United States Patent Application Publication US 2018/0305689 A1 - sequence listing, part 49

SEQ ID NO: 654563 - RNA, 19 nt, Artificial Sequence
  Description of Artificial Sequence: Synthetic oligonucleotide
  Antisense strand to SEQ ID NO: 654562
guuucucaggcuuaacuag

SEQ ID NO: 654564 - RNA, 19 nt, Artificial Sequence
  Description of Artificial Sequence: Synthetic oligonucleotide
  Sense strand starting at position 796 of SEQ ID NO: 585623
ugucacagccaagaauaua

SEQ ID NO: 654565 - RNA, 19 nt, Artificial Sequence
  Description of Artificial Sequence: Synthetic oligonucleotide
  Antisense strand to SEQ ID NO: 654564
uauauucuuggcugugaca

SEQ ID NO: 654566 - RNA, 19 nt, Artificial Sequence
  Description of Artificial Sequence: Synthetic oligonucleotide
  Sense strand starting at position 858 of SEQ ID NO: 585623
gcuggcauccuggaacaga

SEQ ID NO: 654567 - RNA, 19 nt, Artificial Sequence
  Description of Artificial Sequence: Synthetic oligonucleotide
  Antisense strand to SEQ ID NO: 654566
ucuguuccaggaugccagc

SEQ ID NO: 654568 - RNA, 19 nt, Artificial Sequence
  Description of Artificial Sequence: Synthetic oligonucleotide
  Sense strand starting at position 1215 of SEQ ID NO: 585623
gaggaauucuaaguuuauu

SEQ ID NO: 654569 - RNA, 19 nt, Artificial Sequence
  Description of Artificial Sequence: Synthetic oligonucleotide
  Antisense strand to SEQ ID NO: 654568
aauaaacuuagaauuccuc

SEQ ID NO: 654570 - RNA, 19 nt, Artificial Sequence
  Description of Artificial Sequence: Synthetic oligonucleotide
  Sense strand starting at position 1399 of SEQ ID NO: 585623
ggauacuaccuuuagcgaa

SEQ ID NO: 654571 - RNA, 19 nt, Artificial Sequence
  Description of Artificial Sequence: Synthetic oligonucleotide
  Antisense strand to SEQ ID NO: 654570
uucgcuaaagguaguaucc

SEQ ID NO: 654572 - RNA, 19 nt, Artificial Sequence
  Description of Artificial Sequence: Synthetic oligonucleotide
  Sense strand starting at position 1432 of SEQ ID NO: 585623
auccaucauuggguaagaa

SEQ ID NO: 654573 - RNA, 19 nt, Artificial Sequence
  Description of Artificial Sequence: Synthetic oligonucleotide
  Antisense strand to SEQ ID NO: 654572
uucuuacccaaugauggau

SEQ ID NO: 654574 - RNA, 19 nt, Artificial Sequence
  Description of Artificial Sequence: Synthetic oligonucleotide
  Sense strand starting at position 1626 of SEQ ID NO: 585623
cuucucguccgagaggaaa

SEQ ID NO: 654575 - RNA, 19 nt, Artificial Sequence
  Description of Artificial Sequence: Synthetic oligonucleotide
  Antisense strand to SEQ ID NO: 654574
uuuccucucggacgagaag

SEQ ID NO: 654576 - RNA, 19 nt, Artificial Sequence
  Description of Artificial Sequence: Synthetic oligonucleotide
  Sense strand starting at position 1704 of SEQ ID NO: 585623
aaagcagcgcucugauuua

SEQ ID NO: 654577 - RNA, 19 nt, Artificial Sequence
  Description of Artificial Sequence: Synthetic oligonucleotide
  Antisense strand to SEQ ID NO: 654576
uaaaucagagcgcugcuuu

SEQ ID NO: 654578 - RNA, 19 nt, Artificial Sequence
  Description of Artificial Sequence: Synthetic oligonucleotide
  Sense strand starting at position 1744 of SEQ ID NO: 585623
gcuuuaaaggaaugagguu

SEQ ID NO: 654579 - RNA, 19 nt, Artificial Sequence
  Description of Artificial Sequence: Synthetic oligonucleotide
  Antisense strand to SEQ ID NO: 654578
aaccucauuccuuuaaagc

SEQ ID NO: 654580 - RNA, 19 nt, Artificial Sequence
  Description of Artificial Sequence: Synthetic oligonucleotide
  Sense strand starting at position 1824 of SEQ ID NO: 585623
aaccaagaacguuguaaug

SEQ ID NO: 654581 - RNA, 19 nt, Artificial Sequence
  Description of Artificial Sequence: Synthetic oligonucleotide
  Antisense strand to SEQ ID NO: 654580
cauuacaacguucuugguu

SEQ ID NO: 654582 - RNA, 19 nt, Artificial Sequence
  Description of Artificial Sequence: Synthetic oligonucleotide
  Sense strand starting at position 1833 of SEQ ID NO: 585623
cguuguaaugguccggcaa

SEQ ID NO: 654583 - RNA, 19 nt, Artificial Sequence
  Description of Artificial Sequence: Synthetic oligonucleotide
  Antisense strand to SEQ ID NO: 654582
uugccggaccauuacaacg

SEQ ID NO: 654584 - RNA, 19 nt, Artificial Sequence
  Description of Artificial Sequence: Synthetic oligonucleotide
  Sense strand starting at position 1984 of SEQ ID NO: 585623
cgauuugucucacccggaa

SEQ ID NO: 654585 - RNA, 19 nt, Artificial Sequence
  Description of Artificial Sequence: Synthetic oligonucleotide
  Antisense strand to SEQ ID NO: 654584
uuccgggugagacaaaucg

SEQ ID NO: 654586 - RNA, 19 nt, Artificial Sequence
  Description of Artificial Sequence: Synthetic oligonucleotide
  Sense strand starting at position 1986 of SEQ ID NO: 585623
auuugucucacccggaagu

SEQ ID NO: 654587 - RNA, 19 nt, Artificial Sequence
  Description of Artificial Sequence: Synthetic oligonucleotide
  Antisense strand to SEQ ID NO: 654586
acuuccgggugagacaaau

SEQ ID NO: 654588 - RNA, 19 nt, Artificial Sequence
  Description of Artificial Sequence: Synthetic oligonucleotide
  Sense strand starting at position 1988 of SEQ ID NO: 585623
uugucucacccggaaguaa

SEQ ID NO: 654589 - RNA, 19 nt, Artificial Sequence
  Description of Artificial Sequence: Synthetic oligonucleotide
  Antisense strand to SEQ ID NO: 654588
uuacuuccgggugagacaa

SEQ ID NO: 654590 - RNA, 19 nt, Artificial Sequence
  Description of Artificial Sequence: Synthetic oligonucleotide
  Sense strand starting at position 2203 of SEQ ID NO: 585623
cuuuauaguggccagaaag

SEQ ID NO: 654591 - RNA, 19 nt, Artificial Sequence
  Description of Artificial Sequence: Synthetic oligonucleotide
  Antisense strand to SEQ ID NO: 654590
cuuucuggccacuauaaag

SEQ ID NO: 654592 - RNA, 19 nt, Artificial Sequence
  Description of Artificial Sequence: Synthetic oligonucleotide
  Sense strand starting at position 2230 of SEQ ID NO: 585623
guaaguguucuacacauag

SEQ ID NO: 654593 - RNA, 19 nt, Artificial Sequence
  Description of Artificial Sequence: Synthetic oligonucleotide
  Antisense strand to SEQ ID NO: 654592
cuauguguagaacacuuac

SEQ ID NO: 654594 - RNA, 19 nt, Artificial Sequence
  Description of Artificial Sequence: Synthetic oligonucleotide
  Sense strand starting at position 2507 of SEQ ID NO: 585623
ggaauacucucacuugagc

SEQ ID NO: 654595 - RNA, 19 nt, Artificial Sequence
  Description of Artificial Sequence: Synthetic oligonucleotide
  Antisense strand to SEQ ID NO: 654594
gcucaagugagaguauucc

SEQ ID NO: 654596 - RNA, 19 nt, Artificial Sequence
  Description of Artificial Sequence: Synthetic oligonucleotide
  Sense strand starting at position 2618 of SEQ ID NO: 585623
gcugucuuucucuuuguua

SEQ ID NO: 654597 - RNA, 19 nt, Artificial Sequence
  Description of Artificial Sequence: Synthetic oligonucleotide
  Antisense strand to SEQ ID NO: 654596
uaacaaagagaaagacagc

SEQ ID NO: 654598 - RNA, 19 nt, Artificial Sequence
  Description of Artificial Sequence: Synthetic oligonucleotide
  Sense strand starting at position 2822 of SEQ ID NO: 585623
caaagacaguauguugauu

SEQ ID NO: 654599 - RNA, 19 nt, Artificial Sequence
  Description of Artificial Sequence: Synthetic oligonucleotide
  Antisense strand to SEQ ID NO: 654598
aaucaacauacugucuuug

SEQ ID NO: 654600 - RNA, 19 nt, Artificial Sequence
  Description of Artificial Sequence: Synthetic oligonucleotide
  Sense strand starting at position 2934 of SEQ ID NO: 585623
aagauacaguguuuauuag

SEQ ID NO: 654601 - RNA, 19 nt, Artificial Sequence
  Description of Artificial Sequence: Synthetic oligonucleotide
  Antisense strand to SEQ ID NO: 654600
cuaauaaacacuguaucuu

SEQ ID NO: 654602 - RNA, 19 nt, Artificial Sequence
  Description of Artificial Sequence: Synthetic oligonucleotide
  Sense strand starting at position 2963 of SEQ ID NO: 585623
ggaagugccuuuccagaga

SEQ ID NO: 654603 - RNA, 19 nt, Artificial Sequence
  Description of Artificial Sequence: Synthetic oligonucleotide
  Antisense strand to SEQ ID NO: 654602
ucucuggaaaggcacuucc

SEQ ID NO: 654604 - RNA, 19 nt, Artificial Sequence
  Description of Artificial Sequence: Synthetic oligonucleotide
  Sense strand starting at position 2966 of SEQ ID NO: 585623
agugccuuuccagagagua

SEQ ID NO: 654605 - RNA, 19 nt, Artificial Sequence
  Description of Artificial Sequence: Synthetic oligonucleotide
  Antisense strand to SEQ ID NO: 654604
uacucucuggaaaggcacu

SEQ ID NO: 654606 - RNA, 19 nt, Artificial Sequence
  Description of Artificial Sequence: Synthetic oligonucleotide
  Sense strand starting at position 2991 of SEQ ID NO: 585623
aaacuucugcgugacaaag

SEQ ID NO: 654607 - RNA, 19 nt, Artificial Sequence
  Description of Artificial Sequence: Synthetic oligonucleotide
  Antisense strand to SEQ ID NO: 654606
cuuugucacgcagaaguuu

SEQ ID NO: 654608 - RNA, 19 nt, Artificial Sequence
  Description of Artificial Sequence: Synthetic oligonucleotide
  Sense strand starting at position 3003 of SEQ ID NO: 585623
gacaaagugcacgaaguau

SEQ ID NO: 654609 - RNA, 19 nt, Artificial Sequence
  Description of Artificial Sequence: Synthetic oligonucleotide
  Antisense strand to SEQ ID NO: 654608
auacuucgugcacuuuguc

SEQ ID NO: 654610 - RNA, 19 nt, Artificial Sequence
  Description of Artificial Sequence: Synthetic oligonucleotide
  Sense strand starting at position 3061 of SEQ ID NO: 585623
agcaaauuaccguagaaac

SEQ ID NO: 654611 - RNA, 19 nt, Artificial Sequence
  Description of Artificial Sequence: Synthetic oligonucleotide
  Antisense strand to SEQ ID NO: 654610
guuucuacgguaauuugcu

SEQ ID NO: 654612 - RNA, 19 nt, Artificial Sequence
  Description of Artificial Sequence: Synthetic oligonucleotide
  Sense strand starting at position 3198 of SEQ ID NO: 585623
auaauaaagucgucacuag

SEQ ID NO: 654613 - RNA, 19 nt, Artificial Sequence
  Description of Artificial Sequence: Synthetic oligonucleotide
  Antisense strand to SEQ ID NO: 654612
cuagugacgacuuuauuau

SEQ ID NO: 654614 - RNA, 19 nt, Artificial Sequence
  Description of Artificial Sequence: Synthetic oligonucleotide
  Sense strand starting at position 3635 of SEQ ID NO: 585623
gcuugaacucagggucaga

SEQ ID NO: 654615 - RNA, 19 nt, Artificial Sequence
  Description of Artificial Sequence: Synthetic oligonucleotide
  Antisense strand to SEQ ID NO: 654614
ucugacccugaguucaagc

SEQ ID NO: 654616 - RNA, 19 nt, Artificial Sequence
  Description of Artificial Sequence: Synthetic oligonucleotide
  Sense strand starting at position 3777 of SEQ ID NO: 585623
acauguuaucaguaaucuc

SEQ ID NO: 654617 - RNA, 19 nt, Artificial Sequence
  Description of Artificial Sequence: Synthetic oligonucleotide
  Antisense strand to SEQ ID NO: 654616
gagauuacugauaacaugu

SEQ ID NO: 654618 - RNA, 19 nt, Artificial Sequence
  Description of Artificial Sequence: Synthetic oligonucleotide
  Sense strand starting at position 3855 of SEQ ID NO: 585623
aguuuaauucucugagaaa

SEQ ID NO: 654619 - RNA, 19 nt, Artificial Sequence
  Description of Artificial Sequence: Synthetic oligonucleotide
  Antisense strand to SEQ ID NO: 654618
uuucucagagaauuaaacu

SEQ ID NO: 654620 - RNA, 19 nt, Artificial Sequence
  Description of Artificial Sequence: Synthetic oligonucleotide
  Sense strand starting at position 3879 of SEQ ID NO: 585623
ucaucagaggaauguucua

SEQ ID NO: 654621 - RNA, 19 nt, Artificial Sequence
  Description of Artificial Sequence: Synthetic oligonucleotide
  Antisense strand to SEQ ID NO: 654620
uagaacauuccucugauga

SEQ ID NO: 654622 - RNA, 19 nt, Artificial Sequence
  Description of Artificial Sequence: Synthetic oligonucleotide
  Sense strand starting at position 3891 of SEQ ID NO: 585623
uguucuaucuucuuagaga

SEQ ID NO: 654623 - RNA, 19 nt, Artificial Sequence
  Description of Artificial Sequence: Synthetic oligonucleotide
  Antisense strand to SEQ ID NO: 654622
ucucuaagaagauagaaca

SEQ ID NO: 654624 - RNA, 19 nt, Artificial Sequence
  Description of Artificial Sequence: Synthetic oligonucleotide
  Sense strand starting at position 3906 of SEQ ID NO: 585623
gagaaaccugauuggccua

SEQ ID NO: 654625 - RNA, 19 nt, Artificial Sequence
  Description of Artificial Sequence: Synthetic oligonucleotide
  Antisense strand to SEQ ID NO: 654624
uaggccaaucagguuucuc

SEQ ID NO: 654626 - RNA, 19 nt, Artificial Sequence
  Description of Artificial Sequence: Synthetic oligonucleotide
  Sense strand starting at position 3911 of SEQ ID NO: 585623
accugauuggccuagugaa

SEQ ID NO: 654627 - RNA, 19 nt, Artificial Sequence
  Description of Artificial Sequence: Synthetic oligonucleotide
  Antisense strand to SEQ ID NO: 654626
uucacuaggccaaucaggu

SEQ ID NO: 654628 - RNA, 19 nt, Artificial Sequence
  Description of Artificial Sequence: Synthetic oligonucleotide
  Sense strand starting at position 34 of SEQ ID NO: 585624
gagccaugcucauuuguuc

SEQ ID NO: 654629 - RNA, 19 nt, Artificial Sequence
  Description of Artificial Sequence: Synthetic oligonucleotide
  Antisense strand to SEQ ID NO: 654628
gaacaaaugagcauggcuc

SEQ ID NO: 654630 - RNA, 19 nt, Artificial Sequence
  Description of Artificial Sequence: Synthetic oligonucleotide
  Sense strand starting at position 51 of SEQ ID NO: 585624
ucauguauucucuacagcu

SEQ ID NO: 654631 - RNA, 19 nt, Artificial Sequence
  Description of Artificial Sequence: Synthetic oligonucleotide
  Antisense strand to SEQ ID NO: 654630
agcuguagagaauacauga

SEQ ID NO: 654632 - RNA, 19 nt, Artificial Sequence
  Description of Artificial Sequence: Synthetic oligonucleotide
  Sense strand starting at position 89 of SEQ ID NO: 585624
aggauugaguagcuguaaa

SEQ ID NO: 654633 - RNA, 19 nt, Artificial Sequence
  Description of Artificial Sequence: Synthetic oligonucleotide
  Antisense strand to SEQ ID NO: 654632
uuuacagcuacucaauccu

SEQ ID NO: 654634 - RNA, 19 nt, Artificial Sequence
  Description of Artificial Sequence: Synthetic oligonucleotide
  Sense strand starting at position 513 of SEQ ID NO: 585624
gugguugcucacgcuuaua

SEQ ID NO: 654635 - RNA, 19 nt, Artificial Sequence
  Description of Artificial Sequence: Synthetic oligonucleotide
  Antisense strand to SEQ ID NO: 654634
uauaagcgugagcaaccac

SEQ ID NO: 654636 - RNA, 19 nt, Artificial Sequence
  Description of Artificial Sequence: Synthetic oligonucleotide
  Sense strand starting at position 516 of SEQ ID NO: 585624
guugcucacgcuuauaauu

SEQ ID NO: 654637 - RNA, 19 nt, Artificial Sequence
  Description of Artificial Sequence: Synthetic oligonucleotide
  Antisense strand to SEQ ID NO: 654636
aauuauaagcgugagcaac

SEQ ID NO: 654638 - RNA, 19 nt, Artificial Sequence
  Description of Artificial Sequence: Synthetic oligonucleotide
  Sense strand starting at position 827 of SEQ ID NO: 585624
aagaguaacagugaguguu

SEQ ID NO: 654639 - RNA, 19 nt, Artificial Sequence
  Description of Artificial Sequence: Synthetic oligonucleotide
  Antisense strand to SEQ ID NO: 654638
aacacucacuguuacucuu

SEQ ID NO: 654640 - RNA, 19 nt, Artificial Sequence
  Description of Artificial Sequence: Synthetic oligonucleotide
  Sense strand starting at position 833 of SEQ ID NO: 585624
aacagugaguguuccuuaa

SEQ ID NO: 654641 - RNA, 19 nt, Artificial Sequence
  Description of Artificial Sequence: Synthetic oligonucleotide
  Antisense strand to SEQ ID NO: 654640
uuaaggaacacucacuguu

SEQ ID NO: 654642 - RNA, 19 nt, Artificial Sequence
  Description of Artificial Sequence: Synthetic oligonucleotide
  Sense strand starting at position 835 of SEQ ID NO: 585624
cagugaguguuccuuaaua

SEQ ID NO: 654643 - RNA, 19 nt, Artificial Sequence
  Description of Artificial Sequence: Synthetic oligonucleotide
  Antisense strand to SEQ ID NO: 654642
uauuaaggaacacucacug

SEQ ID NO: 654644 - RNA, 19 nt, Artificial Sequence
  Description of Artificial Sequence: Synthetic oligonucleotide
  Sense strand starting at position 837 of SEQ ID NO: 585624
gugaguguuccuuaauacu

SEQ ID NO: 654645 - RNA, 19 nt, Artificial Sequence
  Description of Artificial Sequence: Synthetic oligonucleotide
  Antisense strand to SEQ ID NO: 654644
aguauuaaggaacacucac

SEQ ID NO: 654646 - RNA, 19 nt, Artificial Sequence
  Description of Artificial Sequence: Synthetic oligonucleotide
  Sense strand starting at position 886 of SEQ ID NO: 585624
aaauuugguuugcuccgaa

SEQ ID NO: 654647 - RNA, 19 nt, Artificial Sequence
  Description of Artificial Sequence: Synthetic oligonucleotide
  Antisense strand to SEQ ID NO: 654646
uucggagcaaaccaaauuu

SEQ ID NO: 654648 - RNA, 19 nt, Artificial Sequence
  Description of Artificial Sequence: Synthetic oligonucleotide
  Sense strand starting at position 904 of SEQ ID NO: 585624
aguguugauuuccauaugu

SEQ ID NO: 654649 - RNA, 19 nt, Artificial Sequence
  Description of Artificial Sequence: Synthetic oligonucleotide
  Antisense strand to SEQ ID NO: 654648
acauauggaaaucaacacu

SEQ ID NO: 654650 - RNA, 19 nt, Artificial Sequence
  Description of Artificial Sequence: Synthetic oligonucleotide
  Sense strand starting at position 1154 of SEQ ID NO: 585624
aucucauuccacgagcaau

SEQ ID NO: 654651 - RNA, 19 nt, Artificial Sequence
  Description of Artificial Sequence: Synthetic oligonucleotide
  Antisense strand to SEQ ID NO: 654650
auugcucguggaaugagau

SEQ ID NO: 654652 - RNA, 19 nt, Artificial Sequence
  Description of Artificial Sequence: Synthetic oligonucleotide
  Sense strand starting at position 1693 of SEQ ID NO: 585624
uguacuugcugcucaaagu

SEQ ID NO: 654653 - RNA, 19 nt, Artificial Sequence
  Description of Artificial Sequence: Synthetic oligonucleotide
  Antisense strand to SEQ ID NO: 654652
acuuugagcagcaaguaca

SEQ ID NO: 654654 - RNA, 19 nt, Artificial Sequence
  Description of Artificial Sequence: Synthetic oligonucleotide
  Sense strand starting at position 2129 of SEQ ID NO: 585624
uuguacgauuugcuacaga

SEQ ID NO: 654655 - RNA, 19 nt, Artificial Sequence
  Description of Artificial Sequence: Synthetic oligonucleotide
  Antisense strand to SEQ ID NO: 654654
ucuguagcaaaucguacaa

SEQ ID NO: 654656 - RNA, 19 nt, Artificial Sequence
  Description of Artificial Sequence: Synthetic oligonucleotide
  Sense strand starting at position 2206 of SEQ ID NO: 585624
agcccuuaacgugagaaug

SEQ ID NO: 654657 - RNA, 19 nt, Artificial Sequence
  Description of Artificial Sequence: Synthetic oligonucleotide
  Antisense strand to SEQ ID NO: 654656
cauucucacguuaagggcu

SEQ ID NO: 654658 - RNA, 19 nt, Artificial Sequence
  Description of Artificial Sequence: Synthetic oligonucleotide
  Sense strand starting at position 2214 of SEQ ID NO: 585624
acgugagaaugucauuuac

SEQ ID NO: 654659 - RNA, 19 nt, Artificial Sequence
  Description of Artificial Sequence: Synthetic oligonucleotide
  Antisense strand to SEQ ID NO: 654658
guaaaugacauucucacgu

SEQ ID NO: 654660 - RNA, 19 nt, Artificial Sequence
  Description of Artificial Sequence: Synthetic oligonucleotide
  Sense strand starting at position 2354 of SEQ ID NO: 585624
ggcucacggucuucuaaau

SEQ ID NO: 654661 - RNA, 19 nt, Artificial Sequence
  Description of Artificial Sequence: Synthetic oligonucleotide
  Antisense strand to SEQ ID NO: 654660
auuuagaagaccgugagcc

SEQ ID NO: 654662 - RNA, 19 nt, Artificial Sequence
  Description of Artificial Sequence: Synthetic oligonucleotide
  Sense strand starting at position 2563 of SEQ ID NO: 585624
gcacucacuccuugcggaa

SEQ ID NO: 654663 - RNA, 19 nt, Artificial Sequence
  Description of Artificial Sequence: Synthetic oligonucleotide
  Antisense strand to SEQ ID NO: 654662
uuccgcaaggagugagugc

SEQ ID NO: 654664 - RNA, 19 nt, Artificial Sequence
  Description of Artificial Sequence: Synthetic oligonucleotide
  Sense strand starting at position 2600 of SEQ ID NO: 585624
acauacaugugagcuuaau

SEQ ID NO: 654665 - RNA, 19 nt, Artificial Sequence
  Description of Artificial Sequence: Synthetic oligonucleotide
  Antisense strand to SEQ ID NO: 654664
auuaagcucacauguaugu

SEQ ID NO: 654666 - RNA, 19 nt, Artificial Sequence
  Description of Artificial Sequence: Synthetic oligonucleotide
  Sense strand starting at position 2644 of SEQ ID NO: 585624
gcaacuaguccauggucuu

SEQ ID NO: 654667 - RNA, 19 nt, Artificial Sequence
  Description of Artificial Sequence: Synthetic oligonucleotide
  Antisense strand to SEQ ID NO: 654666
aagaccauggacuaguugc

SEQ ID NO: 654668 - RNA, 19 nt, Artificial Sequence
  Description of Artificial Sequence: Synthetic oligonucleotide
  Sense strand starting at position 2669 of SEQ ID NO: 585624
aguguccucccuugaauuc

SEQ ID NO: 654669 - RNA, 19 nt, Artificial Sequence
  Description of Artificial Sequence: Synthetic oligonucleotide
  Antisense strand to SEQ ID NO: 654668
gaauucaagggaggacacu

SEQ ID NO: 654670 - RNA, 19 nt, Artificial Sequence
  Description of Artificial Sequence: Synthetic oligonucleotide
  Sense strand starting at position 2670 of SEQ ID NO: 585624
guguccucccuugaauucu

SEQ ID NO: 654671 - RNA, 19 nt, Artificial Sequence
  Description of Artificial Sequence: Synthetic oligonucleotide
  Antisense strand to SEQ ID NO: 654670
agaauucaagggaggacac

SEQ ID NO: 654672 - RNA, 19 nt, Artificial Sequence
  Description of Artificial Sequence: Synthetic oligonucleotide
  Sense strand starting at position 2678 of SEQ ID NO: 585624
ccuugaauucuaggcuucu

SEQ ID NO: 654673 - RNA, 19 nt, Artificial Sequence
  Description of Artificial Sequence: Synthetic oligonucleotide
  Antisense strand to SEQ ID NO: 654672
agaagccuagaauucaagg

SEQ ID NO: 654674 - RNA, 19 nt, Artificial Sequence
  Description of Artificial Sequence: Synthetic oligonucleotide
  Sense strand starting at position 2679 of SEQ ID NO: 585624
cuugaauucuaggcuucua

SEQ ID NO: 654675 - RNA, 19 nt, Artificial Sequence
  Description of Artificial Sequence: Synthetic oligonucleotide
  Antisense strand to SEQ ID NO: 654674
uagaagccuagaauucaag

SEQ ID NO: 654676 - RNA, 19 nt, Artificial Sequence
  Description of Artificial Sequence: Synthetic oligonucleotide
  Sense strand starting at position 2687 of SEQ ID NO: 585624
cuaggcuucuacuugaaca

SEQ ID NO: 654677 - RNA, 19 nt, Artificial Sequence
  Description of Artificial Sequence: Synthetic oligonucleotide
  Antisense strand to SEQ ID NO: 654676
uguucaaguagaagccuag

SEQ ID NO: 654678 - RNA, 19 nt, Artificial Sequence
  Description of Artificial Sequence: Synthetic oligonucleotide
  Sense strand starting at position 2711 of SEQ ID NO: 585624
uuggaacuaugguccucaa

SEQ ID NO: 654679 - RNA, 19 nt, Artificial Sequence
  Description of Artificial Sequence: Synthetic oligonucleotide
  Antisense strand to SEQ ID NO: 654678
uugaggaccauaguuccaa

SEQ ID NO: 654680 - RNA, 19 nt, Artificial Sequence
  Description of Artificial Sequence: Synthetic oligonucleotide
  Sense strand starting at position 2714 of SEQ ID NO: 585624
gaacuaugguccucaaagu

SEQ ID NO: 654681 - RNA, 19 nt, Artificial Sequence
  Description of Artificial Sequence: Synthetic oligonucleotide
  Antisense strand to SEQ ID NO: 654680
acuuugaggaccauaguuc

SEQ ID NO: 654682 - RNA, 19 nt, Artificial Sequence
  Description of Artificial Sequence: Synthetic oligonucleotide
  Sense strand starting at position 2729 of SEQ ID NO: 585624
aagugaggugcucaaauca

SEQ ID NO: 654683 - RNA, 19 nt, Artificial Sequence
  Description of Artificial Sequence: Synthetic oligonucleotide
  Antisense strand to SEQ ID NO: 654682
ugauuugagcaccucacuu

SEQ ID NO: 654684 - RNA, 19 nt, Artificial Sequence
  Description of Artificial Sequence: Synthetic oligonucleotide
  Sense strand starting at position 3094 of SEQ ID NO: 585624
aaugccucuccgggacauu

SEQ ID NO: 654685 - RNA, 19 nt, Artificial Sequence
  Description of Artificial Sequence: Synthetic oligonucleotide
  Antisense strand to SEQ ID NO: 654684
aaugucccggagaggcauu

SEQ ID NO: 654686 - RNA, 19 nt, Artificial Sequence
  Description of Artificial Sequence: Synthetic oligonucleotide
  Sense strand starting at position 3095 of SEQ ID NO: 585624
augccucuccgggacauua

SEQ ID NO: 654687 - RNA, 19 nt, Artificial Sequence
  Description of Artificial Sequence: Synthetic oligonucleotide
  Antisense strand to SEQ ID NO: 654686
uaaugucccggagaggcau

SEQ ID NO: 654688 - RNA, 19 nt, Artificial Sequence
  Description of Artificial Sequence: Synthetic oligonucleotide
  Sense strand starting at position 3097 of SEQ ID NO: 585624
gccucuccgggacauuaau

SEQ ID NO: 654689 - RNA, 19 nt, Artificial Sequence
  Description of Artificial Sequence: Synthetic oligonucleotide
  Antisense strand to SEQ ID NO: 654688
auuaaugucccggagaggc

SEQ ID NO: 654690 - RNA, 19 nt, Artificial Sequence
  Description of Artificial Sequence: Synthetic oligonucleotide
  Sense strand starting at position 3137 of SEQ ID NO: 585624
gccauuugauucugaagac

SEQ ID NO: 654691 - RNA, 19 nt, Artificial Sequence
  Description of Artificial Sequence: Synthetic oligonucleotide
  Antisense strand to SEQ ID NO: 654690
gucuucagaaucaaauggc

SEQ ID NO: 654692 - RNA, 19 nt, Artificial Sequence
  Description of Artificial Sequence: Synthetic oligonucleotide
  Sense strand starting at position 3180 of SEQ ID NO: 585624
acagauguguuccauuuaa

SEQ ID NO: 654693 - RNA, 19 nt, Artificial Sequence
  Description of Artificial Sequence: Synthetic oligonucleotide
  Antisense strand to SEQ ID NO: 654692
uuaaauggaacacaucugu

SEQ ID NO: 654694 - RNA, 19 nt, Artificial Sequence
  Description of Artificial Sequence: Synthetic oligonucleotide
  Sense strand starting at position 3557 of SEQ ID NO: 585624
auuuguuucucuuacuguu

SEQ ID NO: 654695 - RNA, 19 nt, Artificial Sequence
  Description of Artificial Sequence: Synthetic oligonucleotide
  Antisense strand to SEQ ID NO: 654694
aacaguaagagaaacaaau

SEQ ID NO: 654696 - RNA, 19 nt, Artificial Sequence
  Description of Artificial Sequence: Synthetic oligonucleotide
  Sense strand starting at position 3621 of SEQ ID NO: 585624
ucacauacugacuguucua

SEQ ID NO: 654697 - RNA, 19 nt, Artificial Sequence
  Description of Artificial Sequence: Synthetic oligonucleotide
  Antisense strand to SEQ ID NO: 654696
uagaacagucaguauguga

SEQ ID NO: 654698 - RNA, 19 nt, Artificial Sequence
  Description of Artificial Sequence: Synthetic oligonucleotide
  Sense strand starting at position 3628 of SEQ ID NO: 585624
cugacuguucuauaguauu

SEQ ID NO: 654699 - RNA, 19 nt, Artificial Sequence
  Description of Artificial Sequence: Synthetic oligonucleotide
  Antisense strand to SEQ ID NO: 654698
aauacuauagaacagucag

SEQ ID NO: 654700 - RNA, 19 nt, Artificial Sequence
  Description of Artificial Sequence: Synthetic oligonucleotide
  Sense strand starting at position 3642 of SEQ ID NO: 585624
guauuagauugauacugac

SEQ ID NO: 654701 - RNA, 19 nt, Artificial Sequence
  Description of Artificial Sequence: Synthetic oligonucleotide
  Antisense strand to SEQ ID NO: 654700
gucaguaucaaucuaauac

SEQ ID NO: 654702 - RNA, 19 nt, Artificial Sequence
  Description of Artificial Sequence: Synthetic oligonucleotide
  Sense strand starting at position 3716 of SEQ ID NO: 585624
ugagaucacucgccaugaa

SEQ ID NO: 654703 - RNA, 19 nt, Artificial Sequence
  Description of Artificial Sequence: Synthetic oligonucleotide
  Antisense strand to SEQ ID NO: 654702
uucauggcgagugaucuca

SEQ ID NO: 654704 - RNA, 19 nt, Artificial Sequence
  Description of Artificial Sequence: Synthetic oligonucleotide
  Sense strand starting at position 3717 of SEQ ID NO: 585624
gagaucacucgccaugaac

SEQ ID NO: 654705 - RNA, 19 nt, Artificial Sequence
  Description of Artificial Sequence: Synthetic oligonucleotide
  Antisense strand to SEQ ID NO: 654704
guucauggcgagugaucuc

SEQ ID NO: 654706 - RNA, 19 nt, Artificial Sequence
  Description of Artificial Sequence: Synthetic oligonucleotide
  Sense strand starting at position 3791 of SEQ ID NO: 585624
gagcucagacaaugucaua

SEQ ID NO: 654707 - RNA, 19 nt, Artificial Sequence
  Description of Artificial Sequence: Synthetic oligonucleotide
  Antisense strand to SEQ ID NO: 654706
uaugacauugucugagcuc

SEQ ID NO: 654708 - RNA, 19 nt, Artificial Sequence
  Description of Artificial Sequence: Synthetic oligonucleotide
  Sense strand starting at position 527 of SEQ ID NO: 585625
uagggugucaucugacaga

SEQ ID NO: 654709 - RNA, 19 nt, Artificial Sequence
  Description of Artificial Sequence: Synthetic oligonucleotide
  Antisense strand to SEQ ID NO: 654708
ucugucagaugacacccua

SEQ ID NO: 654710 - RNA, 19 nt, Artificial Sequence
  Description of Artificial Sequence: Synthetic oligonucleotide
  Sense strand starting at position 532 of SEQ ID NO: 585625
ugucaucugacagaugugu

SEQ ID NO: 654711 - RNA, 19 nt, Artificial Sequence
  Description of Artificial Sequence: Synthetic oligonucleotide
  Antisense strand to SEQ ID NO: 654710
acacaucugucagaugaca

SEQ ID NO: 654712 - RNA, 19 nt, Artificial Sequence
  Description of Artificial Sequence: Synthetic oligonucleotide
  Sense strand starting at position 541 of SEQ ID NO: 585625
acagauguguuaucugaca

SEQ ID NO: 654713 - RNA, 19 nt, Artificial Sequence
  Description of Artificial Sequence: Synthetic oligonucleotide
  Antisense strand to SEQ ID NO: 654712
ugucagauaacacaucugu

SEQ ID NO: 654714 - RNA, 19 nt, Artificial Sequence
  Description of Artificial Sequence: Synthetic oligonucleotide
  Sense strand starting at position 543 of SEQ ID NO: 585625
agauguguuaucugacaga

SEQ ID NO: 654715 - RNA, 19 nt, Artificial Sequence
  Description of Artificial Sequence: Synthetic oligonucleotide
  Antisense strand to SEQ ID NO: 654714
ucugucagauaacacaucu

SEQ ID NO: 654716 - RNA, 19 nt, Artificial Sequence
  Description of Artificial Sequence: Synthetic oligonucleotide
  Sense strand starting at position 604 of SEQ ID NO: 585625
cacagaauggguuguaacu

SEQ ID NO: 654717 - RNA, 19 nt, Artificial Sequence
  Description of Artificial Sequence: Synthetic oligonucleotide
  Antisense strand to SEQ ID NO: 654716
aguuacaacccauucugug

SEQ ID NO: 654718 - RNA, 19 nt, Artificial Sequence
  Description of Artificial Sequence: Synthetic oligonucleotide
  Sense strand starting at position 662 of SEQ ID NO: 585625
ggaugaguugaguaugcag

SEQ ID NO: 654719 - RNA, 19 nt, Artificial Sequence
  Description of Artificial Sequence: Synthetic oligonucleotide
  Antisense strand to SEQ ID NO: 654718
cugcauacucaacucaucc

SEQ ID NO: 654720 - RNA, 19 nt, Artificial Sequence
  Description of Artificial Sequence: Synthetic oligonucleotide
  Sense strand starting at position 722 of SEQ ID NO: 585625
gggaaagacuaucaagaaa

SEQ ID NO: 654721 - RNA, 19 nt, Artificial Sequence
  Description of Artificial Sequence: Synthetic oligonucleotide
  Antisense strand to SEQ ID NO: 654720
uuucuugauagucuuuccc

SEQ ID NO: 654722 - RNA, 19 nt, Artificial Sequence
  Description of Artificial Sequence: Synthetic oligonucleotide
  Sense strand starting at position 938 of SEQ ID NO: 585625
agaggauuaucacuguaua

SEQ ID NO: 654723 - RNA, 19 nt, Artificial Sequence
  Description of Artificial Sequence: Synthetic oligonucleotide
  Antisense strand to SEQ ID NO: 654722
uauacagugauaauccucu

SEQ ID NO: 654724 - RNA, 19 nt, Artificial Sequence
  Description of Artificial Sequence: Synthetic oligonucleotide
  Sense strand starting at position 939 of SEQ ID NO: 585625
gaggauuaucacuguauau

SEQ ID NO: 654725 - RNA, 19 nt, Artificial Sequence
  Description of Artificial Sequence: Synthetic oligonucleotide
  Antisense strand to SEQ ID NO: 654724
auauacagugauaauccuc

SEQ ID NO: 654726 - RNA, 19 nt, Artificial Sequence
  Description of Artificial Sequence: Synthetic oligonucleotide
  Sense strand starting at position 941 of SEQ ID NO: 585625
ggauuaucacuguauaucc

SEQ ID NO: 654727 - RNA, 19 nt, Artificial Sequence
  Description of Artificial Sequence: Synthetic oligonucleotide
  Antisense strand to SEQ ID NO: 654726
ggauauacagugauaaucc

SEQ ID NO: 654728 - RNA, 19 nt, Artificial Sequence
  Description of Artificial Sequence: Synthetic oligonucleotide
  Sense strand starting at position 1083 of SEQ ID NO: 585625
ucuagaaucagacggacuu

SEQ ID NO: 654729 - RNA, 19 nt, Artificial Sequence
  Description of Artificial Sequence: Synthetic oligonucleotide
  Antisense strand to SEQ ID NO: 654728
aaguccgucugauucuaga

SEQ ID NO: 654730 - RNA, 19 nt, Artificial Sequence
  Description of Artificial Sequence: Synthetic oligonucleotide
  Sense strand starting at position 1089 of SEQ ID NO: 585625
aucagacggacuugugaau

SEQ ID NO: 654731 - RNA, 19 nt, Artificial Sequence
  Description of Artificial Sequence: Synthetic oligonucleotide
  Antisense strand to SEQ ID NO: 654730
auucacaaguccgucugau

SEQ ID NO: 654732 - RNA, 19 nt, Artificial Sequence
  Description of Artificial Sequence: Synthetic oligonucleotide
  Sense strand starting at position 1166 of SEQ ID NO: 585625
gcucaaucugugcaggaaa

SEQ ID NO: 654733 - RNA, 19 nt, Artificial Sequence
  Description of Artificial Sequence: Synthetic oligonucleotide
  Antisense strand to SEQ ID NO: 654732
uuuccugcacagauugagc

SEQ ID NO: 654734 - RNA, 19 nt, Artificial Sequence
  Description of Artificial Sequence: Synthetic oligonucleotide
  Sense strand starting at position 1239 of SEQ ID NO: 585625
gacuaaugaguuuaaagcu

SEQ ID NO: 654735 - RNA, 19 nt, Artificial Sequence
  Description of Artificial Sequence: Synthetic oligonucleotide
  Antisense strand to SEQ ID NO: 654734
agcuuuaaacucauuaguc

SEQ ID NO: 654736 - RNA, 19 nt, Artificial Sequence
  Description of Artificial Sequence: Synthetic oligonucleotide
  Sense strand starting at position 1398 of SEQ ID NO: 585625
ucccuaugccugcaggaua

SEQ ID NO: 654737 - RNA, 19 nt, Artificial Sequence
  Description of Artificial Sequence: Synthetic oligonucleotide
  Antisense strand to SEQ ID NO: 654736
uauccugcaggcauaggga

SEQ ID NO: 654738 - RNA, 19 nt, Artificial Sequence
  Description of Artificial Sequence: Synthetic oligonucleotide
  Sense strand starting at position 1478 of SEQ ID NO: 585625
ugcuuccucccagagcaaa

SEQ ID NO: 654739 - RNA, 19 nt, Artificial Sequence
  Description of Artificial Sequence: Synthetic oligonucleotide
  Antisense strand to SEQ ID NO: 654738
uuugcucugggaggaagca

SEQ ID NO: 654740 - RNA, 19 nt, Artificial Sequence
  Description of Artificial Sequence: Synthetic oligonucleotide
  Sense strand starting at position 1679 of SEQ ID NO: 585625
cccacugaguugucaaaga

SEQ ID NO: 654741 - RNA, 19 nt, Artificial Sequence
  Description of Artificial Sequence: Synthetic oligonucleotide
  Antisense strand to SEQ ID NO: 654740
ucuuugacaacucaguggg

SEQ ID NO: 654742 - RNA, 19 nt, Artificial Sequence
  Description of Artificial Sequence: Synthetic oligonucleotide
  Sense strand starting at position 1996 of SEQ ID NO: 585625
gugucugucaugccaucuu

SEQ ID NO: 654743 - RNA, 19 nt, Artificial Sequence
  Description of Artificial Sequence: Synthetic oligonucleotide
  Antisense strand to SEQ ID NO: 654742
aagauggcaugacagacac

SEQ ID NO: 654744 - RNA, 19 nt, Artificial Sequence
  Description of Artificial Sequence: Synthetic oligonucleotide
  Sense strand starting at position 2079 of SEQ ID NO: 585625
augugagugguuuauuaac

SEQ ID NO: 654745 - RNA, 19 nt, Artificial Sequence
  Description of Artificial Sequence: Synthetic oligonucleotide
  Antisense strand to SEQ ID NO: 654744
guuaauaaaccacucacau

SEQ ID NO: 654746 - RNA, 19 nt, Artificial Sequence
  Description of Artificial Sequence: Synthetic oligonucleotide
  Sense strand starting at position 2123 of SEQ ID NO: 585625
acaagagguaaguguuauu

SEQ ID NO: 654747 - RNA, 19 nt, Artificial Sequence
  Description of Artificial Sequence: Synthetic oligonucleotide
  Antisense strand to SEQ ID NO: 654746
aauaacacuuaccucuugu

SEQ ID NO: 654748 - RNA, 19 nt, Artificial Sequence
  Description of Artificial Sequence: Synthetic oligonucleotide
  Sense strand starting at position 2157 of SEQ ID NO: 585625
ggaagaagcugagucugaa

SEQ ID NO: 654749 - RNA, 19 nt, Artificial Sequence
  Description of Artificial Sequence: Synthetic oligonucleotide
  Antisense strand to SEQ ID NO: 654748
uucagacucagcuucuucc

SEQ ID NO: 654750 - RNA, 19 nt, Artificial Sequence
  Description of Artificial Sequence: Synthetic oligonucleotide
  Sense strand starting at position 2167 of SEQ ID NO: 585625
gagucugaaggaugucaga

SEQ ID NO: 654751 - RNA, 19 nt, Artificial Sequence
  Description of Artificial Sequence: Synthetic oligonucleotide
  Antisense strand to SEQ ID NO: 654750
ucugacauccuucagacuc

SEQ ID NO: 654752 - RNA, 19 nt, Artificial Sequence
  Description of Artificial Sequence: Synthetic oligonucleotide
  Sense strand starting at position 2219 of SEQ ID NO: 585625
guuggaauuugucugccuu

SEQ ID NO: 654753 - RNA, 19 nt, Artificial Sequence
  Description of Artificial Sequence: Synthetic oligonucleotide
  Antisense strand to SEQ ID NO: 654752
aaggcagacaaauuccaac

SEQ ID NO: 654754 - RNA, 19 nt, Artificial Sequence
  Description of Artificial Sequence: Synthetic oligonucleotide
  Sense strand starting at position 2220 of SEQ ID NO: 585625
uuggaauuugucugccuuu

SEQ ID NO: 654755 - RNA, 19 nt, Artificial Sequence
  Description of Artificial Sequence: Synthetic oligonucleotide
  Antisense strand to SEQ ID NO: 654754
aaaggcagacaaauuccaa

SEQ ID NO: 654756 - RNA, 19 nt, Artificial Sequence
  Description of Artificial Sequence: Synthetic oligonucleotide
  Sense strand starting at position 2315 of SEQ ID NO: 585625
acuaaacagucucuagagu

SEQ ID NO: 654757 - RNA, 19 nt, Artificial Sequence
  Description of Artificial Sequence: Synthetic oligonucleotide
  Antisense strand to SEQ ID NO: 654756
acucuagagacuguuuagu

SEQ ID NO: 654758 - RNA, 19 nt, Artificial Sequence
  Description of Artificial Sequence: Synthetic oligonucleotide
  Sense strand starting at position 2373 of SEQ ID NO: 585625
agucuaaucccucaguuaa

SEQ ID NO: 654759 - RNA, 19 nt, Artificial Sequence
  Description of Artificial Sequence: Synthetic oligonucleotide
  Antisense strand to SEQ ID NO: 654758
uuaacugagggauuagacu

SEQ ID NO: 654760 - RNA, 19 nt, Artificial Sequence
  Description of Artificial Sequence: Synthetic oligonucleotide
  Sense strand starting at position 2386 of SEQ ID NO: 585625
aguuaauacuaacuuggau

SEQ ID NO: 654761 - RNA, 19 nt, Artificial Sequence
  Description of Artificial Sequence: Synthetic oligonucleotide
  Antisense strand to SEQ ID NO: 654760
auccaaguuaguauuaacu

SEQ ID NO: 654762 - RNA, 19 nt, Artificial Sequence
  Description of Artificial Sequence: Synthetic oligonucleotide
  Sense strand starting at position 2395 of SEQ ID NO: 585625
uaacuuggauucucgagau

SEQ ID NO: 654763 - RNA, 19 nt, Artificial Sequence
  Description of Artificial Sequence: Synthetic oligonucleotide
  Antisense strand to SEQ ID NO: 654762
aucucgagaauccaaguua

SEQ ID NO: 654764 - RNA, 19 nt, Artificial Sequence
  Description of Artificial Sequence: Synthetic oligonucleotide
  Sense strand starting at position 2426 of SEQ ID NO: 585625
aagaaagaugucuggcagu

SEQ ID NO: 654765 - RNA, 19 nt, Artificial Sequence
  Description of Artificial Sequence: Synthetic oligonucleotide
  Antisense strand to SEQ ID NO: 654764
acugccagacaucuuucuu

SEQ ID NO: 654766 - RNA, 19 nt, Artificial Sequence
  Description of Artificial Sequence: Synthetic oligonucleotide
  Sense strand starting at position 3155 of SEQ ID NO: 585625
gacugcuaucuauacacga

SEQ ID NO: 654767 - RNA, 19 nt, Artificial Sequence
  Description of Artificial Sequence: Synthetic oligonucleotide
  Antisense strand to SEQ ID NO: 654766
ucguguauagauagcaguc

SEQ ID NO: 654768 - RNA, 19 nt, Artificial Sequence
  Description of Artificial Sequence: Synthetic oligonucleotide
  Sense strand starting at position 3160 of SEQ ID NO: 585625
cuaucuauacacgaaguua

SEQ ID NO: 654769 - RNA, 19 nt, Artificial Sequence
  Description of Artificial Sequence: Synthetic oligonucleotide
  Antisense strand to SEQ ID NO: 654768
uaacuucguguauagauag

SEQ ID NO: 654770 - RNA, 19 nt, Artificial Sequence
  Description of Artificial Sequence: Synthetic oligonucleotide
  Sense strand starting at position 3218 of SEQ ID NO: 585625
agcgucuaucaauagggaa

SEQ ID NO: 654771 - RNA, 19 nt, Artificial Sequence
  Description of Artificial Sequence: Synthetic oligonucleotide
  Antisense strand to SEQ ID NO: 654770
uucccuauugauagacgcu

SEQ ID NO: 654772 - RNA, 19 nt, Artificial Sequence
  Description of Artificial Sequence: Synthetic oligonucleotide
  Sense strand starting at position 3236 of SEQ ID NO: 585625
acggguuaaaucgaccaca

SEQ ID NO: 654773 - RNA, 19 nt, Artificial Sequence
  Description of Artificial Sequence: Synthetic oligonucleotide
  Antisense strand to SEQ ID NO: 654772
uguggucgauuuaacccgu

SEQ ID NO: 654774 - RNA, 19 nt, Artificial Sequence
  Description of Artificial Sequence: Synthetic oligonucleotide
  Sense strand starting at position 3260 of SEQ ID NO: 585625
uccauaugacgauggaaca

SEQ ID NO: 654775 - RNA, 19 nt, Artificial Sequence
  Description of Artificial Sequence: Synthetic oligonucleotide
  Antisense strand to SEQ ID NO: 654774
uguuccaucgucauaugga

SEQ ID NO: 654776 - RNA, 19 nt, Artificial Sequence
  Description of Artificial Sequence: Synthetic oligonucleotide
  Sense strand starting at position 3313 of SEQ ID NO: 585625
ugcucugauacggaacagu

SEQ ID NO: 654777 - RNA, 19 nt, Artificial Sequence
  Description of Artificial Sequence: Synthetic oligonucleotide
  Antisense strand to SEQ ID NO: 654776
acuguuccguaucagagca

SEQ ID NO: 654778 - RNA, 19 nt, Artificial Sequence
  Description of Artificial Sequence: Synthetic oligonucleotide
  Sense strand starting at position 3551 of SEQ ID NO: 585625
ugaaguugacaauguacuu

SEQ ID NO: 654779 - RNA, 19 nt, Artificial Sequence
  Description of Artificial Sequence: Synthetic oligonucleotide
  Antisense strand to SEQ ID NO: 654778
aaguacauugucaacuuca

SEQ ID NO: 654780 - RNA, 19 nt, Artificial Sequence
  Description of Artificial Sequence: Synthetic oligonucleotide
  Sense strand starting at position 3583 of SEQ ID NO: 585625
gcaaaugcccuggagaagu

SEQ ID NO: 654781 - RNA, 19 nt, Artificial Sequence
  Description of Artificial Sequence: Synthetic oligonucleotide
  Antisense strand to SEQ ID NO: 654780
acuucuccagggcauuugc

SEQ ID NO: 654782 - RNA, 19 nt, Artificial Sequence
  Description of Artificial Sequence: Synthetic oligonucleotide
  Sense strand starting at position 3774 of SEQ ID NO: 585625
ggaggauuauugagguuga

SEQ ID NO: 654783 - RNA, 19 nt, Artificial Sequence
  Description of Artificial Sequence: Synthetic oligonucleotide
  Antisense strand to SEQ ID NO: 654782
ucaaccucaauaauccucc

SEQ ID NO: 654784 - RNA, 19 nt, Artificial Sequence
  Description of Artificial Sequence: Synthetic oligonucleotide
  Sense strand starting at position 3778 of SEQ ID NO: 585625
gauuauugagguugagagu

SEQ ID NO: 654785 - RNA, 19 nt, Artificial Sequence
  Description of Artificial Sequence: Synthetic oligonucleotide
  Antisense strand to SEQ ID NO: 654784
acucucaaccucaauaauc

SEQ ID NO: 654786 - RNA, 19 nt, Artificial Sequence
  Description of Artificial Sequence: Synthetic oligonucleotide
  Sense strand starting at position 3779 of SEQ ID NO: 585625
auuauugagguugagaguu

SEQ ID NO: 654787 - RNA, 19 nt, Artificial Sequence
  Description of Artificial Sequence: Synthetic oligonucleotide
  Antisense strand to SEQ ID NO: 654786
aacucucaaccucaauaau

SEQ ID NO: 654788 - RNA, 19 nt, Artificial Sequence
  Description of Artificial Sequence: Synthetic oligonucleotide
  Sense strand starting at position 41 of SEQ ID NO: 585626
aggugaagcuucuucugua

SEQ ID NO: 654789 - RNA, 19 nt, Artificial Sequence
  Description of Artificial Sequence: Synthetic oligonucleotide
  Antisense strand to SEQ ID NO: 654788
uacagaagaagcuucaccu

SEQ ID NO: 654790 - RNA, 19 nt, Artificial Sequence
  Description of Artificial Sequence: Synthetic oligonucleotide
  Sense strand starting at position 42 of SEQ ID NO: 585626
ggugaagcuucuucuguau

SEQ ID NO: 654791 - RNA, 19 nt, Artificial Sequence
  Description of Artificial Sequence: Synthetic oligonucleotide
  Antisense strand to SEQ ID NO: 654790
auacagaagaagcuucacc

SEQ ID NO: 654792 - RNA, 19 nt, Artificial Sequence
  Description of Artificial Sequence: Synthetic oligonucleotide
  Sense strand starting at position 472 of SEQ ID NO: 585626
guaacaaugccgggaacua

SEQ ID NO: 654793 - RNA, 19 nt, Artificial Sequence
  Description of Artificial Sequence: Synthetic oligonucleotide
  Antisense strand to SEQ ID NO: 654792
uaguucccggcauuguuac

SEQ ID NO: 654794 - RNA, 19 nt, Artificial Sequence
  Description of Artificial Sequence: Synthetic oligonucleotide
  Sense strand starting at position 556 of SEQ ID NO: 585626
ucaggcaugcaucaugaaa

SEQ ID NO: 654795 - RNA, 19 nt, Artificial Sequence
  Description of Artificial Sequence: Synthetic oligonucleotide
  Antisense strand to SEQ ID NO: 654794
uuucaugaugcaugccuga

SEQ ID NO: 654796 - RNA, 19 nt, Artificial Sequence
  Description of Artificial Sequence: Synthetic oligonucleotide
  Sense strand starting at position 656 of SEQ ID NO: 585626
ucccuuaggugagaugaga

SEQ ID NO: 654797 - RNA, 19 nt, Artificial Sequence
  Description of Artificial Sequence: Synthetic oligonucleotide
  Antisense strand to SEQ ID NO: 654796
ucucaucucaccuaaggga

SEQ ID NO: 654798 - RNA, 19 nt, Artificial Sequence
  Description of Artificial Sequence: Synthetic oligonucleotide
  Sense strand starting at position 785 of SEQ ID NO: 585626
ccaguagcuuguucuauca

SEQ ID NO: 654799 - RNA, 19 nt, Artificial Sequence
  Description of Artificial Sequence: Synthetic oligonucleotide
  Antisense strand to SEQ ID NO: 654798
ugauagaacaagcuacugg

SEQ ID NO: 654800 - RNA, 19 nt, Artificial Sequence
  Description of Artificial Sequence: Synthetic oligonucleotide
  Sense strand starting at position 942 of SEQ ID NO: 585626
acuagaaggugccuuguuu

SEQ ID NO: 654801 - RNA, 19 nt, Artificial Sequence
  Description of Artificial Sequence: Synthetic oligonucleotide
  Antisense strand to SEQ ID NO: 654800
aaacaaggcaccuucuagu

SEQ ID NO: 654802 - RNA, 19 nt, Artificial Sequence
  Description of Artificial Sequence: Synthetic oligonucleotide
  Sense strand starting at position 946 of SEQ ID NO: 585626
gaaggugccuuguuugaau

SEQ ID NO: 654803 - RNA, 19 nt, Artificial Sequence
  Description of Artificial Sequence: Synthetic oligonucleotide
  Antisense strand to SEQ ID NO: 654802
auucaaacaaggcaccuuc

SEQ ID NO: 654804 - RNA, 19 nt, Artificial Sequence
  Description of Artificial Sequence: Synthetic oligonucleotide
  Sense strand starting at position 1033 of SEQ ID NO: 585626
ggaacagagcucugucuag

SEQ ID NO: 654805 - RNA, 19 nt, Artificial Sequence
  Description of Artificial Sequence: Synthetic oligonucleotide
  Antisense strand to SEQ ID NO: 654804
cuagacagagcucuguucc

SEQ ID NO: 654806 - RNA, 19 nt, Artificial Sequence
  Description of Artificial Sequence: Synthetic oligonucleotide
  Sense strand starting at position 1227 of SEQ ID NO: 585626
gugagagcuucuguauucu

SEQ ID NO: 654807 - RNA, 19 nt, Artificial Sequence
  Description of Artificial Sequence: Synthetic oligonucleotide
  Antisense strand to SEQ ID NO: 654806
agaauacagaagcucucac

SEQ ID NO: 654808 - RNA, 19 nt, Artificial Sequence
  Description of Artificial Sequence: Synthetic oligonucleotide
  Sense strand starting at position 1303 of SEQ ID NO: 585626
gccucagggcguucaucuu

SEQ ID NO: 654809 - RNA, 19 nt, Artificial Sequence
  Description of Artificial Sequence: Synthetic oligonucleotide
  Antisense strand to SEQ ID NO: 654808
aagaugaacgcccugaggc

SEQ ID NO: 654810 - RNA, 19 nt, Artificial Sequence
  Description of Artificial Sequence: Synthetic oligonucleotide
  Sense strand starting at position 1355 of SEQ ID NO: 585626
ccaucagggugauagagau

SEQ ID NO: 654811 - RNA, 19 nt, Artificial Sequence
  Description of Artificial Sequence: Synthetic oligonucleotide
  Antisense strand to SEQ ID NO: 654810
aucucuaucacccugaugg

SEQ ID NO: 654812 - RNA, 19 nt, Artificial Sequence
  Description of Artificial Sequence: Synthetic oligonucleotide
  Sense strand starting at position 1485 of SEQ ID NO: 585626
uucgauguucgagggagau

SEQ ID NO: 654813 - RNA, 19 nt, Artificial Sequence
  Description of Artificial Sequence: Synthetic oligonucleotide
  Antisense strand to SEQ ID NO: 654812
aucucccucgaacaucgaa

SEQ ID NO: 654814 - RNA, 19 nt, Artificial Sequence
  Description of Artificial Sequence: Synthetic oligonucleotide
  Sense strand starting at position 1497 of SEQ ID NO: 585626
gggagauacuguccuuuac

SEQ ID NO: 654815 - RNA, 19 nt, Artificial Sequence
  Description of Artificial Sequence: Synthetic oligonucleotide
  Antisense strand to SEQ ID NO: 654814
guaaaggacaguaucuccc

SEQ ID NO: 654816 - RNA, 19 nt, Artificial Sequence
  Description of Artificial Sequence: Synthetic oligonucleotide
  Sense strand starting at position 1735 of SEQ ID NO: 585626
uccuucugucucuguggaa

SEQ ID NO: 654817 - RNA, 19 nt, Artificial Sequence
  Description of Artificial Sequence: Synthetic oligonucleotide
  Antisense strand to SEQ ID NO: 654816
uuccacagagacagaagga

SEQ ID NO: 654818 - RNA, 19 nt, Artificial Sequence
  Description of Artificial Sequence: Synthetic oligonucleotide
  Sense strand starting at position 1736 of SEQ ID NO: 585626
ccuucugucucuguggaau

SEQ ID NO: 654819 - RNA, 19 nt, Artificial Sequence
  Description of Artificial Sequence: Synthetic oligonucleotide
  Antisense strand to SEQ ID NO: 654818
auuccacagagacagaagg

SEQ ID NO: 654820 - RNA, 19 nt, Artificial Sequence
  Description of Artificial Sequence: Synthetic oligonucleotide
  Sense strand starting at position 2343 of SEQ ID NO: 585626
ucugcccauccaugguaua

SEQ ID NO: 654821 - RNA, 19 nt, Artificial Sequence
  Description of Artificial Sequence: Synthetic oligonucleotide
  Antisense strand to SEQ ID NO: 654820
uauaccauggaugggcaga

SEQ ID NO: 654822 - RNA, 19 nt, Artificial Sequence
  Description of Artificial Sequence: Synthetic oligonucleotide
  Sense strand starting at position 2458 of SEQ ID NO: 585626
gaugguuaucgguguacac

SEQ ID NO: 654823 - RNA, 19 nt, Artificial Sequence
  Description of Artificial Sequence: Synthetic oligonucleotide
  Antisense strand to SEQ ID NO: 654822
guguacaccgauaaccauc

SEQ ID NO: 654824 - RNA, 19 nt, Artificial Sequence
  Description of Artificial Sequence: Synthetic oligonucleotide
  Sense strand starting at position 2698 of SEQ ID NO: 585626
uagcauuggcccuggguaa

SEQ ID NO: 654825 - RNA, 19 nt, Artificial Sequence
  Description of Artificial Sequence: Synthetic oligonucleotide
  Antisense strand to SEQ ID NO: 654824
uuacccagggccaaugcua

SEQ ID NO: 654826 - RNA, 19 nt, Artificial Sequence
  Description of Artificial Sequence: Synthetic oligonucleotide
  Sense strand starting at position 2699 of SEQ ID NO: 585626
agcauuggcccuggguaaa

SEQ ID NO: 654827 - RNA, 19 nt, Artificial Sequence
  Description of Artificial Sequence: Synthetic oligonucleotide
  Antisense strand to SEQ ID NO: 654826
uuuacccagggccaaugcu

SEQ ID NO: 654828 - RNA, 19 nt, Artificial Sequence
  Description of Artificial Sequence: Synthetic oligonucleotide
  Sense strand starting at position 2721 of SEQ ID NO: 585626
uuaagagaagugugacuuu

SEQ ID NO: 654829 - RNA, 19 nt, Artificial Sequence
  Description of Artificial Sequence: Synthetic oligonucleotide
  Antisense strand to SEQ ID NO: 654828
aaagucacacuucucuuaa

SEQ ID NO: 654830 - RNA, 19 nt, Artificial Sequence
  Description of Artificial Sequence: Synthetic oligonucleotide
  Sense strand starting at position 2854 of SEQ ID NO: 585626
ucuucuaagugugcaggaa

SEQ ID NO: 654831 - RNA, 19 nt, Artificial Sequence
  Description of Artificial Sequence: Synthetic oligonucleotide
  Antisense strand to SEQ ID NO: 654830
uuccugcacacuuagaaga

SEQ ID NO: 654832 - RNA, 19 nt, Artificial Sequence
  Description of Artificial Sequence: Synthetic oligonucleotide
  Sense strand starting at position 2903 of SEQ ID NO: 585626
gugugugaggcuucguguu

SEQ ID NO: 654833 - RNA, 19 nt, Artificial Sequence
  Description of Artificial Sequence: Synthetic oligonucleotide
  Antisense strand to SEQ ID NO: 654832
aacacgaagccucacacac

SEQ ID NO: 654834 - RNA, 19 nt, Artificial Sequence
  Description of Artificial Sequence: Synthetic oligonucleotide
  Sense strand starting at position 2929 of SEQ ID NO: 585626
cuucuucccgcucagaaau

SEQ ID NO: 654835 - RNA, 19 nt, Artificial Sequence
  Description of Artificial Sequence: Synthetic oligonucleotide
  Antisense strand to SEQ ID NO: 654834
auuucugagcgggaagaag

SEQ ID NO: 654836 - RNA, 19 nt, Artificial Sequence
  Description of Artificial Sequence: Synthetic oligonucleotide
  Sense strand starting at position 2955 of SEQ ID NO: 585626
uugagauagcaauguuuaa

SEQ ID NO: 654837 - RNA, 19 nt, Artificial Sequence
  Description of Artificial Sequence: Synthetic oligonucleotide
  Antisense strand to SEQ ID NO: 654836
uuaaacauugcuaucucaa

SEQ ID NO: 654838 - RNA, 19 nt, Artificial Sequence
  Description of Artificial Sequence: Synthetic oligonucleotide
  Sense strand starting at position 3107 of SEQ ID NO: 585626
uguaucaugugguccugau

SEQ ID NO: 654839 - RNA, 19 nt, Artificial Sequence
  Description of Artificial Sequence: Synthetic oligonucleotide
  Antisense strand to SEQ ID NO: 654838
aucaggaccacaugauaca

SEQ ID NO: 654840 - RNA, 19 nt, Artificial Sequence
  Description of Artificial Sequence: Synthetic oligonucleotide
  Sense strand starting at position 3228 of SEQ ID NO: 585626
ggaccagaaucagaaucaa

SEQ ID NO: 654841 - RNA, 19 nt, Artificial Sequence
  Description of Artificial Sequence: Synthetic oligonucleotide
  Antisense strand to SEQ ID NO: 654840
uugauucugauucuggucc

SEQ ID NO: 654842 - RNA, 19 nt, Artificial Sequence
  Description of Artificial Sequence: Synthetic oligonucleotide
  Sense strand starting at position 3267 of SEQ ID NO: 585626
gugccaauccaggauguga

SEQ ID NO: 654843 - RNA, 19 nt, Artificial Sequence
  Description of Artificial Sequence: Synthetic oligonucleotide
  Antisense strand to SEQ ID NO: 654842
ucacauccuggauuggcac

SEQ ID NO: 654844 - RNA, 19 nt, Artificial Sequence
  Description of Artificial Sequence: Synthetic oligonucleotide
  Sense strand starting at position 3333 of SEQ ID NO: 585626
cucacuuaucugcauggga

SEQ ID NO: 654845 - RNA, 19 nt, Artificial Sequence
  Description of Artificial Sequence: Synthetic oligonucleotide
  Antisense strand to SEQ ID NO: 654844
ucccaugcagauaagugag

SEQ ID NO: 654846 - RNA, 19 nt, Artificial Sequence
  Description of Artificial Sequence: Synthetic oligonucleotide
  Sense strand starting at position 3336 of SEQ ID NO: 585626
acuuaucugcaugggaauu

SEQ ID NO: 654847 - RNA, 19 nt, Artificial Sequence
  Description of Artificial Sequence: Synthetic oligonucleotide
  Antisense strand to SEQ ID NO: 654846
aauucccaugcagauaagu

SEQ ID NO: 654848 - RNA, 19 nt, Artificial Sequence
  Description of Artificial Sequence: Synthetic oligonucleotide
  Sense strand starting at position 3396 of SEQ ID NO: 585626
uucugucuuggguagguaa

SEQ ID NO: 654849 - RNA, 19 nt, Artificial Sequence
  Description of Artificial Sequence: Synthetic oligonucleotide
  Antisense strand to SEQ ID NO: 654848
uuaccuacccaagacagaa

SEQ ID NO: 654850 - RNA, 19 nt, Artificial Sequence
  Description of Artificial Sequence: Synthetic oligonucleotide
  Sense strand starting at position 3398 of SEQ ID NO: 585626
cugucuuggguagguaauu

SEQ ID NO: 654851 - RNA, 19 nt, Artificial Sequence
  Description of Artificial Sequence: Synthetic oligonucleotide
  Antisense strand to SEQ ID NO: 654850
aauuaccuacccaagacag

SEQ ID NO: 654852 - RNA, 19 nt, Artificial Sequence
  Description of Artificial Sequence: Synthetic oligonucleotide
  Sense strand starting at position 3408 of SEQ ID NO: 585626
uagguaauuccaggcauau

SEQ ID NO: 654853 - RNA, 19 nt, Artificial Sequence
  Description of Artificial Sequence: Synthetic oligonucleotide
  Antisense strand to SEQ ID NO: 654852
auaugccuggaauuaccua

SEQ ID NO: 654854 - RNA, 19 nt, Artificial Sequence
  Description of Artificial Sequence: Synthetic oligonucleotide
  Sense strand starting at position 3444 of SEQ ID NO: 585626
aagagagcuuuagauuaga

SEQ ID NO: 654855 - RNA, 19 nt, Artificial Sequence
  Description of Artificial Sequence: Synthetic oligonucleotide
  Antisense strand to SEQ ID NO: 654854
ucuaaucuaaagcucucuu

SEQ ID NO: 654856 - RNA, 19 nt, Artificial Sequence
  Description of Artificial Sequence: Synthetic oligonucleotide
  Sense strand starting at position 3449 of SEQ ID NO: 585626
agcuuuagauuagauaaag

SEQ ID NO: 654857 - RNA, 19 nt, Artificial Sequence
  Description of Artificial Sequence: Synthetic oligonucleotide
  Antisense strand to SEQ ID NO: 654856
cuuuaucuaaucuaaagcu

SEQ ID NO: 654858 - RNA, 19 nt, Artificial Sequence
  Description of Artificial Sequence: Synthetic oligonucleotide
  Sense strand starting at position 3700 of SEQ ID NO: 585626
aucagauauuugcaggcuu

SEQ ID NO: 654859 - RNA, 19 nt, Artificial Sequence
  Description of Artificial Sequence: Synthetic oligonucleotide
  Antisense strand to SEQ ID NO: 654858
aagccugcaaauaucugau

SEQ ID NO: 654860 - RNA, 19 nt, Artificial Sequence
  Description of Artificial Sequence: Synthetic oligonucleotide
  Sense strand starting at position 3702 of SEQ ID NO: 585626
cagauauuugcaggcuucu

SEQ ID NO: 654861 - RNA, 19 nt, Artificial Sequence
  Description of Artificial Sequence: Synthetic oligonucleotide
  Antisense strand to SEQ ID NO: 654860
agaagccugcaaauaucug

SEQ ID NO: 654862 - RNA, 19 nt, Artificial Sequence
  Description of Artificial Sequence: Synthetic oligonucleotide
  Sense strand starting at position 3708 of SEQ ID NO: 585626
uuugcaggcuucuugggaa

SEQ ID NO: 654863 - RNA, 19 nt, Artificial Sequence
  Description of Artificial Sequence: Synthetic oligonucleotide
  Antisense strand to SEQ ID NO: 654862
uucccaagaagccugcaaa

SEQ ID NO: 654864 - RNA, 19 nt, Artificial Sequence
  Description of Artificial Sequence: Synthetic oligonucleotide
  Sense strand starting at position 3731 of SEQ ID NO: 585626
acaggcaaaugugaaauaa

SEQ ID NO: 654865 - RNA, 19 nt, Artificial Sequence
  Description of Artificial Sequence: Synthetic oligonucleotide
  Antisense strand to SEQ ID NO: 654864
uuauuucacauuugccugu

SEQ ID NO: 654866 - RNA, 19 nt, Artificial Sequence
  Description of Artificial Sequence: Synthetic oligonucleotide
  Sense strand starting at position 3766 of SEQ ID NO: 585626
ggcaaucuauaauuaagua

SEQ ID NO: 654867 - RNA, 19 nt, Artificial Sequence
  Description of Artificial Sequence: Synthetic oligonucleotide
  Antisense strand to SEQ ID NO: 654866
uacuuaauuauagauugcc

SEQ ID NO: 654868 - RNA, 19 nt, Artificial Sequence
  Description of Artificial Sequence: Synthetic oligonucleotide
  Sense strand starting at position 30 of SEQ ID NO: 585627
agcguaagguaauccacua

SEQ ID NO: 654869 - RNA, 19 nt, Artificial Sequence
  Description of Artificial Sequence: Synthetic oligonucleotide
  Antisense strand to SEQ ID NO: 654868
uaguggauuaccuuacgcu

SEQ ID NO: 654870 - RNA, 19 nt, Artificial Sequence
  Description of Artificial Sequence: Synthetic oligonucleotide
  Sense strand starting at position 116 of SEQ ID NO: 585627
uuuccacgucaauaagguu

SEQ ID NO: 654871 - RNA, 19 nt, Artificial Sequence
  Description of Artificial Sequence: Synthetic oligonucleotide
  Antisense strand to SEQ ID NO: 654870
aaccuuauugacguggaaa

SEQ ID NO: 654872 - RNA, 19 nt, Artificial Sequence
  Description of Artificial Sequence: Synthetic oligonucleotide
  Sense strand starting at position 139 of SEQ ID NO: 585627
gccagagcucccuaguuag

SEQ ID NO: 654873 - RNA, 19 nt, Artificial Sequence
  Description of Artificial Sequence: Synthetic oligonucleotide
  Antisense strand to SEQ ID NO: 654872
cuaacuagggagcucuggc

SEQ ID NO: 654874 - RNA, 19 nt, Artificial Sequence
  Description of Artificial Sequence: Synthetic oligonucleotide
  Sense strand starting at position 153 of SEQ ID NO: 585627
guuaguaccuguucuagaa

SEQ ID NO: 654875 - RNA, 19 nt, Artificial Sequence
  Description of Artificial Sequence: Synthetic oligonucleotide
  Antisense strand to SEQ ID NO: 654874
uucuagaacagguacuaac

SEQ ID NO: 654876 - RNA, 19 nt, Artificial Sequence
  Description of Artificial Sequence: Synthetic oligonucleotide
  Sense strand starting at position 201 of SEQ ID NO: 585627
uuagguaaucacggauauu

SEQ ID NO: 654877 - RNA, 19 nt, Artificial Sequence
  Description of Artificial Sequence: Synthetic oligonucleotide
  Antisense strand to SEQ ID NO: 654876
aauauccgugauuaccuaa

SEQ ID NO: 654878 - RNA, 19 nt, Artificial Sequence
  Description of Artificial Sequence: Synthetic oligonucleotide
  Sense strand starting at position 243 of SEQ ID NO: 585627
gggagacauugagacgaua

SEQ ID NO: 654879 - RNA, 19 nt, Artificial Sequence
  Description of Artificial Sequence: Synthetic oligonucleotide
  Antisense strand to SEQ ID NO: 654878
uaucgucucaaugucuccc

SEQ ID NO: 654880 - RNA, 19 nt, Artificial Sequence
  Description of Artificial Sequence: Synthetic oligonucleotide
  Sense strand starting at position 379 of SEQ ID NO: 585627
agauuaagucauugaacuu

SEQ ID NO: 654881 - RNA, 19 nt, Artificial Sequence
  Description of Artificial Sequence: Synthetic oligonucleotide
  Antisense strand to SEQ ID NO: 654880
aaguucaaugacuuaaucu

SEQ ID NO: 654882 - RNA, 19 nt, Artificial Sequence
  Description of Artificial Sequence: Synthetic oligonucleotide
  Sense strand starting at position 418 of SEQ ID NO: 585627
ugacaagacuuugaaauca

SEQ ID NO: 654883 - RNA, 19 nt, Artificial Sequence
  Description of Artificial Sequence: Synthetic oligonucleotide
  Antisense strand to SEQ ID NO: 654882
ugauuucaaagucuuguca

SEQ ID NO: 654884 - RNA, 19 nt, Artificial Sequence
  Description of Artificial Sequence: Synthetic oligonucleotide
  Sense strand starting at position 430 of SEQ ID NO: 585627
gaaaucauuucguagacuu

SEQ ID NO: 654885 - RNA, 19 nt, Artificial Sequence
  Description of Artificial Sequence: Synthetic oligonucleotide
  Antisense strand to SEQ ID NO: 654884
aagucuacgaaaugauuuc

SEQ ID NO: 654886 - RNA, 19 nt, Artificial Sequence
  Description of Artificial Sequence: Synthetic oligonucleotide
  Sense strand starting at position 991 of SEQ ID NO: 585627
cgccgccagccuucuaaau

SEQ ID NO: 654887 - RNA, 19 nt, Artificial Sequence
  Description of Artificial Sequence: Synthetic oligonucleotide
  Antisense strand to SEQ ID NO: 654886
auuuagaaggcuggcggcg

SEQ ID NO: 654888 - RNA, 19 nt, Artificial Sequence
  Description of Artificial Sequence: Synthetic oligonucleotide
  Sense strand starting at position 2034 of SEQ ID NO: 585627
gcccaauuagagugcgaca

SEQ ID NO: 654889 - RNA, 19 nt, Artificial Sequence
  Description of Artificial Sequence: Synthetic oligonucleotide
  Antisense strand to SEQ ID NO: 654888
ugucgcacucuaauugggc

SEQ ID NO: 654890 - RNA, 19 nt, Artificial Sequence
  Description of Artificial Sequence: Synthetic oligonucleotide
  Sense strand starting at position 2186 of SEQ ID NO: 585627
ucccgcgaacaaugaaauu

SEQ ID NO: 654891 - RNA, 19 nt, Artificial Sequence
  Description of Artificial Sequence: Synthetic oligonucleotide
  Antisense strand to SEQ ID NO: 654890
aauuucauuguucgcggga

SEQ ID NO: 654892 - RNA, 19 nt, Artificial Sequence
  Description of Artificial Sequence: Synthetic oligonucleotide
  Sense strand starting at position 2267 of SEQ ID NO: 585627
aguggugguacugaaaugu

SEQ ID NO: 654893 - RNA, 19 nt, Artificial Sequence
  Description of Artificial Sequence: Synthetic oligonucleotide
  Antisense strand to SEQ ID NO: 654892
acauuucaguaccaccacu

SEQ ID NO: 654894 - RNA, 19 nt, Artificial Sequence
  Description of Artificial Sequence: Synthetic oligonucleotide
  Sense strand starting at position 2441 of SEQ ID NO: 585627
acauaacagcguuaucauu

SEQ ID NO: 654895 - RNA, 19 nt, Artificial Sequence
  Description of Artificial Sequence: Synthetic oligonucleotide
  Antisense strand to SEQ ID NO: 654894
aaugauaacgcuguuaugu

SEQ ID NO: 654896 - RNA, 19 nt, Artificial Sequence
  Description of Artificial Sequence: Synthetic oligonucleotide
  Sense strand starting at position 2475 of SEQ ID NO: 585627
cuaaguacgcuguaaggau

SEQ ID NO: 654897 - RNA, 19 nt, Artificial Sequence
  Description of Artificial Sequence: Synthetic oligonucleotide
  Antisense strand to SEQ ID NO: 654896
auccuuacagcguacuuag

SEQ ID NO: 654898 - RNA, 19 nt, Artificial Sequence
  Description of Artificial Sequence: Synthetic oligonucleotide
  Sense strand starting at position 2500 of SEQ ID NO: 585627
ccuagcaaucgugaagaaa

SEQ ID NO: 654899 - RNA, 19 nt, Artificial Sequence
  Description of Artificial Sequence: Synthetic oligonucleotide
  Antisense strand to SEQ ID NO: 654898
uuucuucacgauugcuagg

SEQ ID NO: 654900 - RNA, 19 nt, Artificial Sequence
  Description of Artificial Sequence: Synthetic oligonucleotide
  Sense strand starting at position 2546 of SEQ ID NO: 585627
ugaaguauggcucacgauu

SEQ ID NO: 654901 - RNA, 19 nt, Artificial Sequence
  Description of Artificial Sequence: Synthetic oligonucleotide
  Antisense strand to SEQ ID NO: 654900
aaucgugagccauacuuca

SEQ ID NO: 654902 - RNA, 19 nt, Artificial Sequence
  Description of Artificial Sequence: Synthetic oligonucleotide
  Sense strand starting at position 2581 of SEQ ID NO: 585627
ucggcaucgcugcuuauua

SEQ ID NO: 654903 - RNA, 19 nt, Artificial Sequence
  Description of Artificial Sequence: Synthetic oligonucleotide
  Antisense strand to SEQ ID NO: 654902
uaauaagcagcgaugccga

SEQ ID NO: 654904 - RNA, 19 nt, Artificial Sequence
  Description of Artificial Sequence: Synthetic oligonucleotide
  Sense strand starting at position 2594 of SEQ ID NO: 585627
uuauuagucucggugauca

SEQ ID NO: 654905 - RNA, 19 nt, Artificial Sequence
  Description of Artificial Sequence: Synthetic oligonucleotide
  Antisense strand to SEQ ID NO: 654904
ugaucaccgagacuaauaa

SEQ ID NO: 654906 - RNA, 19 nt, Artificial Sequence
  Description of Artificial Sequence: Synthetic oligonucleotide
  Sense strand starting at position 2596 of SEQ ID NO: 585627
auuagucucggugaucaga

SEQ ID NO: 654907 - RNA, 19 nt, Artificial Sequence
  Description of Artificial Sequence: Synthetic oligonucleotide
  Antisense strand to SEQ ID NO: 654906
ucugaucaccgagacuaau

SEQ ID NO: 654908 - RNA, 19 nt, Artificial Sequence
  Description of Artificial Sequence: Synthetic oligonucleotide
  Sense strand starting at position 2598 of SEQ ID NO: 585627
uagucucggugaucagagu

SEQ ID NO: 654909 - RNA, 19 nt, Artificial Sequence
  Description of Artificial Sequence: Synthetic oligonucleotide
  Antisense strand to SEQ ID NO: 654908
acucugaucaccgagacua

SEQ ID NO: 654910 - RNA, 19 nt, Artificial Sequence
  Description of Artificial Sequence: Synthetic oligonucleotide
  Sense strand starting at position 2599 of SEQ ID NO: 585627
agucucggugaucagagua

SEQ ID NO: 654911 - RNA, 19 nt, Artificial Sequence
  Description of Artificial Sequence: Synthetic oligonucleotide
  Antisense strand to SEQ ID NO: 654910
uacucugaucaccgagacu

SEQ ID NO: 654912 - RNA, 19 nt, Artificial Sequence
  Description of Artificial Sequence: Synthetic oligonucleotide
  Sense strand starting at position 2627 of SEQ ID NO: 585627
gugacuuacugauugaauu

SEQ ID NO: 654913 - RNA, 19 nt, Artificial Sequence
  Description of Artificial Sequence: Synthetic oligonucleotide
  Antisense strand to SEQ ID NO: 654912
aauucaaucaguaagucac

SEQ ID NO: 654914 - RNA, 19 nt, Artificial Sequence
  Description of Artificial Sequence: Synthetic oligonucleotide
  Sense strand starting at position 2628 of SEQ ID NO: 585627
ugacuuacugauugaauua

SEQ ID NO: 654915 - RNA, 19 nt, Artificial Sequence
  Description of Artificial Sequence: Synthetic oligonucleotide
  Antisense strand to SEQ ID NO: 654914
uaauucaaucaguaaguca

SEQ ID NO: 654916 - RNA, 19 nt, Artificial Sequence
  Description of Artificial Sequence: Synthetic oligonucleotide
  Sense strand starting at position 2742 of SEQ ID NO: 585627
agaacauugugccugguua

SEQ ID NO: 654917 - RNA, 19 nt, Artificial Sequence
  Description of Artificial Sequence: Synthetic oligonucleotide
  Antisense strand to SEQ ID NO: 654916
uaaccaggcacaauguucu

SEQ ID NO: 654918 - RNA, 19 nt, Artificial Sequence
  Description of Artificial Sequence: Synthetic oligonucleotide
  Sense strand starting at position 2743 of SEQ ID NO: 585627
gaacauugugccugguuac

SEQ ID NO: 654919 - RNA, 19 nt, Artificial Sequence
  Description of Artificial Sequence: Synthetic oligonucleotide
  Antisense strand to SEQ ID NO: 654918
guaaccaggcacaauguuc

SEQ ID NO: 654920 - RNA, 19 nt, Artificial Sequence
  Description of Artificial Sequence: Synthetic oligonucleotide
  Sense strand starting at position 2744 of SEQ ID NO: 585627
aacauugugccugguuacu

SEQ ID NO: 654921 - RNA, 19 nt, Artificial Sequence
  Description of Artificial Sequence: Synthetic oligonucleotide
  Antisense strand to SEQ ID NO: 654920
aguaaccaggcacaauguu

SEQ ID NO: 654922 - RNA, 19 nt, Artificial Sequence
  Description of Artificial Sequence: Synthetic oligonucleotide
  Sense strand starting at position 2783 of SEQ ID NO: 585627
uugcgucucaaagggagaa

SEQ ID NO: 654923 - RNA, 19 nt, Artificial Sequence
  Description of Artificial Sequence: Synthetic oligonucleotide
  Antisense strand to SEQ ID NO: 654922
uucucccuuugagacgcaa

SEQ ID NO: 654924 - RNA, 19 nt, Artificial Sequence
  Description of Artificial Sequence: Synthetic oligonucleotide
  Sense strand starting at position 2803 of SEQ ID NO: 585627
gugaaacagcucugcaaca

SEQ ID NO: 654925 - RNA, 19 nt, Artificial Sequence
  Description of Artificial Sequence: Synthetic oligonucleotide
  Antisense strand to SEQ ID NO: 654924
uguugcagagcuguuucac

SEQ ID NO: 654926 - RNA, 19 nt, Artificial Sequence
  Description of Artificial Sequence: Synthetic oligonucleotide
  Sense strand starting at position 2804 of SEQ ID NO: 585627
ugaaacagcucugcaacau

SEQ ID NO: 654927 - RNA, 19 nt, Artificial Sequence
  Description of Artificial Sequence: Synthetic oligonucleotide
  Antisense strand to SEQ ID NO: 654926
auguugcagagcuguuuca

SEQ ID NO: 654928 - RNA, 19 nt, Artificial Sequence
  Description of Artificial Sequence: Synthetic oligonucleotide
  Sense strand starting at position 2916 of SEQ ID NO: 585627
gcauuuauguuccaggaac

SEQ ID NO: 654929 - RNA, 19 nt, Artificial Sequence
  Description of Artificial Sequence: Synthetic oligonucleotide
  Antisense strand to SEQ ID NO: 654928
guuccuggaacauaaaugc

SEQ ID NO: 654930 - RNA, 19 nt, Artificial Sequence
  Description of Artificial Sequence: Synthetic oligonucleotide
  Sense strand starting at position 2929 of SEQ ID NO: 585627
aggaacuguucuuuacaua

SEQ ID NO: 654931 - RNA, 19 nt, Artificial Sequence
  Description of Artificial Sequence: Synthetic oligonucleotide
  Antisense strand to SEQ ID NO: 654930
uauguaaagaacaguuccu

SEQ ID NO: 654932 - RNA, 19 nt, Artificial Sequence
  Description of Artificial Sequence: Synthetic oligonucleotide
  Sense strand starting at position 2980 of SEQ ID NO: 585627
acgaauagguacuaagaaa

SEQ ID NO: 654933 - RNA, 19 nt, Artificial Sequence
  Description of Artificial Sequence: Synthetic oligonucleotide
  Antisense strand to SEQ ID NO: 654932
uuucuuaguaccuauucgu

SEQ ID NO: 654934 - RNA, 19 nt, Artificial Sequence
  Description of Artificial Sequence: Synthetic oligonucleotide
  Sense strand starting at position 3108 of SEQ ID NO: 585627
acgcauuaucuuuaaguuu

SEQ ID NO: 654935 - RNA, 19 nt, Artificial Sequence
  Description of Artificial Sequence: Synthetic oligonucleotide
  Antisense strand to SEQ ID NO: 654934
aaacuuaaagauaaugcgu

SEQ ID NO: 654936 - RNA, 19 nt, Artificial Sequence
  Description of Artificial Sequence: Synthetic oligonucleotide
  Sense strand starting at position 3151 of SEQ ID NO: 585627
auguauagcuagucaagag

SEQ ID NO: 654937 - RNA, 19 nt, Artificial Sequence
  Description of Artificial Sequence: Synthetic oligonucleotide
  Antisense strand to SEQ ID NO: 654936
cucuugacuagcuauacau

SEQ ID NO: 654938 - RNA, 19 nt, Artificial Sequence
  Description of Artificial Sequence: Synthetic oligonucleotide
  Sense strand starting at position 3299 of SEQ ID NO: 585627
ccucaagcuuggccugauu

SEQ ID NO: 654939 - RNA, 19 nt, Artificial Sequence
  Description of Artificial Sequence: Synthetic oligonucleotide
  Antisense strand to SEQ ID NO: 654938
aaucaggccaagcuugagg

SEQ ID NO: 654940 - RNA, 19 nt, Artificial Sequence
  Description of Artificial Sequence: Synthetic oligonucleotide
  Sense strand starting at position 3337 of SEQ ID NO: 585627
gagggacaguacuguauuu

SEQ ID NO: 654941 - RNA, 19 nt, Artificial Sequence
  Description of Artificial Sequence: Synthetic oligonucleotide
  Antisense strand to SEQ ID NO: 654940
aaauacaguacugucccuc

SEQ ID NO: 654942 - RNA, 19 nt, Artificial Sequence
  Description of Artificial Sequence: Synthetic oligonucleotide
  Sense strand starting at position 3853 of SEQ ID NO: 585627
ucagcuuuggaguaguaag

SEQ ID NO: 654943 - RNA, 19 nt, Artificial Sequence
  Description of Artificial Sequence: Synthetic oligonucleotide
  Antisense strand to SEQ ID NO: 654942
cuuacuacuccaaagcuga

SEQ ID NO: 654944 - RNA, 19 nt, Artificial Sequence
  Description of Artificial Sequence: Synthetic oligonucleotide
  Sense strand starting at position 3864 of SEQ ID NO: 585627
guaguaagcaauuaguaag

SEQ ID NO: 654945 - RNA, 19 nt, Artificial Sequence
  Description of Artificial Sequence: Synthetic oligonucleotide
  Antisense strand to SEQ ID NO: 654944
cuuacuaauugcuuacuac

SEQ ID NO: 654946 - RNA, 19 nt, Artificial Sequence
  Description of Artificial Sequence: Synthetic oligonucleotide
  Sense strand starting at position 3870 of SEQ ID NO: 585627
agcaauuaguaagcaauga

SEQ ID NO: 654947 - RNA, 19 nt, Artificial Sequence
  Description of Artificial Sequence: Synthetic oligonucleotide
  Antisense strand to SEQ ID NO: 654946
ucauugcuuacuaauugcu

SEQ ID NO: 654948 - RNA, 19 nt, Artificial Sequence
  Description of Artificial Sequence: Synthetic oligonucleotide
  Sense strand starting at position 430 of SEQ ID NO: 585628
ugauuuaaauacgagaaac

SEQ ID NO: 654949 - RNA, 19 nt, Artificial Sequence
  Description of Artificial Sequence: Synthetic oligonucleotide
  Antisense strand to SEQ ID NO: 654948
guuucucguauuuaaauca

SEQ ID NO: 654950 - RNA, 19 nt, Artificial Sequence
  Description of Artificial Sequence: Synthetic oligonucleotide
  Sense strand starting at position 440 of SEQ ID NO: 585628
acgagaaacacagguuaua

SEQ ID NO: 654951 - RNA, 19 nt, Artificial Sequence
  Description of Artificial Sequence: Synthetic oligonucleotide
  Antisense strand to SEQ ID NO: 654950
uauaaccuguguuucucgu

SEQ ID NO: 654952 - RNA, 19 nt, Artificial Sequence
  Description of Artificial Sequence: Synthetic oligonucleotide
  Sense strand starting at position 451 of SEQ ID NO: 585628
agguuauacaguugaguga

SEQ ID NO: 654953 - RNA, 19 nt, Artificial Sequence
  Description of Artificial Sequence: Synthetic oligonucleotide
  Antisense strand to SEQ ID NO: 654952
ucacucaacuguauaaccu

SEQ ID NO: 654954 - RNA, 19 nt, Artificial Sequence
  Description of Artificial Sequence: Synthetic oligonucleotide
  Sense strand starting at position 772 of SEQ ID NO: 585628
ggcuaagcaccauauuaga

SEQ ID NO: 654955 - RNA, 19 nt, Artificial Sequence
  Description of Artificial Sequence: Synthetic oligonucleotide
  Antisense strand to SEQ ID NO: 654954
ucuaauauggugcuuagcc

SEQ ID NO: 654956 - RNA, 19 nt, Artificial Sequence
  Description of Artificial Sequence: Synthetic oligonucleotide
  Sense strand starting at position 879 of SEQ ID NO: 585628
ugcagacuuuaacagauaa

SEQ ID NO: 654957 - RNA, 19 nt, Artificial Sequence
  Description of Artificial Sequence: Synthetic oligonucleotide
  Antisense strand to SEQ ID NO: 654956
uuaucuguuaaagucugca

SEQ ID NO: 654958 - RNA, 19 nt, Artificial Sequence
  Description of Artificial Sequence: Synthetic oligonucleotide
  Sense strand starting at position 920 of SEQ ID NO: 585628
uuauguauuuacuggagaa

SEQ ID NO: 654959 - RNA, 19 nt, Artificial Sequence
  Description of Artificial Sequence: Synthetic oligonucleotide
  Antisense strand to SEQ ID NO: 654958
uucuccaguaaauacauaa

SEQ ID NO: 654960 - RNA, 19 nt, Artificial Sequence
  Description of Artificial Sequence: Synthetic oligonucleotide
  Sense strand starting at position 1265 of SEQ ID NO: 585628
ggccaagagcuuuauaaag

SEQ ID NO: 654961 - RNA, 19 nt, Artificial Sequence
  Description of Artificial Sequence: Synthetic oligonucleotide
  Antisense strand to SEQ ID NO: 654960
cuuuauaaagcucuuggcc

SEQ ID NO: 654962 - RNA, 19 nt, Artificial Sequence
  Description of Artificial Sequence: Synthetic oligonucleotide
  Sense strand starting at position 1267 of SEQ ID NO: 585628
ccaagagcuuuauaaagau

SEQ ID NO: 654963 - RNA, 19 nt, Artificial Sequence
  Description of Artificial Sequence: Synthetic oligonucleotide
  Antisense strand to SEQ ID NO: 654962
aucuuuauaaagcucuugg

SEQ ID NO: 654964 - RNA, 19 nt, Artificial Sequence
  Description of Artificial Sequence: Synthetic oligonucleotide
  Sense strand starting at position 1295 of SEQ ID NO: 585628
agaagacuuucugcccaag

SEQ ID NO: 654965 - RNA, 19 nt, Artificial Sequence
  Description of Artificial Sequence: Synthetic oligonucleotide
  Antisense strand to SEQ ID NO: 654964
cuugggcagaaagucuucu

SEQ ID NO: 654966 - RNA, 19 nt, Artificial Sequence
  Description of Artificial Sequence: Synthetic oligonucleotide
  Sense strand starting at position 1324 of SEQ ID NO: 585628
ggauaaggauuacacuacu

SEQ ID NO: 654967 - RNA, 19 nt, Artificial Sequence
  Description of Artificial Sequence: Synthetic oligonucleotide
  Antisense strand to SEQ ID NO: 654966
aguaguguaauccuuaucc

SEQ ID NO: 654968 - RNA, 19 nt, Artificial Sequence
  Description of Artificial Sequence: Synthetic oligonucleotide
  Sense strand starting at position 1357 of SEQ ID NO: 585628
auagcacuuggccaauuau

SEQ ID NO: 654969 - RNA, 19 nt, Artificial Sequence
  Description of Artificial Sequence: Synthetic oligonucleotide
  Antisense strand to SEQ ID NO: 654968
auaauuggccaagugcuau

SEQ ID NO: 654970 - RNA, 19 nt, Artificial Sequence
  Description of Artificial Sequence: Synthetic oligonucleotide
  Sense strand starting at position 1414 of SEQ ID NO: 585628
uuuaaacaucucgaguuac

SEQ ID NO: 654971 - RNA, 19 nt, Artificial Sequence
  Description of Artificial Sequence: Synthetic oligonucleotide
  Antisense strand to SEQ ID NO: 654970
guaacucgagauguuuaaa

SEQ ID NO: 654972 - RNA, 19 nt, Artificial Sequence
  Description of Artificial Sequence: Synthetic oligonucleotide
  Sense strand starting at position 1677 of SEQ ID NO: 585628
agcgaacgguucuaaauuu

SEQ ID NO: 654973 - RNA, 19 nt, Artificial Sequence
  Description of Artificial Sequence: Synthetic oligonucleotide
  Antisense strand to SEQ ID NO: 654972
aaauuuagaaccguucgcu

SEQ ID NO: 654974 - RNA, 19 nt, Artificial Sequence
  Description of Artificial Sequence: Synthetic oligonucleotide
  Sense strand starting at position 2197 of SEQ ID NO: 585628
ggguggucucgccgaggga

SEQ ID NO: 654975 - RNA, 19 nt, Artificial Sequence
  Description of Artificial Sequence: Synthetic oligonucleotide
  Antisense strand to SEQ ID NO: 654974
ucccucggcgagaccaccc

SEQ ID NO: 654976 - RNA, 19 nt, Artificial Sequence
  Description of Artificial Sequence: Synthetic oligonucleotide
  Sense strand starting at position 2367 of SEQ ID NO: 585628
gcuggaagcccucaaggua

SEQ ID NO: 654977 - RNA, 19 nt, Artificial Sequence
  Description of Artificial Sequence: Synthetic oligonucleotide
  Antisense strand to SEQ ID NO: 654976
uaccuugagggcuuccagc

SEQ ID NO: 654978 - RNA, 19 nt, Artificial Sequence
  Description of Artificial Sequence: Synthetic oligonucleotide
  Sense strand starting at position 2573 of SEQ ID NO: 585628
cuguccuuugccugggaca

SEQ ID NO: 654979 - RNA, 19 nt, Artificial Sequence
  Description of Artificial Sequence: Synthetic oligonucleotide
  Antisense strand to SEQ ID NO: 654978
ugucccaggcaaaggacag

SEQ ID NO: 654980 - RNA, 19 nt, Artificial Sequence
  Description of Artificial Sequence: Synthetic oligonucleotide
  Sense strand starting at position 2761 of SEQ ID NO: 585628
acaccagcuucguucuuua

SEQ ID NO: 654981 - RNA, 19 nt, Artificial Sequence
  Description of Artificial Sequence: Synthetic oligonucleotide
  Antisense strand to SEQ ID NO: 654980
uaaagaacgaagcuggugu

SEQ ID NO: 654982 - RNA, 19 nt, Artificial Sequence
  Description of Artificial Sequence: Synthetic oligonucleotide
  Sense strand starting at position 2780 of SEQ ID NO: 585628
uggucucuccugcacuaaa

SEQ ID NO: 654983 - RNA, 19 nt, Artificial Sequence
  Description of Artificial Sequence: Synthetic oligonucleotide
  Antisense strand to SEQ ID NO: 654982
uuuagugcaggagagacca

SEQ ID NO: 654984 - RNA, 19 nt, Artificial Sequence
  Description of Artificial Sequence: Synthetic oligonucleotide
  Sense strand starting at position 3019 of SEQ ID NO: 585628
gcacuuugguuuccugaaa

SEQ ID NO: 654985 - RNA, 19 nt, Artificial Sequence
  Description of Artificial Sequence: Synthetic oligonucleotide
  Antisense strand to SEQ ID NO: 654984
uuucaggaaaccaaagugc

SEQ ID NO: 654986 - RNA, 19 nt, Artificial Sequence
  Description of Artificial Sequence: Synthetic oligonucleotide
  Sense strand starting at position 3020 of SEQ ID NO: 585628
cacuuugguuuccugaaag

SEQ ID NO: 654987 - RNA, 19 nt, Artificial Sequence
  Description of Artificial Sequence: Synthetic oligonucleotide
  Antisense strand to SEQ ID NO: 654986
cuuucaggaaaccaaagug

SEQ ID NO: 654988 - RNA, 19 nt, Artificial Sequence
  Description of Artificial Sequence: Synthetic oligonucleotide
  Sense strand starting at position 3032 of SEQ ID NO: 585628
cugaaaguaguuugcguga

SEQ ID NO: 654989 - RNA, 19 nt, Artificial Sequence
  Description of Artificial Sequence: Synthetic oligonucleotide
  Antisense strand to SEQ ID NO: 654988
ucacgcaaacuacuuucag

SEQ ID NO: 654990 - RNA, 19 nt, Artificial Sequence
  Description of Artificial Sequence: Synthetic oligonucleotide
  Sense strand starting at position 3035 of SEQ ID NO: 585628
aaaguaguuugcgugagac

SEQ ID NO: 654991 - RNA, 19 nt, Artificial Sequence
  Description of Artificial Sequence: Synthetic oligonucleotide
  Antisense strand to SEQ ID NO: 654990
gucucacgcaaacuacuuu

SEQ ID NO: 654992 - RNA, 19 nt, Artificial Sequence
  Description of Artificial Sequence: Synthetic oligonucleotide
  Sense strand starting at position 3045 of SEQ ID NO: 585628
gcgugagacccgaaugcuc

SEQ ID NO: 654993 - RNA, 19 nt, Artificial Sequence
  Description of Artificial Sequence: Synthetic oligonucleotide
  Antisense strand to SEQ ID NO: 654992
gagcauucgggucucacgc

SEQ ID NO: 654994 - RNA, 19 nt, Artificial Sequence
  Description of Artificial Sequence: Synthetic oligonucleotide
  Sense strand starting at position 3064 of SEQ ID NO: 585628
ugcucuugggacugacuua

SEQ ID NO: 654995 - RNA, 19 nt, Artificial Sequence
  Description of Artificial Sequence: Synthetic oligonucleotide
  Antisense strand to SEQ ID NO: 654994
uaagucagucccaagagca

SEQ ID NO: 654996 - RNA, 19 nt, Artificial Sequence
  Description of Artificial Sequence: Synthetic oligonucleotide
  Sense strand starting at position 3065 of SEQ ID NO: 585628
gcucuugggacugacuuau

SEQ ID NO: 654997 - RNA, 19 nt, Artificial Sequence
  Description of Artificial Sequence: Synthetic oligonucleotide
  Antisense strand to SEQ ID NO: 654996
auaagucagucccaagagc

SEQ ID NO: 654998 - RNA, 19 nt, Artificial Sequence
  Description of Artificial Sequence: Synthetic oligonucleotide
  Sense strand starting at position 3137 of SEQ ID NO: 585628
gugugugggcugugagaaa

SEQ ID NO: 654999 - RNA, 19 nt, Artificial Sequence
  Description of Artificial Sequence: Synthetic oligonucleotide
  Antisense strand to SEQ ID NO: 654998
uuucucacagcccacacac

SEQ ID NO: 655000 - RNA, 19 nt, Artificial Sequence
  Description of Artificial Sequence: Synthetic oligonucleotide
  Sense strand starting at position 3144 of SEQ ID NO: 585628
ggcugugagaaauggccau

SEQ ID NO: 655001 - RNA, 19 nt, Artificial Sequence
  Description of Artificial Sequence: Synthetic oligonucleotide
  Antisense strand to SEQ ID NO: 655000
auggccauuucucacagcc

SEQ ID NO: 655002 - RNA, 19 nt, Artificial Sequence
  Description of Artificial Sequence: Synthetic oligonucleotide
  Sense strand starting at position 3235 of SEQ ID NO: 585628
gaggaaauguuacaauaug

SEQ ID NO: 655003 - RNA, 19 nt, Artificial Sequence
  Description of Artificial Sequence: Synthetic oligonucleotide
  Antisense strand to SEQ ID NO: 655002
cauauuguaacauuuccuc

SEQ ID NO: 655004 - RNA, 19 nt, Artificial Sequence
  Description of Artificial Sequence: Synthetic oligonucleotide
  Sense strand starting at position 3250 of SEQ ID NO: 585628
uauguagaugucugccaca

SEQ ID NO: 655005 - RNA, 19 nt, Artificial Sequence
  Description of Artificial Sequence: Synthetic oligonucleotide
  Antisense strand to SEQ ID NO: 655004
uguggcagacaucuacaua

SEQ ID NO: 655006 - RNA, 19 nt, Artificial Sequence
  Description of Artificial Sequence: Synthetic oligonucleotide
  Sense strand starting at position 3347 of SEQ ID NO: 585628
agaauacgacagugauucu

SEQ ID NO: 655007 - RNA, 19 nt, Artificial Sequence
  Description of Artificial Sequence: Synthetic oligonucleotide
  Antisense strand to SEQ ID NO: 655006
agaaucacugucguauucu

SEQ ID NO: 655008 - RNA, 19 nt, Artificial Sequence
  Description of Artificial Sequence: Synthetic oligonucleotide
  Sense strand starting at position 3354 of SEQ ID NO: 585628
gacagugauucugcauguu

SEQ ID NO: 655009 - RNA, 19 nt, Artificial Sequence
  Description of Artificial Sequence: Synthetic oligonucleotide
  Antisense strand to SEQ ID NO: 655008
aacaugcagaaucacuguc

SEQ ID NO: 655010 - RNA, 19 nt, Artificial Sequence
  Description of Artificial Sequence: Synthetic oligonucleotide
  Sense strand starting at position 3357 of SEQ ID NO: 585628
agugauucugcauguuccu

SEQ ID NO: 655011 - RNA, 19 nt, Artificial Sequence
  Description of Artificial Sequence: Synthetic oligonucleotide
  Antisense strand to SEQ ID NO: 655010
aggaacaugcagaaucacu

SEQ ID NO: 655012 - RNA, 19 nt, Artificial Sequence
  Description of Artificial Sequence: Synthetic oligonucleotide
  Sense strand starting at position 3504 of SEQ ID NO: 585628
ggaugucucuaacaaauaa

SEQ ID NO: 655013 - RNA, 19 nt, Artificial Sequence
  Description of Artificial Sequence: Synthetic oligonucleotide
  Antisense strand to SEQ ID NO: 655012
uuauuuguuagagacaucc

SEQ ID NO: 655014 - RNA, 19 nt, Artificial Sequence
  Description of Artificial Sequence: Synthetic oligonucleotide
  Sense strand starting at position 3612 of SEQ ID NO: 585628
aaggaauguuuaucaguuc

SEQ ID NO: 655015 - RNA, 19 nt, Artificial Sequence
  Description of Artificial Sequence: Synthetic oligonucleotide
  Antisense strand to SEQ ID NO: 655014
gaacugauaaacauuccuu

SEQ ID NO: 655016 - RNA, 19 nt, Artificial Sequence
  Description of Artificial Sequence: Synthetic oligonucleotide
  Sense strand starting at position 3619 of SEQ ID NO: 585628
guuuaucaguucuuuauuc

SEQ ID NO: 655017 - RNA, 19 nt, Artificial Sequence
  Description of Artificial Sequence: Synthetic oligonucleotide
  Antisense strand to SEQ ID NO: 655016
gaauaaagaacugauaaac

SEQ ID NO: 655018 - RNA, 19 nt, Artificial Sequence
  Description of Artificial Sequence: Synthetic oligonucleotide
  Sense strand starting at position 3688 of SEQ ID NO: 585628
ggaaauguuauauaugugu

SEQ ID NO: 655019 - RNA, 19 nt, Artificial Sequence
  Description of Artificial Sequence: Synthetic oligonucleotide
  Antisense strand to SEQ ID NO: 655018
acacauauauaacauuucc

SEQ ID NO: 655020 - RNA, 19 nt, Artificial Sequence
  Description of Artificial Sequence: Synthetic oligonucleotide
  Sense strand starting at position 3757 of SEQ ID NO: 585628
aagcaacugugcuuggaga

SEQ ID NO: 655021 - RNA, 19 nt, Artificial Sequence
  Description of Artificial Sequence: Synthetic oligonucleotide
  Antisense strand to SEQ ID NO: 655020
ucuccaagcacaguugcuu

SEQ ID NO: 655022 - RNA, 19 nt, Artificial Sequence
  Description of Artificial Sequence: Synthetic oligonucleotide
  Sense strand starting at position 3758 of SEQ ID NO: 585628
agcaacugugcuuggagau

SEQ ID NO: 655023 - RNA, 19 nt, Artificial Sequence
  Description of Artificial Sequence: Synthetic oligonucleotide
  Antisense strand to SEQ ID NO: 655022
aucuccaagcacaguugcu

SEQ ID NO: 655024 - RNA, 19 nt, Artificial Sequence
  Description of Artificial Sequence: Synthetic oligonucleotide
  Sense strand starting at position 3759 of SEQ ID NO: 585628
gcaacugugcuuggagauc

SEQ ID NO: 655025 - RNA, 19 nt, Artificial Sequence
  Description of Artificial Sequence: Synthetic oligonucleotide
  Antisense strand to SEQ ID NO: 655024
gaucuccaagcacaguugc

SEQ ID NO: 655026 - RNA, 19 nt, Artificial Sequence
  Description of Artificial Sequence: Synthetic oligonucleotide
  Sense strand starting at position 3779 of SEQ ID NO: 585628
acauaauauugaucuaggu

SEQ ID NO: 655027 - RNA, 19 nt, Artificial Sequence
  Description of Artificial Sequence: Synthetic oligonucleotide
  Antisense strand to SEQ ID NO: 655026
accuagaucaauauuaugu

SEQ ID NO: 655028 - RNA, 19 nt, Artificial Sequence
  Description of Artificial Sequence: Synthetic oligonucleotide
  Sense strand starting at position 317 of SEQ ID NO: 585629
acauaagagugccucauga

SEQ ID NO: 655029 - RNA, 19 nt, Artificial Sequence
  Description of Artificial Sequence: Synthetic oligonucleotide
  Antisense strand to SEQ ID NO: 655028
ucaugaggcacucuuaugu

SEQ ID NO: 655030 - RNA, 19 nt, Artificial Sequence
  Description of Artificial Sequence: Synthetic oligonucleotide
  Sense strand starting at position 376 of SEQ ID NO: 585629
ccugguuucugagcucuga

SEQ ID NO: 655031 - RNA, 19 nt, Artificial Sequence
  Description of Artificial Sequence: Synthetic oligonucleotide
  Antisense strand to SEQ ID NO: 655030
ucagagcucagaaaccagg

SEQ ID NO: 655032 - RNA, 19 nt, Artificial Sequence
  Description of Artificial Sequence: Synthetic oligonucleotide
  Sense strand starting at position 436 of SEQ ID NO: 585629
ucucuaaauuugccagguu

SEQ ID NO: 655033 - RNA, 19 nt, Artificial Sequence
  Description of Artificial Sequence: Synthetic oligonucleotide
  Antisense strand to SEQ ID NO: 655032
aaccuggcaaauuuagaga

SEQ ID NO: 655034 - RNA, 19 nt, Artificial Sequence
  Description of Artificial Sequence: Synthetic oligonucleotide
  Sense strand starting at position 439 of SEQ ID NO: 585629
cuaaauuugccagguucuu

SEQ ID NO: 655035 - RNA, 19 nt, Artificial Sequence
  Description of Artificial Sequence: Synthetic oligonucleotide
  Antisense strand to SEQ ID NO: 655034
aagaaccuggcaaauuuag

SEQ ID NO: 655036 - RNA, 19 nt, Artificial Sequence
  Description of Artificial Sequence: Synthetic oligonucleotide
  Sense strand starting at position 498 of SEQ ID NO: 585629
gcaacuaucuguucugaca

SEQ ID NO: 655037 - RNA, 19 nt, Artificial Sequence
  Description of Artificial Sequence: Synthetic oligonucleotide
  Antisense strand to SEQ ID NO: 655036
ugucagaacagauaguugc

SEQ ID NO: 655038 - RNA, 19 nt, Artificial Sequence
  Description of Artificial Sequence: Synthetic oligonucleotide
  Sense strand starting at position 810 of SEQ ID NO: 585629
agaucugccugcuccauau

SEQ ID NO: 655039 - RNA, 19 nt, Artificial Sequence
  Description of Artificial Sequence: Synthetic oligonucleotide
  Antisense strand to SEQ ID NO: 655038
auauggagcaggcagaucu

SEQ ID NO: 655040 - RNA, 19 nt, Artificial Sequence
  Description of Artificial Sequence: Synthetic oligonucleotide
  Sense strand starting at position 814 of SEQ ID NO: 585629
cugccugcuccauaugauc

SEQ ID NO: 655041 - RNA, 19 nt, Artificial Sequence
  Description of Artificial Sequence: Synthetic oligonucleotide
  Antisense strand to SEQ ID NO: 655040
gaucauauggagcaggcag

SEQ ID NO: 655042 - RNA, 19 nt, Artificial Sequence
  Description of Artificial Sequence: Synthetic oligonucleotide
  Sense strand starting at position 872 of SEQ ID NO: 585629
aucucaucaugucugcuua

SEQ ID NO: 655043 - RNA, 19 nt, Artificial Sequence
  Description of Artificial Sequence: Synthetic oligonucleotide
  Antisense strand to SEQ ID NO: 655042
uaagcagacaugaugagau

SEQ ID NO: 655044 - RNA, 19 nt, Artificial Sequence
  Description of Artificial Sequence: Synthetic oligonucleotide
  Sense strand starting at position 1085 of SEQ ID NO: 585629
agcacugauuuacagauca

SEQ ID NO: 655045 - RNA, 19 nt, Artificial Sequence
  Description of Artificial Sequence: Synthetic oligonucleotide
  Antisense strand to SEQ ID NO: 655044
ugaucuguaaaucagugcu

SEQ ID NO: 655046 - RNA, 19 nt, Artificial Sequence
  Description of Artificial Sequence: Synthetic oligonucleotide
  Sense strand starting at position 1131 of SEQ ID NO: 585629
uugccuaaacgguaacauu

SEQ ID NO: 655047 - RNA, 19 nt, Artificial Sequence
  Description of Artificial Sequence: Synthetic oligonucleotide
  Antisense strand to SEQ ID NO: 655046
aauguuaccguuuaggcaa

SEQ ID NO: 655048 - RNA, 19 nt, Artificial Sequence
  Description of Artificial Sequence: Synthetic oligonucleotide
  Sense strand starting at position 1473 of SEQ ID NO: 585629
acugaacaucuuugcagaa

SEQ ID NO: 655049 - RNA, 19 nt, Artificial Sequence
  Description of Artificial Sequence: Synthetic oligonucleotide
  Antisense strand to SEQ ID NO: 655048
uucugcaaagauguucagu

SEQ ID NO: 655050 - RNA, 19 nt, Artificial Sequence
  Description of Artificial Sequence: Synthetic oligonucleotide
  Sense strand starting at position 1505 of SEQ ID NO: 585629
gugucuaauuuggccugua

SEQ ID NO: 655051 - RNA, 19 nt, Artificial Sequence
  Description of Artificial Sequence: Synthetic oligonucleotide
  Antisense strand to SEQ ID NO: 655050
uacaggccaaauuagacac

SEQ ID NO: 655052 - RNA, 19 nt, Artificial Sequence
  Description of Artificial Sequence: Synthetic oligonucleotide
  Sense strand starting at position 1506 of SEQ ID NO: 585629
ugucuaauuuggccuguaa

SEQ ID NO: 655053 - RNA, 19 nt, Artificial Sequence
  Description of Artificial Sequence: Synthetic oligonucleotide
  Antisense strand to SEQ ID NO: 655052
uuacaggccaaauuagaca

SEQ ID NO: 655054 - RNA, 19 nt, Artificial Sequence
  Description of Artificial Sequence: Synthetic oligonucleotide
  Sense strand starting at position 1724 of SEQ ID NO: 585629
guaguauggaccuagagca

SEQ ID NO: 655055 - RNA, 19 nt, Artificial Sequence
  Description of Artificial Sequence: Synthetic oligonucleotide
  Antisense strand to SEQ ID NO: 655054
ugcucuagguccauacuac

SEQ ID NO: 655056 - RNA, 19 nt, Artificial Sequence
  Description of Artificial Sequence: Synthetic oligonucleotide
  Sense strand starting at position 2432 of SEQ ID NO: 585629
ggucuucgugcacacuaaa

SEQ ID NO: 655057 - RNA, 19 nt, Artificial Sequence
  Description of Artificial Sequence: Synthetic oligonucleotide
  Antisense strand to SEQ ID NO: 655056
uuuagugugcacgaagacc

SEQ ID NO: 655058 - RNA, 19 nt, Artificial Sequence
  Description of Artificial Sequence: Synthetic oligonucleotide
  Sense strand starting at position 2542 of SEQ ID NO: 585629
aagguauucuuggaacaag

SEQ ID NO: 655059 - RNA, 19 nt, Artificial Sequence
  Description of Artificial Sequence: Synthetic oligonucleotide
  Antisense strand to SEQ ID NO: 655058
cuuguuccaagaauaccuu

SEQ ID NO: 655060 - RNA, 19 nt, Artificial Sequence
  Description of Artificial Sequence: Synthetic oligonucleotide
  Sense strand starting at position 2545 of SEQ ID NO: 585629
guauucuuggaacaaguua

SEQ ID NO: 655061 - RNA, 19 nt, Artificial Sequence
  Description of Artificial Sequence: Synthetic oligonucleotide
  Antisense strand to SEQ ID NO: 655060
uaacuuguuccaagaauac

SEQ ID NO: 655062 - RNA, 19 nt, Artificial Sequence
  Description of Artificial Sequence: Synthetic oligonucleotide
  Sense strand starting at position 2626 of SEQ ID NO: 585629
acauacuauguguauaguu

SEQ ID NO: 655063 - RNA, 19 nt, Artificial Sequence
  Description of Artificial Sequence: Synthetic oligonucleotide
  Antisense strand to SEQ ID NO: 655062
aacuauacacauaguaugu

SEQ ID NO: 655064 - RNA, 19 nt, Artificial Sequence
  Description of Artificial Sequence: Synthetic oligonucleotide
  Sense strand starting at position 2693 of SEQ ID NO: 585629
agucuuugauagguaacau

SEQ ID NO: 655065 - RNA, 19 nt, Artificial Sequence
  Description of Artificial Sequence: Synthetic oligonucleotide
  Antisense strand to SEQ ID NO: 655064
auguuaccuaucaaagacu

SEQ ID NO: 655066 - RNA, 19 nt, Artificial Sequence
  Description of Artificial Sequence: Synthetic oligonucleotide
  Sense strand starting at position 2738 of SEQ ID NO: 585629
guagguuucccaggcuaga

SEQ ID NO: 655067 - RNA, 19 nt, Artificial Sequence
  Description of Artificial Sequence: Synthetic oligonucleotide
  Antisense strand to SEQ ID NO: 655066
ucuagccugggaaaccuac

SEQ ID NO: 655068 - RNA, 19 nt, Artificial Sequence
  Description of Artificial Sequence: Synthetic oligonucleotide
  Sense strand starting at position 2782 of SEQ ID NO: 585629
gcguucugagagcauauga

SEQ ID NO: 655069 - RNA, 19 nt, Artificial Sequence
  Description of Artificial Sequence: Synthetic oligonucleotide
  Antisense strand to SEQ ID NO: 655068
ucauaugcucucagaacgc

SEQ ID NO: 655070 - RNA, 19 nt, Artificial Sequence
  Description of Artificial Sequence: Synthetic oligonucleotide
  Sense strand starting at position 2812 of SEQ ID NO: 585629
guggcaugaucuguaguga

SEQ ID NO: 655071 - RNA, 19 nt, Artificial Sequence
  Description of Artificial Sequence: Synthetic oligonucleotide
  Antisense strand to SEQ ID NO: 655070
ucacuacagaucaugccac

SEQ ID NO: 655072 - RNA, 19 nt, Artificial Sequence
  Description of Artificial Sequence: Synthetic oligonucleotide
  Sense strand starting at position 2813 of SEQ ID NO: 585629
uggcaugaucuguagugau

SEQ ID NO: 655073 - RNA, 19 nt, Artificial Sequence
  Description of Artificial Sequence: Synthetic oligonucleotide
  Antisense strand to SEQ ID NO: 655072
aucacuacagaucaugcca

SEQ ID NO: 655074 - RNA, 19 nt, Artificial Sequence
  Description of Artificial Sequence: Synthetic oligonucleotide
  Sense strand starting at position 2865 of SEQ ID NO: 585629
gcccuaaacccugggauga

SEQ ID NO: 655075 - RNA, 19 nt, Artificial Sequence
  Description of Artificial Sequence: Synthetic oligonucleotide
  Antisense strand to SEQ ID NO: 655074
ucaucccaggguuuagggc

SEQ ID NO: 655076 - RNA, 19 nt, Artificial Sequence
  Description of Artificial Sequence: Synthetic oligonucleotide
  Sense strand starting at position 2949 of SEQ ID NO: 585629
gaggcucagcugugauuga

SEQ ID NO: 655077 - RNA, 19 nt, Artificial Sequence
  Description of Artificial Sequence: Synthetic oligonucleotide
  Antisense strand to SEQ ID NO: 655076
ucaaucacagcugagccuc

SEQ ID NO: 655078 - RNA, 19 nt, Artificial Sequence
  Description of Artificial Sequence: Synthetic oligonucleotide
  Sense strand starting at position 2992 of SEQ ID NO: 585629
aggcucuagcuucgaggau

SEQ ID NO: 655079 - RNA, 19 nt, Artificial Sequence
  Description of Artificial Sequence: Synthetic oligonucleotide
  Antisense strand to SEQ ID NO: 655078
auccucgaagcuagagccu

SEQ ID NO: 655080 - RNA, 19 nt, Artificial Sequence
  Description of Artificial Sequence: Synthetic oligonucleotide
  Sense strand starting at position 3091 of SEQ ID NO: 585629
uggagaguuccugggcaug

SEQ ID NO: 655081 - RNA, 19 nt, Artificial Sequence
  Description of Artificial Sequence: Synthetic oligonucleotide
  Antisense strand to SEQ ID NO: 655080
caugcccaggaacucucca

SEQ ID NO: 655082 - RNA, 19 nt, Artificial Sequence
  Description of Artificial Sequence: Synthetic oligonucleotide
  Sense strand starting at position 3093 of SEQ ID NO: 585629
gagaguuccugggcaugaa

SEQ ID NO: 655083 - RNA, 19 nt, Artificial Sequence
  Description of Artificial Sequence: Synthetic oligonucleotide
  Antisense strand to SEQ ID NO: 655082
uucaugcccaggaacucuc

SEQ ID NO: 655084 - RNA, 19 nt, Artificial Sequence
  Description of Artificial Sequence: Synthetic oligonucleotide
  Sense strand starting at position 3160 of SEQ ID NO: 585629
gauugaauccucugcaggu

SEQ ID NO: 655085 - RNA, 19 nt, Artificial Sequence
  Description of Artificial Sequence: Synthetic oligonucleotide
  Antisense strand to SEQ ID NO: 655084
accugcagaggauucaauc

SEQ ID NO: 655086 - RNA, 19 nt, Artificial Sequence
  Description of Artificial Sequence: Synthetic oligonucleotide
  Sense strand starting at position 3161 of SEQ ID NO: 585629
auugaauccucugcaggua

SEQ ID NO: 655087 - RNA, 19 nt, Artificial Sequence
  Description of Artificial Sequence: Synthetic oligonucleotide
  Antisense strand to SEQ ID NO: 655086
uaccugcagaggauucaau

SEQ ID NO: 655088 - RNA, 19 nt, Artificial Sequence
  Description of Artificial Sequence: Synthetic oligonucleotide
  Sense strand starting at position 3164 of SEQ ID NO: 585629
gaauccucugcagguagaa

SEQ ID NO: 655089 - RNA, 19 nt, Artificial Sequence
  Description of Artificial Sequence: Synthetic oligonucleotide
  Antisense strand to SEQ ID NO: 655088
uucuaccugcagaggauuc

SEQ ID NO: 655090 - RNA, 19 nt, Artificial Sequence
  Description of Artificial Sequence: Synthetic oligonucleotide
  Sense strand starting at position 3182 of SEQ ID NO: 585629
aaaguagaccuagguaugu

SEQ ID NO: 655091 - RNA, 19 nt, Artificial Sequence
  Description of Artificial Sequence: Synthetic oligonucleotide
  Antisense strand to SEQ ID NO: 655090
acauaccuaggucuacuuu

SEQ ID NO: 655092 - RNA, 19 nt, Artificial Sequence
  Description of Artificial Sequence: Synthetic oligonucleotide
  Sense strand starting at position 3192 of SEQ ID NO: 585629
uagguaugucccguguucu

SEQ ID NO: 655093 - RNA, 19 nt, Artificial Sequence
  Description of Artificial Sequence: Synthetic oligonucleotide
  Antisense strand to SEQ ID NO: 655092
agaacacgggacauaccua

SEQ ID NO: 655094 - RNA, 19 nt, Artificial Sequence
  Description of Artificial Sequence: Synthetic oligonucleotide
  Sense strand starting at position 3195 of SEQ ID NO: 585629
guaugucccguguucugga

SEQ ID NO: 655095 - RNA, 19 nt, Artificial Sequence
  Description of Artificial Sequence: Synthetic oligonucleotide
  Antisense strand to SEQ ID NO: 655094
uccagaacacgggacauac

SEQ ID NO: 655096 - RNA, 19 nt, Artificial Sequence
  Description of Artificial Sequence: Synthetic oligonucleotide
  Sense strand starting at position 3246 of SEQ ID NO: 585629
caguuagaaccauguagaa

SEQ ID NO: 655097 - RNA, 19 nt, Artificial Sequence
  Description of Artificial Sequence: Synthetic oligonucleotide
  Antisense strand to SEQ ID NO: 655096
uucuacaugguucuaacug

SEQ ID NO: 655098 - RNA, 19 nt, Artificial Sequence
  Description of Artificial Sequence: Synthetic oligonucleotide
  Sense strand starting at position 3447 of SEQ ID NO: 585629
ugaggagccuucucuugaa

SEQ ID NO: 655099 - RNA, 19 nt, Artificial Sequence
  Description of Artificial Sequence: Synthetic oligonucleotide
  Antisense strand to SEQ ID NO: 655098
uucaagagaaggcuccuca

SEQ ID NO: 655100 - RNA, 19 nt, Artificial Sequence
  Description of Artificial Sequence: Synthetic oligonucleotide
  Sense strand starting at position 3454 of SEQ ID NO: 585629
ccuucucuugaagaagcuu

SEQ ID NO: 655101 - RNA, 19 nt, Artificial Sequence
  Description of Artificial Sequence: Synthetic oligonucleotide
  Antisense strand to SEQ ID NO: 655100
aagcuucuucaagagaagg

SEQ ID NO: 655102 - RNA, 19 nt, Artificial Sequence
  Description of Artificial Sequence: Synthetic oligonucleotide
  Sense strand starting at position 3462 of SEQ ID NO: 585629
ugaagaagcuucccuccua

SEQ ID NO: 655103 - RNA, 19 nt, Artificial Sequence
  Description of Artificial Sequence: Synthetic oligonucleotide
  Antisense strand to SEQ ID NO: 655102
uaggagggaagcuucuuca

SEQ ID NO: 655104 - RNA, 19 nt, Artificial Sequence
  Description of Artificial Sequence: Synthetic oligonucleotide
  Sense strand starting at position 3572 of SEQ ID NO: 585629
ugcaccugucacugaaaca

SEQ ID NO: 655105 - RNA, 19 nt, Artificial Sequence
  Description of Artificial Sequence: Synthetic oligonucleotide
  Antisense strand to SEQ ID NO: 655104
uguuucagugacaggugca

SEQ ID NO: 655106 - RNA, 19 nt, Artificial Sequence
  Description of Artificial Sequence: Synthetic oligonucleotide
  Sense strand starting at position 3727 of SEQ ID NO: 585629
ccuauagaacucugugcuu

SEQ ID NO: 655107 - RNA, 19 nt, Artificial Sequence
  Description of Artificial Sequence: Synthetic oligonucleotide
  Antisense strand to SEQ ID NO: 655106
aagcacagaguucuauagg

SEQ ID NO: 655108 - RNA, 19 nt, Artificial Sequence
  Description of Artificial Sequence: Synthetic oligonucleotide
  Sense strand starting at position 107 of SEQ ID NO: 585630
uggguagaagcaugaguaa

SEQ ID NO: 655109 - RNA, 19 nt, Artificial Sequence
  Description of Artificial Sequence: Synthetic oligonucleotide
  Antisense strand to SEQ ID NO: 655108
uuacucaugcuucuaccca

SEQ ID NO: 655110 - RNA, 19 nt, Artificial Sequence
  Description of Artificial Sequence: Synthetic oligonucleotide
  Sense strand starting at position 110 of SEQ ID NO: 585630
guagaagcaugaguaaaug

SEQ ID NO: 655111 - RNA, 19 nt, Artificial Sequence
  Description of Artificial Sequence: Synthetic oligonucleotide
  Antisense strand to SEQ ID NO: 655110
cauuuacucaugcuucuac

SEQ ID NO: 655112 - RNA, 19 nt, Artificial Sequence
  Description of Artificial Sequence: Synthetic oligonucleotide
  Sense strand starting at position 158 of SEQ ID NO: 585630
gcuaucaugggcguaguuu

SEQ ID NO: 655113 - RNA, 19 nt, Artificial Sequence
  Description of Artificial Sequence: Synthetic oligonucleotide
  Antisense strand to SEQ ID NO: 655112
aaacuacgcccaugauagc

SEQ ID NO: 655114 - RNA, 19 nt, Artificial Sequence
  Description of Artificial Sequence: Synthetic oligonucleotide
  Sense strand starting at position 195 of SEQ ID NO: 585630
caaagauaggcuugaaggu

SEQ ID NO: 655115 - RNA, 19 nt, Artificial Sequence
  Description of Artificial Sequence: Synthetic oligonucleotide
  Antisense strand to SEQ ID NO: 655114
accuucaagccuaucuuug

SEQ ID NO: 655116 - RNA, 19 nt, Artificial Sequence
  Description of Artificial Sequence: Synthetic oligonucleotide
  Sense strand starting at position 216 of SEQ ID NO: 585630
gaguuaagguacccugaau

SEQ ID NO: 655117 - RNA, 19 nt, Artificial Sequence
  Description of Artificial Sequence: Synthetic oligonucleotide
  Antisense strand to SEQ ID NO: 655116
auucaggguaccuuaacuc

SEQ ID NO: 655118 - RNA, 19 nt, Artificial Sequence
  Description of Artificial Sequence: Synthetic oligonucleotide
  Sense strand starting at position 263 of SEQ ID NO: 585630
gcagcugugacugaaauuc

SEQ ID NO: 655119 - RNA, 19 nt, Artificial Sequence
  Description of Artificial Sequence: Synthetic oligonucleotide
  Antisense strand to SEQ ID NO: 655118
gaauuucagucacagcugc

SEQ ID NO: 655120 - RNA, 19 nt, Artificial Sequence
  Description of Artificial Sequence: Synthetic oligonucleotide
  Sense strand starting at position 368 of SEQ ID NO: 585630
ggugcagaugcagaaagau

SEQ ID NO: 655121 - RNA, 19 nt, Artificial Sequence
  Description of Artificial Sequence: Synthetic oligonucleotide
  Antisense strand to SEQ ID NO: 655120
aucuuucugcaucugcacc

SEQ ID NO: 655122 - RNA, 19 nt, Artificial Sequence
  Description of Artificial Sequence: Synthetic oligonucleotide
  Sense strand starting at position 376 of SEQ ID NO: 585630
ugcagaaagaugggauguu

SEQ ID NO: 655123 - RNA, 19 nt, Artificial Sequence
  Description of Artificial Sequence: Synthetic oligonucleotide
  Antisense strand to SEQ ID NO: 655122
aacaucccaucuuucugca

SEQ ID NO: 655124 - RNA, 19 nt, Artificial Sequence
  Description of Artificial Sequence: Synthetic oligonucleotide
  Sense strand starting at position 411 of SEQ ID NO: 585630
caagcaaaguacuuuggau

SEQ ID NO: 655125 - RNA, 19 nt, Artificial Sequence
  Description of Artificial Sequence: Synthetic oligonucleotide
  Antisense strand to SEQ ID NO: 655124
auccaaaguacuuugcuug

SEQ ID NO: 655126 - RNA, 19 nt, Artificial Sequence
  Description of Artificial Sequence: Synthetic oligonucleotide
  Sense strand starting at position 556 of SEQ ID NO: 585630
gggcuuugagucuggagag

SEQ ID NO: 655127 - RNA, 19 nt, Artificial Sequence
  Description of Artificial Sequence: Synthetic oligonucleotide
  Antisense strand to SEQ ID NO: 655126
cucuccagacucaaagccc

SEQ ID NO: 655128 - RNA, 19 nt, Artificial Sequence
  Description of Artificial Sequence: Synthetic oligonucleotide
  Sense strand starting at position 731 of SEQ ID NO: 585630
ggauuugcucccuggguua

SEQ ID NO: 655129 - RNA, 19 nt, Artificial Sequence
  Description of Artificial Sequence: Synthetic oligonucleotide
  Antisense strand to SEQ ID NO: 655128
uaacccagggagcaaaucc

SEQ ID NO: 655130 - RNA, 19 nt, Artificial Sequence
  Description of Artificial Sequence: Synthetic oligonucleotide
  Sense strand starting at position 747 of SEQ ID NO: 585630
uuagaucuguuucugaaga

SEQ ID NO: 655131 - RNA, 19 nt, Artificial Sequence
  Description of Artificial Sequence: Synthetic oligonucleotide
  Antisense strand to SEQ ID NO: 655130
ucuucagaaacagaucuaa

SEQ ID NO: 655132 - RNA, 19 nt, Artificial Sequence
  Description of Artificial Sequence: Synthetic oligonucleotide
  Sense strand starting at position 812 of SEQ ID NO: 585630
gggaaagggucuguguuga

SEQ ID NO: 655133 - RNA, 19 nt, Artificial Sequence
  Description of Artificial Sequence: Synthetic oligonucleotide
  Antisense strand to SEQ ID NO: 655132
ucaacacagacccuuuccc

SEQ ID NO: 655134 - RNA, 19 nt, Artificial Sequence
  Description of Artificial Sequence: Synthetic oligonucleotide
  Sense strand starting at position 945 of SEQ ID NO: 585630
ccagguucucagggcuaga

SEQ ID NO: 655135 - RNA, 19 nt, Artificial Sequence
  Description of Artificial Sequence: Synthetic oligonucleotide
  Antisense strand to SEQ ID NO: 655134
ucuagcccugagaaccugg

SEQ ID NO: 655136 - RNA, 19 nt, Artificial Sequence
  Description of Artificial Sequence: Synthetic oligonucleotide
  Sense strand starting at position 1027 of SEQ ID NO: 585630
aucugauaccagugggacu

SEQ ID NO: 655137 - RNA, 19 nt, Artificial Sequence
  Description of Artificial Sequence: Synthetic oligonucleotide
  Antisense strand to SEQ ID NO: 655136
agucccacugguaucagau

SEQ ID NO: 655138 - RNA, 19 nt, Artificial Sequence
  Description of Artificial Sequence: Synthetic oligonucleotide
  Sense strand starting at position 1093 of SEQ ID NO: 585630
uggugucucgaaugauaca

SEQ ID NO: 655139 - RNA, 19 nt, Artificial Sequence
  Description of Artificial Sequence: Synthetic oligonucleotide
  Antisense strand to SEQ ID NO: 655138
uguaucauucgagacacca

SEQ ID NO: 655140 - RNA, 19 nt, Artificial Sequence
  Description of Artificial Sequence: Synthetic oligonucleotide
  Sense strand starting at position 1114 of SEQ ID NO: 585630
gggaacacuucucuuccaa

SEQ ID NO: 655141 - RNA, 19 nt, Artificial Sequence
  Description of Artificial Sequence: Synthetic oligonucleotide
  Antisense strand to SEQ ID NO: 655140
uuggaagagaaguguuccc

SEQ ID NO: 655142 - RNA, 19 nt, Artificial Sequence
  Description of Artificial Sequence: Synthetic oligonucleotide
  Sense strand starting at position 1126 of SEQ ID NO: 585630
cuuccaagggucugagaaa

SEQ ID NO: 655143 - RNA, 19 nt, Artificial Sequence
  Description of Artificial Sequence: Synthetic oligonucleotide
  Antisense strand to SEQ ID NO: 655142
uuucucagacccuuggaag

SEQ ID NO: 655144 - RNA, 19 nt, Artificial Sequence
  Description of Artificial Sequence: Synthetic oligonucleotide
  Sense strand starting at position 1567 of SEQ ID NO: 585630
aggagugauccugaugguc

SEQ ID NO: 655145 - RNA, 19 nt, Artificial Sequence
  Description of Artificial Sequence: Synthetic oligonucleotide
  Antisense strand to SEQ ID NO: 655144
gaccaucaggaucacuccu

SEQ ID NO: 655146 - RNA, 19 nt, Artificial Sequence
  Description of Artificial Sequence: Synthetic oligonucleotide
  Sense strand starting at position 1624 of SEQ ID NO: 585630
aauaguccgcuuuaaguaa

SEQ ID NO: 655147 - RNA, 19 nt, Artificial Sequence
  Description of Artificial Sequence: Synthetic oligonucleotide
  Antisense strand to SEQ ID NO: 655146
uuacuuaaagcggacuauu

SEQ ID NO: 655148 - RNA, 19 nt, Artificial Sequence
  Description of Artificial Sequence: Synthetic oligonucleotide
  Sense strand starting at position 1817 of SEQ ID NO: 585630
acccgaugaacuuggugaa

SEQ ID NO: 655149 - RNA, 19 nt, Artificial Sequence
  Description of Artificial Sequence: Synthetic oligonucleotide
  Antisense strand to SEQ ID NO: 655148
uucaccaaguucaucgggu

SEQ ID NO: 655150 - RNA, 19 nt, Artificial Sequence
  Description of Artificial Sequence: Synthetic oligonucleotide
  Sense strand starting at position 1905 of SEQ ID NO: 585630
gcgaaaguuccaguuugcu

SEQ ID NO: 655151 - RNA, 19 nt, Artificial Sequence
  Description of Artificial Sequence: Synthetic oligonucleotide
  Antisense strand to SEQ ID NO: 655150
agcaaacuggaacuuucgc

SEQ ID NO: 655152 - RNA, 19 nt, Artificial Sequence
  Description of Artificial Sequence: Synthetic oligonucleotide
  Sense strand starting at position 1915 of SEQ ID NO: 585630
caguuugcucaggaaacug

SEQ ID NO: 655153 - RNA, 19 nt, Artificial Sequence
  Description of Artificial Sequence: Synthetic oligonucleotide
  Antisense strand to SEQ ID NO: 655152
caguuuccugagcaaacug

SEQ ID NO: 655154 - RNA, 19 nt, Artificial Sequence
  Description of Artificial Sequence: Synthetic oligonucleotide
  Sense strand starting at position 2050 of SEQ ID NO: 585630
ggauucacgcgcuaggaaa

SEQ ID NO: 655155 - RNA, 19 nt, Artificial Sequence
  Description of Artificial Sequence: Synthetic oligonucleotide
  Antisense strand to SEQ ID NO: 655154
uuuccuagcgcgugaaucc

SEQ ID NO: 655156 - RNA, 19 nt, Artificial Sequence
  Description of Artificial Sequence: Synthetic oligonucleotide
  Sense strand starting at position 2363 of SEQ ID NO: 585630
gacuauuacuggccucgaa

SEQ ID NO: 655157 - RNA, 19 nt, Artificial Sequence
  Description of Artificial Sequence: Synthetic oligonucleotide
  Antisense strand to SEQ ID NO: 655156
uucgaggccaguaauaguc

SEQ ID NO: 655158 - RNA, 19 nt, Artificial Sequence
  Description of Artificial Sequence: Synthetic oligonucleotide
  Sense strand starting at position 2367 of SEQ ID NO: 585630
auuacuggccucgaaggua

SEQ ID NO: 655159 - RNA, 19 nt, Artificial Sequence
  Description of Artificial Sequence: Synthetic oligonucleotide
  Antisense strand to SEQ ID NO: 655158
uaccuucgaggccaguaau

SEQ ID NO: 655160 - RNA, 19 nt, Artificial Sequence
  Description of Artificial Sequence: Synthetic oligonucleotide
  Sense strand starting at position 2579 of SEQ ID NO: 585630
gauugaggauuuccgcguu

SEQ ID NO: 655161 - RNA, 19 nt, Artificial Sequence
  Description of Artificial Sequence: Synthetic oligonucleotide
  Antisense strand to SEQ ID NO: 655160
aacgcggaaauccucaauc

SEQ ID NO: 655162 - RNA, 19 nt, Artificial Sequence
  Description of Artificial Sequence: Synthetic oligonucleotide
  Sense strand starting at position 2582 of SEQ ID NO: 585630
ugaggauuuccgcguuucu

SEQ ID NO: 655163 - RNA, 19 nt, Artificial Sequence
  Description of Artificial Sequence: Synthetic oligonucleotide
  Antisense strand to SEQ ID NO: 655162
agaaacgcggaaauccuca

SEQ ID NO: 655164 - RNA, 19 nt, Artificial Sequence
  Description of Artificial Sequence: Synthetic oligonucleotide
  Sense strand starting at position 2634 of SEQ ID NO: 585630
gucagucauuugccgcaca

SEQ ID NO: 655165 - RNA, 19 nt, Artificial Sequence
  Description of Artificial Sequence: Synthetic oligonucleotide
  Antisense strand to SEQ ID NO: 655164
ugugcggcaaaugacugac

SEQ ID NO: 655166 - RNA, 19 nt, Artificial Sequence
  Description of Artificial Sequence: Synthetic oligonucleotide
  Sense strand starting at position 2705 of SEQ ID NO: 585630
ccuauucgcacuuggagaa

SEQ ID NO: 655167 - RNA, 19 nt, Artificial Sequence
  Description of Artificial Sequence: Synthetic oligonucleotide
  Antisense strand to SEQ ID NO: 655166
uucuccaagugcgaauagg

SEQ ID NO: 655168 - RNA, 19 nt, Artificial Sequence
  Description of Artificial Sequence: Synthetic oligonucleotide
  Sense strand starting at position 3047 of SEQ ID NO: 585630
gcagaugguaaacaguaua

SEQ ID NO: 655169 - RNA, 19 nt, Artificial Sequence
  Description of Artificial Sequence: Synthetic oligonucleotide
  Antisense strand to SEQ ID NO: 655168
uauacuguuuaccaucugc

SEQ ID NO: 655170 - RNA, 19 nt, Artificial Sequence
  Description of Artificial Sequence: Synthetic oligonucleotide
  Sense strand starting at position 3085 of SEQ ID NO: 585630
ugacauaugcuauauguca

SEQ ID NO: 655171 - RNA, 19 nt, Artificial Sequence
  Description of Artificial Sequence: Synthetic oligonucleotide
  Antisense strand to SEQ ID NO: 655170
ugacauauagcauauguca

SEQ ID NO: 655172 - RNA, 19 nt, Artificial Sequence
  Description of Artificial Sequence: Synthetic oligonucleotide
  Sense strand starting at position 3327 of SEQ ID NO: 585630
auggcaauuucuuacaaag

SEQ ID NO: 655173 - RNA, 19 nt, Artificial Sequence
  Description of Artificial Sequence: Synthetic oligonucleotide
  Antisense strand to SEQ ID NO: 655172
cuuuguaagaaauugccau

SEQ ID NO: 655174 - RNA, 19 nt, Artificial Sequence
  Description of Artificial Sequence: Synthetic oligonucleotide
  Sense strand starting at position 3396 of SEQ ID NO: 585630
uccaaaugagcuuaaagug

SEQ ID NO: 655175 - RNA, 19 nt, Artificial Sequence
  Description of Artificial Sequence: Synthetic oligonucleotide
  Antisense strand to SEQ ID NO: 655174
cacuuuaagcucauuugga

SEQ ID NO: 655176 - RNA, 19 nt, Artificial Sequence
  Description of Artificial Sequence: Synthetic oligonucleotide
  Sense strand starting at position 3401 of SEQ ID NO: 585630
augagcuuaaagugaaugu

SEQ ID NO: 655177 - RNA, 19 nt, Artificial Sequence
  Description of Artificial Sequence: Synthetic oligonucleotide
  Antisense strand to SEQ ID NO: 655176
acauucacuuuaagcucau

SEQ ID NO: 655178 - RNA, 19 nt, Artificial Sequence
  Description of Artificial Sequence: Synthetic oligonucleotide
  Sense strand starting at position 3425 of SEQ ID NO: 585630
uaaggaccugcaugugaau

SEQ ID NO: 655179 - RNA, 19 nt, Artificial Sequence
  Description of Artificial Sequence: Synthetic oligonucleotide
  Antisense strand to SEQ ID NO: 655178
auucacaugcagguccuua

SEQ ID NO: 655180 - RNA, 19 nt, Artificial Sequence
  Description of Artificial Sequence: Synthetic oligonucleotide
  Sense strand starting at position 3434 of SEQ ID NO: 585630
gcaugugaauguuuauaga

SEQ ID NO: 655181 - RNA, 19 nt, Artificial Sequence
  Description of Artificial Sequence: Synthetic oligonucleotide
  Antisense strand to SEQ ID NO: 655180
ucuauaaacauucacaugc

SEQ ID NO: 655182 - RNA, 19 nt, Artificial Sequence
  Description of Artificial Sequence: Synthetic oligonucleotide
  Sense strand starting at position 3607 of SEQ ID NO: 585630
ccauauugcuaagugaaug

SEQ ID NO: 655183 - RNA, 19 nt, Artificial Sequence
  Description of Artificial Sequence: Synthetic oligonucleotide
  Antisense strand to SEQ ID NO: 655182
cauucacuuagcaauaugg

SEQ ID NO: 655184 - RNA, 19 nt, Artificial Sequence
  Description of Artificial Sequence: Synthetic oligonucleotide
  Sense strand starting at position 3728 of SEQ ID NO: 585630
gugguaaagaaauguggga

SEQ ID NO: 655185 - RNA, 19 nt, Artificial Sequence
  Description of Artificial Sequence: Synthetic oligonucleotide
  Antisense strand to SEQ ID NO: 655184
ucccacauuucuuuaccac

SEQ ID NO: 655186 - RNA, 19 nt, Artificial Sequence
  Description of Artificial Sequence: Synthetic oligonucleotide
  Sense strand starting at position 3741 of SEQ ID NO: 585630
gugggauaccauuaagcac

SEQ ID NO: 655187 - RNA, 19 nt, Artificial Sequence
  Description of Artificial Sequence: Synthetic oligonucleotide
  Antisense strand to SEQ ID NO: 655186
gugcuuaaugguaucccac

SEQ ID NO: 655188 - RNA, 19 nt, Artificial Sequence
  Description of Artificial Sequence: Synthetic oligonucleotide
  Sense strand starting at position 53 of SEQ ID NO: 585631
aaucgaaucggugauucga

SEQ ID NO: 655189 - RNA, 19 nt, Artificial Sequence
  Description of Artificial Sequence: Synthetic oligonucleotide
  Antisense strand to SEQ ID NO: 655188
ucgaaucaccgauucgauu

SEQ ID NO: 655190 - RNA, 19 nt, Artificial Sequence
  Description of Artificial Sequence: Synthetic oligonucleotide
  Sense strand starting at position 62 of SEQ ID NO: 585631
ggugauucgauauacucuu

SEQ ID NO: 655191 - RNA, 19 nt, Artificial Sequence
  Description of Artificial Sequence: Synthetic oligonucleotide
  Antisense strand to SEQ ID NO: 655190
aagaguauaucgaaucacc

SEQ ID NO: 655192 - RNA, 19 nt, Artificial Sequence
  Description of Artificial Sequence: Synthetic oligonucleotide
  Sense strand starting at position 212 of SEQ ID NO: 585631
ugaaauuucuugccugcca

SEQ ID NO: 655193 - RNA, 19 nt, Artificial Sequence
  Description of Artificial Sequence: Synthetic oligonucleotide
  Antisense strand to SEQ ID NO: 655192
uggcaggcaagaaauuuca

SEQ ID NO: 655194 - RNA, 19 nt, Artificial Sequence
  Description of Artificial Sequence: Synthetic oligonucleotide
  Sense strand starting at position 232 of SEQ ID NO: 585631
guugcuuauguguuaugcu

SEQ ID NO: 655195 - RNA, 19 nt, Artificial Sequence
  Description of Artificial Sequence: Synthetic oligonucleotide
  Antisense strand to SEQ ID NO: 655194
agcauaacacauaagcaac

SEQ ID NO: 655196 - RNA, 19 nt, Artificial Sequence
  Description of Artificial Sequence: Synthetic oligonucleotide
  Sense strand starting at position 239 of SEQ ID NO: 585631
auguguuaugcucacauac

SEQ ID NO: 655197 - RNA, 19 nt, Artificial Sequence
  Description of Artificial Sequence: Synthetic oligonucleotide
  Antisense strand to SEQ ID NO: 655196
guaugugagcauaacacau

SEQ ID NO: 655198 - RNA, 19 nt, Artificial Sequence
  Description of Artificial Sequence: Synthetic oligonucleotide
  Sense strand starting at position 280 of SEQ ID NO: 585631
ucuuaauucuuccuggaga

SEQ ID NO: 655199 - RNA, 19 nt, Artificial Sequence
  Description of Artificial Sequence: Synthetic oligonucleotide
  Antisense strand to SEQ ID NO: 655198
ucuccaggaagaauuaaga

SEQ ID NO: 655200 - RNA, 19 nt, Artificial Sequence
  Description of Artificial Sequence: Synthetic oligonucleotide
  Sense strand starting at position 282 of SEQ ID NO: 585631
uuaauucuuccuggagacu

SEQ ID NO: 655201 - RNA, 19 nt, Artificial Sequence
  Description of Artificial Sequence: Synthetic oligonucleotide
  Antisense strand to SEQ ID NO: 655200
agucuccaggaagaauuaa

SEQ ID NO: 655202 - RNA, 19 nt, Artificial Sequence
  Description of Artificial Sequence: Synthetic oligonucleotide
  Sense strand starting at position 316 of SEQ ID NO: 585631
ggcaucagugcucuagugu

SEQ ID NO: 655203 - RNA, 19 nt, Artificial Sequence
  Description of Artificial Sequence: Synthetic oligonucleotide
  Antisense strand to SEQ ID NO: 655202
acacuagagcacugaugcc

SEQ ID NO: 655204 - RNA, 19 nt, Artificial Sequence
  Description of Artificial Sequence: Synthetic oligonucleotide
  Sense strand starting at position 377 of SEQ ID NO: 585631
uuuguuucccaugacacau

SEQ ID NO: 655205 - RNA, 19 nt, Artificial Sequence
  Description of Artificial Sequence: Synthetic oligonucleotide
  Antisense strand to SEQ ID NO: 655204
augugucaugggaaacaaa

SEQ ID NO: 655206 - RNA, 19 nt, Artificial Sequence
  Description of Artificial Sequence: Synthetic oligonucleotide
  Sense strand starting at position 919 of SEQ ID NO: 585631
gcaguuuguaggcuugcaa

SEQ ID NO: 655207 - RNA, 19 nt, Artificial Sequence
  Description of Artificial Sequence: Synthetic oligonucleotide
  Antisense strand to SEQ ID NO: 655206
uugcaagccuacaaacugc

SEQ ID NO: 655208 - RNA, 19 nt, Artificial Sequence
  Description of Artificial Sequence: Synthetic oligonucleotide
  Sense strand starting at position 983 of SEQ ID NO: 585631
caacgaaguuuaguaaauc

SEQ ID NO: 655209 - RNA, 19 nt, Artificial Sequence
  Description of Artificial Sequence: Synthetic oligonucleotide
  Antisense strand to SEQ ID NO: 655208
gauuuacuaaacuucguug

SEQ ID NO: 655210 - RNA, 19 nt, Artificial Sequence
  Description of Artificial Sequence: Synthetic oligonucleotide
  Sense strand starting at position 1301 of SEQ ID NO: 585631
cugugagaacagugugaga

SEQ ID NO: 655211 - RNA, 19 nt, Artificial Sequence
  Description of Artificial Sequence: Synthetic oligonucleotide
  Antisense strand to SEQ ID NO: 655210
ucucacacuguucucacag

SEQ ID NO: 655212 - RNA, 19 nt, Artificial Sequence
  Description of Artificial Sequence: Synthetic oligonucleotide
  Sense strand starting at position 1515 of SEQ ID NO: 585631
ggaggaauauucgcccaga

SEQ ID NO: 655213 - RNA, 19 nt, Artificial Sequence
  Description of Artificial Sequence: Synthetic oligonucleotide
  Antisense strand to SEQ ID NO: 655212
ucugggcgaauauuccucc

SEQ ID NO: 655214 - RNA, 19 nt, Artificial Sequence
  Description of Artificial Sequence: Synthetic oligonucleotide
  Sense strand starting at position 1516 of SEQ ID NO: 585631
gaggaauauucgcccagaa

SEQ ID NO: 655215 - RNA, 19 nt, Artificial Sequence
  Description of Artificial Sequence: Synthetic oligonucleotide
  Antisense strand to SEQ ID NO: 655214
uucugggcgaauauuccuc

SEQ ID NO: 655216 - RNA, 19 nt, Artificial Sequence
  Description of Artificial Sequence: Synthetic oligonucleotide
  Sense strand starting at position 1518 of SEQ ID NO: 585631
ggaauauucgcccagaagc

SEQ ID NO: 655217 - RNA, 19 nt, Artificial Sequence
  Description of Artificial Sequence: Synthetic oligonucleotide
  Antisense strand to SEQ ID NO: 655216
gcuucugggcgaauauucc

SEQ ID NO: 655218 - RNA, 19 nt, Artificial Sequence
  Description of Artificial Sequence: Synthetic oligonucleotide
  Sense strand starting at position 2335 of SEQ ID NO: 585631
agagguaaaucaccauagu

SEQ ID NO: 655219 - RNA, 19 nt, Artificial Sequence
  Description of Artificial Sequence: Synthetic oligonucleotide
  Antisense strand to SEQ ID NO: 655218
acuauggugauuuaccucu

SEQ ID NO: 655220 - RNA, 19 nt, Artificial Sequence
  Description of Artificial Sequence: Synthetic oligonucleotide
  Sense strand starting at position 2361 of SEQ ID NO: 585631
ggaauauuaggguguauug

SEQ ID NO: 655221 - RNA, 19 nt, Artificial Sequence
  Description of Artificial Sequence: Synthetic oligonucleotide
  Antisense strand to SEQ ID NO: 655220
caauacacccuaauauucc

SEQ ID NO: 655222 - RNA, 19 nt, Artificial Sequence
  Description of Artificial Sequence: Synthetic oligonucleotide
  Sense strand starting at position 2534 of SEQ ID NO: 585631
aaagcuuaggauugcagau

SEQ ID NO: 655223 - RNA, 19 nt, Artificial Sequence
  Description of Artificial Sequence: Synthetic oligonucleotide
  Antisense strand to SEQ ID NO: 655222
aucugcaauccuaagcuuu

SEQ ID NO: 655224 - RNA, 19 nt, Artificial Sequence
  Description of Artificial Sequence: Synthetic oligonucleotide
  Sense strand starting at position 2818 of SEQ ID NO: 585631
guuggugacgaccaguaaa

SEQ ID NO: 655225 - RNA, 19 nt, Artificial Sequence
  Description of Artificial Sequence: Synthetic oligonucleotide
  Antisense strand to SEQ ID NO: 655224
uuuacuggucgucaccaac

SEQ ID NO: 655226 - RNA, 19 nt, Artificial Sequence
  Description of Artificial Sequence: Synthetic oligonucleotide
  Sense strand starting at position 2850 of SEQ ID NO: 585631
uuaagaaugucaucuccug

SEQ ID NO: 655227 - RNA, 19 nt, Artificial Sequence
  Description of Artificial Sequence: Synthetic oligonucleotide
  Antisense strand to SEQ ID NO: 655226
caggagaugacauucuuaa

SEQ ID NO: 655228 - RNA, 19 nt, Artificial Sequence
  Description of Artificial Sequence: Synthetic oligonucleotide
  Sense strand starting at position 2923 of SEQ ID NO: 585631
acaagaauuuauugagcaa

SEQ ID NO: 655229 - RNA, 19 nt, Artificial Sequence
  Description of Artificial Sequence: Synthetic oligonucleotide
  Antisense strand to SEQ ID NO: 655228
uugcucaauaaauucuugu

SEQ ID NO: 655230 - RNA, 19 nt, Artificial Sequence
  Description of Artificial Sequence: Synthetic oligonucleotide
  Sense strand starting at position 3152 of SEQ ID NO: 585631
ggauguaguccauagugug

SEQ ID NO: 655231 - RNA, 19 nt, Artificial Sequence
  Description of Artificial Sequence: Synthetic oligonucleotide
  Antisense strand to SEQ ID NO: 655230
cacacuauggacuacaucc

SEQ ID NO: 655232 - RNA, 19 nt, Artificial Sequence
  Description of Artificial Sequence: Synthetic oligonucleotide
  Sense strand starting at position 3246 of SEQ ID NO: 585631
aaacuauggccagggaagu

SEQ ID NO: 655233 - RNA, 19 nt, Artificial Sequence
  Description of Artificial Sequence: Synthetic oligonucleotide
  Antisense strand to SEQ ID NO: 655232
acuucccuggccauaguuu

SEQ ID NO: 655234 - RNA, 19 nt, Artificial Sequence
  Description of Artificial Sequence: Synthetic oligonucleotide
  Sense strand starting at position 3263 of SEQ ID NO: 585631
gugagaagcccaugaacuu

SEQ ID NO: 655235 - RNA, 19 nt, Artificial Sequence
  Description of Artificial Sequence: Synthetic oligonucleotide
  Antisense strand to SEQ ID NO: 655234
aaguucaugggcuucucac

SEQ ID NO: 655236 - RNA, 19 nt, Artificial Sequence
  Description of Artificial Sequence: Synthetic oligonucleotide
  Sense strand starting at position 3276 of SEQ ID NO: 585631
gaacuuugaggucagaugu

SEQ ID NO: 655237 - RNA, 19 nt, Artificial Sequence
  Description of Artificial Sequence: Synthetic oligonucleotide
  Antisense strand to SEQ ID NO: 655236
acaucugaccucaaaguuc

SEQ ID NO: 655238 - RNA, 19 nt, Artificial Sequence
  Description of Artificial Sequence: Synthetic oligonucleotide
  Sense strand starting at position 3396 of SEQ ID NO: 585631
ugcccuggauucuuaugau

SEQ ID NO: 655239 - RNA, 19 nt, Artificial Sequence
  Description of Artificial Sequence: Synthetic oligonucleotide
  Antisense strand to SEQ ID NO: 655238
aucauaagaauccagggca

SEQ ID NO: 655240 - RNA, 19 nt, Artificial Sequence
  Description of Artificial Sequence: Synthetic oligonucleotide
  Sense strand starting at position 3402 of SEQ ID NO: 585631
ggauucuuaugaucuccca

SEQ ID NO: 655241 - RNA, 19 nt, Artificial Sequence
  Description of Artificial Sequence: Synthetic oligonucleotide
  Antisense strand to SEQ ID NO: 655240
ugggagaucauaagaaucc

SEQ ID NO: 655242 - RNA, 19 nt, Artificial Sequence
  Description of Artificial Sequence: Synthetic oligonucleotide
  Sense strand starting at position 3422 of SEQ ID NO: 585631
gauagagauuaacagagau

SEQ ID NO: 655243 - RNA, 19 nt, Artificial Sequence
  Description of Artificial Sequence: Synthetic oligonucleotide
  Antisense strand to SEQ ID NO: 655242
aucucuguuaaucucuauc

SEQ ID NO: 655244 - RNA, 19 nt, Artificial Sequence
  Description of Artificial Sequence: Synthetic oligonucleotide
  Sense strand starting at position 3513 of SEQ ID NO: 585631
aacggacugcucugaggau

SEQ ID NO: 655245 - RNA, 19 nt, Artificial Sequence
  Description of Artificial Sequence: Synthetic oligonucleotide
  Antisense strand to SEQ ID NO: 655244
auccucagagcaguccguu

SEQ ID NO: 655246 - RNA, 19 nt, Artificial Sequence
  Description of Artificial Sequence: Synthetic oligonucleotide
  Sense strand starting at position 3584 of SEQ ID NO: 585631
gcaccuauaggaggaguuu

SEQ ID NO: 655247 - RNA, 19 nt, Artificial Sequence
  Description of Artificial Sequence: Synthetic oligonucleotide
  Antisense strand to SEQ ID NO: 655246
aaacuccuccuauaggugc

SEQ ID NO: 655248 - RNA, 19 nt, Artificial Sequence
  Description of Artificial Sequence: Synthetic oligonucleotide
  Sense strand starting at position 3690 of SEQ ID NO: 585631
uuagcauuaaagugaggaa

SEQ ID NO: 655249 - RNA, 19 nt, Artificial Sequence
  Description of Artificial Sequence: Synthetic oligonucleotide
  Antisense strand to SEQ ID NO: 655248
uuccucacuuuaaugcuaa

SEQ ID NO: 655250 - RNA, 19 nt, Artificial Sequence
  Description of Artificial Sequence: Synthetic oligonucleotide
  Sense strand starting at position 3725 of SEQ ID NO: 585631
ggaguuuaagucuaacugu

SEQ ID NO: 655251 - RNA, 19 nt, Artificial Sequence
  Description of Artificial Sequence: Synthetic oligonucleotide
  Antisense strand to SEQ ID NO: 655250
acaguuagacuuaaacucc

SEQ ID NO: 655252 - RNA, 19 nt, Artificial Sequence
  Description of Artificial Sequence: Synthetic oligonucleotide
  Sense strand starting at position 3818 of SEQ ID NO: 585631
uuaccuauugacugagagu

SEQ ID NO: 655253 - RNA, 19 nt, Artificial Sequence
  Description of Artificial Sequence: Synthetic oligonucleotide
  Antisense strand to SEQ ID NO: 655252
acucucagucaauagguaa

SEQ ID NO: 655254 - RNA, 19 nt, Artificial Sequence
  Description of Artificial Sequence: Synthetic oligonucleotide
  Sense strand starting at position 3841 of SEQ ID NO: 585631
uaagcuagagcuugaguaa

SEQ ID NO: 655255 - RNA, 19 nt, Artificial Sequence
  Description of Artificial Sequence: Synthetic oligonucleotide
  Antisense strand to SEQ ID NO: 655254
uuacucaagcucuagcuua

SEQ ID NO: 655256 - RNA, 19 nt, Artificial Sequence
  Description of Artificial Sequence: Synthetic oligonucleotide
  Sense strand starting at position 3842 of SEQ ID NO: 585631
aagcuagagcuugaguaag

SEQ ID NO: 655257 - RNA, 19 nt, Artificial Sequence
  Description of Artificial Sequence: Synthetic oligonucleotide
  Antisense strand to SEQ ID NO: 655256
cuuacucaagcucuagcuu

SEQ ID NO: 655258 - RNA, 19 nt, Artificial Sequence
  Description of Artificial Sequence: Synthetic oligonucleotide
  Sense strand starting at position 3844 of SEQ ID NO: 585631
gcuagagcuugaguaagga

SEQ ID NO: 655259 - RNA, 19 nt, Artificial Sequence
  Description of Artificial Sequence: Synthetic oligonucleotide
  Antisense strand to SEQ ID NO: 655258
uccuuacucaagcucuagc

SEQ ID NO: 655260 - RNA, 19 nt, Artificial Sequence
  Description of Artificial Sequence: Synthetic oligonucleotide
  Sense strand starting at position 3906 of SEQ ID NO: 585631
gucucaaugcaacaaagau

SEQ ID NO: 655261 - RNA, 19 nt, Artificial Sequence
  Description of Artificial Sequence: Synthetic oligonucleotide
  Antisense strand to SEQ ID NO: 655260
aucuuuguugcauugagac

SEQ ID NO: 655262 - RNA, 19 nt, Artificial Sequence
  Description of Artificial Sequence: Synthetic oligonucleotide
  Sense strand starting at position 3918 of SEQ ID NO: 585631
caaagauaucccuguguga

SEQ ID NO: 655263 - RNA, 19 nt, Artificial Sequence
  Description of Artificial Sequence: Synthetic oligonucleotide
  Antisense strand to SEQ ID NO: 655262
ucacacagggauaucuuug

SEQ ID NO: 655264 - RNA, 19 nt, Artificial Sequence
  Description of Artificial Sequence: Synthetic oligonucleotide
  Sense strand starting at position 3920 of SEQ ID NO: 585631
aagauaucccugugugaca

SEQ ID NO: 655265 - RNA, 19 nt, Artificial Sequence
  Description of Artificial Sequence: Synthetic oligonucleotide
  Antisense strand to SEQ ID NO: 655264
ugucacacagggauaucuu

SEQ ID NO: 655266 - RNA, 19 nt, Artificial Sequence
  Description of Artificial Sequence: Synthetic oligonucleotide
  Sense strand starting at position 3922 of SEQ ID NO: 585631
gauaucccugugugacaga

SEQ ID NO: 655267 - RNA, 19 nt, Artificial Sequence
  Description of Artificial Sequence: Synthetic oligonucleotide
  Antisense strand to SEQ ID NO: 655266
ucugucacacagggauauc

SEQ ID NO: 655268 - RNA, 19 nt, Artificial Sequence
  Description of Artificial Sequence: Synthetic oligonucleotide
  Sense strand starting at position 2211 of SEQ ID NO: 585632
cccuuugauuuacguggau

SEQ ID NO: 655269 - RNA, 19 nt, Artificial Sequence
  Description of Artificial Sequence: Synthetic oligonucleotide
  Antisense strand to SEQ ID NO: 655268
auccacguaaaucaaaggg

SEQ ID NO: 655270 - RNA, 19 nt, Artificial Sequence
  Description of Artificial Sequence: Synthetic oligonucleotide
  Sense strand starting at position 2650 of SEQ ID NO: 585632
guguguaucucuuaaaccu

SEQ ID NO: 655271 - RNA, 19 nt, Artificial Sequence
  Description of Artificial Sequence: Synthetic oligonucleotide
  Antisense strand to SEQ ID NO: 655270
agguuuaagagauacacac

SEQ ID NO: 655272 - RNA, 19 nt, Artificial Sequence
  Description of Artificial Sequence: Synthetic oligonucleotide
  Sense strand starting at position 2707 of SEQ ID NO: 585632
cuugcaucccacgguuaga

SEQ ID NO: 655273 - RNA, 19 nt, Artificial Sequence
  Description of Artificial Sequence: Synthetic oligonucleotide
  Antisense strand to SEQ ID NO: 655272
ucuaaccgugggaugcaag

SEQ ID NO: 655274 - RNA, 19 nt, Artificial Sequence
  Description of Artificial Sequence: Synthetic oligonucleotide
  Sense strand starting at position 2710 of SEQ ID NO: 585632
gcaucccacgguuagaauu

SEQ ID NO: 655275 - RNA, 19 nt, Artificial Sequence
  Description of Artificial Sequence: Synthetic oligonucleotide
  Antisense strand to SEQ ID NO: 655274
aauucuaaccgugggaugc

SEQ ID NO: 655276 - RNA, 19 nt, Artificial Sequence
  Description of Artificial Sequence: Synthetic oligonucleotide
  Sense strand starting at position 2905 of SEQ ID NO: 585632
gcuuguaagucauucccau

SEQ ID NO: 655277 - RNA, 19 nt, Artificial Sequence
  Description of Artificial Sequence: Synthetic oligonucleotide
  Antisense strand to SEQ ID NO: 655276
augggaaugacuuacaagc

SEQ ID NO: 655278 - RNA, 19 nt, Artificial Sequence
  Description of Artificial Sequence: Synthetic oligonucleotide
  Sense strand starting at position 2909 of SEQ ID NO: 585632
guaagucauucccaucaag

SEQ ID NO: 655279 - RNA, 19 nt, Artificial Sequence
  Description of Artificial Sequence: Synthetic oligonucleotide
  Antisense strand to SEQ ID NO: 655278
cuugaugggaaugacuuac

SEQ ID NO: 655280 - RNA, 19 nt, Artificial Sequence
  Description of Artificial Sequence: Synthetic oligonucleotide
  Sense strand starting at position 2932 of SEQ ID NO: 585632
ggaguugcuugcucugaca

SEQ ID NO: 655281 - RNA, 19 nt, Artificial Sequence
  Description of Artificial Sequence: Synthetic oligonucleotide
  Antisense strand to SEQ ID NO: 655280
ugucagagcaagcaacucc

SEQ ID NO: 655282 - RNA, 19 nt, Artificial Sequence
  Description of Artificial Sequence: Synthetic oligonucleotide
  Sense strand starting at position 3229 of SEQ ID NO: 585632
ggaagagugugugaagcaa

SEQ ID NO: 655283 - RNA, 19 nt, Artificial Sequence
  Description of Artificial Sequence: Synthetic oligonucleotide
  Antisense strand to SEQ ID NO: 655282
uugcuucacacacucuucc

SEQ ID NO: 655284 - RNA, 19 nt, Artificial Sequence
  Description of Artificial Sequence: Synthetic oligonucleotide
  Sense strand starting at position 3469 of SEQ ID NO: 585632
gcgaguuuccgagccugca

SEQ ID NO: 655285 - RNA, 19 nt, Artificial Sequence
  Description of Artificial Sequence: Synthetic oligonucleotide
  Antisense strand to SEQ ID NO: 655284
ugcaggcucggaaacucgc

SEQ ID NO: 655286 - RNA, 19 nt, Artificial Sequence
  Description of Artificial Sequence: Synthetic oligonucleotide
  Sense strand starting at position 3470 of SEQ ID NO: 585632
cgaguuuccgagccugcaa

SEQ ID NO: 655287 - RNA, 19 nt, Artificial Sequence
  Description of Artificial Sequence: Synthetic oligonucleotide
  Antisense strand to SEQ ID NO: 655286
uugcaggcucggaaacucg

SEQ ID NO: 655288 - RNA, 19 nt, Artificial Sequence
  Description of Artificial Sequence: Synthetic oligonucleotide
  Sense strand starting at position 3794 of SEQ ID NO: 585632
gagucaugcucuuuggaga

SEQ ID NO: 655289 - RNA, 19 nt, Artificial Sequence
  Description of Artificial Sequence: Synthetic oligonucleotide
  Antisense strand to SEQ ID NO: 655288
ucuccaaagagcaugacuc

SEQ ID NO: 655290 - RNA, 19 nt, Artificial Sequence
  Description of Artificial Sequence: Synthetic oligonucleotide
  Sense strand starting at position 3795 of SEQ ID NO: 585632
agucaugcucuuuggagag

SEQ ID NO: 655291 - RNA, 19 nt, Artificial Sequence
  Description of Artificial Sequence: Synthetic oligonucleotide
  Antisense strand to SEQ ID NO: 655290
cucuccaaagagcaugacu

SEQ ID NO: 655292 - RNA, 19 nt, Artificial Sequence
  Description of Artificial Sequence: Synthetic oligonucleotide
  Sense strand starting at position 3815 of SEQ ID NO: 585632
ggcugagcuguuuauaaau

SEQ ID NO: 655293 - RNA, 19 nt, Artificial Sequence
  Description of Artificial Sequence: Synthetic oligonucleotide
  Antisense strand to SEQ ID NO: 655292
auuuauaaacagcucagcc

SEQ ID NO: 655294 - RNA, 19 nt, Artificial Sequence
  Description of Artificial Sequence: Synthetic oligonucleotide
  Sense strand starting at position 3824 of SEQ ID NO: 585632
guuuauaaaucaccacguu

SEQ ID NO: 655295 - RNA, 19 nt, Artificial Sequence
  Description of Artificial Sequence: Synthetic oligonucleotide
  Antisense strand to SEQ ID NO: 655294
aacguggugauuuauaaac

SEQ ID NO: 655296 - RNA, 19 nt, Artificial Sequence
  Description of Artificial Sequence: Synthetic oligonucleotide
  Sense strand starting at position 3860 of SEQ ID NO: 585632
agacgcuuuggcugagaau

SEQ ID NO: 655297 - RNA, 19 nt, Artificial Sequence
  Description of Artificial Sequence: Synthetic oligonucleotide
  Antisense strand to SEQ ID NO: 655296
auucucagccaaagcgucu

SEQ ID NO: 655298 - RNA, 19 nt, Artificial Sequence
  Description of Artificial Sequence: Synthetic oligonucleotide
  Sense strand starting at position 3861 of SEQ ID NO: 585632
gacgcuuuggcugagaauu

SEQ ID NO: 655299 - RNA, 19 nt, Artificial Sequence
  Description of Artificial Sequence: Synthetic oligonucleotide
  Antisense strand to SEQ ID NO: 655298
aauucucagccaaagcguc

SEQ ID NO: 655300 - RNA, 19 nt, Artificial Sequence
  Description of Artificial Sequence: Synthetic oligonucleotide
  Sense strand starting at position 3863 of SEQ ID NO: 585632
cgcuuuggcugagaauuuc

SEQ ID NO: 655301 - RNA, 19 nt, Artificial Sequence
  Description of Artificial Sequence: Synthetic oligonucleotide
  Antisense strand to SEQ ID NO: 655300
gaaauucucagccaaagcg

SEQ ID NO: 655302 - RNA, 19 nt, Artificial Sequence
  Description of Artificial Sequence: Synthetic oligonucleotide
  Sense strand starting at position 3881 of SEQ ID NO: 585632
ccacguguccuguguuuau

SEQ ID NO: 655303 - RNA, 19 nt, Artificial Sequence
  Description of Artificial Sequence: Synthetic oligonucleotide
  Antisense strand to SEQ ID NO: 655302
auaaacacaggacacgugg

SEQ ID NO: 655304 - RNA, 19 nt, Artificial Sequence
  Description of Artificial Sequence: Synthetic oligonucleotide
  Sense strand starting at position 228 of SEQ ID NO: 585633
gcaggauccuggaaggguu

SEQ ID NO: 655305 - RNA, 19 nt, Artificial Sequence
  Description of Artificial Sequence: Synthetic oligonucleotide
  Antisense strand to SEQ ID NO: 655304
aacccuuccaggauccugc

SEQ ID NO: 655306 - RNA, 19 nt, Artificial Sequence
  Description of Artificial Sequence: Synthetic oligonucleotide
  Sense strand starting at position 324 of SEQ ID NO: 585633
cuacgagccagugauggaa

SEQ ID NO: 655307 - RNA, 19 nt, Artificial Sequence
  Description of Artificial Sequence: Synthetic oligonucleotide
  Antisense strand to SEQ ID NO: 655306
uuccaucacuggcucguag

SEQ ID NO: 655308 - RNA, 19 nt, Artificial Sequence
  Description of Artificial Sequence: Synthetic oligonucleotide
  Sense strand starting at position 506 of SEQ ID NO: 585633
gauggucguuuggcugaau

SEQ ID NO: 655309 - RNA, 19 nt, Artificial Sequence
  Description of Artificial Sequence: Synthetic oligonucleotide
  Antisense strand to SEQ ID NO: 655308
auucagccaaacgaccauc

SEQ ID NO: 655310 - RNA, 19 nt, Artificial Sequence
  Description of Artificial Sequence: Synthetic oligonucleotide
  Sense strand starting at position 507 of SEQ ID NO: 585633
auggucguuuggcugaaua

SEQ ID NO: 655311 - RNA, 19 nt, Artificial Sequence
  Description of Artificial Sequence: Synthetic oligonucleotide
  Antisense strand to SEQ ID NO: 655310
uauucagccaaacgaccau

SEQ ID NO: 655312 - RNA, 19 nt, Artificial Sequence
  Description of Artificial Sequence: Synthetic oligonucleotide
  Sense strand starting at position 583 of SEQ ID NO: 585633
uugugacccugagauccaa

SEQ ID NO: 655313 - RNA, 19 nt, Artificial Sequence
  Description of Artificial Sequence: Synthetic oligonucleotide
  Antisense strand to SEQ ID NO: 655312
uuggaucucagggucacaa

SEQ ID NO: 655314 - RNA, 19 nt, Artificial Sequence
  Description of Artificial Sequence: Synthetic oligonucleotide
  Sense strand starting at position 721 of SEQ ID NO: 585633
gggagaugcggucagaauc

SEQ ID NO: 655315 - RNA, 19 nt, Artificial Sequence
  Description of Artificial Sequence: Synthetic oligonucleotide
  Antisense strand to SEQ ID NO: 655314
gauucugaccgcaucuccc

SEQ ID NO: 655316 - RNA, 19 nt, Artificial Sequence
  Description of Artificial Sequence: Synthetic oligonucleotide
  Sense strand starting at position 780 of SEQ ID NO: 585633
cccacaucggccuguguau

SEQ ID NO: 655317 - RNA, 19 nt, Artificial Sequence
  Description of Artificial Sequence: Synthetic oligonucleotide
  Antisense strand to SEQ ID NO: 655316
auacacaggccgauguggg

SEQ ID NO: 655318 - RNA, 19 nt, Artificial Sequence
  Description of Artificial Sequence: Synthetic oligonucleotide
  Sense strand starting at position 892 of SEQ ID NO: 585633
gcagaagacuuguaagaac

SEQ ID NO: 655319 - RNA, 19 nt, Artificial Sequence
  Description of Artificial Sequence: Synthetic oligonucleotide
  Antisense strand to SEQ ID NO: 655318
guucuuacaagucuucugc

SEQ ID NO: 655320 - RNA, 19 nt, Artificial Sequence
  Description of Artificial Sequence: Synthetic oligonucleotide
  Sense strand starting at position 973 of SEQ ID NO: 585633
caaggaauagucuguagaa

SEQ ID NO: 655321 - RNA, 19 nt, Artificial Sequence
  Description of Artificial Sequence: Synthetic oligonucleotide
  Antisense strand to SEQ ID NO: 655320
uucuacagacuauuccuug

SEQ ID NO: 655322 - RNA, 19 nt, Artificial Sequence
  Description of Artificial Sequence: Synthetic oligonucleotide
  Sense strand starting at position 975 of SEQ ID NO: 585633
aggaauagucuguagaagu

SEQ ID NO: 655323 - RNA, 19 nt, Artificial Sequence
  Description of Artificial Sequence: Synthetic oligonucleotide
  Antisense strand to SEQ ID NO: 655322
acuucuacagacuauuccu

SEQ ID NO: 655324 - RNA, 19 nt, Artificial Sequence
  Description of Artificial Sequence: Synthetic oligonucleotide
  Sense strand starting at position 1128 of SEQ ID NO: 585633
gaugcagagcaucgugaaa

SEQ ID NO: 655325 - RNA, 19 nt, Artificial Sequence
  Description of Artificial Sequence: Synthetic oligonucleotide
  Antisense strand to SEQ ID NO: 655324
uuucacgaugcucugcauc

SEQ ID NO: 655326 - RNA, 19 nt, Artificial Sequence
  Description of Artificial Sequence: Synthetic oligonucleotide
  Sense strand starting at position 1172 of SEQ ID NO: 585633
gagaacaccugucagguua

SEQ ID NO: 655327 - RNA, 19 nt, Artificial Sequence
  Description of Artificial Sequence: Synthetic oligonucleotide
  Antisense strand to SEQ ID NO: 655326
uaaccugacagguguucuc

SEQ ID NO: 655328 - RNA, 19 nt, Artificial Sequence
  Description of Artificial Sequence: Synthetic oligonucleotide
  Sense strand starting at position 1183 of SEQ ID NO: 585633
ucagguuaugaagguuaga

SEQ ID NO: 655329 - RNA, 19 nt, Artificial Sequence
  Description of Artificial Sequence: Synthetic oligonucleotide
  Antisense strand to SEQ ID NO: 655328
ucuaaccuucauaaccuga

SEQ ID NO: 655330 - RNA, 19 nt, Artificial Sequence
  Description of Artificial Sequence: Synthetic oligonucleotide
  Sense strand starting at position 1186 of SEQ ID NO: 585633
gguuaugaagguuagaagu

SEQ ID NO: 655331 - RNA, 19 nt, Artificial Sequence
  Description of Artificial Sequence: Synthetic oligonucleotide
  Antisense strand to SEQ ID NO: 655330
acuucuaaccuucauaacc

SEQ ID NO: 655332 - RNA, 19 nt, Artificial Sequence
  Description of Artificial Sequence: Synthetic oligonucleotide
  Sense strand starting at position 1598 of SEQ ID NO: 585633
uaaguucuggguuaauuaa

SEQ ID NO: 655333 - RNA, 19 nt, Artificial Sequence
  Description of Artificial Sequence: Synthetic oligonucleotide
  Antisense strand to SEQ ID NO: 655332
uuaauuaacccagaacuua

SEQ ID NO: 655334 - RNA, 19 nt, Artificial Sequence
  Description of Artificial Sequence: Synthetic oligonucleotide
  Sense strand starting at position 1623 of SEQ ID NO: 585633
agagcaucaugucucagaa

SEQ ID NO: 655335 - RNA, 19 nt, Artificial Sequence
  Description of Artificial Sequence: Synthetic oligonucleotide
  Antisense strand to SEQ ID NO: 655334
uucugagacaugaugcucu

SEQ ID NO: 655336 - RNA, 19 nt, Artificial Sequence
  Description of Artificial Sequence: Synthetic oligonucleotide
  Sense strand starting at position 1729 of SEQ ID NO: 585633
aguaacaggugucauaaga

SEQ ID NO: 655337 - RNA, 19 nt, Artificial Sequence
  Description of Artificial Sequence: Synthetic oligonucleotide
  Antisense strand to SEQ ID NO: 655336
ucuuaugacaccuguuacu

SEQ ID NO: 655338 - RNA, 19 nt, Artificial Sequence
  Description of Artificial Sequence: Synthetic oligonucleotide
  Sense strand starting at position 1737 of SEQ ID NO: 585633
gugucauaagaauggauaa

SEQ ID NO: 655339 - RNA, 19 nt, Artificial Sequence
  Description of Artificial Sequence: Synthetic oligonucleotide
  Antisense strand to SEQ ID NO: 655338
uuauccauucuuaugacac

SEQ ID NO: 655340 - RNA, 19 nt, Artificial Sequence
  Description of Artificial Sequence: Synthetic oligonucleotide
  Sense strand starting at position 1749 of SEQ ID NO: 585633
uggauaaagugcuuugugu

SEQ ID NO: 655341 - RNA, 19 nt, Artificial Sequence
  Description of Artificial Sequence: Synthetic oligonucleotide
  Antisense strand to SEQ ID NO: 655340
acacaaagcacuuuaucca

SEQ ID NO: 655342 - RNA, 19 nt, Artificial Sequence
  Description of Artificial Sequence: Synthetic oligonucleotide
  Sense strand starting at position 1751 of SEQ ID NO: 585633
gauaaagugcuuugugugu

SEQ ID NO: 655343 - RNA, 19 nt, Artificial Sequence
  Description of Artificial Sequence: Synthetic oligonucleotide
  Antisense strand to SEQ ID NO: 655342
acacacaaagcacuuuauc

SEQ ID NO: 655344 - RNA, 19 nt, Artificial Sequence
  Description of Artificial Sequence: Synthetic oligonucleotide
  Sense strand starting at position 1756 of SEQ ID NO: 585633
agugcuuuguguguacuua

SEQ ID NO: 655345 - RNA, 19 nt, Artificial Sequence
  Description of Artificial Sequence: Synthetic oligonucleotide
  Antisense strand to SEQ ID NO: 655344
uaaguacacacaaagcacu

SEQ ID NO: 655346 - RNA, 19 nt, Artificial Sequence
  Description of Artificial Sequence: Synthetic oligonucleotide
  Sense strand starting at position 1760 of SEQ ID NO: 585633
cuuuguguguacuuacuca

SEQ ID NO: 655347 - RNA, 19 nt, Artificial Sequence
  Description of Artificial Sequence: Synthetic oligonucleotide
  Antisense strand to SEQ ID NO: 655346
ugaguaaguacacacaaag

SEQ ID NO: 655348 - RNA, 19 nt, Artificial Sequence
  Description of Artificial Sequence: Synthetic oligonucleotide
  Sense strand starting at position 1913 of SEQ ID NO: 585633
ugacauccagcaugacaga

SEQ ID NO: 655349 - RNA, 19 nt, Artificial Sequence
  Description of Artificial Sequence: Synthetic oligonucleotide
  Antisense strand to SEQ ID NO: 655348
ucugucaugcuggauguca

SEQ ID NO: 655350 - RNA, 19 nt, Artificial Sequence
  Description of Artificial Sequence: Synthetic oligonucleotide
  Sense strand starting at position 1922 of SEQ ID NO: 585633
gcaugacagaagugcuauu

SEQ ID NO: 655351 - RNA, 19 nt, Artificial Sequence
  Description of Artificial Sequence: Synthetic oligonucleotide
  Antisense strand to SEQ ID NO: 655350
aauagcacuucugucaugc

SEQ ID NO: 655352 - RNA, 19 nt, Artificial Sequence
  Description of Artificial Sequence: Synthetic oligonucleotide
  Sense strand starting at position 2561 of SEQ ID NO: 585633
agucuauaggaguagggua

SEQ ID NO: 655353 - RNA, 19 nt, Artificial Sequence
  Description of Artificial Sequence: Synthetic oligonucleotide
  Antisense strand to SEQ ID NO: 655352
uacccuacuccuauagacu

SEQ ID NO: 655354 - RNA, 19 nt, Artificial Sequence
  Description of Artificial Sequence: Synthetic oligonucleotide
  Sense strand starting at position 2624 of SEQ ID NO: 585633
agagaaggugauuguuuga

SEQ ID NO: 655355 - RNA, 19 nt, Artificial Sequence
  Description of Artificial Sequence: Synthetic oligonucleotide
  Antisense strand to SEQ ID NO: 655354
ucaaacaaucaccuucucu

SEQ ID NO: 655356 - RNA, 19 nt, Artificial Sequence
  Description of Artificial Sequence: Synthetic oligonucleotide
  Sense strand starting at position 2627 of SEQ ID NO: 585633
gaaggugauuguuugagca

SEQ ID NO: 655357 - RNA, 19 nt, Artificial Sequence
  Description of Artificial Sequence: Synthetic oligonucleotide
  Antisense strand to SEQ ID NO: 655356
ugcucaaacaaucaccuuc

SEQ ID NO: 655358 - RNA, 19 nt, Artificial Sequence
  Description of Artificial Sequence: Synthetic oligonucleotide
  Sense strand starting at position 2629 of SEQ ID NO: 585633
aggugauuguuugagcaaa

SEQ ID NO: 655359 - RNA, 19 nt, Artificial Sequence
  Description of Artificial Sequence: Synthetic oligonucleotide
  Antisense strand to SEQ ID NO: 655358
uuugcucaaacaaucaccu

SEQ ID NO: 655360 - RNA, 19 nt, Artificial Sequence
  Description of Artificial Sequence: Synthetic oligonucleotide
  Sense strand starting at position 2730 of SEQ ID NO: 585633
cagacauagugacuuuguu

SEQ ID NO: 655361 - RNA, 19 nt, Artificial Sequence
  Description of Artificial Sequence: Synthetic oligonucleotide
  Antisense strand to SEQ ID NO: 655360
aacaaagucacuaugucug

SEQ ID NO: 655362 - RNA, 19 nt, Artificial Sequence
  Description of Artificial Sequence: Synthetic oligonucleotide
  Sense strand starting at position 2748 of SEQ ID NO: 585633
uuuaguccaagcgaaauga

SEQ ID NO: 655363 - RNA, 19 nt, Artificial Sequence
  Description of Artificial Sequence: Synthetic oligonucleotide
  Antisense strand to SEQ ID NO: 655362
ucauuucgcuuggacuaaa

SEQ ID NO: 655364 - RNA, 19 nt, Artificial Sequence
  Description of Artificial Sequence: Synthetic oligonucleotide
  Sense strand starting at position 3397 of SEQ ID NO: 585633
aguauaauuugagaagcua

SEQ ID NO: 655365 - RNA, 19 nt, Artificial Sequence
  Description of Artificial Sequence: Synthetic oligonucleotide
  Antisense strand to SEQ ID NO: 655364
uagcuucucaaauuauacu

SEQ ID NO: 655366 - RNA, 19 nt, Artificial Sequence
  Description of Artificial Sequence: Synthetic oligonucleotide
  Sense strand starting at position 3419 of SEQ ID NO: 585633
cgguaaucccagcagagau

SEQ ID NO: 655367 - RNA, 19 nt, Artificial Sequence
  Description of Artificial Sequence: Synthetic oligonucleotide
  Antisense strand to SEQ ID NO: 655366
aucucugcugggauuaccg

SEQ ID NO: 655368 - RNA, 19 nt, Artificial Sequence
  Description of Artificial Sequence: Synthetic oligonucleotide
  Sense strand starting at position 3475 of SEQ ID NO: 585633
caggauguuucuuaaggau

SEQ ID NO: 655369 - RNA, 19 nt, Artificial Sequence
  Description of Artificial Sequence: Synthetic oligonucleotide
  Antisense strand to SEQ ID NO: 655368
auccuuaagaaacauccug

SEQ ID NO: 655370 - RNA, 19 nt, Artificial Sequence
  Description of Artificial Sequence: Synthetic oligonucleotide
  Sense strand starting at position 3483 of SEQ ID NO: 585633
uucuuaaggauaggaugua

SEQ ID NO: 655371 - RNA, 19 nt, Artificial Sequence
  Description of Artificial Sequence: Synthetic oligonucleotide
  Antisense strand to SEQ ID NO: 655370
uacauccuauccuuaagaa

SEQ ID NO: 655372 - RNA, 19 nt, Artificial Sequence
  Description of Artificial Sequence: Synthetic oligonucleotide
  Sense strand starting at position 3527 of SEQ ID NO: 585633
uggguuuggccuugagcaa

SEQ ID NO: 655373 - RNA, 19 nt, Artificial Sequence
  Description of Artificial Sequence: Synthetic oligonucleotide
  Antisense strand to SEQ ID NO: 655372
uugcucaaggccaaaccca

SEQ ID NO: 655374 - RNA, 19 nt, Artificial Sequence
  Description of Artificial Sequence: Synthetic oligonucleotide
  Sense strand starting at position 3604 of SEQ ID NO: 585633
gucaucuggugucuaaaug

SEQ ID NO: 655375 - RNA, 19 nt, Artificial Sequence
  Description of Artificial Sequence: Synthetic oligonucleotide
  Antisense strand to SEQ ID NO: 655374
cauuuagacaccagaugac

SEQ ID NO: 655376 - RNA, 19 nt, Artificial Sequence
  Description of Artificial Sequence: Synthetic oligonucleotide
  Sense strand starting at position 3612 of SEQ ID NO: 585633
gugucuaaauggcauuuaa

SEQ ID NO: 655377 - RNA, 19 nt, Artificial Sequence
  Description of Artificial Sequence: Synthetic oligonucleotide
  Antisense strand to SEQ ID NO: 655376
uuaaaugccauuuagacac

SEQ ID NO: 655378 - RNA, 19 nt, Artificial Sequence
  Description of Artificial Sequence: Synthetic oligonucleotide
  Sense strand starting at position 3623 of SEQ ID NO: 585633
gcauuuaagccuugagggu

SEQ ID NO: 655379 - RNA, 19 nt, Artificial Sequence
  Description of Artificial Sequence: Synthetic oligonucleotide
  Antisense strand to SEQ ID NO: 655378
acccucaaggcuuaaaugc

SEQ ID NO: 655380 - RNA, 19 nt, Artificial Sequence
  Description of Artificial Sequence: Synthetic oligonucleotide
  Sense strand starting at position 3791 of SEQ ID NO: 585633
aauggugcuugaucauauc

SEQ ID NO: 655381 - RNA, 19 nt, Artificial Sequence
  Description of Artificial Sequence: Synthetic oligonucleotide
  Antisense strand to SEQ ID NO: 655380
gauaugaucaagcaccauu

SEQ ID NO: 655382 - RNA, 19 nt, Artificial Sequence
  Description of Artificial Sequence: Synthetic oligonucleotide
  Sense strand starting at position 3964 of SEQ ID NO: 585633
cccguuaaauaggauaaua

SEQ ID NO: 655383 - RNA, 19 nt, Artificial Sequence
  Description of Artificial Sequence: Synthetic oligonucleotide
  Antisense strand to SEQ ID NO: 655382
uauuauccuauuuaacggg

SEQ ID NO: 655384 - RNA, 19 nt, Artificial Sequence
  Description of Artificial Sequence: Synthetic oligonucleotide
  Sense strand starting at position 4 of SEQ ID NO: 585634
uggguuuggccuugagcaa

SEQ ID NO: 655385 - RNA, 19 nt, Artificial Sequence
  Description of Artificial Sequence: Synthetic oligonucleotide
  Antisense strand to SEQ ID NO: 655384
uugcucaaggccaaaccca

SEQ ID NO: 655386 - RNA, 19 nt, Artificial Sequence
  Description of Artificial Sequence: Synthetic oligonucleotide
  Sense strand starting at position 81 of SEQ ID NO: 585634
gucaucuggugucuaaaug

SEQ ID NO: 655387 - RNA, 19 nt, Artificial Sequence
  Description of Artificial Sequence: Synthetic oligonucleotide
  Antisense strand to SEQ ID NO: 655386
cauuuagacaccagaugac

SEQ ID NO: 655388 - RNA, 19 nt, Artificial Sequence
  Description of Artificial Sequence: Synthetic oligonucleotide
  Sense strand starting at position 89 of SEQ ID NO: 585634
gugucuaaauggcauuuaa

SEQ ID NO: 655389 - RNA, 19 nt, Artificial Sequence
  Description of Artificial Sequence: Synthetic oligonucleotide
  Antisense strand to SEQ ID NO: 655388
uuaaaugccauuuagacac

SEQ ID NO: 655390 - RNA, 19 nt, Artificial Sequence
  Description of Artificial Sequence: Synthetic oligonucleotide
  Sense strand starting at position 100 of SEQ ID NO: 585634
gcauuuaagccuugagggu

SEQ ID NO: 655391 - RNA, 19 nt, Artificial Sequence
  Description of Artificial Sequence: Synthetic oligonucleotide
  Antisense strand to SEQ ID NO: 655390
acccucaaggcuuaaaugc

SEQ ID NO: 655392 - RNA, 19 nt, Artificial Sequence
  Description of Artificial Sequence: Synthetic oligonucleotide
  Sense strand starting at position 268 of SEQ ID NO: 585634
aauggugcuugaucauauc

SEQ ID NO: 655393 - RNA, 19 nt, Artificial Sequence
  Description of Artificial Sequence: Synthetic oligonucleotide
  Antisense strand to SEQ ID NO: 655392
gauaugaucaagcaccauu

SEQ ID NO: 655394 - RNA, 19 nt, Artificial Sequence
  Description of Artificial Sequence: Synthetic oligonucleotide
  Sense strand starting at position 678 of SEQ ID NO: 585634
uuacacuugucgccuugaa

SEQ ID NO: 655395 - RNA, 19 nt, Artificial Sequence
  Description of Artificial Sequence: Synthetic oligonucleotide
  Antisense strand to SEQ ID NO: 655394
uucaaggcgacaaguguaa

SEQ ID NO: 655396 - RNA, 19 nt, Artificial Sequence
  Description of Artificial Sequence: Synthetic oligonucleotide
  Sense strand starting at position 713 of SEQ ID NO: 585634
cuuuaauaguccucagcag

SEQ ID NO: 655397 - RNA, 19 nt, Artificial Sequence
  Description of Artificial Sequence: Synthetic oligonucleotide
  Antisense strand to SEQ ID NO: 655396
cugcugaggacuauuaaag

SEQ ID NO: 655398 - RNA, 19 nt, Artificial Sequence
  Description of Artificial Sequence: Synthetic oligonucleotide
  Sense strand starting at position 749 of SEQ ID NO: 585634
cccgcagcagcucuauauu

SEQ ID NO: 655399 - RNA, 19 nt, Artificial Sequence
  Description of Artificial Sequence: Synthetic oligonucleotide
  Antisense strand to SEQ ID NO: 655398
aauauagagcugcugcggg

SEQ ID NO: 655400 - RNA, 19 nt, Artificial Sequence
  Description of Artificial Sequence: Synthetic oligonucleotide
  Sense strand starting at position 767 of SEQ ID NO: 585634
uugcaaauggccuggagaa

SEQ ID NO: 655401 - RNA, 19 nt, Artificial Sequence
  Description of Artificial Sequence: Synthetic oligonucleotide
  Antisense strand to SEQ ID NO: 655400
uucuccaggccauuugcaa

SEQ ID NO: 655402 - RNA, 19 nt, Artificial Sequence
  Description of Artificial Sequence: Synthetic oligonucleotide
  Sense strand starting at position 768 of SEQ ID NO: 585634
ugcaaauggccuggagaaa

SEQ ID NO: 655403 - RNA, 19 nt, Artificial Sequence
  Description of Artificial Sequence: Synthetic oligonucleotide
  Antisense strand to SEQ ID NO: 655402
uuucuccaggccauuugca

SEQ ID NO: 655404 - RNA, 19 nt, Artificial Sequence
  Description of Artificial Sequence: Synthetic oligonucleotide
  Sense strand starting at position 780 of SEQ ID NO: 585634
ggagaaaucucucaccauu

SEQ ID NO: 655405 - RNA, 19 nt, Artificial Sequence
  Description of Artificial Sequence: Synthetic oligonucleotide
  Antisense strand to SEQ ID NO: 655404
aauggugagagauuucucc

SEQ ID NO: 655406 - RNA, 19 nt, Artificial Sequence
  Description of Artificial Sequence: Synthetic oligonucleotide
  Sense strand starting at position 867 of SEQ ID NO: 585634
gggugugcaccuuaacaca

SEQ ID NO: 655407 - RNA, 19 nt, Artificial Sequence
  Description of Artificial Sequence: Synthetic oligonucleotide
  Antisense strand to SEQ ID NO: 655406
uguguuaaggugcacaccc

SEQ ID NO: 655408 - RNA, 19 nt, Artificial Sequence
  Description of Artificial Sequence: Synthetic oligonucleotide
  Sense strand starting at position 891 of SEQ ID NO: 585634
cagucauuggccugaggca

SEQ ID NO: 655409 - RNA, 19 nt, Artificial Sequence
  Description of Artificial Sequence: Synthetic oligonucleotide
  Antisense strand to SEQ ID NO: 655408
ugccucaggccaaugacug

SEQ ID NO: 655410 - RNA, 19 nt, Artificial Sequence
  Description of Artificial Sequence: Synthetic oligonucleotide
  Sense strand starting at position 931 of SEQ ID NO: 585634
cuauacuugacuggaggua

SEQ ID NO: 655411 - RNA, 19 nt, Artificial Sequence
  Description of Artificial Sequence: Synthetic oligonucleotide
  Antisense strand to SEQ ID NO: 655410
uaccuccagucaaguauag

SEQ ID NO: 655412 - RNA, 19 nt, Artificial Sequence
  Description of Artificial Sequence: Synthetic oligonucleotide
  Sense strand starting at position 986 of SEQ ID NO: 585634
aggagauccuaucagaaac

SEQ ID NO: 655413 - RNA, 19 nt, Artificial Sequence
  Description of Artificial Sequence: Synthetic oligonucleotide
  Antisense strand to SEQ ID NO: 655412
guuucugauaggaucuccu

SEQ ID NO: 655414 - RNA, 19 nt, Artificial Sequence
  Description of Artificial Sequence: Synthetic oligonucleotide
  Sense strand starting at position 988 of SEQ ID NO: 585634
gagauccuaucagaaacga

SEQ ID NO: 655415 - RNA, 19 nt, Artificial Sequence
  Description of Artificial Sequence: Synthetic oligonucleotide
  Antisense strand to SEQ ID NO: 655414
ucguuucugauaggaucuc

SEQ ID NO: 655416 - RNA, 19 nt, Artificial Sequence
  Description of Artificial Sequence: Synthetic oligonucleotide
  Sense strand starting at position 1004 of SEQ ID NO: 585634
cgagucacacccuagacuu

SEQ ID NO: 655417 - RNA, 19 nt, Artificial Sequence
  Description of Artificial Sequence: Synthetic oligonucleotide
  Antisense strand to SEQ ID NO: 655416
aagucuagggugugacucg

SEQ ID NO: 655418 - RNA, 19 nt, Artificial Sequence
  Description of Artificial Sequence: Synthetic oligonucleotide
  Sense strand starting at position 1088 of SEQ ID NO: 585634
aaaucuugggucugauaag

SEQ ID NO: 655419 - RNA, 19 nt, Artificial Sequence
  Description of Artificial Sequence: Synthetic oligonucleotide
  Antisense strand to SEQ ID NO: 655418
cuuaucagacccaagauuu

SEQ ID NO: 655420 - RNA, 19 nt, Artificial Sequence
  Description of Artificial Sequence: Synthetic oligonucleotide
  Sense strand starting at position 1095 of SEQ ID NO: 585634
gggucugauaagggucaaa

SEQ ID NO: 655421 - RNA, 19 nt, Artificial Sequence
  Description of Artificial Sequence: Synthetic oligonucleotide
  Antisense strand to SEQ ID NO: 655420
uuugacccuuaucagaccc

SEQ ID NO: 655422 - RNA, 19 nt, Artificial Sequence
  Description of Artificial Sequence: Synthetic oligonucleotide
  Sense strand starting at position 1207 of SEQ ID NO: 585634
aggccuaggagaugugaga

SEQ ID NO: 655423 - RNA, 19 nt, Artificial Sequence
  Description of Artificial Sequence: Synthetic oligonucleotide
  Antisense strand to SEQ ID NO: 655422
ucucacaucuccuaggccu

SEQ ID NO: 655424 - RNA, 19 nt, Artificial Sequence
  Description of Artificial Sequence: Synthetic oligonucleotide
  Sense strand starting at position 2086 of SEQ ID NO: 585634
ggcgaaggauguuugccua

SEQ ID NO: 655425 - RNA, 19 nt, Artificial Sequence
  Description of Artificial Sequence: Synthetic oligonucleotide
  Antisense strand to SEQ ID NO: 655424
uaggcaaacauccuucgcc

SEQ ID NO: 655426 - RNA, 19 nt, Artificial Sequence
  Description of Artificial Sequence: Synthetic oligonucleotide
  Sense strand starting at position 2089 of SEQ ID NO: 585634
gaaggauguuugccuaaug

SEQ ID NO: 655427 - RNA, 19 nt, Artificial Sequence
  Description of Artificial Sequence: Synthetic oligonucleotide
  Antisense strand to SEQ ID NO: 655426
cauuaggcaaacauccuuc

SEQ ID NO: 655428 - RNA, 19 nt, Artificial Sequence
  Description of Artificial Sequence: Synthetic oligonucleotide
  Sense strand starting at position 2113 of SEQ ID NO: 585634
ggcaauggugucuguggaa

SEQ ID NO: 655429 - RNA, 19 nt, Artificial Sequence
  Description of Artificial Sequence: Synthetic oligonucleotide
  Antisense strand to SEQ ID NO: 655428
uuccacagacaccauugcc

SEQ ID NO: 655430 - RNA, 19 nt, Artificial Sequence
  Description of Artificial Sequence: Synthetic oligonucleotide
  Sense strand starting at position 2684 of SEQ ID NO: 585634
ggcgcuaucccucaaugca

SEQ ID NO: 655431 - RNA, 19 nt, Artificial Sequence
  Description of Artificial Sequence: Synthetic oligonucleotide
  Antisense strand to SEQ ID NO: 655430
ugcauugagggauagcgcc

SEQ ID NO: 655432 - RNA, 19 nt, Artificial Sequence
  Description of Artificial Sequence: Synthetic oligonucleotide
  Sense strand starting at position 2757 of SEQ ID NO: 585634
uccagaauccuaggcauuc

SEQ ID NO: 655433 - RNA, 19 nt, Artificial Sequence
  Description of Artificial Sequence: Synthetic oligonucleotide
  Antisense strand to SEQ ID NO: 655432
gaaugccuaggauucugga

SEQ ID NO: 655434 - RNA, 19 nt, Artificial Sequence
  Description of Artificial Sequence: Synthetic oligonucleotide
  Sense strand starting at position 3044 of SEQ ID NO: 585634
gcugaaacagagugauaag

SEQ ID NO: 655435 - RNA, 19 nt, Artificial Sequence
  Description of Artificial Sequence: Synthetic oligonucleotide
  Antisense strand to SEQ ID NO: 655434
cuuaucacucuguuucagc

SEQ ID NO: 655436 - RNA, 19 nt, Artificial Sequence
  Description of Artificial Sequence: Synthetic oligonucleotide
  Sense strand starting at position 3047 of SEQ ID NO: 585634
gaaacagagugauaagaca

SEQ ID NO: 655437 - RNA, 19 nt, Artificial Sequence
  Description of Artificial Sequence: Synthetic oligonucleotide
  Antisense strand to SEQ ID NO: 655436
ugucuuaucacucuguuuc

SEQ ID NO: 655438 - RNA, 19 nt, Artificial Sequence
  Description of Artificial Sequence: Synthetic oligonucleotide
  Sense strand starting at position 3621 of SEQ ID NO: 585634
cagauugagggaugugcuu

SEQ ID NO: 655439 - RNA, 19 nt, Artificial Sequence
  Description of Artificial Sequence: Synthetic oligonucleotide
  Antisense strand to SEQ ID NO: 655438
aagcacaucccucaaucug

SEQ ID NO: 655440 - RNA, 19 nt, Artificial Sequence
  Description of Artificial Sequence: Synthetic oligonucleotide
  Sense strand starting at position 3628 of SEQ ID NO: 585634
agggaugugcuuuguuuag

SEQ ID NO: 655441 - RNA, 19 nt, Artificial Sequence
  Description of Artificial Sequence: Synthetic oligonucleotide
  Antisense strand to SEQ ID NO: 655440
cuaaacaaagcacaucccu

SEQ ID NO: 655442 - RNA, 19 nt, Artificial Sequence
  Description of Artificial Sequence: Synthetic oligonucleotide
  Sense strand starting at position 3683 of SEQ ID NO: 585634
gagugauuuguggaggcgu

SEQ ID NO: 655443 - RNA, 19 nt, Artificial Sequence
  Description of Artificial Sequence: Synthetic oligonucleotide
  Antisense strand to SEQ ID NO: 655442
acgccuccacaaaucacuc

SEQ ID NO: 655444 - RNA, 19 nt, Artificial Sequence
  Description of Artificial Sequence: Synthetic oligonucleotide
  Sense strand starting at position 3779 of SEQ ID NO: 585634
uggucuagugcuugauucu

SEQ ID NO: 655445 - RNA, 19 nt, Artificial Sequence
  Description of Artificial Sequence: Synthetic oligonucleotide
  Antisense strand to SEQ ID NO: 655444
agaaucaagcacuagacca

SEQ ID NO: 655446 - RNA, 19 nt, Artificial Sequence
  Description of Artificial Sequence: Synthetic oligonucleotide
  Sense strand starting at position 3788 of SEQ ID NO: 585634
gcuugauucuguuugcaag

SEQ ID NO: 655447 - RNA, 19 nt, Artificial Sequence
  Description of Artificial Sequence: Synthetic oligonucleotide
  Antisense strand to SEQ ID NO: 655446
cuugcaaacagaaucaagc

SEQ ID NO: 655448 - RNA, 19 nt, Artificial Sequence
  Description of Artificial Sequence: Synthetic oligonucleotide
  Sense strand starting at position 3789 of SEQ ID NO: 585634
cuugauucuguuugcaaga

SEQ ID NO: 655449 - RNA, 19 nt, Artificial Sequence
  Description of Artificial Sequence: Synthetic oligonucleotide
  Antisense strand to SEQ ID NO: 655448
ucuugcaaacagaaucaag

SEQ ID NO: 655450 - RNA, 19 nt, Artificial Sequence
  Description of Artificial Sequence: Synthetic oligonucleotide
  Sense strand starting at position 3825 of SEQ ID NO: 585634
ccugucugugagggaugau

SEQ ID NO: 655451 - RNA, 19 nt, Artificial Sequence
  Description of Artificial Sequence: Synthetic oligonucleotide
  Antisense strand to SEQ ID NO: 655450
aucaucccucacagacagg

SEQ ID NO: 655452 - RNA, 19 nt, Artificial Sequence
  Description of Artificial Sequence: Synthetic oligonucleotide
  Sense strand starting at position 3828 of SEQ ID NO: 585634
gucugugagggaugauguu

SEQ ID NO: 655453 - RNA, 19 nt, Artificial Sequence
  Description of Artificial Sequence: Synthetic oligonucleotide
  Antisense strand to SEQ ID NO: 655452
aacaucaucccucacagac

SEQ ID NO: 655454 - RNA, 19 nt, Artificial Sequence
  Description of Artificial Sequence: Synthetic oligonucleotide
  Sense strand starting at position 3834 of SEQ ID NO: 585634
gagggaugauguuugucug

SEQ ID NO: 655455 - RNA, 19 nt, Artificial Sequence
  Description of Artificial Sequence: Synthetic oligonucleotide
  Antisense strand to SEQ ID NO: 655454
cagacaaacaucaucccuc

SEQ ID NO: 655456 - RNA, 19 nt, Artificial Sequence
  Description of Artificial Sequence: Synthetic oligonucleotide
  Sense strand starting at position 3835 of SEQ ID NO: 585634
agggaugauguuugucugu

SEQ ID NO: 655457 - RNA, 19 nt, Artificial Sequence
  Description of Artificial Sequence: Synthetic oligonucleotide
  Antisense strand to SEQ ID NO: 655456
acagacaaacaucaucccu

SEQ ID NO: 655458 - RNA, 19 nt, Artificial Sequence
  Description of Artificial Sequence: Synthetic oligonucleotide
  Sense strand starting at position 3837 of SEQ ID NO: 585634
ggaugauguuugucugucu

SEQ ID NO: 655459 - RNA, 19 nt, Artificial Sequence
  Description of Artificial Sequence: Synthetic oligonucleotide
  Antisense strand to SEQ ID NO: 655458
agacagacaaacaucaucc

SEQ ID NO: 655460 - RNA, 19 nt, Artificial Sequence
  Description of Artificial Sequence: Synthetic oligonucleotide
  Sense strand starting at position 3846 of SEQ ID NO: 585634
uugucugucugcucccaaa

SEQ ID NO: 655461 - RNA, 19 nt, Artificial Sequence
  Description of Artificial Sequence: Synthetic oligonucleotide
  Antisense strand to SEQ ID NO: 655460
uuugggagcagacagacaa

SEQ ID NO: 655462 - RNA, 19 nt, Artificial Sequence
  Description of Artificial Sequence: Synthetic oligonucleotide
  Sense strand starting at position 3975 of SEQ ID NO: 585634
cugaccucugucgacuuaa

SEQ ID NO: 655463 - RNA, 19 nt, Artificial Sequence
  Description of Artificial Sequence: Synthetic oligonucleotide
  Antisense strand to SEQ ID NO: 655462
uuaagucgacagaggucag

SEQ ID NO: 655464 - RNA, 19 nt, Artificial Sequence
  Description of Artificial Sequence: Synthetic oligonucleotide
  Sense strand starting at position 10 of SEQ ID NO: 585635
cuugaauacuucuuuagag

SEQ ID NO: 655465 - RNA, 19 nt, Artificial Sequence
  Description of Artificial Sequence: Synthetic oligonucleotide
  Antisense strand to SEQ ID NO: 655464
cucuaaagaaguauucaag

SEQ ID NO: 655466 - RNA, 19 nt, Artificial Sequence
  Description of Artificial Sequence: Synthetic oligonucleotide
  Sense strand starting at position 66 of SEQ ID NO: 585635
ugacgagaaucuucugcuu

SEQ ID NO: 655467 - RNA, 19 nt, Artificial Sequence
  Description of Artificial Sequence: Synthetic oligonucleotide
  Antisense strand to SEQ ID NO: 655466
aagcagaagauucucguca

SEQ ID NO: 655468 - RNA, 19 nt, Artificial Sequence
  Description of Artificial Sequence: Synthetic oligonucleotide
  Sense strand starting at position 71 of SEQ ID NO: 585635
agaaucuucugcuugguaa

SEQ ID NO: 655469 - RNA, 19 nt, Artificial Sequence
  Description of Artificial Sequence: Synthetic oligonucleotide
  Antisense strand to SEQ ID NO: 655468
uuaccaagcagaagauucu

SEQ ID NO: 655470 - RNA, 19 nt, Artificial Sequence
  Description of Artificial Sequence: Synthetic oligonucleotide
  Sense strand starting at position 72 of SEQ ID NO: 585635
gaaucuucugcuugguaag

SEQ ID NO: 655471 - RNA, 19 nt, Artificial Sequence
  Description of Artificial Sequence: Synthetic oligonucleotide
  Antisense strand to SEQ ID NO: 655470
cuuaccaagcagaagauuc

SEQ ID NO: 655472 - RNA, 19 nt, Artificial Sequence
  Description of Artificial Sequence: Synthetic oligonucleotide
  Sense strand starting at position 140 of SEQ ID NO: 585635
gaagaugaucuaugugacu

SEQ ID NO: 655473 - RNA, 19 nt, Artificial Sequence
  Description of Artificial Sequence: Synthetic oligonucleotide
  Antisense strand to SEQ ID NO: 655472
agucacauagaucaucuuc

SEQ ID NO: 655474 - RNA, 19 nt, Artificial Sequence
  Description of Artificial Sequence: Synthetic oligonucleotide
  Sense strand starting at position 145 of SEQ ID NO: 585635
ugaucuaugugacuggaag

SEQ ID NO: 655475 - RNA, 19 nt, Artificial Sequence
  Description of Artificial Sequence: Synthetic oligonucleotide
  Antisense strand to SEQ ID NO: 655474
cuuccagucacauagauca

SEQ ID NO: 655476 - RNA, 19 nt, Artificial Sequence
  Description of Artificial Sequence: Synthetic oligonucleotide
  Sense strand starting at position 217 of SEQ ID NO: 585635
ccaccaggguaguuaucaa

SEQ ID NO: 655477 - RNA, 19 nt, Artificial Sequence
  Description of Artificial Sequence: Synthetic oligonucleotide
  Antisense strand to SEQ ID NO: 655476
uugauaacuacccuggugg

SEQ ID NO: 655478 - RNA, 19 nt, Artificial Sequence
  Description of Artificial Sequence: Synthetic oligonucleotide
  Sense strand starting at position 245 of SEQ ID NO: 585635
ucauacuaugccugggcaa

SEQ ID NO: 655479 - RNA, 19 nt, Artificial Sequence
  Description of Artificial Sequence: Synthetic oligonucleotide
  Antisense strand to SEQ ID NO: 655478
uugcccaggcauaguauga

SEQ ID NO: 655480 - RNA, 19 nt, Artificial Sequence
  Description of Artificial Sequence: Synthetic oligonucleotide
  Sense strand starting at position 266 of SEQ ID NO: 585635
ggaacagagcucugggauu

SEQ ID NO: 655481 - RNA, 19 nt, Artificial Sequence
  Description of Artificial Sequence: Synthetic oligonucleotide
  Antisense strand to SEQ ID NO: 655480
aaucccagagcucuguucc

SEQ ID NO: 655482 - RNA, 19 nt, Artificial Sequence
  Description of Artificial Sequence: Synthetic oligonucleotide
  Sense strand starting at position 435 of SEQ ID NO: 585635
uuggccaaagauugucaaa

SEQ ID NO: 655483 - RNA, 19 nt, Artificial Sequence
  Description of Artificial Sequence: Synthetic oligonucleotide
  Antisense strand to SEQ ID NO: 655482
uuugacaaucuuuggccaa

SEQ ID NO: 655484 - RNA, 19 nt, Artificial Sequence
  Description of Artificial Sequence: Synthetic oligonucleotide
  Sense strand starting at position 437 of SEQ ID NO: 585635
ggccaaagauugucaaaga

SEQ ID NO: 655485 - RNA, 19 nt, Artificial Sequence
  Description of Artificial Sequence: Synthetic oligonucleotide
  Antisense strand to SEQ ID NO: 655484
ucuuugacaaucuuuggcc

SEQ ID NO: 655486 - RNA, 19 nt, Artificial Sequence
  Description of Artificial Sequence: Synthetic oligonucleotide
  Sense strand starting at position 526 of SEQ ID NO: 585635
gggcuaucaggccagcaau

SEQ ID NO: 655487 - RNA, 19 nt, Artificial Sequence
  Description of Artificial Sequence: Synthetic oligonucleotide
  Antisense strand to SEQ ID NO: 655486
auugcuggccugauagccc

SEQ ID NO: 655488 - RNA, 19 nt, Artificial Sequence
  Description of Artificial Sequence: Synthetic oligonucleotide
  Sense strand starting at position 631 of SEQ ID NO: 585635
acagcuucuggagaauucu

SEQ ID NO: 655489 - RNA, 19 nt, Artificial Sequence
  Description of Artificial Sequence: Synthetic oligonucleotide
  Antisense strand to SEQ ID NO: 655488
agaauucuccagaagcugu

SEQ ID NO: 655490 - RNA, 19 nt, Artificial Sequence
  Description of Artificial Sequence: Synthetic oligonucleotide
  Sense strand starting at position 637 of SEQ ID NO: 585635
ucuggagaauucucuuagu

SEQ ID NO: 655491 - RNA, 19 nt, Artificial Sequence
  Description of Artificial Sequence: Synthetic oligonucleotide
  Antisense strand to SEQ ID NO: 655490
acuaagagaauucuccaga

SEQ ID NO: 655492 - RNA, 19 nt, Artificial Sequence
  Description of Artificial Sequence: Synthetic oligonucleotide
  Sense strand starting at position 653 of SEQ ID NO: 585635
aguccuuucggauggagca

SEQ ID NO: 655493 - RNA, 19 nt, Artificial Sequence
  Description of Artificial Sequence: Synthetic oligonucleotide
  Antisense strand to SEQ ID NO: 655492
ugcuccauccgaaaggacu

SEQ ID NO: 655494 - RNA, 19 nt, Artificial Sequence
  Description of Artificial Sequence: Synthetic oligonucleotide
  Sense strand starting at position 710 of SEQ ID NO: 585635
gguaucaugguauaagugu

SEQ ID NO: 655495 - RNA, 19 nt, Artificial Sequence
  Description of Artificial Sequence: Synthetic oligonucleotide
  Antisense strand to SEQ ID NO: 655494
acacuuauaccaugauacc

SEQ ID NO: 655496 - RNA, 19 nt, Artificial Sequence
  Description of Artificial Sequence: Synthetic oligonucleotide
  Sense strand starting at position 716 of SEQ ID NO: 585635
augguauaaguguauucca

SEQ ID NO: 655497 - RNA, 19 nt, Artificial Sequence
  Description of Artificial Sequence: Synthetic oligonucleotide
  Antisense strand to SEQ ID NO: 655496
uggaauacacuuauaccau

SEQ ID NO: 655498 - RNA, 19 nt, Artificial Sequence
  Description of Artificial Sequence: Synthetic oligonucleotide
  Sense strand starting at position 719 of SEQ ID NO: 585635
guauaaguguauuccacac

SEQ ID NO: 655499 - RNA, 19 nt, Artificial Sequence
  Description of Artificial Sequence: Synthetic oligonucleotide
  Antisense strand to SEQ ID NO: 655498
guguggaauacacuuauac

SEQ ID NO: 655500 - RNA, 19 nt, Artificial Sequence
  Description of Artificial Sequence: Synthetic oligonucleotide
  Sense strand starting at position 917 of SEQ ID NO: 585635
ggacaucaucucugaugca

SEQ ID NO: 655501 - RNA, 19 nt, Artificial Sequence
  Description of Artificial Sequence: Synthetic oligonucleotide
  Antisense strand to SEQ ID NO: 655500
ugcaucagagaugaugucc

SEQ ID NO: 655502 - RNA, 19 nt, Artificial Sequence
  Description of Artificial Sequence: Synthetic oligonucleotide
  Sense strand starting at position 961 of SEQ ID NO: 585635
aucuguuauuuccuuuagu

SEQ ID NO: 655503 - RNA, 19 nt, Artificial Sequence
  Description of Artificial Sequence: Synthetic oligonucleotide
  Antisense strand to SEQ ID NO: 655502
acuaaaggaaauaacagau

SEQ ID NO: 655504 - RNA, 19 nt, Artificial Sequence
  Description of Artificial Sequence: Synthetic oligonucleotide
  Sense strand starting at position 962 of SEQ ID NO: 585635
ucuguuauuuccuuuaguc

SEQ ID NO: 655505 - RNA, 19 nt, Artificial Sequence
  Description of Artificial Sequence: Synthetic oligonucleotide
  Antisense strand to SEQ ID NO: 655504
gacuaaaggaaauaacaga

SEQ ID NO: 655506 - RNA, 19 nt, Artificial Sequence
  Description of Artificial Sequence: Synthetic oligonucleotide
  Sense strand starting at position 989 of SEQ ID NO: 585635
ucuuaauucgaucaagguc

SEQ ID NO: 655507 - RNA, 19 nt, Artificial Sequence
  Description of Artificial Sequence: Synthetic oligonucleotide
  Antisense strand to SEQ ID NO: 655506
gaccuugaucgaauuaaga

SEQ ID NO: 655508 - RNA, 19 nt, Artificial Sequence
  Description of Artificial Sequence: Synthetic oligonucleotide
  Sense strand starting at position 1150 of SEQ ID NO: 585635
cagaauugauacgaaggaa

SEQ ID NO: 655509 - RNA, 19 nt, Artificial Sequence
  Description of Artificial Sequence: Synthetic oligonucleotide
  Antisense strand to SEQ ID NO: 655508
uuccuucguaucaauucug

SEQ ID NO: 655510 - RNA, 19 nt, Artificial Sequence
  Description of Artificial Sequence: Synthetic oligonucleotide
  Sense strand starting at position 1291 of SEQ ID NO: 585635
ccauaauacuaggagggau

SEQ ID NO: 655511 - RNA, 19 nt, Artificial Sequence
  Description of Artificial Sequence: Synthetic oligonucleotide
  Antisense strand to SEQ ID NO: 655510
aucccuccuaguauuaugg

SEQ ID NO: 655512 - RNA, 19 nt, Artificial Sequence
  Description of Artificial Sequence: Synthetic oligonucleotide
  Sense strand starting at position 1429 of SEQ ID NO: 585635
agaagacucucgcuagaua

SEQ ID NO: 655513 - RNA, 19 nt, Artificial Sequence
  Description of Artificial Sequence: Synthetic oligonucleotide
  Antisense strand to SEQ ID NO: 655512
uaucuagcgagagucuucu

SEQ ID NO: 655514 - RNA, 19 nt, Artificial Sequence
  Description of Artificial Sequence: Synthetic oligonucleotide
  Sense strand starting at position 1430 of SEQ ID NO: 585635
gaagacucucgcuagauag

SEQ ID NO: 655515 - RNA, 19 nt, Artificial Sequence
  Description of Artificial Sequence: Synthetic oligonucleotide
  Antisense strand to SEQ ID NO: 655514
cuaucuagcgagagucuuc

SEQ ID NO: 655516 - RNA, 19 nt, Artificial Sequence
  Description of Artificial Sequence: Synthetic oligonucleotide
  Sense strand starting at position 1538 of SEQ ID NO: 585635
gguucucacaagugggaga

SEQ ID NO: 655517 - RNA, 19 nt, Artificial Sequence
  Description of Artificial Sequence: Synthetic oligonucleotide
  Antisense strand to SEQ ID NO: 655516
ucucccacuugugagaacc

SEQ ID NO: 655518 - RNA, 19 nt, Artificial Sequence
  Description of Artificial Sequence: Synthetic oligonucleotide
  Sense strand starting at position 2340 of SEQ ID NO: 585635
gugacuugcagugacaagu

SEQ ID NO: 655519 - RNA, 19 nt, Artificial Sequence
  Description of Artificial Sequence: Synthetic oligonucleotide
  Antisense strand to SEQ ID NO: 655518
acuugucacugcaagucac

SEQ ID NO: 655520 - RNA, 19 nt, Artificial Sequence
  Description of Artificial Sequence: Synthetic oligonucleotide
  Sense strand starting at position 2470 of SEQ ID NO: 585635
gucuuagaguucuuaaccu

SEQ ID NO: 655521 - RNA, 19 nt, Artificial Sequence
  Description of Artificial Sequence: Synthetic oligonucleotide
  Antisense strand to SEQ ID NO: 655520
agguuaagaacucuaagac

SEQ ID NO: 655522 - RNA, 19 nt, Artificial Sequence
  Description of Artificial Sequence: Synthetic oligonucleotide
  Sense strand starting at position 2492 of SEQ ID NO: 585635
uucccaugugcuuaugcaa

SEQ ID NO: 655523 - RNA, 19 nt, Artificial Sequence
  Description of Artificial Sequence: Synthetic oligonucleotide
  Antisense strand to SEQ ID NO: 655522
uugcauaagcacaugggaa

SEQ ID NO: 655524 - RNA, 19 nt, Artificial Sequence
  Description of Artificial Sequence: Synthetic oligonucleotide
  Sense strand starting at position 2533 of SEQ ID NO: 585635
gggacauccuccuuauugu

SEQ ID NO: 655525 - RNA, 19 nt, Artificial Sequence
  Description of Artificial Sequence: Synthetic oligonucleotide
  Antisense strand to SEQ ID NO: 655524
acaauaaggaggauguccc

SEQ ID NO: 655526 - RNA, 19 nt, Artificial Sequence
  Description of Artificial Sequence: Synthetic oligonucleotide
  Sense strand starting at position 2534 of SEQ ID NO: 585635
ggacauccuccuuauuguu

SEQ ID NO: 655527 - RNA, 19 nt, Artificial Sequence
  Description of Artificial Sequence: Synthetic oligonucleotide
  Antisense strand to SEQ ID NO: 655526
aacaauaaggaggaugucc

SEQ ID NO: 655528 - RNA, 19 nt, Artificial Sequence
  Description of Artificial Sequence: Synthetic oligonucleotide
  Sense strand starting at position 2659 of SEQ ID NO: 585635
aggcaaucugguggaagaa

SEQ ID NO: 655529 - RNA, 19 nt, Artificial Sequence
  Description of Artificial Sequence: Synthetic oligonucleotide
  Antisense strand to SEQ ID NO: 655528
uucuuccaccagauugccu

SEQ ID NO: 655530 - RNA, 19 nt, Artificial Sequence
  Description of Artificial Sequence: Synthetic oligonucleotide
  Sense strand starting at position 2815 of SEQ ID NO: 585635
ccuagcuaucuggaugagu

SEQ ID NO: 655531 - RNA, 19 nt, Artificial Sequence
  Description of Artificial Sequence: Synthetic oligonucleotide
  Antisense strand to SEQ ID NO: 655530
acucauccagauagcuagg

SEQ ID NO: 655532 - RNA, 19 nt, Artificial Sequence
  Description of Artificial Sequence: Synthetic oligonucleotide
  Sense strand starting at position 2817 of SEQ ID NO: 585635
uagcuaucuggaugaguga

SEQ ID NO: 655533 - RNA, 19 nt, Artificial Sequence
  Description of Artificial Sequence: Synthetic oligonucleotide
  Antisense strand to SEQ ID NO: 655532
ucacucauccagauagcua

SEQ ID NO: 655534 - RNA, 19 nt, Artificial Sequence
  Description of Artificial Sequence: Synthetic oligonucleotide
  Sense strand starting at position 2818 of SEQ ID NO: 585635
agcuaucuggaugagugau

SEQ ID NO: 655535 - RNA, 19 nt, Artificial Sequence
  Description of Artificial Sequence: Synthetic oligonucleotide
  Antisense strand to SEQ ID NO: 655534
aucacucauccagauagcu

SEQ ID NO: 655536 - RNA, 19 nt, Artificial Sequence
  Description of Artificial Sequence: Synthetic oligonucleotide
  Sense strand starting at position 3212 of SEQ ID NO: 585635
augcuugugcauuauauuu

SEQ ID NO: 655537 - RNA, 19 nt, Artificial Sequence
  Description of Artificial Sequence: Synthetic oligonucleotide
  Antisense strand to SEQ ID NO: 655536
aaauauaaugcacaagcau

SEQ ID NO: 655538 - RNA, 19 nt, Artificial Sequence
  Description of Artificial Sequence: Synthetic oligonucleotide
  Sense strand starting at position 3227 of SEQ ID NO: 585635
auuuguaacuuagauguca

SEQ ID NO: 655539 - RNA, 19 nt, Artificial Sequence
  Description of Artificial Sequence: Synthetic oligonucleotide
  Antisense strand to SEQ ID NO: 655538
ugacaucuaaguuacaaau

SEQ ID NO: 655540 - RNA, 19 nt, Artificial Sequence
  Description of Artificial Sequence: Synthetic oligonucleotide
  Sense strand starting at position 3254 of SEQ ID NO: 585635
gcccuuugagauugaggua

SEQ ID NO: 655541 - RNA, 19 nt, Artificial Sequence
  Description of Artificial Sequence: Synthetic oligonucleotide
  Antisense strand to SEQ ID NO: 655540
uaccucaaucucaaagggc

SEQ ID NO: 655542 - RNA, 19 nt, Artificial Sequence
  Description of Artificial Sequence: Synthetic oligonucleotide
  Sense strand starting at position 3504 of SEQ ID NO: 585635
ggucauaugauacauggca

SEQ ID NO: 655543 - RNA, 19 nt, Artificial Sequence
  Description of Artificial Sequence: Synthetic oligonucleotide
  Antisense strand to SEQ ID NO: 655542
ugccauguaucauaugacc

SEQ ID NO: 655544 - RNA, 19 nt, Artificial Sequence
  Description of Artificial Sequence: Synthetic oligonucleotide
  Sense strand starting at position 67 of SEQ ID NO: 585636
gguacucuuucccucauga

SEQ ID NO: 655545 - RNA, 19 nt, Artificial Sequence
  Description of Artificial Sequence: Synthetic oligonucleotide
  Antisense strand to SEQ ID NO: 655544
ucaugagggaaagaguacc

SEQ ID NO: 655546 - RNA, 19 nt, Artificial Sequence
  Description of Artificial Sequence: Synthetic oligonucleotide
  Sense strand starting at position 89 of SEQ ID NO: 585636
uuacauucuggaggauauu

SEQ ID NO: 655547 - RNA, 19 nt, Artificial Sequence
  Description of Artificial Sequence: Synthetic oligonucleotide
  Antisense strand to SEQ ID NO: 655546
aauauccuccagaauguaa

SEQ ID NO: 655548 - RNA, 19 nt, Artificial Sequence
  Description of Artificial Sequence: Synthetic oligonucleotide
  Sense strand starting at position 143 of SEQ ID NO: 585636
ucaggaaguacguauacaa

SEQ ID NO: 655549 - RNA, 19 nt, Artificial Sequence
  Description of Artificial Sequence: Synthetic oligonucleotide
  Antisense strand to SEQ ID NO: 655548
uuguauacguacuuccuga

SEQ ID NO: 655550 - RNA, 19 nt, Artificial Sequence
  Description of Artificial Sequence: Synthetic oligonucleotide
  Sense strand starting at position 164 of SEQ ID NO: 585636
cugaaaugugcauaccuca

SEQ ID NO: 655551 - RNA, 19 nt, Artificial Sequence
  Description of Artificial Sequence: Synthetic oligonucleotide
  Antisense strand to SEQ ID NO: 655550
ugagguaugcacauuucag

SEQ ID NO: 655552 - RNA, 19 nt, Artificial Sequence
  Description of Artificial Sequence: Synthetic oligonucleotide
  Sense strand starting at position 169 of SEQ ID NO: 585636
augugcauaccucaguaau

SEQ ID NO: 655553 - RNA, 19 nt, Artificial Sequence
  Description of Artificial Sequence: Synthetic oligonucleotide
  Antisense strand to SEQ ID NO: 655552
auuacugagguaugcacau

SEQ ID NO: 655554 - RNA, 19 nt, Artificial Sequence
  Description of Artificial Sequence: Synthetic oligonucleotide
  Sense strand starting at position 171 of SEQ ID NO: 585636
gugcauaccucaguaauuu

SEQ ID NO: 655555 - RNA, 19 nt, Artificial Sequence
  Description of Artificial Sequence: Synthetic oligonucleotide
  Antisense strand to SEQ ID NO: 655554
aaauuacugagguaugcac

SEQ ID NO: 655556 - RNA, 19 nt, Artificial Sequence
  Description of Artificial Sequence: Synthetic oligonucleotide
  Sense strand starting at position 194 of SEQ ID NO: 585636
uuccaaguauccucuagga

SEQ ID NO: 655557 - RNA, 19 nt, Artificial Sequence
  Description of Artificial Sequence: Synthetic oligonucleotide
  Antisense strand to SEQ ID NO: 655556
uccuagaggauacuuggaa

SEQ ID NO: 655558 - RNA, 19 nt, Artificial Sequence
  Description of Artificial Sequence: Synthetic oligonucleotide
  Sense strand starting at position 347 of SEQ ID NO: 585636
ugggcagcuaccugaauua

SEQ ID NO: 655559 - RNA, 19 nt, Artificial Sequence
  Description of Artificial Sequence: Synthetic oligonucleotide
  Antisense strand to SEQ ID NO: 655558
uaauucagguagcugccca

SEQ ID NO: 655560 - RNA, 19 nt, Artificial Sequence
  Description of Artificial Sequence: Synthetic oligonucleotide
  Sense strand starting at position 399 of SEQ ID NO: 585636
auacauacaguaugaucau

SEQ ID NO: 655561 - RNA, 19 nt, Artificial Sequence
  Description of Artificial Sequence: Synthetic oligonucleotide
  Antisense strand to SEQ ID NO: 655560
augaucauacuguauguau

SEQ ID NO: 655562 - RNA, 19 nt, Artificial Sequence
  Description of Artificial Sequence: Synthetic oligonucleotide
  Sense strand starting at position 450 of SEQ ID NO: 585636
agagguuuauauguacaua

SEQ ID NO: 655563 - RNA, 19 nt, Artificial Sequence
  Description of Artificial Sequence: Synthetic oligonucleotide
  Antisense strand to SEQ ID NO: 655562
uauguacauauaaaccucu

SEQ ID NO: 655564 - RNA, 19 nt, Artificial Sequence
  Description of Artificial Sequence: Synthetic oligonucleotide
  Sense strand starting at position 549 of SEQ ID NO: 585636
gucuacauugcuuggauuu

SEQ ID NO: 655565 - RNA, 19 nt, Artificial Sequence
  Description of Artificial Sequence: Synthetic oligonucleotide
  Antisense strand to SEQ ID NO: 655564
aaauccaagcaauguagac

SEQ ID NO: 655566 - RNA, 19 nt, Artificial Sequence
  Description of Artificial Sequence: Synthetic oligonucleotide
  Sense strand starting at position 715 of SEQ ID NO: 585636
cugacagaacucugcuuua

SEQ ID NO: 655567 - RNA, 19 nt, Artificial Sequence
  Description of Artificial Sequence: Synthetic oligonucleotide
  Antisense strand to SEQ ID NO: 655566
uaaagcagaguucugucag

SEQ ID NO: 655568 - RNA, 19 nt, Artificial Sequence
  Description of Artificial Sequence: Synthetic oligonucleotide
  Sense strand starting at position 883 of SEQ ID NO: 585636
gcagcaagacguuauuaaa

SEQ ID NO: 655569 - RNA, 19 nt, Artificial Sequence
  Description of Artificial Sequence: Synthetic oligonucleotide
  Antisense strand to SEQ ID NO: 655568
uuuaauaacgucuugcugc

SEQ ID NO: 655570 - RNA, 19 nt, Artificial Sequence
  Description of Artificial Sequence: Synthetic oligonucleotide
  Sense strand starting at position 926 of SEQ ID NO: 585636
uuguccuacuuuguaaaga

SEQ ID NO: 655571 - RNA, 19 nt, Artificial Sequence
  Description of Artificial Sequence: Synthetic oligonucleotide
  Antisense strand to SEQ ID NO: 655570
ucuuuacaaaguaggacaa

SEQ ID NO: 655572 - RNA, 19 nt, Artificial Sequence
  Description of Artificial Sequence: Synthetic oligonucleotide
  Sense strand starting at position 1069 of SEQ ID NO: 585636
ggcuuuaagcuguaaauuc

SEQ ID NO: 655573 - RNA, 19 nt, Artificial Sequence
  Description of Artificial Sequence: Synthetic oligonucleotide
  Antisense strand to SEQ ID NO: 655572
gaauuuacagcuuaaagcc

SEQ ID NO: 655574 - RNA, 19 nt, Artificial Sequence
  Description of Artificial Sequence: Synthetic oligonucleotide
  Sense strand starting at position 1088 of SEQ ID NO: 585636
cggcguuuccuccugcuaa

SEQ ID NO: 655575 - RNA, 19 nt, Artificial Sequence
  Description of Artificial Sequence: Synthetic oligonucleotide
  Antisense strand to SEQ ID NO: 655574
uuagcaggaggaaacgccg

SEQ ID NO: 655576 - RNA, 19 nt, Artificial Sequence
  Description of Artificial Sequence: Synthetic oligonucleotide
  Sense strand starting at position 1090 of SEQ ID NO: 585636
gcguuuccuccugcuaaua

SEQ ID NO: 655577 - RNA, 19 nt, Artificial Sequence
  Description of Artificial Sequence: Synthetic oligonucleotide
  Antisense strand to SEQ ID NO: 655576
uauuagcaggaggaaacgc

SEQ ID NO: 655578 - RNA, 19 nt, Artificial Sequence
  Description of Artificial Sequence: Synthetic oligonucleotide
  Sense strand starting at position 1147 of SEQ ID NO: 585636
aguugcuaagauuaaacua

SEQ ID NO: 655579 - RNA, 19 nt, Artificial Sequence
  Description of Artificial Sequence: Synthetic oligonucleotide
  Antisense strand to SEQ ID NO: 655578
uaguuuaaucuuagcaacu

SEQ ID NO: 655580 - RNA, 19 nt, Artificial Sequence
  Description of Artificial Sequence: Synthetic oligonucleotide
  Sense strand starting at position 1261 of SEQ ID NO: 585636
ggaauuuguuucuacaacu

SEQ ID NO: 655581 - RNA, 19 nt, Artificial Sequence
  Description of Artificial Sequence: Synthetic oligonucleotide
  Antisense strand to SEQ ID NO: 655580
aguuguagaaacaaauucc

SEQ ID NO: 655582 - RNA, 19 nt, Artificial Sequence
  Description of Artificial Sequence: Synthetic oligonucleotide
  Sense strand starting at position 1466 of SEQ ID NO: 585636
aggacaaucaggcagcuau

SEQ ID NO: 655583 - RNA, 19 nt, Artificial Sequence
  Description of Artificial Sequence: Synthetic oligonucleotide
  Antisense strand to SEQ ID NO: 655582
auagcugccugauuguccu

SEQ ID NO: 655584 - RNA, 19 nt, Artificial Sequence
  Description of Artificial Sequence: Synthetic oligonucleotide
  Sense strand starting at position 1689 of SEQ ID NO: 585636
ucaccuggucuccaaguaa

SEQ ID NO: 655585 - RNA, 19 nt, Artificial Sequence
  Description of Artificial Sequence: Synthetic oligonucleotide
  Antisense strand to SEQ ID NO: 655584
uuacuuggagaccagguga

SEQ ID NO: 655586 - RNA, 19 nt, Artificial Sequence
  Description of Artificial Sequence: Synthetic oligonucleotide
  Sense strand starting at position 1785 of SEQ ID NO: 585636
cuacuuccggcgucgauua

SEQ ID NO: 655587 - RNA, 19 nt, Artificial Sequence
  Description of Artificial Sequence: Synthetic oligonucleotide
  Antisense strand to SEQ ID NO: 655586
uaaucgacgccggaaguag

SEQ ID NO: 655588 - RNA, 19 nt, Artificial Sequence
  Description of Artificial Sequence: Synthetic oligonucleotide
  Sense strand starting at position 2474 of SEQ ID NO: 585636
cuuaacauuggcugggaua

SEQ ID NO: 655589 - RNA, 19 nt, Artificial Sequence
  Description of Artificial Sequence: Synthetic oligonucleotide
  Antisense strand to SEQ ID NO: 655588
uaucccagccaauguuaag

SEQ ID NO: 655590 - RNA, 19 nt, Artificial Sequence
  Description of Artificial Sequence: Synthetic oligonucleotide
  Sense strand starting at position 2476 of SEQ ID NO: 585636
uaacauuggcugggauaga

SEQ ID NO: 655591 - RNA, 19 nt, Artificial Sequence
  Description of Artificial Sequence: Synthetic oligonucleotide
  Antisense strand to SEQ ID NO: 655590
ucuaucccagccaauguua

SEQ ID NO: 655592 - RNA, 19 nt, Artificial Sequence
  Description of Artificial Sequence: Synthetic oligonucleotide
  Sense strand starting at position 2490 of SEQ ID NO: 585636
auagaugguaccugaaagu

SEQ ID NO: 655593 - RNA, 19 nt, Artificial Sequence
  Description of Artificial Sequence: Synthetic oligonucleotide
  Antisense strand to SEQ ID NO: 655592
acuuucagguaccaucuau

SEQ ID NO: 655594 - RNA, 19 nt, Artificial Sequence
  Description of Artificial Sequence: Synthetic oligonucleotide
  Sense strand starting at position 2632 of SEQ ID NO: 585636
cuuaauaaugaugguugaa

SEQ ID NO: 655595 - RNA, 19 nt, Artificial Sequence
  Description of Artificial Sequence: Synthetic oligonucleotide
  Antisense strand to SEQ ID NO: 655594
uucaaccaucauuauuaag

SEQ ID NO: 655596 - RNA, 19 nt, Artificial Sequence
  Description of Artificial Sequence: Synthetic oligonucleotide
  Sense strand starting at position 2635 of SEQ ID NO: 585636
aauaaugaugguugaaugu

SEQ ID NO: 655597 - RNA, 19 nt, Artificial Sequence
  Description of Artificial Sequence: Synthetic oligonucleotide
  Antisense strand to SEQ ID NO: 655596
acauucaaccaucauuauu

SEQ ID NO: 655598 - RNA, 19 nt, Artificial Sequence
  Description of Artificial Sequence: Synthetic oligonucleotide
  Sense strand starting at position 2642 of SEQ ID NO: 585636
augguugaauguuuaccau

SEQ ID NO: 655599 - RNA, 19 nt, Artificial Sequence
  Description of Artificial Sequence: Synthetic oligonucleotide
  Antisense strand to SEQ ID NO: 655598
augguaaacauucaaccau

SEQ ID NO: 655600 - RNA, 19 nt, Artificial Sequence
  Description of Artificial Sequence: Synthetic oligonucleotide
  Sense strand starting at position 2757 of SEQ ID NO: 585636
gaagcugagccuuacagau

SEQ ID NO: 655601 - RNA, 19 nt, Artificial Sequence
  Description of Artificial Sequence: Synthetic oligonucleotide
  Antisense strand to SEQ ID NO: 655600
aucuguaaggcucagcuuc

SEQ ID NO: 655602 - RNA, 19 nt, Artificial Sequence
  Description of Artificial Sequence: Synthetic oligonucleotide
  Sense strand starting at position 2833 of SEQ ID NO: 585636
acuguaaugucccuaauug

SEQ ID NO: 655603 - RNA, 19 nt, Artificial Sequence
  Description of Artificial Sequence: Synthetic oligonucleotide
  Antisense strand to SEQ ID NO: 655602
caauuagggacauuacagu

SEQ ID NO: 655604 - RNA, 19 nt, Artificial Sequence
  Description of Artificial Sequence: Synthetic oligonucleotide
  Sense strand starting at position 2834 of SEQ ID NO: 585636
cuguaaugucccuaauugu

SEQ ID NO: 655605 - RNA, 19 nt, Artificial Sequence
  Description of Artificial Sequence: Synthetic oligonucleotide
  Antisense strand to SEQ ID NO: 655604
acaauuagggacauuacag

SEQ ID NO: 655606 - RNA, 19 nt, Artificial Sequence
  Description of Artificial Sequence: Synthetic oligonucleotide
  Sense strand starting at position 2892 of SEQ ID NO: 585636
uagacagcuccuugagaga

SEQ ID NO: 655607 - RNA, 19 nt, Artificial Sequence
  Description of Artificial Sequence: Synthetic oligonucleotide
  Antisense strand to SEQ ID NO: 655606
ucucucaaggagcugucua

SEQ ID NO: 655608 - RNA, 19 nt, Artificial Sequence
  Description of Artificial Sequence: Synthetic oligonucleotide
  Sense strand starting at position 3074 of SEQ ID NO: 585636
ggcccuugagcuggaugaa

SEQ ID NO: 655609 - RNA, 19 nt, Artificial Sequence
  Description of Artificial Sequence: Synthetic oligonucleotide
  Antisense strand to SEQ ID NO: 655608
uucauccagcucaagggcc

SEQ ID NO: 655610 - RNA, 19 nt, Artificial Sequence
  Description of Artificial Sequence: Synthetic oligonucleotide
  Sense strand starting at position 3075 of SEQ ID NO: 585636
gcccuugagcuggaugaaa

SEQ ID NO: 655611 - RNA, 19 nt, Artificial Sequence
  Description of Artificial Sequence: Synthetic oligonucleotide
  Antisense strand to SEQ ID NO: 655610
uuucauccagcucaagggc

SEQ ID NO: 655612 - RNA, 19 nt, Artificial Sequence
  Description of Artificial Sequence: Synthetic oligonucleotide
  Sense strand starting at position 3132 of SEQ ID NO: 585636
ugccuuucucuggacuuua

SEQ ID NO: 655613 - RNA, 19 nt, Artificial Sequence
  Description of Artificial Sequence: Synthetic oligonucleotide
  Antisense strand to SEQ ID NO: 655612
uaaaguccagagaaaggca

SEQ ID NO: 655614 - RNA, 19 nt, Artificial Sequence
  Description of Artificial Sequence: Synthetic oligonucleotide
  Sense strand starting at position 3165 of SEQ ID NO: 585636
guguaucucgggagucaug

SEQ ID NO: 655615 - RNA, 19 nt, Artificial Sequence
  Description of Artificial Sequence: Synthetic oligonucleotide
  Antisense strand to SEQ ID NO: 655614
caugacucccgagauacac

SEQ ID NO: 655616 - RNA, 19 nt, Artificial Sequence
  Description of Artificial Sequence: Synthetic oligonucleotide
  Sense strand starting at position 3194 of SEQ ID NO: 585636
aggcuccaaugucugaaua

SEQ ID NO: 655617 - RNA, 19 nt, Artificial Sequence
  Description of Artificial Sequence: Synthetic oligonucleotide
  Antisense strand to SEQ ID NO: 655616
uauucagacauuggagccu

SEQ ID NO: 655618 - RNA, 19 nt, Artificial Sequence
  Description of Artificial Sequence: Synthetic oligonucleotide
  Sense strand starting at position 3195 of SEQ ID NO: 585636
ggcuccaaugucugaauau

SEQ ID NO: 655619 - RNA, 19 nt, Artificial Sequence
  Description of Artificial Sequence: Synthetic oligonucleotide
  Antisense strand to SEQ ID NO: 655618
auauucagacauuggagcc

SEQ ID NO: 655620 - RNA, 19 nt, Artificial Sequence
  Description of Artificial Sequence: Synthetic oligonucleotide
  Sense strand starting at position 3756 of SEQ ID NO: 585636
gagcucugguuacuccaga

SEQ ID NO: 655621 - RNA, 19 nt, Artificial Sequence
  Description of Artificial Sequence: Synthetic oligonucleotide
  Antisense strand to SEQ ID NO: 655620
ucuggaguaaccagagcuc

SEQ ID NO: 655622 - RNA, 19 nt, Artificial Sequence
  Description of Artificial Sequence: Synthetic oligonucleotide
  Sense strand starting at position 3840 of SEQ ID NO: 585636
uggaguuagccagaagcca

SEQ ID NO: 655623 - RNA, 19 nt, Artificial Sequence
  Description of Artificial Sequence: Synthetic oligonucleotide
  Antisense strand to SEQ ID NO: 655622
uggcuucuggcuaacucca

SEQ ID NO: 655624 - RNA, 19 nt, Artificial Sequence
  Description of Artificial Sequence: Synthetic oligonucleotide
  Sense strand starting at position 21 of SEQ ID NO: 585637
uccucauaacucugggaaa

SEQ ID NO: 655625 - RNA, 19 nt, Artificial Sequence
  Description of Artificial Sequence: Synthetic oligonucleotide
  Antisense strand to SEQ ID NO: 655624
uuucccagaguuaugagga

SEQ ID NO: 655626 - RNA, 19 nt, Artificial Sequence
  Description of Artificial Sequence: Synthetic oligonucleotide
  Sense strand starting at position 233 of SEQ ID NO: 585637
ggguuucuaucacuugaac

SEQ ID NO: 655627 - RNA, 19 nt, Artificial Sequence
  Description of Artificial Sequence: Synthetic oligonucleotide
  Antisense strand to SEQ ID NO: 655626
guucaagugauagaaaccc

SEQ ID NO: 655628 - RNA, 19 nt, Artificial Sequence
  Description of Artificial Sequence: Synthetic oligonucleotide
  Sense strand starting at position 464 of SEQ ID NO: 585637
ugugucaugugguuuauaa

SEQ ID NO: 655629 - RNA, 19 nt, Artificial Sequence
  Description of Artificial Sequence: Synthetic oligonucleotide
  Antisense strand to SEQ ID NO: 655628
uuauaaaccacaugacaca

SEQ ID NO: 655630 - RNA, 19 nt, Artificial Sequence
  Description of Artificial Sequence: Synthetic oligonucleotide
  Sense strand starting at position 510 of SEQ ID NO: 585637
ucagguaacucugcuuaga

SEQ ID NO: 655631 - RNA, 19 nt, Artificial Sequence
  Description of Artificial Sequence: Synthetic oligonucleotide
  Antisense strand to SEQ ID NO: 655630
ucuaagcagaguuaccuga

SEQ ID NO: 655632 - RNA, 19 nt, Artificial Sequence
  Description of Artificial Sequence: Synthetic oligonucleotide
  Sense strand starting at position 512 of SEQ ID NO: 585637
agguaacucugcuuagaaa

SEQ ID NO: 655633 - RNA, 19 nt, Artificial Sequence
  Description of Artificial Sequence: Synthetic oligonucleotide
  Antisense strand to SEQ ID NO: 655632
uuucuaagcagaguuaccu

SEQ ID NO: 655634 - RNA, 19 nt, Artificial Sequence
  Description of Artificial Sequence: Synthetic oligonucleotide
  Sense strand starting at position 513 of SEQ ID NO: 585637
gguaacucugcuuagaaag

SEQ ID NO: 655635 - RNA, 19 nt, Artificial Sequence
  Description of Artificial Sequence: Synthetic oligonucleotide
  Antisense strand to SEQ ID NO: 655634
cuuucuaagcagaguuacc

SEQ ID NO: 655636 - RNA, 19 nt, Artificial Sequence
  Description of Artificial Sequence: Synthetic oligonucleotide
  Sense strand starting at position 549 of SEQ ID NO: 585637
aagagaugaugcuugaucu

SEQ ID NO: 655637 - RNA, 19 nt, Artificial Sequence
  Description of Artificial Sequence: Synthetic oligonucleotide
  Antisense strand to SEQ ID NO: 655636
agaucaagcaucaucucuu

SEQ ID NO: 655638 - RNA, 19 nt, Artificial Sequence
  Description of Artificial Sequence: Synthetic oligonucleotide
  Sense strand starting at position 550 of SEQ ID NO: 585637
agagaugaugcuugaucug

SEQ ID NO: 655639 - RNA, 19 nt, Artificial Sequence
  Description of Artificial Sequence: Synthetic oligonucleotide
  Antisense strand to SEQ ID NO: 655638
cagaucaagcaucaucucu

SEQ ID NO: 655640 - RNA, 19 nt, Artificial Sequence
  Description of Artificial Sequence: Synthetic oligonucleotide
  Sense strand starting at position 553 of SEQ ID NO: 585637
gaugaugcuugaucugaga

SEQ ID NO: 655641 - RNA, 19 nt, Artificial Sequence
  Description of Artificial Sequence: Synthetic oligonucleotide
  Antisense strand to SEQ ID NO: 655640
ucucagaucaagcaucauc

SEQ ID NO: 655642 - RNA, 19 nt, Artificial Sequence
  Description of Artificial Sequence: Synthetic oligonucleotide
  Sense strand starting at position 555 of SEQ ID NO: 585637
ugaugcuugaucugagauu

SEQ ID NO: 655643 - RNA, 19 nt, Artificial Sequence
  Description of Artificial Sequence: Synthetic oligonucleotide
  Antisense strand to SEQ ID NO: 655642
aaucucagaucaagcauca

SEQ ID NO: 655644 - RNA, 19 nt, Artificial Sequence
  Description of Artificial Sequence: Synthetic oligonucleotide
  Sense strand starting at position 556 of SEQ ID NO: 585637
gaugcuugaucugagauuu

SEQ ID NO: 655645 - RNA, 19 nt, Artificial Sequence
  Description of Artificial Sequence: Synthetic oligonucleotide
  Antisense strand to SEQ ID NO: 655644
aaaucucagaucaagcauc

SEQ ID NO: 655646 - RNA, 19 nt, Artificial Sequence
  Description of Artificial Sequence: Synthetic oligonucleotide
  Sense strand starting at position 583 of SEQ ID NO: 585637
aguaguaaguuugccagaa

SEQ ID NO: 655647 - RNA, 19 nt, Artificial Sequence
  Description of Artificial Sequence: Synthetic oligonucleotide
  Antisense strand to SEQ ID NO: 655646
uucuggcaaacuuacuacu

SEQ ID NO: 655648 - RNA, 19 nt, Artificial Sequence
  Description of Artificial Sequence: Synthetic oligonucleotide
  Sense strand starting at position 584 of SEQ ID NO: 585637
guaguaaguuugccagaag

SEQ ID NO: 655649 - RNA, 19 nt, Artificial Sequence
  Description of Artificial Sequence: Synthetic oligonucleotide
  Antisense strand to SEQ ID NO: 655648
cuucuggcaaacuuacuac

SEQ ID NO: 655650 - RNA, 19 nt, Artificial Sequence
  Description of Artificial Sequence: Synthetic oligonucleotide
  Sense strand starting at position 587 of SEQ ID NO: 585637
guaaguuugccagaaggac

SEQ ID NO: 655651 - RNA, 19 nt, Artificial Sequence
  Description of Artificial Sequence: Synthetic oligonucleotide
  Antisense strand to SEQ ID NO: 655650
guccuucuggcaaacuuac

SEQ ID NO: 655652 - RNA, 19 nt, Artificial Sequence
  Description of Artificial Sequence: Synthetic oligonucleotide
  Sense strand starting at position 736 of SEQ ID NO: 585637
gcaggagguaguuauugua

SEQ ID NO: 655653 - RNA, 19 nt, Artificial Sequence
  Description of Artificial Sequence: Synthetic oligonucleotide
  Antisense strand to SEQ ID NO: 655652
uacaauaacuaccuccugc

SEQ ID NO: 655654 - RNA, 19 nt, Artificial Sequence
  Description of Artificial Sequence: Synthetic oligonucleotide
  Sense strand starting at position 746 of SEQ ID NO: 585637
guuauuguacaauauugca

SEQ ID NO: 655655 - RNA, 19 nt, Artificial Sequence
  Description of Artificial Sequence: Synthetic oligonucleotide
  Antisense strand to SEQ ID NO: 655654
ugcaauauuguacaauaac

SEQ ID NO: 655656 - RNA, 19 nt, Artificial Sequence
  Description of Artificial Sequence: Synthetic oligonucleotide
  Sense strand starting at position 806 of SEQ ID NO: 585637
guaggacccuguuuguaac

SEQ ID NO: 655657 - RNA, 19 nt, Artificial Sequence
  Description of Artificial Sequence: Synthetic oligonucleotide
  Antisense strand to SEQ ID NO: 655656
guuacaaacaggguccuac

SEQ ID NO: 655658 - RNA, 19 nt, Artificial Sequence
  Description of Artificial Sequence: Synthetic oligonucleotide
  Sense strand starting at position 812 of SEQ ID NO: 585637
cccuguuuguaacuaaucu

SEQ ID NO: 655659 - RNA, 19 nt, Artificial Sequence
  Description of Artificial Sequence: Synthetic oligonucleotide
  Antisense strand to SEQ ID NO: 655658
agauuaguuacaaacaggg

SEQ ID NO: 655660 - RNA, 19 nt, Artificial Sequence
  Description of Artificial Sequence: Synthetic oligonucleotide
  Sense strand starting at position 836 of SEQ ID NO: 585637
ggucucaguuucuuccuga

SEQ ID NO: 655661 - RNA, 19 nt, Artificial Sequence
  Description of Artificial Sequence: Synthetic oligonucleotide
  Antisense strand to SEQ ID NO: 655660
ucaggaagaaacugagacc

SEQ ID NO: 655662 - RNA, 19 nt, Artificial Sequence
  Description of Artificial Sequence: Synthetic oligonucleotide
  Sense strand starting at position 843 of SEQ ID NO: 585637
guuucuuccugacucugau

SEQ ID NO: 655663 - RNA, 19 nt, Artificial Sequence
  Description of Artificial Sequence: Synthetic oligonucleotide
  Antisense strand to SEQ ID NO: 655662
aucagagucaggaagaaac

SEQ ID NO: 655664 - RNA, 19 nt, Artificial Sequence
  Description of Artificial Sequence: Synthetic oligonucleotide
  Sense strand starting at position 897 of SEQ ID NO: 585637
acaaguaugccaugccuca

SEQ ID NO: 655665 - RNA, 19 nt, Artificial Sequence
  Description of Artificial Sequence: Synthetic oligonucleotide
  Antisense strand to SEQ ID NO: 655664
ugaggcauggcauacuugu

SEQ ID NO: 655666 - RNA, 19 nt, Artificial Sequence
  Description of Artificial Sequence: Synthetic oligonucleotide
  Sense strand starting at position 985 of SEQ ID NO: 585637
aggcguaucugaccacacu

SEQ ID NO: 655667 - RNA, 19 nt, Artificial Sequence
  Description of Artificial Sequence: Synthetic oligonucleotide
  Antisense strand to SEQ ID NO: 655666
aguguggucagauacgccu

SEQ ID NO: 655668 - RNA, 19 nt, Artificial Sequence
  Description of Artificial Sequence: Synthetic oligonucleotide
  Sense strand starting at position 1137 of SEQ ID NO: 585637
ucaaguguucuauauagua

SEQ ID NO: 655669 - RNA, 19 nt, Artificial Sequence
  Description of Artificial Sequence: Synthetic oligonucleotide
  Antisense strand to SEQ ID NO: 655668
uacuauauagaacacuuga

SEQ ID NO: 655670 - RNA, 19 nt, Artificial Sequence
  Description of Artificial Sequence: Synthetic oligonucleotide
  Sense strand starting at position 1149 of SEQ ID NO: 585637
uauaguauucgcuagcuuu

SEQ ID NO: 655671 - RNA, 19 nt, Artificial Sequence
  Description of Artificial Sequence: Synthetic oligonucleotide
  Antisense strand to SEQ ID NO: 655670
aaagcuagcgaauacuaua

SEQ ID NO: 655672 - RNA, 19 nt, Artificial Sequence
  Description of Artificial Sequence: Synthetic oligonucleotide
  Sense strand starting at position 1476 of SEQ ID NO: 585637
uguuccucucacgaguaaa

SEQ ID NO: 655673 - RNA, 19 nt, Artificial Sequence
  Description of Artificial Sequence: Synthetic oligonucleotide
  Antisense strand to SEQ ID NO: 655672
uuuacucgugagaggaaca

SEQ ID NO: 655674 - RNA, 19 nt, Artificial Sequence
  Description of Artificial Sequence: Synthetic oligonucleotide
  Sense strand starting at position 1523 of SEQ ID NO: 585637
uuguaugugcagcucgaau

SEQ ID NO: 655675 - RNA, 19 nt, Artificial Sequence
  Description of Artificial Sequence: Synthetic oligonucleotide
  Antisense strand to SEQ ID NO: 655674
auucgagcugcacauacaa

SEQ ID NO: 655676 - RNA, 19 nt, Artificial Sequence
  Description of Artificial Sequence: Synthetic oligonucleotide
  Sense strand starting at position 1877 of SEQ ID NO: 585637
uaaaguggucuccaguaga

SEQ ID NO: 655677 - RNA, 19 nt, Artificial Sequence
  Description of Artificial Sequence: Synthetic oligonucleotide
  Antisense strand to SEQ ID NO: 655676
ucuacuggagaccacuuua

SEQ ID NO: 655678 - RNA, 19 nt, Artificial Sequence
  Description of Artificial Sequence: Synthetic oligonucleotide
  Sense strand starting at position 2159 of SEQ ID NO: 585637
ggaagccugucccucagaa

SEQ ID NO: 655679 - RNA, 19 nt, Artificial Sequence
  Description of Artificial Sequence: Synthetic oligonucleotide
  Antisense strand to SEQ ID NO: 655678
uucugagggacaggcuucc

SEQ ID NO: 655680 - RNA, 19 nt, Artificial Sequence
  Description of Artificial Sequence: Synthetic oligonucleotide
  Sense strand starting at position 2275 of SEQ ID NO: 585637
gggaucuucucuccaccua

SEQ ID NO: 655681 - RNA, 19 nt, Artificial Sequence
  Description of Artificial Sequence: Synthetic oligonucleotide
  Antisense strand to SEQ ID NO: 655680
uagguggagagaagauccc

SEQ ID NO: 655682 - RNA, 19 nt, Artificial Sequence
  Description of Artificial Sequence: Synthetic oligonucleotide
  Sense strand starting at position 2762 of SEQ ID NO: 585637
gccugucacucuuucuuau

SEQ ID NO: 655683 - RNA, 19 nt, Artificial Sequence
  Description of Artificial Sequence: Synthetic oligonucleotide
  Antisense strand to SEQ ID NO: 655682
auaagaaagagugacaggc

SEQ ID NO: 655684 - RNA, 19 nt, Artificial Sequence
  Description of Artificial Sequence: Synthetic oligonucleotide
  Sense strand starting at position 2764 of SEQ ID NO: 585637
cugucacucuuucuuauga

SEQ ID NO: 655685 - RNA, 19 nt, Artificial Sequence
  Description of Artificial Sequence: Synthetic oligonucleotide
  Antisense strand to SEQ ID NO: 655684
ucauaagaaagagugacag

SEQ ID NO: 655686 - RNA, 19 nt, Artificial Sequence
  Description of Artificial Sequence: Synthetic oligonucleotide
  Sense strand starting at position 3223 of SEQ ID NO: 585637
acaguuugcuauucccuga

SEQ ID NO: 655687 - RNA, 19 nt, Artificial Sequence
  Description of Artificial Sequence: Synthetic oligonucleotide
  Antisense strand to SEQ ID NO: 655686
ucagggaauagcaaacugu

SEQ ID NO: 655688 - RNA, 19 nt, Artificial Sequence
  Description of Artificial Sequence: Synthetic oligonucleotide
  Sense strand starting at position 3226 of SEQ ID NO: 585637
guuugcuauucccugaaca

SEQ ID NO: 655689 - RNA, 19 nt, Artificial Sequence
  Description of Artificial Sequence: Synthetic oligonucleotide
  Antisense strand to SEQ ID NO: 655688
uguucagggaauagcaaac

SEQ ID NO: 655690 - RNA, 19 nt, Artificial Sequence
  Description of Artificial Sequence: Synthetic oligonucleotide
  Sense strand starting at position 3462 of SEQ ID NO: 585637
acaugcuauuuacgaauuu

SEQ ID NO: 655691 - RNA, 19 nt, Artificial Sequence
  Description of Artificial Sequence: Synthetic oligonucleotide
  Antisense strand to SEQ ID NO: 655690
aaauucguaaauagcaugu

SEQ ID NO: 655692 - RNA, 19 nt, Artificial Sequence
  Description of Artificial Sequence: Synthetic oligonucleotide
  Sense strand starting at position 3472 of SEQ ID NO: 585637
uacgaauuuguuuguuugu

SEQ ID NO: 655693 - RNA, 19 nt, Artificial Sequence
  Description of Artificial Sequence: Synthetic oligonucleotide
  Antisense strand to SEQ ID NO: 655692
acaaacaaacaaauucgua

SEQ ID NO: 655694 - RNA, 19 nt, Artificial Sequence
  Description of Artificial Sequence: Synthetic oligonucleotide
  Sense strand starting at position 3473 of SEQ ID NO: 585637
acgaauuuguuuguuuguu

SEQ ID NO: 655695 - RNA, 19 nt, Artificial Sequence
  Description of Artificial Sequence: Synthetic oligonucleotide
  Antisense strand to SEQ ID NO: 655694
aacaaacaaacaaauucgu

SEQ ID NO: 655696 - RNA, 19 nt, Artificial Sequence
  Description of Artificial Sequence: Synthetic oligonucleotide
  Sense strand starting at position 3485 of SEQ ID NO: 585637
guuuguuuauuguuacuag

SEQ ID NO: 655697 - RNA, 19 nt, Artificial Sequence
  Description of Artificial Sequence: Synthetic oligonucleotide
  Antisense strand to SEQ ID NO: 655696
cuaguaacaauaaacaaac

SEQ ID NO: 655698 - RNA, 19 nt, Artificial Sequence
  Description of Artificial Sequence: Synthetic oligonucleotide
  Sense strand starting at position 3501 of SEQ ID NO: 585637
uagaauguguguuccagga

SEQ ID NO: 655699 - RNA, 19 nt, Artificial Sequence
  Description of Artificial Sequence: Synthetic oligonucleotide
  Antisense strand to SEQ ID NO: 655698
uccuggaacacacauucua

SEQ ID NO: 655700 - RNA, 19 nt, Artificial Sequence
  Description of Artificial Sequence: Synthetic oligonucleotide
  Sense strand starting at position 3505 of SEQ ID NO: 585637
auguguguuccaggauauu

SEQ ID NO: 655701 - RNA, 19 nt, Artificial Sequence
  Description of Artificial Sequence: Synthetic oligonucleotide
  Antisense strand to SEQ ID NO: 655700
aauauccuggaacacacau

SEQ ID NO: 655702 - RNA, 19 nt, Artificial Sequence
  Description of Artificial Sequence: Synthetic oligonucleotide
  Sense strand starting at position 3552 of SEQ ID NO: 585637
aucccuaaugcguaugaca

SEQ ID NO: 655703 - RNA, 19 nt, Artificial Sequence
  Description of Artificial Sequence: Synthetic oligonucleotide
  Antisense strand to SEQ ID NO: 655702
ugucauacgcauuagggau

SEQ ID NO: 655704 - RNA, 19 nt, Artificial Sequence
  Description of Artificial Sequence: Synthetic oligonucleotide
  Sense strand starting at position 65 of SEQ ID NO: 585638
ggccauuaacuuugguaau

SEQ ID NO: 655705 - RNA, 19 nt, Artificial Sequence
  Description of Artificial Sequence: Synthetic oligonucleotide
  Antisense strand to SEQ ID NO: 655704
auuaccaaaguuaauggcc

SEQ ID NO: 655706 - RNA, 19 nt, Artificial Sequence
  Description of Artificial Sequence: Synthetic oligonucleotide
  Sense strand starting at position 448 of SEQ ID NO: 585638
gagucaccgcgccaagaua

SEQ ID NO: 655707 - RNA, 19 nt, Artificial Sequence
  Description of Artificial Sequence: Synthetic oligonucleotide
  Antisense strand to SEQ ID NO: 655706
uaucuuggcgcggugacuc

SEQ ID NO: 655708 - RNA, 19 nt, Artificial Sequence
  Description of Artificial Sequence: Synthetic oligonucleotide
  Sense strand starting at position 456 of SEQ ID NO: 585638
gcgccaagauaucuucuau

SEQ ID NO: 655709 - RNA, 19 nt, Artificial Sequence
  Description of Artificial Sequence: Synthetic oligonucleotide
  Antisense strand to SEQ ID NO: 655708
auagaagauaucuuggcgc

SEQ ID NO: 655710 - RNA, 19 nt, Artificial Sequence
  Description of Artificial Sequence: Synthetic oligonucleotide
  Sense strand starting at position 466 of SEQ ID NO: 585638
aucuucuauuugggaacau

SEQ ID NO: 655711 - RNA, 19 nt, Artificial Sequence
  Description of Artificial Sequence: Synthetic oligonucleotide
  Antisense strand to SEQ ID NO: 655710
auguucccaaauagaagau

SEQ ID NO: 655712 - RNA, 19 nt, Artificial Sequence
  Description of Artificial Sequence: Synthetic oligonucleotide
  Sense strand starting at position 467 of SEQ ID NO: 585638
ucuucuauuugggaacauu

SEQ ID NO: 655713 - RNA, 19 nt, Artificial Sequence
  Description of Artificial Sequence: Synthetic oligonucleotide
  Antisense strand to SEQ ID NO: 655712
aauguucccaaauagaaga

SEQ ID NO: 655714 - RNA, 19 nt, Artificial Sequence
  Description of Artificial Sequence: Synthetic oligonucleotide
  Sense strand starting at position 505 of SEQ ID NO: 585638
uggguacuucgggaguuaa

SEQ ID NO: 655715 - RNA, 19 nt, Artificial Sequence
  Description of Artificial Sequence: Synthetic oligonucleotide
  Antisense strand to SEQ ID NO: 655714
uuaacucccgaaguaccca

SEQ ID NO: 655716 - RNA, 19 nt, Artificial Sequence
  Description of Artificial Sequence: Synthetic oligonucleotide
  Sense strand starting at position 536 of SEQ ID NO: 585638
aggcaugguccuggaguca

SEQ ID NO: 655717 - RNA, 19 nt, Artificial Sequence
  Description of Artificial Sequence: Synthetic oligonucleotide
  Antisense strand to SEQ ID NO: 655716
ugacuccaggaccaugccu

SEQ ID NO: 655718 - RNA, 19 nt, Artificial Sequence
  Description of Artificial Sequence: Synthetic oligonucleotide
  Sense strand starting at position 545 of SEQ ID NO: 585638
ccuggagucaagugagcuu

SEQ ID NO: 655719 - RNA, 19 nt, Artificial Sequence
  Description of Artificial Sequence: Synthetic oligonucleotide
  Antisense strand to SEQ ID NO: 655718
aagcucacuugacuccagg

SEQ ID NO: 655720 - RNA, 19 nt, Artificial Sequence
  Description of Artificial Sequence: Synthetic oligonucleotide
  Sense strand starting at position 554 of SEQ ID NO: 585638
aagugagcuucggcgagaa

SEQ ID NO: 655721 - RNA, 19 nt, Artificial Sequence
  Description of Artificial Sequence: Synthetic oligonucleotide
  Antisense strand to SEQ ID NO: 655720
uucucgccgaagcucacuu

SEQ ID NO: 655722 - RNA, 19 nt, Artificial Sequence
  Description of Artificial Sequence: Synthetic oligonucleotide
  Sense strand starting at position 556 of SEQ ID NO: 585638
gugagcuucggcgagaagu

SEQ ID NO: 655723 - RNA, 19 nt, Artificial Sequence
  Description of Artificial Sequence: Synthetic oligonucleotide
  Antisense strand to SEQ ID NO: 655722
acuucucgccgaagcucac

SEQ ID NO: 655724 - RNA, 19 nt, Artificial Sequence
  Description of Artificial Sequence: Synthetic oligonucleotide
  Sense strand starting at position 557 of SEQ ID NO: 585638
ugagcuucggcgagaaguu

SEQ ID NO: 655725 - RNA, 19 nt, Artificial Sequence
  Description of Artificial Sequence: Synthetic oligonucleotide
  Antisense strand to SEQ ID NO: 655724
aacuucucgccgaagcuca

SEQ ID NO: 655726 - RNA, 19 nt, Artificial Sequence
  Description of Artificial Sequence: Synthetic oligonucleotide
  Sense strand starting at position 558 of SEQ ID NO: 585638
gagcuucggcgagaaguuu

SEQ ID NO: 655727 - RNA, 19 nt, Artificial Sequence
  Description of Artificial Sequence: Synthetic oligonucleotide
  Antisense strand to SEQ ID NO: 655726
aaacuucucgccgaagcuc

SEQ ID NO: 655728 - RNA, 19 nt, Artificial Sequence
  Description of Artificial Sequence: Synthetic oligonucleotide
  Sense strand starting at position 566 of SEQ ID NO: 585638
gcgagaaguuugccaugga

SEQ ID NO: 655729 - RNA, 19 nt, Artificial Sequence
  Description of Artificial Sequence: Synthetic oligonucleotide
  Antisense strand to SEQ ID NO: 655728
uccauggcaaacuucucgc

SEQ ID NO: 655730 - RNA, 19 nt, Artificial Sequence
  Description of Artificial Sequence: Synthetic oligonucleotide
  Sense strand starting at position 594 of SEQ ID NO: 585638
uggagcaaacccuguaaga

SEQ ID NO: 655731 - RNA, 19 nt, Artificial Sequence
  Description of Artificial Sequence: Synthetic oligonucleotide
  Antisense strand to SEQ ID NO: 655730
ucuuacaggguuugcucca

SEQ ID NO: 655732 - RNA, 19 nt, Artificial Sequence
  Description of Artificial Sequence: Synthetic oligonucleotide
  Sense strand starting at position 680 of SEQ ID NO: 585638
gcaugacugaucuggccaa

SEQ ID NO: 655733 - RNA, 19 nt, Artificial Sequence
  Description of Artificial Sequence: Synthetic oligonucleotide
  Antisense strand to SEQ ID NO: 655732
uuggccagaucagucaugc

SEQ ID NO: 655734 - RNA, 19 nt, Artificial Sequence
  Description of Artificial Sequence: Synthetic oligonucleotide
  Sense strand starting at position 692 of SEQ ID NO: 585638
uggccaaauucuuccaguu

SEQ ID NO: 655735 - RNA, 19 nt, Artificial Sequence
  Description of Artificial Sequence: Synthetic oligonucleotide
  Antisense strand to SEQ ID NO: 655734
aacuggaagaauuuggcca

SEQ ID NO: 655736 - RNA, 19 nt, Artificial Sequence
  Description of Artificial Sequence: Synthetic oligonucleotide
  Sense strand starting at position 726 of SEQ ID NO: 585638
ccuuuaguaucguucugag

SEQ ID NO: 655737 - RNA, 19 nt, Artificial Sequence
  Description of Artificial Sequence: Synthetic oligonucleotide
  Antisense strand to SEQ ID NO: 655736
cucagaacgauacuaaagg

SEQ ID NO: 655738 - RNA, 19 nt, Artificial Sequence
  Description of Artificial Sequence: Synthetic oligonucleotide
  Sense strand starting at position 733 of SEQ ID NO: 585638
uaucguucugaguguuuac

SEQ ID NO: 655739 - RNA, 19 nt, Artificial Sequence
  Description of Artificial Sequence: Synthetic oligonucleotide
  Antisense strand to SEQ ID NO: 655738
guaaacacucagaacgaua

SEQ ID NO: 655740 - RNA, 19 nt, Artificial Sequence
  Description of Artificial Sequence: Synthetic oligonucleotide
  Sense strand starting at position 736 of SEQ ID NO: 585638
cguucugaguguuuacaaa

SEQ ID NO: 655741 - RNA, 19 nt, Artificial Sequence
  Description of Artificial Sequence: Synthetic oligonucleotide
  Antisense strand to SEQ ID NO: 655740
uuuguaaacacucagaacg

SEQ ID NO: 655742 - RNA, 19 nt, Artificial Sequence
  Description of Artificial Sequence: Synthetic oligonucleotide
  Sense strand starting at position 778 of SEQ ID NO: 585638
ugaagcaucuaguucgauu

SEQ ID NO: 655743 - RNA, 19 nt, Artificial Sequence
  Description of Artificial Sequence: Synthetic oligonucleotide
  Antisense strand to SEQ ID NO: 655742
aaucgaacuagaugcuuca

SEQ ID NO: 655744 - RNA, 19 nt, Artificial Sequence
  Description of Artificial Sequence: Synthetic oligonucleotide
  Sense strand starting at position 841 of SEQ ID NO: 585638
ccgcaugaauaguuaacaa

SEQ ID NO: 655745 - RNA, 19 nt, Artificial Sequence
  Description of Artificial Sequence: Synthetic oligonucleotide
  Antisense strand to SEQ ID NO: 655744
uuguuaacuauucaugcgg

SEQ ID NO: 655746 - RNA, 19 nt, Artificial Sequence
  Description of Artificial Sequence: Synthetic oligonucleotide
  Sense strand starting at position 1002 of SEQ ID NO: 585638
gggauuaccuuaucuccca

SEQ ID NO: 655747 - RNA, 19 nt, Artificial Sequence
  Description of Artificial Sequence: Synthetic oligonucleotide
  Antisense strand to SEQ ID NO: 655746
ugggagauaagguaauccc

SEQ ID NO: 655748 - RNA, 19 nt, Artificial Sequence
  Description of Artificial Sequence: Synthetic oligonucleotide
  Sense strand starting at position 1042 of SEQ ID NO: 585638
ucgcucaguucucccuuua

SEQ ID NO: 655749 - RNA, 19 nt, Artificial Sequence
  Description of Artificial Sequence: Synthetic oligonucleotide
  Antisense strand to SEQ ID NO: 655748
uaaagggagaacugagcga

SEQ ID NO: 655750 - RNA, 19 nt, Artificial Sequence
  Description of Artificial Sequence: Synthetic oligonucleotide
  Sense strand starting at position 1265 of SEQ ID NO: 585638
ggagguuucucugugguua

SEQ ID NO: 655751 - RNA, 19 nt, Artificial Sequence
  Description of Artificial Sequence: Synthetic oligonucleotide
  Antisense strand to SEQ ID NO: 655750
uaaccacagagaaaccucc

SEQ ID NO: 655752 - RNA, 19 nt, Artificial Sequence
  Description of Artificial Sequence: Synthetic oligonucleotide
  Sense strand starting at position 1266 of SEQ ID NO: 585638
gagguuucucugugguuac

SEQ ID NO: 655753 - RNA, 19 nt, Artificial Sequence
  Description of Artificial Sequence: Synthetic oligonucleotide
  Antisense strand to SEQ ID NO: 655752
guaaccacagagaaaccuc

SEQ ID NO: 655754 - RNA, 19 nt, Artificial Sequence
  Description of Artificial Sequence: Synthetic oligonucleotide
  Sense strand starting at position 2596 of SEQ ID NO: 585638
ccaagaagguccuaugacu

SEQ ID NO: 655755 - RNA, 19 nt, Artificial Sequence
  Description of Artificial Sequence: Synthetic oligonucleotide
  Antisense strand to SEQ ID NO: 655754
agucauaggaccuucuugg

SEQ ID NO: 655756 - RNA, 19 nt, Artificial Sequence
  Description of Artificial Sequence: Synthetic oligonucleotide
  Sense strand starting at position 2715 of SEQ ID NO: 585638
gcugaucagagcuggaaga

SEQ ID NO: 655757 - RNA, 19 nt, Artificial Sequence
  Description of Artificial Sequence: Synthetic oligonucleotide
  Antisense strand to SEQ ID NO: 655756
ucuuccagcucugaucagc

SEQ ID NO: 655758 - RNA, 19 nt, Artificial Sequence
  Description of Artificial Sequence: Synthetic oligonucleotide
  Sense strand starting at position 3114 of SEQ ID NO: 585638
gccuaugugacccauguga

SEQ ID NO: 655759 - RNA, 19 nt, Artificial Sequence
  Description of Artificial Sequence: Synthetic oligonucleotide
  Antisense strand to SEQ ID NO: 655758
ucacaugggucacauaggc

SEQ ID NO: 655760 - RNA, 19 nt, Artificial Sequence
  Description of Artificial Sequence: Synthetic oligonucleotide
  Sense strand starting at position 3116 of SEQ ID NO: 585638
cuaugugacccaugugagu

SEQ ID NO: 655761 - RNA, 19 nt, Artificial Sequence
  Description of Artificial Sequence: Synthetic oligonucleotide
  Antisense strand to SEQ ID NO: 655760
acucacaugggucacauag

SEQ ID NO: 655762 - RNA, 19 nt, Artificial Sequence
  Description of Artificial Sequence: Synthetic oligonucleotide
  Sense strand starting at position 3183 of SEQ ID NO: 585638
gagagaugguacuucucua

SEQ ID NO: 655763 - RNA, 19 nt, Artificial Sequence
  Description of Artificial Sequence: Synthetic oligonucleotide
  Antisense strand to SEQ ID NO: 655762
uagagaaguaccaucucuc

SEQ ID NO: 655764 - RNA, 19 nt, Artificial Sequence
  Description of Artificial Sequence: Synthetic oligonucleotide
  Sense strand starting at position 3191 of SEQ ID NO: 585638
guacuucucuagcucucau

SEQ ID NO: 655765 - RNA, 19 nt, Artificial Sequence
  Description of Artificial Sequence: Synthetic oligonucleotide
  Antisense strand to SEQ ID NO: 655764
augagagcuagagaaguac

SEQ ID NO: 655766 - RNA, 19 nt, Artificial Sequence
  Description of Artificial Sequence: Synthetic oligonucleotide
  Sense strand starting at position 3259 of SEQ ID NO: 585638
aggcuuauccauuguauac

SEQ ID NO: 655767 - RNA, 19 nt, Artificial Sequence
  Description of Artificial Sequence: Synthetic oligonucleotide
  Antisense strand to SEQ ID NO: 655766
guauacaauggauaagccu

SEQ ID NO: 655768 - RNA, 19 nt, Artificial Sequence
  Description of Artificial Sequence: Synthetic oligonucleotide
  Sense strand starting at position 3334 of SEQ ID NO: 585638
ucagucuuaucugcuguga

SEQ ID NO: 655769 - RNA, 19 nt, Artificial Sequence
  Description of Artificial Sequence: Synthetic oligonucleotide
  Antisense strand to SEQ ID NO: 655768
ucacagcagauaagacuga

SEQ ID NO: 655770 - RNA, 19 nt, Artificial Sequence
  Description of Artificial Sequence: Synthetic oligonucleotide
  Sense strand starting at position 3715 of SEQ ID NO: 585638
ugaggacuugccuguuacu

SEQ ID NO: 655771 - RNA, 19 nt, Artificial Sequence
  Description of Artificial Sequence: Synthetic oligonucleotide
  Antisense strand to SEQ ID NO: 655770
aguaacaggcaaguccuca

SEQ ID NO: 655772 - RNA, 19 nt, Artificial Sequence
  Description of Artificial Sequence: Synthetic oligonucleotide
  Sense strand starting at position 3799 of SEQ ID NO: 585638
cccuuagggcucugaggaa

SEQ ID NO: 655773 - RNA, 19 nt, Artificial Sequence
  Description of Artificial Sequence: Synthetic oligonucleotide
  Antisense strand to SEQ ID NO: 655772
uuccucagagcccuaaggg

SEQ ID NO: 655774 - RNA, 19 nt, Artificial Sequence
  Description of Artificial Sequence: Synthetic oligonucleotide
  Sense strand starting at position 3942 of SEQ ID NO: 585638
ugcugugucucuuugucua

SEQ ID NO: 655775 - RNA, 19 nt, Artificial Sequence
  Description of Artificial Sequence: Synthetic oligonucleotide
  Antisense strand to SEQ ID NO: 655774
uagacaaagagacacagca

SEQ ID NO: 655776 - RNA, 19 nt, Artificial Sequence
  Description of Artificial Sequence: Synthetic oligonucleotide
  Sense strand starting at position 3945 of SEQ ID NO: 585638
ugugucucuuugucuacua

SEQ ID NO: 655777 - RNA, 19 nt, Artificial Sequence
  Description of Artificial Sequence: Synthetic oligonucleotide
  Antisense strand to SEQ ID NO: 655776
uaguagacaaagagacaca

SEQ ID NO: 655778 - RNA, 19 nt, Artificial Sequence
  Description of Artificial Sequence: Synthetic oligonucleotide
  Sense strand starting at position 3946 of SEQ ID NO: 585638
gugucucuuugucuacuaa

SEQ ID NO: 655779 - RNA, 19 nt, Artificial Sequence
  Description of Artificial Sequence: Synthetic oligonucleotide
  Antisense strand to SEQ ID NO: 655778
uuaguagacaaagagacac

SEQ ID NO: 655780 - RNA, 19 nt, Artificial Sequence
  Description of Artificial Sequence: Synthetic oligonucleotide
  Sense strand starting at position 3957 of SEQ ID NO: 585638
ucuacuaaccuguguagau

SEQ ID NO: 655781 - RNA, 19 nt, Artificial Sequence
  Description of Artificial Sequence: Synthetic oligonucleotide
  Antisense strand to SEQ ID NO: 655780
aucuacacagguuaguaga

SEQ ID NO: 655782 - RNA, 19 nt, Artificial Sequence
  Description of Artificial Sequence: Synthetic oligonucleotide
  Sense strand starting at position 3958 of SEQ ID NO: 585638
cuacuaaccuguguagauc

SEQ ID NO: 655783 - RNA, 19 nt, Artificial Sequence
  Description of Artificial Sequence: Synthetic oligonucleotide
  Antisense strand to SEQ ID NO: 655782
gaucuacacagguuaguag

SEQ ID NO: 655784 - RNA, 19 nt, Artificial Sequence
  Description of Artificial Sequence: Synthetic oligonucleotide
  Sense strand starting at position 229 of SEQ ID NO: 585639
caaggaaagucgccauauu

SEQ ID NO: 655785 - RNA, 19 nt, Artificial Sequence
  Description of Artificial Sequence: Synthetic oligonucleotide
  Antisense strand to SEQ ID NO: 655784
aauauggcgacuuuccuug

SEQ ID NO: 655786 - RNA, 19 nt, Artificial Sequence
  Description of Artificial Sequence: Synthetic oligonucleotide
  Sense strand starting at position 230 of SEQ ID NO: 585639
aaggaaagucgccauauug

SEQ ID NO: 655787 - RNA, 19 nt, Artificial Sequence
  Description of Artificial Sequence: Synthetic oligonucleotide
  Antisense strand to SEQ ID NO: 655786
caauauggcgacuuuccuu

SEQ ID NO: 655788 - RNA, 19 nt, Artificial Sequence
  Description of Artificial Sequence: Synthetic oligonucleotide
  Sense strand starting at position 498 of SEQ ID NO: 585639
auguacuggcacuaagauu

SEQ ID NO: 655789 - RNA, 19 nt, Artificial Sequence
  Description of Artificial Sequence: Synthetic oligonucleotide
  Antisense strand to SEQ ID NO: 655788
aaucuuagugccaguacau

SEQ ID NO: 655790 - RNA, 19 nt, Artificial Sequence
  Description of Artificial Sequence: Synthetic oligonucleotide
  Sense strand starting at position 635 of SEQ ID NO: 585639
guuauagcgagcuauuacu

SEQ ID NO: 655791 - RNA, 19 nt, Artificial Sequence
  Description of Artificial Sequence: Synthetic oligonucleotide
  Antisense strand to SEQ ID NO: 655790
aguaauagcucgcuauaac

SEQ ID NO: 655792 - RNA, 19 nt, Artificial Sequence
  Description of Artificial Sequence: Synthetic oligonucleotide
  Sense strand starting at position 677 of SEQ ID NO: 585639
ugcaaucuuuauguacaga

SEQ ID NO: 655793 - RNA, 19 nt, Artificial Sequence
  Description of Artificial Sequence: Synthetic oligonucleotide
  Antisense strand to SEQ ID NO: 655792
ucuguacauaaagauugca

SEQ ID NO: 655794 - RNA, 19 nt, Artificial Sequence
  Description of Artificial Sequence: Synthetic oligonucleotide
  Sense strand starting at position 685 of SEQ ID NO: 585639
uuauguacagauugcuuau

SEQ ID NO: 655795 - RNA, 19 nt, Artificial Sequence
  Description of Artificial Sequence: Synthetic oligonucleotide
  Antisense strand to SEQ ID NO: 655794
auaagcaaucuguacauaa

SEQ ID NO: 655796 - RNA, 19 nt, Artificial Sequence
  Description of Artificial Sequence: Synthetic oligonucleotide
  Sense strand starting at position 687 of SEQ ID NO: 585639
auguacagauugcuuauua

SEQ ID NO: 655797 - RNA, 19 nt, Artificial Sequence
  Description of Artificial Sequence: Synthetic oligonucleotide
  Antisense strand to SEQ ID NO: 655796
uaauaagcaaucuguacau

SEQ ID NO: 655798 - RNA, 19 nt, Artificial Sequence
  Description of Artificial Sequence: Synthetic oligonucleotide
  Sense strand starting at position 688 of SEQ ID NO: 585639
uguacagauugcuuauuaa

SEQ ID NO: 655799 - RNA, 19 nt, Artificial Sequence
  Description of Artificial Sequence: Synthetic oligonucleotide
  Antisense strand to SEQ ID NO: 655798
uuaauaagcaaucuguaca

SEQ ID NO: 655800 - RNA, 19 nt, Artificial Sequence
  Description of Artificial Sequence: Synthetic oligonucleotide
  Sense strand starting at position 752 of SEQ ID NO: 585639
ugguacuucugggccacaa

SEQ ID NO: 655801 - RNA, 19 nt, Artificial Sequence
  Description of Artificial Sequence: Synthetic oligonucleotide
  Antisense strand to SEQ ID NO: 655800
uuguggcccagaaguacca

SEQ ID NO: 655802 - RNA, 19 nt, Artificial Sequence
  Description of Artificial Sequence: Synthetic oligonucleotide
  Sense strand starting at position 754 of SEQ ID NO: 585639
guacuucugggccacaaga

SEQ ID NO: 655803 - RNA, 19 nt, Artificial Sequence
  Description of Artificial Sequence: Synthetic oligonucleotide
  Antisense strand to SEQ ID NO: 655802
ucuuguggcccagaaguac

SEQ ID NO: 655804 - RNA, 19 nt, Artificial Sequence
  Description of Artificial Sequence: Synthetic oligonucleotide
  Sense strand starting at position 788 of SEQ ID NO: 585639
augugagcucauuaacccu

SEQ ID NO: 655805 - RNA, 19 nt, Artificial Sequence
  Description of Artificial Sequence: Synthetic oligonucleotide
  Antisense strand to SEQ ID NO: 655804
aggguuaaugagcucacau

SEQ ID NO: 655806 - RNA, 19 nt, Artificial Sequence
  Description of Artificial Sequence: Synthetic oligonucleotide
  Sense strand starting at position 876 of SEQ ID NO: 585639
ucuggaaauuggcuggauu

SEQ ID NO: 655807 - RNA, 19 nt, Artificial Sequence
  Description of Artificial Sequence: Synthetic oligonucleotide
  Antisense strand to SEQ ID NO: 655806
aauccagccaauuuccaga

SEQ ID NO: 655808 - RNA, 19 nt, Artificial Sequence
  Description of Artificial Sequence: Synthetic oligonucleotide
  Sense strand starting at position 878 of SEQ ID NO: 585639
uggaaauuggcuggauuac

SEQ ID NO: 655809 - RNA, 19 nt, Artificial Sequence
  Description of Artificial Sequence: Synthetic oligonucleotide
  Antisense strand to SEQ ID NO: 655808
guaauccagccaauuucca

SEQ ID NO: 655810 - RNA, 19 nt, Artificial Sequence
  Description of Artificial Sequence: Synthetic oligonucleotide
  Sense strand starting at position 888 of SEQ ID NO: 585639
cuggauuaccaaggguuaa

SEQ ID NO: 655811 - RNA, 19 nt, Artificial Sequence
  Description of Artificial Sequence: Synthetic oligonucleotide
  Antisense strand to SEQ ID NO: 655810
uuaacccuugguaauccag

SEQ ID NO: 655812 - RNA, 19 nt, Artificial Sequence
  Description of Artificial Sequence: Synthetic oligonucleotide
  Sense strand starting at position 889 of SEQ ID NO: 585639
uggauuaccaaggguuaac

SEQ ID NO: 655813 - RNA, 19 nt, Artificial Sequence
  Description of Artificial Sequence: Synthetic oligonucleotide
  Antisense strand to SEQ ID NO: 655812
guuaacccuugguaaucca

SEQ ID NO: 655814 - RNA, 19 nt, Artificial Sequence
  Description of Artificial Sequence: Synthetic oligonucleotide
  Sense strand starting at position 1042 of SEQ ID NO: 585639
ccagauugguccuucucca

SEQ ID NO: 655815 - RNA, 19 nt, Artificial Sequence
  Description of Artificial Sequence: Synthetic oligonucleotide
  Antisense strand to SEQ ID NO: 655814
uggagaaggaccaaucugg

SEQ ID NO: 655816 - RNA, 19 nt, Artificial Sequence
  Description of Artificial Sequence: Synthetic oligonucleotide
  Sense strand starting at position 1125 of SEQ ID NO: 585639
guugauuucuuguugcaag

SEQ ID NO: 655817 - RNA, 19 nt, Artificial Sequence
  Description of Artificial Sequence: Synthetic oligonucleotide
  Antisense strand to SEQ ID NO: 655816
cuugcaacaagaaaucaac

SEQ ID NO: 655818 - RNA, 19 nt, Artificial Sequence
  Description of Artificial Sequence: Synthetic oligonucleotide
  Sense strand starting at position 1401 of SEQ ID NO: 585639
aaguaaacgcuggaugagu

SEQ ID NO: 655819 - RNA, 19 nt, Artificial Sequence
  Description of Artificial Sequence: Synthetic oligonucleotide
  Antisense strand to SEQ ID NO: 655818
acucauccagcguuuacuu

SEQ ID NO: 655820 - RNA, 19 nt, Artificial Sequence
  Description of Artificial Sequence: Synthetic oligonucleotide
  Sense strand starting at position 1438 of SEQ ID NO: 585639
aagggagggugguugauua

SEQ ID NO: 655821 - RNA, 19 nt, Artificial Sequence
  Description of Artificial Sequence: Synthetic oligonucleotide
  Antisense strand to SEQ ID NO: 655820
uaaucaaccacccucccuu

SEQ ID NO: 655822 - RNA, 19 nt, Artificial Sequence
  Description of Artificial Sequence: Synthetic oligonucleotide
  Sense strand starting at position 1439 of SEQ ID NO: 585639
agggagggugguugauuau

SEQ ID NO: 655823 - RNA, 19 nt, Artificial Sequence
  Description of Artificial Sequence: Synthetic oligonucleotide
  Antisense strand to SEQ ID NO: 655822
auaaucaaccacccucccu

SEQ ID NO: 655824 - RNA, 19 nt, Artificial Sequence
  Description of Artificial Sequence: Synthetic oligonucleotide
  Sense strand starting at position 1440 of SEQ ID NO: 585639
gggagggugguugauuauu

SEQ ID NO: 655825 - RNA, 19 nt, Artificial Sequence
  Description of Artificial Sequence: Synthetic oligonucleotide
  Antisense strand to SEQ ID NO: 655824
aauaaucaaccacccuccc

SEQ ID NO: 655826 - RNA, 19 nt, Artificial Sequence
  Description of Artificial Sequence: Synthetic oligonucleotide
  Sense strand starting at position 1665 of SEQ ID NO: 585639
ccugucuuucuccgagaaa

SEQ ID NO: 655827 - RNA, 19 nt, Artificial Sequence
  Description of Artificial Sequence: Synthetic oligonucleotide
  Antisense strand to SEQ ID NO: 655826
uuucucggagaaagacagg

SEQ ID NO: 655828 - RNA, 19 nt, Artificial Sequence
  Description of Artificial Sequence: Synthetic oligonucleotide
  Sense strand starting at position 1719 of SEQ ID NO: 585639
agauguaaucaguacgggu

SEQ ID NO: 655829 - RNA, 19 nt, Artificial Sequence
  Description of Artificial Sequence: Synthetic oligonucleotide
  Antisense strand to SEQ ID NO: 655828
acccguacugauuacaucu

SEQ ID NO: 655830 - RNA, 19 nt, Artificial Sequence
  Description of Artificial Sequence: Synthetic oligonucleotide
  Sense strand starting at position 2012 of SEQ ID NO: 585639
cuugucgcgagacauuaua

SEQ ID NO: 655831 - RNA, 19 nt, Artificial Sequence
  Description of Artificial Sequence: Synthetic oligonucleotide
  Antisense strand to SEQ ID NO: 655830
uauaaugucucgcgacaag

SEQ ID NO: 655832 - RNA, 19 nt, Artificial Sequence
  Description of Artificial Sequence: Synthetic oligonucleotide
  Sense strand starting at position 2038 of SEQ ID NO: 585639
cgugaacucauuggucaac

SEQ ID NO: 655833 - RNA, 19 nt, Artificial Sequence
  Description of Artificial Sequence: Synthetic oligonucleotide
  Antisense strand to SEQ ID NO: 655832
guugaccaaugaguucacg

SEQ ID NO: 655834 - RNA, 19 nt, Artificial Sequence
  Description of Artificial Sequence: Synthetic oligonucleotide
  Sense strand starting at position 2202 of SEQ ID NO: 585639
ccacuuccgcccuggagaa

SEQ ID NO: 655835 - RNA, 19 nt, Artificial Sequence
  Description of Artificial Sequence: Synthetic oligonucleotide
  Antisense strand to SEQ ID NO: 655834
uucuccagggcggaagugg

SEQ ID NO: 655836 - RNA, 19 nt, Artificial Sequence
  Description of Artificial Sequence: Synthetic oligonucleotide
  Sense strand starting at position 2633 of SEQ ID NO: 585639
ucagguaacucuucgaaag

SEQ ID NO: 655837 - RNA, 19 nt, Artificial Sequence
  Description of Artificial Sequence: Synthetic oligonucleotide
  Antisense strand to SEQ ID NO: 655836
cuuucgaagaguuaccuga

SEQ ID NO: 655838 - RNA, 19 nt, Artificial Sequence
  Description of Artificial Sequence: Synthetic oligonucleotide
  Sense strand starting at position 2634 of SEQ ID NO: 585639
cagguaacucuucgaaaga

SEQ ID NO: 655839 - RNA, 19 nt, Artificial Sequence
  Description of Artificial Sequence: Synthetic oligonucleotide
  Antisense strand to SEQ ID NO: 655838
ucuuucgaagaguuaccug

SEQ ID NO: 655840 - RNA, 19 nt, Artificial Sequence
  Description of Artificial Sequence: Synthetic oligonucleotide
  Sense strand starting at position 2674 of SEQ ID NO: 585639
gguuauaccuucucgaggu

SEQ ID NO: 655841 - RNA, 19 nt, Artificial Sequence
  Description of Artificial Sequence: Synthetic oligonucleotide
  Antisense strand to SEQ ID NO: 655840
accucgagaagguauaacc

SEQ ID NO: 655842 - RNA, 19 nt, Artificial Sequence
  Description of Artificial Sequence: Synthetic oligonucleotide
  Sense strand starting at position 3029 of SEQ ID NO: 585639
uaugcaaguggugacuaaa

SEQ ID NO: 655843 - RNA, 19 nt, Artificial Sequence
  Description of Artificial Sequence: Synthetic oligonucleotide
  Antisense strand to SEQ ID NO: 655842
uuuagucaccacuugcaua

SEQ ID NO: 655844 - RNA, 19 nt, Artificial Sequence
  Description of Artificial Sequence: Synthetic oligonucleotide
  Sense strand starting at position 3032 of SEQ ID NO: 585639
gcaaguggugacuaaaucu

SEQ ID NO: 655845 - RNA, 19 nt, Artificial Sequence
  Description of Artificial Sequence: Synthetic oligonucleotide
  Antisense strand to SEQ ID NO: 655844
agauuuagucaccacuugc

SEQ ID NO: 655846 - RNA, 19 nt, Artificial Sequence
  Description of Artificial Sequence: Synthetic oligonucleotide
  Sense strand starting at position 3124 of SEQ ID NO: 585639
caggauauauucuuacgac

SEQ ID NO: 655847 - RNA, 19 nt, Artificial Sequence
  Description of Artificial Sequence: Synthetic oligonucleotide
  Antisense strand to SEQ ID NO: 655846
gucguaagaauauauccug

SEQ ID NO: 655848 - RNA, 19 nt, Artificial Sequence
  Description of Artificial Sequence: Synthetic oligonucleotide
  Sense strand starting at position 3174 of SEQ ID NO: 585639
aucaguuucuuaucggagu

SEQ ID NO: 655849 - RNA, 19 nt, Artificial Sequence
  Description of Artificial Sequence: Synthetic oligonucleotide
  Antisense strand to SEQ ID NO: 655848
acuccgauaagaaacugau

SEQ ID NO: 655850 - RNA, 19 nt, Artificial Sequence
  Description of Artificial Sequence: Synthetic oligonucleotide
  Sense strand starting at position 3181 of SEQ ID NO: 585639
ucuuaucggaguuaugaga

SEQ ID NO: 655851 - RNA, 19 nt, Artificial Sequence
  Description of Artificial Sequence: Synthetic oligonucleotide
  Antisense strand to SEQ ID NO: 655850
ucucauaacuccgauaaga

SEQ ID NO: 655852 - RNA, 19 nt, Artificial Sequence
  Description of Artificial Sequence: Synthetic oligonucleotide
  Sense strand starting at position 3202 of SEQ ID NO: 585639
uuaacuccguccuuugaau

SEQ ID NO: 655853 - RNA, 19 nt, Artificial Sequence
  Description of Artificial Sequence: Synthetic oligonucleotide
  Antisense strand to SEQ ID NO: 655852
auucaaaggacggaguuaa

SEQ ID NO: 655854 - RNA, 19 nt, Artificial Sequence
  Description of Artificial Sequence: Synthetic oligonucleotide
  Sense strand starting at position 3210 of SEQ ID NO: 585639
guccuuugaauugagguuu

SEQ ID NO: 655855 - RNA, 19 nt, Artificial Sequence
  Description of Artificial Sequence: Synthetic oligonucleotide
  Antisense strand to SEQ ID NO: 655854
aaaccucaauucaaaggac

SEQ ID NO: 655856 - RNA, 19 nt, Artificial Sequence
  Description of Artificial Sequence: Synthetic oligonucleotide
  Sense strand starting at position 3222 of SEQ ID NO: 585639
gagguuucccuccagucuu

SEQ ID NO: 655857 - RNA, 19 nt, Artificial Sequence
  Description of Artificial Sequence: Synthetic oligonucleotide
  Antisense strand to SEQ ID NO: 655856
aagacuggagggaaaccuc

SEQ ID NO: 655858 - RNA, 19 nt, Artificial Sequence
  Description of Artificial Sequence: Synthetic oligonucleotide
  Sense strand starting at position 3382 of SEQ ID NO: 585639
agcguuaggacucaaguuu

SEQ ID NO: 655859 - RNA, 19 nt, Artificial Sequence
  Description of Artificial Sequence: Synthetic oligonucleotide
  Antisense strand to SEQ ID NO: 655858
aaacuugaguccuaacgcu

SEQ ID NO: 655860 - RNA, 19 nt, Artificial Sequence
  Description of Artificial Sequence: Synthetic oligonucleotide
  Sense strand starting at position 3400 of SEQ ID NO: 585639
uguucugcccuguagaaug

SEQ ID NO: 655861 - RNA, 19 nt, Artificial Sequence
  Description of Artificial Sequence: Synthetic oligonucleotide
  Antisense strand to SEQ ID NO: 655860
cauucuacagggcagaaca

SEQ ID NO: 655862 - RNA, 19 nt, Artificial Sequence
  Description of Artificial Sequence: Synthetic oligonucleotide
  Sense strand starting at position 3462 of SEQ ID NO: 585639
uuggauugauuuggagacu

SEQ ID NO: 655863 - RNA, 19 nt, Artificial Sequence
  Description of Artificial Sequence: Synthetic oligonucleotide
  Antisense strand to SEQ ID NO: 655862
agucuccaaaucaauccaa

SEQ ID NO: 655864 - RNA, 19 nt, Artificial Sequence
  Description of Artificial Sequence: Synthetic oligonucleotide
  Sense strand starting at position 85 of SEQ ID NO: 585640
gaggaaggguaagauauau

SEQ ID NO: 655865 - RNA, 19 nt, Artificial Sequence
  Description of Artificial Sequence: Synthetic oligonucleotide
  Antisense strand to SEQ ID NO: 655864
auauaucuuacccuuccuc

SEQ ID NO: 655866 - RNA, 19 nt, Artificial Sequence
  Description of Artificial Sequence: Synthetic oligonucleotide
  Sense strand starting at position 215 of SEQ ID NO: 585640
cucuuagagagccacgaau

SEQ ID NO: 655867 - RNA, 19 nt, Artificial Sequence
  Description of Artificial Sequence: Synthetic oligonucleotide
  Antisense strand to SEQ ID NO: 655866
auucguggcucucuaagag

SEQ ID NO: 655868 - RNA, 19 nt, Artificial Sequence
  Description of Artificial Sequence: Synthetic oligonucleotide
  Sense strand starting at position 268 of SEQ ID NO: 585640
ugcugucagaccuaggcaa

SEQ ID NO: 655869 - RNA, 19 nt, Artificial Sequence
  Description of Artificial Sequence: Synthetic oligonucleotide
  Antisense strand to SEQ ID NO: 655868
uugccuaggucugacagca

SEQ ID NO: 655870 - RNA, 19 nt, Artificial Sequence
  Description of Artificial Sequence: Synthetic oligonucleotide
  Sense strand starting at position 270 of SEQ ID NO: 585640
cugucagaccuaggcaauu

SEQ ID NO: 655871 - RNA, 19 nt, Artificial Sequence
  Description of Artificial Sequence: Synthetic oligonucleotide
  Antisense strand to SEQ ID NO: 655870
aauugccuaggucugacag

SEQ ID NO: 655872 - RNA, 19 nt, Artificial Sequence
  Description of Artificial Sequence: Synthetic oligonucleotide
  Sense strand starting at position 372 of SEQ ID NO: 585640
cuggaaagccaguggauau

SEQ ID NO: 655873 - RNA, 19 nt, Artificial Sequence
  Description of Artificial Sequence: Synthetic oligonucleotide
  Antisense strand to SEQ ID NO: 655872
auauccacuggcuuuccag

SEQ ID NO: 655874 - RNA, 19 nt, Artificial Sequence
  Description of Artificial Sequence: Synthetic oligonucleotide
  Sense strand starting at position 558 of SEQ ID NO: 585640
ccgguucuccuagaagguu

SEQ ID NO: 655875 - RNA, 19 nt, Artificial Sequence
  Description of Artificial Sequence: Synthetic oligonucleotide
  Antisense strand to SEQ ID NO: 655874
aaccuucuaggagaaccgg

SEQ ID NO: 655876 - RNA, 19 nt, Artificial Sequence
  Description of Artificial Sequence: Synthetic oligonucleotide
  Sense strand starting at position 570 of SEQ ID NO: 585640
gaagguuaaggaugagcau

SEQ ID NO: 655877 - RNA, 19 nt, Artificial Sequence
  Description of Artificial Sequence: Synthetic oligonucleotide
  Antisense strand to SEQ ID NO: 655876
augcucauccuuaaccuuc

SEQ ID NO: 655878 - RNA, 19 nt, Artificial Sequence
  Description of Artificial Sequence: Synthetic oligonucleotide
  Sense strand starting at position 579 of SEQ ID NO: 585640
ggaugagcauaccuaucua

SEQ ID NO: 655879 - RNA, 19 nt, Artificial Sequence
  Description of Artificial Sequence: Synthetic oligonucleotide
  Antisense strand to SEQ ID NO: 655878
uagauagguaugcucaucc

SEQ ID NO: 655880 - RNA, 19 nt, Artificial Sequence
  Description of Artificial Sequence: Synthetic oligonucleotide
  Sense strand starting at position 728 of SEQ ID NO: 585640
cagauagucccuugaggaa

SEQ ID NO: 655881 - RNA, 19 nt, Artificial Sequence
  Description of Artificial Sequence: Synthetic oligonucleotide
  Antisense strand to SEQ ID NO: 655880
uuccucaagggacuaucug

SEQ ID NO: 655882 - RNA, 19 nt, Artificial Sequence
  Description of Artificial Sequence: Synthetic oligonucleotide
  Sense strand starting at position 868 of SEQ ID NO: 585640
ccaaaucauccuugguagu

SEQ ID NO: 655883 - RNA, 19 nt, Artificial Sequence
  Description of Artificial Sequence: Synthetic oligonucleotide
  Antisense strand to SEQ ID NO: 655882
acuaccaaggaugauuugg

SEQ ID NO: 655884 - RNA, 19 nt, Artificial Sequence
  Description of Artificial Sequence: Synthetic oligonucleotide
  Sense strand starting at position 1109 of SEQ ID NO: 585640
gaguauuaagcccaaugca

SEQ ID NO: 655885 - RNA, 19 nt, Artificial Sequence
  Description of Artificial Sequence: Synthetic oligonucleotide
  Antisense strand to SEQ ID NO: 655884
ugcauugggcuuaauacuc

SEQ ID NO: 655886 - RNA, 19 nt, Artificial Sequence
  Description of Artificial Sequence: Synthetic oligonucleotide
  Sense strand starting at position 1317 of SEQ ID NO: 585640
uugauaaguuggccuccaa

SEQ ID NO: 655887 - RNA, 19 nt, Artificial Sequence
  Description of Artificial Sequence: Synthetic oligonucleotide
  Antisense strand to SEQ ID NO: 655886
uuggaggccaacuuaucaa

SEQ ID NO: 655888 - RNA, 19 nt, Artificial Sequence
  Description of Artificial Sequence: Synthetic oligonucleotide
  Sense strand starting at position 1397 of SEQ ID NO: 585640
auuucccuuucguuuauua

SEQ ID NO: 655889 - RNA, 19 nt, Artificial Sequence
  Description of Artificial Sequence: Synthetic oligonucleotide
  Antisense strand to SEQ ID NO: 655888
uaauaaacgaaagggaaau

SEQ ID NO: 655890 - RNA, 19 nt, Artificial Sequence
  Description of Artificial Sequence: Synthetic oligonucleotide
  Sense strand starting at position 1399 of SEQ ID NO: 585640
uucccuuucguuuauuacu

SEQ ID NO: 655891 - RNA, 19 nt, Artificial Sequence
  Description of Artificial Sequence: Synthetic oligonucleotide
  Antisense strand to SEQ ID NO: 655890
aguaauaaacgaaagggaa

SEQ ID NO: 655892 - RNA, 19 nt, Artificial Sequence
  Description of Artificial Sequence: Synthetic oligonucleotide
  Sense strand starting at position 1405 of SEQ ID NO: 585640
uucguuuauuacuuacaca

SEQ ID NO: 655893 - RNA, 19 nt, Artificial Sequence
  Description of Artificial Sequence: Synthetic oligonucleotide
  Antisense strand to SEQ ID NO: 655892
uguguaaguaauaaacgaa

SEQ ID NO: 655894 - RNA, 19 nt, Artificial Sequence
  Description of Artificial Sequence: Synthetic oligonucleotide
  Sense strand starting at position 2012 of SEQ ID NO: 585640
aggcgucgcuggauuaguu

SEQ ID NO: 655895 - RNA, 19 nt, Artificial Sequence
  Description of Artificial Sequence: Synthetic oligonucleotide
  Antisense strand to SEQ ID NO: 655894
aacuaauccagcgacgccu

SEQ ID NO: 655896 - RNA, 19 nt, Artificial Sequence
  Description of Artificial Sequence: Synthetic oligonucleotide
  Sense strand starting at position 2350 of SEQ ID NO: 585640
uggucuggguuucucuaaa

SEQ ID NO: 655897 - RNA, 19 nt, Artificial Sequence
  Description of Artificial Sequence: Synthetic oligonucleotide
  Antisense strand to SEQ ID NO: 655896
uuuagagaaacccagacca

SEQ ID NO: 655898 - RNA, 19 nt, Artificial Sequence
  Description of Artificial Sequence: Synthetic oligonucleotide
  Sense strand starting at position 2398 of SEQ ID NO: 585640
acacuuaagagucaagcga

SEQ ID NO: 655899 - RNA, 19 nt, Artificial Sequence
  Description of Artificial Sequence: Synthetic oligonucleotide
  Antisense strand to SEQ ID NO: 655898
ucgcuugacucuuaagugu

SEQ ID NO: 655900 - RNA, 19 nt, Artificial Sequence
  Description of Artificial Sequence: Synthetic oligonucleotide
  Sense strand starting at position 2502 of SEQ ID NO: 585640
gugcuacgccuugaagaug

SEQ ID NO: 655901 - RNA, 19 nt, Artificial Sequence
  Description of Artificial Sequence: Synthetic oligonucleotide
  Antisense strand to SEQ ID NO: 655900
caucuucaaggcguagcac

SEQ ID NO: 655902 - RNA, 19 nt, Artificial Sequence
  Description of Artificial Sequence: Synthetic oligonucleotide
  Sense strand starting at position 2551 of SEQ ID NO: 585640
uuagcucuaguaggaaaga

SEQ ID NO: 655903 - RNA, 19 nt, Artificial Sequence
  Description of Artificial Sequence: Synthetic oligonucleotide
  Antisense strand to SEQ ID NO: 655902
ucuuuccuacuagagcuaa

SEQ ID NO: 655904 - RNA, 19 nt, Artificial Sequence
  Description of Artificial Sequence: Synthetic oligonucleotide
  Sense strand starting at position 2624 of SEQ ID NO: 585640
augucugauuuguaaaucu

SEQ ID NO: 655905 - RNA, 19 nt, Artificial Sequence
  Description of Artificial Sequence: Synthetic oligonucleotide
  Antisense strand to SEQ ID NO: 655904
agauuuacaaaucagacau

SEQ ID NO: 655906 - RNA, 19 nt, Artificial Sequence
  Description of Artificial Sequence: Synthetic oligonucleotide
  Sense strand starting at position 2634 of SEQ ID NO: 585640
uguaaaucugaauguaguu

SEQ ID NO: 655907 - RNA, 19 nt, Artificial Sequence
  Description of Artificial Sequence: Synthetic oligonucleotide
  Antisense strand to SEQ ID NO: 655906
aacuacauucagauuuaca

SEQ ID NO: 655908 - RNA, 19 nt, Artificial Sequence
  Description of Artificial Sequence: Synthetic oligonucleotide
  Sense strand starting at position 2639 of SEQ ID NO: 585640
aucugaauguaguuacaua

SEQ ID NO: 655909 - RNA, 19 nt, Artificial Sequence
  Description of Artificial Sequence: Synthetic oligonucleotide
  Antisense strand to SEQ ID NO: 655908
uauguaacuacauucagau

SEQ ID NO: 655910 - RNA, 19 nt, Artificial Sequence
  Description of Artificial Sequence: Synthetic oligonucleotide
  Sense strand starting at position 2702 of SEQ ID NO: 585640
cagagaaauggucguaaau

SEQ ID NO: 655911 - RNA, 19 nt, Artificial Sequence
  Description of Artificial Sequence: Synthetic oligonucleotide
  Antisense strand to SEQ ID NO: 655910
auuuacgaccauuucucug

SEQ ID NO: 655912 - RNA, 19 nt, Artificial Sequence
  Description of Artificial Sequence: Synthetic oligonucleotide
  Sense strand starting at position 2748 of SEQ ID NO: 585640
uaugcacguuucuuagaga

SEQ ID NO: 655913 - RNA, 19 nt, Artificial Sequence
  Description of Artificial Sequence: Synthetic oligonucleotide
  Antisense strand to SEQ ID NO: 655912
ucucuaagaaacgugcaua

SEQ ID NO: 655914 - RNA, 19 nt, Artificial Sequence
  Description of Artificial Sequence: Synthetic oligonucleotide
  Sense strand starting at position 2753 of SEQ ID NO: 585640
acguuucuuagagagcaaa

SEQ ID NO: 655915 - RNA, 19 nt, Artificial Sequence
  Description of Artificial Sequence: Synthetic oligonucleotide
  Antisense strand to SEQ ID NO: 655914
uuugcucucuaagaaacgu

SEQ ID NO: 655916 - RNA, 19 nt, Artificial Sequence
  Description of Artificial Sequence: Synthetic oligonucleotide
  Sense strand starting at position 2840 of SEQ ID NO: 585640
uguagaugugugcacuaca

SEQ ID NO: 655917 - RNA, 19 nt, Artificial Sequence
  Description of Artificial Sequence: Synthetic oligonucleotide
  Antisense strand to SEQ ID NO: 655916
uguagugcacacaucuaca

SEQ ID NO: 655918 - RNA, 19 nt, Artificial Sequence
  Description of Artificial Sequence: Synthetic oligonucleotide
  Sense strand starting at position 2843 of SEQ ID NO: 585640
agaugugugcacuacagga

SEQ ID NO: 655919 - RNA, 19 nt, Artificial Sequence
  Description of Artificial Sequence: Synthetic oligonucleotide
  Antisense strand to SEQ ID NO: 655918
uccuguagugcacacaucu

SEQ ID NO: 655920 - RNA, 19 nt, Artificial Sequence
  Description of Artificial Sequence: Synthetic oligonucleotide
  Sense strand starting at position 2912 of SEQ ID NO: 585640
cagguaggcagugguuaua

SEQ ID NO: 655921 - RNA, 19 nt, Artificial Sequence
  Description of Artificial Sequence: Synthetic oligonucleotide
  Antisense strand to SEQ ID NO: 655920
uauaaccacugccuaccug

SEQ ID NO: 655922 - RNA, 19 nt, Artificial Sequence
  Description of Artificial Sequence: Synthetic oligonucleotide
  Sense strand starting at position 2940 of SEQ ID NO: 585640
cuguaugcuuugcuaagaa

SEQ ID NO: 655923 - RNA, 19 nt, Artificial Sequence
  Description of Artificial Sequence: Synthetic oligonucleotide
  Antisense strand to SEQ ID NO: 655922
uucuuagcaaagcauacag

SEQ ID NO: 655924 - RNA, 19 nt, Artificial Sequence
  Description of Artificial Sequence: Synthetic oligonucleotide
  Sense strand starting at position 3058 of SEQ ID NO: 585640
agucaacugccagaacagu

SEQ ID NO: 655925 - RNA, 19 nt, Artificial Sequence
  Description of Artificial Sequence: Synthetic oligonucleotide
  Antisense strand to SEQ ID NO: 655924
acuguucuggcaguugacu

SEQ ID NO: 655926 - RNA, 19 nt, Artificial Sequence
  Description of Artificial Sequence: Synthetic oligonucleotide
  Sense strand starting at position 3092 of SEQ ID NO: 585640
ggaagacugcccugcccau

SEQ ID NO: 655927 - RNA, 19 nt, Artificial Sequence
  Description of Artificial Sequence: Synthetic oligonucleotide
  Antisense strand to SEQ ID NO: 655926
augggcagggcagucuucc

SEQ ID NO: 655928 - RNA, 19 nt, Artificial Sequence
  Description of Artificial Sequence: Synthetic oligonucleotide
  Sense strand starting at position 3148 of SEQ ID NO: 585640
guuugagagcucugaauau

SEQ ID NO: 655929 - RNA, 19 nt, Artificial Sequence
  Description of Artificial Sequence: Synthetic oligonucleotide
  Antisense strand to SEQ ID NO: 655928
auauucagagcucucaaac

SEQ ID NO: 655930 - RNA, 19 nt, Artificial Sequence
  Description of Artificial Sequence: Synthetic oligonucleotide
  Sense strand starting at position 3237 of SEQ ID NO: 585640
gcgggaccugaguaugcau

SEQ ID NO: 655931 - RNA, 19 nt, Artificial Sequence
  Description of Artificial Sequence: Synthetic oligonucleotide
  Antisense strand to SEQ ID NO: 655930
augcauacucaggucccgc

SEQ ID NO: 655932 - RNA, 19 nt, Artificial Sequence
  Description of Artificial Sequence: Synthetic oligonucleotide
  Sense strand starting at position 3309 of SEQ ID NO: 585640
gcaugucuaguccauuaaa

SEQ ID NO: 655933 - RNA, 19 nt, Artificial Sequence
  Description of Artificial Sequence: Synthetic oligonucleotide
  Antisense strand to SEQ ID NO: 655932
uuuaauggacuagacaugc

SEQ ID NO: 655934 - RNA, 19 nt, Artificial Sequence
  Description of Artificial Sequence: Synthetic oligonucleotide
  Sense strand starting at position 3403 of SEQ ID NO: 585640
uuugguuaucucuguggag

SEQ ID NO: 655935 - RNA, 19 nt, Artificial Sequence
  Description of Artificial Sequence: Synthetic oligonucleotide
  Antisense strand to SEQ ID NO: 655934
cuccacagagauaaccaaa

SEQ ID NO: 655936 - RNA, 19 nt, Artificial Sequence
  Description of Artificial Sequence: Synthetic oligonucleotide
  Sense strand starting at position 3405 of SEQ ID NO: 585640
ugguuaucucuguggagua

SEQ ID NO: 655937 - RNA, 19 nt, Artificial Sequence
  Description of Artificial Sequence: Synthetic oligonucleotide
  Antisense strand to SEQ ID NO: 655936
uacuccacagagauaacca

SEQ ID NO: 655938 - RNA, 19 nt, Artificial Sequence
  Description of Artificial Sequence: Synthetic oligonucleotide
  Sense strand starting at position 3410 of SEQ ID NO: 585640
aucucuguggaguaggauu

SEQ ID NO: 655939 - RNA, 19 nt, Artificial Sequence
  Description of Artificial Sequence: Synthetic oligonucleotide
  Antisense strand to SEQ ID NO: 655938
aauccuacuccacagagau

SEQ ID NO: 655940 - RNA, 19 nt, Artificial Sequence
  Description of Artificial Sequence: Synthetic oligonucleotide
  Sense strand starting at position 3418 of SEQ ID NO: 585640
ggaguaggauuccuuguga

SEQ ID NO: 655941 - RNA, 19 nt, Artificial Sequence
  Description of Artificial Sequence: Synthetic oligonucleotide
  Antisense strand to SEQ ID NO: 655940
ucacaaggaauccuacucc

SEQ ID NO: 655942 - RNA, 19 nt, Artificial Sequence
  Description of Artificial Sequence: Synthetic oligonucleotide
  Sense strand starting at position 3935 of SEQ ID NO: 585640
agugaucacuuaguggcau

SEQ ID NO: 655943 - RNA, 19 nt, Artificial Sequence
  Description of Artificial Sequence: Synthetic oligonucleotide
  Antisense strand to SEQ ID NO: 655942
augccacuaagugaucacu

SEQ ID NO: 655944 - RNA, 19 nt, Artificial Sequence
  Description of Artificial Sequence: Synthetic oligonucleotide
  Sense strand starting at position 357 of SEQ ID NO: 585641
gugcaaugaggguguuuaa

SEQ ID NO: 655945 - RNA, 19 nt, Artificial Sequence
  Description of Artificial Sequence: Synthetic oligonucleotide
  Antisense strand to SEQ ID NO: 655944
uuaaacacccucauugcac

SEQ ID NO: 655946 - RNA, 19 nt, Artificial Sequence
  Description of Artificial Sequence: Synthetic oligonucleotide
  Sense strand starting at position 360 of SEQ ID NO: 585641
caaugaggguguuuaagaa

SEQ ID NO: 655947 - RNA, 19 nt, Artificial Sequence
  Description of Artificial Sequence: Synthetic oligonucleotide
  Antisense strand to SEQ ID NO: 655946
uucuuaaacacccucauug

SEQ ID NO: 655948 - RNA, 19 nt, Artificial Sequence
  Description of Artificial Sequence: Synthetic oligonucleotide
  Sense strand starting at position 396 of SEQ ID NO: 585641
ggccaugaaaugugucaaa

SEQ ID NO: 655949 - RNA, 19 nt, Artificial Sequence
  Description of Artificial Sequence: Synthetic oligonucleotide
  Antisense strand to SEQ ID NO: 655948
uuugacacauuucauggcc

SEQ ID NO: 655950 - RNA, 19 nt, Artificial Sequence
  Description of Artificial Sequence: Synthetic oligonucleotide
  Sense strand starting at position 433 of SEQ ID NO: 585641
agugguaaagccugugagu

SEQ ID NO: 655951 - RNA, 19 nt, Artificial Sequence
  Description of Artificial Sequence: Synthetic oligonucleotide
  Antisense strand to SEQ ID NO: 655950
acucacaggcuuuaccacu

SEQ ID NO: 655952 - RNA, 19 nt, Artificial Sequence
  Description of Artificial Sequence: Synthetic oligonucleotide
  Sense strand starting at position 435 of SEQ ID NO: 585641
ugguaaagccugugaguuc

SEQ ID NO: 655953 - RNA, 19 nt, Artificial Sequence
  Description of Artificial Sequence: Synthetic oligonucleotide
  Antisense strand to SEQ ID NO: 655952
gaacucacaggcuuuacca

SEQ ID NO: 655954 - RNA, 19 nt, Artificial Sequence
  Description of Artificial Sequence: Synthetic oligonucleotide
  Sense strand starting at position 458 of SEQ ID NO: 585641
gguugucaucucuguugaa

SEQ ID NO: 655955 - RNA, 19 nt, Artificial Sequence
  Description of Artificial Sequence: Synthetic oligonucleotide
  Antisense strand to SEQ ID NO: 655954
uucaacagagaugacaacc

SEQ ID NO: 655956 - RNA, 19 nt, Artificial Sequence
  Description of Artificial Sequence: Synthetic oligonucleotide
  Sense strand starting at position 459 of SEQ ID NO: 585641
guugucaucucuguugaag

SEQ ID NO: 655957 - RNA, 19 nt, Artificial Sequence
  Description of Artificial Sequence: Synthetic oligonucleotide
  Antisense strand to SEQ ID NO: 655956
cuucaacagagaugacaac

SEQ ID NO: 655958 - RNA, 19 nt, Artificial Sequence
  Description of Artificial Sequence: Synthetic oligonucleotide
  Sense strand starting at position 621 of SEQ ID NO: 585641
agaugcucaugagagauca

SEQ ID NO: 655959 - RNA, 19 nt, Artificial Sequence
  Description of Artificial Sequence: Synthetic oligonucleotide
  Antisense strand to SEQ ID NO: 655958
ugaucucucaugagcaucu

SEQ ID NO: 655960 - RNA, 19 nt, Artificial Sequence
  Description of Artificial Sequence: Synthetic oligonucleotide
  Sense strand starting at position 659 of SEQ ID NO: 585641
gcugcaguuuauucuacau

SEQ ID NO: 655961 - RNA, 19 nt, Artificial Sequence
  Description of Artificial Sequence: Synthetic oligonucleotide
  Antisense strand to SEQ ID NO: 655960
auguagaauaaacugcagc

SEQ ID NO: 655962 - RNA, 19 nt, Artificial Sequence
  Description of Artificial Sequence: Synthetic oligonucleotide
  Sense strand starting at position 698 of SEQ ID NO: 585641
uauacacgucccugagacu

SEQ ID NO: 655963 - RNA, 19 nt, Artificial Sequence
  Description of Artificial Sequence: Synthetic oligonucleotide
  Antisense strand to SEQ ID NO: 655962
agucucagggacguguaua

SEQ ID NO: 655964 - RNA, 19 nt, Artificial Sequence
  Description of Artificial Sequence: Synthetic oligonucleotide
  Sense strand starting at position 699 of SEQ ID NO: 585641
auacacgucccugagacuu

SEQ ID NO: 655965 - RNA, 19 nt, Artificial Sequence
  Description of Artificial Sequence: Synthetic oligonucleotide
  Antisense strand to SEQ ID NO: 655964
aagucucagggacguguau

SEQ ID NO: 655966 - RNA, 19 nt, Artificial Sequence
  Description of Artificial Sequence: Synthetic oligonucleotide
  Sense strand starting at position 705 of SEQ ID NO: 585641
gucccugagacuuguguau

SEQ ID NO: 655967 - RNA, 19 nt, Artificial Sequence
  Description of Artificial Sequence: Synthetic oligonucleotide
  Antisense strand to SEQ ID NO: 655966
auacacaagucucagggac

SEQ ID NO: 655968 - RNA, 19 nt, Artificial Sequence
  Description of Artificial Sequence: Synthetic oligonucleotide
  Sense strand starting at position 711 of SEQ ID NO: 585641
gagacuuguguaugaccuu

SEQ ID NO: 655969 - RNA, 19 nt, Artificial Sequence
  Description of Artificial Sequence: Synthetic oligonucleotide
  Antisense strand to SEQ ID NO: 655968
aaggucauacacaagucuc

SEQ ID NO: 655970 - RNA, 19 nt, Artificial Sequence
  Description of Artificial Sequence: Synthetic oligonucleotide
  Sense strand starting at position 872 of SEQ ID NO: 585641
ucauucugcgcccaucaau

SEQ ID NO: 655971 - RNA, 19 nt, Artificial Sequence
  Description of Artificial Sequence: Synthetic oligonucleotide
  Antisense strand to SEQ ID NO: 655970
auugaugggcgcagaauga

SEQ ID NO: 655972 - RNA, 19 nt, Artificial Sequence
  Description of Artificial Sequence: Synthetic oligonucleotide
  Sense strand starting at position 880 of SEQ ID NO: 585641
cgcccaucaaugggaguaa

SEQ ID NO: 655973 - RNA, 19 nt, Artificial Sequence
  Description of Artificial Sequence: Synthetic oligonucleotide
  Antisense strand to SEQ ID NO: 655972
uuacucccauugaugggcg

SEQ ID NO: 655974 - RNA, 19 nt, Artificial Sequence
  Description of Artificial Sequence: Synthetic oligonucleotide
  Sense strand starting at position 891 of SEQ ID NO: 585641
gggaguaacugagcuuaga

SEQ ID NO: 655975 - RNA, 19 nt, Artificial Sequence
  Description of Artificial Sequence: Synthetic oligonucleotide
  Antisense strand to SEQ ID NO: 655974
ucuaagcucaguuacuccc

SEQ ID NO: 655976 - RNA, 19 nt, Artificial Sequence
  Description of Artificial Sequence: Synthetic oligonucleotide
  Sense strand starting at position 1107 of SEQ ID NO: 585641
ccugcucguucuccacaaa

SEQ ID NO: 655977 - RNA, 19 nt, Artificial Sequence
  Description of Artificial Sequence: Synthetic oligonucleotide
  Antisense strand to SEQ ID NO: 655976
uuuguggagaacgagcagg

SEQ ID NO: 655978 - RNA, 19 nt, Artificial Sequence
  Description of Artificial Sequence: Synthetic oligonucleotide
  Sense strand starting at position 2177 of SEQ ID NO: 585641
ggaaaugugugcgccuaga

SEQ ID NO: 655979 - RNA, 19 nt, Artificial Sequence
  Description of Artificial Sequence: Synthetic oligonucleotide
  Antisense strand to SEQ ID NO: 655978
ucuaggcgcacacauuucc

SEQ ID NO: 655980 - RNA, 19 nt, Artificial Sequence
  Description of Artificial Sequence: Synthetic oligonucleotide
  Sense strand starting at position 2279 of SEQ ID NO: 585641
gccucuagucucggagaca

SEQ ID NO: 655981 - RNA, 19 nt, Artificial Sequence
  Description of Artificial Sequence: Synthetic oligonucleotide
  Antisense strand to SEQ ID NO: 655980
ugucuccgagacuagaggc

SEQ ID NO: 655982 - RNA, 19 nt, Artificial Sequence
  Description of Artificial Sequence: Synthetic oligonucleotide
  Sense strand starting at position 2539 of SEQ ID NO: 585641
gccacuuccucucuggauu

SEQ ID NO: 655983 - RNA, 19 nt, Artificial Sequence
  Description of Artificial Sequence: Synthetic oligonucleotide
  Antisense strand to SEQ ID NO: 655982
aauccagagaggaaguggc

SEQ ID NO: 655984 - RNA, 19 nt, Artificial Sequence
  Description of Artificial Sequence: Synthetic oligonucleotide
  Sense strand starting at position 2545 of SEQ ID NO: 585641
uccucucuggauugugaga

SEQ ID NO: 655985 - RNA, 19 nt, Artificial Sequence
  Description of Artificial Sequence: Synthetic oligonucleotide
  Antisense strand to SEQ ID NO: 655984
ucucacaauccagagagga

SEQ ID NO: 655986 - RNA, 19 nt, Artificial Sequence
  Description of Artificial Sequence: Synthetic oligonucleotide
  Sense strand starting at position 2550 of SEQ ID NO: 585641
ucuggauugugagaaacau

SEQ ID NO: 655987 - RNA, 19 nt, Artificial Sequence
  Description of Artificial Sequence: Synthetic oligonucleotide
  Antisense strand to SEQ ID NO: 655986
auguuucucacaauccaga

SEQ ID NO: 655988 - RNA, 19 nt, Artificial Sequence
  Description of Artificial Sequence: Synthetic oligonucleotide
  Sense strand starting at position 2579 of SEQ ID NO: 585641
auguuugugcaauaaggca

SEQ ID NO: 655989 - RNA, 19 nt, Artificial Sequence
  Description of Artificial Sequence: Synthetic oligonucleotide
  Antisense strand to SEQ ID NO: 655988
ugccuuauugcacaaacau

SEQ ID NO: 655990 - RNA, 19 nt, Artificial Sequence
  Description of Artificial Sequence: Synthetic oligonucleotide
  Sense strand starting at position 2597 of SEQ ID NO: 585641
agucacggcgcuugagaaa

SEQ ID NO: 655991 - RNA, 19 nt, Artificial Sequence
  Description of Artificial Sequence: Synthetic oligonucleotide
  Antisense strand to SEQ ID NO: 655990
uuucucaagcgccgugacu

SEQ ID NO: 655992 - RNA, 19 nt, Artificial Sequence
  Description of Artificial Sequence: Synthetic oligonucleotide
  Sense strand starting at position 2654 of SEQ ID NO: 585641
cugcuuaaucaugggcaca

SEQ ID NO: 655993 - RNA, 19 nt, Artificial Sequence
  Description of Artificial Sequence: Synthetic oligonucleotide
  Antisense strand to SEQ ID NO: 655992
ugugcccaugauuaagcag

SEQ ID NO: 655994 - RNA, 19 nt, Artificial Sequence
  Description of Artificial Sequence: Synthetic oligonucleotide
  Sense strand starting at position 2666 of SEQ ID NO: 585641
gggcacagcauucggauau

SEQ ID NO: 655995 - RNA, 19 nt, Artificial Sequence
  Description of Artificial Sequence: Synthetic oligonucleotide
  Antisense strand to SEQ ID NO: 655994
auauccgaaugcugugccc

SEQ ID NO: 655996 - RNA, 19 nt, Artificial Sequence
  Description of Artificial Sequence: Synthetic oligonucleotide
  Sense strand starting at position 2670 of SEQ ID NO: 585641
acagcauucggauaucuuc

SEQ ID NO: 655997 - RNA, 19 nt, Artificial Sequence
  Description of Artificial Sequence: Synthetic oligonucleotide
  Antisense strand to SEQ ID NO: 655996
gaagauauccgaaugcugu

SEQ ID NO: 655998 - RNA, 19 nt, Artificial Sequence
  Description of Artificial Sequence: Synthetic oligonucleotide
  Sense strand starting at position 2677 of SEQ ID NO: 585641
ucggauaucuucguaucca

SEQ ID NO: 655999 - RNA, 19 nt, Artificial Sequence
  Description of Artificial Sequence: Synthetic oligonucleotide
  Antisense strand to SEQ ID NO: 655998
uggauacgaagauauccga

SEQ ID NO: 656000 - RNA, 19 nt, Artificial Sequence
  Description of Artificial Sequence: Synthetic oligonucleotide
  Sense strand starting at position 2738 of SEQ ID NO: 585641
gcauccagacaguaaacau

SEQ ID NO: 656001 - RNA, 19 nt, Artificial Sequence
  Description of Artificial Sequence: Synthetic oligonucleotide
  Antisense strand to SEQ ID NO: 656000
auguuuacugucuggaugc

SEQ ID NO: 656002 - RNA, 19 nt, Artificial Sequence
  Description of Artificial Sequence: Synthetic oligonucleotide
  Sense strand starting at position 2910 of SEQ ID NO: 585641
aguaguuacacaugaagga

SEQ ID NO: 656003 - RNA, 19 nt, Artificial Sequence
  Description of Artificial Sequence: Synthetic oligonucleotide
  Antisense strand to SEQ ID NO: 656002
uccuucauguguaacuacu

SEQ ID NO: 656004 - RNA, 19 nt, Artificial Sequence
  Description of Artificial Sequence: Synthetic oligonucleotide
  Sense strand starting at position 3064 of SEQ ID NO: 585641
cacagagacguccgaauga

SEQ ID NO: 656005 - RNA, 19 nt, Artificial Sequence
  Description of Artificial Sequence: Synthetic oligonucleotide
  Antisense strand to SEQ ID NO: 656004
ucauucggacgucucugug

SEQ ID NO: 656006 - RNA, 19 nt, Artificial Sequence
  Description of Artificial Sequence: Synthetic oligonucleotide
  Sense strand starting at position 3069 of SEQ ID NO: 585641
agacguccgaaugaauaca

SEQ ID NO: 656007 - RNA, 19 nt, Artificial Sequence
  Description of Artificial Sequence: Synthetic oligonucleotide
  Antisense strand to SEQ ID NO: 656006
uguauucauucggacgucu

SEQ ID NO: 656008 - RNA, 19 nt, Artificial Sequence
  Description of Artificial Sequence: Synthetic oligonucleotide
  Sense strand starting at position 3486 of SEQ ID NO: 585641
agaaguuucucagagauaa

SEQ ID NO: 656009 - RNA, 19 nt, Artificial Sequence
  Description of Artificial Sequence: Synthetic oligonucleotide
  Antisense strand to SEQ ID NO: 656008
uuaucucugagaaacuucu

SEQ ID NO: 656010 - RNA, 19 nt, Artificial Sequence
  Description of Artificial Sequence: Synthetic oligonucleotide
  Sense strand starting at position 3516 of SEQ ID NO: 585641
agucaaauuccucggaaca

SEQ ID NO: 656011 - RNA, 19 nt, Artificial Sequence
  Description of Artificial Sequence: Synthetic oligonucleotide
  Antisense strand to SEQ ID NO: 656010
uguuccgaggaauuugacu

SEQ ID NO: 656012 - RNA, 19 nt, Artificial Sequence
  Description of Artificial Sequence: Synthetic oligonucleotide
  Sense strand starting at position 3517 of SEQ ID NO: 585641
gucaaauuccucggaacac

SEQ ID NO: 656013 - RNA, 19 nt, Artificial Sequence
  Description of Artificial Sequence: Synthetic oligonucleotide
  Antisense strand to SEQ ID NO: 656012
guguuccgaggaauuugac

SEQ ID NO: 656014 - RNA, 19 nt, Artificial Sequence
  Description of Artificial Sequence: Synthetic oligonucleotide
  Sense strand starting at position 3528 of SEQ ID NO: 585641
cggaacacuuuccuaugau

SEQ ID NO: 656015 - RNA, 19 nt, Artificial Sequence
  Description of Artificial Sequence: Synthetic oligonucleotide
  Antisense strand to SEQ ID NO: 656014
aucauaggaaaguguuccg

SEQ ID NO: 656016 - RNA, 19 nt, Artificial Sequence
  Description of Artificial Sequence: Synthetic oligonucleotide
  Sense strand starting at position 3529 of SEQ ID NO: 585641
ggaacacuuuccuaugaug

SEQ ID NO: 656017 - RNA, 19 nt, Artificial Sequence
  Description of Artificial Sequence: Synthetic oligonucleotide
  Antisense strand to SEQ ID NO: 656016
caucauaggaaaguguucc

SEQ ID NO: 656018 - RNA, 19 nt, Artificial Sequence
  Description of Artificial Sequence: Synthetic oligonucleotide
  Sense strand starting at position 3802 of SEQ ID NO: 585641
aucugcggagauugaaaua

SEQ ID NO: 656019 - RNA, 19 nt, Artificial Sequence
  Description of Artificial Sequence: Synthetic oligonucleotide
  Antisense strand to SEQ ID NO: 656018
uauuucaaucuccgcagau

SEQ ID NO: 656020 - RNA, 19 nt, Artificial Sequence
  Description of Artificial Sequence: Synthetic oligonucleotide
  Sense strand starting at position 3842 of SEQ ID NO: 585641
ggacuccugccauaauuac

SEQ ID NO: 656021 - RNA, 19 nt, Artificial Sequence
  Description of Artificial Sequence: Synthetic oligonucleotide
  Antisense strand to SEQ ID NO: 656020
guaauuauggcaggagucc

SEQ ID NO: 656022 - RNA, 19 nt, Artificial Sequence
  Description of Artificial Sequence: Synthetic oligonucleotide
  Sense strand starting at position 3903 of SEQ ID NO: 585641
ccagcugcccuuuagaaga

SEQ ID NO: 656023 - RNA, 19 nt, Artificial Sequence
  Description of Artificial Sequence: Synthetic oligonucleotide
  Antisense strand to SEQ ID NO: 656022
ucuucuaaagggcagcugg

SEQ ID NO: 656024 - RNA, 19 nt, Artificial Sequence
  Description of Artificial Sequence: Synthetic oligonucleotide
  Sense strand starting at position 62 of SEQ ID NO: 585642
gggcuuugcucucgagacu

SEQ ID NO: 656025 - RNA, 19 nt, Artificial Sequence
  Description of Artificial Sequence: Synthetic oligonucleotide
  Antisense strand to SEQ ID NO: 656024
agucucgagagcaaagccc

SEQ ID NO: 656026 - RNA, 19 nt, Artificial Sequence
  Description of Artificial Sequence: Synthetic oligonucleotide
  Sense strand starting at position 76 of SEQ ID NO: 585642
agacucugcuagucucaga

SEQ ID NO: 656027 - RNA, 19 nt, Artificial Sequence
  Description of Artificial Sequence: Synthetic oligonucleotide
  Antisense strand to SEQ ID NO: 656026
ucugagacuagcagagucu

SEQ ID NO: 656028 - RNA, 19 nt, Artificial Sequence
  Description of Artificial Sequence: Synthetic oligonucleotide
  Sense strand starting at position 104 of SEQ ID NO: 585642
ggaguuucuccaggacuca

SEQ ID NO: 656029 - RNA, 19 nt, Artificial Sequence
  Description of Artificial Sequence: Synthetic oligonucleotide
  Antisense strand to SEQ ID NO: 656028
ugaguccuggagaaacucc

SEQ ID NO: 656030 - RNA, 19 nt, Artificial Sequence
  Description of Artificial Sequence: Synthetic oligonucleotide
  Sense strand starting at position 130 of SEQ ID NO: 585642
uuuccaugccucugacagu

SEQ ID NO: 656031 - RNA, 19 nt, Artificial Sequence
  Description of Artificial Sequence: Synthetic oligonucleotide
  Antisense strand to SEQ ID NO: 656030
acugucagaggcauggaaa

SEQ ID NO: 656032 - RNA, 19 nt, Artificial Sequence
  Description of Artificial Sequence: Synthetic oligonucleotide
  Sense strand starting at position 362 of SEQ ID NO: 585642
ggcuuucucucugcuagca

SEQ ID NO: 656033 - RNA, 19 nt, Artificial Sequence
  Description of Artificial Sequence: Synthetic oligonucleotide
  Antisense strand to SEQ ID NO: 656032
ugcuagcagagagaaagcc

SEQ ID NO: 656034 - RNA, 19 nt, Artificial Sequence
  Description of Artificial Sequence: Synthetic oligonucleotide
  Sense strand starting at position 418 of SEQ ID NO: 585642
ccgcuccugccggaugaau

SEQ ID NO: 656035 - RNA, 19 nt, Artificial Sequence
  Description of Artificial Sequence: Synthetic oligonucleotide
  Antisense strand to SEQ ID NO: 656034
auucauccggcaggagcgg

SEQ ID NO: 656036 - RNA, 19 nt, Artificial Sequence
  Description of Artificial Sequence: Synthetic oligonucleotide
  Sense strand starting at position 620 of SEQ ID NO: 585642
gcuuucucucggccucgaa

SEQ ID NO: 656037 - RNA, 19 nt, Artificial Sequence
  Description of Artificial Sequence: Synthetic oligonucleotide
  Antisense strand to SEQ ID NO: 656036
uucgaggccgagagaaagc

SEQ ID NO: 656038 - RNA, 19 nt, Artificial Sequence
  Description of Artificial Sequence: Synthetic oligonucleotide
  Sense strand starting at position 1006 of SEQ ID NO: 585642
caggguuaaugcguauuaa

SEQ ID NO: 656039 - RNA, 19 nt, Artificial Sequence
  Description of Artificial Sequence: Synthetic oligonucleotide
  Antisense strand to SEQ ID NO: 656038
uuaauacgcauuaacccug

SEQ ID NO: 656040 - RNA, 19 nt, Artificial Sequence
  Description of Artificial Sequence: Synthetic oligonucleotide
  Sense strand starting at position 1007 of SEQ ID NO: 585642
aggguuaaugcguauuaaa

SEQ ID NO: 656041 - RNA, 19 nt, Artificial Sequence
  Description of Artificial Sequence: Synthetic oligonucleotide
  Antisense strand to SEQ ID NO: 656040
uuuaauacgcauuaacccu

SEQ ID NO: 656042 - RNA, 19 nt, Artificial Sequence
  Description of Artificial Sequence: Synthetic oligonucleotide
  Sense strand starting at position 1010 of SEQ ID NO: 585642
guuaaugcguauuaaagac

SEQ ID NO: 656043 - RNA, 19 nt, Artificial Sequence
  Description of Artificial Sequence: Synthetic oligonucleotide
  Antisense strand to SEQ ID NO: 656042
gucuuuaauacgcauuaac

SEQ ID NO: 656044 - RNA, 19 nt, Artificial Sequence
  Description of Artificial Sequence: Synthetic oligonucleotide
  Sense strand starting at position 1022 of SEQ ID NO: 585642
uaaagaccgucucuaggau

SEQ ID NO: 656045 - RNA, 19 nt, Artificial Sequence
  Description of Artificial Sequence: Synthetic oligonucleotide
  Antisense strand to SEQ ID NO: 656044
auccuagagacggucuuua

SEQ ID NO: 656046 - RNA, 19 nt, Artificial Sequence
  Description of Artificial Sequence: Synthetic oligonucleotide
  Sense strand starting at position 1028 of SEQ ID NO: 585642
ccgucucuaggaugugaga

SEQ ID NO: 656047 - RNA, 19 nt, Artificial Sequence
  Description of Artificial Sequence: Synthetic oligonucleotide
  Antisense strand to SEQ ID NO: 656046
ucucacauccuagagacgg

SEQ ID NO: 656048 - RNA, 19 nt, Artificial Sequence
  Description of Artificial Sequence: Synthetic oligonucleotide
  Sense strand starting at position 1030 of SEQ ID NO: 585642
gucucuaggaugugagaaa

SEQ ID NO: 656049 - RNA, 19 nt, Artificial Sequence
  Description of Artificial Sequence: Synthetic oligonucleotide
  Antisense strand to SEQ ID NO: 656048
uuucucacauccuagagac

SEQ ID NO: 656050 - RNA, 19 nt, Artificial Sequence
  Description of Artificial Sequence: Synthetic oligonucleotide
  Sense strand starting at position 1067 of SEQ ID NO: 585642
ggaaaguuggcgugaggga

SEQ ID NO: 656051 - RNA, 19 nt, Artificial Sequence
  Description of Artificial Sequence: Synthetic oligonucleotide
  Antisense strand to SEQ ID NO: 656050
ucccucacgccaacuuucc

SEQ ID NO: 656052 - RNA, 19 nt, Artificial Sequence
  Description of Artificial Sequence: Synthetic oligonucleotide
  Sense strand starting at position 1686 of SEQ ID NO: 585642
cugacaaucucggcacaaa

SEQ ID NO: 656053 - RNA, 19 nt, Artificial Sequence
  Description of Artificial Sequence: Synthetic oligonucleotide
  Antisense strand to SEQ ID NO: 656052
uuugugccgagauugucag

SEQ ID NO: 656054 - RNA, 19 nt, Artificial Sequence
  Description of Artificial Sequence: Synthetic oligonucleotide
  Sense strand starting at position 1981 of SEQ ID NO: 585642
cggcgaccgcuuugucuaa

SEQ ID NO: 656055 - RNA, 19 nt, Artificial Sequence
  Description of Artificial Sequence: Synthetic oligonucleotide
  Antisense strand to SEQ ID NO: 656054
uuagacaaagcggucgccg

SEQ ID NO: 656056 - RNA, 19 nt, Artificial Sequence
  Description of Artificial Sequence: Synthetic oligonucleotide
  Sense strand starting at position 1988 of SEQ ID NO: 585642
cgcuuugucuaaggacaau

SEQ ID NO: 656057 - RNA, 19 nt, Artificial Sequence
  Description of Artificial Sequence: Synthetic oligonucleotide
  Antisense strand to SEQ ID NO: 656056
auuguccuuagacaaagcg

SEQ ID NO: 656058 - RNA, 19 nt, Artificial Sequence
  Description of Artificial Sequence: Synthetic oligonucleotide
  Sense strand starting at position 2694 of SEQ ID NO: 585642
cccuguagcuugggagaca

SEQ ID NO: 656059 - RNA, 19 nt, Artificial Sequence
  Description of Artificial Sequence: Synthetic oligonucleotide
  Antisense strand to SEQ ID NO: 656058
ugucucccaagcuacaggg

SEQ ID NO: 656060 - RNA, 19 nt, Artificial Sequence
  Description of Artificial Sequence: Synthetic oligonucleotide
  Sense strand starting at position 2765 of SEQ ID NO: 585642
gagcaucuuccucgggaga

SEQ ID NO: 656061 - RNA, 19 nt, Artificial Sequence
  Description of Artificial Sequence: Synthetic oligonucleotide
  Antisense strand to SEQ ID NO: 656060
ucucccgaggaagaugcuc

SEQ ID NO: 656062 - RNA, 19 nt, Artificial Sequence
  Description of Artificial Sequence: Synthetic oligonucleotide
  Sense strand starting at position 2802 of SEQ ID NO: 585642
ucgaguuaagagcaggaga

SEQ ID NO: 656063 - RNA, 19 nt, Artificial Sequence
  Description of Artificial Sequence: Synthetic oligonucleotide
  Antisense strand to SEQ ID NO: 656062
ucuccugcucuuaacucga

SEQ ID NO: 656064 - RNA, 19 nt, Artificial Sequence
  Description of Artificial Sequence: Synthetic oligonucleotide
  Sense strand starting at position 2919 of SEQ ID NO: 585642
gacagcuaugaccguugaa

SEQ ID NO: 656065 - RNA, 19 nt, Artificial Sequence
  Description of Artificial Sequence: Synthetic oligonucleotide
  Antisense strand to SEQ ID NO: 656064
uucaacggucauagcuguc

SEQ ID NO: 656066 - RNA, 19 nt, Artificial Sequence
  Description of Artificial Sequence: Synthetic oligonucleotide
  Sense strand starting at position 2922 of SEQ ID NO: 585642
agcuaugaccguugaacuu

SEQ ID NO: 656067 - RNA, 19 nt, Artificial Sequence
  Description of Artificial Sequence: Synthetic oligonucleotide
  Antisense strand to SEQ ID NO: 656066
aaguucaacggucauagcu

SEQ ID NO: 656068 - RNA, 19 nt, Artificial Sequence
  Description of Artificial Sequence: Synthetic oligonucleotide
  Sense strand starting at position 3025 of SEQ ID NO: 585642
gggaguggucagggcagau

SEQ ID NO: 656069 - RNA, 19 nt, Artificial Sequence
  Description of Artificial Sequence: Synthetic oligonucleotide
  Antisense strand to SEQ ID NO: 656068
aucugcccugaccacuccc

SEQ ID NO: 656070 - RNA, 19 nt, Artificial Sequence
  Description of Artificial Sequence: Synthetic oligonucleotide
  Sense strand starting at position 3071 of SEQ ID NO: 585642
gggagagugucaugcucua

SEQ ID NO: 656071 - RNA, 19 nt, Artificial Sequence
  Description of Artificial Sequence: Synthetic oligonucleotide
  Antisense strand to SEQ ID NO: 656070
uagagcaugacacucuccc

SEQ ID NO: 656072 - RNA, 19 nt, Artificial Sequence
  Description of Artificial Sequence: Synthetic oligonucleotide
  Sense strand starting at position 3076 of SEQ ID NO: 585642
agugucaugcucuaaacag

SEQ ID NO: 656073 - RNA, 19 nt, Artificial Sequence
  Description of Artificial Sequence: Synthetic oligonucleotide
  Antisense strand to SEQ ID NO: 656072
cuguuuagagcaugacacu

SEQ ID NO: 656074 - RNA, 19 nt, Artificial Sequence
  Description of Artificial Sequence: Synthetic oligonucleotide
  Sense strand starting at position 3125 of SEQ ID NO: 585642
cuuccuugcuggugagaag

SEQ ID NO: 656075 - RNA, 19 nt, Artificial Sequence
  Description of Artificial Sequence: Synthetic oligonucleotide
  Antisense strand to SEQ ID NO: 656074
cuucucaccagcaaggaag

SEQ ID NO: 656076 - RNA, 19 nt, Artificial Sequence
  Description of Artificial Sequence: Synthetic oligonucleotide
  Sense strand starting at position 3126 of SEQ ID NO: 585642
uuccuugcuggugagaagu

SEQ ID NO: 656077 - RNA, 19 nt, Artificial Sequence
  Description of Artificial Sequence: Synthetic oligonucleotide
  Antisense strand to SEQ ID NO: 656076
acuucucaccagcaaggaa

SEQ ID NO: 656078 - RNA, 19 nt, Artificial Sequence
  Description of Artificial Sequence: Synthetic oligonucleotide
  Sense strand starting at position 3139 of SEQ ID NO: 585642
agaaguggaccuuggaguu

SEQ ID NO: 656079 - RNA, 19 nt, Artificial Sequence
  Description of Artificial Sequence: Synthetic oligonucleotide
  Antisense strand to SEQ ID NO: 656078
aacuccaagguccacuucu

SEQ ID NO: 656080 - RNA, 19 nt, Artificial Sequence
  Description of Artificial Sequence: Synthetic oligonucleotide
  Sense strand starting at position 3152 of SEQ ID NO: 585642
ggaguucaguggcugaaac

SEQ ID NO: 656081 - RNA, 19 nt, Artificial Sequence
  Description of Artificial Sequence: Synthetic oligonucleotide
  Antisense strand to SEQ ID NO: 656080
guuucagccacugaacucc

SEQ ID NO: 656082 - RNA, 19 nt, Artificial Sequence
  Description of Artificial Sequence: Synthetic oligonucleotide
  Sense strand starting at position 3160 of SEQ ID NO: 585642
guggcugaaacucagaauu

SEQ ID NO: 656083 - RNA, 19 nt, Artificial Sequence
  Description of Artificial Sequence: Synthetic oligonucleotide
  Antisense strand to SEQ ID NO: 656082
aauucugaguuucagccac

SEQ ID NO: 656084 - RNA, 19 nt, Artificial Sequence
  Description of Artificial Sequence: Synthetic oligonucleotide
  Sense strand starting at position 3162 of SEQ ID NO: 585642
ggcugaaacucagaauuua

SEQ ID NO: 656085 - RNA, 19 nt, Artificial Sequence
  Description of Artificial Sequence: Synthetic oligonucleotide
  Antisense strand to SEQ ID NO: 656084
uaaauucugaguuucagcc

SEQ ID NO: 656086 - RNA, 19 nt, Artificial Sequence
  Description of Artificial Sequence: Synthetic oligonucleotide
  Sense strand starting at position 3201 of SEQ ID NO: 585642
agaauaaagucucaaguag

SEQ ID NO: 656087 - RNA, 19 nt, Artificial Sequence
  Description of Artificial Sequence: Synthetic oligonucleotide
  Antisense strand to SEQ ID NO: 656086
cuacuugagacuuuauucu

SEQ ID NO: 656088 - RNA, 19 nt, Artificial Sequence
  Description of Artificial Sequence: Synthetic oligonucleotide
  Sense strand starting at position 3275 of SEQ ID NO: 585642
gggccuggauguuaaggau

SEQ ID NO: 656089 - RNA, 19 nt, Artificial Sequence
  Description of Artificial Sequence: Synthetic oligonucleotide
  Antisense strand to SEQ ID NO: 656088
auccuuaacauccaggccc

SEQ ID NO: 656090 - RNA, 19 nt, Artificial Sequence
  Description of Artificial Sequence: Synthetic oligonucleotide
  Sense strand starting at position 3278 of SEQ ID NO: 585642
ccuggauguuaaggauuua

SEQ ID NO: 656091 - RNA, 19 nt, Artificial Sequence
  Description of Artificial Sequence: Synthetic oligonucleotide
  Antisense strand to SEQ ID NO: 656090
uaaauccuuaacauccagg

SEQ ID NO: 656092 - RNA, 19 nt, Artificial Sequence
  Description of Artificial Sequence: Synthetic oligonucleotide
  Sense strand starting at position 3416 of SEQ ID NO: 585642
ggaggucuugcugaucaag

SEQ ID NO: 656093 - RNA, 19 nt, Artificial Sequence
  Description of Artificial Sequence: Synthetic oligonucleotide
  Antisense strand to SEQ ID NO: 656092
cuugaucagcaagaccucc

SEQ ID NO: 656094 - RNA, 19 nt, Artificial Sequence
  Description of Artificial Sequence: Synthetic oligonucleotide
  Sense strand starting at position 3576 of SEQ ID NO: 585642
gggagacuucagggccaga

SEQ ID NO: 656095 - RNA, 19 nt, Artificial Sequence
  Description of Artificial Sequence: Synthetic oligonucleotide
  Antisense strand to SEQ ID NO: 656094
ucuggcccugaagucuccc

SEQ ID NO: 656096 - RNA, 19 nt, Artificial Sequence
  Description of Artificial Sequence: Synthetic oligonucleotide
  Sense strand starting at position 3755 of SEQ ID NO: 585642
cccugauccugacuucuga

SEQ ID NO: 656097 - RNA, 19 nt, Artificial Sequence
  Description of Artificial Sequence: Synthetic oligonucleotide
  Antisense strand to SEQ ID NO: 656096
ucagaagucaggaucaggg

SEQ ID NO: 656098 - RNA, 19 nt, Artificial Sequence
  Description of Artificial Sequence: Synthetic oligonucleotide
  Sense strand starting at position 3762 of SEQ ID NO: 585642
ccugacuucugauccaugu

SEQ ID NO: 656099 - RNA, 19 nt, Artificial Sequence
  Description of Artificial Sequence: Synthetic oligonucleotide
  Antisense strand to SEQ ID NO: 656098
acauggaucagaagucagg

SEQ ID NO: 656100 - RNA, 19 nt, Artificial Sequence
  Description of Artificial Sequence: Synthetic oligonucleotide
  Sense strand starting at position 3968 of SEQ ID NO: 585642
ggcccaugagcucagcaua

SEQ ID NO: 656101 - RNA, 19 nt, Artificial Sequence
  Description of Artificial Sequence: Synthetic oligonucleotide
  Antisense strand to SEQ ID NO: 656100
uaugcugagcucaugggcc

SEQ ID NO: 656102 - RNA, 19 nt, Artificial Sequence
  Description of Artificial Sequence: Synthetic oligonucleotide
  Sense strand starting at position 41 of SEQ ID NO: 585643
gcuuucucucggccucgaa

SEQ ID NO: 656103 - RNA, 19 nt, Artificial Sequence
  Description of Artificial Sequence: Synthetic oligonucleotide
  Antisense strand to SEQ ID NO: 656102
uucgaggccgagagaaagc

SEQ ID NO: 656104 - RNA, 19 nt, Artificial Sequence
  Description of Artificial Sequence: Synthetic oligonucleotide
  Sense strand starting at position 427 of SEQ ID NO: 585643
caggguuaaugcguauuaa

SEQ ID NO: 656105 - RNA, 19 nt, Artificial Sequence
  Description of Artificial Sequence: Synthetic oligonucleotide
  Antisense strand to SEQ ID NO: 656104
uuaauacgcauuaacccug

SEQ ID NO: 656106 - RNA, 19 nt, Artificial Sequence
  Description of Artificial Sequence: Synthetic oligonucleotide
  Sense strand starting at position 428 of SEQ ID NO: 585643
aggguuaaugcguauuaaa

SEQ ID NO: 656107 - RNA, 19 nt, Artificial Sequence
  Description of Artificial Sequence: Synthetic oligonucleotide
  Antisense strand to SEQ ID NO: 656106
uuuaauacgcauuaacccu

SEQ ID NO: 656108 - RNA, 19 nt, Artificial Sequence
  Description of Artificial Sequence: Synthetic oligonucleotide
  Sense strand starting at position 431 of SEQ ID NO: 585643
guuaaugcguauuaaagac

SEQ ID NO: 656109 - RNA, 19 nt, Artificial Sequence
  Description of Artificial Sequence: Synthetic oligonucleotide
  Antisense strand to SEQ ID NO: 656108
gucuuuaauacgcauuaac

SEQ ID NO: 656110 - RNA, 19 nt, Artificial Sequence
  Description of Artificial Sequence: Synthetic oligonucleotide
  Sense strand starting at position 443 of SEQ ID NO: 585643
uaaagaccgucucuaggau

SEQ ID NO: 656111 - RNA, 19 nt, Artificial Sequence
  Description of Artificial Sequence: Synthetic oligonucleotide
  Antisense strand to SEQ ID NO: 656110
auccuagagacggucuuua

SEQ ID NO: 656112 - RNA, 19 nt, Artificial Sequence
  Description of Artificial Sequence: Synthetic oligonucleotide
  Sense strand starting at position 449 of SEQ ID NO: 585643
ccgucucuaggaugugaga

SEQ ID NO: 656113 - RNA, 19 nt, Artificial Sequence
  Description of Artificial Sequence: Synthetic oligonucleotide
  Antisense strand to SEQ ID NO: 656112
ucucacauccuagagacgg

SEQ ID NO: 656114 - RNA, 19 nt, Artificial Sequence
  Description of Artificial Sequence: Synthetic oligonucleotide
  Sense strand starting at position 451 of SEQ ID NO: 585643
gucucuaggaugugagaaa

SEQ ID NO: 656115 - RNA, 19 nt, Artificial Sequence
  Description of Artificial Sequence: Synthetic oligonucleotide
  Antisense strand to SEQ ID NO: 656114
uuucucacauccuagagac

SEQ ID NO: 656116 - RNA, 19 nt, Artificial Sequence
  Description of Artificial Sequence: Synthetic oligonucleotide
  Sense strand starting at position 488 of SEQ ID NO: 585643
ggaaaguuggcgugaggga

SEQ ID NO: 656117 - RNA, 19 nt, Artificial Sequence
  Description of Artificial Sequence: Synthetic oligonucleotide
  Antisense strand to SEQ ID NO: 656116
ucccucacgccaacuuucc

SEQ ID NO: 656118 - RNA, 19 nt, Artificial Sequence
  Description of Artificial Sequence: Synthetic oligonucleotide
  Sense strand starting at position 1107 of SEQ ID NO: 585643
cugacaaucucggcacaaa

SEQ ID NO: 656119 - RNA, 19 nt, Artificial Sequence
  Description of Artificial Sequence: Synthetic oligonucleotide
  Antisense strand to SEQ ID NO: 656118
uuugugccgagauugucag

SEQ ID NO: 656120 - RNA, 19 nt, Artificial Sequence
  Description of Artificial Sequence: Synthetic oligonucleotide
  Sense strand starting at position 1402 of SEQ ID NO: 585643
cggcgaccgcuuugucuaa

SEQ ID NO: 656121 - RNA, 19 nt, Artificial Sequence
  Description of Artificial Sequence: Synthetic oligonucleotide
  Antisense strand to SEQ ID NO: 656120
uuagacaaagcggucgccg

SEQ ID NO: 656122 - RNA, 19 nt, Artificial Sequence
  Description of Artificial Sequence: Synthetic oligonucleotide
  Sense strand starting at position 2186 of SEQ ID NO: 585643
gagcaucuuccucgggaga

SEQ ID NO: 656123 - RNA, 19 nt, Artificial Sequence
  Description of Artificial Sequence: Synthetic oligonucleotide
  Antisense strand to SEQ ID NO: 656122
ucucccgaggaagaugcuc

SEQ ID NO: 656124 - RNA, 19 nt, Artificial Sequence
  Description of Artificial Sequence: Synthetic oligonucleotide
  Sense strand starting at position 2223 of SEQ ID NO: 585643
ucgaguuaagagcaggaga

SEQ ID NO: 656125 - RNA, 19 nt, Artificial Sequence
  Description of Artificial Sequence: Synthetic oligonucleotide
  Antisense strand to SEQ ID NO: 656124
ucuccugcucuuaacucga

SEQ ID NO: 656126 - RNA, 19 nt, Artificial Sequence
  Description of Artificial Sequence: Synthetic oligonucleotide
  Sense strand starting at position 2340 of SEQ ID NO: 585643
gacagcuaugaccguugaa

SEQ ID NO: 656127 - RNA, 19 nt, Artificial Sequence
  Description of Artificial Sequence: Synthetic oligonucleotide
  Antisense strand to SEQ ID NO: 656126
uucaacggucauagcuguc

SEQ ID NO: 656128 - RNA, 19 nt, Artificial Sequence
  Description of Artificial Sequence: Synthetic oligonucleotide
  Sense strand starting at position 2343 of SEQ ID NO: 585643
agcuaugaccguugaacuu

SEQ ID NO: 656129 - RNA, 19 nt, Artificial Sequence
  Description of Artificial Sequence: Synthetic oligonucleotide
  Antisense strand to SEQ ID NO: 656128
aaguucaacggucauagcu

SEQ ID NO: 656130 - RNA, 19 nt, Artificial Sequence
  Description of Artificial Sequence: Synthetic oligonucleotide
  Sense strand starting at position 2446 of SEQ ID NO: 585643
gggaguggucagggcagau

SEQ ID NO: 656131 - RNA, 19 nt, Artificial Sequence
  Description of Artificial Sequence: Synthetic oligonucleotide
  Antisense strand to SEQ ID NO: 656130
aucugcccugaccacuccc

SEQ ID NO: 656132 - RNA, 19 nt, Artificial Sequence
  Description of Artificial Sequence: Synthetic oligonucleotide
  Sense strand starting at position 2497 of SEQ ID NO: 585643
agugucaugcucuaaacag

SEQ ID NO: 656133 - RNA, 19 nt, Artificial Sequence
  Description of Artificial Sequence: Synthetic oligonucleotide
  Antisense strand to SEQ ID NO: 656132
cuguuuagagcaugacacu

SEQ ID NO: 656134 - RNA, 19 nt, Artificial Sequence
  Description of Artificial Sequence: Synthetic oligonucleotide
  Sense strand starting at position 2547 of SEQ ID NO: 585643
uuccuugcuggugagaagu

SEQ ID NO: 656135 - RNA, 19 nt, Artificial Sequence
  Description of Artificial Sequence: Synthetic oligonucleotide
  Antisense strand to SEQ ID NO: 656134
acuucucaccagcaaggaa

SEQ ID NO: 656136 - RNA, 19 nt, Artificial Sequence
  Description of Artificial Sequence: Synthetic oligonucleotide
  Sense strand starting at position 2560 of SEQ ID NO: 585643
agaaguggaccuuggaguu

SEQ ID NO: 656137 - RNA, 19 nt, Artificial Sequence
  Description of Artificial Sequence: Synthetic oligonucleotide
  Antisense strand to SEQ ID NO: 656136
aacuccaagguccacuucu

SEQ ID NO: 656138 - RNA, 19 nt, Artificial Sequence
  Description of Artificial Sequence: Synthetic oligonucleotide
  Sense strand starting at position 2573 of SEQ ID NO: 585643
ggaguucaguggcugaaac

SEQ ID NO: 656139 - RNA, 19 nt, Artificial Sequence
  Description of Artificial Sequence: Synthetic oligonucleotide
  Antisense strand to SEQ ID NO: 656138
guuucagccacugaacucc

SEQ ID NO: 656140 - RNA, 19 nt, Artificial Sequence
  Description of Artificial Sequence: Synthetic oligonucleotide
  Sense strand starting at position 2581 of SEQ ID NO: 585643
guggcugaaacucagaauu

SEQ ID NO: 656141 - RNA, 19 nt, Artificial Sequence
  Description of Artificial Sequence: Synthetic oligonucleotide
  Antisense strand to SEQ ID NO: 656140
aauucugaguuucagccac

SEQ ID NO: 656142 - RNA, 19 nt, Artificial Sequence
  Description of Artificial Sequence: Synthetic oligonucleotide
  Sense strand starting at position 2583 of SEQ ID NO: 585643
ggcugaaacucagaauuua

SEQ ID NO: 656143 - RNA, 19 nt, Artificial Sequence
  Description of Artificial Sequence: Synthetic oligonucleotide
  Antisense strand to SEQ ID NO: 656142
uaaauucugaguuucagcc

SEQ ID NO: 656144 - RNA, 19 nt, Artificial Sequence
  Description of Artificial Sequence: Synthetic oligonucleotide
  Sense strand starting at position 2622 of SEQ ID NO: 585643
agaauaaagucucaaguag

SEQ ID NO: 656145 - RNA, 19 nt, Artificial Sequence
  Description of Artificial Sequence: Synthetic oligonucleotide
  Antisense strand to SEQ ID NO: 656144
cuacuugagacuuuauucu

SEQ ID NO: 656146 - RNA, 19 nt, Artificial Sequence
  Description of Artificial Sequence: Synthetic oligonucleotide
  Sense strand starting at position 2696 of SEQ ID NO: 585643
gggccuggauguuaaggau

SEQ ID NO: 656147 - RNA, 19 nt, Artificial Sequence
  Description of Artificial Sequence: Synthetic oligonucleotide
  Antisense strand to SEQ ID NO: 656146
auccuuaacauccaggccc

SEQ ID NO: 656148 - RNA, 19 nt, Artificial Sequence
  Description of Artificial Sequence: Synthetic oligonucleotide
  Sense strand starting at position 2699 of SEQ ID NO: 585643
ccuggauguuaaggauuua

SEQ ID NO: 656149 - RNA, 19 nt, Artificial Sequence
  Description of Artificial Sequence: Synthetic oligonucleotide
  Antisense strand to SEQ ID NO: 656148
uaaauccuuaacauccagg

SEQ ID NO: 656150 - RNA, 19 nt, Artificial Sequence
  Description of Artificial Sequence: Synthetic oligonucleotide
  Sense strand starting at position 2837 of SEQ ID NO: 585643
ggaggucuugcugaucaag

SEQ ID NO: 656151 - RNA, 19 nt, Artificial Sequence
  Description of Artificial Sequence: Synthetic oligonucleotide
  Antisense strand to SEQ ID NO: 656150
cuugaucagcaagaccucc

SEQ ID NO: 656152 - RNA, 19 nt, Artificial Sequence
  Description of Artificial Sequence: Synthetic oligonucleotide
  Sense strand starting at position 2997 of SEQ ID NO: 585643
gggagacuucagggccaga

SEQ ID NO: 656153 - RNA, 19 nt, Artificial Sequence
  Description of Artificial Sequence: Synthetic oligonucleotide
  Antisense strand to SEQ ID NO: 656152
ucuggcccugaagucuccc

SEQ ID NO: 656154 - RNA, 19 nt, Artificial Sequence
  Description of Artificial Sequence: Synthetic oligonucleotide
  Sense strand starting at position 3176 of SEQ ID NO: 585643
cccugauccugacuucuga

SEQ ID NO: 656155 - RNA, 19 nt, Artificial Sequence
  Description of Artificial Sequence: Synthetic oligonucleotide
  Antisense strand to SEQ ID NO: 656154
ucagaagucaggaucaggg

SEQ ID NO: 656156 - RNA, 19 nt, Artificial Sequence
  Description of Artificial Sequence: Synthetic oligonucleotide
  Sense strand starting at position 3183 of SEQ ID NO: 585643
ccugacuucugauccaugu

SEQ ID NO: 656157 - RNA, 19 nt, Artificial Sequence
  Description of Artificial Sequence: Synthetic oligonucleotide
  Antisense strand to SEQ ID NO: 656156
acauggaucagaagucagg

SEQ ID NO: 656158 - RNA, 19 nt, Artificial Sequence
  Description of Artificial Sequence: Synthetic oligonucleotide
  Sense strand starting at position 3389 of SEQ ID NO: 585643
ggcccaugagcucagcaua

SEQ ID NO: 656159 - RNA, 19 nt, Artificial Sequence
  Description of Artificial Sequence: Synthetic oligonucleotide
  Antisense strand to SEQ ID NO: 656158
uaugcugagcucaugggcc

SEQ ID NO: 656160 - RNA, 19 nt, Artificial Sequence
  Description of Artificial Sequence: Synthetic oligonucleotide
  Sense strand starting at position 3416 of SEQ ID NO: 585643
cgagaaggaugcuaaagau

SEQ ID NO: 656161 - RNA, 19 nt, Artificial Sequence
  Description of Artificial Sequence: Synthetic oligonucleotide
  Antisense strand to SEQ ID NO: 656160
aucuuuagcauccuucucg

SEQ ID NO: 656162 - RNA, 19 nt, Artificial Sequence
  Description of Artificial Sequence: Synthetic oligonucleotide
  Sense strand starting at position 3745 of SEQ ID NO: 585643
gccugucucuacccugaga

SEQ ID NO: 656163 - RNA, 19 nt, Artificial Sequence
  Description of Artificial Sequence: Synthetic oligonucleotide
  Antisense strand to SEQ ID NO: 656162
ucucaggguagagacaggc

SEQ ID NO: 656164 - RNA, 19 nt, Artificial Sequence
  Description of Artificial Sequence: Synthetic oligonucleotide
  Sense strand starting at position 3747 of SEQ ID NO: 585643
cugucucuacccugagaac

SEQ ID NO: 656165 - RNA, 19 nt, Artificial Sequence
  Description of Artificial Sequence: Synthetic oligonucleotide
  Antisense strand to SEQ ID NO: 656164
guucucaggguagagacag

SEQ ID NO: 656166 - RNA, 19 nt, Artificial Sequence
  Description of Artificial Sequence: Synthetic oligonucleotide
  Sense strand starting at position 3748 of SEQ ID NO: 585643
ugucucuacccugagaacu

SEQ ID NO: 656167 - RNA, 19 nt, Artificial Sequence
  Description of Artificial Sequence: Synthetic oligonucleotide
  Antisense strand to SEQ ID NO: 656166
aguucucaggguagagaca

SEQ ID NO: 656168 - RNA, 19 nt, Artificial Sequence
  Description of Artificial Sequence: Synthetic oligonucleotide
  Sense strand starting at position 3783 of SEQ ID NO: 585643
ugaccugauagcuacgcaa

SEQ ID NO: 656169 - RNA, 19 nt, Artificial Sequence
  Description of Artificial Sequence: Synthetic oligonucleotide
  Antisense strand to SEQ ID NO: 656168
uugcguagcuaucagguca

SEQ ID NO: 656170 - RNA, 19 nt, Artificial Sequence
  Description of Artificial Sequence: Synthetic oligonucleotide
  Sense strand starting at position 3786 of SEQ ID NO: 585643
ccugauagcuacgcaaagu

SEQ ID NO: 656171 - RNA, 19 nt, Artificial Sequence
  Description of Artificial Sequence: Synthetic oligonucleotide
  Antisense strand to SEQ ID NO: 656170
acuuugcguagcuaucagg

SEQ ID NO: 656172 - RNA, 19 nt, Artificial Sequence
  Description of Artificial Sequence: Synthetic oligonucleotide
  Sense strand starting at position 3787 of SEQ ID NO: 585643
cugauagcuacgcaaagua

SEQ ID NO: 656173 - RNA, 19 nt, Artificial Sequence
  Description of Artificial Sequence: Synthetic oligonucleotide
  Antisense strand to SEQ ID NO: 656172
uacuuugcguagcuaucag

SEQ ID NO: 656174 - RNA, 19 nt, Artificial Sequence
  Description of Artificial Sequence: Synthetic oligonucleotide
  Sense strand starting at position 3901 of SEQ ID NO: 585643
ggaucucaagcaggacaua

SEQ ID NO: 656175 - RNA, 19 nt, Artificial Sequence
  Description of Artificial Sequence: Synthetic oligonucleotide
  Antisense strand to SEQ ID NO: 656174
uauguccugcuugagaucc

SEQ ID NO: 656176 - RNA, 19 nt, Artificial Sequence
  Description of Artificial Sequence: Synthetic oligonucleotide
  Sense strand starting at position 3922 of SEQ ID NO: 585643
caaaguugcagaggugaga

SEQ ID NO: 656177 - RNA, 19 nt, Artificial Sequence
  Description of Artificial Sequence: Synthetic oligonucleotide
  Antisense strand to SEQ ID NO: 656176
ucucaccucugcaacuuug

SEQ ID NO: 656178 - RNA, 19 nt, Artificial Sequence
  Description of Artificial Sequence: Synthetic oligonucleotide
  Sense strand starting at position 3943 of SEQ ID NO: 585643
cauaucuugugcuuaggga

SEQ ID NO: 656179 - RNA, 19 nt, Artificial Sequence
  Description of Artificial Sequence: Synthetic oligonucleotide
  Antisense strand to SEQ ID NO: 656178
ucccuaagcacaagauaug

SEQ ID NO: 656180 - RNA, 19 nt, Artificial Sequence
  Description of Artificial Sequence: Synthetic oligonucleotide
  Sense strand starting at position 3944 of SEQ ID NO: 585643
auaucuugugcuuagggaa

SEQ ID NO: 656181 - RNA, 19 nt, Artificial Sequence
  Description of Artificial Sequence: Synthetic oligonucleotide
  Antisense strand to SEQ ID NO: 656180
uucccuaagcacaagauau

SEQ ID NO: 656182 - RNA, 19 nt, Artificial Sequence
  Description of Artificial Sequence: Synthetic oligonucleotide
  Sense strand starting at position 63 of SEQ ID NO: 585644
acggaacacuuucuacaga

SEQ ID NO: 656183 - RNA, 19 nt, Artificial Sequence
  Description of Artificial Sequence: Synthetic oligonucleotide
  Antisense strand to SEQ ID NO: 656182
ucuguagaaaguguuccgu

SEQ ID NO: 656184 - RNA, 19 nt, Artificial Sequence
  Description of Artificial Sequence: Synthetic oligonucleotide
  Sense strand starting at position 64 of SEQ ID NO: 585644
cggaacacuuucuacagaa

SEQ ID NO: 656185 - RNA, 19 nt, Artificial Sequence
  Description of Artificial Sequence: Synthetic oligonucleotide
  Antisense strand to SEQ ID NO: 656184
uucuguagaaaguguuccg

SEQ ID NO: 656186 - RNA, 19 nt, Artificial Sequence
  Description of Artificial Sequence: Synthetic oligonucleotide
  Sense strand starting at position 109 of SEQ ID NO: 585644
gcccuuucgcaguagagag

SEQ ID NO: 656187 - RNA, 19 nt, Artificial Sequence
  Description of Artificial Sequence: Synthetic oligonucleotide
  Antisense strand to SEQ ID NO: 656186
cucucuacugcgaaagggc

SEQ ID NO: 656188 - RNA, 19 nt, Artificial Sequence
  Description of Artificial Sequence: Synthetic oligonucleotide
  Sense strand starting at position 141 of SEQ ID NO: 585644
ggaggaauuuguaggcugu

SEQ ID NO: 656189 - RNA, 19 nt, Artificial Sequence
  Description of Artificial Sequence: Synthetic oligonucleotide
  Antisense strand to SEQ ID NO: 656188
acagccuacaaauuccucc

SEQ ID NO: 656190 - RNA, 19 nt, Artificial Sequence
  Description of Artificial Sequence: Synthetic oligonucleotide
  Sense strand starting at position 148 of SEQ ID NO: 585644
uuuguaggcuguuguuuaa

SEQ ID NO: 656191 - RNA, 19 nt, Artificial Sequence
  Description of Artificial Sequence: Synthetic oligonucleotide
  Antisense strand to SEQ ID NO: 656190
uuaaacaacagccuacaaa

SEQ ID NO: 656192 - RNA, 19 nt, Artificial Sequence
  Description of Artificial Sequence: Synthetic oligonucleotide
  Sense strand starting at position 151 of SEQ ID NO: 585644
guaggcuguuguuuaagga

SEQ ID NO: 656193 - RNA, 19 nt, Artificial Sequence
  Description of Artificial Sequence: Synthetic oligonucleotide
  Antisense strand to SEQ ID NO: 656192
uccuuaaacaacagccuac

SEQ ID NO: 656194 - RNA, 19 nt, Artificial Sequence
  Description of Artificial Sequence: Synthetic oligonucleotide
  Sense strand starting at position 152 of SEQ ID NO: 585644
uaggcuguuguuuaaggau

SEQ ID NO: 656195 - RNA, 19 nt, Artificial Sequence
  Description of Artificial Sequence: Synthetic oligonucleotide
  Antisense strand to SEQ ID NO: 656194
auccuuaaacaacagccua

SEQ ID NO: 656196 - RNA, 19 nt, Artificial Sequence
  Description of Artificial Sequence: Synthetic oligonucleotide
  Sense strand starting at position 161 of SEQ ID NO: 585644
guuuaaggauuguuaaagu

SEQ ID NO: 656197 - RNA, 19 nt, Artificial Sequence
  Description of Artificial Sequence: Synthetic oligonucleotide
  Antisense strand to SEQ ID NO: 656196
acuuuaacaauccuuaaac

SEQ ID NO: 656198 - RNA, 19 nt, Artificial Sequence
  Description of Artificial Sequence: Synthetic oligonucleotide
  Sense strand starting at position 186 of SEQ ID NO: 585644
aucaucagcugacaaagau

SEQ ID NO: 656199 - RNA, 19 nt, Artificial Sequence
  Description of Artificial Sequence: Synthetic oligonucleotide
  Antisense strand to SEQ ID NO: 656198
aucuuugucagcugaugau

SEQ ID NO: 656200 - RNA, 19 nt, Artificial Sequence
  Description of Artificial Sequence: Synthetic oligonucleotide
  Sense strand starting at position 2322 of SEQ ID NO: 585644
cccgagugcuccgguggaa

SEQ ID NO: 656201 - RNA, 19 nt, Artificial Sequence
  Description of Artificial Sequence: Synthetic oligonucleotide
  Antisense strand to SEQ ID NO: 656200
uuccaccggagcacucggg

SEQ ID NO: 656202 - RNA, 19 nt, Artificial Sequence
  Description of Artificial Sequence: Synthetic oligonucleotide
  Sense strand starting at position 2324 of SEQ ID NO: 585644
cgagugcuccgguggaaug

SEQ ID NO: 656203 - RNA, 19 nt, Artificial Sequence
  Description of Artificial Sequence: Synthetic oligonucleotide
  Antisense strand to SEQ ID NO: 656202
cauuccaccggagcacucg

SEQ ID NO: 656204 - RNA, 19 nt, Artificial Sequence
  Description of Artificial Sequence: Synthetic oligonucleotide
  Sense strand starting at position 2599 of SEQ ID NO: 585644
gggaaaucuugccuacgca

SEQ ID NO: 656205 - RNA, 19 nt, Artificial Sequence
  Description of Artificial Sequence: Synthetic oligonucleotide
  Antisense strand to SEQ ID NO: 656204
ugcguaggcaagauuuccc

SEQ ID NO: 656206 - RNA, 19 nt, Artificial Sequence
  Description of Artificial Sequence: Synthetic oligonucleotide
  Sense strand starting at position 2600 of SEQ ID NO: 585644
ggaaaucuugccuacgcag

SEQ ID NO: 656207 - RNA, 19 nt, Artificial Sequence
  Description of Artificial Sequence: Synthetic oligonucleotide
  Antisense strand to SEQ ID NO: 656206
cugcguaggcaagauuucc

SEQ ID NO: 656208 - RNA, 19 nt, Artificial Sequence
  Description of Artificial Sequence: Synthetic oligonucleotide
  Sense strand starting at position 2754 of SEQ ID NO: 585644
ccgcucugcucuuccgaaa

SEQ ID NO: 656209 - RNA, 19 nt, Artificial Sequence
  Description of Artificial Sequence: Synthetic oligonucleotide
  Antisense strand to SEQ ID NO: 656208
uuucggaagagcagagcgg

SEQ ID NO: 656210 - RNA, 19 nt, Artificial Sequence
  Description of Artificial Sequence: Synthetic oligonucleotide
  Sense strand starting at position 3200 of SEQ ID NO: 585644
cgucgugguaccuagggau

SEQ ID NO: 656211 - RNA, 19 nt, Artificial Sequence
  Description of Artificial Sequence: Synthetic oligonucleotide
  Antisense strand to SEQ ID NO: 656210
aucccuagguaccacgacg

SEQ ID NO: 656212 - RNA, 19 nt, Artificial Sequence
  Description of Artificial Sequence: Synthetic oligonucleotide
  Sense strand starting at position 3275 of SEQ ID NO: 585644
ggccaucuaagucagugau

SEQ ID NO: 656213 - RNA, 19 nt, Artificial Sequence
  Description of Artificial Sequence: Synthetic oligonucleotide
  Antisense strand to SEQ ID NO: 656212
aucacugacuuagauggcc

SEQ ID NO: 656214 - RNA, 19 nt, Artificial Sequence
  Description of Artificial Sequence: Synthetic oligonucleotide
  Sense strand starting at position 3277 of SEQ ID NO: 585644
ccaucuaagucagugauuc

SEQ ID NO: 656215 - RNA, 19 nt, Artificial Sequence
  Description of Artificial Sequence: Synthetic oligonucleotide
  Antisense strand to SEQ ID NO: 656214
gaaucacugacuuagaugg

SEQ ID NO: 656216 - RNA, 19 nt, Artificial Sequence
  Description of Artificial Sequence: Synthetic oligonucleotide
  Sense strand starting at position 3281 of SEQ ID NO: 585644
cuaagucagugauucuacu

SEQ ID NO: 656217 - RNA, 19 nt, Artificial Sequence
  Description of Artificial Sequence: Synthetic oligonucleotide
  Antisense strand to SEQ ID NO: 656216
aguagaaucacugacuuag

SEQ ID NO: 656218 - RNA, 19 nt, Artificial Sequence
  Description of Artificial Sequence: Synthetic oligonucleotide
  Sense strand starting at position 3354 of SEQ ID NO: 585644
cccagaguuuccuucuuuc

SEQ ID NO: 656219 - RNA, 19 nt, Artificial Sequence
  Description of Artificial Sequence: Synthetic oligonucleotide
  Antisense strand to SEQ ID NO: 656218
gaaagaaggaaacucuggg

SEQ ID NO: 656220 - RNA, 19 nt, Artificial Sequence
  Description of Artificial Sequence: Synthetic oligonucleotide
  Sense strand starting at position 3592 of SEQ ID NO: 585644
aaccuauguggauguguau

SEQ ID NO: 656221 - RNA, 19 nt, Artificial Sequence
  Description of Artificial Sequence: Synthetic oligonucleotide
  Antisense strand to SEQ ID NO: 656220
auacacauccacauagguu

SEQ ID NO: 656222 - RNA, 19 nt, Artificial Sequence
  Description of Artificial Sequence: Synthetic oligonucleotide
  Sense strand starting at position 3599 of SEQ ID NO: 585644
guggauguguauucaguua

SEQ ID NO: 656223 - RNA, 19 nt, Artificial Sequence
  Description of Artificial Sequence: Synthetic oligonucleotide
  Antisense strand to SEQ ID NO: 656222
uaacugaauacacauccac

SEQ ID NO: 656224 - RNA, 19 nt, Artificial Sequence
  Description of Artificial Sequence: Synthetic oligonucleotide
  Sense strand starting at position 3696 of SEQ ID NO: 585644
caugucaugguuuggcaga

SEQ ID NO: 656225 - RNA, 19 nt, Artificial Sequence
  Description of Artificial Sequence: Synthetic oligonucleotide
  Antisense strand to SEQ ID NO: 656224
ucugccaaaccaugacaug

SEQ ID NO: 656226 - RNA, 19 nt, Artificial Sequence
  Description of Artificial Sequence: Synthetic oligonucleotide
  Sense strand starting at position 3697 of SEQ ID NO: 585644
augucaugguuuggcagaa

SEQ ID NO: 656227 - RNA, 19 nt, Artificial Sequence
  Description of Artificial Sequence: Synthetic oligonucleotide
  Antisense strand to SEQ ID NO: 656226
uucugccaaaccaugacau

SEQ ID NO: 656228 - RNA, 19 nt, Artificial Sequence
  Description of Artificial Sequence: Synthetic oligonucleotide
  Sense strand starting at position 3701 of SEQ ID NO: 585644
caugguuuggcagaacuga

SEQ ID NO: 656229 - RNA, 19 nt, Artificial Sequence
  Description of Artificial Sequence: Synthetic oligonucleotide
  Antisense strand to SEQ ID NO: 656228
ucaguucugccaaaccaug

SEQ ID NO: 656230 - RNA, 19 nt, Artificial Sequence
  Description of Artificial Sequence: Synthetic oligonucleotide
  Sense strand starting at position 3771 of SEQ ID NO: 585644
gggugaggagcguguuaag

SEQ ID NO: 656231 - RNA, 19 nt, Artificial Sequence
  Description of Artificial Sequence: Synthetic oligonucleotide
  Antisense strand to SEQ ID NO: 656230
cuuaacacgcuccucaccc

SEQ ID NO: 656232 - RNA, 19 nt, Artificial Sequence
  Description of Artificial Sequence: Synthetic oligonucleotide
  Sense strand starting at position 3782 of SEQ ID NO: 585644
guguuaagagcuuacauug

SEQ ID NO: 656233 - RNA, 19 nt, Artificial Sequence
  Description of Artificial Sequence: Synthetic oligonucleotide
  Antisense strand to SEQ ID NO: 656232
caauguaagcucuuaacac

SEQ ID NO: 656234 - RNA, 19 nt, Artificial Sequence
  Description of Artificial Sequence: Synthetic oligonucleotide
  Sense strand starting at position 3791 of SEQ ID NO: 585644
gcuuacauugauugacuga

SEQ ID NO: 656235 - RNA, 19 nt, Artificial Sequence
  Description of Artificial Sequence: Synthetic oligonucleotide
  Antisense strand to SEQ ID NO: 656234
ucagucaaucaauguaagc

SEQ ID NO: 656236 - RNA, 19 nt, Artificial Sequence
  Description of Artificial Sequence: Synthetic oligonucleotide
  Sense strand starting at position 3819 of SEQ ID NO: 585644
ggauguccuguccaugaaa

SEQ ID NO: 656237 - RNA, 19 nt, Artificial Sequence
  Description of Artificial Sequence: Synthetic oligonucleotide
  Antisense strand to SEQ ID NO: 656236
uuucauggacaggacaucc

SEQ ID NO: 656238 - RNA, 19 nt, Artificial Sequence
  Description of Artificial Sequence: Synthetic oligonucleotide
  Sense strand starting at position 3821 of SEQ ID NO: 585644
auguccuguccaugaaaua

SEQ ID NO: 656239 - RNA, 19 nt, Artificial Sequence
  Description of Artificial Sequence: Synthetic oligonucleotide
  Antisense strand to SEQ ID NO: 656238
uauuucauggacaggacau

SEQ ID NO: 656240 - RNA, 19 nt, Artificial Sequence
  Description of Artificial Sequence: Synthetic oligonucleotide
  Sense strand starting at position 3822 of SEQ ID NO: 585644
uguccuguccaugaaauag

SEQ ID NO: 656241 - RNA, 19 nt, Artificial Sequence
  Description of Artificial Sequence: Synthetic oligonucleotide
  Antisense strand to SEQ ID NO: 656240
cuauuucauggacaggaca

SEQ ID NO: 656242 - RNA, 19 nt, Artificial Sequence
  Description of Artificial Sequence: Synthetic oligonucleotide
  Sense strand starting at position 34 of SEQ ID NO: 585645
aucagagcugccuggcaaa

SEQ ID NO: 656243 - RNA, 19 nt, Artificial Sequence
  Description of Artificial Sequence: Synthetic oligonucleotide
  Antisense strand to SEQ ID NO: 656242
uuugccaggcagcucugau

SEQ ID NO: 656244 - RNA, 19 nt, Artificial Sequence
  Description of Artificial Sequence: Synthetic oligonucleotide
  Sense strand starting at position 116 of SEQ ID NO: 585645
agccaaucagagggcaaau

SEQ ID NO: 656245 - RNA, 19 nt, Artificial Sequence
  Description of Artificial Sequence: Synthetic oligonucleotide
  Antisense strand to SEQ ID NO: 656244
auuugcccucugauuggcu

SEQ ID NO: 656246 - RNA, 19 nt, Artificial Sequence
  Description of Artificial Sequence: Synthetic oligonucleotide
  Sense strand starting at position 254 of SEQ ID NO: 585645
ccuagcauccuauguguga

SEQ ID NO: 656247 - RNA, 19 nt, Artificial Sequence
  Description of Artificial Sequence: Synthetic oligonucleotide
  Antisense strand to SEQ ID NO: 656246
ucacacauaggaugcuagg

SEQ ID NO: 656248 - RNA, 19 nt, Artificial Sequence
  Description of Artificial Sequence: Synthetic oligonucleotide
  Sense strand starting at position 258 of SEQ ID NO: 585645
gcauccuaugugugagucu

SEQ ID NO: 656249 - RNA, 19 nt, Artificial Sequence
  Description of Artificial Sequence: Synthetic oligonucleotide
  Antisense strand to SEQ ID NO: 656248
agacucacacauaggaugc

SEQ ID NO: 656250 - RNA, 19 nt, Artificial Sequence
  Description of Artificial Sequence: Synthetic oligonucleotide
  Sense strand starting at position 261 of SEQ ID NO: 585645
uccuaugugugagucugua

SEQ ID NO: 656251 - RNA, 19 nt, Artificial Sequence
  Description of Artificial Sequence: Synthetic oligonucleotide
  Antisense strand to SEQ ID NO: 656250
uacagacucacacauagga

SEQ ID NO: 656252 - RNA, 19 nt, Artificial Sequence
  Description of Artificial Sequence: Synthetic oligonucleotide
  Sense strand starting at position 722 of SEQ ID NO: 585645
aaagaaauggccuguguca

SEQ ID NO: 656253 - RNA, 19 nt, Artificial Sequence
  Description of Artificial Sequence: Synthetic oligonucleotide
  Antisense strand to SEQ ID NO: 656252
ugacacaggccauuucuuu

SEQ ID NO: 656254 - RNA, 19 nt, Artificial Sequence
  Description of Artificial Sequence: Synthetic oligonucleotide
  Sense strand starting at position 748 of SEQ ID NO: 585645
augauaaagacaugggugu

SEQ ID NO: 656255 - RNA, 19 nt, Artificial Sequence
  Description of Artificial Sequence: Synthetic oligonucleotide
  Antisense strand to SEQ ID NO: 656254
acacccaugucuuuaucau

SEQ ID NO: 656256 - RNA, 19 nt, Artificial Sequence
  Description of Artificial Sequence: Synthetic oligonucleotide
  Sense strand starting at position 799 of SEQ ID NO: 585645
acaauaaucugacagugag

SEQ ID NO: 656257 - RNA, 19 nt, Artificial Sequence
  Description of Artificial Sequence: Synthetic oligonucleotide
  Antisense strand to SEQ ID NO: 656256
cucacugucagauuauugu

SEQ ID NO: 656258 - RNA, 19 nt, Artificial Sequence
  Description of Artificial Sequence: Synthetic oligonucleotide
  Sense strand starting at position 837 of SEQ ID NO: 585645
gaugguguagcuuaggaaa

SEQ ID NO: 656259 - RNA, 19 nt, Artificial Sequence
  Description of Artificial Sequence: Synthetic oligonucleotide
  Antisense strand to SEQ ID NO: 656258
uuuccuaagcuacaccauc

SEQ ID NO: 656260 - RNA, 19 nt, Artificial Sequence
  Description of Artificial Sequence: Synthetic oligonucleotide
  Sense strand starting at position 857 of SEQ ID NO: 585645
gcagaaauccagcacuggu

SEQ ID NO: 656261 - RNA, 19 nt, Artificial Sequence
  Description of Artificial Sequence: Synthetic oligonucleotide
  Antisense strand to SEQ ID NO: 656260
accagugcuggauuucugc

SEQ ID NO: 656262 - RNA, 19 nt, Artificial Sequence
  Description of Artificial Sequence: Synthetic oligonucleotide
  Sense strand starting at position 906 of SEQ ID NO: 585645
aagguuauccuaggauuaa

SEQ ID NO: 656263 - RNA, 19 nt, Artificial Sequence
  Description of Artificial Sequence: Synthetic oligonucleotide
  Antisense strand to SEQ ID NO: 656262
uuaauccuaggauaaccuu

SEQ ID NO: 656264 - RNA, 19 nt, Artificial Sequence
  Description of Artificial Sequence: Synthetic oligonucleotide
  Sense strand starting at position 907 of SEQ ID NO: 585645
agguuauccuaggauuaag

SEQ ID NO: 656265 - RNA, 19 nt, Artificial Sequence
  Description of Artificial Sequence: Synthetic oligonucleotide
  Antisense strand to SEQ ID NO: 656264
cuuaauccuaggauaaccu

SEQ ID NO: 656266 - RNA, 19 nt, Artificial Sequence
  Description of Artificial Sequence: Synthetic oligonucleotide
  Sense strand starting at position 934 of SEQ ID NO: 585645
ugaggagccuacucagauu

SEQ ID NO: 656267 - RNA, 19 nt, Artificial Sequence
  Description of Artificial Sequence: Synthetic oligonucleotide
  Antisense strand to SEQ ID NO: 656266
aaucugaguaggcuccuca

SEQ ID NO: 656268 - RNA, 19 nt, Artificial Sequence
  Description of Artificial Sequence: Synthetic oligonucleotide
  Sense strand starting at position 953 of SEQ ID NO: 585645
aggaaaggugacuggucua

SEQ ID NO: 656269 - RNA, 19 nt, Artificial Sequence
  Description of Artificial Sequence: Synthetic oligonucleotide
  Antisense strand to SEQ ID NO: 656268
uagaccagucaccuuuccu

SEQ ID NO: 656270 - RNA, 19 nt, Artificial Sequence
  Description of Artificial Sequence: Synthetic oligonucleotide
  Sense strand starting at position 956 of SEQ ID NO: 585645
aaaggugacuggucuagga

SEQ ID NO: 656271 - RNA, 19 nt, Artificial Sequence
  Description of Artificial Sequence: Synthetic oligonucleotide
  Antisense strand to SEQ ID NO: 656270
uccuagaccagucaccuuu

SEQ ID NO: 656272 - RNA, 19 nt, Artificial Sequence
  Description of Artificial Sequence: Synthetic oligonucleotide
  Sense strand starting at position 960 of SEQ ID NO: 585645
gugacuggucuaggaugca

SEQ ID NO: 656273 - RNA, 19 nt, Artificial Sequence
  Description of Artificial Sequence: Synthetic oligonucleotide
  Antisense strand to SEQ ID NO: 656272
ugcauccuagaccagucac

SEQ ID NO: 656274 - RNA, 19 nt, Artificial Sequence
  Description of Artificial Sequence: Synthetic oligonucleotide
  Sense strand starting at position 991 of SEQ ID NO: 585645
uuaggagggcuuugauaca

SEQ ID NO: 656275 - RNA, 19 nt, Artificial Sequence
  Description of Artificial Sequence: Synthetic oligonucleotide
  Antisense strand to SEQ ID NO: 656274
uguaucaaagcccuccuaa

SEQ ID NO: 656276 - RNA, 19 nt, Artificial Sequence
  Description of Artificial Sequence: Synthetic oligonucleotide
  Sense strand starting at position 1194 of SEQ ID NO: 585645
cucaguccugcuuacaagu

SEQ ID NO: 656277 - RNA, 19 nt, Artificial Sequence
  Description of Artificial Sequence: Synthetic oligonucleotide
  Antisense strand to SEQ ID NO: 656276
acuuguaagcaggacugag

SEQ ID NO: 656278 - RNA, 19 nt, Artificial Sequence
  Description of Artificial Sequence: Synthetic oligonucleotide
  Sense strand starting at position 1397 of SEQ ID NO: 585645
ggcaauucuggaggaaggu

SEQ ID NO: 656279 - RNA, 19 nt, Artificial Sequence
  Description of Artificial Sequence: Synthetic oligonucleotide
  Antisense strand to SEQ ID NO: 656278
accuuccuccagaauugcc

SEQ ID NO: 656280 - RNA, 19 nt, Artificial Sequence
  Description of Artificial Sequence: Synthetic oligonucleotide
  Sense strand starting at position 2086 of SEQ ID NO: 585645
uccagaauuggcugaagug

SEQ ID NO: 656281 - RNA, 19 nt, Artificial Sequence
  Description of Artificial Sequence: Synthetic oligonucleotide
  Antisense strand to SEQ ID NO: 656280
cacuucagccaauucugga

SEQ ID NO: 656282 - RNA, 19 nt, Artificial Sequence
  Description of Artificial Sequence: Synthetic oligonucleotide
  Sense strand starting at position 2122 of SEQ ID NO: 585645
gugggucgagcuuagagaa

SEQ ID NO: 656283 - RNA, 19 nt, Artificial Sequence
  Description of Artificial Sequence: Synthetic oligonucleotide
  Antisense strand to SEQ ID NO: 656282
uucucuaagcucgacccac

SEQ ID NO: 656284 - RNA, 19 nt, Artificial Sequence
  Description of Artificial Sequence: Synthetic oligonucleotide
  Sense strand starting at position 2355 of SEQ ID NO: 585645
gcccuaauugcagaugcaa

SEQ ID NO: 656285 - RNA, 19 nt, Artificial Sequence
  Description of Artificial Sequence: Synthetic oligonucleotide
  Antisense strand to SEQ ID NO: 656284
uugcaucugcaauuagggc

SEQ ID NO: 656286 - RNA, 19 nt, Artificial Sequence
  Description of Artificial Sequence: Synthetic oligonucleotide
  Sense strand starting at position 2472 of SEQ ID NO: 585645
gggcgaaaugaguggagaa

SEQ ID NO: 656287 - RNA, 19 nt, Artificial Sequence
  Description of Artificial Sequence: Synthetic oligonucleotide
  Antisense strand to SEQ ID NO: 656286
uucuccacucauuucgccc

SEQ ID NO: 656288 - RNA, 19 nt, Artificial Sequence
  Description of Artificial Sequence: Synthetic oligonucleotide
  Sense strand starting at position 2473 of SEQ ID NO: 585645
ggcgaaaugaguggagaau

SEQ ID NO: 656289 - RNA, 19 nt, Artificial Sequence
  Description of Artificial Sequence: Synthetic oligonucleotide
  Antisense strand to SEQ ID NO: 656288
auucuccacucauuucgcc

SEQ ID NO: 656290 - RNA, 19 nt, Artificial Sequence
  Description of Artificial Sequence: Synthetic oligonucleotide
  Sense strand starting at position 2474 of SEQ ID NO: 585645
gcgaaaugaguggagaauc

SEQ ID NO: 656291 - RNA, 19 nt, Artificial Sequence
  Description of Artificial Sequence: Synthetic oligonucleotide
  Antisense strand to SEQ ID NO: 656290
gauucuccacucauuucgc

SEQ ID NO: 656292 - RNA, 19 nt, Artificial Sequence
  Description of Artificial Sequence: Synthetic oligonucleotide
  Sense strand starting at position 2606 of SEQ ID NO: 585645
uguugacugucucaggaaa

SEQ ID NO: 656293 - RNA, 19 nt, Artificial Sequence
  Description of Artificial Sequence: Synthetic oligonucleotide
  Antisense strand to SEQ ID NO: 656292
uuuccugagacagucaaca

SEQ ID NO: 656294 - RNA, 19 nt, Artificial Sequence
  Description of Artificial Sequence: Synthetic oligonucleotide
  Sense strand starting at position 2647 of SEQ ID NO: 585645
gcucaaguccguguucuaa

SEQ ID NO: 656295 - RNA, 19 nt, Artificial Sequence
  Description of Artificial Sequence: Synthetic oligonucleotide
  Antisense strand to SEQ ID NO: 656294
uuagaacacggacuugagc

SEQ ID NO: 656296 - RNA, 19 nt, Artificial Sequence
  Description of Artificial Sequence: Synthetic oligonucleotide
  Sense strand starting at position 2649 of SEQ ID NO: 585645
ucaaguccguguucuaaug

SEQ ID NO: 656297 - RNA, 19 nt, Artificial Sequence
  Description of Artificial Sequence: Synthetic oligonucleotide
  Antisense strand to SEQ ID NO: 656296
cauuagaacacggacuuga

SEQ ID NO: 656298 - RNA, 19 nt, Artificial Sequence
  Description of Artificial Sequence: Synthetic oligonucleotide
  Sense strand starting at position 2655 of SEQ ID NO: 585645
ccguguucuaauggguaag

SEQ ID NO: 656299 - RNA, 19 nt, Artificial Sequence
  Description of Artificial Sequence: Synthetic oligonucleotide
  Antisense strand to SEQ ID NO: 656298
cuuacccauuagaacacgg

SEQ ID NO: 656300 - RNA, 19 nt, Artificial Sequence
  Description of Artificial Sequence: Synthetic oligonucleotide
  Sense strand starting at position 2656 of SEQ ID NO: 585645
cguguucuaauggguaaga

SEQ ID NO: 656301 - RNA, 19 nt, Artificial Sequence
  Description of Artificial Sequence: Synthetic oligonucleotide
  Antisense strand to SEQ ID NO: 656300
ucuuacccauuagaacacg

SEQ ID NO: 656302 - RNA, 19 nt, Artificial Sequence
  Description of Artificial Sequence: Synthetic oligonucleotide
  Sense strand starting at position 2658 of SEQ ID NO: 585645
uguucuaauggguaagacu

SEQ ID NO: 656303 - RNA, 19 nt, Artificial Sequence
  Description of Artificial Sequence: Synthetic oligonucleotide
  Antisense strand to SEQ ID NO: 656302
agucuuacccauuagaaca

SEQ ID NO: 656304 - RNA, 19 nt, Artificial Sequence
  Description of Artificial Sequence: Synthetic oligonucleotide
  Sense strand starting at position 2667 of SEQ ID NO: 585645
ggguaagacucaguuuaug

SEQ ID NO: 656305 - RNA, 19 nt, Artificial Sequence
  Description of Artificial Sequence: Synthetic oligonucleotide
  Antisense strand to SEQ ID NO: 656304
cauaaacugagucuuaccc

SEQ ID NO: 656306 - RNA, 19 nt, Artificial Sequence
  Description of Artificial Sequence: Synthetic oligonucleotide
  Sense strand starting at position 2676 of SEQ ID NO: 585645
ucaguuuaugcccacaaag

SEQ ID NO: 656307 - RNA, 19 nt, Artificial Sequence
  Description of Artificial Sequence: Synthetic oligonucleotide
  Antisense strand to SEQ ID NO: 656306
cuuugugggcauaaacuga

SEQ ID NO: 656308 - RNA, 19 nt, Artificial Sequence
  Description of Artificial Sequence: Synthetic oligonucleotide
  Sense strand starting at position 2678 of SEQ ID NO: 585645
aguuuaugcccacaaagag

SEQ ID NO: 656309 - RNA, 19 nt, Artificial Sequence
  Description of Artificial Sequence: Synthetic oligonucleotide
  Antisense strand to SEQ ID NO: 656308
cucuuugugggcauaaacu

SEQ ID NO: 656310 - RNA, 19 nt, Artificial Sequence
  Description of Artificial Sequence: Synthetic oligonucleotide
  Sense strand starting at position 2704 of SEQ ID NO: 585645
ucuggugaaucacagaugu

SEQ ID NO: 656311 - RNA, 19 nt, Artificial Sequence
  Description of Artificial Sequence: Synthetic oligonucleotide
  Antisense strand to SEQ ID NO: 656310
acaucugugauucaccaga

SEQ ID NO: 656312 - RNA, 19 nt, Artificial Sequence
  Description of Artificial Sequence: Synthetic oligonucleotide
  Sense strand starting at position 2706 of SEQ ID NO: 585645
uggugaaucacagaugugu

SEQ ID NO: 656313 - RNA, 19 nt, Artificial Sequence
  Description of Artificial Sequence: Synthetic oligonucleotide
  Antisense strand to SEQ ID NO: 656312
acacaucugugauucacca

SEQ ID NO: 656314 - RNA, 19 nt, Artificial Sequence
  Description of Artificial Sequence: Synthetic oligonucleotide
  Sense strand starting at position 2708 of SEQ ID NO: 585645
gugaaucacagauguguau

SEQ ID NO: 656315 - RNA, 19 nt, Artificial Sequence
  Description of Artificial Sequence: Synthetic oligonucleotide
  Antisense strand to SEQ ID NO: 656314
auacacaucugugauucac

SEQ ID NO: 656316 - RNA, 19 nt, Artificial Sequence
  Description of Artificial Sequence: Synthetic oligonucleotide
  Sense strand starting at position 3533 of SEQ ID NO: 585645
agaagaaaccugugaugca

SEQ ID NO: 656317 - RNA, 19 nt, Artificial Sequence
  Description of Artificial Sequence: Synthetic oligonucleotide
  Antisense strand to SEQ ID NO: 656316
ugcaucacagguuucuucu

SEQ ID NO: 656318 - RNA, 19 nt, Artificial Sequence
  Description of Artificial Sequence: Synthetic oligonucleotide
  Sense strand starting at position 3534 of SEQ ID NO: 585645
gaagaaaccugugaugcaa

SEQ ID NO: 656319 - RNA, 19 nt, Artificial Sequence
  Description of Artificial Sequence: Synthetic oligonucleotide
  Antisense strand to SEQ ID NO: 656318
uugcaucacagguuucuuc

SEQ ID NO: 656320 - RNA, 19 nt, Artificial Sequence
  Description of Artificial Sequence: Synthetic oligonucleotide
  Sense strand starting at position 3905 of SEQ ID NO: 585645
gggugauggcugcaucaaa

SEQ ID NO: 656321 - RNA, 19 nt, Artificial Sequence
  Description of Artificial Sequence: Synthetic oligonucleotide
  Antisense strand to SEQ ID NO: 656320
uuugaugcagccaucaccc

SEQ ID NO: 656322 - RNA, 19 nt, Artificial Sequence
  Description of Artificial Sequence: Synthetic oligonucleotide
  Sense strand starting at position 124 of SEQ ID NO: 585646
ccgugucuggcaagcgaau

SEQ ID NO: 656323 - RNA, 19 nt, Artificial Sequence
  Description of Artificial Sequence: Synthetic oligonucleotide
  Antisense strand to SEQ ID NO: 656322
auucgcuugccagacacgg

SEQ ID NO: 656324 - RNA, 19 nt, Artificial Sequence
  Description of Artificial Sequence: Synthetic oligonucleotide
  Sense strand starting at position 143 of SEQ ID NO: 585646
ggcaaugcuaagugaccau

SEQ ID NO: 656325 - RNA, 19 nt, Artificial Sequence
  Description of Artificial Sequence: Synthetic oligonucleotide
  Antisense strand to SEQ ID NO: 656324
auggucacuuagcauugcc

SEQ ID NO: 656326 - RNA, 19 nt, Artificial Sequence
  Description of Artificial Sequence: Synthetic oligonucleotide
  Sense strand starting at position 186 of SEQ ID NO: 585646
gggcauucuauggagucua

SEQ ID NO: 656327 - RNA, 19 nt, Artificial Sequence
  Description of Artificial Sequence: Synthetic oligonucleotide
  Antisense strand to SEQ ID NO: 656326
uagacuccauagaaugccc

SEQ ID NO: 656328 - RNA, 19 nt, Artificial Sequence
  Description of Artificial Sequence: Synthetic oligonucleotide
  Sense strand starting at position 506 of SEQ ID NO: 585646
agugacugagcccgaauua

SEQ ID NO: 656329 - RNA, 19 nt, Artificial Sequence
  Description of Artificial Sequence: Synthetic oligonucleotide
  Antisense strand to SEQ ID NO: 656328
uaauucgggcucagucacu

SEQ ID NO: 656330 - RNA, 19 nt, Artificial Sequence
  Description of Artificial Sequence: Synthetic oligonucleotide
  Sense strand starting at position 541 of SEQ ID NO: 585646
ccucuaguucuaggauguu

SEQ ID NO: 656331 - RNA, 19 nt, Artificial Sequence
  Description of Artificial Sequence: Synthetic oligonucleotide
  Antisense strand to SEQ ID NO: 656330
aacauccuagaacuagagg

SEQ ID NO: 656332 - RNA, 19 nt, Artificial Sequence
  Description of Artificial Sequence: Synthetic oligonucleotide
  Sense strand starting at position 575 of SEQ ID NO: 585646
agcccuuauguccaagaac

SEQ ID NO: 656333 - RNA, 19 nt, Artificial Sequence
  Description of Artificial Sequence: Synthetic oligonucleotide
  Antisense strand to SEQ ID NO: 656332
guucuuggacauaagggcu

SEQ ID NO: 656334 - RNA, 19 nt, Artificial Sequence
  Description of Artificial Sequence: Synthetic oligonucleotide
  Sense strand starting at position 584 of SEQ ID NO: 585646
guccaagaaccauggguaa

SEQ ID NO: 656335 - RNA, 19 nt, Artificial Sequence
  Description of Artificial Sequence: Synthetic oligonucleotide
  Antisense strand to SEQ ID NO: 656334
uuacccaugguucuuggac

SEQ ID NO: 656336 - RNA, 19 nt, Artificial Sequence
  Description of Artificial Sequence: Synthetic oligonucleotide
  Sense strand starting at position 716 of SEQ ID NO: 585646
ggagcaaugugguucagaa

SEQ ID NO: 656337 - RNA, 19 nt, Artificial Sequence
  Description of Artificial Sequence: Synthetic oligonucleotide
  Antisense strand to SEQ ID NO: 656336
uucugaaccacauugcucc

SEQ ID NO: 656338 - RNA, 19 nt, Artificial Sequence
  Description of Artificial Sequence: Synthetic oligonucleotide
  Sense strand starting at position 745 of SEQ ID NO: 585646
uaggaagugucccucagau

SEQ ID NO: 656339 - RNA, 19 nt, Artificial Sequence
  Description of Artificial Sequence: Synthetic oligonucleotide
  Antisense strand to SEQ ID NO: 656338
aucugagggacacuuccua

SEQ ID NO: 656340 - RNA, 19 nt, Artificial Sequence
  Description of Artificial Sequence: Synthetic oligonucleotide
  Sense strand starting at position 751 of SEQ ID NO: 585646
gugucccucagauaaggau

SEQ ID NO: 656341 - RNA, 19 nt, Artificial Sequence
  Description of Artificial Sequence: Synthetic oligonucleotide
  Antisense strand to SEQ ID NO: 656340
auccuuaucugagggacac

SEQ ID NO: 656342 - RNA, 19 nt, Artificial Sequence
  Description of Artificial Sequence: Synthetic oligonucleotide
  Sense strand starting at position 776 of SEQ ID NO: 585646
ucagauagggcuuaggagu

SEQ ID NO: 656343 - RNA, 19 nt, Artificial Sequence
  Description of Artificial Sequence: Synthetic oligonucleotide
  Antisense strand to SEQ ID NO: 656342
acuccuaagcccuaucuga

SEQ ID NO: 656344 - RNA, 19 nt, Artificial Sequence
  Description of Artificial Sequence: Synthetic oligonucleotide
  Sense strand starting at position 1040 of SEQ ID NO: 585646
cguccacaggucuauugua

SEQ ID NO: 656345 - RNA, 19 nt, Artificial Sequence
  Description of Artificial Sequence: Synthetic oligonucleotide
  Antisense strand to SEQ ID NO: 656344
uacaauagaccuguggacg

SEQ ID NO: 656346 - RNA, 19 nt, Artificial Sequence
  Description of Artificial Sequence: Synthetic oligonucleotide
  Sense strand starting at position 1050 of SEQ ID NO: 585646
ucuauuguacccugcuaga

SEQ ID NO: 656347 - RNA, 19 nt, Artificial Sequence
  Description of Artificial Sequence: Synthetic oligonucleotide
  Antisense strand to SEQ ID NO: 656346
ucuagcaggguacaauaga

SEQ ID NO: 656348 - RNA, 19 nt, Artificial Sequence
  Description of Artificial Sequence: Synthetic oligonucleotide
  Sense strand starting at position 1105 of SEQ ID NO: 585646
gcaccagcucccugaggaa

SEQ ID NO: 656349 - RNA, 19 nt, Artificial Sequence
  Description of Artificial Sequence: Synthetic oligonucleotide
  Antisense strand to SEQ ID NO: 656348
uuccucagggagcuggugc

SEQ ID NO: 656350 - RNA, 19 nt, Artificial Sequence
  Description of Artificial Sequence: Synthetic oligonucleotide
  Sense strand starting at position 1213 of SEQ ID NO: 585646
ccugccagaccucauugau

SEQ ID NO: 656351 - RNA, 19 nt, Artificial Sequence
  Description of Artificial Sequence: Synthetic oligonucleotide
  Antisense strand to SEQ ID NO: 656350
aucaaugaggucuggcagg

SEQ ID NO: 656352 - RNA, 19 nt, Artificial Sequence
  Description of Artificial Sequence: Synthetic oligonucleotide
  Sense strand starting at position 1423 of SEQ ID NO: 585646
gggugauaagggcauguga

SEQ ID NO: 656353 - RNA, 19 nt, Artificial Sequence
  Description of Artificial Sequence: Synthetic oligonucleotide
  Antisense strand to SEQ ID NO: 656352
ucacaugcccuuaucaccc

SEQ ID NO: 656354 - RNA, 19 nt, Artificial Sequence
  Description of Artificial Sequence: Synthetic oligonucleotide
  Sense strand starting at position 2232 of SEQ ID NO: 585646
aagguaguccucugcauuu

SEQ ID NO: 656355 - RNA, 19 nt, Artificial Sequence
  Description of Artificial Sequence: Synthetic oligonucleotide
  Antisense strand to SEQ ID NO: 656354
aaaugcagaggacuaccuu

SEQ ID NO: 656356 - RNA, 19 nt, Artificial Sequence
  Description of Artificial Sequence: Synthetic oligonucleotide
  Sense strand starting at position 2349 of SEQ ID NO: 585646
aggucagcgacuuacaacu

SEQ ID NO: 656357 - RNA, 19 nt, Artificial Sequence
  Description of Artificial Sequence: Synthetic oligonucleotide
  Antisense strand to SEQ ID NO: 656356
aguuguaagucgcugaccu

SEQ ID NO: 656358 - RNA, 19 nt, Artificial Sequence
  Description of Artificial Sequence: Synthetic oligonucleotide
  Sense strand starting at position 2543 of SEQ ID NO: 585646
cguaauuucgaccagucuu

SEQ ID NO: 656359 - RNA, 19 nt, Artificial Sequence
  Description of Artificial Sequence: Synthetic oligonucleotide
  Antisense strand to SEQ ID NO: 656358
aagacuggucgaaauuacg

SEQ ID NO: 656360 - RNA, 19 nt, Artificial Sequence
  Description of Artificial Sequence: Synthetic oligonucleotide
  Sense strand starting at position 2578 of SEQ ID NO: 585646
ccagaaucuggcugucuga

SEQ ID NO: 656361 - RNA, 19 nt, Artificial Sequence
  Description of Artificial Sequence: Synthetic oligonucleotide
  Antisense strand to SEQ ID NO: 656360
ucagacagccagauucugg

SEQ ID NO: 656362 - RNA, 19 nt, Artificial Sequence
  Description of Artificial Sequence: Synthetic oligonucleotide
  Sense strand starting at position 2715 of SEQ ID NO: 585646
uaaagacguuucucuagag

SEQ ID NO: 656363 - RNA, 19 nt, Artificial Sequence
  Description of Artificial Sequence: Synthetic oligonucleotide
  Antisense strand to SEQ ID NO: 656362
cucuagagaaacgucuuua

SEQ ID NO: 656364 - RNA, 19 nt, Artificial Sequence
  Description of Artificial Sequence: Synthetic oligonucleotide
  Sense strand starting at position 2716 of SEQ ID NO: 585646
aaagacguuucucuagaga

SEQ ID NO: 656365 - RNA, 19 nt, Artificial Sequence
  Description of Artificial Sequence: Synthetic oligonucleotide
  Antisense strand to SEQ ID NO: 656364
ucucuagagaaacgucuuu

SEQ ID NO: 656366 - RNA, 19 nt, Artificial Sequence
  Description of Artificial Sequence: Synthetic oligonucleotide
  Sense strand starting at position 2719 of SEQ ID NO: 585646
gacguuucucuagagauaa

SEQ ID NO: 656367 - RNA, 19 nt, Artificial Sequence
  Description of Artificial Sequence: Synthetic oligonucleotide
  Antisense strand to SEQ ID NO: 656366
uuaucucuagagaaacguc

SEQ ID NO: 656368 - RNA, 19 nt, Artificial Sequence
  Description of Artificial Sequence: Synthetic oligonucleotide
  Sense strand starting at position 2766 of SEQ ID NO: 585646
cucuguuuacaaggucauu

SEQ ID NO: 656369 - RNA, 19 nt, Artificial Sequence
  Description of Artificial Sequence: Synthetic oligonucleotide
  Antisense strand to SEQ ID NO: 656368
aaugaccuuguaaacagag

SEQ ID NO: 656370 - RNA, 19 nt, Artificial Sequence
  Description of Artificial Sequence: Synthetic oligonucleotide
  Sense strand starting at position 2776 of SEQ ID NO: 585646
aaggucauugcuuggucua

SEQ ID NO: 656371 - RNA, 19 nt, Artificial Sequence
  Description of Artificial Sequence: Synthetic oligonucleotide
  Antisense strand to SEQ ID NO: 656370
uagaccaagcaaugaccuu

SEQ ID NO: 656372 - RNA, 19 nt, Artificial Sequence
  Description of Artificial Sequence: Synthetic oligonucleotide
  Sense strand starting at position 2777 of SEQ ID NO: 585646
aggucauugcuuggucuaa

SEQ ID NO: 656373 - RNA, 19 nt, Artificial Sequence
  Description of Artificial Sequence: Synthetic oligonucleotide
  Antisense strand to SEQ ID NO: 656372
uuagaccaagcaaugaccu

SEQ ID NO: 656374 - RNA, 19 nt, Artificial Sequence
  Description of Artificial Sequence: Synthetic oligonucleotide
  Sense strand starting at position 2778 of SEQ ID NO: 585646
ggucauugcuuggucuaaa

SEQ ID NO: 656375 - RNA, 19 nt, Artificial Sequence
  Description of Artificial Sequence: Synthetic oligonucleotide
  Antisense strand to SEQ ID NO: 656374
uuuagaccaagcaaugacc

SEQ ID NO: 656376 - RNA, 19 nt, Artificial Sequence
  Description of Artificial Sequence: Synthetic oligonucleotide
  Sense strand starting at position 2904 of SEQ ID NO: 585646
gugugaagccgugaucuga

SEQ ID NO: 656377 - RNA, 19 nt, Artificial Sequence
  Description of Artificial Sequence: Synthetic oligonucleotide
  Antisense strand to SEQ ID NO: 656376
ucagaucacggcuucacac

SEQ ID NO: 656378 - RNA, 19 nt, Artificial Sequence
  Description of Artificial Sequence: Synthetic oligonucleotide
  Sense strand starting at position 3102 of SEQ ID NO: 585646
ugguguaaaucuccauaga

SEQ ID NO: 656379 - RNA, 19 nt, Artificial Sequence
  Description of Artificial Sequence: Synthetic oligonucleotide
  Antisense strand to SEQ ID NO: 656378
ucuauggagauuuacacca

SEQ ID NO: 656380 - RNA, 19 nt, Artificial Sequence
  Description of Artificial Sequence: Synthetic oligonucleotide
  Sense strand starting at position 3103 of SEQ ID NO: 585646
gguguaaaucuccauagac

SEQ ID NO: 656381 - RNA, 19 nt, Artificial Sequence
  Description of Artificial Sequence: Synthetic oligonucleotide
  Antisense strand to SEQ ID NO: 656380
gucuauggagauuuacacc

SEQ ID NO: 656382 - RNA, 19 nt, Artificial Sequence
  Description of Artificial Sequence: Synthetic oligonucleotide
  Sense strand starting at position 3260 of SEQ ID NO: 585646
ggguuuagggaauggaucu

SEQ ID NO: 656383 - RNA, 19 nt, Artificial Sequence
  Description of Artificial Sequence: Synthetic oligonucleotide
  Antisense strand to SEQ ID NO: 656382
agauccauucccuaaaccc

SEQ ID NO: 656384 - RNA, 19 nt, Artificial Sequence
  Description of Artificial Sequence: Synthetic oligonucleotide
  Sense strand starting at position 3267 of SEQ ID NO: 585646
gggaauggaucugaacauu

SEQ ID NO: 656385 - RNA, 19 nt, Artificial Sequence
  Description of Artificial Sequence: Synthetic oligonucleotide
  Antisense strand to SEQ ID NO: 656384
aauguucagauccauuccc

SEQ ID NO: 656386 - RNA, 19 nt, Artificial Sequence
  Description of Artificial Sequence: Synthetic oligonucleotide
  Sense strand starting at position 3362 of SEQ ID NO: 585646
gccagaaaugagcaguuaa

SEQ ID NO: 656387 - RNA, 19 nt, Artificial Sequence
  Description of Artificial Sequence: Synthetic oligonucleotide
  Antisense strand to SEQ ID NO: 656386
uuaacugcucauuucuggc

SEQ ID NO: 656388 - RNA, 19 nt, Artificial Sequence
  Description of Artificial Sequence: Synthetic oligonucleotide
  Sense strand starting at position 3415 of SEQ ID NO: 585646
cuccuuaguccuggacgaa

SEQ ID NO: 656389 - RNA, 19 nt, Artificial Sequence
  Description of Artificial Sequence: Synthetic oligonucleotide
  Antisense strand to SEQ ID NO: 656388
uucguccaggacuaaggag

SEQ ID NO: 656390 - RNA, 19 nt, Artificial Sequence
  Description of Artificial Sequence: Synthetic oligonucleotide
  Sense strand starting at position 3416 of SEQ ID NO: 585646
uccuuaguccuggacgaag

SEQ ID NO: 656391 - RNA, 19 nt, Artificial Sequence
  Description of Artificial Sequence: Synthetic oligonucleotide
  Antisense strand to SEQ ID NO: 656390
cuucguccaggacuaagga

SEQ ID NO: 656392 - RNA, 19 nt, Artificial Sequence
  Description of Artificial Sequence: Synthetic oligonucleotide
  Sense strand starting at position 3418 of SEQ ID NO: 585646
cuuaguccuggacgaagaa

SEQ ID NO: 656393 - RNA, 19 nt, Artificial Sequence
  Description of Artificial Sequence: Synthetic oligonucleotide
  Antisense strand to SEQ ID NO: 656392
uucuucguccaggacuaag

SEQ ID NO: 656394 - RNA, 19 nt, Artificial Sequence
  Description of Artificial Sequence: Synthetic oligonucleotide
  Sense strand starting at position 3576 of SEQ ID NO: 585646
aguucugaacucugcacaa

SEQ ID NO: 656395 - RNA, 19 nt, Artificial Sequence
  Description of Artificial Sequence: Synthetic oligonucleotide
  Antisense strand to SEQ ID NO: 656394
uugugcagaguucagaacu

SEQ ID NO: 656396 - RNA, 19 nt, Artificial Sequence
  Description of Artificial Sequence: Synthetic oligonucleotide
  Sense strand starting at position 3644 of SEQ ID NO: 585646
ggccaaggauuugggagaa

SEQ ID NO: 656397 - RNA, 19 nt, Artificial Sequence
  Description of Artificial Sequence: Synthetic oligonucleotide
  Antisense strand to SEQ ID NO: 656396
uucucccaaauccuuggcc

SEQ ID NO: 656398 - RNA, 19 nt, Artificial Sequence
  Description of Artificial Sequence: Synthetic oligonucleotide
  Sense strand starting at position 3711 of SEQ ID NO: 585646
ggaggcaccuggguuauua

SEQ ID NO: 656399 - RNA, 19 nt, Artificial Sequence
  Description of Artificial Sequence: Synthetic oligonucleotide
  Antisense strand to SEQ ID NO: 656398
uaauaacccaggugccucc

SEQ ID NO: 656400 - RNA, 19 nt, Artificial Sequence
  Description of Artificial Sequence: Synthetic oligonucleotide
  Sense strand starting at position 3852 of SEQ ID NO: 585646
ccguguuuccaugacaacu

SEQ ID NO: 656401 - RNA, 19 nt, Artificial Sequence
  Description of Artificial Sequence: Synthetic oligonucleotide
  Antisense strand to SEQ ID NO: 656400
aguugucauggaaacacgg

SEQ ID NO: 656402 - RNA, 19 nt, Artificial Sequence
  Description of Artificial Sequence: Synthetic oligonucleotide
  Sense strand starting at position 28 of SEQ ID NO: 585647
agcccuuauguccaagaac

SEQ ID NO: 656403 - RNA, 19 nt, Artificial Sequence
  Description of Artificial Sequence: Synthetic oligonucleotide
  Antisense strand to SEQ ID NO: 656402
guucuuggacauaagggcu

SEQ ID NO: 656404 - RNA, 19 nt, Artificial Sequence
  Description of Artificial Sequence: Synthetic oligonucleotide
  Sense strand starting at position 37 of SEQ ID NO: 585647
guccaagaaccauggguaa

SEQ ID NO: 656405 - RNA, 19 nt, Artificial Sequence
  Description of Artificial Sequence: Synthetic oligonucleotide
  Antisense strand to SEQ ID NO: 656404
uuacccaugguucuuggac

SEQ ID NO: 656406 - RNA, 19 nt, Artificial Sequence
  Description of Artificial Sequence: Synthetic oligonucleotide
  Sense strand starting at position 169 of SEQ ID NO: 585647
ggagcaaugugguucagaa

SEQ ID NO: 656407 - RNA, 19 nt, Artificial Sequence
  Description of Artificial Sequence: Synthetic oligonucleotide
  Antisense strand to SEQ ID NO: 656406
uucugaaccacauugcucc

SEQ ID NO: 656408 - RNA, 19 nt, Artificial Sequence
  Description of Artificial Sequence: Synthetic oligonucleotide
  Sense strand starting at position 198 of SEQ ID NO: 585647
uaggaagugucccucagau

SEQ ID NO: 656409 - RNA, 19 nt, Artificial Sequence
  Description of Artificial Sequence: Synthetic oligonucleotide
  Antisense strand to SEQ ID NO: 656408
aucugagggacacuuccua

SEQ ID NO: 656410 - RNA, 19 nt, Artificial Sequence
  Description of Artificial Sequence: Synthetic oligonucleotide
  Sense strand starting at position 204 of SEQ ID NO: 585647
gugucccucagauaaggau

SEQ ID NO: 656411 - RNA, 19 nt, Artificial Sequence
  Description of Artificial Sequence: Synthetic oligonucleotide
  Antisense strand to SEQ ID NO: 656410
auccuuaucugagggacac

SEQ ID NO: 656412 - RNA, 19 nt, Artificial Sequence
  Description of Artificial Sequence: Synthetic oligonucleotide
  Sense strand starting at position 229 of SEQ ID NO: 585647
ucagauagggcuuaggagu

SEQ ID NO: 656413 - RNA, 19 nt, Artificial Sequence
  Description of Artificial Sequence: Synthetic oligonucleotide
  Antisense strand to SEQ ID NO: 656412
acuccuaagcccuaucuga

SEQ ID NO: 656414 - RNA, 19 nt, Artificial Sequence
  Description of Artificial Sequence: Synthetic oligonucleotide
  Sense strand starting at position 493 of SEQ ID NO: 585647
cguccacaggucuauugua

SEQ ID NO: 656415 - RNA, 19 nt, Artificial Sequence
  Description of Artificial Sequence: Synthetic oligonucleotide
  Antisense strand to SEQ ID NO: 656414
uacaauagaccuguggacg

SEQ ID NO: 656416 - RNA, 19 nt, Artificial Sequence
  Description of Artificial Sequence: Synthetic oligonucleotide
  Sense strand starting at position 503 of SEQ ID NO: 585647
ucuauuguacccugcuaga

SEQ ID NO: 656417 - RNA, 19 nt, Artificial Sequence
  Description of Artificial Sequence: Synthetic oligonucleotide
  Antisense strand to SEQ ID NO: 656416
ucuagcaggguacaauaga

SEQ ID NO: 656418 - RNA, 19 nt, Artificial Sequence
  Description of Artificial Sequence: Synthetic oligonucleotide
  Sense strand starting at position 558 of SEQ ID NO: 585647
gcaccagcucccugaggaa

SEQ ID NO: 656419 - RNA, 19 nt, Artificial Sequence
  Description of Artificial Sequence: Synthetic oligonucleotide
  Antisense strand to SEQ ID NO: 656418
uuccucagggagcuggugc

SEQ ID NO: 656420 - RNA, 19 nt, Artificial Sequence
  Description of Artificial Sequence: Synthetic oligonucleotide
  Sense strand starting at position 666 of SEQ ID NO: 585647
ccugccagaccucauugau

SEQ ID NO: 656421 - RNA, 19 nt, Artificial Sequence
  Description of Artificial Sequence: Synthetic oligonucleotide
  Antisense strand to SEQ ID NO: 656420
aucaaugaggucuggcagg

SEQ ID NO: 656422 - RNA, 19 nt, Artificial Sequence
  Description of Artificial Sequence: Synthetic oligonucleotide
  Sense strand starting at position 856 of SEQ ID NO: 585647
caugcucccgccugagaaa

SEQ ID NO: 656423 - RNA, 19 nt, Artificial Sequence
  Description of Artificial Sequence: Synthetic oligonucleotide
  Antisense strand to SEQ ID NO: 656422
uuucucaggcgggagcaug

SEQ ID NO: 656424 - RNA, 19 nt, Artificial Sequence
  Description of Artificial Sequence: Synthetic oligonucleotide
  Sense strand starting at position 876 of SEQ ID NO: 585647
gggugauaagggcauguga

SEQ ID NO: 656425 - RNA, 19 nt, Artificial Sequence
  Description of Artificial Sequence: Synthetic oligonucleotide
  Antisense strand to SEQ ID NO: 656424
ucacaugcccuuaucaccc

SEQ ID NO: 656426 - RNA, 19 nt, Artificial Sequence
  Description of Artificial Sequence: Synthetic oligonucleotide
  Sense strand starting at position 1685 of SEQ ID NO: 585647
aagguaguccucugcauuu

SEQ ID NO: 656427 - RNA, 19 nt, Artificial Sequence
  Description of Artificial Sequence: Synthetic oligonucleotide
  Antisense strand to SEQ ID NO: 656426
aaaugcagaggacuaccuu

SEQ ID NO: 656428 - RNA, 19 nt, Artificial Sequence
  Description of Artificial Sequence: Synthetic oligonucleotide
  Sense strand starting at position 1802 of SEQ ID NO: 585647
aggucagcgacuuacaacu

SEQ ID NO: 656429 - RNA, 19 nt, Artificial Sequence
  Description of Artificial Sequence: Synthetic oligonucleotide
  Antisense strand to SEQ ID NO: 656428
aguuguaagucgcugaccu

SEQ ID NO: 656430 - RNA, 19 nt, Artificial Sequence
  Description of Artificial Sequence: Synthetic oligonucleotide
  Sense strand starting at position 1996 of SEQ ID NO: 585647
cguaauuucgaccagucuu

SEQ ID NO: 656431 - RNA, 19 nt, Artificial Sequence
  Description of Artificial Sequence: Synthetic oligonucleotide
  Antisense strand to SEQ ID NO: 656430
aagacuggucgaaauuacg

SEQ ID NO: 656432 - RNA, 19 nt, Artificial Sequence
  Description of Artificial Sequence: Synthetic oligonucleotide
  Sense strand starting at position 2031 of SEQ ID NO: 585647
ccagaaucuggcugucuga

SEQ ID NO: 656433 - RNA, 19 nt, Artificial Sequence
  Description of Artificial Sequence: Synthetic oligonucleotide
  Antisense strand to SEQ ID NO: 656432
ucagacagccagauucugg

SEQ ID NO: 656434 - RNA, 19 nt, Artificial Sequence
  Description of Artificial Sequence: Synthetic oligonucleotide
  Sense strand starting at position 2168 of SEQ ID NO: 585647
uaaagacguuucucuagag

SEQ ID NO: 656435 - RNA, 19 nt, Artificial Sequence
  Description of Artificial Sequence: Synthetic oligonucleotide
  Antisense strand to SEQ ID NO: 656434
cucuagagaaacgucuuua

SEQ ID NO: 656436 - RNA, 19 nt, Artificial Sequence
  Description of Artificial Sequence: Synthetic oligonucleotide
  Sense strand starting at position 2169 of SEQ ID NO: 585647
aaagacguuucucuagaga

SEQ ID NO: 656437 - RNA, 19 nt, Artificial Sequence
  Description of Artificial Sequence: Synthetic oligonucleotide
  Antisense strand to SEQ ID NO: 656436
ucucuagagaaacgucuuu

SEQ ID NO: 656438 - RNA, 19 nt, Artificial Sequence
  Description of Artificial Sequence: Synthetic oligonucleotide
  Sense strand starting at position 2172 of SEQ ID NO: 585647
gacguuucucuagagauaa

SEQ ID NO: 656439 - RNA, 19 nt, Artificial Sequence
  Description of Artificial Sequence: Synthetic oligonucleotide
  Antisense strand to SEQ ID NO: 656438
uuaucucuagagaaacguc

SEQ ID NO: 656440 - RNA, 19 nt, Artificial Sequence
  Description of Artificial Sequence: Synthetic oligonucleotide
  Sense strand starting at position 2219 of SEQ ID NO: 585647
cucuguuuacaaggucauu

SEQ ID NO: 656441 - RNA, 19 nt, Artificial Sequence
  Description of Artificial Sequence: Synthetic oligonucleotide
  Antisense strand to SEQ ID NO: 656440
aaugaccuuguaaacagag

SEQ ID NO: 656442 - RNA, 19 nt, Artificial Sequence
  Description of Artificial Sequence: Synthetic oligonucleotide
  Sense strand starting at position 2229 of SEQ ID NO: 585647
aaggucauugcuuggucua

SEQ ID NO: 656443 - RNA, 19 nt, Artificial Sequence
  Description of Artificial Sequence: Synthetic oligonucleotide
  Antisense strand to SEQ ID NO: 656442
uagaccaagcaaugaccuu

SEQ ID NO: 656444 - RNA, 19 nt, Artificial Sequence
  Description of Artificial Sequence: Synthetic oligonucleotide
  Sense strand starting at position 2230 of SEQ ID NO: 585647
aggucauugcuuggucuaa

SEQ ID NO: 656445 - RNA, 19 nt, Artificial Sequence
  Description of Artificial Sequence: Synthetic oligonucleotide
  Antisense strand to SEQ ID NO: 656444
uuagaccaagcaaugaccu

SEQ ID NO: 656446 - RNA, 19 nt, Artificial Sequence
  Description of Artificial Sequence: Synthetic oligonucleotide
  Sense strand starting at position 2231 of SEQ ID NO: 585647
ggucauugcuuggucuaaa

SEQ ID NO: 656447 - RNA, 19 nt, Artificial Sequence
  Description of Artificial Sequence: Synthetic oligonucleotide
  Antisense strand to SEQ ID NO: 656446
uuuagaccaagcaaugacc

SEQ ID NO: 656448 - RNA, 19 nt, Artificial Sequence
  Description of Artificial Sequence: Synthetic oligonucleotide
  Sense strand starting at position 2232 of SEQ ID NO: 585647
gucauugcuuggucuaaau

SEQ ID NO: 656449 - RNA, 19 nt, Artificial Sequence
  Description of Artificial Sequence: Synthetic oligonucleotide
  Antisense strand to SEQ ID NO: 656448
auuuagaccaagcaaugac

SEQ ID NO: 656450 - RNA, 19 nt, Artificial Sequence
  Description of Artificial Sequence: Synthetic oligonucleotide
  Sense strand starting at position 2357 of SEQ ID NO: 585647
gugugaagccgugaucuga

SEQ ID NO: 656451 - RNA, 19 nt, Artificial Sequence
  Description of Artificial Sequence: Synthetic oligonucleotide
  Antisense strand to SEQ ID NO: 656450
ucagaucacggcuucacac

SEQ ID NO: 656452 - RNA, 19 nt, Artificial Sequence
  Description of Artificial Sequence: Synthetic oligonucleotide
  Sense strand starting at position 2513 of SEQ ID NO: 585647
auaauuaucuggcuguguu

SEQ ID NO: 656453 - RNA, 19 nt, Artificial Sequence
  Description of Artificial Sequence: Synthetic oligonucleotide
  Antisense strand to SEQ ID NO: 656452
aacacagccagauaauuau

SEQ ID NO: 656454 - RNA, 19 nt, Artificial Sequence
  Description of Artificial Sequence: Synthetic oligonucleotide
  Sense strand starting at position 2555 of SEQ ID NO: 585647
ugguguaaaucuccauaga

SEQ ID NO: 656455 - RNA, 19 nt, Artificial Sequence
  Description of Artificial Sequence: Synthetic oligonucleotide
  Antisense strand to SEQ ID NO: 656454
ucuauggagauuuacacca

SEQ ID NO: 656456 - RNA, 19 nt, Artificial Sequence
  Description of Artificial Sequence: Synthetic oligonucleotide
  Sense strand starting at position 2556 of SEQ ID NO: 585647
gguguaaaucuccauagac

SEQ ID NO: 656457 - RNA, 19 nt, Artificial Sequence
  Description of Artificial Sequence: Synthetic oligonucleotide
  Antisense strand to SEQ ID NO: 656456
gucuauggagauuuacacc

SEQ ID NO: 656458 - RNA, 19 nt, Artificial Sequence
  Description of Artificial Sequence: Synthetic oligonucleotide
  Sense strand starting at position 2713 of SEQ ID NO: 585647
ggguuuagggaauggaucu

SEQ ID NO: 656459 - RNA, 19 nt, Artificial Sequence
  Description of Artificial Sequence: Synthetic oligonucleotide
  Antisense strand to SEQ ID NO: 656458
agauccauucccuaaaccc

SEQ ID NO: 656460 - RNA, 19 nt, Artificial Sequence
  Description of Artificial Sequence: Synthetic oligonucleotide
  Sense strand starting at position 2720 of SEQ ID NO: 585647
gggaauggaucugaacauu

SEQ ID NO: 656461 - RNA, 19 nt, Artificial Sequence
  Description of Artificial Sequence: Synthetic oligonucleotide
  Antisense strand to SEQ ID NO: 656460
aauguucagauccauuccc

SEQ ID NO: 656462 - RNA, 19 nt, Artificial Sequence
  Description of Artificial Sequence: Synthetic oligonucleotide
  Sense strand starting at position 2815 of SEQ ID NO: 585647
gccagaaaugagcaguuaa

SEQ ID NO: 656463 - RNA, 19 nt, Artificial Sequence
  Description of Artificial Sequence: Synthetic oligonucleotide
  Antisense strand to SEQ ID NO: 656462
uuaacugcucauuucuggc

SEQ ID NO: 656464 - RNA, 19 nt, Artificial Sequence
  Description of Artificial Sequence: Synthetic oligonucleotide
  Sense strand starting at position 2868 of SEQ ID NO: 585647
cuccuuaguccuggacgaa

SEQ ID NO: 656465 - RNA, 19 nt, Artificial Sequence
  Description of Artificial Sequence: Synthetic oligonucleotide
  Antisense strand to SEQ ID NO: 656464
uucguccaggacuaaggag

SEQ ID NO: 656466 - RNA, 19 nt, Artificial Sequence
  Description of Artificial Sequence: Synthetic oligonucleotide
  Sense strand starting at position 2869 of SEQ ID NO: 585647
uccuuaguccuggacgaag

SEQ ID NO: 656467 - RNA, 19 nt, Artificial Sequence
  Description of Artificial Sequence: Synthetic oligonucleotide
  Antisense strand to SEQ ID NO: 656466
cuucguccaggacuaagga

SEQ ID NO: 656468 - RNA, 19 nt, Artificial Sequence
  Description of Artificial Sequence: Synthetic oligonucleotide
  Sense strand starting at position 2871 of SEQ ID NO: 585647
cuuaguccuggacgaagaa

SEQ ID NO: 656469 - RNA, 19 nt, Artificial Sequence
  Description of Artificial Sequence: Synthetic oligonucleotide
  Antisense strand to SEQ ID NO: 656468
uucuucguccaggacuaag

SEQ ID NO: 656470 - RNA, 19 nt, Artificial Sequence
  Description of Artificial Sequence: Synthetic oligonucleotide
  Sense strand starting at position 3029 of SEQ ID NO: 585647
aguucugaacucugcacaa

SEQ ID NO: 656471 - RNA, 19 nt, Artificial Sequence
  Description of Artificial Sequence: Synthetic oligonucleotide
  Antisense strand to SEQ ID NO: 656470
uugugcagaguucagaacu

SEQ ID NO: 656472 - RNA, 19 nt, Artificial Sequence
  Description of Artificial Sequence: Synthetic oligonucleotide
  Sense strand starting at position 3097 of SEQ ID NO: 585647
ggccaaggauuugggagaa

SEQ ID NO: 656473 - RNA, 19 nt, Artificial Sequence
  Description of Artificial Sequence: Synthetic oligonucleotide
  Antisense strand to SEQ ID NO: 656472
uucucccaaauccuuggcc

SEQ ID NO: 656474 - RNA, 19 nt, Artificial Sequence
  Description of Artificial Sequence: Synthetic oligonucleotide
  Sense strand starting at position 3164 of SEQ ID NO: 585647
ggaggcaccuggguuauua

SEQ ID NO: 656475 - RNA, 19 nt, Artificial Sequence
  Description of Artificial Sequence: Synthetic oligonucleotide
  Antisense strand to SEQ ID NO: 656474
uaauaacccaggugccucc

SEQ ID NO: 656476 - RNA, 19 nt, Artificial Sequence
  Description of Artificial Sequence: Synthetic oligonucleotide
  Sense strand starting at position 3305 of SEQ ID NO: 585647
ccguguuuccaugacaacu

SEQ ID NO: 656477 - RNA, 19 nt, Artificial Sequence
  Description of Artificial Sequence: Synthetic oligonucleotide
  Antisense strand to SEQ ID NO: 656476
aguugucauggaaacacgg

SEQ ID NO: 656478 - RNA, 19 nt, Artificial Sequence
  Description of Artificial Sequence: Synthetic oligonucleotide
  Sense strand starting at position 3620 of SEQ ID NO: 585647
gcaggcaugucauccgaaa

SEQ ID NO: 656479 - RNA, 19 nt, Artificial Sequence
  Description of Artificial Sequence: Synthetic oligonucleotide
  Antisense strand to SEQ ID NO: 656478
uuucggaugacaugccugc

SEQ ID NO: 656480 - RNA, 19 nt, Artificial Sequence
  Description of Artificial Sequence: Synthetic oligonucleotide
  Sense strand starting at position 3961 of SEQ ID NO: 585647
gagacauccugugaggaaa

SEQ ID NO: 656481 - RNA, 19 nt, Artificial Sequence
  Description of Artificial Sequence: Synthetic oligonucleotide
  Antisense strand to SEQ ID NO: 656480
uuuccucacaggaugucuc

SEQ ID NO: 656482 - RNA, 19 nt, Artificial Sequence
  Description of Artificial Sequence: Synthetic oligonucleotide
  Sense strand starting at position 193 of SEQ ID NO: 585648
cuaauacaguagucugaag

SEQ ID NO: 656483 - RNA, 19 nt, Artificial Sequence
  Description of Artificial Sequence: Synthetic oligonucleotide
  Antisense strand to SEQ ID NO: 656482
cuucagacuacuguauuag

SEQ ID NO: 656484 - RNA, 19 nt, Artificial Sequence
  Description of Artificial Sequence: Synthetic oligonucleotide
  Sense strand starting at position 257 of SEQ ID NO: 585648
caagaagccguauaaagua

SEQ ID NO: 656485 - RNA, 19 nt, Artificial Sequence
  Description of Artificial Sequence: Synthetic oligonucleotide
  Antisense strand to SEQ ID NO: 656484
uacuuuauacggcuucuug

SEQ ID NO: 656486 - RNA, 19 nt, Artificial Sequence
  Description of Artificial Sequence: Synthetic oligonucleotide
  Sense strand starting at position 393 of SEQ ID NO: 585648
cugaacaaucccuggcuuu

SEQ ID NO: 656487 - RNA, 19 nt, Artificial Sequence
  Description of Artificial Sequence: Synthetic oligonucleotide
  Antisense strand to SEQ ID NO: 656486
aaagccagggauuguucag

SEQ ID NO: 656488 - RNA, 19 nt, Artificial Sequence
  Description of Artificial Sequence: Synthetic oligonucleotide
  Sense strand starting at position 394 of SEQ ID NO: 585648
ugaacaaucccuggcuuua

SEQ ID NO: 656489 - RNA, 19 nt, Artificial Sequence
  Description of Artificial Sequence: Synthetic oligonucleotide
  Antisense strand to SEQ ID NO: 656488
uaaagccagggauuguuca

SEQ ID NO: 656490 - RNA, 19 nt, Artificial Sequence
  Description of Artificial Sequence: Synthetic oligonucleotide
  Sense strand starting at position 741 of SEQ ID NO: 585648
gguugcauccugccagcau

SEQ ID NO: 656491 - RNA, 19 nt, Artificial Sequence
  Description of Artificial Sequence: Synthetic oligonucleotide
  Antisense strand to SEQ ID NO: 656490
augcuggcaggaugcaacc

SEQ ID NO: 656492 - RNA, 19 nt, Artificial Sequence
  Description of Artificial Sequence: Synthetic oligonucleotide
  Sense strand starting at position 779 of SEQ ID NO: 585648
agaaaucacuuggaccaca

SEQ ID NO: 656493 - RNA, 19 nt, Artificial Sequence
  Description of Artificial Sequence: Synthetic oligonucleotide
  Antisense strand to SEQ ID NO: 656492
ugugguccaagugauuucu

SEQ ID NO: 656494 - RNA, 19 nt, Artificial Sequence
  Description of Artificial Sequence: Synthetic oligonucleotide
  Sense strand starting at position 963 of SEQ ID NO: 585648
ccauuuaaaucugaaagug

SEQ ID NO: 656495 - RNA, 19 nt, Artificial Sequence
  Description of Artificial Sequence: Synthetic oligonucleotide
  Antisense strand to SEQ ID NO: 656494
cacuuucagauuuaaaugg

SEQ ID NO: 656496 - RNA, 19 nt, Artificial Sequence
  Description of Artificial Sequence: Synthetic oligonucleotide
  Sense strand starting at position 972 of SEQ ID NO: 585648
ucugaaaguguaugaauuc

SEQ ID NO: 656497 - RNA, 19 nt, Artificial Sequence
  Description of Artificial Sequence: Synthetic oligonucleotide
  Antisense strand to SEQ ID NO: 656496
gaauucauacacuuucaga

SEQ ID NO: 656498 - RNA, 19 nt, Artificial Sequence
  Description of Artificial Sequence: Synthetic oligonucleotide
  Sense strand starting at position 979 of SEQ ID NO: 585648
guguaugaauucccagaag

SEQ ID NO: 656499 - RNA, 19 nt, Artificial Sequence
  Description of Artificial Sequence: Synthetic oligonucleotide
  Antisense strand to SEQ ID NO: 656498
cuucugggaauucauacac

SEQ ID NO: 656500 - RNA, 19 nt, Artificial Sequence
  Description of Artificial Sequence: Synthetic oligonucleotide
  Sense strand starting at position 990 of SEQ ID NO: 585648
cccagaagucacugaugua

SEQ ID NO: 656501 - RNA, 19 nt, Artificial Sequence
  Description of Artificial Sequence: Synthetic oligonucleotide
  Antisense strand to SEQ ID NO: 656500
uacaucagugacuucuggg

SEQ ID NO: 656502 - RNA, 19 nt, Artificial Sequence
  Description of Artificial Sequence: Synthetic oligonucleotide
  Sense strand starting at position 1000 of SEQ ID NO: 585648
acugauguacuacaguuua

SEQ ID NO: 656503 - RNA, 19 nt, Artificial Sequence
  Description of Artificial Sequence: Synthetic oligonucleotide
  Antisense strand to SEQ ID NO: 656502
uaaacuguaguacaucagu

SEQ ID NO: 656504 - RNA, 19 nt, Artificial Sequence
  Description of Artificial Sequence: Synthetic oligonucleotide
  Sense strand starting at position 1013 of SEQ ID NO: 585648
aguuuacuguaacuaaagu

SEQ ID NO: 656505 - RNA, 19 nt, Artificial Sequence
  Description of Artificial Sequence: Synthetic oligonucleotide
  Antisense strand to SEQ ID NO: 656504
acuuuaguuacaguaaacu

SEQ ID NO: 656506 - RNA, 19 nt, Artificial Sequence
  Description of Artificial Sequence: Synthetic oligonucleotide
  Sense strand starting at position 1211 of SEQ ID NO: 585648
ggguaucauuuccauguaa

SEQ ID NO: 656507 - RNA, 19 nt, Artificial Sequence
  Description of Artificial Sequence: Synthetic oligonucleotide
  Antisense strand to SEQ ID NO: 656506
uuacauggaaaugauaccc

SEQ ID NO: 656508 - RNA, 19 nt, Artificial Sequence
  Description of Artificial Sequence: Synthetic oligonucleotide
  Sense strand starting at position 1255 of SEQ ID NO: 585648
cauaacauucuguggaagu

SEQ ID NO: 656509 - RNA, 19 nt, Artificial Sequence
  Description of Artificial Sequence: Synthetic oligonucleotide
  Antisense strand to SEQ ID NO: 656508
acuuccacagaauguuaug

SEQ ID NO: 656510 - RNA, 19 nt, Artificial Sequence
  Description of Artificial Sequence: Synthetic oligonucleotide
  Sense strand starting at position 1521 of SEQ ID NO: 585648
uggcaauuaugucuagaac

SEQ ID NO: 656511 - RNA, 19 nt, Artificial Sequence
  Description of Artificial Sequence: Synthetic oligonucleotide
  Antisense strand to SEQ ID NO: 656510
guucuagacauaauugcca

SEQ ID NO: 656512 - RNA, 19 nt, Artificial Sequence
  Description of Artificial Sequence: Synthetic oligonucleotide
  Sense strand starting at position 1522 of SEQ ID NO: 585648
ggcaauuaugucuagaacu

SEQ ID NO: 656513 - RNA, 19 nt, Artificial Sequence
  Description of Artificial Sequence: Synthetic oligonucleotide
  Antisense strand to SEQ ID NO: 656512
aguucuagacauaauugcc

SEQ ID NO: 656514 - RNA, 19 nt, Artificial Sequence
  Description of Artificial Sequence: Synthetic oligonucleotide
  Sense strand starting at position 2127 of SEQ ID NO: 585648
cucucuucgcauguguauu

SEQ ID NO: 656515 - RNA, 19 nt, Artificial Sequence
  Description of Artificial Sequence: Synthetic oligonucleotide
  Antisense strand to SEQ ID NO: 656514
aauacacaugcgaagagag

SEQ ID NO: 656516 - RNA, 19 nt, Artificial Sequence
  Description of Artificial Sequence: Synthetic oligonucleotide
  Sense strand starting at position 2201 of SEQ ID NO: 585648
uuacuugggcucuauugua

SEQ ID NO: 656517 - RNA, 19 nt, Artificial Sequence
  Description of Artificial Sequence: Synthetic oligonucleotide
  Antisense strand to SEQ ID NO: 656516
uacaauagagcccaaguaa

SEQ ID NO: 656518 - RNA, 19 nt, Artificial Sequence
  Description of Artificial Sequence: Synthetic oligonucleotide
  Sense strand starting at position 2410 of SEQ ID NO: 585648
ggagcugucugguccucaa

SEQ ID NO: 656519 - RNA, 19 nt, Artificial Sequence
  Description of Artificial Sequence: Synthetic oligonucleotide
  Antisense strand to SEQ ID NO: 656518
uugaggaccagacagcucc

SEQ ID NO: 656520 - RNA, 19 nt, Artificial Sequence
  Description of Artificial Sequence: Synthetic oligonucleotide
  Sense strand starting at position 2421 of SEQ ID NO: 585648
guccucaagcuguugugua

SEQ ID NO: 656521 - RNA, 19 nt, Artificial Sequence
  Description of Artificial Sequence: Synthetic oligonucleotide
  Antisense strand to SEQ ID NO: 656520
uacacaacagcuugaggac

SEQ ID NO: 656522 - RNA, 19 nt, Artificial Sequence
  Description of Artificial Sequence: Synthetic oligonucleotide
  Sense strand starting at position 2621 of SEQ ID NO: 585648
cugacuucccaggagugua

SEQ ID NO: 656523 - RNA, 19 nt, Artificial Sequence
  Description of Artificial Sequence: Synthetic oligonucleotide
  Antisense strand to SEQ ID NO: 656522
uacacuccugggaagucag

SEQ ID NO: 656524 - RNA, 19 nt, Artificial Sequence
  Description of Artificial Sequence: Synthetic oligonucleotide
  Sense strand starting at position 2626 of SEQ ID NO: 585648
uucccaggaguguaaguaa

SEQ ID NO: 656525 - RNA, 19 nt, Artificial Sequence
  Description of Artificial Sequence: Synthetic oligonucleotide
  Antisense strand to SEQ ID NO: 656524
uuacuuacacuccugggaa

SEQ ID NO: 656526 - RNA, 19 nt, Artificial Sequence
  Description of Artificial Sequence: Synthetic oligonucleotide
  Sense strand starting at position 2653 of SEQ ID NO: 585648
gcauuagucguuucacagu

SEQ ID NO: 656527 - RNA, 19 nt, Artificial Sequence
  Description of Artificial Sequence: Synthetic oligonucleotide
  Antisense strand to SEQ ID NO: 656526
acugugaaacgacuaaugc

SEQ ID NO: 656528 - RNA, 19 nt, Artificial Sequence
  Description of Artificial Sequence: Synthetic oligonucleotide
  Sense strand starting at position 2684 of SEQ ID NO: 585648
ugaacugaucacugcaagu

SEQ ID NO: 656529 - RNA, 19 nt, Artificial Sequence
  Description of Artificial Sequence: Synthetic oligonucleotide
  Antisense strand to SEQ ID NO: 656528
acuugcagugaucaguuca

SEQ ID NO: 656530 - RNA, 19 nt, Artificial Sequence
  Description of Artificial Sequence: Synthetic oligonucleotide
  Sense strand starting at position 2708 of SEQ ID NO: 585648
gcggucggaggcaguaauu

SEQ ID NO: 656531 - RNA, 19 nt, Artificial Sequence
  Description of Artificial Sequence: Synthetic oligonucleotide
  Antisense strand to SEQ ID NO: 656530
aauuacugccuccgaccgc

SEQ ID NO: 656532 - RNA, 19 nt, Artificial Sequence
  Description of Artificial Sequence: Synthetic oligonucleotide
  Sense strand starting at position 2769 of SEQ ID NO: 585648
cagucaguccucuguugaa

SEQ ID NO: 656533 - RNA, 19 nt, Artificial Sequence
  Description of Artificial Sequence: Synthetic oligonucleotide
  Antisense strand to SEQ ID NO: 656532
uucaacagaggacugacug

SEQ ID NO: 656534 - RNA, 19 nt, Artificial Sequence
  Description of Artificial Sequence: Synthetic oligonucleotide
  Sense strand starting at position 2773 of SEQ ID NO: 585648
caguccucuguugaaggaa

SEQ ID NO: 656535 - RNA, 19 nt, Artificial Sequence
  Description of Artificial Sequence: Synthetic oligonucleotide
  Antisense strand to SEQ ID NO: 656534
uuccuucaacagaggacug

SEQ ID NO: 656536 - RNA, 19 nt, Artificial Sequence
  Description of Artificial Sequence: Synthetic oligonucleotide
  Sense strand starting at position 2790 of SEQ ID NO: 585648
aaggacauccugugaugau

SEQ ID NO: 656537 - RNA, 19 nt, Artificial Sequence
  Description of Artificial Sequence: Synthetic oligonucleotide
  Antisense strand to SEQ ID NO: 656536
aucaucacaggauguccuu

SEQ ID NO: 656538 - RNA, 19 nt, Artificial Sequence
  Description of Artificial Sequence: Synthetic oligonucleotide
  Sense strand starting at position 3352 of SEQ ID NO: 585648
aggaaauggugucuaaagu

SEQ ID NO: 656539 - RNA, 19 nt, Artificial Sequence
  Description of Artificial Sequence: Synthetic oligonucleotide
  Antisense strand to SEQ ID NO: 656538
acuuuagacaccauuuccu

SEQ ID NO: 656540 - RNA, 19 nt, Artificial Sequence
  Description of Artificial Sequence: Synthetic oligonucleotide
  Sense strand starting at position 3418 of SEQ ID NO: 585648
gggacaugauuagcacaca

SEQ ID NO: 656541 - RNA, 19 nt, Artificial Sequence
  Description of Artificial Sequence: Synthetic oligonucleotide
  Antisense strand to SEQ ID NO: 656540
ugugugcuaaucauguccc

SEQ ID NO: 656542 - RNA, 19 nt, Artificial Sequence
  Description of Artificial Sequence: Synthetic oligonucleotide
  Sense strand starting at position 3559 of SEQ ID NO: 585648
uccuaagaguccucagaaa

SEQ ID NO: 656543 - RNA, 19 nt, Artificial Sequence
  Description of Artificial Sequence: Synthetic oligonucleotide
  Antisense strand to SEQ ID NO: 656542
uuucugaggacucuuagga

SEQ ID NO: 656544 - RNA, 19 nt, Artificial Sequence
  Description of Artificial Sequence: Synthetic oligonucleotide
  Sense strand starting at position 3602 of SEQ ID NO: 585648
agaaauccagccugcucaa

SEQ ID NO: 656545 - RNA, 19 nt, Artificial Sequence
  Description of Artificial Sequence: Synthetic oligonucleotide
  Antisense strand to SEQ ID NO: 656544
uugagcaggcuggauuucu

SEQ ID NO: 656546 - RNA, 19 nt, Artificial Sequence
  Description of Artificial Sequence: Synthetic oligonucleotide
  Sense strand starting at position 3708 of SEQ ID NO: 585648
gucucacuugcagauguua

SEQ ID NO: 656547 - RNA, 19 nt, Artificial Sequence
  Description of Artificial Sequence: Synthetic oligonucleotide
  Antisense strand to SEQ ID NO: 656546
uaacaucugcaagugagac

SEQ ID NO: 656548 - RNA, 19 nt, Artificial Sequence
  Description of Artificial Sequence: Synthetic oligonucleotide
  Sense strand starting at position 3717 of SEQ ID NO: 585648
gcagauguuaaagaguauu

SEQ ID NO: 656549 - RNA, 19 nt, Artificial Sequence
  Description of Artificial Sequence: Synthetic oligonucleotide
  Antisense strand to SEQ ID NO: 656548
aauacucuuuaacaucugc

SEQ ID NO: 656550 - RNA, 19 nt, Artificial Sequence
  Description of Artificial Sequence: Synthetic oligonucleotide
  Sense strand starting at position 3797 of SEQ ID NO: 585648
gugagucaaccaugauaga

SEQ ID NO: 656551 - RNA, 19 nt, Artificial Sequence
  Description of Artificial Sequence: Synthetic oligonucleotide
  Antisense strand to SEQ ID NO: 656550
ucuaucaugguugacucac

SEQ ID NO: 656552 - RNA, 19 nt, Artificial Sequence
  Description of Artificial Sequence: Synthetic oligonucleotide
  Sense strand starting at position 3836 of SEQ ID NO: 585648
uuugauauuugagguggga

SEQ ID NO: 656553 - RNA, 19 nt, Artificial Sequence
  Description of Artificial Sequence: Synthetic oligonucleotide
  Antisense strand to SEQ ID NO: 656552
ucccaccucaaauaucaaa

SEQ ID NO: 656554 - RNA, 19 nt, Artificial Sequence
  Description of Artificial Sequence: Synthetic oligonucleotide
  Sense strand starting at position 3893 of SEQ ID NO: 585648
ggaagaugccagugaauca

SEQ ID NO: 656555 - RNA, 19 nt, Artificial Sequence
  Description of Artificial Sequence: Synthetic oligonucleotide
  Antisense strand to SEQ ID NO: 656554
ugauucacuggcaucuucc

SEQ ID NO: 656556 - RNA, 19 nt, Artificial Sequence
  Description of Artificial Sequence: Synthetic oligonucleotide
  Sense strand starting at position 3943 of SEQ ID NO: 585648
accuucagagguggugaaa

SEQ ID NO: 656557 - RNA, 19 nt, Artificial Sequence
  Description of Artificial Sequence: Synthetic oligonucleotide
  Antisense strand to SEQ ID NO: 656556
uuucaccaccucugaaggu

SEQ ID NO: 656558 - RNA, 19 nt, Artificial Sequence
  Description of Artificial Sequence: Synthetic oligonucleotide
  Sense strand starting at position 3956 of SEQ ID NO: 585648
gugaaaugggcuugagucu

SEQ ID NO: 656559 - RNA, 19 nt, Artificial Sequence
  Description of Artificial Sequence: Synthetic oligonucleotide
  Antisense strand to SEQ ID NO: 656558
agacucaagcccauuucac

SEQ ID NO: 656560 - RNA, 19 nt, Artificial Sequence
  Description of Artificial Sequence: Synthetic oligonucleotide
  Sense strand starting at position 3957 of SEQ ID NO: 585648
ugaaaugggcuugagucua

SEQ ID NO: 656561 - RNA, 19 nt, Artificial Sequence
  Description of Artificial Sequence: Synthetic oligonucleotide
  Antisense strand to SEQ ID NO: 656560
uagacucaagcccauuuca

SEQ ID NO: 656562 - RNA, 19 nt, Artificial Sequence
  Description of Artificial Sequence: Synthetic oligonucleotide
  Sense strand starting at position 166 of SEQ ID NO: 585649
ugaaguguggaaugaauac

SEQ ID NO: 656563 - RNA, 19 nt, Artificial Sequence
  Description of Artificial Sequence: Synthetic oligonucleotide
  Antisense strand to SEQ ID NO: 656562
guauucauuccacacuuca

SEQ ID NO: 656564 - RNA, 19 nt, Artificial Sequence
  Description of Artificial Sequence: Synthetic oligonucleotide
  Sense strand starting at position 341 of SEQ ID NO: 585649
ugguaaagcaaauggauau

SEQ ID NO: 656565 - RNA, 19 nt, Artificial Sequence
  Description of Artificial Sequence: Synthetic oligonucleotide
  Antisense strand to SEQ ID NO: 656564
auauccauuugcuuuacca

SEQ ID NO: 656566 - RNA, 19 nt, Artificial Sequence
  Description of Artificial Sequence: Synthetic oligonucleotide
  Sense strand starting at position 342 of SEQ ID NO: 585649
gguaaagcaaauggauaua

SEQ ID NO: 656567 - RNA, 19 nt, Artificial Sequence
  Description of Artificial Sequence: Synthetic oligonucleotide
  Antisense strand to SEQ ID NO: 656566
uauauccauuugcuuuacc

SEQ ID NO: 656568 - RNA, 19 nt, Artificial Sequence
  Description of Artificial Sequence: Synthetic oligonucleotide
  Sense strand starting at position 371 of SEQ ID NO: 585649
acugguaaaccuggguaaa

SEQ ID NO: 656569 - RNA, 19 nt, Artificial Sequence
  Description of Artificial Sequence: Synthetic oligonucleotide
  Antisense strand to SEQ ID NO: 656568
uuuacccagguuuaccagu

SEQ ID NO: 656570 - RNA, 19 nt, Artificial Sequence
  Description of Artificial Sequence: Synthetic oligonucleotide
  Sense strand starting at position 372 of SEQ ID NO: 585649
cugguaaaccuggguaaag

SEQ ID NO: 656571 - RNA, 19 nt, Artificial Sequence
  Description of Artificial Sequence: Synthetic oligonucleotide
  Antisense strand to SEQ ID NO: 656570
cuuuacccagguuuaccag

SEQ ID NO: 656572 - RNA, 19 nt, Artificial Sequence
  Description of Artificial Sequence: Synthetic oligonucleotide
  Sense strand starting at position 560 of SEQ ID NO: 585649
auaguuacagcagagguua

SEQ ID NO: 656573 - RNA, 19 nt, Artificial Sequence
  Description of Artificial Sequence: Synthetic oligonucleotide
  Antisense strand to SEQ ID NO: 656572
uaaccucugcuguaacuau

SEQ ID NO: 656574 - RNA, 19 nt, Artificial Sequence
  Description of Artificial Sequence: Synthetic oligonucleotide
  Sense strand starting at position 735 of SEQ ID NO: 585649
gugauagguggcuacuaua

SEQ ID NO: 656575 - RNA, 19 nt, Artificial Sequence
  Description of Artificial Sequence: Synthetic oligonucleotide
  Antisense strand to SEQ ID NO: 656574
uauaguagccaccuaucac

SEQ ID NO: 656576 - RNA, 19 nt, Artificial Sequence
  Description of Artificial Sequence: Synthetic oligonucleotide
  Sense strand starting at position 999 of SEQ ID NO: 585649
cuggaccaaucccuguaau

SEQ ID NO: 656577 - RNA, 19 nt, Artificial Sequence
  Description of Artificial Sequence: Synthetic oligonucleotide
  Antisense strand to SEQ ID NO: 656576
auuacagggauugguccag

SEQ ID NO: 656578 - RNA, 19 nt, Artificial Sequence
  Description of Artificial Sequence: Synthetic oligonucleotide
  Sense strand starting at position 1000 of SEQ ID NO: 585649
uggaccaaucccuguaauu

SEQ ID NO: 656579 - RNA, 19 nt, Artificial Sequence
  Description of Artificial Sequence: Synthetic oligonucleotide
  Antisense strand to SEQ ID NO: 656578
aauuacagggauuggucca

SEQ ID NO: 656580 - RNA, 19 nt, Artificial Sequence
  Description of Artificial Sequence: Synthetic oligonucleotide
  Sense strand starting at position 1124 of SEQ ID NO: 585649
ugaucaaguuuccuaauag

SEQ ID NO: 656581 - RNA, 19 nt, Artificial Sequence
  Description of Artificial Sequence: Synthetic oligonucleotide
  Antisense strand to SEQ ID NO: 656580
cuauuaggaaacuugauca

SEQ ID NO: 656582 - RNA, 19 nt, Artificial Sequence
  Description of Artificial Sequence: Synthetic oligonucleotide
  Sense strand starting at position 1213 of SEQ ID NO: 585649
augacaaagccguauaauu

SEQ ID NO: 656583 - RNA, 19 nt, Artificial Sequence
  Description of Artificial Sequence: Synthetic oligonucleotide
  Antisense strand to SEQ ID NO: 656582
aauuauacggcuuugucau

SEQ ID NO: 656584 - RNA, 19 nt, Artificial Sequence
  Description of Artificial Sequence: Synthetic oligonucleotide
  Sense strand starting at position 1298 of SEQ ID NO: 585649
guaauccacuuacugagau

SEQ ID NO: 656585 - RNA, 19 nt, Artificial Sequence
  Description of Artificial Sequence: Synthetic oligonucleotide
  Antisense strand to SEQ ID NO: 656584
aucucaguaaguggauuac

SEQ ID NO: 656586 - RNA, 19 nt, Artificial Sequence
  Description of Artificial Sequence: Synthetic oligonucleotide
  Sense strand starting at position 1554 of SEQ ID NO: 585649
uggaauagaucuguccaaa

SEQ ID NO: 656587 - RNA, 19 nt, Artificial Sequence
  Description of Artificial Sequence: Synthetic oligonucleotide
  Antisense strand to SEQ ID NO: 656586
uuuggacagaucuauucca

SEQ ID NO: 656588 - RNA, 19 nt, Artificial Sequence
  Description of Artificial Sequence: Synthetic oligonucleotide
  Sense strand starting at position 1644 of SEQ ID NO: 585649
uaccgugugugauuucuga

SEQ ID NO: 656589 - RNA, 19 nt, Artificial Sequence
  Description of Artificial Sequence: Synthetic oligonucleotide
  Antisense strand to SEQ ID NO: 656588
ucagaaaucacacacggua

SEQ ID NO: 656590 - RNA, 19 nt, Artificial Sequence
  Description of Artificial Sequence: Synthetic oligonucleotide
  Sense strand starting at position 1691 of SEQ ID NO: 585649
ccaaucaguuuagccagaa

SEQ ID NO: 656591 - RNA, 19 nt, Artificial Sequence
  Description of Artificial Sequence: Synthetic oligonucleotide
  Antisense strand to SEQ ID NO: 656590
uucuggcuaaacugauugg

SEQ ID NO: 656592 - RNA, 19 nt, Artificial Sequence
  Description of Artificial Sequence: Synthetic oligonucleotide
  Sense strand starting at position 1695 of SEQ ID NO: 585649
ucaguuuagccagaauagu

SEQ ID NO: 656593 - RNA, 19 nt, Artificial Sequence
  Description of Artificial Sequence: Synthetic oligonucleotide
  Antisense strand to SEQ ID NO: 656592
acuauucuggcuaaacuga

SEQ ID NO: 656594 - RNA, 19 nt, Artificial Sequence
  Description of Artificial Sequence: Synthetic oligonucleotide
  Sense strand starting at position 1701 of SEQ ID NO: 585649
uagccagaauagucuugaa

SEQ ID NO: 656595 - RNA, 19 nt, Artificial Sequence
  Description of Artificial Sequence: Synthetic oligonucleotide
  Antisense strand to SEQ ID NO: 656594
uucaagacuauucuggcua

SEQ ID NO: 656596 - RNA, 19 nt, Artificial Sequence
  Description of Artificial Sequence: Synthetic oligonucleotide
  Sense strand starting at position 1722 of SEQ ID NO: 585649
agcagaaaucagggcggaa

SEQ ID NO: 656597 - RNA, 19 nt, Artificial Sequence
  Description of Artificial Sequence: Synthetic oligonucleotide
  Antisense strand to SEQ ID NO: 656596
uuccgcccugauuucugcu

SEQ ID NO: 656598 - RNA, 19 nt, Artificial Sequence
  Description of Artificial Sequence: Synthetic oligonucleotide
  Sense strand starting at position 2224 of SEQ ID NO: 585649
gacagucuauuacugagaa

SEQ ID NO: 656599 - RNA, 19 nt, Artificial Sequence
  Description of Artificial Sequence: Synthetic oligonucleotide
  Antisense strand to SEQ ID NO: 656598
uucucaguaauagacuguc

SEQ ID NO: 656600 - RNA, 19 nt, Artificial Sequence
  Description of Artificial Sequence: Synthetic oligonucleotide
  Sense strand starting at position 2257 of SEQ ID NO: 585649
ugauaaacauguccagacu

SEQ ID NO: 656601 - RNA, 19 nt, Artificial Sequence
  Description of Artificial Sequence: Synthetic oligonucleotide
  Antisense strand to SEQ ID NO: 656600
agucuggacauguuuauca

SEQ ID NO: 656602 - RNA, 19 nt, Artificial Sequence
  Description of Artificial Sequence: Synthetic oligonucleotide
  Sense strand starting at position 2432 of SEQ ID NO: 585649
aaguuuguccuagaguaau

SEQ ID NO: 656603 - RNA, 19 nt, Artificial Sequence
  Description of Artificial Sequence: Synthetic oligonucleotide
  Antisense strand to SEQ ID NO: 656602
auuacucuaggacaaacuu

SEQ ID NO: 656604 - RNA, 19 nt, Artificial Sequence
  Description of Artificial Sequence: Synthetic oligonucleotide
  Sense strand starting at position 2435 of SEQ ID NO: 585649
uuuguccuagaguaauacu

SEQ ID NO: 656605 - RNA, 19 nt, Artificial Sequence
  Description of Artificial Sequence: Synthetic oligonucleotide
  Antisense strand to SEQ ID NO: 656604
aguauuacucuaggacaaa

SEQ ID NO: 656606 - RNA, 19 nt, Artificial Sequence
  Description of Artificial Sequence: Synthetic oligonucleotide
  Sense strand starting at position 2444 of SEQ ID NO: 585649
gaguaauacuacuucugga

SEQ ID NO: 656607 - RNA, 19 nt, Artificial Sequence
  Description of Artificial Sequence: Synthetic oligonucleotide
  Antisense strand to SEQ ID NO: 656606
uccagaaguaguauuacuc

SEQ ID NO: 656608 - RNA, 19 nt, Artificial Sequence
  Description of Artificial Sequence: Synthetic oligonucleotide
  Sense strand starting at position 2782 of SEQ ID NO: 585649
uucuguauuucgcucaaac

SEQ ID NO: 656609 - RNA, 19 nt, Artificial Sequence
  Description of Artificial Sequence: Synthetic oligonucleotide
  Antisense strand to SEQ ID NO: 656608
guuugagcgaaauacagaa

SEQ ID NO: 656610 - RNA, 19 nt, Artificial Sequence
  Description of Artificial Sequence: Synthetic oligonucleotide
  Sense strand starting at position 2784 of SEQ ID NO: 585649
cuguauuucgcucaaacgu

SEQ ID NO: 656611 - RNA, 19 nt, Artificial Sequence
  Description of Artificial Sequence: Synthetic oligonucleotide
  Antisense strand to SEQ ID NO: 656610
acguuugagcgaaauacag

SEQ ID NO: 656612 - RNA, 19 nt, Artificial Sequence
  Description of Artificial Sequence: Synthetic oligonucleotide
  Sense strand starting at position 2818 of SEQ ID NO: 585649
ggaacucugucccuuuaac

SEQ ID NO: 656613 - RNA, 19 nt, Artificial Sequence
  Description of Artificial Sequence: Synthetic oligonucleotide
  Antisense strand to SEQ ID NO: 656612
guuaaagggacagaguucc

SEQ ID NO: 656614 - RNA, 19 nt, Artificial Sequence
  Description of Artificial Sequence: Synthetic oligonucleotide
  Sense strand starting at position 2872 of SEQ ID NO: 585649
aguaacuuccuguaaauug

SEQ ID NO: 656615 - RNA, 19 nt, Artificial Sequence
  Description of Artificial Sequence: Synthetic oligonucleotide
  Antisense strand to SEQ ID NO: 656614
caauuuacaggaaguuacu

SEQ ID NO: 656616 - RNA, 19 nt, Artificial Sequence
  Description of Artificial Sequence: Synthetic oligonucleotide
  Sense strand starting at position 2966 of SEQ ID NO: 585649
ggaacaaggcugggugaau

SEQ ID NO: 656617 - RNA, 19 nt, Artificial Sequence
  Description of Artificial Sequence: Synthetic oligonucleotide
  Antisense strand to SEQ ID NO: 656616
auucacccagccuuguucc

SEQ ID NO: 656618 - RNA, 19 nt, Artificial Sequence
  Description of Artificial Sequence: Synthetic oligonucleotide
  Sense strand starting at position 3026 of SEQ ID NO: 585649
ugcaaacuuccaggaacau

SEQ ID NO: 656619 - RNA, 19 nt, Artificial Sequence
  Description of Artificial Sequence: Synthetic oligonucleotide
  Antisense strand to SEQ ID NO: 656618
auguuccuggaaguuugca

SEQ ID NO: 656620 - RNA, 19 nt, Artificial Sequence
  Description of Artificial Sequence: Synthetic oligonucleotide
  Sense strand starting at position 3048 of SEQ ID NO: 585649
guuccaucgcucuuguacu

SEQ ID NO: 656621 - RNA, 19 nt, Artificial Sequence
  Description of Artificial Sequence: Synthetic oligonucleotide
  Antisense strand to SEQ ID NO: 656620
aguacaagagcgauggaac

SEQ ID NO: 656622 - RNA, 19 nt, Artificial Sequence
  Description of Artificial Sequence: Synthetic oligonucleotide
  Sense strand starting at position 3300 of SEQ ID NO: 585649
aagaaaugucacugguuuc

SEQ ID NO: 656623 - RNA, 19 nt, Artificial Sequence
  Description of Artificial Sequence: Synthetic oligonucleotide
  Antisense strand to SEQ ID NO: 656622
gaaaccagugacauuucuu

SEQ ID NO: 656624 - RNA, 19 nt, Artificial Sequence
  Description of Artificial Sequence: Synthetic oligonucleotide
  Sense strand starting at position 3339 of SEQ ID NO: 585649
uuggcaguguaauuugcau

SEQ ID NO: 656625 - RNA, 19 nt, Artificial Sequence
  Description of Artificial Sequence: Synthetic oligonucleotide
  Antisense strand to SEQ ID NO: 656624
augcaaauuacacugccaa

SEQ ID NO: 656626 - RNA, 19 nt, Artificial Sequence
  Description of Artificial Sequence: Synthetic oligonucleotide
  Sense strand starting at position 3341 of SEQ ID NO: 585649
ggcaguguaauuugcauga

SEQ ID NO: 656627 - RNA, 19 nt, Artificial Sequence
  Description of Artificial Sequence: Synthetic oligonucleotide
  Antisense strand to SEQ ID NO: 656626
ucaugcaaauuacacugcc

SEQ ID NO: 656628 - RNA, 19 nt, Artificial Sequence
  Description of Artificial Sequence: Synthetic oligonucleotide
  Sense strand starting at position 3408 of SEQ ID NO: 585649
cgagauguucuacaauauc

SEQ ID NO: 656629 - RNA, 19 nt, Artificial Sequence
  Description of Artificial Sequence: Synthetic oligonucleotide
  Antisense strand to SEQ ID NO: 656628
gauauuguagaacaucucg

SEQ ID NO: 656630 - RNA, 19 nt, Artificial Sequence
  Description of Artificial Sequence: Synthetic oligonucleotide
  Sense strand starting at position 3642 of SEQ ID NO: 585649
cacuucugagaagacguua

SEQ ID NO: 656631 - RNA, 19 nt, Artificial Sequence
  Description of Artificial Sequence: Synthetic oligonucleotide
  Antisense strand to SEQ ID NO: 656630
uaacgucuucucagaagug

SEQ ID NO: 656632 - RNA, 19 nt, Artificial Sequence
  Description of Artificial Sequence: Synthetic oligonucleotide
  Sense strand starting at position 3702 of SEQ ID NO: 585649
uaagucaggugauuaauau

SEQ ID NO: 656633 - RNA, 19 nt, Artificial Sequence
  Description of Artificial Sequence: Synthetic oligonucleotide
  Antisense strand to SEQ ID NO: 656632
auauuaaucaccugacuua

SEQ ID NO: 656634 - RNA, 19 nt, Artificial Sequence
  Description of Artificial Sequence: Synthetic oligonucleotide
  Sense strand starting at position 3752 of SEQ ID NO: 585649
uugugagcacaugauucuu

SEQ ID NO: 656635 - RNA, 19 nt, Artificial Sequence
  Description of Artificial Sequence: Synthetic oligonucleotide
  Antisense strand to SEQ ID NO: 656634
aagaaucaugugcucacaa

SEQ ID NO: 656636 - RNA, 19 nt, Artificial Sequence
  Description of Artificial Sequence: Synthetic oligonucleotide
  Sense strand starting at position 3760 of SEQ ID NO: 585649
acaugauucuuagugaauc

SEQ ID NO: 656637 - RNA, 19 nt, Artificial Sequence
  Description of Artificial Sequence: Synthetic oligonucleotide
  Antisense strand to SEQ ID NO: 656636
gauucacuaagaaucaugu

SEQ ID NO: 656638 - RNA, 19 nt, Artificial Sequence
  Description of Artificial Sequence: Synthetic oligonucleotide
  Sense strand starting at position 3768 of SEQ ID NO: 585649
cuuagugaaucuguaacua

SEQ ID NO: 656639 - RNA, 19 nt, Artificial Sequence
  Description of Artificial Sequence: Synthetic oligonucleotide
  Antisense strand to SEQ ID NO: 656638
uaguuacagauucacuaag

SEQ ID NO: 656640 - RNA, 19 nt, Artificial Sequence
  Description of Artificial Sequence: Synthetic oligonucleotide
  Sense strand starting at position 3872 of SEQ ID NO: 585649
ucuuguccgaacgauauaa

SEQ ID NO: 656641 - RNA, 19 nt, Artificial Sequence
  Description of Artificial Sequence: Synthetic oligonucleotide
  Antisense strand to SEQ ID NO: 656640
uuauaucguucggacaaga

SEQ ID NO: 656642 - RNA, 19 nt, Artificial Sequence
  Description of Artificial Sequence: Synthetic oligonucleotide
  Sense strand starting at position 215 of SEQ ID NO: 585650
aggaaagucuaccuaugcu

SEQ ID NO: 656643 - RNA, 19 nt, Artificial Sequence
  Description of Artificial Sequence: Synthetic oligonucleotide
  Antisense strand to SEQ ID NO: 656642
agcauagguagacuuuccu

SEQ ID NO: 656644 - RNA, 19 nt, Artificial Sequence
  Description of Artificial Sequence: Synthetic oligonucleotide
  Sense strand starting at position 393 of SEQ ID NO: 585650
uagagacauuucuagguca

SEQ ID NO: 656645 - RNA, 19 nt, Artificial Sequence
  Description of Artificial Sequence: Synthetic oligonucleotide
  Antisense strand to SEQ ID NO: 656644
ugaccuagaaaugucucua

SEQ ID NO: 656646 - RNA, 19 nt, Artificial Sequence
  Description of Artificial Sequence: Synthetic oligonucleotide
  Sense strand starting at position 512 of SEQ ID NO: 585650
agcuaaagucucggaacaa

SEQ ID NO: 656647 - RNA, 19 nt, Artificial Sequence
  Description of Artificial Sequence: Synthetic oligonucleotide
  Antisense strand to SEQ ID NO: 656646
uuguuccgagacuuuagcu

SEQ ID NO: 656648 - RNA, 19 nt, Artificial Sequence
  Description of Artificial Sequence: Synthetic oligonucleotide
  Sense strand starting at position 839 of SEQ ID NO: 585650
cuauaagucucucugguca

SEQ ID NO: 656649 - RNA, 19 nt, Artificial Sequence
  Description of Artificial Sequence: Synthetic oligonucleotide
  Antisense strand to SEQ ID NO: 656648
ugaccagagagacuuauag

SEQ ID NO: 656650 - RNA, 19 nt, Artificial Sequence
  Description of Artificial Sequence: Synthetic oligonucleotide
  Sense strand starting at position 1147 of SEQ ID NO: 585650
uuacuuuaaggcgaaauua

SEQ ID NO: 656651 - RNA, 19 nt, Artificial Sequence
  Description of Artificial Sequence: Synthetic oligonucleotide
  Antisense strand to SEQ ID NO: 656650
uaauuucgccuuaaaguaa

SEQ ID NO: 656652 - RNA, 19 nt, Artificial Sequence
  Description of Artificial Sequence: Synthetic oligonucleotide
  Sense strand starting at position 1155 of SEQ ID NO: 585650
aggcgaaauuaggccucaa

SEQ ID NO: 656653 - RNA, 19 nt, Artificial Sequence
  Description of Artificial Sequence: Synthetic oligonucleotide
  Antisense strand to SEQ ID NO: 656652
uugaggccuaauuucgccu

SEQ ID NO: 656654 - RNA, 19 nt, Artificial Sequence
  Description of Artificial Sequence: Synthetic oligonucleotide
  Sense strand starting at position 1438 of SEQ ID NO: 585650
gaggcuacuugcucagaau

SEQ ID NO: 656655 - RNA, 19 nt, Artificial Sequence
  Description of Artificial Sequence: Synthetic oligonucleotide
  Antisense strand to SEQ ID NO: 656654
auucugagcaaguagccuc

SEQ ID NO: 656656 - RNA, 19 nt, Artificial Sequence
  Description of Artificial Sequence: Synthetic oligonucleotide
  Sense strand starting at position 1439 of SEQ ID NO: 585650
aggcuacuugcucagaaua

SEQ ID NO: 656657 - RNA, 19 nt, Artificial Sequence
  Description of Artificial Sequence: Synthetic oligonucleotide
  Antisense strand to SEQ ID NO: 656656
uauucugagcaaguagccu

SEQ ID NO: 656658 - RNA, 19 nt, Artificial Sequence
  Description of Artificial Sequence: Synthetic oligonucleotide
  Sense strand starting at position 1576 of SEQ ID NO: 585650
agaggucugaauggucaau

SEQ ID NO: 656659 - RNA, 19 nt, Artificial Sequence
  Description of Artificial Sequence: Synthetic oligonucleotide
  Antisense strand to SEQ ID NO: 656658
auugaccauucagaccucu

SEQ ID NO: 656660 - RNA, 19 nt, Artificial Sequence
  Description of Artificial Sequence: Synthetic oligonucleotide
  Sense strand starting at position 1578 of SEQ ID NO: 585650
aggucugaauggucaauac

SEQ ID NO: 656661 - RNA, 19 nt, Artificial Sequence
  Description of Artificial Sequence: Synthetic oligonucleotide
  Antisense strand to SEQ ID NO: 656660
guauugaccauucagaccu

SEQ ID NO: 656662 - RNA, 19 nt, Artificial Sequence
  Description of Artificial Sequence: Synthetic oligonucleotide
  Sense strand starting at position 1582 of SEQ ID NO: 585650
cugaauggucaauaccuuu

SEQ ID NO: 656663 - RNA, 19 nt, Artificial Sequence
  Description of Artificial Sequence: Synthetic oligonucleotide
  Antisense strand to SEQ ID NO: 656662
aaagguauugaccauucag

SEQ ID NO: 656664 - RNA, 19 nt, Artificial Sequence
  Description of Artificial Sequence: Synthetic oligonucleotide
  Sense strand starting at position 2159 of SEQ ID NO: 585650
gguauuguccuccagacag

SEQ ID NO: 656665 - RNA, 19 nt, Artificial Sequence
  Description of Artificial Sequence: Synthetic oligonucleotide
  Antisense strand to SEQ ID NO: 656664
cugucuggaggacaauacc

SEQ ID NO: 656666 - RNA, 19 nt, Artificial Sequence
  Description of Artificial Sequence: Synthetic oligonucleotide
  Sense strand starting at position 2170 of SEQ ID NO: 585650
ccagacaguuacgauauuu

SEQ ID NO: 656667 - RNA, 19 nt, Artificial Sequence
  Description of Artificial Sequence: Synthetic oligonucleotide
  Antisense strand to SEQ ID NO: 656666
aaauaucguaacugucugg

SEQ ID NO: 656668 - RNA, 19 nt, Artificial Sequence
  Description of Artificial Sequence: Synthetic oligonucleotide
  Sense strand starting at position 2263 of SEQ ID NO: 585650
ggaaauaagugacuacuuu

SEQ ID NO: 656669 - RNA, 19 nt, Artificial Sequence
  Description of Artificial Sequence: Synthetic oligonucleotide
  Antisense strand to SEQ ID NO: 656668
aaaguagucacuuauuucc

SEQ ID NO: 656670 - RNA, 19 nt, Artificial Sequence
  Description of Artificial Sequence: Synthetic oligonucleotide
  Sense strand starting at position 2267 of SEQ ID NO: 585650
auaagugacuacuuuaagu

SEQ ID NO: 656671 - RNA, 19 nt, Artificial Sequence
  Description of Artificial Sequence: Synthetic oligonucleotide
  Antisense strand to SEQ ID NO: 656670
acuuaaaguagucacuuau

SEQ ID NO: 656672 - RNA, 19 nt, Artificial Sequence
  Description of Artificial Sequence: Synthetic oligonucleotide
  Sense strand starting at position 2281 of SEQ ID NO: 585650
uaagucuacuuggcugauu

SEQ ID NO: 656673 - RNA, 19 nt, Artificial Sequence
  Description of Artificial Sequence: Synthetic oligonucleotide
  Antisense strand to SEQ ID NO: 656672
aaucagccaaguagacuua

SEQ ID NO: 656674 - RNA, 19 nt, Artificial Sequence
  Description of Artificial Sequence: Synthetic oligonucleotide
  Sense strand starting at position 2299 of SEQ ID NO: 585650
uccuuugagccuugaucua

SEQ ID NO: 656675 - RNA, 19 nt, Artificial Sequence
  Description of Artificial Sequence: Synthetic oligonucleotide
  Antisense strand to SEQ ID NO: 656674
uagaucaaggcucaaagga

SEQ ID NO: 656676 - RNA, 19 nt, Artificial Sequence
  Description of Artificial Sequence: Synthetic oligonucleotide
  Sense strand starting at position 2382 of SEQ ID NO: 585650
gacuguuuggaggacuugu

SEQ ID NO: 656677 - RNA, 19 nt, Artificial Sequence
  Description of Artificial Sequence: Synthetic oligonucleotide
  Antisense strand to SEQ ID NO: 656676
acaaguccuccaaacaguc

SEQ ID NO: 656678 - RNA, 19 nt, Artificial Sequence
  Description of Artificial Sequence: Synthetic oligonucleotide
  Sense strand starting at position 2392 of SEQ ID NO: 585650
aggacuuguuaacuacuau

SEQ ID NO: 656679 - RNA, 19 nt, Artificial Sequence
  Description of Artificial Sequence: Synthetic oligonucleotide
  Antisense strand to SEQ ID NO: 656678
auaguaguuaacaaguccu

SEQ ID NO: 656680 - RNA, 19 nt, Artificial Sequence
  Description of Artificial Sequence: Synthetic oligonucleotide
  Sense strand starting at position 2430 of SEQ ID NO: 585650
uacagaaauuaggcaggua

SEQ ID NO: 656681 - RNA, 19 nt, Artificial Sequence
  Description of Artificial Sequence: Synthetic oligonucleotide
  Antisense strand to SEQ ID NO: 656680
uaccugccuaauuucugua

SEQ ID NO: 656682 - RNA, 19 nt, Artificial Sequence
  Description of Artificial Sequence: Synthetic oligonucleotide
  Sense strand starting at position 2539 of SEQ ID NO: 585650
ucagaaccgcuuuaauucu

SEQ ID NO: 656683 - RNA, 19 nt, Artificial Sequence
  Description of Artificial Sequence: Synthetic oligonucleotide
  Antisense strand to SEQ ID NO: 656682
agaauuaaagcgguucuga

SEQ ID NO: 656684 - RNA, 19 nt, Artificial Sequence
  Description of Artificial Sequence: Synthetic oligonucleotide
  Sense strand starting at position 2564 of SEQ ID NO: 585650
ugucccauuucguccgaaa

SEQ ID NO: 656685 - RNA, 19 nt, Artificial Sequence
  Description of Artificial Sequence: Synthetic oligonucleotide
  Antisense strand to SEQ ID NO: 656684
uuucggacgaaaugggaca

SEQ ID NO: 656686 - RNA, 19 nt, Artificial Sequence
  Description of Artificial Sequence: Synthetic oligonucleotide
  Sense strand starting at position 2658 of SEQ ID NO: 585650
cugcacuuucucuggagaa

SEQ ID NO: 656687 - RNA, 19 nt, Artificial Sequence
  Description of Artificial Sequence: Synthetic oligonucleotide
  Antisense strand to SEQ ID NO: 656686
uucuccagagaaagugcag

SEQ ID NO: 656688 - RNA, 19 nt, Artificial Sequence
  Description of Artificial Sequence: Synthetic oligonucleotide
  Sense strand starting at position 2660 of SEQ ID NO: 585650
gcacuuucucuggagaaug

SEQ ID NO: 656689 - RNA, 19 nt, Artificial Sequence
  Description of Artificial Sequence: Synthetic oligonucleotide
  Antisense strand to SEQ ID NO: 656688
cauucuccagagaaagugc

SEQ ID NO: 656690 - RNA, 19 nt, Artificial Sequence
  Description of Artificial Sequence: Synthetic oligonucleotide
  Sense strand starting at position 2754 of SEQ ID NO: 585650
aaguucuaccaguggguua

SEQ ID NO: 656691 - RNA, 19 nt, Artificial Sequence
  Description of Artificial Sequence: Synthetic oligonucleotide
  Antisense strand to SEQ ID NO: 656690
uaacccacugguagaacuu

SEQ ID NO: 656692 - RNA, 19 nt, Artificial Sequence
  Description of Artificial Sequence: Synthetic oligonucleotide
  Sense strand starting at position 2755 of SEQ ID NO: 585650
aguucuaccaguggguuau

SEQ ID NO: 656693 - RNA, 19 nt, Artificial Sequence
  Description of Artificial Sequence: Synthetic oligonucleotide
  Antisense strand to SEQ ID NO: 656692
auaacccacugguagaacu

SEQ ID NO: 656694 - RNA, 19 nt, Artificial Sequence
  Description of Artificial Sequence: Synthetic oligonucleotide
  Sense strand starting at position 2759 of SEQ ID NO: 585650
cuaccaguggguuauugau

SEQ ID NO: 656695 - RNA, 19 nt, Artificial Sequence
  Description of Artificial Sequence: Synthetic oligonucleotide
  Antisense strand to SEQ ID NO: 656694
aucaauaacccacugguag

SEQ ID NO: 656696 - RNA, 19 nt, Artificial Sequence
  Description of Artificial Sequence: Synthetic oligonucleotide
  Sense strand starting at position 2761 of SEQ ID NO: 585650
accaguggguuauugauca

SEQ ID NO: 656697 - RNA, 19 nt, Artificial Sequence
  Description of Artificial Sequence: Synthetic oligonucleotide
  Antisense strand to SEQ ID NO: 656696
ugaucaauaacccacuggu

SEQ ID NO: 656698 - RNA, 19 nt, Artificial Sequence
  Description of Artificial Sequence: Synthetic oligonucleotide
  Sense strand starting at position 2785 of SEQ ID NO: 585650
ccuagaagauguccuugga

SEQ ID NO: 656699 - RNA, 19 nt, Artificial Sequence
  Description of Artificial Sequence: Synthetic oligonucleotide
  Antisense strand to SEQ ID NO: 656698
uccaaggacaucuucuagg

SEQ ID NO: 656700 - RNA, 19 nt, Artificial Sequence
  Description of Artificial Sequence: Synthetic oligonucleotide
  Sense strand starting at position 2788 of SEQ ID NO: 585650
agaagauguccuuggacua

SEQ ID NO: 656701 - RNA, 19 nt, Artificial Sequence
  Description of Artificial Sequence: Synthetic oligonucleotide
  Antisense strand to SEQ ID NO: 656700
uaguccaaggacaucuucu

SEQ ID NO: 656702 - RNA, 19 nt, Artificial Sequence
  Description of Artificial Sequence: Synthetic oligonucleotide
  Sense strand starting at position 2789 of SEQ ID NO: 585650
gaagauguccuuggacuaa

SEQ ID NO: 656703 - RNA, 19 nt, Artificial Sequence
  Description of Artificial Sequence: Synthetic oligonucleotide
  Antisense strand to SEQ ID NO: 656702
uuaguccaaggacaucuuc

SEQ ID NO: 656704 - RNA, 19 nt, Artificial Sequence
  Description of Artificial Sequence: Synthetic oligonucleotide
  Sense strand starting at position 2953 of SEQ ID NO: 585650
cuaacaagacguuguacuu

SEQ ID NO: 656705 - RNA, 19 nt, Artificial Sequence
  Description of Artificial Sequence: Synthetic oligonucleotide
  Antisense strand to SEQ ID NO: 656704
aaguacaacgucuuguuag

SEQ ID NO: 656706 - RNA, 19 nt, Artificial Sequence
  Description of Artificial Sequence: Synthetic oligonucleotide
  Sense strand starting at position 2973 of SEQ ID NO: 585650
agaguuaaaccggagagcu

SEQ ID NO: 656707 - RNA, 19 nt, Artificial Sequence
  Description of Artificial Sequence: Synthetic oligonucleotide
  Antisense strand to SEQ ID NO: 656706
agcucuccgguuuaacucu

SEQ ID NO: 656708 - RNA, 19 nt, Artificial Sequence
  Description of Artificial Sequence: Synthetic oligonucleotide
  Sense strand starting at position 3014 of SEQ ID NO: 585650
cuccaauuggcgugagaac

SEQ ID NO: 656709 - RNA, 19 nt, Artificial Sequence
  Description of Artificial Sequence: Synthetic oligonucleotide
  Antisense strand to SEQ ID NO: 656708
guucucacgccaauuggag

SEQ ID NO: 656710 - RNA, 19 nt, Artificial Sequence
  Description of Artificial Sequence: Synthetic oligonucleotide
  Sense strand starting at position 3015 of SEQ ID NO: 585650
uccaauuggcgugagaaca

SEQ ID NO: 656711 - RNA, 19 nt, Artificial Sequence
  Description of Artificial Sequence: Synthetic oligonucleotide
  Antisense strand to SEQ ID NO: 656710
uguucucacgccaauugga

SEQ ID NO: 656712 - RNA, 19 nt, Artificial Sequence
  Description of Artificial Sequence: Synthetic oligonucleotide
  Sense strand starting at position 3050 of SEQ ID NO: 585650
guagccaaguaaucaaguu

SEQ ID NO: 656713 - RNA, 19 nt, Artificial Sequence
  Description of Artificial Sequence: Synthetic oligonucleotide
  Antisense strand to SEQ ID NO: 656712
aacuugauuacuuggcuac

SEQ ID NO: 656714 - RNA, 19 nt, Artificial Sequence
  Description of Artificial Sequence: Synthetic oligonucleotide
  Sense strand starting at position 3070 of SEQ ID NO: 585650
aucagauauuugugauuuc

SEQ ID NO: 656715 - RNA, 19 nt, Artificial Sequence
  Description of Artificial Sequence: Synthetic oligonucleotide
  Antisense strand to SEQ ID NO: 656714
gaaaucacaaauaucugau

SEQ ID NO: 656716 - RNA, 19 nt, Artificial Sequence
  Description of Artificial Sequence: Synthetic oligonucleotide
  Sense strand starting at position 3160 of SEQ ID NO: 585650
cgaugcaguucuuccaaga

SEQ ID NO: 656717 - RNA, 19 nt, Artificial Sequence
  Description of Artificial Sequence: Synthetic oligonucleotide
  Antisense strand to SEQ ID NO: 656716
ucuuggaagaacugcaucg

SEQ ID NO: 656718 - RNA, 19 nt, Artificial Sequence
  Description of Artificial Sequence: Synthetic oligonucleotide
  Sense strand starting at position 3350 of SEQ ID NO: 585650
ccugcaacucagcaguuua

SEQ ID NO: 656719 - RNA, 19 nt, Artificial Sequence
  Description of Artificial Sequence: Synthetic oligonucleotide
  Antisense strand to SEQ ID NO: 656718
uaaacugcugaguugcagg

SEQ ID NO: 656720 - RNA, 19 nt, Artificial Sequence
  Description of Artificial Sequence: Synthetic oligonucleotide
  Sense strand starting at position 3586 of SEQ ID NO: 585650
ucacuucgguuuguaacaa

SEQ ID NO: 656721 - RNA, 19 nt, Artificial Sequence
  Description of Artificial Sequence: Synthetic oligonucleotide
  Antisense strand to SEQ ID NO: 656720
uuguuacaaaccgaaguga

SEQ ID NO: 656722 - RNA, 19 nt, Artificial Sequence
  Description of Artificial Sequence: Synthetic oligonucleotide
  Sense strand starting at position 163 of SEQ ID NO: 585651
cagaauggguaauucuuua

SEQ ID NO: 656723 - RNA, 19 nt, Artificial Sequence
  Description of Artificial Sequence: Synthetic oligonucleotide
  Antisense strand to SEQ ID NO: 656722
uaaagaauuacccauucug

SEQ ID NO: 656724 - RNA, 19 nt, Artificial Sequence
  Description of Artificial Sequence: Synthetic oligonucleotide
  Sense strand starting at position 168 of SEQ ID NO: 585651
uggguaauucuuuauauuc

SEQ ID NO: 656725 - RNA, 19 nt, Artificial Sequence
  Description of Artificial Sequence: Synthetic oligonucleotide
  Antisense strand to SEQ ID NO: 656724
gaauauaaagaauuaccca

SEQ ID NO: 656726 - RNA, 19 nt, Artificial Sequence
  Description of Artificial Sequence: Synthetic oligonucleotide
  Sense strand starting at position 219 of SEQ ID NO: 585651
cuggcuucccauuacuagu

SEQ ID NO: 656727 - RNA, 19 nt, Artificial Sequence
  Description of Artificial Sequence: Synthetic oligonucleotide
  Antisense strand to SEQ ID NO: 656726
acuaguaaugggaagccag

SEQ ID NO: 656728 - RNA, 19 nt, Artificial Sequence
  Description of Artificial Sequence: Synthetic oligonucleotide
  Sense strand starting at position 227 of SEQ ID NO: 585651
ccauuacuagucuggaaca

SEQ ID NO: 656729 - RNA, 19 nt, Artificial Sequence
  Description of Artificial Sequence: Synthetic oligonucleotide
  Antisense strand to SEQ ID NO: 656728
uguuccagacuaguaaugg

SEQ ID NO: 656730 - RNA, 19 nt, Artificial Sequence
  Description of Artificial Sequence: Synthetic oligonucleotide
  Sense strand starting at position 274 of SEQ ID NO: 585651
augaaugaaugacaacauu

SEQ ID NO: 656731 - RNA, 19 nt, Artificial Sequence
  Description of Artificial Sequence: Synthetic oligonucleotide
  Antisense strand to SEQ ID NO: 656730
aauguugucauucauucau

SEQ ID NO: 656732 - RNA, 19 nt, Artificial Sequence
  Description of Artificial Sequence: Synthetic oligonucleotide
  Sense strand starting at position 313 of SEQ ID NO: 585651
gcccuauggucaguccaaa

SEQ ID NO: 656733 - RNA, 19 nt, Artificial Sequence
  Description of Artificial Sequence: Synthetic oligonucleotide
  Antisense strand to SEQ ID NO: 656732
uuuggacugaccauagggc

SEQ ID NO: 656734 - RNA, 19 nt, Artificial Sequence
  Description of Artificial Sequence: Synthetic oligonucleotide
  Sense strand starting at position 515 of SEQ ID NO: 585651
agagcuucuugagcuguua

SEQ ID NO: 656735 - RNA, 19 nt, Artificial Sequence
  Description of Artificial Sequence: Synthetic oligonucleotide
  Antisense strand to SEQ ID NO: 656734
uaacagcucaagaagcucu

SEQ ID NO: 656736 - RNA, 19 nt, Artificial Sequence
  Description of Artificial Sequence: Synthetic oligonucleotide
  Sense strand starting at position 534 of SEQ ID NO: 585651
ggguaaauuuaauaagcaa

SEQ ID NO: 656737 - RNA, 19 nt, Artificial Sequence
  Description of Artificial Sequence: Synthetic oligonucleotide
  Antisense strand to SEQ ID NO: 656736
uugcuuauuaaauuuaccc

SEQ ID NO: 656738 - RNA, 19 nt, Artificial Sequence
  Description of Artificial Sequence: Synthetic oligonucleotide
  Sense strand starting at position 555 of SEQ ID NO: 585651
agcugagcagacugagaaa

SEQ ID NO: 656739 - RNA, 19 nt, Artificial Sequence
  Description of Artificial Sequence: Synthetic oligonucleotide
  Antisense strand to SEQ ID NO: 656738
uuucucagucugcucagcu

SEQ ID NO: 656740 - RNA, 19 nt, Artificial Sequence
  Description of Artificial Sequence: Synthetic oligonucleotide
  Sense strand starting at position 583 of SEQ ID NO: 585651
ccagauggccacuggucaa

SEQ ID NO: 656741 - RNA, 19 nt, Artificial Sequence
  Description of Artificial Sequence: Synthetic oligonucleotide
  Antisense strand to SEQ ID NO: 656740
uugaccaguggccaucugg

SEQ ID NO: 656742 - RNA, 19 nt, Artificial Sequence
  Description of Artificial Sequence: Synthetic oligonucleotide
  Sense strand starting at position 586 of SEQ ID NO: 585651
gauggccacuggucaaaga

SEQ ID NO: 656743 - RNA, 19 nt, Artificial Sequence
  Description of Artificial Sequence: Synthetic oligonucleotide
  Antisense strand to SEQ ID NO: 656742
ucuuugaccaguggccauc

SEQ ID NO: 656744 - RNA, 19 nt, Artificial Sequence
  Description of Artificial Sequence: Synthetic oligonucleotide
  Sense strand starting at position 619 of SEQ ID NO: 585651
gcaucagugucacuuggaa

SEQ ID NO: 656745 - RNA, 19 nt, Artificial Sequence
  Description of Artificial Sequence: Synthetic oligonucleotide
  Antisense strand to SEQ ID NO: 656744
uuccaagugacacugaugc

SEQ ID NO: 656746 - RNA, 19 nt, Artificial Sequence
  Description of Artificial Sequence: Synthetic oligonucleotide
  Sense strand starting at position 621 of SEQ ID NO: 585651
aucagugucacuuggaagu

SEQ ID NO: 656747 - RNA, 19 nt, Artificial Sequence
  Description of Artificial Sequence: Synthetic oligonucleotide
  Antisense strand to SEQ ID NO: 656746
acuuccaagugacacugau

SEQ ID NO: 656748 - RNA, 19 nt, Artificial Sequence
  Description of Artificial Sequence: Synthetic oligonucleotide
  Sense strand starting at position 654 of SEQ ID NO: 585651
guauguccuuuacuccgaa

SEQ ID NO: 656749 - RNA, 19 nt, Artificial Sequence
  Description of Artificial Sequence: Synthetic oligonucleotide
  Antisense strand to SEQ ID NO: 656748
uucggaguaaaggacauac

SEQ ID NO: 656750 - RNA, 19 nt, Artificial Sequence
  Description of Artificial Sequence: Synthetic oligonucleotide
  Sense strand starting at position 696 of SEQ ID NO: 585651
guagcacgugcuuuaaagu

SEQ ID NO: 656751 - RNA, 19 nt, Artificial Sequence
  Description of Artificial Sequence: Synthetic oligonucleotide
  Antisense strand to SEQ ID NO: 656750
acuuuaaagcacgugcuac

SEQ ID NO: 656752 - RNA, 19 nt, Artificial Sequence
  Description of Artificial Sequence: Synthetic oligonucleotide
  Sense strand starting at position 810 of SEQ ID NO: 585651
ugagaaauguagcuauuag

SEQ ID NO: 656753 - RNA, 19 nt, Artificial Sequence
  Description of Artificial Sequence: Synthetic oligonucleotide
  Antisense strand to SEQ ID NO: 656752
cuaauagcuacauuucuca

SEQ ID NO: 656754 - RNA, 19 nt, Artificial Sequence
  Description of Artificial Sequence: Synthetic oligonucleotide
  Sense strand starting at position 867 of SEQ ID NO: 585651
uuccuaagucgucaaauuc

SEQ ID NO: 656755 - RNA, 19 nt, Artificial Sequence
  Description of Artificial Sequence: Synthetic oligonucleotide
  Antisense strand to SEQ ID NO: 656754
gaauuugacgacuuaggaa

SEQ ID NO: 656756 - RNA, 19 nt, Artificial Sequence
  Description of Artificial Sequence: Synthetic oligonucleotide
  Sense strand starting at position 899 of SEQ ID NO: 585651
aaaggugucugcccagaau

SEQ ID NO: 656757 - RNA, 19 nt, Artificial Sequence
  Description of Artificial Sequence: Synthetic oligonucleotide
  Antisense strand to SEQ ID NO: 656756
auucugggcagacaccuuu

SEQ ID NO: 656758 - RNA, 19 nt, Artificial Sequence
  Description of Artificial Sequence: Synthetic oligonucleotide
  Sense strand starting at position 912 of SEQ ID NO: 585651
cagaauuccgccuacugga

SEQ ID NO: 656759 - RNA, 19 nt, Artificial Sequence
  Description of Artificial Sequence: Synthetic oligonucleotide
  Antisense strand to SEQ ID NO: 656758
uccaguaggcggaauucug

SEQ ID NO: 656760 - RNA, 19 nt, Artificial Sequence
  Description of Artificial Sequence: Synthetic oligonucleotide
  Sense strand starting at position 1242 of SEQ ID NO: 585651
aggacuuuaaaguguaagu

SEQ ID NO: 656761 - RNA, 19 nt, Artificial Sequence
  Description of Artificial Sequence: Synthetic oligonucleotide
  Antisense strand to SEQ ID NO: 656760
acuuacacuuuaaaguccu

SEQ ID NO: 656762 - RNA, 19 nt, Artificial Sequence
  Description of Artificial Sequence: Synthetic oligonucleotide
  Sense strand starting at position 1244 of SEQ ID NO: 585651
gacuuuaaaguguaaguuu

SEQ ID NO: 656763 - RNA, 19 nt, Artificial Sequence
  Description of Artificial Sequence: Synthetic oligonucleotide
  Antisense strand to SEQ ID NO: 656762
aaacuuacacuuuaaaguc

SEQ ID NO: 656764 - RNA, 19 nt, Artificial Sequence
  Description of Artificial Sequence: Synthetic oligonucleotide
  Sense strand starting at position 2434 of SEQ ID NO: 585651
ggaagaaguaaucgaucau

SEQ ID NO: 656765 - RNA, 19 nt, Artificial Sequence
  Description of Artificial Sequence: Synthetic oligonucleotide
  Antisense strand to SEQ ID NO: 656764
augaucgauuacuucuucc

SEQ ID NO: 656766 - RNA, 19 nt, Artificial Sequence
  Description of Artificial Sequence: Synthetic oligonucleotide
  Sense strand starting at position 2447 of SEQ ID NO: 585651
gaucaugaugaccgugaaa

SEQ ID NO: 656767 - RNA, 19 nt, Artificial Sequence
  Description of Artificial Sequence: Synthetic oligonucleotide
  Antisense strand to SEQ ID NO: 656766
uuucacggucaucaugauc

SEQ ID NO: 656768 - RNA, 19 nt, Artificial Sequence
  Description of Artificial Sequence: Synthetic oligonucleotide
  Sense strand starting at position 2449 of SEQ ID NO: 585651
ucaugaugaccgugaaaga

SEQ ID NO: 656769 - RNA, 19 nt, Artificial Sequence
  Description of Artificial Sequence: Synthetic oligonucleotide
  Antisense strand to SEQ ID NO: 656768
ucuuucacggucaucauga

SEQ ID NO: 656770 - RNA, 19 nt, Artificial Sequence
  Description of Artificial Sequence: Synthetic oligonucleotide
  Sense strand starting at position 2510 of SEQ ID NO: 585651
ugguuuagcauccggacua

SEQ ID NO: 656771 - RNA, 19 nt, Artificial Sequence
  Description of Artificial Sequence: Synthetic oligonucleotide
  Antisense strand to SEQ ID NO: 656770
uaguccggaugcuaaacca

SEQ ID NO: 656772 - RNA, 19 nt, Artificial Sequence
  Description of Artificial Sequence: Synthetic oligonucleotide
  Sense strand starting at position 2574 of SEQ ID NO: 585651
uuugauauuuaccgauuga

SEQ ID NO: 656773 - RNA, 19 nt, Artificial Sequence
  Description of Artificial Sequence: Synthetic oligonucleotide
  Antisense strand to SEQ ID NO: 656772
ucaaucgguaaauaucaaa

SEQ ID NO: 656774 - RNA, 19 nt, Artificial Sequence
  Description of Artificial Sequence: Synthetic oligonucleotide
  Sense strand starting at position 2604 of SEQ ID NO: 585651
gauuaagaggccuggaacu

SEQ ID NO: 656775 - RNA, 19 nt, Artificial Sequence
  Description of Artificial Sequence: Synthetic oligonucleotide
  Antisense strand to SEQ ID NO: 656774
aguuccaggccucuuaauc

SEQ ID NO: 656776 - RNA, 19 nt, Artificial Sequence
  Description of Artificial Sequence: Synthetic oligonucleotide
  Sense strand starting at position 2670 of SEQ ID NO: 585651
gcugucaugcuuguuuauu

SEQ ID NO: 656777 - RNA, 19 nt, Artificial Sequence
  Description of Artificial Sequence: Synthetic oligonucleotide
  Antisense strand to SEQ ID NO: 656776
aauaaacaagcaugacagc

SEQ ID NO: 656778 - RNA, 19 nt, Artificial Sequence
  Description of Artificial Sequence: Synthetic oligonucleotide
  Sense strand starting at position 2679 of SEQ ID NO: 585651
cuuguuuauugagcaccua

SEQ ID NO: 656779 - RNA, 19 nt, Artificial Sequence
  Description of Artificial Sequence: Synthetic oligonucleotide
  Antisense strand to SEQ ID NO: 656778
uaggugcucaauaaacaag

SEQ ID NO: 656780 - RNA, 19 nt, Artificial Sequence
  Description of Artificial Sequence: Synthetic oligonucleotide
  Sense strand starting at position 2691 of SEQ ID NO: 585651
gcaccuacuguuuauggga

SEQ ID NO: 656781 - RNA, 19 nt, Artificial Sequence
  Description of Artificial Sequence: Synthetic oligonucleotide
  Antisense strand to SEQ ID NO: 656780
ucccauaaacaguaggugc

SEQ ID NO: 656782 - RNA, 19 nt, Artificial Sequence
  Description of Artificial Sequence: Synthetic oligonucleotide
  Sense strand starting at position 2789 of SEQ ID NO: 585651
gcgguauguguucuggucu

SEQ ID NO: 656783 - RNA, 19 nt, Artificial Sequence
  Description of Artificial Sequence: Synthetic oligonucleotide
  Antisense strand to SEQ ID NO: 656782
agaccagaacacauaccgc

SEQ ID NO: 656784 - RNA, 19 nt, Artificial Sequence
  Description of Artificial Sequence: Synthetic oligonucleotide
  Sense strand starting at position 2943 of SEQ ID NO: 585651
uccggaaucuaaguggaua

SEQ ID NO: 656785 - RNA, 19 nt, Artificial Sequence
  Description of Artificial Sequence: Synthetic oligonucleotide
  Antisense strand to SEQ ID NO: 656784
uauccacuuagauuccgga

SEQ ID NO: 656786 - RNA, 19 nt, Artificial Sequence
  Description of Artificial Sequence: Synthetic oligonucleotide
  Sense strand starting at position 2944 of SEQ ID NO: 585651
ccggaaucuaaguggauau

SEQ ID NO: 656787 - RNA, 19 nt, Artificial Sequence
  Description of Artificial Sequence: Synthetic oligonucleotide
  Antisense strand to SEQ ID NO: 656786
auauccacuuagauuccgg

SEQ ID NO: 656788 - RNA, 19 nt, Artificial Sequence
  Description of Artificial Sequence: Synthetic oligonucleotide
  Sense strand starting at position 2956 of SEQ ID NO: 585651
uggauaugguaacuauuau

SEQ ID NO: 656789 - RNA, 19 nt, Artificial Sequence
  Description of Artificial Sequence: Synthetic oligonucleotide
  Antisense strand to SEQ ID NO: 656788
auaauaguuaccauaucca

SEQ ID NO: 656790 - RNA, 19 nt, Artificial Sequence
  Description of Artificial Sequence: Synthetic oligonucleotide
  Sense strand starting at position 3129 of SEQ ID NO: 585651
gagaacucacgcuauugau

SEQ ID NO: 656791 - RNA, 19 nt, Artificial Sequence
  Description of Artificial Sequence: Synthetic oligonucleotide
  Antisense strand to SEQ ID NO: 656790
aucaauagcgugaguucuc

SEQ ID NO: 656792 - RNA, 19 nt, Artificial Sequence
  Description of Artificial Sequence: Synthetic oligonucleotide
  Sense strand starting at position 3524 of SEQ ID NO: 585651
cggccuuccuacucauaaa

SEQ ID NO: 656793 - RNA, 19 nt, Artificial Sequence
  Description of Artificial Sequence: Synthetic oligonucleotide
  Antisense strand to SEQ ID NO: 656792
uuuaugaguaggaaggccg

SEQ ID NO: 656794 - RNA, 19 nt, Artificial Sequence
  Description of Artificial Sequence: Synthetic oligonucleotide
  Sense strand starting at position 3717 of SEQ ID NO: 585651
gagguaaagguuuguagug

SEQ ID NO: 656795 - RNA, 19 nt, Artificial Sequence
  Description of Artificial Sequence: Synthetic oligonucleotide
  Antisense strand to SEQ ID NO: 656794
cacuacaaaccuuuaccuc

SEQ ID NO: 656796 - RNA, 19 nt, Artificial Sequence
  Description of Artificial Sequence: Synthetic oligonucleotide
  Sense strand starting at position 3827 of SEQ ID NO: 585651
uccuauugaccacguuagu

SEQ ID NO: 656797 - RNA, 19 nt, Artificial Sequence
  Description of Artificial Sequence: Synthetic oligonucleotide
  Antisense strand to SEQ ID NO: 656796
acuaacguggucaauagga

SEQ ID NO: 656798 - RNA, 19 nt, Artificial Sequence
  Description of Artificial Sequence: Synthetic oligonucleotide
  Sense strand starting at position 3866 of SEQ ID NO: 585651
uguugucuccuuuaauccu

SEQ ID NO: 656799 - RNA, 19 nt, Artificial Sequence
  Description of Artificial Sequence: Synthetic oligonucleotide
  Antisense strand to SEQ ID NO: 656798
aggauuaaaggagacaaca

SEQ ID NO: 656800 - RNA, 19 nt, Artificial Sequence
  Description of Artificial Sequence: Synthetic oligonucleotide
  Sense strand starting at position 3929 of SEQ ID NO: 585651
gcuuuaagggaaugaguuc

SEQ ID NO: 656801 - RNA, 19 nt, Artificial Sequence
  Description of Artificial Sequence: Synthetic oligonucleotide
  Antisense strand to SEQ ID NO: 656800
gaacucauucccuuaaagc

SEQ ID NO: 656802 - RNA, 19 nt, Artificial Sequence
  Description of Artificial Sequence: Synthetic oligonucleotide
  Sense strand starting at position 21 of SEQ ID NO: 585652
ucggcagcuccugauauga

SEQ ID NO: 656803 - RNA, 19 nt, Artificial Sequence
  Description of Artificial Sequence: Synthetic oligonucleotide
  Antisense strand to SEQ ID NO: 656802
ucauaucaggagcugccga

SEQ ID NO: 656804 - RNA, 19 nt, Artificial Sequence
  Description of Artificial Sequence: Synthetic oligonucleotide
  Sense strand starting at position 524 of SEQ ID NO: 585652
auaagcugggcgugguaau

SEQ ID NO: 656805 - RNA, 19 nt, Artificial Sequence
  Description of Artificial Sequence: Synthetic oligonucleotide
  Antisense strand to SEQ ID NO: 656804
auuaccacgcccagcuuau

SEQ ID NO: 656806 - RNA, 19 nt, Artificial Sequence
  Description of Artificial Sequence: Synthetic oligonucleotide
  Sense strand starting at position 737 of SEQ ID NO: 585652
gagcucauaguggguaaga

SEQ ID NO: 656807 - RNA, 19 nt, Artificial Sequence
  Description of Artificial Sequence: Synthetic oligonucleotide
  Antisense strand to SEQ ID NO: 656806
ucuuacccacuaugagcuc

SEQ ID NO: 656808 - RNA, 19 nt, Artificial Sequence
  Description of Artificial Sequence: Synthetic oligonucleotide
  Sense strand starting at position 739 of SEQ ID NO: 585652
gcucauaguggguaagaca

SEQ ID NO: 656809 - RNA, 19 nt, Artificial Sequence
  Description of Artificial Sequence: Synthetic oligonucleotide
  Antisense strand to SEQ ID NO: 656808
ugucuuacccacuaugagc

SEQ ID NO: 656810 - RNA, 19 nt, Artificial Sequence
  Description of Artificial Sequence: Synthetic oligonucleotide
  Sense strand starting at position 768 of SEQ ID NO: 585652
cagguagaaugggaucaau

SEQ ID NO: 656811 - RNA, 19 nt, Artificial Sequence
  Description of Artificial Sequence: Synthetic oligonucleotide
  Antisense strand to SEQ ID NO: 656810
auugaucccauucuaccug

SEQ ID NO: 656812 - RNA, 19 nt, Artificial Sequence
  Description of Artificial Sequence: Synthetic oligonucleotide
  Sense strand starting at position 910 of SEQ ID NO: 585652
auaaucuuaugagguaauc

SEQ ID NO: 656813 - RNA, 19 nt, Artificial Sequence
  Description of Artificial Sequence: Synthetic oligonucleotide
  Antisense strand to SEQ ID NO: 656812
gauuaccucauaagauuau

SEQ ID NO: 656814 - RNA, 19 nt, Artificial Sequence
  Description of Artificial Sequence: Synthetic oligonucleotide
  Sense strand starting at position 1015 of SEQ ID NO: 585652
gcuucugagagcugggaua

SEQ ID NO: 656815 - RNA, 19 nt, Artificial Sequence
  Description of Artificial Sequence: Synthetic oligonucleotide
  Antisense strand to SEQ ID NO: 656814
uaucccagcucucagaagc

SEQ ID NO: 656816 - RNA, 19 nt, Artificial Sequence
  Description of Artificial Sequence: Synthetic oligonucleotide
  Sense strand starting at position 1027 of SEQ ID NO: 585652
ugggauagauucugaaagu

SEQ ID NO: 656817 - RNA, 19 nt, Artificial Sequence
  Description of Artificial Sequence: Synthetic oligonucleotide
  Antisense strand to SEQ ID NO: 656816
acuuucagaaucuauccca

SEQ ID NO: 656818 - RNA, 19 nt, Artificial Sequence
  Description of Artificial Sequence: Synthetic oligonucleotide
  Sense strand starting at position 1028 of SEQ ID NO: 585652
gggauagauucugaaagua

SEQ ID NO: 656819 - RNA, 19 nt, Artificial Sequence
  Description of Artificial Sequence: Synthetic oligonucleotide
  Antisense strand to SEQ ID NO: 656818
uacuuucagaaucuauccc

SEQ ID NO: 656820 - RNA, 19 nt, Artificial Sequence
  Description of Artificial Sequence: Synthetic oligonucleotide
  Sense strand starting at position 1121 of SEQ ID NO: 585652
gaggguuuggacuguaaca

SEQ ID NO: 656821 - RNA, 19 nt, Artificial Sequence
  Description of Artificial Sequence: Synthetic oligonucleotide
  Antisense strand to SEQ ID NO: 656820
uguuacaguccaaacccuc

SEQ ID NO: 656822 - RNA, 19 nt, Artificial Sequence
  Description of Artificial Sequence: Synthetic oligonucleotide
  Sense strand starting at position 1123 of SEQ ID NO: 585652
ggguuuggacuguaacagu

SEQ ID NO: 656823 - RNA, 19 nt, Artificial Sequence
  Description of Artificial Sequence: Synthetic oligonucleotide
  Antisense strand to SEQ ID NO: 656822
acuguuacaguccaaaccc

SEQ ID NO: 656824 - RNA, 19 nt, Artificial Sequence
  Description of Artificial Sequence: Synthetic oligonucleotide
  Sense strand starting at position 1126 of SEQ ID NO: 585652
uuuggacuguaacaguuaa

SEQ ID NO: 656825 - RNA, 19 nt, Artificial Sequence
  Description of Artificial Sequence: Synthetic oligonucleotide
  Antisense strand to SEQ ID NO: 656824
uuaacuguuacaguccaaa

SEQ ID NO: 656826 - RNA, 19 nt, Artificial Sequence
  Description of Artificial Sequence: Synthetic oligonucleotide
  Sense strand starting at position 1409 of SEQ ID NO: 585652
uggcucuaguuugcauaga

SEQ ID NO: 656827 - RNA, 19 nt, Artificial Sequence
  Description of Artificial Sequence: Synthetic oligonucleotide
  Antisense strand to SEQ ID NO: 656826
ucuaugcaaacuagagcca

SEQ ID NO: 656828 - RNA, 19 nt, Artificial Sequence
  Description of Artificial Sequence: Synthetic oligonucleotide
  Sense strand starting at position 1410 of SEQ ID NO: 585652
ggcucuaguuugcauagaa

SEQ ID NO: 656829 - RNA, 19 nt, Artificial Sequence
  Description of Artificial Sequence: Synthetic oligonucleotide
  Antisense strand to SEQ ID NO: 656828
uucuaugcaaacuagagcc

SEQ ID NO: 656830 - RNA, 19 nt, Artificial Sequence
  Description of Artificial Sequence: Synthetic oligonucleotide
  Sense strand starting at position 1420 of SEQ ID NO: 585652
ugcauagaauuguccaaca

SEQ ID NO: 656831 - RNA, 19 nt, Artificial Sequence
  Description of Artificial Sequence: Synthetic oligonucleotide
  Antisense strand to SEQ ID NO: 656830
uguuggacaauucuaugca

SEQ ID NO: 656832 - RNA, 19 nt, Artificial Sequence
  Description of Artificial Sequence: Synthetic oligonucleotide
  Sense strand starting at position 2316 of SEQ ID NO: 585652
caaccauucgcugaaugga

SEQ ID NO: 656833 - RNA, 19 nt, Artificial Sequence
  Description of Artificial Sequence: Synthetic oligonucleotide
  Antisense strand to SEQ ID NO: 656832
uccauucagcgaaugguug

SEQ ID NO: 656834 - RNA, 19 nt, Artificial Sequence
  Description of Artificial Sequence: Synthetic oligonucleotide
  Sense strand starting at position 2420 of SEQ ID NO: 585652
ccgcguguuucccuucagu

SEQ ID NO: 656835 - RNA, 19 nt, Artificial Sequence
  Description of Artificial Sequence: Synthetic oligonucleotide
  Antisense strand to SEQ ID NO: 656834
acugaagggaaacacgcgg

SEQ ID NO: 656836 - RNA, 19 nt, Artificial Sequence
  Description of Artificial Sequence: Synthetic oligonucleotide
  Sense strand starting at position 2422 of SEQ ID NO: 585652
gcguguuucccuucaguuc

SEQ ID NO: 656837 - RNA, 19 nt, Artificial Sequence
  Description of Artificial Sequence: Synthetic oligonucleotide
  Antisense strand to SEQ ID NO: 656836
gaacugaagggaaacacgc

SEQ ID NO: 656838 - RNA, 19 nt, Artificial Sequence
  Description of Artificial Sequence: Synthetic oligonucleotide
  Sense strand starting at position 3324 of SEQ ID NO: 585652
cuuccacugcccggaaauu

SEQ ID NO: 656839 - RNA, 19 nt, Artificial Sequence
  Description of Artificial Sequence: Synthetic oligonucleotide
  Antisense strand to SEQ ID NO: 656838
aauuuccgggcaguggaag

SEQ ID NO: 656840 - RNA, 19 nt, Artificial Sequence
  Description of Artificial Sequence: Synthetic oligonucleotide
  Sense strand starting at position 3333 of SEQ ID NO: 585652
cccggaaauuccuaggauc

SEQ ID NO: 656841 - RNA, 19 nt, Artificial Sequence
  Description of Artificial Sequence: Synthetic oligonucleotide
  Antisense strand to SEQ ID NO: 656840
gauccuaggaauuuccggg

SEQ ID NO: 656842 - RNA, 19 nt, Artificial Sequence
  Description of Artificial Sequence: Synthetic oligonucleotide
  Sense strand starting at position 3336 of SEQ ID NO: 585652
ggaaauuccuaggaucccu

SEQ ID NO: 656843 - RNA, 19 nt, Artificial Sequence
  Description of Artificial Sequence: Synthetic oligonucleotide
  Antisense strand to SEQ ID NO: 656842
agggauccuaggaauuucc

SEQ ID NO: 656844 - RNA, 19 nt, Artificial Sequence
  Description of Artificial Sequence: Synthetic oligonucleotide
  Sense strand starting at position 3553 of SEQ ID NO: 585652
cugauaucuuaaggagaag

SEQ ID NO: 656845 - RNA, 19 nt, Artificial Sequence
  Description of Artificial Sequence: Synthetic oligonucleotide
  Antisense strand to SEQ ID NO: 656844
cuucuccuuaagauaucag

SEQ ID NO: 656846 - RNA, 19 nt, Artificial Sequence
  Description of Artificial Sequence: Synthetic oligonucleotide
  Sense strand starting at position 3569 of SEQ ID NO: 585652
aagagauggugauagggaa

SEQ ID NO: 656847 - RNA, 19 nt, Artificial Sequence
  Description of Artificial Sequence: Synthetic oligonucleotide
  Antisense strand to SEQ ID NO: 656846
uucccuaucaccaucucuu

SEQ ID NO: 656848 - RNA, 19 nt, Artificial Sequence
  Description of Artificial Sequence: Synthetic oligonucleotide
  Sense strand starting at position 3611 of SEQ ID NO: 585652
acccuagaguucuucguuu

SEQ ID NO: 656849 - RNA, 19 nt, Artificial Sequence
  Description of Artificial Sequence: Synthetic oligonucleotide
  Antisense strand to SEQ ID NO: 656848
aaacgaagaacucuagggu

SEQ ID NO: 656850 - RNA, 19 nt, Artificial Sequence
  Description of Artificial Sequence: Synthetic oligonucleotide
  Sense strand starting at position 3769 of SEQ ID NO: 585652
ccuggaaguuguccaagga

SEQ ID NO: 656851 - RNA, 19 nt, Artificial Sequence
  Description of Artificial Sequence: Synthetic oligonucleotide
  Antisense strand to SEQ ID NO: 656850
uccuuggacaacuuccagg

SEQ ID NO: 656852 - RNA, 19 nt, Artificial Sequence
  Description of Artificial Sequence: Synthetic oligonucleotide
  Sense strand starting at position 3770 of SEQ ID NO: 585652
cuggaaguuguccaaggau

SEQ ID NO: 656853 - RNA, 19 nt, Artificial Sequence
  Description of Artificial Sequence: Synthetic oligonucleotide
  Antisense strand to SEQ ID NO: 656852
auccuuggacaacuuccag

SEQ ID NO: 656854 - RNA, 19 nt, Artificial Sequence
  Description of Artificial Sequence: Synthetic oligonucleotide
  Sense strand starting at position 3773 of SEQ ID NO: 585652
gaaguuguccaaggaugca

SEQ ID NO: 656855 - RNA, 19 nt, Artificial Sequence
  Description of Artificial Sequence: Synthetic oligonucleotide
  Antisense strand to SEQ ID NO: 656854
ugcauccuuggacaacuuc

SEQ ID NO: 656856 - RNA, 19 nt, Artificial Sequence
  Description of Artificial Sequence: Synthetic oligonucleotide
  Sense strand starting at position 3807 of SEQ ID NO: 585652
ugggaaguguuucuccaga

SEQ ID NO: 656857 - RNA, 19 nt, Artificial Sequence
  Description of Artificial Sequence: Synthetic oligonucleotide
  Antisense strand to SEQ ID NO: 656856
ucuggagaaacacuuccca

SEQ ID NO: 656858 - RNA, 19 nt, Artificial Sequence
  Description of Artificial Sequence: Synthetic oligonucleotide
  Sense strand starting at position 3809 of SEQ ID NO: 585652
ggaaguguuucuccagagc

SEQ ID NO: 656859 - RNA, 19 nt, Artificial Sequence
  Description of Artificial Sequence: Synthetic oligonucleotide
  Antisense strand to SEQ ID NO: 656858
gcucuggagaaacacuucc

SEQ ID NO: 656860 - RNA, 19 nt, Artificial Sequence
  Description of Artificial Sequence: Synthetic oligonucleotide
  Sense strand starting at position 3877 of SEQ ID NO: 585652
cuaccuugggcucagauau

SEQ ID NO: 656861 - RNA, 19 nt, Artificial Sequence
  Description of Artificial Sequence: Synthetic oligonucleotide
  Antisense strand to SEQ ID NO: 656860
auaucugagcccaagguag

SEQ ID NO: 656862 - RNA, 19 nt, Artificial Sequence
  Description of Artificial Sequence: Synthetic oligonucleotide
  Sense strand starting at position 3884 of SEQ ID NO: 585652
gggcucagauauccugaaa

SEQ ID NO: 656863 - RNA, 19 nt, Artificial Sequence
  Description of Artificial Sequence: Synthetic oligonucleotide
  Antisense strand to SEQ ID NO: 656862
uuucaggauaucugagccc

SEQ ID NO: 656864 - RNA, 19 nt, Artificial Sequence
  Description of Artificial Sequence: Synthetic oligonucleotide
  Sense strand starting at position 3905 of SEQ ID NO: 585652
uuggcuuacuguuaacauu

SEQ ID NO: 656865 - RNA, 19 nt, Artificial Sequence
  Description of Artificial Sequence: Synthetic oligonucleotide
  Antisense strand to SEQ ID NO: 656864
aauguuaacaguaagccaa

SEQ ID NO: 656866 - RNA, 19 nt, Artificial Sequence
  Description of Artificial Sequence: Synthetic oligonucleotide
  Sense strand starting at position 84 of SEQ ID NO: 585653
aaguauugacacugcuaag

SEQ ID NO: 656867 - RNA, 19 nt, Artificial Sequence
  Description of Artificial Sequence: Synthetic oligonucleotide
  Antisense strand to SEQ ID NO: 656866
cuuagcagugucaauacuu

SEQ ID NO: 656868 - RNA, 19 nt, Artificial Sequence
  Description of Artificial Sequence: Synthetic oligonucleotide
  Sense strand starting at position 270 of SEQ ID NO: 585653
ugaagacaacgcuaguguu

SEQ ID NO: 656869 - RNA, 19 nt, Artificial Sequence
  Description of Artificial Sequence: Synthetic oligonucleotide
  Antisense strand to SEQ ID NO: 656868
aacacuagcguugucuuca

SEQ ID NO: 656870 - RNA, 19 nt, Artificial Sequence
  Description of Artificial Sequence: Synthetic oligonucleotide
  Sense strand starting at position 391 of SEQ ID NO: 585653
auaucauuagcauggcaca

SEQ ID NO: 656871 - RNA, 19 nt, Artificial Sequence
  Description of Artificial Sequence: Synthetic oligonucleotide
  Antisense strand to SEQ ID NO: 656870
ugugccaugcuaaugauau

SEQ ID NO: 656872 - RNA, 19 nt, Artificial Sequence
  Description of Artificial Sequence: Synthetic oligonucleotide
  Sense strand starting at position 571 of SEQ ID NO: 585653
ucaguauguccagaucaca

SEQ ID NO: 656873 - RNA, 19 nt, Artificial Sequence
  Description of Artificial Sequence: Synthetic oligonucleotide
  Antisense strand to SEQ ID NO: 656872
ugugaucuggacauacuga

SEQ ID NO: 656874 - RNA, 19 nt, Artificial Sequence
  Description of Artificial Sequence: Synthetic oligonucleotide
  Sense strand starting at position 667 of SEQ ID NO: 585653
uuacuucuacuagagcagu

SEQ ID NO: 656875 - RNA, 19 nt, Artificial Sequence
  Description of Artificial Sequence: Synthetic oligonucleotide
  Antisense strand to SEQ ID NO: 656874
acugcucuaguagaaguaa

SEQ ID NO: 656876 - RNA, 19 nt, Artificial Sequence
  Description of Artificial Sequence: Synthetic oligonucleotide
  Sense strand starting at position 670 of SEQ ID NO: 585653
cuucuacuagagcaguuaa

SEQ ID NO: 656877 - RNA, 19 nt, Artificial Sequence
  Description of Artificial Sequence: Synthetic oligonucleotide
  Antisense strand to SEQ ID NO: 656876
uuaacugcucuaguagaag

SEQ ID NO: 656878 - RNA, 19 nt, Artificial Sequence
  Description of Artificial Sequence: Synthetic oligonucleotide
  Sense strand starting at position 912 of SEQ ID NO: 585653
uguugaauggauugcugaa

SEQ ID NO: 656879 - RNA, 19 nt, Artificial Sequence
  Description of Artificial Sequence: Synthetic oligonucleotide
  Antisense strand to SEQ ID NO: 656878
uucagcaauccauucaaca

SEQ ID NO: 656880 - RNA, 19 nt, Artificial Sequence
  Description of Artificial Sequence: Synthetic oligonucleotide
  Sense strand starting at position 919 of SEQ ID NO: 585653
uggauugcugaaugaagga

SEQ ID NO: 656881 - RNA, 19 nt, Artificial Sequence
  Description of Artificial Sequence: Synthetic oligonucleotide
  Antisense strand to SEQ ID NO: 656880
uccuucauucagcaaucca

SEQ ID NO: 656882 - RNA, 19 nt, Artificial Sequence
  Description of Artificial Sequence: Synthetic oligonucleotide
  Sense strand starting at position 1169 of SEQ ID NO: 585653
ccaucuuggucaccuuaga

SEQ ID NO: 656883 - RNA, 19 nt, Artificial Sequence
  Description of Artificial Sequence: Synthetic oligonucleotide
  Antisense strand to SEQ ID NO: 656882
ucuaaggugaccaagaugg

SEQ ID NO: 656884 - RNA, 19 nt, Artificial Sequence
  Description of Artificial Sequence: Synthetic oligonucleotide
  Sense strand starting at position 1316 of SEQ ID NO: 585653
uggcaauuccugggugaug

SEQ ID NO: 656885 - RNA, 19 nt, Artificial Sequence
  Description of Artificial Sequence: Synthetic oligonucleotide
  Antisense strand to SEQ ID NO: 656884
caucacccaggaauugcca

SEQ ID NO: 656886 - RNA, 19 nt, Artificial Sequence
  Description of Artificial Sequence: Synthetic oligonucleotide
  Sense strand starting at position 1442 of SEQ ID NO: 585653
augaaagucaggugauguu

SEQ ID NO: 656887 - RNA, 19 nt, Artificial Sequence
  Description of Artificial Sequence: Synthetic oligonucleotide
  Antisense strand to SEQ ID NO: 656886
aacaucaccugacuuucau

SEQ ID NO: 656888 - RNA, 19 nt, Artificial Sequence
  Description of Artificial Sequence: Synthetic oligonucleotide
  Sense strand starting at position 1502 of SEQ ID NO: 585653
uuacgaucccaagaguuaa

SEQ ID NO: 656889 - RNA, 19 nt, Artificial Sequence
  Description of Artificial Sequence: Synthetic oligonucleotide
  Antisense strand to SEQ ID NO: 656888
uuaacucuugggaucguaa

SEQ ID NO: 656890 - RNA, 19 nt, Artificial Sequence
  Description of Artificial Sequence: Synthetic oligonucleotide
  Sense strand starting at position 1537 of SEQ ID NO: 585653
gucugcaauccugaacuua

SEQ ID NO: 656891 - RNA, 19 nt, Artificial Sequence
  Description of Artificial Sequence: Synthetic oligonucleotide
  Antisense strand to SEQ ID NO: 656890
uaaguucaggauugcagac

SEQ ID NO: 656892 - RNA, 19 nt, Artificial Sequence
  Description of Artificial Sequence: Synthetic oligonucleotide
  Sense strand starting at position 1568 of SEQ ID NO: 585653
guagguucuggcuaaauga

SEQ ID NO: 656893 - RNA, 19 nt, Artificial Sequence
  Description of Artificial Sequence: Synthetic oligonucleotide
  Antisense strand to SEQ ID NO: 656892
ucauuuagccagaaccuac

SEQ ID NO: 656894 - RNA, 19 nt, Artificial Sequence
  Description of Artificial Sequence: Synthetic oligonucleotide
  Sense strand starting at position 1576 of SEQ ID NO: 585653
uggcuaaaugagggucuua

SEQ ID NO: 656895 - RNA, 19 nt, Artificial Sequence
  Description of Artificial Sequence: Synthetic oligonucleotide
  Antisense strand to SEQ ID NO: 656894
uaagacccucauuuagcca

SEQ ID NO: 656896 - RNA, 19 nt, Artificial Sequence
  Description of Artificial Sequence: Synthetic oligonucleotide
  Sense strand starting at position 1585 of SEQ ID NO: 585653
gagggucuuacuugaugga

SEQ ID NO: 656897 - RNA, 19 nt, Artificial Sequence
  Description of Artificial Sequence: Synthetic oligonucleotide
  Antisense strand to SEQ ID NO: 656896
uccaucaaguaagacccuc

SEQ ID NO: 656898 - RNA, 19 nt, Artificial Sequence
  Description of Artificial Sequence: Synthetic oligonucleotide
  Sense strand starting at position 1617 of SEQ ID NO: 585653
cucacuuccucuguuauga

SEQ ID NO: 656899 - RNA, 19 nt, Artificial Sequence
  Description of Artificial Sequence: Synthetic oligonucleotide
  Antisense strand to SEQ ID NO: 656898
ucauaacagaggaagugag

SEQ ID NO: 656900 - RNA, 19 nt, Artificial Sequence
  Description of Artificial Sequence: Synthetic oligonucleotide
  Sense strand starting at position 1627 of SEQ ID NO: 585653
cuguuaugacucugggaaa

SEQ ID NO: 656901 - RNA, 19 nt, Artificial Sequence
  Description of Artificial Sequence: Synthetic oligonucleotide
  Antisense strand to SEQ ID NO: 656900
uuucccagagucauaacag

SEQ ID NO: 656902 - RNA, 19 nt, Artificial Sequence
  Description of Artificial Sequence: Synthetic oligonucleotide
  Sense strand starting at position 2099 of SEQ ID NO: 585653
cugggaauucaagguguuc

SEQ ID NO: 656903 - RNA, 19 nt, Artificial Sequence
  Description of Artificial Sequence: Synthetic oligonucleotide
  Antisense strand to SEQ ID NO: 656902
gaacaccuugaauucccag

SEQ ID NO: 656904 - RNA, 19 nt, Artificial Sequence
  Description of Artificial Sequence: Synthetic oligonucleotide
  Sense strand starting at position 2200 of SEQ ID NO: 585653
uguggagucgguagcuuua

SEQ ID NO: 656905 - RNA, 19 nt, Artificial Sequence
  Description of Artificial Sequence: Synthetic oligonucleotide
  Antisense strand to SEQ ID NO: 656904
uaaagcuaccgacuccaca

SEQ ID NO: 656906 - RNA, 19 nt, Artificial Sequence
  Description of Artificial Sequence: Synthetic oligonucleotide
  Sense strand starting at position 2538 of SEQ ID NO: 585653
guuaguuugcccgucuaca

SEQ ID NO: 656907 - RNA, 19 nt, Artificial Sequence
  Description of Artificial Sequence: Synthetic oligonucleotide
  Antisense strand to SEQ ID NO: 656906
uguagacgggcaaacuaac

SEQ ID NO: 656908 - RNA, 19 nt, Artificial Sequence
  Description of Artificial Sequence: Synthetic oligonucleotide
  Sense strand starting at position 2636 of SEQ ID NO: 585653
cggcaaugccucgcacaga

SEQ ID NO: 656909 - RNA, 19 nt, Artificial Sequence
  Description of Artificial Sequence: Synthetic oligonucleotide
  Antisense strand to SEQ ID NO: 656908
ucugugcgaggcauugccg

SEQ ID NO: 656910 - RNA, 19 nt, Artificial Sequence
  Description of Artificial Sequence: Synthetic oligonucleotide
  Sense strand starting at position 2665 of SEQ ID NO: 585653
agcugaauuaucuguggaa

SEQ ID NO: 656911 - RNA, 19 nt, Artificial Sequence
  Description of Artificial Sequence: Synthetic oligonucleotide
  Antisense strand to SEQ ID NO: 656910
uuccacagauaauucagcu

SEQ ID NO: 656912 - RNA, 19 nt, Artificial Sequence
  Description of Artificial Sequence: Synthetic oligonucleotide
  Sense strand starting at position 2666 of SEQ ID NO: 585653
gcugaauuaucuguggaau

SEQ ID NO: 656913 - RNA, 19 nt, Artificial Sequence
  Description of Artificial Sequence: Synthetic oligonucleotide
  Antisense strand to SEQ ID NO: 656912
auuccacagauaauucagc

SEQ ID NO: 656914 - RNA, 19 nt, Artificial Sequence
  Description of Artificial Sequence: Synthetic oligonucleotide
  Sense strand starting at position 2667 of SEQ ID NO: 585653
cugaauuaucuguggaaug

SEQ ID NO: 656915 - RNA, 19 nt, Artificial Sequence
  Description of Artificial Sequence: Synthetic oligonucleotide
  Antisense strand to SEQ ID NO: 656914
cauuccacagauaauucag

SEQ ID NO: 656916 - RNA, 19 nt, Artificial Sequence
  Description of Artificial Sequence: Synthetic oligonucleotide
  Sense strand starting at position 2672 of SEQ ID NO: 585653
uuaucuguggaaugaacua

SEQ ID NO: 656917 - RNA, 19 nt, Artificial Sequence
  Description of Artificial Sequence: Synthetic oligonucleotide
  Antisense strand to SEQ ID NO: 656916
uaguucauuccacagauaa

SEQ ID NO: 656918 - RNA, 19 nt, Artificial Sequence
  Description of Artificial Sequence: Synthetic oligonucleotide
  Sense strand starting at position 2718 of SEQ ID NO: 585653
ggaaucgcucugcaaucua

SEQ ID NO: 656919 - RNA, 19 nt, Artificial Sequence
  Description of Artificial Sequence: Synthetic oligonucleotide
  Antisense strand to SEQ ID NO: 656918
uagauugcagagcgauucc

SEQ ID NO: 656920 - RNA, 19 nt, Artificial Sequence
  Description of Artificial Sequence: Synthetic oligonucleotide
  Sense strand starting at position 2725 of SEQ ID NO: 585653
cucugcaaucuacaggaau

SEQ ID NO: 656921 - RNA, 19 nt, Artificial Sequence
  Description of Artificial Sequence: Synthetic oligonucleotide
  Antisense strand to SEQ ID NO: 656920
auuccuguagauugcagag

SEQ ID NO: 656922 - RNA, 19 nt, Artificial Sequence
  Description of Artificial Sequence: Synthetic oligonucleotide
  Sense strand starting at position 2874 of SEQ ID NO: 585653
aguucuccgcugucuguaa

SEQ ID NO: 656923 - RNA, 19 nt, Artificial Sequence
  Description of Artificial Sequence: Synthetic oligonucleotide
  Antisense strand to SEQ ID NO: 656922
uuacagacagcggagaacu

SEQ ID NO: 656924 - RNA, 19 nt, Artificial Sequence
  Description of Artificial Sequence: Synthetic oligonucleotide
  Sense strand starting at position 2950 of SEQ ID NO: 585653
uacaaaugugcuggaauga

SEQ ID NO: 656925 - RNA, 19 nt, Artificial Sequence
  Description of Artificial Sequence: Synthetic oligonucleotide
  Antisense strand to SEQ ID NO: 656924
ucauuccagcacauuugua

SEQ ID NO: 656926 - RNA, 19 nt, Artificial Sequence
  Description of Artificial Sequence: Synthetic oligonucleotide
  Sense strand starting at position 2997 of SEQ ID NO: 585653
ucaaaugaaugcuuugaaa

SEQ ID NO: 656927 - RNA, 19 nt, Artificial Sequence
  Description of Artificial Sequence: Synthetic oligonucleotide
  Antisense strand to SEQ ID NO: 656926
uuucaaagcauucauuuga

SEQ ID NO: 656928 - RNA, 19 nt, Artificial Sequence
  Description of Artificial Sequence: Synthetic oligonucleotide
  Sense strand starting at position 3034 of SEQ ID NO: 585653
ugcaaaguacauugaaaca

SEQ ID NO: 656929 - RNA, 19 nt, Artificial Sequence
  Description of Artificial Sequence: Synthetic oligonucleotide
  Antisense strand to SEQ ID NO: 656928
uguuucaauguacuuugca

SEQ ID NO: 656930 - RNA, 19 nt, Artificial Sequence
  Description of Artificial Sequence: Synthetic oligonucleotide
  Sense strand starting at position 3098 of SEQ ID NO: 585653
uggcacugacuuuauauca

SEQ ID NO: 656931 - RNA, 19 nt, Artificial Sequence
  Description of Artificial Sequence: Synthetic oligonucleotide
  Antisense strand to SEQ ID NO: 656930
ugauauaaagucagugcca

SEQ ID NO: 656932 - RNA, 19 nt, Artificial Sequence
  Description of Artificial Sequence: Synthetic oligonucleotide
  Sense strand starting at position 3661 of SEQ ID NO: 585653
aauacaucacgugguccaa

SEQ ID NO: 656933 - RNA, 19 nt, Artificial Sequence
  Description of Artificial Sequence: Synthetic oligonucleotide
  Antisense strand to SEQ ID NO: 656932
uuggaccacgugauguauu

SEQ ID NO: 656934 - RNA, 19 nt, Artificial Sequence
  Description of Artificial Sequence: Synthetic oligonucleotide
  Sense strand starting at position 3665 of SEQ ID NO: 585653
caucacgugguccaaagaa

SEQ ID NO: 656935 - RNA, 19 nt, Artificial Sequence
  Description of Artificial Sequence: Synthetic oligonucleotide
  Antisense strand to SEQ ID NO: 656934
uucuuuggaccacgugaug

SEQ ID NO: 656936 - RNA, 19 nt, Artificial Sequence
  Description of Artificial Sequence: Synthetic oligonucleotide
  Sense strand starting at position 3747 of SEQ ID NO: 585653
ugaauaucuuaucucugga

SEQ ID NO: 656937 - RNA, 19 nt, Artificial Sequence
  Description of Artificial Sequence: Synthetic oligonucleotide
  Antisense strand to SEQ ID NO: 656936
uccagagauaagauauuca

SEQ ID NO: 656938 - RNA, 19 nt, Artificial Sequence
  Description of Artificial Sequence: Synthetic oligonucleotide
  Sense strand starting at position 3750 of SEQ ID NO: 585653
auaucuuaucucuggauag

SEQ ID NO: 656939 - RNA, 19 nt, Artificial Sequence
  Description of Artificial Sequence: Synthetic oligonucleotide
  Antisense strand to SEQ ID NO: 656938
cuauccagagauaagauau

SEQ ID NO: 656940 - RNA, 19 nt, Artificial Sequence
  Description of Artificial Sequence: Synthetic oligonucleotide
  Sense strand starting at position 3752 of SEQ ID NO: 585653
aucuuaucucuggauagca

SEQ ID NO: 656941 - RNA, 19 nt, Artificial Sequence
  Description of Artificial Sequence: Synthetic oligonucleotide
  Antisense strand to SEQ ID NO: 656940
ugcuauccagagauaagau

SEQ ID NO: 656942 - RNA, 19 nt, Artificial Sequence
  Description of Artificial Sequence: Synthetic oligonucleotide
  Sense strand starting at position 3754 of SEQ ID NO: 585653
cuuaucucuggauagcaaa

SEQ ID NO: 656943 - RNA, 19 nt, Artificial Sequence
  Description of Artificial Sequence: Synthetic oligonucleotide
  Antisense strand to SEQ ID NO: 656942
uuugcuauccagagauaag

SEQ ID NO: 656944 - RNA, 19 nt, Artificial Sequence
  Description of Artificial Sequence: Synthetic oligonucleotide
  Sense strand starting at position 3918 of SEQ ID NO: 585653
gguuaaugccaucaggaua

SEQ ID NO: 656945 - RNA, 19 nt, Artificial Sequence
  Description of Artificial Sequence: Synthetic oligonucleotide
  Antisense strand to SEQ ID NO: 656944
uauccugauggcauuaacc

SEQ ID NO: 656946 - RNA, 19 nt, Artificial Sequence
  Description of Artificial Sequence: Synthetic oligonucleotide
  Sense strand starting at position 62 of SEQ ID NO: 585654
aguucuccgcugucuguaa

SEQ ID NO: 656947 - RNA, 19 nt, Artificial Sequence
  Description of Artificial Sequence: Synthetic oligonucleotide
  Antisense strand to SEQ ID NO: 656946
uuacagacagcggagaacu

SEQ ID NO: 656948 - RNA, 19 nt, Artificial Sequence
  Description of Artificial Sequence: Synthetic oligonucleotide
  Sense strand starting at position 138 of SEQ ID NO: 585654
uacaaaugugcuggaauga

SEQ ID NO: 656949 - RNA, 19 nt, Artificial Sequence
  Description of Artificial Sequence: Synthetic oligonucleotide
  Antisense strand to SEQ ID NO: 656948
ucauuccagcacauuugua

SEQ ID NO: 656950 - RNA, 19 nt, Artificial Sequence
  Description of Artificial Sequence: Synthetic oligonucleotide
  Sense strand starting at position 185 of SEQ ID NO: 585654
ucaaaugaaugcuuugaaa

SEQ ID NO: 656951 - RNA, 19 nt, Artificial Sequence
  Description of Artificial Sequence: Synthetic oligonucleotide
  Antisense strand to SEQ ID NO: 656950
uuucaaagcauucauuuga

SEQ ID NO: 656952 - RNA, 19 nt, Artificial Sequence
  Description of Artificial Sequence: Synthetic oligonucleotide
  Sense strand starting at position 222 of SEQ ID NO: 585654
ugcaaaguacauugaaaca

SEQ ID NO: 656953 - RNA, 19 nt, Artificial Sequence
  Description of Artificial Sequence: Synthetic oligonucleotide
  Antisense strand to SEQ ID NO: 656952
uguuucaauguacuuugca

SEQ ID NO: 656954 - RNA, 19 nt, Artificial Sequence
  Description of Artificial Sequence: Synthetic oligonucleotide
  Sense strand starting at position 286 of SEQ ID NO: 585654
uggcacugacuuuauauca

SEQ ID NO: 656955 - RNA, 19 nt, Artificial Sequence
  Description of Artificial Sequence: Synthetic oligonucleotide
  Antisense strand to SEQ ID NO: 656954
ugauauaaagucagugcca

SEQ ID NO: 656956 - RNA, 19 nt, Artificial Sequence
  Description of Artificial Sequence: Synthetic oligonucleotide
  Sense strand starting at position 849 of SEQ ID NO: 585654
aauacaucacgugguccaa

SEQ ID NO: 656957 - RNA, 19 nt, Artificial Sequence
  Description of Artificial Sequence: Synthetic oligonucleotide
  Antisense strand to SEQ ID NO: 656956
uuggaccacgugauguauu

SEQ ID NO: 656958 - RNA, 19 nt, Artificial Sequence
  Description of Artificial Sequence: Synthetic oligonucleotide
  Sense strand starting at position 853 of SEQ ID NO: 585654
caucacgugguccaaagaa

SEQ ID NO: 656959 - RNA, 19 nt, Artificial Sequence
  Description of Artificial Sequence: Synthetic oligonucleotide
  Antisense strand to SEQ ID NO: 656958
uucuuuggaccacgugaug

SEQ ID NO: 656960 - RNA, 19 nt, Artificial Sequence
  Description of Artificial Sequence: Synthetic oligonucleotide
  Sense strand starting at position 935 of SEQ ID NO: 585654
ugaauaucuuaucucugga

SEQ ID NO: 656961 - RNA, 19 nt, Artificial Sequence
  Description of Artificial Sequence: Synthetic oligonucleotide
  Antisense strand to SEQ ID NO: 656960
uccagagauaagauauuca

SEQ ID NO: 656962 - RNA, 19 nt, Artificial Sequence
  Description of Artificial Sequence: Synthetic oligonucleotide
  Sense strand starting at position 938 of SEQ ID NO: 585654
auaucuuaucucuggauag

SEQ ID NO: 656963 - RNA, 19 nt, Artificial Sequence
  Description of Artificial Sequence: Synthetic oligonucleotide
  Antisense strand to SEQ ID NO: 656962
cuauccagagauaagauau

SEQ ID NO: 656964 - RNA, 19 nt, Artificial Sequence
  Description of Artificial Sequence: Synthetic oligonucleotide
  Sense strand starting at position 940 of SEQ ID NO: 585654
aucuuaucucuggauagca

SEQ ID NO: 656965 - RNA, 19 nt, Artificial Sequence
  Description of Artificial Sequence: Synthetic oligonucleotide
  Antisense strand to SEQ ID NO: 656964
ugcuauccagagauaagau

SEQ ID NO: 656966 - RNA, 19 nt, Artificial Sequence
  Description of Artificial Sequence: Synthetic oligonucleotide
  Sense strand starting at position 942 of SEQ ID NO: 585654
cuuaucucuggauagcaaa

SEQ ID NO: 656967 - RNA, 19 nt, Artificial Sequence
  Description of Artificial Sequence: Synthetic oligonucleotide
  Antisense strand to SEQ ID NO: 656966
uuugcuauccagagauaag

SEQ ID NO: 656968 - RNA, 19 nt, Artificial Sequence
  Description of Artificial Sequence: Synthetic oligonucleotide
  Sense strand starting at position 1106 of SEQ ID NO: 585654
gguuaaugccaucaggaua

SEQ ID NO: 656969 - RNA, 19 nt, Artificial Sequence
  Description of Artificial Sequence: Synthetic oligonucleotide
  Antisense strand to SEQ ID NO: 656968
uauccugauggcauuaacc

SEQ ID NO: 656970 - RNA, 19 nt, Artificial Sequence
  Description of Artificial Sequence: Synthetic oligonucleotide
  Sense strand starting at position 1431 of SEQ ID NO: 585654
uuaagaacuucuguaguag

SEQ ID NO: 656971 - RNA, 19 nt, Artificial Sequence
  Description of Artificial Sequence: Synthetic oligonucleotide
  Antisense strand to SEQ ID NO: 656970
cuacuacagaaguucuuaa

SEQ ID NO: 656972 - RNA, 19 nt, Artificial Sequence
  Description of Artificial Sequence: Synthetic oligonucleotide
  Sense strand starting at position 1443 of SEQ ID NO: 585654
guaguagagggauguuaau

SEQ ID NO: 656973 - RNA, 19 nt, Artificial Sequence
  Description of Artificial Sequence: Synthetic oligonucleotide
  Antisense strand to SEQ ID NO: 656972
auuaacaucccucuacuac

SEQ ID NO: 656974 - RNA, 19 nt, Artificial Sequence
  Description of Artificial Sequence: Synthetic oligonucleotide
  Sense strand starting at position 1449 of SEQ ID NO: 585654
gagggauguuaauuagguc

SEQ ID NO: 656975 - RNA, 19 nt, Artificial Sequence
  Description of Artificial Sequence: Synthetic oligonucleotide
  Antisense strand to SEQ ID NO: 656974
gaccuaauuaacaucccuc

SEQ ID NO: 656976 - RNA, 19 nt, Artificial Sequence
  Description of Artificial Sequence: Synthetic oligonucleotide
  Sense strand starting at position 1456 of SEQ ID NO: 585654
guuaauuaggucuaugaac

SEQ ID NO: 656977 - RNA, 19 nt, Artificial Sequence
  Description of Artificial Sequence: Synthetic oligonucleotide
  Antisense strand to SEQ ID NO: 656976
guucauagaccuaauuaac

SEQ ID NO: 656978 - RNA, 19 nt, Artificial Sequence
  Description of Artificial Sequence: Synthetic oligonucleotide
  Sense strand starting at position 1555 of SEQ ID NO: 585654
accauauguggcuaguuaa

SEQ ID NO: 656979 - RNA, 19 nt, Artificial Sequence
  Description of Artificial Sequence: Synthetic oligonucleotide
  Antisense strand to SEQ ID NO: 656978
uuaacuagccacauauggu

SEQ ID NO: 656980 - RNA, 19 nt, Artificial Sequence
  Description of Artificial Sequence: Synthetic oligonucleotide
  Sense strand starting at position 1558 of SEQ ID NO: 585654
auauguggcuaguuaagaa

SEQ ID NO: 656981 - RNA, 19 nt, Artificial Sequence
  Description of Artificial Sequence: Synthetic oligonucleotide
  Antisense strand to SEQ ID NO: 656980
uucuuaacuagccacauau

SEQ ID NO: 656982 - RNA, 19 nt, Artificial Sequence
  Description of Artificial Sequence: Synthetic oligonucleotide
  Sense strand starting at position 1595 of SEQ ID NO: 585654
uuaagcuuucuuuggauga

SEQ ID NO: 656983 - RNA, 19 nt, Artificial Sequence
  Description of Artificial Sequence: Synthetic oligonucleotide
  Antisense strand to SEQ ID NO: 656982
ucauccaaagaaagcuuaa

SEQ ID NO: 656984 - RNA, 19 nt, Artificial Sequence
  Description of Artificial Sequence: Synthetic oligonucleotide
  Sense strand starting at position 1878 of SEQ ID NO: 585654
gucacuaccucacugugaa

SEQ ID NO: 656985 - RNA, 19 nt, Artificial Sequence
  Description of Artificial Sequence: Synthetic oligonucleotide
  Antisense strand to SEQ ID NO: 656984
uucacagugagguagugac

SEQ ID NO: 656986 - RNA, 19 nt, Artificial Sequence
  Description of Artificial Sequence: Synthetic oligonucleotide
  Sense strand starting at position 2584 of SEQ ID NO: 585654
uguugaauacugugagaga

SEQ ID NO: 656987 - RNA, 19 nt, Artificial Sequence
  Description of Artificial Sequence: Synthetic oligonucleotide
  Antisense strand to SEQ ID NO: 656986
ucucucacaguauucaaca

SEQ ID NO: 656988 - RNA, 19 nt, Artificial Sequence
  Description of Artificial Sequence: Synthetic oligonucleotide
  Sense strand starting at position 2636 of SEQ ID NO: 585654
uuaaacagaugguuugaau

SEQ ID NO: 656989 - RNA, 19 nt, Artificial Sequence
  Description of Artificial Sequence: Synthetic oligonucleotide
  Antisense strand to SEQ ID NO: 656988
auucaaaccaucuguuuaa

SEQ ID NO: 656990 - RNA, 19 nt, Artificial Sequence
  Description of Artificial Sequence: Synthetic oligonucleotide
  Sense strand starting at position 2746 of SEQ ID NO: 585654
uguaauaaagcacagagua

SEQ ID NO: 656991 - RNA, 19 nt, Artificial Sequence
  Description of Artificial Sequence: Synthetic oligonucleotide
  Antisense strand to SEQ ID NO: 656990
uacucugugcuuuauuaca

SEQ ID NO: 656992 - RNA, 19 nt, Artificial Sequence
  Description of Artificial Sequence: Synthetic oligonucleotide
  Sense strand starting at position 2914 of SEQ ID NO: 585654
acuuacagcugagaauuua

SEQ ID NO: 656993 - RNA, 19 nt, Artificial Sequence
  Description of Artificial Sequence: Synthetic oligonucleotide
  Antisense strand to SEQ ID NO: 656992
uaaauucucagcuguaagu

SEQ ID NO: 656994 - RNA, 19 nt, Artificial Sequence
  Description of Artificial Sequence: Synthetic oligonucleotide
  Sense strand starting at position 2944 of SEQ ID NO: 585654
ugguaaaucuaagugagug

SEQ ID NO: 656995 - RNA, 19 nt, Artificial Sequence
  Description of Artificial Sequence: Synthetic oligonucleotide
  Antisense strand to SEQ ID NO: 656994
cacucacuuagauuuacca

SEQ ID NO: 656996 - RNA, 19 nt, Artificial Sequence
  Description of Artificial Sequence: Synthetic oligonucleotide
  Sense strand starting at position 2946 of SEQ ID NO: 585654
guaaaucuaagugaguguu

SEQ ID NO: 656997 - RNA, 19 nt, Artificial Sequence
  Description of Artificial Sequence: Synthetic oligonucleotide
  Antisense strand to SEQ ID NO: 656996
aacacucacuuagauuuac

SEQ ID NO: 656998 - RNA, 19 nt, Artificial Sequence
  Description of Artificial Sequence: Synthetic oligonucleotide
  Sense strand starting at position 3018 of SEQ ID NO: 585654
uucuuuacugaguaagcau

SEQ ID NO: 656999 - RNA, 19 nt, Artificial Sequence
  Description of Artificial Sequence: Synthetic oligonucleotide
  Antisense strand to SEQ ID NO: 656998
augcuuacucaguaaagaa

SEQ ID NO: 657000 - RNA, 19 nt, Artificial Sequence
  Description of Artificial Sequence: Synthetic oligonucleotide
  Sense strand starting at position 3038 of SEQ ID NO: 585654
cuguaaauucuagguccua

SEQ ID NO: 657001 - RNA, 19 nt, Artificial Sequence
  Description of Artificial Sequence: Synthetic oligonucleotide
  Antisense strand to SEQ ID NO: 657000
uaggaccuagaauuuacag

SEQ ID NO: 657002 - RNA, 19 nt, Artificial Sequence
  Description of Artificial Sequence: Synthetic oligonucleotide
  Sense strand starting at position 3080 of SEQ ID NO: 585654
cagagaacaugagguauuu

SEQ ID NO: 657003 - RNA, 19 nt, Artificial Sequence
  Description of Artificial Sequence: Synthetic oligonucleotide
  Antisense strand to SEQ ID NO: 657002
aaauaccucauguucucug

SEQ ID NO: 657004 - RNA, 19 nt, Artificial Sequence
  Description of Artificial Sequence: Synthetic oligonucleotide
  Sense strand starting at position 3184 of SEQ ID NO: 585654
cggaguuggcugggaaaca

SEQ ID NO: 657005 - RNA, 19 nt, Artificial Sequence
  Description of Artificial Sequence: Synthetic oligonucleotide
  Antisense strand to SEQ ID NO: 657004
uguuucccagccaacuccg

SEQ ID NO: 657006 - RNA, 19 nt, Artificial Sequence
  Description of Artificial Sequence: Synthetic oligonucleotide
  Sense strand starting at position 3340 of SEQ ID NO: 585654
cauuauuugguguguucca

SEQ ID NO: 657007 - RNA, 19 nt, Artificial Sequence
  Description of Artificial Sequence: Synthetic oligonucleotide
  Antisense strand to SEQ ID NO: 657006
uggaacacaccaaauaaug

SEQ ID NO: 657008 - RNA, 19 nt, Artificial Sequence
  Description of Artificial Sequence: Synthetic oligonucleotide
  Sense strand starting at position 3347 of SEQ ID NO: 585654
ugguguguuccagaaauag

SEQ ID NO: 657009 - RNA, 19 nt, Artificial Sequence
  Description of Artificial Sequence: Synthetic oligonucleotide
  Antisense strand to SEQ ID NO: 657008
cuauuucuggaacacacca

SEQ ID NO: 657010 - RNA, 19 nt, Artificial Sequence
  Description of Artificial Sequence: Synthetic oligonucleotide
  Sense strand starting at position 3600 of SEQ ID NO: 585654
aggaaaggcuggcuaagaa

SEQ ID NO: 657011 - RNA, 19 nt, Artificial Sequence
  Description of Artificial Sequence: Synthetic oligonucleotide
  Antisense strand to SEQ ID NO: 657010
uucuuagccagccuuuccu

SEQ ID NO: 657012 - RNA, 19 nt, Artificial Sequence
  Description of Artificial Sequence: Synthetic oligonucleotide
  Sense strand starting at position 3612 of SEQ ID NO: 585654
cuaagaauguggccaugaa

SEQ ID NO: 657013 - RNA, 19 nt, Artificial Sequence
  Description of Artificial Sequence: Synthetic oligonucleotide
  Antisense strand to SEQ ID NO: 657012
uucauggccacauucuuag

SEQ ID NO: 657014 - RNA, 19 nt, Artificial Sequence
  Description of Artificial Sequence: Synthetic oligonucleotide
  Sense strand starting at position 3656 of SEQ ID NO: 585654
uuuagucaugucuaucuuu

SEQ ID NO: 657015 - RNA, 19 nt, Artificial Sequence
  Description of Artificial Sequence: Synthetic oligonucleotide
  Antisense strand to SEQ ID NO: 657014
aaagauagacaugacuaaa

SEQ ID NO: 657016 - RNA, 19 nt, Artificial Sequence
  Description of Artificial Sequence: Synthetic oligonucleotide
  Sense strand starting at position 3697 of SEQ ID NO: 585654
auggaaggcuaaucuuaau

SEQ ID NO: 657017 - RNA, 19 nt, Artificial Sequence
  Description of Artificial Sequence: Synthetic oligonucleotide
  Antisense strand to SEQ ID NO: 657016
auuaagauuagccuuccau

SEQ ID NO: 657018 - RNA, 19 nt, Artificial Sequence
  Description of Artificial Sequence: Synthetic oligonucleotide
  Sense strand starting at position 3797 of SEQ ID NO: 585654
gucccacaccuaugaggaa

SEQ ID NO: 657019 - RNA, 19 nt, Artificial Sequence
  Description of Artificial Sequence: Synthetic oligonucleotide
  Antisense strand to SEQ ID NO: 657018
uuccucauaggugugggac

SEQ ID NO: 657020 - RNA, 19 nt, Artificial Sequence
  Description of Artificial Sequence: Synthetic oligonucleotide
  Sense strand starting at position 3838 of SEQ ID NO: 585654
cguacaaaucaauggaaga

SEQ ID NO: 657021 - RNA, 19 nt, Artificial Sequence
  Description of Artificial Sequence: Synthetic oligonucleotide
  Antisense strand to SEQ ID NO: 657020
ucuuccauugauuuguacg

SEQ ID NO: 657022 - RNA, 19 nt, Artificial Sequence
  Description of Artificial Sequence: Synthetic oligonucleotide
  Sense strand starting at position 3872 of SEQ ID NO: 585654
cuaaauggugcugggacaa

SEQ ID NO: 657023 - RNA, 19 nt, Artificial Sequence
  Description of Artificial Sequence: Synthetic oligonucleotide
  Antisense strand to SEQ ID NO: 657022
uugucccagcaccauuuag

SEQ ID NO: 657024 - RNA, 19 nt, Artificial Sequence
  Description of Artificial Sequence: Synthetic oligonucleotide
  Sense strand starting at position 3884 of SEQ ID NO: 585654
gggacaauuggcugucuau

SEQ ID NO: 657025 - RNA, 19 nt, Artificial Sequence
  Description of Artificial Sequence: Synthetic oligonucleotide
  Antisense strand to SEQ ID NO: 657024
auagacagccaauuguccc

SEQ ID NO: 657026 - RNA, 19 nt, Artificial Sequence
  Description of Artificial Sequence: Synthetic oligonucleotide
  Sense strand starting at position 84 of SEQ ID NO: 585655
cugaucuuugcugaagguu

SEQ ID NO: 657027 - RNA, 19 nt, Artificial Sequence
  Description of Artificial Sequence: Synthetic oligonucleotide
  Antisense strand to SEQ ID NO: 657026
aaccuucagcaaagaucag

SEQ ID NO: 657028 - RNA, 19 nt, Artificial Sequence
  Description of Artificial Sequence: Synthetic oligonucleotide
  Sense strand starting at position 412 of SEQ ID NO: 585655
uaguguaggaagugacuaa

SEQ ID NO: 657029 - RNA, 19 nt, Artificial Sequence
  Description of Artificial Sequence: Synthetic oligonucleotide
  Antisense strand to SEQ ID NO: 657028
uuagucacuuccuacacua

SEQ ID NO: 657030 - RNA, 19 nt, Artificial Sequence
  Description of Artificial Sequence: Synthetic oligonucleotide
  Sense strand starting at position 460 of SEQ ID NO: 585655
uugagaugauuccuauuau

SEQ ID NO: 657031 - RNA, 19 nt, Artificial Sequence
  Description of Artificial Sequence: Synthetic oligonucleotide
  Antisense strand to SEQ ID NO: 657030
auaauaggaaucaucucaa

SEQ ID NO: 657032 - RNA, 19 nt, Artificial Sequence
  Description of Artificial Sequence: Synthetic oligonucleotide
  Sense strand starting at position 588 of SEQ ID NO: 585655
gugcuuuguagauagagga

SEQ ID NO: 657033 - RNA, 19 nt, Artificial Sequence
  Description of Artificial Sequence: Synthetic oligonucleotide
  Antisense strand to SEQ ID NO: 657032
uccucuaucuacaaagcac

SEQ ID NO: 657034 - RNA, 19 nt, Artificial Sequence
  Description of Artificial Sequence: Synthetic oligonucleotide
  Sense strand starting at position 613 of SEQ ID NO: 585655
auagcaggucuaggaaauu

SEQ ID NO: 657035 - RNA, 19 nt, Artificial Sequence
  Description of Artificial Sequence: Synthetic oligonucleotide
  Antisense strand to SEQ ID NO: 657034
aauuuccuagaccugcuau

SEQ ID NO: 657036 - RNA, 19 nt, Artificial Sequence
  Description of Artificial Sequence: Synthetic oligonucleotide
  Sense strand starting at position 637 of SEQ ID NO: 585655
cuggauagauguucuguaa

SEQ ID NO: 657037 - RNA, 19 nt, Artificial Sequence
  Description of Artificial Sequence: Synthetic oligonucleotide
  Antisense strand to SEQ ID NO: 657036
uuacagaacaucuauccag

SEQ ID NO: 657038 - RNA, 19 nt, Artificial Sequence
  Description of Artificial Sequence: Synthetic oligonucleotide
  Sense strand starting at position 640 of SEQ ID NO: 585655
gauagauguucuguaacuc

SEQ ID NO: 657039 - RNA, 19 nt, Artificial Sequence
  Description of Artificial Sequence: Synthetic oligonucleotide
  Antisense strand to SEQ ID NO: 657038
gaguuacagaacaucuauc

SEQ ID NO: 657040 - RNA, 19 nt, Artificial Sequence
  Description of Artificial Sequence: Synthetic oligonucleotide
  Sense strand starting at position 641 of SEQ ID NO: 585655
auagauguucuguaacucu

SEQ ID NO: 657041 - RNA, 19 nt, Artificial Sequence
  Description of Artificial Sequence: Synthetic oligonucleotide
  Antisense strand to SEQ ID NO: 657040
agaguuacagaacaucuau

SEQ ID NO: 657042 - RNA, 19 nt, Artificial Sequence
  Description of Artificial Sequence: Synthetic oligonucleotide
  Sense strand starting at position 807 of SEQ ID NO: 585655
aaguaaaggugauuaguua

SEQ ID NO: 657043 - RNA, 19 nt, Artificial Sequence
  Description of Artificial Sequence: Synthetic oligonucleotide
  Antisense strand to SEQ ID NO: 657042
uaacuaaucaccuuuacuu

SEQ ID NO: 657044 - RNA, 19 nt, Artificial Sequence
  Description of Artificial Sequence: Synthetic oligonucleotide
  Sense strand starting at position 808 of SEQ ID NO: 585655
aguaaaggugauuaguuau

SEQ ID NO: 657045 - RNA, 19 nt, Artificial Sequence
  Description of Artificial Sequence: Synthetic oligonucleotide
  Antisense strand to SEQ ID NO: 657044
auaacuaaucaccuuuacu

SEQ ID NO: 657046 - RNA, 19 nt, Artificial Sequence
  Description of Artificial Sequence: Synthetic oligonucleotide
  Sense strand starting at position 811 of SEQ ID NO: 585655
aaaggugauuaguuauuac

SEQ ID NO: 657047 - RNA, 19 nt, Artificial Sequence
  Description of Artificial Sequence: Synthetic oligonucleotide
  Antisense strand to SEQ ID NO: 657046
guaauaacuaaucaccuuu

SEQ ID NO: 657048 - RNA, 19 nt, Artificial Sequence
  Description of Artificial Sequence: Synthetic oligonucleotide
  Sense strand starting at position 814 of SEQ ID NO: 585655
ggugauuaguuauuacuag

SEQ ID NO: 657049 - RNA, 19 nt, Artificial Sequence
  Description of Artificial Sequence: Synthetic oligonucleotide
  Antisense strand to SEQ ID NO: 657048
cuaguaauaacuaaucacc

SEQ ID NO: 657050 - RNA, 19 nt, Artificial Sequence
  Description of Artificial Sequence: Synthetic oligonucleotide
  Sense strand starting at position 961 of SEQ ID NO: 585655
uuggccaauccacauuaga

SEQ ID NO: 657051 - RNA, 19 nt, Artificial Sequence
  Description of Artificial Sequence: Synthetic oligonucleotide
  Antisense strand to SEQ ID NO: 657050
ucuaauguggauuggccaa

SEQ ID NO: 657052 - RNA, 19 nt, Artificial Sequence
  Description of Artificial Sequence: Synthetic oligonucleotide
  Sense strand starting at position 972 of SEQ ID NO: 585655
acauuagaggccugauaac

SEQ ID NO: 657053 - RNA, 19 nt, Artificial Sequence
  Description of Artificial Sequence: Synthetic oligonucleotide
  Antisense strand to SEQ ID NO: 657052
guuaucaggccucuaaugu

SEQ ID NO: 657054 - RNA, 19 nt, Artificial Sequence
  Description of Artificial Sequence: Synthetic oligonucleotide
  Sense strand starting at position 1053 of SEQ ID NO: 585655
cuuauucuaguccagaguu

SEQ ID NO: 657055 - RNA, 19 nt, Artificial Sequence
  Description of Artificial Sequence: Synthetic oligonucleotide
  Antisense strand to SEQ ID NO: 657054
aacucuggacuagaauaag

SEQ ID NO: 657056 - RNA, 19 nt, Artificial Sequence
  Description of Artificial Sequence: Synthetic oligonucleotide
  Sense strand starting at position 1246 of SEQ ID NO: 585655
gccaaaugccucugagaga

SEQ ID NO: 657057 - RNA, 19 nt, Artificial Sequence
  Description of Artificial Sequence: Synthetic oligonucleotide
  Antisense strand to SEQ ID NO: 657056
ucucucagaggcauuuggc

SEQ ID NO: 657058 - RNA, 19 nt, Artificial Sequence
  Description of Artificial Sequence: Synthetic oligonucleotide
  Sense strand starting at position 1329 of SEQ ID NO: 585655
gaaacauaagauugugcuu

SEQ ID NO: 657059 - RNA, 19 nt, Artificial Sequence
  Description of Artificial Sequence: Synthetic oligonucleotide
  Antisense strand to SEQ ID NO: 657058
aagcacaaucuuauguuuc

SEQ ID NO: 657060 - RNA, 19 nt, Artificial Sequence
  Description of Artificial Sequence: Synthetic oligonucleotide
  Sense strand starting at position 1332 of SEQ ID NO: 585655
acauaagauugugcuucua

SEQ ID NO: 657061 - RNA, 19 nt, Artificial Sequence
  Description of Artificial Sequence: Synthetic oligonucleotide
  Antisense strand to SEQ ID NO: 657060
uagaagcacaaucuuaugu

SEQ ID NO: 657062 - RNA, 19 nt, Artificial Sequence
  Description of Artificial Sequence: Synthetic oligonucleotide
  Sense strand starting at position 1334 of SEQ ID NO: 585655
auaagauugugcuucuaaa

SEQ ID NO: 657063 - RNA, 19 nt, Artificial Sequence
  Description of Artificial Sequence: Synthetic oligonucleotide
  Antisense strand to SEQ ID NO: 657062
uuuagaagcacaaucuuau

SEQ ID NO: 657064 - RNA, 19 nt, Artificial Sequence
  Description of Artificial Sequence: Synthetic oligonucleotide
  Sense strand starting at position 1548 of SEQ ID NO: 585655
cccagauauuggcuuuaua

SEQ ID NO: 657065 - RNA, 19 nt, Artificial Sequence
  Description of Artificial Sequence: Synthetic oligonucleotide
  Antisense strand to SEQ ID NO: 657064
uauaaagccaauaucuggg

SEQ ID NO: 657066 - RNA, 19 nt, Artificial Sequence
  Description of Artificial Sequence: Synthetic oligonucleotide
  Sense strand starting at position 1621 of SEQ ID NO: 585655
ggucaucuauuuccgucau

SEQ ID NO: 657067 - RNA, 19 nt, Artificial Sequence
  Description of Artificial Sequence: Synthetic oligonucleotide
  Antisense strand to SEQ ID NO: 657066
augacggaaauagaugacc

SEQ ID NO: 657068 - RNA, 19 nt, Artificial Sequence
  Description of Artificial Sequence: Synthetic oligonucleotide
  Sense strand starting at position 1792 of SEQ ID NO: 585655
acuagauugguuuggagga

SEQ ID NO: 657069 - RNA, 19 nt, Artificial Sequence
  Description of Artificial Sequence: Synthetic oligonucleotide
  Antisense strand to SEQ ID NO: 657068
uccuccaaaccaaucuagu

SEQ ID NO: 657070 - RNA, 19 nt, Artificial Sequence
  Description of Artificial Sequence: Synthetic oligonucleotide
  Sense strand starting at position 1856 of SEQ ID NO: 585655
cucuaaaguuuguugaaua

SEQ ID NO: 657071 - RNA, 19 nt, Artificial Sequence
  Description of Artificial Sequence: Synthetic oligonucleotide
  Antisense strand to SEQ ID NO: 657070
uauucaacaaacuuuagag

SEQ ID NO: 657072 - RNA, 19 nt, Artificial Sequence
  Description of Artificial Sequence: Synthetic oligonucleotide
  Sense strand starting at position 1936 of SEQ ID NO: 585655
ucaagauugcuagguaaag

SEQ ID NO: 657073 - RNA, 19 nt, Artificial Sequence
  Description of Artificial Sequence: Synthetic oligonucleotide
  Antisense strand to SEQ ID NO: 657072
cuuuaccuagcaaucuuga

SEQ ID NO: 657074 - RNA, 19 nt, Artificial Sequence
  Description of Artificial Sequence: Synthetic oligonucleotide
  Sense strand starting at position 1937 of SEQ ID NO: 585655
caagauugcuagguaaaga

SEQ ID NO: 657075 - RNA, 19 nt, Artificial Sequence
  Description of Artificial Sequence: Synthetic oligonucleotide
  Antisense strand to SEQ ID NO: 657074
ucuuuaccuagcaaucuug

SEQ ID NO: 657076 - RNA, 19 nt, Artificial Sequence
  Description of Artificial Sequence: Synthetic oligonucleotide
  Sense strand starting at position 2027 of SEQ ID NO: 585655
guuacacugucauuaaauu

SEQ ID NO: 657077 - RNA, 19 nt, Artificial Sequence
  Description of Artificial Sequence: Synthetic oligonucleotide
  Antisense strand to SEQ ID NO: 657076
aauuuaaugacaguguaac

SEQ ID NO: 657078 - RNA, 19 nt, Artificial Sequence
  Description of Artificial Sequence: Synthetic oligonucleotide
  Sense strand starting at position 2157 of SEQ ID NO: 585655
ugguacuuugaauguacau

SEQ ID NO: 657079 - RNA, 19 nt, Artificial Sequence
  Description of Artificial Sequence: Synthetic oligonucleotide
  Antisense strand to SEQ ID NO: 657078
auguacauucaaaguacca

SEQ ID NO: 657080 - RNA, 19 nt, Artificial Sequence
  Description of Artificial Sequence: Synthetic oligonucleotide
  Sense strand starting at position 2273 of SEQ ID NO: 585655
gguaaagaauaugaaagaa

SEQ ID NO: 657081 - RNA, 19 nt, Artificial Sequence
  Description of Artificial Sequence: Synthetic oligonucleotide
  Antisense strand to SEQ ID NO: 657080
uucuuucauauucuuuacc

SEQ ID NO: 657082 - RNA, 19 nt, Artificial Sequence
  Description of Artificial Sequence: Synthetic oligonucleotide
  Sense strand starting at position 2447 of SEQ ID NO: 585655
ggaaaugaauucucuugua

SEQ ID NO: 657083 - RNA, 19 nt, Artificial Sequence
  Description of Artificial Sequence: Synthetic oligonucleotide
  Antisense strand to SEQ ID NO: 657082
uacaagagaauucauuucc

SEQ ID NO: 657084 - RNA, 19 nt, Artificial Sequence
  Description of Artificial Sequence: Synthetic oligonucleotide
  Sense strand starting at position 2605 of SEQ ID NO: 585655
ucugguauaccauguaaua

SEQ ID NO: 657085 - RNA, 19 nt, Artificial Sequence
  Description of Artificial Sequence: Synthetic oligonucleotide
  Antisense strand to SEQ ID NO: 657084
uauuacaugguauaccaga

SEQ ID NO: 657086 - RNA, 19 nt, Artificial Sequence
  Description of Artificial Sequence: Synthetic oligonucleotide
  Sense strand starting at position 2626 of SEQ ID NO: 585655
cugaaauucuagccaguaa

SEQ ID NO: 657087 - RNA, 19 nt, Artificial Sequence
  Description of Artificial Sequence: Synthetic oligonucleotide
  Antisense strand to SEQ ID NO: 657086
uuacuggcuagaauuucag

SEQ ID NO: 657088 - RNA, 19 nt, Artificial Sequence
  Description of Artificial Sequence: Synthetic oligonucleotide
  Sense strand starting at position 2782 of SEQ ID NO: 585655
uuggaaauuuccuaaauga

SEQ ID NO: 657089 - RNA, 19 nt, Artificial Sequence
  Description of Artificial Sequence: Synthetic oligonucleotide
  Antisense strand to SEQ ID NO: 657088
ucauuuaggaaauuuccaa

SEQ ID NO: 657090 - RNA, 19 nt, Artificial Sequence
  Description of Artificial Sequence: Synthetic oligonucleotide
  Sense strand starting at position 2999 of SEQ ID NO: 585655
gcaauuaucugacuaagug

SEQ ID NO: 657091 - RNA, 19 nt, Artificial Sequence
  Description of Artificial Sequence: Synthetic oligonucleotide
  Antisense strand to SEQ ID NO: 657090
cacuuagucagauaauugc

SEQ ID NO: 657092 - RNA, 19 nt, Artificial Sequence
  Description of Artificial Sequence: Synthetic oligonucleotide
  Sense strand starting at position 3239 of SEQ ID NO: 585655
agcuguguggcagagaaau

SEQ ID NO: 657093 - RNA, 19 nt, Artificial Sequence
  Description of Artificial Sequence: Synthetic oligonucleotide
  Antisense strand to SEQ ID NO: 657092
auuucucugccacacagcu

SEQ ID NO: 657094 - RNA, 19 nt, Artificial Sequence
  Description of Artificial Sequence: Synthetic oligonucleotide
  Sense strand starting at position 3241 of SEQ ID NO: 585655
cuguguggcagagaaauua

SEQ ID NO: 657095 - RNA, 19 nt, Artificial Sequence
  Description of Artificial Sequence: Synthetic oligonucleotide
  Antisense strand to SEQ ID NO: 657094
uaauuucucugccacacag

SEQ ID NO: 657096 - RNA, 19 nt, Artificial Sequence
  Description of Artificial Sequence: Synthetic oligonucleotide
  Sense strand starting at position 3421 of SEQ ID NO: 585655
gggucugucagucgauuua

SEQ ID NO: 657097 - RNA, 19 nt, Artificial Sequence
  Description of Artificial Sequence: Synthetic oligonucleotide
  Antisense strand to SEQ ID NO: 657096
uaaaucgacugacagaccc

SEQ ID NO: 657098 - RNA, 19 nt, Artificial Sequence
  Description of Artificial Sequence: Synthetic oligonucleotide
  Sense strand starting at position 3431 of SEQ ID NO: 585655
gucgauuuauuugacugca

SEQ ID NO: 657099 - RNA, 19 nt, Artificial Sequence
  Description of Artificial Sequence: Synthetic oligonucleotide
  Antisense strand to SEQ ID NO: 657098
ugcagucaaauaaaucgac

SEQ ID NO: 657100 - RNA, 19 nt, Artificial Sequence
  Description of Artificial Sequence: Synthetic oligonucleotide
  Sense strand starting at position 3703 of SEQ ID NO: 585655
uaagaauaggguuguacau

SEQ ID NO: 657101 - RNA, 19 nt, Artificial Sequence
  Description of Artificial Sequence: Synthetic oligonucleotide
  Antisense strand to SEQ ID NO: 657100
auguacaacccuauucuua

SEQ ID NO: 657102 - RNA, 19 nt, Artificial Sequence
  Description of Artificial Sequence: Synthetic oligonucleotide
  Sense strand starting at position 3804 of SEQ ID NO: 585655
ugucaaguagcugaauaaa

SEQ ID NO: 657103 - RNA, 19 nt, Artificial Sequence
  Description of Artificial Sequence: Synthetic oligonucleotide
  Antisense strand to SEQ ID NO: 657102
uuuauucagcuacuugaca

SEQ ID NO: 657104 - RNA, 19 nt, Artificial Sequence
  Description of Artificial Sequence: Synthetic oligonucleotide
  Sense strand starting at position 3854 of SEQ ID NO: 585655
uguuuaguaccugaaacua

SEQ ID NO: 657105 - RNA, 19 nt, Artificial Sequence
  Description of Artificial Sequence: Synthetic oligonucleotide
  Antisense strand to SEQ ID NO: 657104
uaguuucagguacuaaaca

SEQ ID NO: 657106 - RNA, 19 nt, Artificial Sequence
  Description of Artificial Sequence: Synthetic oligonucleotide
  Sense strand starting at position 113 of SEQ ID NO: 585656
ggaugacauguccagaguc

SEQ ID NO: 657107 - RNA, 19 nt, Artificial Sequence
  Description of Artificial Sequence: Synthetic oligonucleotide
  Antisense strand to SEQ ID NO: 657106
gacucuggacaugucaucc

SEQ ID NO: 657108 - RNA, 19 nt, Artificial Sequence
  Description of Artificial Sequence: Synthetic oligonucleotide
  Sense strand starting at position 204 of SEQ ID NO: 585656
gcuaaucagaagugagaug

SEQ ID NO: 657109 - RNA, 19 nt, Artificial Sequence
  Description of Artificial Sequence: Synthetic oligonucleotide
  Antisense strand to SEQ ID NO: 657108
caucucacuucugauuagc

SEQ ID NO: 657110 - RNA, 19 nt, Artificial Sequence
  Description of Artificial Sequence: Synthetic oligonucleotide
  Sense strand starting at position 224 of SEQ ID NO: 585656
augauaacuuuccuuguga

SEQ ID NO: 657111 - RNA, 19 nt, Artificial Sequence
  Description of Artificial Sequence: Synthetic oligonucleotide
  Antisense strand to SEQ ID NO: 657110
ucacaaggaaaguuaucau

SEQ ID NO: 657112 - RNA, 19 nt, Artificial Sequence
  Description of Artificial Sequence: Synthetic oligonucleotide
  Sense strand starting at position 225 of SEQ ID NO: 585656
ugauaacuuuccuugugaa

SEQ ID NO: 657113 - RNA, 19 nt, Artificial Sequence
  Description of Artificial Sequence: Synthetic oligonucleotide
  Antisense strand to SEQ ID NO: 657112
uucacaaggaaaguuauca

SEQ ID NO: 657114 - RNA, 19 nt, Artificial Sequence
  Description of Artificial Sequence: Synthetic oligonucleotide
  Sense strand starting at position 292 of SEQ ID NO: 585656
uucuuaucugauggaaagu

SEQ ID NO: 657115 - RNA, 19 nt, Artificial Sequence
  Description of Artificial Sequence: Synthetic oligonucleotide
  Antisense strand to SEQ ID NO: 657114
acuuuccaucagauaagaa

SEQ ID NO: 657116 - RNA, 19 nt, Artificial Sequence
  Description of Artificial Sequence: Synthetic oligonucleotide
  Sense strand starting at position 305 of SEQ ID NO: 585656
gaaaguagagcugaagcau

SEQ ID NO: 657117 - RNA, 19 nt, Artificial Sequence
  Description of Artificial Sequence: Synthetic oligonucleotide
  Antisense strand to SEQ ID NO: 657116
augcuucagcucuacuuuc

SEQ ID NO: 657118 - RNA, 19 nt, Artificial Sequence
  Description of Artificial Sequence: Synthetic oligonucleotide
  Sense strand starting at position 339 of SEQ ID NO: 585656
gggaucaauuggucuaucu

SEQ ID NO: 657119 - RNA, 19 nt, Artificial Sequence
  Description of Artificial Sequence: Synthetic oligonucleotide
  Antisense strand to SEQ ID NO: 657118
agauagaccaauugauccc

SEQ ID NO: 657120 - RNA, 19 nt, Artificial Sequence
  Description of Artificial Sequence: Synthetic oligonucleotide
  Sense strand starting at position 431 of SEQ ID NO: 585656
cuuacuucccgggauaauu

SEQ ID NO: 657121 - RNA, 19 nt, Artificial Sequence
  Description of Artificial Sequence: Synthetic oligonucleotide
  Antisense strand to SEQ ID NO: 657120
aauuaucccgggaaguaag

SEQ ID NO: 657122 - RNA, 19 nt, Artificial Sequence
  Description of Artificial Sequence: Synthetic oligonucleotide
  Sense strand starting at position 499 of SEQ ID NO: 585656
aacagaaagcuauagcgau

SEQ ID NO: 657123 - RNA, 19 nt, Artificial Sequence
  Description of Artificial Sequence: Synthetic oligonucleotide
  Antisense strand to SEQ ID NO: 657122
aucgcuauagcuuucuguu

SEQ ID NO: 657124 - RNA, 19 nt, Artificial Sequence
  Description of Artificial Sequence: Synthetic oligonucleotide
  Sense strand starting at position 505 of SEQ ID NO: 585656
aagcuauagcgauagauca

SEQ ID NO: 657125 - RNA, 19 nt, Artificial Sequence
  Description of Artificial Sequence: Synthetic oligonucleotide
  Antisense strand to SEQ ID NO: 657124
ugaucuaucgcuauagcuu

SEQ ID NO: 657126 - RNA, 19 nt, Artificial Sequence
  Description of Artificial Sequence: Synthetic oligonucleotide
  Sense strand starting at position 540 of SEQ ID NO: 585656
cugaaaugauaggcauuga

SEQ ID NO: 657127 - RNA, 19 nt, Artificial Sequence
  Description of Artificial Sequence: Synthetic oligonucleotide
  Antisense strand to SEQ ID NO: 657126
ucaaugccuaucauuucag

SEQ ID NO: 657128 - RNA, 19 nt, Artificial Sequence
  Description of Artificial Sequence: Synthetic oligonucleotide
  Sense strand starting at position 545 of SEQ ID NO: 585656
augauaggcauugauguuu

SEQ ID NO: 657129 - RNA, 19 nt, Artificial Sequence
  Description of Artificial Sequence: Synthetic oligonucleotide
  Antisense strand to SEQ ID NO: 657128
aaacaucaaugccuaucau

SEQ ID NO: 657130 - RNA, 19 nt, Artificial Sequence
  Description of Artificial Sequence: Synthetic oligonucleotide
  Sense strand starting at position 928 of SEQ ID NO: 585656
augucuuaucaguauaacc

SEQ ID NO: 657131 - RNA, 19 nt, Artificial Sequence
  Description of Artificial Sequence: Synthetic oligonucleotide
  Antisense strand to SEQ ID NO: 657130
gguuauacugauaagacau

SEQ ID NO: 657132 - RNA, 19 nt, Artificial Sequence
  Description of Artificial Sequence: Synthetic oligonucleotide
  Sense strand starting at position 930 of SEQ ID NO: 585656
gucuuaucaguauaaccaa

SEQ ID NO: 657133 - RNA, 19 nt, Artificial Sequence
  Description of Artificial Sequence: Synthetic oligonucleotide
  Antisense strand to SEQ ID NO: 657132
uugguuauacugauaagac

SEQ ID NO: 657134 - RNA, 19 nt, Artificial Sequence
  Description of Artificial Sequence: Synthetic oligonucleotide
  Sense strand starting at position 1041 of SEQ ID NO: 585656
ucugauguccaacaguaau

SEQ ID NO: 657135 - RNA, 19 nt, Artificial Sequence
  Description of Artificial Sequence: Synthetic oligonucleotide
  Antisense strand to SEQ ID NO: 657134
auuacuguuggacaucaga

SEQ ID NO: 657136 - RNA, 19 nt, Artificial Sequence
  Description of Artificial Sequence: Synthetic oligonucleotide
  Sense strand starting at position 1219 of SEQ ID NO: 585656
acuuguuaucaacagugga

SEQ ID NO: 657137 - RNA, 19 nt, Artificial Sequence
  Description of Artificial Sequence: Synthetic oligonucleotide
  Antisense strand to SEQ ID NO: 657136
uccacuguugauaacaagu

SEQ ID NO: 657138 - RNA, 19 nt, Artificial Sequence
  Description of Artificial Sequence: Synthetic oligonucleotide
  Sense strand starting at position 1482 of SEQ ID NO: 585656
aaaggauauguaggcaaca

SEQ ID NO: 657139 - RNA, 19 nt, Artificial Sequence
  Description of Artificial Sequence: Synthetic oligonucleotide
  Antisense strand to SEQ ID NO: 657138
uguugccuacauauccuuu

SEQ ID NO: 657140 - RNA, 19 nt, Artificial Sequence
  Description of Artificial Sequence: Synthetic oligonucleotide
  Sense strand starting at position 1483 of SEQ ID NO: 585656
aaggauauguaggcaacaa

SEQ ID NO: 657141 - RNA, 19 nt, Artificial Sequence
  Description of Artificial Sequence: Synthetic oligonucleotide
  Antisense strand to SEQ ID NO: 657140
uuguugccuacauauccuu

SEQ ID NO: 657142 - RNA, 19 nt, Artificial Sequence
  Description of Artificial Sequence: Synthetic oligonucleotide
  Sense strand starting at position 1605 of SEQ ID NO: 585656
aaugcuuauguacaaguga

SEQ ID NO: 657143 - RNA, 19 nt, Artificial Sequence
  Description of Artificial Sequence: Synthetic oligonucleotide
  Antisense strand to SEQ ID NO: 657142
ucacuuguacauaagcauu

SEQ ID NO: 657144 - RNA, 19 nt, Artificial Sequence
  Description of Artificial Sequence: Synthetic oligonucleotide
  Sense strand starting at position 1953 of SEQ ID NO: 585656
guacuucuggaaugaaggu

SEQ ID NO: 657145 - RNA, 19 nt, Artificial Sequence
  Description of Artificial Sequence: Synthetic oligonucleotide
  Antisense strand to SEQ ID NO: 657144
accuucauuccagaaguac

SEQ ID NO: 657146 - RNA, 19 nt, Artificial Sequence
  Description of Artificial Sequence: Synthetic oligonucleotide
  Sense strand starting at position 1962 of SEQ ID NO: 585656
gaaugaagguucuuaugac

SEQ ID NO: 657147 - RNA, 19 nt, Artificial Sequence
  Description of Artificial Sequence: Synthetic oligonucleotide
  Antisense strand to SEQ ID NO: 657146
gucauaagaaccuucauuc

SEQ ID NO: 657148 - RNA, 19 nt, Artificial Sequence
  Description of Artificial Sequence: Synthetic oligonucleotide
  Sense strand starting at position 2201 of SEQ ID NO: 585656
ugugaagauguuuaugacu

SEQ ID NO: 657149 - RNA, 19 nt, Artificial Sequence
  Description of Artificial Sequence: Synthetic oligonucleotide
  Antisense strand to SEQ ID NO: 657148
agucauaaacaucuucaca

SEQ ID NO: 657150 - RNA, 19 nt, Artificial Sequence
  Description of Artificial Sequence: Synthetic oligonucleotide
  Sense strand starting at position 2417 of SEQ ID NO: 585656
auuaaauugcuggaguaau

SEQ ID NO: 657151 - RNA, 19 nt, Artificial Sequence
  Description of Artificial Sequence: Synthetic oligonucleotide
  Antisense strand to SEQ ID NO: 657150
auuacuccagcaauuuaau

SEQ ID NO: 657152 - RNA, 19 nt, Artificial Sequence
  Description of Artificial Sequence: Synthetic oligonucleotide
  Sense strand starting at position 2510 of SEQ ID NO: 585656
uggagaugagacugucuau

SEQ ID NO: 657153 - RNA, 19 nt, Artificial Sequence
  Description of Artificial Sequence: Synthetic oligonucleotide
  Antisense strand to SEQ ID NO: 657152
auagacagucucaucucca

SEQ ID NO: 657154 - RNA, 19 nt, Artificial Sequence
  Description of Artificial Sequence: Synthetic oligonucleotide
  Sense strand starting at position 2513 of SEQ ID NO: 585656
agaugagacugucuauagu

SEQ ID NO: 657155 - RNA, 19 nt, Artificial Sequence
  Description of Artificial Sequence: Synthetic oligonucleotide
  Antisense strand to SEQ ID NO: 657154
acuauagacagucucaucu

SEQ ID NO: 657156 - RNA, 19 nt, Artificial Sequence
  Description of Artificial Sequence: Synthetic oligonucleotide
  Sense strand starting at position 2717 of SEQ ID NO: 585656
uuaccaugauuguuuaaug

SEQ ID NO: 657157 - RNA, 19 nt, Artificial Sequence
  Description of Artificial Sequence: Synthetic oligonucleotide
  Antisense strand to SEQ ID NO: 657156
cauuaaacaaucaugguaa

SEQ ID NO: 657158 - RNA, 19 nt, Artificial Sequence
  Description of Artificial Sequence: Synthetic oligonucleotide
  Sense strand starting at position 2727 of SEQ ID NO: 585656
uguuuaauggcugaaucua

SEQ ID NO: 657159 - RNA, 19 nt, Artificial Sequence
  Description of Artificial Sequence: Synthetic oligonucleotide
  Antisense strand to SEQ ID NO: 657158
uagauucagccauuaaaca

SEQ ID NO: 657160 - RNA, 19 nt, Artificial Sequence
  Description of Artificial Sequence: Synthetic oligonucleotide
  Sense strand starting at position 2840 of SEQ ID NO: 585656
uugucacauccaugaagau

SEQ ID NO: 657161 - RNA, 19 nt, Artificial Sequence
  Description of Artificial Sequence: Synthetic oligonucleotide
  Antisense strand to SEQ ID NO: 657160
aucuucauggaugugacaa

SEQ ID NO: 657162 - RNA, 19 nt, Artificial Sequence
  Description of Artificial Sequence: Synthetic oligonucleotide
  Sense strand starting at position 2927 of SEQ ID NO: 585656
ucuauaugucuacaaguaa

SEQ ID NO: 657163 - RNA, 19 nt, Artificial Sequence
  Description of Artificial Sequence: Synthetic oligonucleotide
  Antisense strand to SEQ ID NO: 657162
uuacuuguagacauauaga

SEQ ID NO: 657164 - RNA, 19 nt, Artificial Sequence
  Description of Artificial Sequence: Synthetic oligonucleotide
  Sense strand starting at position 2939 of SEQ ID NO: 585656
caaguaagauaugcugauu

SEQ ID NO: 657165 - RNA, 19 nt, Artificial Sequence
  Description of Artificial Sequence: Synthetic oligonucleotide
  Antisense strand to SEQ ID NO: 657164
aaucagcauaucuuacuug

SEQ ID NO: 657166 - RNA, 19 nt, Artificial Sequence
  Description of Artificial Sequence: Synthetic oligonucleotide
  Sense strand starting at position 3020 of SEQ ID NO: 585656
caucucagaguugaguuua

SEQ ID NO: 657167 - RNA, 19 nt, Artificial Sequence
  Description of Artificial Sequence: Synthetic oligonucleotide
  Antisense strand to SEQ ID NO: 657166
uaaacucaacucugagaug

SEQ ID NO: 657168 - RNA, 19 nt, Artificial Sequence
  Description of Artificial Sequence: Synthetic oligonucleotide
  Sense strand starting at position 3244 of SEQ ID NO: 585656
gcucaacuucuggacaauc

SEQ ID NO: 657169 - RNA, 19 nt, Artificial Sequence
  Description of Artificial Sequence: Synthetic oligonucleotide
  Antisense strand to SEQ ID NO: 657168
gauuguccagaaguugagc

SEQ ID NO: 657170 - RNA, 19 nt, Artificial Sequence
  Description of Artificial Sequence: Synthetic oligonucleotide
  Sense strand starting at position 3498 of SEQ ID NO: 585656
guaagucuuggugaggaaa

SEQ ID NO: 657171 - RNA, 19 nt, Artificial Sequence
  Description of Artificial Sequence: Synthetic oligonucleotide
  Antisense strand to SEQ ID NO: 657170
uuuccucaccaagacuuac

SEQ ID NO: 657172 - RNA, 19 nt, Artificial Sequence
  Description of Artificial Sequence: Synthetic oligonucleotide
  Sense strand starting at position 3579 of SEQ ID NO: 585656
guaauuggguuuccaaaga

SEQ ID NO: 657173 - RNA, 19 nt, Artificial Sequence
  Description of Artificial Sequence: Synthetic oligonucleotide
  Antisense strand to SEQ ID NO: 657172
ucuuuggaaacccaauuac

SEQ ID NO: 657174 - RNA, 19 nt, Artificial Sequence
  Description of Artificial Sequence: Synthetic oligonucleotide
  Sense strand starting at position 3663 of SEQ ID NO: 585656
aagauaauuugcgugugau

SEQ ID NO: 657175 - RNA, 19 nt, Artificial Sequence
  Description of Artificial Sequence: Synthetic oligonucleotide
  Antisense strand to SEQ ID NO: 657174
aucacacgcaaauuaucuu

SEQ ID NO: 657176 - RNA, 19 nt, Artificial Sequence
  Description of Artificial Sequence: Synthetic oligonucleotide
  Sense strand starting at position 3664 of SEQ ID NO: 585656
agauaauuugcgugugauu

SEQ ID NO: 657177 - RNA, 19 nt, Artificial Sequence
  Description of Artificial Sequence: Synthetic oligonucleotide
  Antisense strand to SEQ ID NO: 657176
aaucacacgcaaauuaucu

SEQ ID NO: 657178 - RNA, 19 nt, Artificial Sequence
  Description of Artificial Sequence: Synthetic oligonucleotide
  Sense strand starting at position 3669 of SEQ ID NO: 585656
auuugcgugugauucugaa

SEQ ID NO: 657179 - RNA, 19 nt, Artificial Sequence
  Description of Artificial Sequence: Synthetic oligonucleotide
  Antisense strand to SEQ ID NO: 657178
uucagaaucacacgcaaau

SEQ ID NO: 657180 - RNA, 19 nt, Artificial Sequence
  Description of Artificial Sequence: Synthetic oligonucleotide
  Sense strand starting at position 3783 of SEQ ID NO: 585656
gucuuugauuuaucugcca

SEQ ID NO: 657181 - RNA, 19 nt, Artificial Sequence
  Description of Artificial Sequence: Synthetic oligonucleotide
  Antisense strand to SEQ ID NO: 657180
uggcagauaaaucaaagac

SEQ ID NO: 657182 - RNA, 19 nt, Artificial Sequence
  Description of Artificial Sequence: Synthetic oligonucleotide
  Sense strand starting at position 3883 of SEQ ID NO: 585656
ucuacaucauuaguggaau

SEQ ID NO: 657183 - RNA, 19 nt, Artificial Sequence
  Description of Artificial Sequence: Synthetic oligonucleotide
  Antisense strand to SEQ ID NO: 657182
auuccacuaaugauguaga

SEQ ID NO: 657184 - RNA, 19 nt, Artificial Sequence
  Description of Artificial Sequence: Synthetic oligonucleotide
  Sense strand starting at position 3976 of SEQ ID NO: 585656
uauuauuaccauuggaggu

SEQ ID NO: 657185 - RNA, 19 nt, Artificial Sequence
  Description of Artificial Sequence: Synthetic oligonucleotide
  Antisense strand to SEQ ID NO: 657184
accuccaaugguaauaaua

SEQ ID NO: 657186 - RNA, 19 nt, Artificial Sequence
  Description of Artificial Sequence: Synthetic oligonucleotide
  Sense strand starting at position 112 of SEQ ID NO: 585657
cucaguguucucuaaagaa

SEQ ID NO: 657187 - RNA, 19 nt, Artificial Sequence
  Description of Artificial Sequence: Synthetic oligonucleotide
  Antisense strand to SEQ ID NO: 657186
uucuuuagagaacacugag

SEQ ID NO: 657188 - RNA, 19 nt, Artificial Sequence
  Description of Artificial Sequence: Synthetic oligonucleotide
  Sense strand starting at position 323 of SEQ ID NO: 585657
acagcagaggccuaaauau

SEQ ID NO: 657189 - RNA, 19 nt, Artificial Sequence
  Description of Artificial Sequence: Synthetic oligonucleotide
  Antisense strand to SEQ ID NO: 657188
auauuuaggccucugcugu

SEQ ID NO: 657190 - RNA, 19 nt, Artificial Sequence
  Description of Artificial Sequence: Synthetic oligonucleotide
  Sense strand starting at position 373 of SEQ ID NO: 585657
uugaauacaguaugugaau

SEQ ID NO: 657191 - RNA, 19 nt, Artificial Sequence
  Description of Artificial Sequence: Synthetic oligonucleotide
  Antisense strand to SEQ ID NO: 657190
auucacauacuguauucaa

SEQ ID NO: 657192 - RNA, 19 nt, Artificial Sequence
  Description of Artificial Sequence: Synthetic oligonucleotide
  Sense strand starting at position 374 of SEQ ID NO: 585657
ugaauacaguaugugaaua

SEQ ID NO: 657193 - RNA, 19 nt, Artificial Sequence
  Description of Artificial Sequence: Synthetic oligonucleotide
  Antisense strand to SEQ ID NO: 657192
uauucacauacuguauuca

SEQ ID NO: 657194 - RNA, 19 nt, Artificial Sequence
  Description of Artificial Sequence: Synthetic oligonucleotide
  Sense strand starting at position 386 of SEQ ID NO: 585657
gugaauaaacuauggcuga

SEQ ID NO: 657195 - RNA, 19 nt, Artificial Sequence
  Description of Artificial Sequence: Synthetic oligonucleotide
  Antisense strand to SEQ ID NO: 657194
ucagccauaguuuauucac

SEQ ID NO: 657196 - RNA, 19 nt, Artificial Sequence
  Description of Artificial Sequence: Synthetic oligonucleotide
  Sense strand starting at position 414 of SEQ ID NO: 585657
ggaaaugaaucugaaacau

SEQ ID NO: 657197 - RNA, 19 nt, Artificial Sequence
  Description of Artificial Sequence: Synthetic oligonucleotide
  Antisense strand to SEQ ID NO: 657196
auguuucagauucauuucc

SEQ ID NO: 657198 - RNA, 19 nt, Artificial Sequence
  Description of Artificial Sequence: Synthetic oligonucleotide
  Sense strand starting at position 521 of SEQ ID NO: 585657
uggcauaaacacuguaauu

SEQ ID NO: 657199 - RNA, 19 nt, Artificial Sequence
  Description of Artificial Sequence: Synthetic oligonucleotide
  Antisense strand to SEQ ID NO: 657198
aauuacaguguuuaugcca

SEQ ID NO: 657200 - RNA, 19 nt, Artificial Sequence
  Description of Artificial Sequence: Synthetic oligonucleotide
  Sense strand starting at position 523 of SEQ ID NO: 585657
gcauaaacacuguaauugu

SEQ ID NO: 657201 - RNA, 19 nt, Artificial Sequence
  Description of Artificial Sequence: Synthetic oligonucleotide
  Antisense strand to SEQ ID NO: 657200
acaauuacaguguuuaugc

SEQ ID NO: 657202 - RNA, 19 nt, Artificial Sequence
  Description of Artificial Sequence: Synthetic oligonucleotide
  Sense strand starting at position 534 of SEQ ID NO: 585657
guaauugugccacacaaug

SEQ ID NO: 657203 - RNA, 19 nt, Artificial Sequence
  Description of Artificial Sequence: Synthetic oligonucleotide
  Antisense strand to SEQ ID NO: 657202
cauuguguggcacaauuac

SEQ ID NO: 657204 - RNA, 19 nt, Artificial Sequence
  Description of Artificial Sequence: Synthetic oligonucleotide
  Sense strand starting at position 601 of SEQ ID NO: 585657
auccauuuguucucugcua

SEQ ID NO: 657205 - RNA, 19 nt, Artificial Sequence
  Description of Artificial Sequence: Synthetic oligonucleotide
  Antisense strand to SEQ ID NO: 657204
uagcagagaacaaauggau

SEQ ID NO: 657206 - RNA, 19 nt, Artificial Sequence
  Description of Artificial Sequence: Synthetic oligonucleotide
  Sense strand starting at position 603 of SEQ ID NO: 585657
ccauuuguucucugcuaag

SEQ ID NO: 657207 - RNA, 19 nt, Artificial Sequence
  Description of Artificial Sequence: Synthetic oligonucleotide
  Antisense strand to SEQ ID NO: 657206
cuuagcagagaacaaaugg

SEQ ID NO: 657208 - RNA, 19 nt, Artificial Sequence
  Description of Artificial Sequence: Synthetic oligonucleotide
  Sense strand starting at position 687 of SEQ ID NO: 585657
agcugaguaaugcagauga

SEQ ID NO: 657209 - RNA, 19 nt, Artificial Sequence
  Description of Artificial Sequence: Synthetic oligonucleotide
  Antisense strand to SEQ ID NO: 657208
ucaucugcauuacucagcu

SEQ ID NO: 657210 - RNA, 19 nt, Artificial Sequence
  Description of Artificial Sequence: Synthetic oligonucleotide
  Sense strand starting at position 689 of SEQ ID NO: 585657
cugaguaaugcagaugauu

SEQ ID NO: 657211 - RNA, 19 nt, Artificial Sequence
  Description of Artificial Sequence: Synthetic oligonucleotide
  Antisense strand to SEQ ID NO: 657210
aaucaucugcauuacucag

SEQ ID NO: 657212 - RNA, 19 nt, Artificial Sequence
  Description of Artificial Sequence: Synthetic oligonucleotide
  Sense strand starting at position 809 of SEQ ID NO: 585657
uuucuaagauggcuggaaa

SEQ ID NO: 657213 - RNA, 19 nt, Artificial Sequence
  Description of Artificial Sequence: Synthetic oligonucleotide
  Antisense strand to SEQ ID NO: 657212
uuuccagccaucuuagaaa

SEQ ID NO: 657214 - RNA, 19 nt, Artificial Sequence
  Description of Artificial Sequence: Synthetic oligonucleotide
  Sense strand starting at position 891 of SEQ ID NO: 585657
auaggaacauugccguaaa

SEQ ID NO: 657215 - RNA, 19 nt, Artificial Sequence
  Description of Artificial Sequence: Synthetic oligonucleotide
  Antisense strand to SEQ ID NO: 657214
uuuacggcaauguuccuau

SEQ ID NO: 657216 - RNA, 19 nt, Artificial Sequence
  Description of Artificial Sequence: Synthetic oligonucleotide
  Sense strand starting at position 1078 of SEQ ID NO: 585657
gacauaaagugguuuggca

SEQ ID NO: 657217 - RNA, 19 nt, Artificial Sequence
  Description of Artificial Sequence: Synthetic oligonucleotide
  Antisense strand to SEQ ID NO: 657216
ugccaaaccacuuuauguc

SEQ ID NO: 657218 - RNA, 19 nt, Artificial Sequence
  Description of Artificial Sequence: Synthetic oligonucleotide
  Sense strand starting at position 1283 of SEQ ID NO: 585657
gggugacugcuggacuaaa

SEQ ID NO: 657219 - RNA, 19 nt, Artificial Sequence
  Description of Artificial Sequence: Synthetic oligonucleotide
  Antisense strand to SEQ ID NO: 657218
uuuaguccagcagucaccc

SEQ ID NO: 657220 - RNA, 19 nt, Artificial Sequence
  Description of Artificial Sequence: Synthetic oligonucleotide
  Sense strand starting at position 1309 of SEQ ID NO: 585657
aggugacgagaucaaguau

SEQ ID NO: 657221 - RNA, 19 nt, Artificial Sequence
  Description of Artificial Sequence: Synthetic oligonucleotide
  Antisense strand to SEQ ID NO: 657220
auacuugaucucgucaccu

SEQ ID NO: 657222 - RNA, 19 nt, Artificial Sequence
  Description of Artificial Sequence: Synthetic oligonucleotide
  Sense strand starting at position 2033 of SEQ ID NO: 585657
uucugaguccgcgcuaaga

SEQ ID NO: 657223 - RNA, 19 nt, Artificial Sequence
  Description of Artificial Sequence: Synthetic oligonucleotide
  Antisense strand to SEQ ID NO: 657222
ucuuagcgcggacucagaa

SEQ ID NO: 657224 - RNA, 19 nt, Artificial Sequence
  Description of Artificial Sequence: Synthetic oligonucleotide
  Sense strand starting at position 2122 of SEQ ID NO: 585657
ggcggugcugcuaaggauu

SEQ ID NO: 657225 - RNA, 19 nt, Artificial Sequence
  Description of Artificial Sequence: Synthetic oligonucleotide
  Antisense strand to SEQ ID NO: 657224
aauccuuagcagcaccgcc

SEQ ID NO: 657226 - RNA, 19 nt, Artificial Sequence
  Description of Artificial Sequence: Synthetic oligonucleotide
  Sense strand starting at position 2176 of SEQ ID NO: 585657
gcuagaaauggacguuuag

SEQ ID NO: 657227 - RNA, 19 nt, Artificial Sequence
  Description of Artificial Sequence: Synthetic oligonucleotide
  Antisense strand to SEQ ID NO: 657226
cuaaacguccauuucuagc

SEQ ID NO: 657228 - RNA, 19 nt, Artificial Sequence
  Description of Artificial Sequence: Synthetic oligonucleotide
  Sense strand starting at position 2245 of SEQ ID NO: 585657
cgggugugcgguuccaaga

SEQ ID NO: 657229 - RNA, 19 nt, Artificial Sequence
  Description of Artificial Sequence: Synthetic oligonucleotide
  Antisense strand to SEQ ID NO: 657228
ucuuggaaccgcacacccg

SEQ ID NO: 657230 - RNA, 19 nt, Artificial Sequence
  Description of Artificial Sequence: Synthetic oligonucleotide
  Sense strand starting at position 2264 of SEQ ID NO: 585657
acugauuggcuguggagau

SEQ ID NO: 657231 - RNA, 19 nt, Artificial Sequence
  Description of Artificial Sequence: Synthetic oligonucleotide
  Antisense strand to SEQ ID NO: 657230
aucuccacagccaaucagu

SEQ ID NO: 657232 - RNA, 19 nt, Artificial Sequence
  Description of Artificial Sequence: Synthetic oligonucleotide
  Sense strand starting at position 2271 of SEQ ID NO: 585657
ggcuguggagauuagaagu

SEQ ID NO: 657233 - RNA, 19 nt, Artificial Sequence
  Description of Artificial Sequence: Synthetic oligonucleotide
  Antisense strand to SEQ ID NO: 657232
acuucuaaucuccacagcc

SEQ ID NO: 657234 - RNA, 19 nt, Artificial Sequence
  Description of Artificial Sequence: Synthetic oligonucleotide
  Sense strand starting at position 2301 of SEQ ID NO: 585657
ucucuuaaacucgggcaaa

SEQ ID NO: 657235 - RNA, 19 nt, Artificial Sequence
  Description of Artificial Sequence: Synthetic oligonucleotide
  Antisense strand to SEQ ID NO: 657234
uuugcccgaguuuaagaga

SEQ ID NO: 657236 - RNA, 19 nt, Artificial Sequence
  Description of Artificial Sequence: Synthetic oligonucleotide
  Sense strand starting at position 2313 of SEQ ID NO: 585657
gggcaaacgaauugaugau

SEQ ID NO: 657237 - RNA, 19 nt, Artificial Sequence
  Description of Artificial Sequence: Synthetic oligonucleotide
  Antisense strand to SEQ ID NO: 657236
aucaucaauucguuugccc

SEQ ID NO: 657238 - RNA, 19 nt, Artificial Sequence
  Description of Artificial Sequence: Synthetic oligonucleotide
  Sense strand starting at position 2344 of SEQ ID NO: 585657
cgguguuagagacacagua

SEQ ID NO: 657239 - RNA, 19 nt, Artificial Sequence
  Description of Artificial Sequence: Synthetic oligonucleotide
  Antisense strand to SEQ ID NO: 657238
uacugugucucuaacaccg

SEQ ID NO: 657240 - RNA, 19 nt, Artificial Sequence
  Description of Artificial Sequence: Synthetic oligonucleotide
  Sense strand starting at position 2400 of SEQ ID NO: 585657
ggcauuaacuucccgggaa

SEQ ID NO: 657241 - RNA, 19 nt, Artificial Sequence
  Description of Artificial Sequence: Synthetic oligonucleotide
  Antisense strand to SEQ ID NO: 657240
uucccgggaaguuaaugcc

SEQ ID NO: 657242 - RNA, 19 nt, Artificial Sequence
  Description of Artificial Sequence: Synthetic oligonucleotide
  Sense strand starting at position 2402 of SEQ ID NO: 585657
cauuaacuucccgggaaag

SEQ ID NO: 657243 - RNA, 19 nt, Artificial Sequence
  Description of Artificial Sequence: Synthetic oligonucleotide
  Antisense strand to SEQ ID NO: 657242
cuuucccgggaaguuaaug

SEQ ID NO: 657244 - RNA, 19 nt, Artificial Sequence
  Description of Artificial Sequence: Synthetic oligonucleotide
  Sense strand starting at position 2403 of SEQ ID NO: 585657
auuaacuucccgggaaagu

SEQ ID NO: 657245 - RNA, 19 nt, Artificial Sequence
  Description of Artificial Sequence: Synthetic oligonucleotide
  Antisense strand to SEQ ID NO: 657244
acuuucccgggaaguuaau

SEQ ID NO: 657246 - RNA, 19 nt, Artificial Sequence
  Description of Artificial Sequence: Synthetic oligonucleotide
  Sense strand starting at position 2412 of SEQ ID NO: 585657
ccgggaaaguguguagaaa

SEQ ID NO: 657247 - RNA, 19 nt, Artificial Sequence
  Description of Artificial Sequence: Synthetic oligonucleotide
  Antisense strand to SEQ ID NO: 657246
uuucuacacacuuucccgg

SEQ ID NO: 657248 - RNA, 19 nt, Artificial Sequence
  Description of Artificial Sequence: Synthetic oligonucleotide
  Sense strand starting at position 2413 of SEQ ID NO: 585657
cgggaaaguguguagaaag

SEQ ID NO: 657249 - RNA, 19 nt, Artificial Sequence
  Description of Artificial Sequence: Synthetic oligonucleotide
  Antisense strand to SEQ ID NO: 657248
cuuucuacacacuuucccg

SEQ ID NO: 657250 - RNA, 19 nt, Artificial Sequence
  Description of Artificial Sequence: Synthetic oligonucleotide
  Sense strand starting at position 2443 of SEQ ID NO: 585657
uacuguaaacucgaacgua

SEQ ID NO: 657251 - RNA, 19 nt, Artificial Sequence
  Description of Artificial Sequence: Synthetic oligonucleotide
  Antisense strand to SEQ ID NO: 657250
uacguucgaguuuacagua

SEQ ID NO: 657252 - RNA, 19 nt, Artificial Sequence
  Description of Artificial Sequence: Synthetic oligonucleotide
  Sense strand starting at position 2475 of SEQ ID NO: 585657
guggaacuguuacuacauu

SEQ ID NO: 657253 - RNA, 19 nt, Artificial Sequence
  Description of Artificial Sequence: Synthetic oligonucleotide
  Antisense strand to SEQ ID NO: 657252
aauguaguaacaguuccac

SEQ ID NO: 657254 - RNA, 19 nt, Artificial Sequence
  Description of Artificial Sequence: Synthetic oligonucleotide
  Sense strand starting at position 2547 of SEQ ID NO: 585657
uucguuauuuccguaauug

SEQ ID NO: 657255 - RNA, 19 nt, Artificial Sequence
  Description of Artificial Sequence: Synthetic oligonucleotide
  Antisense strand to SEQ ID NO: 657254
caauuacggaaauaacgaa

SEQ ID NO: 657256 - RNA, 19 nt, Artificial Sequence
  Description of Artificial Sequence: Synthetic oligonucleotide
  Sense strand starting at position 2548 of SEQ ID NO: 585657
ucguuauuuccguaauugg

SEQ ID NO: 657257 - RNA, 19 nt, Artificial Sequence
  Description of Artificial Sequence: Synthetic oligonucleotide
  Antisense strand to SEQ ID NO: 657256
ccaauuacggaaauaacga

SEQ ID NO: 657258 - RNA, 19 nt, Artificial Sequence
  Description of Artificial Sequence: Synthetic oligonucleotide
  Sense strand starting at position 2585 of SEQ ID NO: 585657
gcccaaguugcguuaugug

SEQ ID NO: 657259 - RNA, 19 nt, Artificial Sequence
  Description of Artificial Sequence: Synthetic oligonucleotide
  Antisense strand to SEQ ID NO: 657258
cacauaacgcaacuugggc

SEQ ID NO: 657260 - RNA, 19 nt, Artificial Sequence
  Description of Artificial Sequence: Synthetic oligonucleotide
  Sense strand starting at position 2617 of SEQ ID NO: 585657
cuauaacgacucuacagua

SEQ ID NO: 657261 - RNA, 19 nt, Artificial Sequence
  Description of Artificial Sequence: Synthetic oligonucleotide
  Antisense strand to SEQ ID NO: 657260
uacuguagagucguuauag

SEQ ID NO: 657262 - RNA, 19 nt, Artificial Sequence
  Description of Artificial Sequence: Synthetic oligonucleotide
  Sense strand starting at position 3559 of SEQ ID NO: 585657
guaguagaacugugagaga

SEQ ID NO: 657263 - RNA, 19 nt, Artificial Sequence
  Description of Artificial Sequence: Synthetic oligonucleotide
  Antisense strand to SEQ ID NO: 657262
ucucucacaguucuacuac

SEQ ID NO: 657264 - RNA, 19 nt, Artificial Sequence
  Description of Artificial Sequence: Synthetic oligonucleotide
  Sense strand starting at position 3903 of SEQ ID NO: 585657
cuugcaagagccuauuaua

SEQ ID NO: 657265 - RNA, 19 nt, Artificial Sequence
  Description of Artificial Sequence: Synthetic oligonucleotide
  Antisense strand to SEQ ID NO: 657264
uauaauaggcucuugcaag

SEQ ID NO: 657266 - RNA, 19 nt, Artificial Sequence
  Description of Artificial Sequence: Synthetic oligonucleotide
  Sense strand starting at position 51 of SEQ ID NO: 585658
ucaaguucccuuuggacuu

SEQ ID NO: 657267 - RNA, 19 nt, Artificial Sequence
  Description of Artificial Sequence: Synthetic oligonucleotide
  Antisense strand to SEQ ID NO: 657266
aaguccaaagggaacuuga

SEQ ID NO: 657268 - RNA, 19 nt, Artificial Sequence
  Description of Artificial Sequence: Synthetic oligonucleotide
  Sense strand starting at position 229 of SEQ ID NO: 585658
gguggguguguugggaaga

SEQ ID NO: 657269 - RNA, 19 nt, Artificial Sequence
  Description of Artificial Sequence: Synthetic oligonucleotide
  Antisense strand to SEQ ID NO: 657268
ucuucccaacacacccacc

SEQ ID NO: 657270 - RNA, 19 nt, Artificial Sequence
  Description of Artificial Sequence: Synthetic oligonucleotide
  Sense strand starting at position 356 of SEQ ID NO: 585658
ugccaagaauacuuuagaa

SEQ ID NO: 657271 - RNA, 19 nt, Artificial Sequence
  Description of Artificial Sequence: Synthetic oligonucleotide
  Antisense strand to SEQ ID NO: 657270
uucuaaaguauucuuggca

SEQ ID NO: 657272 - RNA, 19 nt, Artificial Sequence
  Description of Artificial Sequence: Synthetic oligonucleotide
  Sense strand starting at position 394 of SEQ ID NO: 585658
uaucaugacucgcuaagua

SEQ ID NO: 657273 - RNA, 19 nt, Artificial Sequence
  Description of Artificial Sequence: Synthetic oligonucleotide
  Antisense strand to SEQ ID NO: 657272
uacuuagcgagucaugaua

SEQ ID NO: 657274 - RNA, 19 nt, Artificial Sequence
  Description of Artificial Sequence: Synthetic oligonucleotide
  Sense strand starting at position 398 of SEQ ID NO: 585658
augacucgcuaaguaaaca

SEQ ID NO: 657275 - RNA, 19 nt, Artificial Sequence
  Description of Artificial Sequence: Synthetic oligonucleotide
  Antisense strand to SEQ ID NO: 657274
uguuuacuuagcgagucau

SEQ ID NO: 657276 - RNA, 19 nt, Artificial Sequence
  Description of Artificial Sequence: Synthetic oligonucleotide
  Sense strand starting at position 495 of SEQ ID NO: 585658
cuauuccagugcucauuua

SEQ ID NO: 657277 - RNA, 19 nt, Artificial Sequence
  Description of Artificial Sequence: Synthetic oligonucleotide
  Antisense strand to SEQ ID NO: 657276
uaaaugagcacuggaauag

SEQ ID NO: 657278 - RNA, 19 nt, Artificial Sequence
  Description of Artificial Sequence: Synthetic oligonucleotide
  Sense strand starting at position 645 of SEQ ID NO: 585658
caaacaucuugggaaugga

SEQ ID NO: 657279 - RNA, 19 nt, Artificial Sequence
  Description of Artificial Sequence: Synthetic oligonucleotide
  Antisense strand to SEQ ID NO: 657278
uccauucccaagauguuug

SEQ ID NO: 657280 - RNA, 19 nt, Artificial Sequence
  Description of Artificial Sequence: Synthetic oligonucleotide
  Sense strand starting at position 659 of SEQ ID NO: 585658
auggaugcucaggguugaa

SEQ ID NO: 657281 - RNA, 19 nt, Artificial Sequence
  Description of Artificial Sequence: Synthetic oligonucleotide
  Antisense strand to SEQ ID NO: 657280
uucaacccugagcauccau

SEQ ID NO: 657282 - RNA, 19 nt, Artificial Sequence
  Description of Artificial Sequence: Synthetic oligonucleotide
  Sense strand starting at position 709 of SEQ ID NO: 585658
uuuaaacuucugggacuga

SEQ ID NO: 657283 - RNA, 19 nt, Artificial Sequence
  Description of Artificial Sequence: Synthetic oligonucleotide
  Antisense strand to SEQ ID NO: 657282
ucagucccagaaguuuaaa

SEQ ID NO: 657284 - RNA, 19 nt, Artificial Sequence
  Description of Artificial Sequence: Synthetic oligonucleotide
  Sense strand starting at position 710 of SEQ ID NO: 585658
uuaaacuucugggacugaa

SEQ ID NO: 657285 - RNA, 19 nt, Artificial Sequence
  Description of Artificial Sequence: Synthetic oligonucleotide
  Antisense strand to SEQ ID NO: 657284
uucagucccagaaguuuaa

SEQ ID NO: 657286 - RNA, 19 nt, Artificial Sequence
  Description of Artificial Sequence: Synthetic oligonucleotide
  Sense strand starting at position 739 of SEQ ID NO: 585658
uugaaugaaugggacaaau

SEQ ID NO: 657287 - RNA, 19 nt, Artificial Sequence
  Description of Artificial Sequence: Synthetic oligonucleotide
  Antisense strand to SEQ ID NO: 657286
auuugucccauucauucaa

SEQ ID NO: 657288 - RNA, 19 nt, Artificial Sequence
  Description of Artificial Sequence: Synthetic oligonucleotide
  Sense strand starting at position 773 of SEQ ID NO: 585658
caguguuugugaucuauga

SEQ ID NO: 657289 - RNA, 19 nt, Artificial Sequence
  Description of Artificial Sequence: Synthetic oligonucleotide
  Antisense strand to SEQ ID NO: 657288
ucauagaucacaaacacug

SEQ ID NO: 657290 - RNA, 19 nt, Artificial Sequence
  Description of Artificial Sequence: Synthetic oligonucleotide
  Sense strand starting at position 775 of SEQ ID NO: 585658
guguuugugaucuaugaau

SEQ ID NO: 657291 - RNA, 19 nt, Artificial Sequence
  Description of Artificial Sequence: Synthetic oligonucleotide
  Antisense strand to SEQ ID NO: 657290
auucauagaucacaaacac

SEQ ID NO: 657292 - RNA, 19 nt, Artificial Sequence
  Description of Artificial Sequence: Synthetic oligonucleotide
  Sense strand starting at position 777 of SEQ ID NO: 585658
guuugugaucuaugaauga

SEQ ID NO: 657293 - RNA, 19 nt, Artificial Sequence
  Description of Artificial Sequence: Synthetic oligonucleotide
  Antisense strand to SEQ ID NO: 657292
ucauucauagaucacaaac

SEQ ID NO: 657294 - RNA, 19 nt, Artificial Sequence
  Description of Artificial Sequence: Synthetic oligonucleotide
  Sense strand starting at position 912 of SEQ ID NO: 585658
gguugaacccuaugaaguu

SEQ ID NO: 657295 - RNA, 19 nt, Artificial Sequence
  Description of Artificial Sequence: Synthetic oligonucleotide
  Antisense strand to SEQ ID NO: 657294
aacuucauaggguucaacc

SEQ ID NO: 657296 - RNA, 19 nt, Artificial Sequence
  Description of Artificial Sequence: Synthetic oligonucleotide
  Sense strand starting at position 954 of SEQ ID NO: 585658
guagaauauuagcaauuuc

SEQ ID NO: 657297 - RNA, 19 nt, Artificial Sequence
  Description of Artificial Sequence: Synthetic oligonucleotide
  Antisense strand to SEQ ID NO: 657296
gaaauugcuaauauucuac

SEQ ID NO: 657298 - RNA, 19 nt, Artificial Sequence
  Description of Artificial Sequence: Synthetic oligonucleotide
  Sense strand starting at position 1135 of SEQ ID NO: 585658
cuuugacuucuuuggagga

SEQ ID NO: 657299 - RNA, 19 nt, Artificial Sequence
  Description of Artificial Sequence: Synthetic oligonucleotide
  Antisense strand to SEQ ID NO: 657298
uccuccaaagaagucaaag

SEQ ID NO: 657300 - RNA, 19 nt, Artificial Sequence
  Description of Artificial Sequence: Synthetic oligonucleotide
  Sense strand starting at position 1426 of SEQ ID NO: 585658
agggcuuccaucuggcaua

SEQ ID NO: 657301 - RNA, 19 nt, Artificial Sequence
  Description of Artificial Sequence: Synthetic oligonucleotide
  Antisense strand to SEQ ID NO: 657300
uaugccagauggaagcccu

SEQ ID NO: 657302 - RNA, 19 nt, Artificial Sequence
  Description of Artificial Sequence: Synthetic oligonucleotide
  Sense strand starting at position 1594 of SEQ ID NO: 585658
ggaacaguccuaggcugaa

SEQ ID NO: 657303 - RNA, 19 nt, Artificial Sequence
  Description of Artificial Sequence: Synthetic oligonucleotide
  Antisense strand to SEQ ID NO: 657302
uucagccuaggacuguucc

SEQ ID NO: 657304 - RNA, 19 nt, Artificial Sequence
  Description of Artificial Sequence: Synthetic oligonucleotide
  Sense strand starting at position 1597 of SEQ ID NO: 585658
acaguccuaggcugaagau

SEQ ID NO: 657305 - RNA, 19 nt, Artificial Sequence
  Description of Artificial Sequence: Synthetic oligonucleotide
  Antisense strand to SEQ ID NO: 657304
aucuucagccuaggacugu

SEQ ID NO: 657306 - RNA, 19 nt, Artificial Sequence
  Description of Artificial Sequence: Synthetic oligonucleotide
  Sense strand starting at position 1678 of SEQ ID NO: 585658
gcuucuucuggucaaacuu

SEQ ID NO: 657307 - RNA, 19 nt, Artificial Sequence
  Description of Artificial Sequence: Synthetic oligonucleotide
  Antisense strand to SEQ ID NO: 657306
aaguuugaccagaagaagc

SEQ ID NO: 657308 - RNA, 19 nt, Artificial Sequence
  Description of Artificial Sequence: Synthetic oligonucleotide
  Sense strand starting at position 1723 of SEQ ID NO: 585658
aguguaguccggguugcuu

SEQ ID NO: 657309 - RNA, 19 nt, Artificial Sequence
  Description of Artificial Sequence: Synthetic oligonucleotide
  Antisense strand to SEQ ID NO: 657308
aagcaacccggacuacacu

SEQ ID NO: 657310 - RNA, 19 nt, Artificial Sequence
  Description of Artificial Sequence: Synthetic oligonucleotide
  Sense strand starting at position 1789 of SEQ ID NO: 585658
gacuuagggccuugggaaa

SEQ ID NO: 657311 - RNA, 19 nt, Artificial Sequence
  Description of Artificial Sequence: Synthetic oligonucleotide
  Antisense strand to SEQ ID NO: 657310
uuucccaaggcccuaaguc

SEQ ID NO: 657312 - RNA, 19 nt, Artificial Sequence
  Description of Artificial Sequence: Synthetic oligonucleotide
  Sense strand starting at position 1989 of SEQ ID NO: 585658
gccugaacgcugcagauua

SEQ ID NO: 657313 - RNA, 19 nt, Artificial Sequence
  Description of Artificial Sequence: Synthetic oligonucleotide
  Antisense strand to SEQ ID NO: 657312
uaaucugcagcguucaggc

SEQ ID NO: 657314 - RNA, 19 nt, Artificial Sequence
  Description of Artificial Sequence: Synthetic oligonucleotide
  Sense strand starting at position 1991 of SEQ ID NO: 585658
cugaacgcugcagauuaaa

SEQ ID NO: 657315 - RNA, 19 nt, Artificial Sequence
  Description of Artificial Sequence: Synthetic oligonucleotide
  Antisense strand to SEQ ID NO: 657314
uuuaaucugcagcguucag

SEQ ID NO: 657316 - RNA, 19 nt, Artificial Sequence
  Description of Artificial Sequence: Synthetic oligonucleotide
  Sense strand starting at position 2131 of SEQ ID NO: 585658
cuggguacagcuuggagaa

SEQ ID NO: 657317 - RNA, 19 nt, Artificial Sequence
  Description of Artificial Sequence: Synthetic oligonucleotide
  Antisense strand to SEQ ID NO: 657316
uucuccaagcuguacccag

SEQ ID NO: 657318 - RNA, 19 nt, Artificial Sequence
  Description of Artificial Sequence: Synthetic oligonucleotide
  Sense strand starting at position 2132 of SEQ ID NO: 585658
uggguacagcuuggagaau

SEQ ID NO: 657319 - RNA, 19 nt, Artificial Sequence
  Description of Artificial Sequence: Synthetic oligonucleotide
  Antisense strand to SEQ ID NO: 657318
auucuccaagcuguaccca

SEQ ID NO: 657320 - RNA, 19 nt, Artificial Sequence
  Description of Artificial Sequence: Synthetic oligonucleotide
  Sense strand starting at position 2173 of SEQ ID NO: 585658
ccagaagaaugggcuguau

SEQ ID NO: 657321 - RNA, 19 nt, Artificial Sequence
  Description of Artificial Sequence: Synthetic oligonucleotide
  Antisense strand to SEQ ID NO: 657320
auacagcccauucuucugg

SEQ ID NO: 657322 - RNA, 19 nt, Artificial Sequence
  Description of Artificial Sequence: Synthetic oligonucleotide
  Sense strand starting at position 2175 of SEQ ID NO: 585658
agaagaaugggcuguaucu

SEQ ID NO: 657323 - RNA, 19 nt, Artificial Sequence
  Description of Artificial Sequence: Synthetic oligonucleotide
  Antisense strand to SEQ ID NO: 657322
agauacagcccauucuucu

SEQ ID NO: 657324 - RNA, 19 nt, Artificial Sequence
  Description of Artificial Sequence: Synthetic oligonucleotide
  Sense strand starting at position 2284 of SEQ ID NO: 585658
uuguuauccucucugagaa

SEQ ID NO: 657325 - RNA, 19 nt, Artificial Sequence
  Description of Artificial Sequence: Synthetic oligonucleotide
  Antisense strand to SEQ ID NO: 657324
uucucagagaggauaacaa

SEQ ID NO: 657326 - RNA, 19 nt, Artificial Sequence
  Description of Artificial Sequence: Synthetic oligonucleotide
  Sense strand starting at position 2285 of SEQ ID NO: 585658
uguuauccucucugagaaa

SEQ ID NO: 657327 - RNA, 19 nt, Artificial Sequence
  Description of Artificial Sequence: Synthetic oligonucleotide
  Antisense strand to SEQ ID NO: 657326
uuucucagagaggauaaca

SEQ ID NO: 657328 - RNA, 19 nt, Artificial Sequence
  Description of Artificial Sequence: Synthetic oligonucleotide
  Sense strand starting at position 3042 of SEQ ID NO: 585658
agaucucaacuuggguaau

SEQ ID NO: 657329 - RNA, 19 nt, Artificial Sequence
  Description of Artificial Sequence: Synthetic oligonucleotide
  Antisense strand to SEQ ID NO: 657328
auuacccaaguugagaucu

SEQ ID NO: 657330 - RNA, 19 nt, Artificial Sequence
  Description of Artificial Sequence: Synthetic oligonucleotide
  Sense strand starting at position 3044 of SEQ ID NO: 585658
aucucaacuuggguaauaa

SEQ ID NO: 657331 - RNA, 19 nt, Artificial Sequence
  Description of Artificial Sequence: Synthetic oligonucleotide
  Antisense strand to SEQ ID NO: 657330
uuauuacccaaguugagau

SEQ ID NO: 657332 - RNA, 19 nt, Artificial Sequence
  Description of Artificial Sequence: Synthetic oligonucleotide
  Sense strand starting at position 3478 of SEQ ID NO: 585658
guguacacucuuggugaau

SEQ ID NO: 657333 - RNA, 19 nt, Artificial Sequence
  Description of Artificial Sequence: Synthetic oligonucleotide
  Antisense strand to SEQ ID NO: 657332
auucaccaagaguguacac

SEQ ID NO: 657334 - RNA, 19 nt, Artificial Sequence
  Description of Artificial Sequence: Synthetic oligonucleotide
  Sense strand starting at position 3479 of SEQ ID NO: 585658
uguacacucuuggugaauc

SEQ ID NO: 657335 - RNA, 19 nt, Artificial Sequence
  Description of Artificial Sequence: Synthetic oligonucleotide
  Antisense strand to SEQ ID NO: 657334
gauucaccaagaguguaca

SEQ ID NO: 657336 - RNA, 19 nt, Artificial Sequence
  Description of Artificial Sequence: Synthetic oligonucleotide
  Sense strand starting at position 3487 of SEQ ID NO: 585658
cuuggugaaucuguacauu

SEQ ID NO: 657337 - RNA, 19 nt, Artificial Sequence
  Description of Artificial Sequence: Synthetic oligonucleotide
  Antisense strand to SEQ ID NO: 657336
aauguacagauucaccaag

SEQ ID NO: 657338 - RNA, 19 nt, Artificial Sequence
  Description of Artificial Sequence: Synthetic oligonucleotide
  Sense strand starting at position 3525 of SEQ ID NO: 585658
uggauuauuucuuacagua

SEQ ID NO: 657339 - RNA, 19 nt, Artificial Sequence
  Description of Artificial Sequence: Synthetic oligonucleotide
  Antisense strand to SEQ ID NO: 657338
uacuguaagaaauaaucca

SEQ ID NO: 657340 - RNA, 19 nt, Artificial Sequence
  Description of Artificial Sequence: Synthetic oligonucleotide
  Sense strand starting at position 3580 of SEQ ID NO: 585658
gggaguucccauuauucuc

SEQ ID NO: 657341 - RNA, 19 nt, Artificial Sequence
  Description of Artificial Sequence: Synthetic oligonucleotide
  Antisense strand to SEQ ID NO: 657340
gagaauaaugggaacuccc

SEQ ID NO: 657342 - RNA, 19 nt, Artificial Sequence
  Description of Artificial Sequence: Synthetic oligonucleotide
  Sense strand starting at position 3720 of SEQ ID NO: 585658
ucagucuuugugcauauaa

SEQ ID NO: 657343 - RNA, 19 nt, Artificial Sequence
  Description of Artificial Sequence: Synthetic oligonucleotide
  Antisense strand to SEQ ID NO: 657342
uuauaugcacaaagacuga

SEQ ID NO: 657344 - RNA, 19 nt, Artificial Sequence
  Description of Artificial Sequence: Synthetic oligonucleotide
  Sense strand starting at position 3722 of SEQ ID NO: 585658
agucuuugugcauauaauu

SEQ ID NO: 657345 - RNA, 19 nt, Artificial Sequence
  Description of Artificial Sequence: Synthetic oligonucleotide
  Antisense strand to SEQ ID NO: 657344
aauuauaugcacaaagacu

SEQ ID NO: 657346 - RNA, 19 nt, Artificial Sequence
  Description of Artificial Sequence: Synthetic oligonucleotide
  Sense strand starting at position 33 of SEQ ID NO: 585659
ucauccuucuaguuagaua

SEQ ID NO: 657347 - RNA, 19 nt, Artificial Sequence
  Description of Artificial Sequence: Synthetic oligonucleotide
  Antisense strand to SEQ ID NO: 657346
uaucuaacuagaaggauga

SEQ ID NO: 657348 - RNA, 19 nt, Artificial Sequence
  Description of Artificial Sequence: Synthetic oligonucleotide
  Sense strand starting at position 41 of SEQ ID NO: 585659
cuaguuagauauucucaga

SEQ ID NO: 657349 - RNA, 19 nt, Artificial Sequence
  Description of Artificial Sequence: Synthetic oligonucleotide
  Antisense strand to SEQ ID NO: 657348
ucugagaauaucuaacuag

SEQ ID NO: 657350 - RNA, 19 nt, Artificial Sequence
  Description of Artificial Sequence: Synthetic oligonucleotide
  Sense strand starting at position 44 of SEQ ID NO: 585659
guuagauauucucagauac

SEQ ID NO: 657351 - RNA, 19 nt, Artificial Sequence
  Description of Artificial Sequence: Synthetic oligonucleotide
  Antisense strand to SEQ ID NO: 657350
guaucugagaauaucuaac

SEQ ID NO: 657352 - RNA, 19 nt, Artificial Sequence
  Description of Artificial Sequence: Synthetic oligonucleotide
  Sense strand starting at position 127 of SEQ ID NO: 585659
ggaggagcuuuacucucua

SEQ ID NO: 657353 - RNA, 19 nt, Artificial Sequence
  Description of Artificial Sequence: Synthetic oligonucleotide
  Antisense strand to SEQ ID NO: 657352
uagagaguaaagcuccucc

SEQ ID NO: 657354 - RNA, 19 nt, Artificial Sequence
  Description of Artificial Sequence: Synthetic oligonucleotide
  Sense strand starting at position 168 of SEQ ID NO: 585659
uguaaucagccgagcgguu

SEQ ID NO: 657355 - RNA, 19 nt, Artificial Sequence
  Description of Artificial Sequence: Synthetic oligonucleotide
  Antisense strand to SEQ ID NO: 657354
aaccgcucggcugauuaca

SEQ ID NO: 657356 - RNA, 19 nt, Artificial Sequence
  Description of Artificial Sequence: Synthetic oligonucleotide
  Sense strand starting at position 243 of SEQ ID NO: 585659
cgcuuuggagacuggaaau

SEQ ID NO: 657357 - RNA, 19 nt, Artificial Sequence
  Description of Artificial Sequence: Synthetic oligonucleotide
  Antisense strand to SEQ ID NO: 657356
auuuccagucuccaaagcg

SEQ ID NO: 657358 - RNA, 19 nt, Artificial Sequence
  Description of Artificial Sequence: Synthetic oligonucleotide
  Sense strand starting at position 253 of SEQ ID NO: 585659
acuggaaauucgguuaacu

SEQ ID NO: 657359 - RNA, 19 nt, Artificial Sequence
  Description of Artificial Sequence: Synthetic oligonucleotide
  Antisense strand to SEQ ID NO: 657358
aguuaaccgaauuuccagu

SEQ ID NO: 657360 - RNA, 19 nt, Artificial Sequence
  Description of Artificial Sequence: Synthetic oligonucleotide
  Sense strand starting at position 2143 of SEQ ID NO: 585659
gacuguugaaugggagcaa

SEQ ID NO: 657361 - RNA, 19 nt, Artificial Sequence
  Description of Artificial Sequence: Synthetic oligonucleotide
  Antisense strand to SEQ ID NO: 657360
uugcucccauucaacaguc

SEQ ID NO: 657362 - RNA, 19 nt, Artificial Sequence
  Description of Artificial Sequence: Synthetic oligonucleotide
  Sense strand starting at position 2144 of SEQ ID NO: 585659
acuguugaaugggagcaaa

SEQ ID NO: 657363 - RNA, 19 nt, Artificial Sequence
  Description of Artificial Sequence: Synthetic oligonucleotide
  Antisense strand to SEQ ID NO: 657362
uuugcucccauucaacagu

SEQ ID NO: 657364 - RNA, 19 nt, Artificial Sequence
  Description of Artificial Sequence: Synthetic oligonucleotide
  Sense strand starting at position 2224 of SEQ ID NO: 585659
uccggugguccgagguuaa

SEQ ID NO: 657365 - RNA, 19 nt, Artificial Sequence
  Description of Artificial Sequence: Synthetic oligonucleotide
  Antisense strand to SEQ ID NO: 657364
uuaaccucggaccaccgga

SEQ ID NO: 657366 - RNA, 19 nt, Artificial Sequence
  Description of Artificial Sequence: Synthetic oligonucleotide
  Sense strand starting at position 2225 of SEQ ID NO: 585659
ccggugguccgagguuaau

SEQ ID NO: 657367 - RNA, 19 nt, Artificial Sequence
  Description of Artificial Sequence: Synthetic oligonucleotide
  Antisense strand to SEQ ID NO: 657366
auuaaccucggaccaccgg

SEQ ID NO: 657368 - RNA, 19 nt, Artificial Sequence
  Description of Artificial Sequence: Synthetic oligonucleotide
  Sense strand starting at position 2238 of SEQ ID NO: 585659
guuaauguaguccgucgaa

SEQ ID NO: 657369 - RNA, 19 nt, Artificial Sequence
  Description of Artificial Sequence: Synthetic oligonucleotide
  Antisense strand to SEQ ID NO: 657368
uucgacggacuacauuaac

SEQ ID NO: 657370 - RNA, 19 nt, Artificial Sequence
  Description of Artificial Sequence: Synthetic oligonucleotide
  Sense strand starting at position 2251 of SEQ ID NO: 585659
gucgaaagccaggagcauu

SEQ ID NO: 657371 - RNA, 19 nt, Artificial Sequence
  Description of Artificial Sequence: Synthetic oligonucleotide
  Antisense strand to SEQ ID NO: 657370
aaugcuccuggcuuucgac

SEQ ID NO: 657372 - RNA, 19 nt, Artificial Sequence
  Description of Artificial Sequence: Synthetic oligonucleotide
  Sense strand starting at position 2461 of SEQ ID NO: 585659
cucagugaaucuuacauag

SEQ ID NO: 657373 - RNA, 19 nt, Artificial Sequence
  Description of Artificial Sequence: Synthetic oligonucleotide
  Antisense strand to SEQ ID NO: 657372
cuauguaagauucacugag

SEQ ID NO: 657374 - RNA, 19 nt, Artificial Sequence
  Description of Artificial Sequence: Synthetic oligonucleotide
  Sense strand starting at position 2465 of SEQ ID NO: 585659
gugaaucuuacauaguguu

SEQ ID NO: 657375 - RNA, 19 nt, Artificial Sequence
  Description of Artificial Sequence: Synthetic oligonucleotide
  Antisense strand to SEQ ID NO: 657374
aacacuauguaagauucac

SEQ ID NO: 657376 - RNA, 19 nt, Artificial Sequence
  Description of Artificial Sequence: Synthetic oligonucleotide
  Sense strand starting at position 2562 of SEQ ID NO: 585659
auauaaugcugauuacaug

SEQ ID NO: 657377 - RNA, 19 nt, Artificial Sequence
  Description of Artificial Sequence: Synthetic oligonucleotide
  Antisense strand to SEQ ID NO: 657376
cauguaaucagcauuauau

SEQ ID NO: 657378 - RNA, 19 nt, Artificial Sequence
  Description of Artificial Sequence: Synthetic oligonucleotide
  Sense strand starting at position 2568 of SEQ ID NO: 585659
ugcugauuacauggcaaau

SEQ ID NO: 657379 - RNA, 19 nt, Artificial Sequence
  Description of Artificial Sequence: Synthetic oligonucleotide
  Antisense strand to SEQ ID NO: 657378
auuugccauguaaucagca

SEQ ID NO: 657380 - RNA, 19 nt, Artificial Sequence
  Description of Artificial Sequence: Synthetic oligonucleotide
  Sense strand starting at position 2570 of SEQ ID NO: 585659
cugauuacauggcaaauau

SEQ ID NO: 657381 - RNA, 19 nt, Artificial Sequence
  Description of Artificial Sequence: Synthetic oligonucleotide
  Antisense strand to SEQ ID NO: 657380
auauuugccauguaaucag

SEQ ID NO: 657382 - RNA, 19 nt, Artificial Sequence
  Description of Artificial Sequence: Synthetic oligonucleotide
  Sense strand starting at position 2579 of SEQ ID NO: 585659
uggcaaauauuagacauca

SEQ ID NO: 657383 - RNA, 19 nt, Artificial Sequence
  Description of Artificial Sequence: Synthetic oligonucleotide
  Antisense strand to SEQ ID NO: 657382
ugaugucuaauauuugcca

SEQ ID NO: 657384 - RNA, 19 nt, Artificial Sequence
  Description of Artificial Sequence: Synthetic oligonucleotide
  Sense strand starting at position 2686 of SEQ ID NO: 585659
uuuacauucuagucguaga

SEQ ID NO: 657385 - RNA, 19 nt, Artificial Sequence
  Description of Artificial Sequence: Synthetic oligonucleotide
  Antisense strand to SEQ ID NO: 657384
ucuacgacuagaauguaaa

SEQ ID NO: 657386 - RNA, 19 nt, Artificial Sequence
  Description of Artificial Sequence: Synthetic oligonucleotide
  Sense strand starting at position 2691 of SEQ ID NO: 585659
auucuagucguagacacau

SEQ ID NO: 657387 - RNA, 19 nt, Artificial Sequence
  Description of Artificial Sequence: Synthetic oligonucleotide
  Antisense strand to SEQ ID NO: 657386
augugucuacgacuagaau

SEQ ID NO: 657388 - RNA, 19 nt, Artificial Sequence
  Description of Artificial Sequence: Synthetic oligonucleotide
  Sense strand starting at position 2697 of SEQ ID NO: 585659
gucguagacacaugaagac

SEQ ID NO: 657389 - RNA, 19 nt, Artificial Sequence
  Description of Artificial Sequence: Synthetic oligonucleotide
  Antisense strand to SEQ ID NO: 657388
gucuucaugugucuacgac

SEQ ID NO: 657390 - RNA, 19 nt, Artificial Sequence
  Description of Artificial Sequence: Synthetic oligonucleotide
  Sense strand starting at position 2759 of SEQ ID NO: 585659
uugcaaagugacggaucaa

SEQ ID NO: 657391 - RNA, 19 nt, Artificial Sequence
  Description of Artificial Sequence: Synthetic oligonucleotide
  Antisense strand to SEQ ID NO: 657390
uugauccgucacuuugcaa

SEQ ID NO: 657392 - RNA, 19 nt, Artificial Sequence
  Description of Artificial Sequence: Synthetic oligonucleotide
  Sense strand starting at position 2760 of SEQ ID NO: 585659
ugcaaagugacggaucaaa

SEQ ID NO: 657393 - RNA, 19 nt, Artificial Sequence
  Description of Artificial Sequence: Synthetic oligonucleotide
  Antisense strand to SEQ ID NO: 657392
uuugauccgucacuuugca

SEQ ID NO: 657394 - RNA, 19 nt, Artificial Sequence
  Description of Artificial Sequence: Synthetic oligonucleotide
  Sense strand starting at position 2818 of SEQ ID NO: 585659
ggauaaucaucagcugcuu

SEQ ID NO: 657395 - RNA, 19 nt, Artificial Sequence
  Description of Artificial Sequence: Synthetic oligonucleotide
  Antisense strand to SEQ ID NO: 657394
aagcagcugaugauuaucc

SEQ ID NO: 657396 - RNA, 19 nt, Artificial Sequence
  Description of Artificial Sequence: Synthetic oligonucleotide
  Sense strand starting at position 2832 of SEQ ID NO: 585659
ugcuuagaucuccacaaag

SEQ ID NO: 657397 - RNA, 19 nt, Artificial Sequence
  Description of Artificial Sequence: Synthetic oligonucleotide
  Antisense strand to SEQ ID NO: 657396
cuuuguggagaucuaagca

SEQ ID NO: 657398 - RNA, 19 nt, Artificial Sequence
  Description of Artificial Sequence: Synthetic oligonucleotide
  Sense strand starting at position 3039 of SEQ ID NO: 585659
gacuguugguggccucaga

SEQ ID NO: 657399 - RNA, 19 nt, Artificial Sequence
  Description of Artificial Sequence: Synthetic oligonucleotide
  Antisense strand to SEQ ID NO: 657398
ucugaggccaccaacaguc

SEQ ID NO: 657400 - RNA, 19 nt, Artificial Sequence
  Description of Artificial Sequence: Synthetic oligonucleotide
  Sense strand starting at position 3055 of SEQ ID NO: 585659
agagaacugcgcuguggau

SEQ ID NO: 657401 - RNA, 19 nt, Artificial Sequence
  Description of Artificial Sequence: Synthetic oligonucleotide
  Antisense strand to SEQ ID NO: 657400
auccacagcgcaguucucu

SEQ ID NO: 657402 - RNA, 19 nt, Artificial Sequence
  Description of Artificial Sequence: Synthetic oligonucleotide
  Sense strand starting at position 3108 of SEQ ID NO: 585659
ggaaacacuucucaccaga

SEQ ID NO: 657403 - RNA, 19 nt, Artificial Sequence
  Description of Artificial Sequence: Synthetic oligonucleotide
  Antisense strand to SEQ ID NO: 657402
ucuggugagaaguguuucc

SEQ ID NO: 657404 - RNA, 19 nt, Artificial Sequence
  Description of Artificial Sequence: Synthetic oligonucleotide
  Sense strand starting at position 3467 of SEQ ID NO: 585659
ggcgguaucaaauaucauu

SEQ ID NO: 657405 - RNA, 19 nt, Artificial Sequence
  Description of Artificial Sequence: Synthetic oligonucleotide
  Antisense strand to SEQ ID NO: 657404
aaugauauuugauaccgcc

SEQ ID NO: 657406 - RNA, 19 nt, Artificial Sequence
  Description of Artificial Sequence: Synthetic oligonucleotide
  Sense strand starting at position 3544 of SEQ ID NO: 585659
ucagacaucugaguuugga

SEQ ID NO: 657407 - RNA, 19 nt, Artificial Sequence
  Description of Artificial Sequence: Synthetic oligonucleotide
  Antisense strand to SEQ ID NO: 657406
uccaaacucagaugucuga

SEQ ID NO: 657408 - RNA, 19 nt, Artificial Sequence
  Description of Artificial Sequence: Synthetic oligonucleotide
  Sense strand starting at position 3666 of SEQ ID NO: 585659
auggguugguggccucaua

SEQ ID NO: 657409 - RNA, 19 nt, Artificial Sequence
  Description of Artificial Sequence: Synthetic oligonucleotide
  Antisense strand to SEQ ID NO: 657408
uaugaggccaccaacccau

SEQ ID NO: 657410 - RNA, 19 nt, Artificial Sequence
  Description of Artificial Sequence: Synthetic oligonucleotide
  Sense strand starting at position 3868 of SEQ ID NO: 585659
uugguagaucagggugauu

SEQ ID NO: 657411 - RNA, 19 nt, Artificial Sequence
  Description of Artificial Sequence: Synthetic oligonucleotide
  Antisense strand to SEQ ID NO: 657410
aaucacccugaucuaccaa

SEQ ID NO: 657412 - RNA, 19 nt, Artificial Sequence
  Description of Artificial Sequence: Synthetic oligonucleotide
  Sense strand starting at position 3886 of SEQ ID NO: 585659
uggauuaagugaccucuca

SEQ ID NO: 657413 - RNA, 19 nt, Artificial Sequence
  Description of Artificial Sequence: Synthetic oligonucleotide
  Antisense strand to SEQ ID NO: 657412
ugagaggucacuuaaucca

SEQ ID NO: 657414 - RNA, 19 nt, Artificial Sequence
  Description of Artificial Sequence: Synthetic oligonucleotide
  Sense strand starting at position 3947 of SEQ ID NO: 585659
agugauaguuuaucagauu

SEQ ID NO: 657415 - RNA, 19 nt, Artificial Sequence
  Description of Artificial Sequence: Synthetic oligonucleotide
  Antisense strand to SEQ ID NO: 657414
aaucugauaaacuaucacu

SEQ ID NO: 657416 - RNA, 19 nt, Artificial Sequence
  Description of Artificial Sequence: Synthetic oligonucleotide
  Sense strand starting at position 3953 of SEQ ID NO: 585659
aguuuaucagauuaaugca

SEQ ID NO: 657417 - RNA, 19 nt, Artificial Sequence
  Description of Artificial Sequence: Synthetic oligonucleotide
  Antisense strand to SEQ ID NO: 657416
ugcauuaaucugauaaacu

SEQ ID NO: 657418 - RNA, 19 nt, Artificial Sequence
  Description of Artificial Sequence: Synthetic oligonucleotide
  Sense strand starting at position 3960 of SEQ ID NO: 585659
cagauuaaugcacgugucu

SEQ ID NO: 657419 - RNA, 19 nt, Artificial Sequence
  Description of Artificial Sequence: Synthetic oligonucleotide
  Antisense strand to SEQ ID NO: 657418
agacacgugcauuaaucug

SEQ ID NO: 657420 - RNA, 19 nt, Artificial Sequence
  Description of Artificial Sequence: Synthetic oligonucleotide
  Sense strand starting at position 3962 of SEQ ID NO: 585659
gauuaaugcacgugucuga

SEQ ID NO: 657421 - RNA, 19 nt, Artificial Sequence
  Description of Artificial Sequence: Synthetic oligonucleotide
  Antisense strand to SEQ ID NO: 657420
ucagacacgugcauuaauc

SEQ ID NO: 657422 - RNA, 19 nt, Artificial Sequence
  Description of Artificial Sequence: Synthetic oligonucleotide
  Sense strand starting at position 3969 of SEQ ID NO: 585659
gcacgugucugaccagaca

SEQ ID NO: 657423 - RNA, 19 nt, Artificial Sequence
  Description of Artificial Sequence: Synthetic oligonucleotide
  Antisense strand to SEQ ID NO: 657422
ugucuggucagacacgugc

SEQ ID NO: 657424 - RNA, 19 nt, Artificial Sequence
  Description of Artificial Sequence: Synthetic oligonucleotide
  Sense strand starting at position 3972 of SEQ ID NO: 585659
cgugucugaccagacaaga

SEQ ID NO: 657425 - RNA, 19 nt, Artificial Sequence
  Description of Artificial Sequence: Synthetic oligonucleotide
  Antisense strand to SEQ ID NO: 657424
ucuugucuggucagacacg

SEQ ID NO: 657426 - RNA, 19 nt, Artificial Sequence
  Description of Artificial Sequence: Synthetic oligonucleotide
  Sense strand starting at position 204 of SEQ ID NO: 585660
caagauugucuugauaguc

SEQ ID NO: 657427 - RNA, 19 nt, Artificial Sequence
  Description of Artificial Sequence: Synthetic oligonucleotide
  Antisense strand to SEQ ID NO: 657426
gacuaucaagacaaucuug

SEQ ID NO: 657428 - RNA, 19 nt, Artificial Sequence
  Description of Artificial Sequence: Synthetic oligonucleotide
  Sense strand starting at position 271 of SEQ ID NO: 585660
cauuauggguguucugacu

SEQ ID NO: 657429 - RNA, 19 nt, Artificial Sequence
  Description of Artificial Sequence: Synthetic oligonucleotide
  Antisense strand to SEQ ID NO: 657428
agucagaacacccauaaug

SEQ ID NO: 657430 - RNA, 19 nt, Artificial Sequence
  Description of Artificial Sequence: Synthetic oligonucleotide
  Sense strand starting at position 278 of SEQ ID NO: 585660
gguguucugacuuggaaug

SEQ ID NO: 657431 - RNA, 19 nt, Artificial Sequence
  Description of Artificial Sequence: Synthetic oligonucleotide
  Antisense strand to SEQ ID NO: 657430
cauuccaagucagaacacc

SEQ ID NO: 657432 - RNA, 19 nt, Artificial Sequence
  Description of Artificial Sequence: Synthetic oligonucleotide
  Sense strand starting at position 307 of SEQ ID NO: 585660
guuuaucaauuugggaaga

SEQ ID NO: 657433 - RNA, 19 nt, Artificial Sequence
  Description of Artificial Sequence: Synthetic oligonucleotide
  Antisense strand to SEQ ID NO: 657432
ucuucccaaauugauaaac

SEQ ID NO: 657434 - RNA, 19 nt, Artificial Sequence
  Description of Artificial Sequence: Synthetic oligonucleotide
  Sense strand starting at position 582 of SEQ ID NO: 585660
uggucaucagaauggauua

SEQ ID NO: 657435 - RNA, 19 nt, Artificial Sequence
  Description of Artificial Sequence: Synthetic oligonucleotide
  Antisense strand to SEQ ID NO: 657434
uaauccauucugaugacca

SEQ ID NO: 657436 - RNA, 19 nt, Artificial Sequence
  Description of Artificial Sequence: Synthetic oligonucleotide
  Sense strand starting at position 605 of SEQ ID NO: 585660
acugaugauucuguucuua

SEQ ID NO: 657437 - RNA, 19 nt, Artificial Sequence
  Description of Artificial Sequence: Synthetic oligonucleotide
  Antisense strand to SEQ ID NO: 657436
uaagaacagaaucaucagu

SEQ ID NO: 657438 - RNA, 19 nt, Artificial Sequence
  Description of Artificial Sequence: Synthetic oligonucleotide
  Sense strand starting at position 607 of SEQ ID NO: 585660
ugaugauucuguucuuagg

SEQ ID NO: 657439 - RNA, 19 nt, Artificial Sequence
  Description of Artificial Sequence: Synthetic oligonucleotide
  Antisense strand to SEQ ID NO: 657438
ccuaagaacagaaucauca

SEQ ID NO: 657440 - RNA, 19 nt, Artificial Sequence
  Description of Artificial Sequence: Synthetic oligonucleotide
  Sense strand starting at position 835 of SEQ ID NO: 585660
accuaagugucuccagaca

SEQ ID NO: 657441 - RNA, 19 nt, Artificial Sequence
  Description of Artificial Sequence: Synthetic oligonucleotide
  Antisense strand to SEQ ID NO: 657440
ugucuggagacacuuaggu

SEQ ID NO: 657442 - RNA, 19 nt, Artificial Sequence
  Description of Artificial Sequence: Synthetic oligonucleotide
  Sense strand starting at position 879 of SEQ ID NO: 585660
uggccagaggacuaguuua

SEQ ID NO: 657443 - RNA, 19 nt, Artificial Sequence
  Description of Artificial Sequence: Synthetic oligonucleotide
  Antisense strand to SEQ ID NO: 657442
uaaacuaguccucuggcca

SEQ ID NO: 657444 - RNA, 19 nt, Artificial Sequence
  Description of Artificial Sequence: Synthetic oligonucleotide
  Sense strand starting at position 886 of SEQ ID NO: 585660
aggacuaguuuagagaaag

SEQ ID NO: 657445 - RNA, 19 nt, Artificial Sequence
  Description of Artificial Sequence: Synthetic oligonucleotide
  Antisense strand to SEQ ID NO: 657444
cuuucucuaaacuaguccu

SEQ ID NO: 657446 - RNA, 19 nt, Artificial Sequence
  Description of Artificial Sequence: Synthetic oligonucleotide
  Sense strand starting at position 1038 of SEQ ID NO: 585660
ccgccuucuccagaaaggu

SEQ ID NO: 657447 - RNA, 19 nt, Artificial Sequence
  Description of Artificial Sequence: Synthetic oligonucleotide
  Antisense strand to SEQ ID NO: 657446
accuuucuggagaaggcgg

SEQ ID NO: 657448 - RNA, 19 nt, Artificial Sequence
  Description of Artificial Sequence: Synthetic oligonucleotide
  Sense strand starting at position 1069 of SEQ ID NO: 585660
ugagguugaugguuccagu

SEQ ID NO: 657449 - RNA, 19 nt, Artificial Sequence
  Description of Artificial Sequence: Synthetic oligonucleotide
  Antisense strand to SEQ ID NO: 657448
acuggaaccaucaaccuca

SEQ ID NO: 657450 - RNA, 19 nt, Artificial Sequence
  Description of Artificial Sequence: Synthetic oligonucleotide
  Sense strand starting at position 2128 of SEQ ID NO: 585660
gcgcaagguagugaugaca

SEQ ID NO: 657451 - RNA, 19 nt, Artificial Sequence
  Description of Artificial Sequence: Synthetic oligonucleotide
  Antisense strand to SEQ ID NO: 657450
ugucaucacuaccuugcgc

SEQ ID NO: 657452 - RNA, 19 nt, Artificial Sequence
  Description of Artificial Sequence: Synthetic oligonucleotide
  Sense strand starting at position 2806 of SEQ ID NO: 585660
cccacugcucccugaagga

SEQ ID NO: 657453 - RNA, 19 nt, Artificial Sequence
  Description of Artificial Sequence: Synthetic oligonucleotide
  Antisense strand to SEQ ID NO: 657452
uccuucagggagcaguggg

SEQ ID NO: 657454 - RNA, 19 nt, Artificial Sequence
  Description of Artificial Sequence: Synthetic oligonucleotide
  Sense strand starting at position 3074 of SEQ ID NO: 585660
gggagucugugacccauca

SEQ ID NO: 657455 - RNA, 19 nt, Artificial Sequence
  Description of Artificial Sequence: Synthetic oligonucleotide
  Antisense strand to SEQ ID NO: 657454
ugaugggucacagacuccc

SEQ ID NO: 657456 - RNA, 19 nt, Artificial Sequence
  Description of Artificial Sequence: Synthetic oligonucleotide
  Sense strand starting at position 3087 of SEQ ID NO: 585660
ccaucauauccgcaggcuu

SEQ ID NO: 657457 - RNA, 19 nt, Artificial Sequence
  Description of Artificial Sequence: Synthetic oligonucleotide
  Antisense strand to SEQ ID NO: 657456
aagccugcggauaugaugg

SEQ ID NO: 657458 - RNA, 19 nt, Artificial Sequence
  Description of Artificial Sequence: Synthetic oligonucleotide
  Sense strand starting at position 3145 of SEQ ID NO: 585660
gacccaaaucggugagggu

SEQ ID NO: 657459 - RNA, 19 nt, Artificial Sequence
  Description of Artificial Sequence: Synthetic oligonucleotide
  Antisense strand to SEQ ID NO: 657458
acccucaccgauuuggguc

SEQ ID NO: 657460 - RNA, 19 nt, Artificial Sequence
  Description of Artificial Sequence: Synthetic oligonucleotide
  Sense strand starting at position 3344 of SEQ ID NO: 585660
gaaggagaaggcugaguau

SEQ ID NO: 657461 - RNA, 19 nt, Artificial Sequence
  Description of Artificial Sequence: Synthetic oligonucleotide
  Antisense strand to SEQ ID NO: 657460
auacucagccuucuccuuc

SEQ ID NO: 657462 - RNA, 19 nt, Artificial Sequence
  Description of Artificial Sequence: Synthetic oligonucleotide
  Sense strand starting at position 3353 of SEQ ID NO: 585660
ggcugaguauugccugaaa

SEQ ID NO: 657463 - RNA, 19 nt, Artificial Sequence
  Description of Artificial Sequence: Synthetic oligonucleotide
  Antisense strand to SEQ ID NO: 657462
uuucaggcaauacucagcc

SEQ ID NO: 657464 - RNA, 19 nt, Artificial Sequence
  Description of Artificial Sequence: Synthetic oligonucleotide
  Sense strand starting at position 3355 of SEQ ID NO: 585660
cugaguauugccugaaaga

SEQ ID NO: 657465 - RNA, 19 nt, Artificial Sequence
  Description of Artificial Sequence: Synthetic oligonucleotide
  Antisense strand to SEQ ID NO: 657464
ucuuucaggcaauacucag

SEQ ID NO: 657466 - RNA, 19 nt, Artificial Sequence
  Description of Artificial Sequence: Synthetic oligonucleotide
  Sense strand starting at position 3420 of SEQ ID NO: 585660
uggagagaaugguuugcga

SEQ ID NO: 657467 - RNA, 19 nt, Artificial Sequence
  Description of Artificial Sequence: Synthetic oligonucleotide
  Antisense strand to SEQ ID NO: 657466
ucgcaaaccauucucucca

SEQ ID NO: 657468 - RNA, 19 nt, Artificial Sequence
  Description of Artificial Sequence: Synthetic oligonucleotide
  Sense strand starting at position 3422 of SEQ ID NO: 585660
gagagaaugguuugcgaag

SEQ ID NO: 657469 - RNA, 19 nt, Artificial Sequence
  Description of Artificial Sequence: Synthetic oligonucleotide
  Antisense strand to SEQ ID NO: 657468
cuucgcaaaccauucucuc

SEQ ID NO: 657470 - RNA, 19 nt, Artificial Sequence
  Description of Artificial Sequence: Synthetic oligonucleotide
  Sense strand starting at position 3423 of SEQ ID NO: 585660
agagaaugguuugcgaagu

SEQ ID NO: 657471 - RNA, 19 nt, Artificial Sequence
  Description of Artificial Sequence: Synthetic oligonucleotide
  Antisense strand to SEQ ID NO: 657470
acuucgcaaaccauucucu

SEQ ID NO: 657472 - RNA, 19 nt, Artificial Sequence
  Description of Artificial Sequence: Synthetic oligonucleotide
  Sense strand starting at position 3434 of SEQ ID NO: 585660
ugcgaaguugauuguacaa

SEQ ID NO: 657473 - RNA, 19 nt, Artificial Sequence
  Description of Artificial Sequence: Synthetic oligonucleotide
  Antisense strand to SEQ ID NO: 657472
uuguacaaucaacuucgca

SEQ ID NO: 657474 - RNA, 19 nt, Artificial Sequence
  Description of Artificial Sequence: Synthetic oligonucleotide
  Sense strand starting at position 3467 of SEQ ID NO: 585660
ggaguuuguggccacagga

SEQ ID NO: 657475 - RNA, 19 nt, Artificial Sequence
  Description of Artificial Sequence: Synthetic oligonucleotide
  Antisense strand to SEQ ID NO: 657474
uccuguggccacaaacucc

SEQ ID NO: 657476 - RNA, 19 nt, Artificial Sequence
  Description of Artificial Sequence: Synthetic oligonucleotide
  Sense strand starting at position 3480 of SEQ ID NO: 585660
acaggauugcucuggaugu

SEQ ID NO: 657477 - RNA, 19 nt, Artificial Sequence
  Description of Artificial Sequence: Synthetic oligonucleotide
  Antisense strand to SEQ ID NO: 657476
acauccagagcaauccugu

SEQ ID NO: 657478 - RNA, 19 nt, Artificial Sequence
  Description of Artificial Sequence: Synthetic oligonucleotide
  Sense strand starting at position 3502 of SEQ ID NO: 585660
ggucccuguucccuuagau

SEQ ID NO: 657479 - RNA, 19 nt, Artificial Sequence
  Description of Artificial Sequence: Synthetic oligonucleotide
  Antisense strand to SEQ ID NO: 657478
aucuaagggaacagggacc

SEQ ID NO: 657480 - RNA, 19 nt, Artificial Sequence
  Description of Artificial Sequence: Synthetic oligonucleotide
  Sense strand starting at position 3599 of SEQ ID NO: 585660
cggucagugcugaguuguu

SEQ ID NO: 657481 - RNA, 19 nt, Artificial Sequence
  Description of Artificial Sequence: Synthetic oligonucleotide
  Antisense strand to SEQ ID NO: 657480
aacaacucagcacugaccg

SEQ ID NO: 657482 - RNA, 19 nt, Artificial Sequence
  Description of Artificial Sequence: Synthetic oligonucleotide
  Sense strand starting at position 3611 of SEQ ID NO: 585660
aguuguuggagcuggacau

SEQ ID NO: 657483 - RNA, 19 nt, Artificial Sequence
  Description of Artificial Sequence: Synthetic oligonucleotide
  Antisense strand to SEQ ID NO: 657482
auguccagcuccaacaacu

SEQ ID NO: 657484 - RNA, 19 nt, Artificial Sequence
  Description of Artificial Sequence: Synthetic oligonucleotide
  Sense strand starting at position 3736 of SEQ ID NO: 585660
ggauguacucuugaauccu

SEQ ID NO: 657485 - RNA, 19 nt, Artificial Sequence
  Description of Artificial Sequence: Synthetic oligonucleotide
  Antisense strand to SEQ ID NO: 657484
aggauucaagaguacaucc

SEQ ID NO: 657486 - RNA, 19 nt, Artificial Sequence
  Description of Artificial Sequence: Synthetic oligonucleotide
  Sense strand starting at position 3815 of SEQ ID NO: 585660
ccuccuuggagcuaugaga

SEQ ID NO: 657487 - RNA, 19 nt, Artificial Sequence
  Description of Artificial Sequence: Synthetic oligonucleotide
  Antisense strand to SEQ ID NO: 657486
ucucauagcuccaaggagg

SEQ ID NO: 657488 - RNA, 19 nt, Artificial Sequence
  Description of Artificial Sequence: Synthetic oligonucleotide
  Sense strand starting at position 3822 of SEQ ID NO: 585660
ggagcuaugagauguccaa

SEQ ID NO: 657489 - RNA, 19 nt, Artificial Sequence
  Description of Artificial Sequence: Synthetic oligonucleotide
  Antisense strand to SEQ ID NO: 657488
uuggacaucucauagcucc

SEQ ID NO: 657490 - RNA, 19 nt, Artificial Sequence
  Description of Artificial Sequence: Synthetic oligonucleotide
  Sense strand starting at position 3829 of SEQ ID NO: 585660
ugagauguccaaggagcaa

SEQ ID NO: 657491 - RNA, 19 nt, Artificial Sequence
  Description of Artificial Sequence: Synthetic oligonucleotide
  Antisense strand to SEQ ID NO: 657490
uugcuccuuggacaucuca

SEQ ID NO: 657492 - RNA, 19 nt, Artificial Sequence
  Description of Artificial Sequence: Synthetic oligonucleotide
  Sense strand starting at position 3877 of SEQ ID NO: 585660
agacuaucuugggaagauu

SEQ ID NO: 657493 - RNA, 19 nt, Artificial Sequence
  Description of Artificial Sequence: Synthetic oligonucleotide
  Antisense strand to SEQ ID NO: 657492
aaucuucccaagauagucu

SEQ ID NO: 657494 - RNA, 19 nt, Artificial Sequence
  Description of Artificial Sequence: Synthetic oligonucleotide
  Sense strand starting at position 3901 of SEQ ID NO: 585660
ggcuuacuccucugagaaa

SEQ ID NO: 657495 - RNA, 19 nt, Artificial Sequence
  Description of Artificial Sequence: Synthetic oligonucleotide
  Antisense strand to SEQ ID NO: 657494
uuucucagaggaguaagcc

SEQ ID NO: 657496 - RNA, 19 nt, Artificial Sequence
  Description of Artificial Sequence: Synthetic oligonucleotide
  Sense strand starting at position 3912 of SEQ ID NO: 585660
cugagaaacucagcuacuu

SEQ ID NO: 657497 - RNA, 19 nt, Artificial Sequence
  Description of Artificial Sequence: Synthetic oligonucleotide
  Antisense strand to SEQ ID NO: 657496
aaguagcugaguuucucag

SEQ ID NO: 657498 - RNA, 19 nt, Artificial Sequence
  Description of Artificial Sequence: Synthetic oligonucleotide
  Sense strand starting at position 3934 of SEQ ID NO: 585660
gcacaaucuggaggugaca

SEQ ID NO: 657499 - RNA, 19 nt, Artificial Sequence
  Description of Artificial Sequence: Synthetic oligonucleotide
  Antisense strand to SEQ ID NO: 657498
ugucaccuccagauugugc

SEQ ID NO: 657500 - RNA, 19 nt, Artificial Sequence
  Description of Artificial Sequence: Synthetic oligonucleotide
  Sense strand starting at position 3976 of SEQ ID NO: 585660
ggcauagugaccuaugguc

SEQ ID NO: 657501 - RNA, 19 nt, Artificial Sequence
  Description of Artificial Sequence: Synthetic oligonucleotide
  Antisense strand to SEQ ID NO: 657500
gaccauaggucacuaugcc

SEQ ID NO: 657502 - RNA, 19 nt, Artificial Sequence
  Description of Artificial Sequence: Synthetic oligonucleotide
  Sense strand starting at position 3978 of SEQ ID NO: 585660
cauagugaccuauggucaa

SEQ ID NO: 657503 - RNA, 19 nt, Artificial Sequence
  Description of Artificial Sequence: Synthetic oligonucleotide
  Antisense strand to SEQ ID NO: 657502
uugaccauaggucacuaug

SEQ ID NO: 657504 - RNA, 19 nt, Artificial Sequence
  Description of Artificial Sequence: Synthetic oligonucleotide
  Sense strand starting at position 3981 of SEQ ID NO: 585660
agugaccuauggucaaauu

SEQ ID NO: 657505 - RNA, 19 nt, Artificial Sequence
  Description of Artificial Sequence: Synthetic oligonucleotide
  Antisense strand to SEQ ID NO: 657504
aauuugaccauaggucacu

SEQ ID NO: 657506 - RNA, 19 nt, Artificial Sequence
  Description of Artificial Sequence: Synthetic oligonucleotide
  Sense strand starting at position 18 of SEQ ID NO: 585661
auugcauuaucauuaggga

SEQ ID NO: 657507 - RNA, 19 nt, Artificial Sequence
  Description of Artificial Sequence: Synthetic oligonucleotide
  Antisense strand to SEQ ID NO: 657506
ucccuaaugauaaugcaau

SEQ ID NO: 657508 - RNA, 19 nt, Artificial Sequence
  Description of Artificial Sequence: Synthetic oligonucleotide
  Sense strand starting at position 19 of SEQ ID NO: 585661
uugcauuaucauuagggac

SEQ ID NO: 657509 - RNA, 19 nt, Artificial Sequence
  Description of Artificial Sequence: Synthetic oligonucleotide
  Antisense strand to SEQ ID NO: 657508
gucccuaaugauaaugcaa

SEQ ID NO: 657510 - RNA, 19 nt, Artificial Sequence
  Description of Artificial Sequence: Synthetic oligonucleotide
  Sense strand starting at position 66 of SEQ ID NO: 585661
ccuccagucuauguaaacu

SEQ ID NO: 657511 - RNA, 19 nt, Artificial Sequence
  Description of Artificial Sequence: Synthetic oligonucleotide
  Antisense strand to SEQ ID NO: 657510
aguuuacauagacuggagg

SEQ ID NO: 657512 - RNA, 19 nt, Artificial Sequence
  Description of Artificial Sequence: Synthetic oligonucleotide
  Sense strand starting at position 156 of SEQ ID NO: 585661
cccagacaccuuugucaag

SEQ ID NO: 657513 - RNA, 19 nt, Artificial Sequence
  Description of Artificial Sequence: Synthetic oligonucleotide
  Antisense strand to SEQ ID NO: 657512
cuugacaaaggugucuggg

SEQ ID NO: 657514 - RNA, 19 nt, Artificial Sequence
  Description of Artificial Sequence: Synthetic oligonucleotide
  Sense strand starting at position 240 of SEQ ID NO: 585661
agaguaauucccuacaagu

SEQ ID NO: 657515 - RNA, 19 nt, Artificial Sequence
  Description of Artificial Sequence: Synthetic oligonucleotide
  Antisense strand to SEQ ID NO: 657514
acuuguagggaauuacucu

SEQ ID NO: 657516 - RNA, 19 nt, Artificial Sequence
  Description of Artificial Sequence: Synthetic oligonucleotide
  Sense strand starting at position 344 of SEQ ID NO: 585661
acaauuccaucagagaaga

SEQ ID NO: 657517 - RNA, 19 nt, Artificial Sequence
  Description of Artificial Sequence: Synthetic oligonucleotide
  Antisense strand to SEQ ID NO: 657516
ucuucucugauggaauugu

SEQ ID NO: 657518 - RNA, 19 nt, Artificial Sequence
  Description of Artificial Sequence: Synthetic oligonucleotide
  Sense strand starting at position 372 of SEQ ID NO: 585661
acuuuagauucccuguuua

SEQ ID NO: 657519 - RNA, 19 nt, Artificial Sequence
  Description of Artificial Sequence: Synthetic oligonucleotide
  Antisense strand to SEQ ID NO: 657518
uaaacagggaaucuaaagu

SEQ ID NO: 657520 - RNA, 19 nt, Artificial Sequence
  Description of Artificial Sequence: Synthetic oligonucleotide
  Sense strand starting at position 469 of SEQ ID NO: 585661
gaagguuugcaggaaggua

SEQ ID NO: 657521 - RNA, 19 nt, Artificial Sequence
  Description of Artificial Sequence: Synthetic oligonucleotide
  Antisense strand to SEQ ID NO: 657520
uaccuuccugcaaaccuuc

SEQ ID NO: 657522 - RNA, 19 nt, Artificial Sequence
  Description of Artificial Sequence: Synthetic oligonucleotide
  Sense strand starting at position 480 of SEQ ID NO: 585661
ggaagguaugcugggaguu

SEQ ID NO: 657523 - RNA, 19 nt, Artificial Sequence
  Description of Artificial Sequence: Synthetic oligonucleotide
  Antisense strand to SEQ ID NO: 657522
aacucccagcauaccuucc

SEQ ID NO: 657524 - RNA, 19 nt, Artificial Sequence
  Description of Artificial Sequence: Synthetic oligonucleotide
  Sense strand starting at position 481 of SEQ ID NO: 585661
gaagguaugcugggaguuu

SEQ ID NO: 657525 - RNA, 19 nt, Artificial Sequence
  Description of Artificial Sequence: Synthetic oligonucleotide
  Antisense strand to SEQ ID NO: 657524
aaacucccagcauaccuuc

SEQ ID NO: 657526 - RNA, 19 nt, Artificial Sequence
  Description of Artificial Sequence: Synthetic oligonucleotide
  Sense strand starting at position 765 of SEQ ID NO: 585661
gccagagccaucuucguuu

SEQ ID NO: 657527 - RNA, 19 nt, Artificial Sequence
  Description of Artificial Sequence: Synthetic oligonucleotide
  Antisense strand to SEQ ID NO: 657526
aaacgaagauggcucuggc

SEQ ID NO: 657528 - RNA, 19 nt, Artificial Sequence
  Description of Artificial Sequence: Synthetic oligonucleotide
  Sense strand starting at position 808 of SEQ ID NO: 585661
ucaccaguguuucuuuacu

SEQ ID NO: 657529 - RNA, 19 nt, Artificial Sequence
  Description of Artificial Sequence: Synthetic oligonucleotide
  Antisense strand to SEQ ID NO: 657528
aguaaagaaacacugguga

SEQ ID NO: 657530 - RNA, 19 nt, Artificial Sequence
  Description of Artificial Sequence: Synthetic oligonucleotide
  Sense strand starting at position 813 of SEQ ID NO: 585661
aguguuucuuuacucgaua

SEQ ID NO: 657531 - RNA, 19 nt, Artificial Sequence
  Description of Artificial Sequence: Synthetic oligonucleotide
  Antisense strand to SEQ ID NO: 657530
uaucgaguaaagaaacacu

SEQ ID NO: 657532 - RNA, 19 nt, Artificial Sequence
  Description of Artificial Sequence: Synthetic oligonucleotide
  Sense strand starting at position 816 of SEQ ID NO: 585661
guuucuuuacucgauaccu

SEQ ID NO: 657533 - RNA, 19 nt, Artificial Sequence
  Description of Artificial Sequence: Synthetic oligonucleotide
  Antisense strand to SEQ ID NO: 657532
agguaucgaguaaagaaac

SEQ ID NO: 657534 - RNA, 19 nt, Artificial Sequence
  Description of Artificial Sequence: Synthetic oligonucleotide
  Sense strand starting at position 859 of SEQ ID NO: 585661
acaggucucucaguccauu

SEQ ID NO: 657535 - RNA, 19 nt, Artificial Sequence
  Description of Artificial Sequence: Synthetic oligonucleotide
  Antisense strand to SEQ ID NO: 657534
aauggacugagagaccugu

SEQ ID NO: 657536 - RNA, 19 nt, Artificial Sequence
  Description of Artificial Sequence: Synthetic oligonucleotide
  Sense strand starting at position 888 of SEQ ID NO: 585661
caggcauucguuuauggac

SEQ ID NO: 657537 - RNA, 19 nt, Artificial Sequence
  Description of Artificial Sequence: Synthetic oligonucleotide
  Antisense strand to SEQ ID NO: 657536
guccauaaacgaaugccug

SEQ ID NO: 657538 - RNA, 19 nt, Artificial Sequence
  Description of Artificial Sequence: Synthetic oligonucleotide
  Sense strand starting at position 895 of SEQ ID NO: 585661
ucguuuauggacgggaaca

SEQ ID NO: 657539 - RNA, 19 nt, Artificial Sequence
  Description of Artificial Sequence: Synthetic oligonucleotide
  Antisense strand to SEQ ID NO: 657538
uguucccguccauaaacga

SEQ ID NO: 657540 - RNA, 19 nt, Artificial Sequence
  Description of Artificial Sequence: Synthetic oligonucleotide
  Sense strand starting at position 1031 of SEQ ID NO: 585661
cuucguagguguuugagga

SEQ ID NO: 657541 - RNA, 19 nt, Artificial Sequence
  Description of Artificial Sequence: Synthetic oligonucleotide
  Antisense strand to SEQ ID NO: 657540
uccucaaacaccuacgaag

SEQ ID NO: 657542 - RNA, 19 nt, Artificial Sequence
  Description of Artificial Sequence: Synthetic oligonucleotide
  Sense strand starting at position 1038 of SEQ ID NO: 585661
gguguuugaggaggccaau

SEQ ID NO: 657543 - RNA, 19 nt, Artificial Sequence
  Description of Artificial Sequence: Synthetic oligonucleotide
  Antisense strand to SEQ ID NO: 657542
auuggccuccucaaacacc

SEQ ID NO: 657544 - RNA, 19 nt, Artificial Sequence
  Description of Artificial Sequence: Synthetic oligonucleotide
  Sense strand starting at position 1048 of SEQ ID NO: 585661
gaggccaaucugugaagau

SEQ ID NO: 657545 - RNA, 19 nt, Artificial Sequence
  Description of Artificial Sequence: Synthetic oligonucleotide
  Antisense strand to SEQ ID NO: 657544
aucuucacagauuggccuc

SEQ ID NO: 657546 - RNA, 19 nt, Artificial Sequence
  Description of Artificial Sequence: Synthetic oligonucleotide
  Sense strand starting at position 1063 of SEQ ID NO: 585661
agauaaauauaugaaggga

SEQ ID NO: 657547 - RNA, 19 nt, Artificial Sequence
  Description of Artificial Sequence: Synthetic oligonucleotide
  Antisense strand to SEQ ID NO: 657546
ucccuucauauauuuaucu

SEQ ID NO: 657548 - RNA, 19 nt, Artificial Sequence
  Description of Artificial Sequence: Synthetic oligonucleotide
  Sense strand starting at position 1090 of SEQ ID NO: 585661
acaagagucauguagcgaa

SEQ ID NO: 657549 - RNA, 19 nt, Artificial Sequence
  Description of Artificial Sequence: Synthetic oligonucleotide
  Antisense strand to SEQ ID NO: 657548
uucgcuacaugacucuugu

SEQ ID NO: 657550 - RNA, 19 nt, Artificial Sequence
  Description of Artificial Sequence: Synthetic oligonucleotide
  Sense strand starting at position 1094 of SEQ ID NO: 585661
gagucauguagcgaauaga

SEQ ID NO: 657551 - RNA, 19 nt, Artificial Sequence
  Description of Artificial Sequence: Synthetic oligonucleotide
  Antisense strand to SEQ ID NO: 657550
ucuauucgcuacaugacuc

SEQ ID NO: 657552 - RNA, 19 nt, Artificial Sequence
  Description of Artificial Sequence: Synthetic oligonucleotide
  Sense strand starting at position 1288 of SEQ ID NO: 585661
gcgacugagcaacauagaa

SEQ ID NO: 657553 - RNA, 19 nt, Artificial Sequence
  Description of Artificial Sequence: Synthetic oligonucleotide
  Antisense strand to SEQ ID NO: 657552
uucuauguugcucagucgc

SEQ ID NO: 657554 - RNA, 19 nt, Artificial Sequence
  Description of Artificial Sequence: Synthetic oligonucleotide
  Sense strand starting at position 1307 of SEQ ID NO: 585661
agcaaagaugcugggauaa

SEQ ID NO: 657555 - RNA, 19 nt, Artificial Sequence
  Description of Artificial Sequence: Synthetic oligonucleotide
  Antisense strand to SEQ ID NO: 657554
uuaucccagcaucuuugcu

SEQ ID NO: 657556 - RNA, 19 nt, Artificial Sequence
  Description of Artificial Sequence: Synthetic oligonucleotide
  Sense strand starting at position 1328 of SEQ ID NO: 585661
gcaggauucuagaguggga

SEQ ID NO: 657557 - RNA, 19 nt, Artificial Sequence
  Description of Artificial Sequence: Synthetic oligonucleotide
  Antisense strand to SEQ ID NO: 657556
ucccacucuagaauccugc

SEQ ID NO: 657558 - RNA, 19 nt, Artificial Sequence
  Description of Artificial Sequence: Synthetic oligonucleotide
  Sense strand starting at position 1330 of SEQ ID NO: 585661
aggauucuagagugggagu

SEQ ID NO: 657559 - RNA, 19 nt, Artificial Sequence
  Description of Artificial Sequence: Synthetic oligonucleotide
  Antisense strand to SEQ ID NO: 657558
acucccacucuagaauccu

SEQ ID NO: 657560 - RNA, 19 nt, Artificial Sequence
  Description of Artificial Sequence: Synthetic oligonucleotide
  Sense strand starting at position 2087 of SEQ ID NO: 585661
cagggcugucuuuaguuua

SEQ ID NO: 657561 - RNA, 19 nt, Artificial Sequence
  Description of Artificial Sequence: Synthetic oligonucleotide
  Antisense strand to SEQ ID NO: 657560
uaaacuaaagacagcccug

SEQ ID NO: 657562 - RNA, 19 nt, Artificial Sequence
  Description of Artificial Sequence: Synthetic oligonucleotide
  Sense strand starting at position 2140 of SEQ ID NO: 585661
ugcggagguuauuugcaua

SEQ ID NO: 657563 - RNA, 19 nt, Artificial Sequence
  Description of Artificial Sequence: Synthetic oligonucleotide
  Antisense strand to SEQ ID NO: 657562
uaugcaaauaaccuccgca

SEQ ID NO: 657564 - RNA, 19 nt, Artificial Sequence
  Description of Artificial Sequence: Synthetic oligonucleotide
  Sense strand starting at position 2143 of SEQ ID NO: 585661
ggagguuauuugcauaaag

SEQ ID NO: 657565 - RNA, 19 nt, Artificial Sequence
  Description of Artificial Sequence: Synthetic oligonucleotide
  Antisense strand to SEQ ID NO: 657564
cuuuaugcaaauaaccucc

SEQ ID NO: 657566 - RNA, 19 nt, Artificial Sequence
  Description of Artificial Sequence: Synthetic oligonucleotide
  Sense strand starting at position 2269 of SEQ ID NO: 585661
gcgguugggacgcagaauu

SEQ ID NO: 657567 - RNA, 19 nt, Artificial Sequence
  Description of Artificial Sequence: Synthetic oligonucleotide
  Antisense strand to SEQ ID NO: 657566
aauucugcgucccaaccgc

SEQ ID NO: 657568 - RNA, 19 nt, Artificial Sequence
  Description of Artificial Sequence: Synthetic oligonucleotide
  Sense strand starting at position 2327 of SEQ ID NO: 585661
ggacguuaguagaaagaug

SEQ ID NO: 657569 - RNA, 19 nt, Artificial Sequence
  Description of Artificial Sequence: Synthetic oligonucleotide
  Antisense strand to SEQ ID NO: 657568
caucuuucuacuaacgucc

SEQ ID NO: 657570 - RNA, 19 nt, Artificial Sequence
  Description of Artificial Sequence: Synthetic oligonucleotide
  Sense strand starting at position 2402 of SEQ ID NO: 585661
cgccuucagcuagggagaa

SEQ ID NO: 657571 - RNA, 19 nt, Artificial Sequence
  Description of Artificial Sequence: Synthetic oligonucleotide
  Antisense strand to SEQ ID NO: 657570
uucucccuagcugaaggcg

SEQ ID NO: 657572 - RNA, 19 nt, Artificial Sequence
  Description of Artificial Sequence: Synthetic oligonucleotide
  Sense strand starting at position 2566 of SEQ ID NO: 585661
gccuuccaguuauuauauu

SEQ ID NO: 657573 - RNA, 19 nt, Artificial Sequence
  Description of Artificial Sequence: Synthetic oligonucleotide
  Antisense strand to SEQ ID NO: 657572
aauauaauaacuggaaggc

SEQ ID NO: 657574 - RNA, 19 nt, Artificial Sequence
  Description of Artificial Sequence: Synthetic oligonucleotide
  Sense strand starting at position 2577 of SEQ ID NO: 585661
auuauauuacgucaugcaa

SEQ ID NO: 657575 - RNA, 19 nt, Artificial Sequence
  Description of Artificial Sequence: Synthetic oligonucleotide
  Antisense strand to SEQ ID NO: 657574
uugcaugacguaauauaau

SEQ ID NO: 657576 - RNA, 19 nt, Artificial Sequence
  Description of Artificial Sequence: Synthetic oligonucleotide
  Sense strand starting at position 2687 of SEQ ID NO: 585661
uugcauaauguaugcaaau

SEQ ID NO: 657577 - RNA, 19 nt, Artificial Sequence
  Description of Artificial Sequence: Synthetic oligonucleotide
  Antisense strand to SEQ ID NO: 657576
auuugcauacauuaugcaa

SEQ ID NO: 657578 - RNA, 19 nt, Artificial Sequence
  Description of Artificial Sequence: Synthetic oligonucleotide
  Sense strand starting at position 2688 of SEQ ID NO: 585661
ugcauaauguaugcaaauc

SEQ ID NO: 657579 - RNA, 19 nt, Artificial Sequence
  Description of Artificial Sequence: Synthetic oligonucleotide
  Antisense strand to SEQ ID NO: 657578
gauuugcauacauuaugca

SEQ ID NO: 657580 - RNA, 19 nt, Artificial Sequence
  Description of Artificial Sequence: Synthetic oligonucleotide
  Sense strand starting at position 2820 of SEQ ID NO: 585661
ugaaauuauugggaauuug

SEQ ID NO: 657581 - RNA, 19 nt, Artificial Sequence
  Description of Artificial Sequence: Synthetic oligonucleotide
  Antisense strand to SEQ ID NO: 657580
caaauucccaauaauuuca

SEQ ID NO: 657582 - RNA, 19 nt, Artificial Sequence
  Description of Artificial Sequence: Synthetic oligonucleotide
  Sense strand starting at position 2865 of SEQ ID NO: 585661
ugugaaaugcaguacuguu

SEQ ID NO: 657583 - RNA, 19 nt, Artificial Sequence
  Description of Artificial Sequence: Synthetic oligonucleotide
  Antisense strand to SEQ ID NO: 657582
aacaguacugcauuucaca

SEQ ID NO: 657584 - RNA, 19 nt, Artificial Sequence
  Description of Artificial Sequence: Synthetic oligonucleotide
  Sense strand starting at position 3642 of SEQ ID NO: 585661
gugauugagaaauguuucu

SEQ ID NO: 657585 - RNA, 19 nt, Artificial Sequence
  Description of Artificial Sequence: Synthetic oligonucleotide
  Antisense strand to SEQ ID NO: 657584
agaaacauuucucaaucac

SEQ ID NO: 657586 - RNA, 19 nt, Artificial Sequence
  Description of Artificial Sequence: Synthetic oligonucleotide
  Sense strand starting at position 293 of SEQ ID NO: 585662
agggcuugucccgggaaca

SEQ ID NO: 657587 - RNA, 19 nt, Artificial Sequence
  Description of Artificial Sequence: Synthetic oligonucleotide
  Antisense strand to SEQ ID NO: 657586
uguucccgggacaagcccu

SEQ ID NO: 657588 - RNA, 19 nt, Artificial Sequence
  Description of Artificial Sequence: Synthetic oligonucleotide
  Sense strand starting at position 294 of SEQ ID NO: 585662
gggcuugucccgggaacac

SEQ ID NO: 657589 - RNA, 19 nt, Artificial Sequence
  Description of Artificial Sequence: Synthetic oligonucleotide
  Antisense strand to SEQ ID NO: 657588
guguucccgggacaagccc

SEQ ID NO: 657590 - RNA, 19 nt, Artificial Sequence
  Description of Artificial Sequence: Synthetic oligonucleotide
  Sense strand starting at position 632 of SEQ ID NO: 585662
gcgagucuccugcagguaa

SEQ ID NO: 657591 - RNA, 19 nt, Artificial Sequence
  Description of Artificial Sequence: Synthetic oligonucleotide
  Antisense strand to SEQ ID NO: 657590
uuaccugcaggagacucgc

SEQ ID NO: 657592 - RNA, 19 nt, Artificial Sequence
  Description of Artificial Sequence: Synthetic oligonucleotide
  Sense strand starting at position 851 of SEQ ID NO: 585662
guggugauggugugaggaa

SEQ ID NO: 657593 - RNA, 19 nt, Artificial Sequence
  Description of Artificial Sequence: Synthetic oligonucleotide
  Antisense strand to SEQ ID NO: 657592
uuccucacaccaucaccac

SEQ ID NO: 657594 - RNA, 19 nt, Artificial Sequence
  Description of Artificial Sequence: Synthetic oligonucleotide
  Sense strand starting at position 1056 of SEQ ID NO: 585662
ggagaaagauaaugggaga

SEQ ID NO: 657595 - RNA, 19 nt, Artificial Sequence
  Description of Artificial Sequence: Synthetic oligonucleotide
  Antisense strand to SEQ ID NO: 657594
ucucccauuaucuuucucc

SEQ ID NO: 657596 - RNA, 19 nt, Artificial Sequence
  Description of Artificial Sequence: Synthetic oligonucleotide
  Sense strand starting at position 1312 of SEQ ID NO: 585662
gugcguaugcguagacaug

SEQ ID NO: 657597 - RNA, 19 nt, Artificial Sequence
  Description of Artificial Sequence: Synthetic oligonucleotide
  Antisense strand to SEQ ID NO: 657596
caugucuacgcauacgcac

SEQ ID NO: 657598 - RNA, 19 nt, Artificial Sequence
  Description of Artificial Sequence: Synthetic oligonucleotide
  Sense strand starting at position 1328 of SEQ ID NO: 585662
augcaacccuguguuaaua

SEQ ID NO: 657599 - RNA, 19 nt, Artificial Sequence
  Description of Artificial Sequence: Synthetic oligonucleotide
  Antisense strand to SEQ ID NO: 657598
uauuaacacaggguugcau

SEQ ID NO: 657600 - RNA, 19 nt, Artificial Sequence
  Description of Artificial Sequence: Synthetic oligonucleotide
  Sense strand starting at position 1336 of SEQ ID NO: 585662
cuguguuaauaugugcuca

SEQ ID NO: 657601 - RNA, 19 nt, Artificial Sequence
  Description of Artificial Sequence: Synthetic oligonucleotide
  Antisense strand to SEQ ID NO: 657600
ugagcacauauuaacacag

SEQ ID NO: 657602 - RNA, 19 nt, Artificial Sequence
  Description of Artificial Sequence: Synthetic oligonucleotide
  Sense strand starting at position 1338 of SEQ ID NO: 585662
guguuaauaugugcucaau

SEQ ID NO: 657603 - RNA, 19 nt, Artificial Sequence
  Description of Artificial Sequence: Synthetic oligonucleotide
  Antisense strand to SEQ ID NO: 657602
auugagcacauauuaacac

SEQ ID NO: 657604 - RNA, 19 nt, Artificial Sequence
  Description of Artificial Sequence: Synthetic oligonucleotide
  Sense strand starting at position 1340 of SEQ ID NO: 585662
guuaauaugugcucaauuc

SEQ ID NO: 657605 - RNA, 19 nt, Artificial Sequence
  Description of Artificial Sequence: Synthetic oligonucleotide
  Antisense strand to SEQ ID NO: 657604
gaauugagcacauauuaac

SEQ ID NO: 657606 - RNA, 19 nt, Artificial Sequence
  Description of Artificial Sequence: Synthetic oligonucleotide
  Sense strand starting at position 1365 of SEQ ID NO: 585662
uguauaaacacauguggga

SEQ ID NO: 657607 - RNA, 19 nt, Artificial Sequence
  Description of Artificial Sequence: Synthetic oligonucleotide
  Antisense strand to SEQ ID NO: 657606
ucccacauguguuuauaca

SEQ ID NO: 657608 - RNA, 19 nt, Artificial Sequence
  Description of Artificial Sequence: Synthetic oligonucleotide
  Sense strand starting at position 1379 of SEQ ID NO: 585662
ugggaugacauguguucca

SEQ ID NO: 657609 - RNA, 19 nt, Artificial Sequence
  Description of Artificial Sequence: Synthetic oligonucleotide
  Antisense strand to SEQ ID NO: 657608
uggaacacaugucauccca

SEQ ID NO: 657610 - RNA, 19 nt, Artificial Sequence
  Description of Artificial Sequence: Synthetic oligonucleotide
  Sense strand starting at position 1514 of SEQ ID NO: 585662
cuggucaugucuccauauu

SEQ ID NO: 657611 - RNA, 19 nt, Artificial Sequence
  Description of Artificial Sequence: Synthetic oligonucleotide
  Antisense strand to SEQ ID NO: 657610
aauauggagacaugaccag

SEQ ID NO: 657612 - RNA, 19 nt, Artificial Sequence
  Description of Artificial Sequence: Synthetic oligonucleotide
  Sense strand starting at position 1538 of SEQ ID NO: 585662
acaggaugucuccaugcca

SEQ ID NO: 657613 - RNA, 19 nt, Artificial Sequence
  Description of Artificial Sequence: Synthetic oligonucleotide
  Antisense strand to SEQ ID NO: 657612
uggcauggagacauccugu

SEQ ID NO: 657614 - RNA, 19 nt, Artificial Sequence
  Description of Artificial Sequence: Synthetic oligonucleotide
  Sense strand starting at position 1734 of SEQ ID NO: 585662
guguugagagcuggagaga

SEQ ID NO: 657615 - RNA, 19 nt, Artificial Sequence
  Description of Artificial Sequence: Synthetic oligonucleotide
  Antisense strand to SEQ ID NO: 657614
ucucuccagcucucaacac

SEQ ID NO: 657616 - RNA, 19 nt, Artificial Sequence
  Description of Artificial Sequence: Synthetic oligonucleotide
  Sense strand starting at position 2178 of SEQ ID NO: 585662
uuccuuuggaguugucaug

SEQ ID NO: 657617 - RNA, 19 nt, Artificial Sequence
  Description of Artificial Sequence: Synthetic oligonucleotide
  Antisense strand to SEQ ID NO: 657616
caugacaacuccaaaggaa

SEQ ID NO: 657618 - RNA, 19 nt, Artificial Sequence
  Description of Artificial Sequence: Synthetic oligonucleotide
  Sense strand starting at position 2273 of SEQ ID NO: 585662
caccaagacucagugauug

SEQ ID NO: 657619 - RNA, 19 nt, Artificial Sequence
  Description of Artificial Sequence: Synthetic oligonucleotide
  Antisense strand to SEQ ID NO: 657618
caaucacugagucuuggug

SEQ ID NO: 657620 - RNA, 19 nt, Artificial Sequence
  Description of Artificial Sequence: Synthetic oligonucleotide
  Sense strand starting at position 2277 of SEQ ID NO: 585662
aagacucagugauuguauu

SEQ ID NO: 657621 - RNA, 19 nt, Artificial Sequence
  Description of Artificial Sequence: Synthetic oligonucleotide
  Antisense strand to SEQ ID NO: 657620
aauacaaucacugagucuu

SEQ ID NO: 657622 - RNA, 19 nt, Artificial Sequence
  Description of Artificial Sequence: Synthetic oligonucleotide
  Sense strand starting at position 2287 of SEQ ID NO: 585662
gauuguauugugggaggaa

SEQ ID NO: 657623 - RNA, 19 nt, Artificial Sequence
  Description of Artificial Sequence: Synthetic oligonucleotide
  Antisense strand to SEQ ID NO: 657622
uuccucccacaauacaauc

SEQ ID NO: 657624 - RNA, 19 nt, Artificial Sequence
  Description of Artificial Sequence: Synthetic oligonucleotide
  Sense strand starting at position 2288 of SEQ ID NO: 585662
auuguauugugggaggaag

SEQ ID NO: 657625 - RNA, 19 nt, Artificial Sequence
  Description of Artificial Sequence: Synthetic oligonucleotide
  Antisense strand to SEQ ID NO: 657624
cuuccucccacaauacaau

SEQ ID NO: 657626 - RNA, 19 nt, Artificial Sequence
  Description of Artificial Sequence: Synthetic oligonucleotide
  Sense strand starting at position 2310 of SEQ ID NO: 585662
acagguucucaguggaguu

SEQ ID NO: 657627 - RNA, 19 nt, Artificial Sequence
  Description of Artificial Sequence: Synthetic oligonucleotide
  Antisense strand to SEQ ID NO: 657626
aacuccacugagaaccugu

SEQ ID NO: 657628 - RNA, 19 nt, Artificial Sequence
  Description of Artificial Sequence: Synthetic oligonucleotide
  Sense strand starting at position 2311 of SEQ ID NO: 585662
cagguucucaguggaguua

SEQ ID NO: 657629 - RNA, 19 nt, Artificial Sequence
  Description of Artificial Sequence: Synthetic oligonucleotide
  Antisense strand to SEQ ID NO: 657628
uaacuccacugagaaccug

SEQ ID NO: 657630 - RNA, 19 nt, Artificial Sequence
  Description of Artificial Sequence: Synthetic oligonucleotide
  Sense strand starting at position 2312 of SEQ ID NO: 585662
agguucucaguggaguuaa

SEQ ID NO: 657631 - RNA, 19 nt, Artificial Sequence
  Description of Artificial Sequence: Synthetic oligonucleotide
  Antisense strand to SEQ ID NO: 657630
uuaacuccacugagaaccu

SEQ ID NO: 657632 - RNA, 19 nt, Artificial Sequence
  Description of Artificial Sequence: Synthetic oligonucleotide
  Sense strand starting at position 2420 of SEQ ID NO: 585662
uccuccucuuuagaagaga

SEQ ID NO: 657633 - RNA, 19 nt, Artificial Sequence
  Description of Artificial Sequence: Synthetic oligonucleotide
  Antisense strand to SEQ ID NO: 657632
ucucuucuaaagaggagga

SEQ ID NO: 657634 - RNA, 19 nt, Artificial Sequence
  Description of Artificial Sequence: Synthetic oligonucleotide
  Sense strand starting at position 2456 of SEQ ID NO: 585662
gagagaauugugcagaguu

SEQ ID NO: 657635 - RNA, 19 nt, Artificial Sequence
  Description of Artificial Sequence: Synthetic oligonucleotide
  Antisense strand to SEQ ID NO: 657634
aacucugcacaauucucuc

SEQ ID NO: 657636 - RNA, 19 nt, Artificial Sequence
  Description of Artificial Sequence: Synthetic oligonucleotide
  Sense strand starting at position 2540 of SEQ ID NO: 585662
gaggcccaggucuguaaau

SEQ ID NO: 657637 - RNA, 19 nt, Artificial Sequence
  Description of Artificial Sequence: Synthetic oligonucleotide
  Antisense strand to SEQ ID NO: 657636
auuuacagaccugggccuc

SEQ ID NO: 657638 - RNA, 19 nt, Artificial Sequence
  Description of Artificial Sequence: Synthetic oligonucleotide
  Sense strand starting at position 2542 of SEQ ID NO: 585662
ggcccaggucuguaaauca

SEQ ID NO: 657639 - RNA, 19 nt, Artificial Sequence
  Description of Artificial Sequence: Synthetic oligonucleotide
  Antisense strand to SEQ ID NO: 657638
ugauuuacagaccugggcc

SEQ ID NO: 657640 - RNA, 19 nt, Artificial Sequence
  Description of Artificial Sequence: Synthetic oligonucleotide
  Sense strand starting at position 2620 of SEQ ID NO: 585662
cuucuucguccaggacuaa

SEQ ID NO: 657641 - RNA, 19 nt, Artificial Sequence
  Description of Artificial Sequence: Synthetic oligonucleotide
  Antisense strand to SEQ ID NO: 657640
uuaguccuggacgaagaag

SEQ ID NO: 657642 - RNA, 19 nt, Artificial Sequence
  Description of Artificial Sequence: Synthetic oligonucleotide
  Sense strand starting at position 2694 of SEQ ID NO: 585662
gcagcucuguugguaaugu

SEQ ID NO: 657643 - RNA, 19 nt, Artificial Sequence
  Description of Artificial Sequence: Synthetic oligonucleotide
  Antisense strand to SEQ ID NO: 657642
acauuaccaacagagcugc

SEQ ID NO: 657644 - RNA, 19 nt, Artificial Sequence
  Description of Artificial Sequence: Synthetic oligonucleotide
  Sense strand starting at position 2703 of SEQ ID NO: 585662
uugguaaugugugcuuguu

SEQ ID NO: 657645 - RNA, 19 nt, Artificial Sequence
  Description of Artificial Sequence: Synthetic oligonucleotide
  Antisense strand to SEQ ID NO: 657644
aacaagcacacauuaccaa

SEQ ID NO: 657646 - RNA, 19 nt, Artificial Sequence
  Description of Artificial Sequence: Synthetic oligonucleotide
  Sense strand starting at position 2855 of SEQ ID NO: 585662
gcaguacagcguuauuagu

SEQ ID NO: 657647 - RNA, 19 nt, Artificial Sequence
  Description of Artificial Sequence: Synthetic oligonucleotide
  Antisense strand to SEQ ID NO: 657646
acuaauaacgcuguacugc

SEQ ID NO: 657648 - RNA, 19 nt, Artificial Sequence
  Description of Artificial Sequence: Synthetic oligonucleotide
  Sense strand starting at position 2930 of SEQ ID NO: 585662
uaggaagucuauggagauu

SEQ ID NO: 657649 - RNA, 19 nt, Artificial Sequence
  Description of Artificial Sequence: Synthetic oligonucleotide
  Antisense strand to SEQ ID NO: 657648
aaucuccauagacuuccua

SEQ ID NO: 657650 - RNA, 19 nt, Artificial Sequence
  Description of Artificial Sequence: Synthetic oligonucleotide
  Sense strand starting at position 3222 of SEQ ID NO: 585662
acaccauucugagcgcaaa

SEQ ID NO: 657651 - RNA, 19 nt, Artificial Sequence
  Description of Artificial Sequence: Synthetic oligonucleotide
  Antisense strand to SEQ ID NO: 657650
uuugcgcucagaauggugu

SEQ ID NO: 657652 - RNA, 19 nt, Artificial Sequence
  Description of Artificial Sequence: Synthetic oligonucleotide
  Sense strand starting at position 3328 of SEQ ID NO: 585662
agagaaacgucuuuaaaug

SEQ ID NO: 657653 - RNA, 19 nt, Artificial Sequence
  Description of Artificial Sequence: Synthetic oligonucleotide
  Antisense strand to SEQ ID NO: 657652
cauuuaaagacguuucucu

SEQ ID NO: 657654 - RNA, 19 nt, Artificial Sequence
  Description of Artificial Sequence: Synthetic oligonucleotide
  Sense strand starting at position 3329 of SEQ ID NO: 585662
gagaaacgucuuuaaaugc

SEQ ID NO: 657655 - RNA, 19 nt, Artificial Sequence
  Description of Artificial Sequence: Synthetic oligonucleotide
  Antisense strand to SEQ ID NO: 657654
gcauuuaaagacguuucuc

SEQ ID NO: 657656 - RNA, 19 nt, Artificial Sequence
  Description of Artificial Sequence: Synthetic oligonucleotide
  Sense strand starting at position 3481 of SEQ ID NO: 585662
ggucguucagguugaaaga

SEQ ID NO: 657657 - RNA, 19 nt, Artificial Sequence
  Description of Artificial Sequence: Synthetic oligonucleotide
  Antisense strand to SEQ ID NO: 657656
ucuuucaaccugaacgacc

SEQ ID NO: 657658 - RNA, 19 nt, Artificial Sequence
  Description of Artificial Sequence: Synthetic oligonucleotide
  Sense strand starting at position 3490 of SEQ ID NO: 585662
gguugaaagacuggucgaa

SEQ ID NO: 657659 - RNA, 19 nt, Artificial Sequence
  Description of Artificial Sequence: Synthetic oligonucleotide
  Antisense strand to SEQ ID NO: 657658
uucgaccagucuuucaacc

SEQ ID NO: 657660 - RNA, 19 nt, Artificial Sequence
  Description of Artificial Sequence: Synthetic oligonucleotide
  Sense strand starting at position 3492 of SEQ ID NO: 585662
uugaaagacuggucgaaau

SEQ ID NO: 657661 - RNA, 19 nt, Artificial Sequence
  Description of Artificial Sequence: Synthetic oligonucleotide
  Antisense strand to SEQ ID NO: 657660
auuucgaccagucuuucaa

SEQ ID NO: 657662 - RNA, 19 nt, Artificial Sequence
  Description of Artificial Sequence: Synthetic oligonucleotide
  Sense strand starting at position 3503 of SEQ ID NO: 585662
gucgaaauuacgcgggcau

SEQ ID NO: 657663 - RNA, 19 nt, Artificial Sequence
  Description of Artificial Sequence: Synthetic oligonucleotide
  Antisense strand to SEQ ID NO: 657662
augcccgcguaauuucgac

SEQ ID NO: 657664 - RNA, 19 nt, Artificial Sequence
  Description of Artificial Sequence: Synthetic oligonucleotide
  Sense strand starting at position 3505 of SEQ ID NO: 585662
cgaaauuacgcgggcauga

SEQ ID NO: 657665 - RNA, 19 nt, Artificial Sequence
  Description of Artificial Sequence: Synthetic oligonucleotide
  Antisense strand to SEQ ID NO: 657664
ucaugcccgcguaauuucg

SEQ ID NO: 657666 - RNA, 19 nt, Artificial Sequence
  Description of Artificial Sequence: Synthetic oligonucleotide
  Sense strand starting at position 23 of SEQ ID NO: 585663
uugacuuuacucugaaguc

SEQ ID NO: 657667 - RNA, 19 nt, Artificial Sequence
  Description of Artificial Sequence: Synthetic oligonucleotide
  Antisense strand to SEQ ID NO: 657666
gacuucagaguaaagucaa

SEQ ID NO: 657668 - RNA, 19 nt, Artificial Sequence
  Description of Artificial Sequence: Synthetic oligonucleotide
  Sense strand starting at position 94 of SEQ ID NO: 585663
gacuuaagccagggaggau

SEQ ID NO: 657669 - RNA, 19 nt, Artificial Sequence
  Description of Artificial Sequence: Synthetic oligonucleotide
  Antisense strand to SEQ ID NO: 657668
auccucccuggcuuaaguc

SEQ ID NO: 657670 - RNA, 19 nt, Artificial Sequence
  Description of Artificial Sequence: Synthetic oligonucleotide
  Sense strand starting at position 106 of SEQ ID NO: 585663
ggaggaucauguccugguu

SEQ ID NO: 657671 - RNA, 19 nt, Artificial Sequence
  Description of Artificial Sequence: Synthetic oligonucleotide
  Antisense strand to SEQ ID NO: 657670
aaccaggacaugauccucc

SEQ ID NO: 657672 - RNA, 19 nt, Artificial Sequence
  Description of Artificial Sequence: Synthetic oligonucleotide
  Sense strand starting at position 109 of SEQ ID NO: 585663
ggaucauguccugguuuau

SEQ ID NO: 657673 - RNA, 19 nt, Artificial Sequence
  Description of Artificial Sequence: Synthetic oligonucleotide
  Antisense strand to SEQ ID NO: 657672
auaaaccaggacaugaucc

SEQ ID NO: 657674 - RNA, 19 nt, Artificial Sequence
  Description of Artificial Sequence: Synthetic oligonucleotide
  Sense strand starting at position 120 of SEQ ID NO: 585663
ugguuuaugcucuaacaga

SEQ ID NO: 657675 - RNA, 19 nt, Artificial Sequence
  Description of Artificial Sequence: Synthetic oligonucleotide
  Antisense strand to SEQ ID NO: 657674
ucuguuagagcauaaacca

SEQ ID NO: 657676 - RNA, 19 nt, Artificial Sequence
  Description of Artificial Sequence: Synthetic oligonucleotide
  Sense strand starting at position 201 of SEQ ID NO: 585663
ccguaauccagguaaggaa

SEQ ID NO: 657677 - RNA, 19 nt, Artificial Sequence
  Description of Artificial Sequence: Synthetic oligonucleotide
  Antisense strand to SEQ ID NO: 657676
uuccuuaccuggauuacgg

SEQ ID NO: 657678 - RNA, 19 nt, Artificial Sequence
  Description of Artificial Sequence: Synthetic oligonucleotide
  Sense strand starting at position 447 of SEQ ID NO: 585663
agacauuccuguccuuuga

SEQ ID NO: 657679 - RNA, 19 nt, Artificial Sequence
  Description of Artificial Sequence: Synthetic oligonucleotide
  Antisense strand to SEQ ID NO: 657678
ucaaaggacaggaaugucu

SEQ ID NO: 657680 - RNA, 19 nt, Artificial Sequence
  Description of Artificial Sequence: Synthetic oligonucleotide
  Sense strand starting at position 658 of SEQ ID NO: 585663
ugagaugcaaguugaguuu

SEQ ID NO: 657681 - RNA, 19 nt, Artificial Sequence
  Description of Artificial Sequence: Synthetic oligonucleotide
  Antisense strand to SEQ ID NO: 657680
aaacucaacuugcaucuca

SEQ ID NO: 657682 - RNA, 19 nt, Artificial Sequence
  Description of Artificial Sequence: Synthetic oligonucleotide
  Sense strand starting at position 899 of SEQ ID NO: 585663
aagaaauggcacugugaga

SEQ ID NO: 657683 - RNA, 19 nt, Artificial Sequence
  Description of Artificial Sequence: Synthetic oligonucleotide
  Antisense strand to SEQ ID NO: 657682
ucucacagugccauuucuu

SEQ ID NO: 657684 - RNA, 19 nt, Artificial Sequence
  Description of Artificial Sequence: Synthetic oligonucleotide
  Sense strand starting at position 965 of SEQ ID NO: 585663
auggaucuuuccuuaugua

SEQ ID NO: 657685 - RNA, 19 nt, Artificial Sequence
  Description of Artificial Sequence: Synthetic oligonucleotide
  Antisense strand to SEQ ID NO: 657684
uacauaaggaaagauccau

SEQ ID NO: 657686 - RNA, 19 nt, Artificial Sequence
  Description of Artificial Sequence: Synthetic oligonucleotide
  Sense strand starting at position 966 of SEQ ID NO: 585663
uggaucuuuccuuauguac

SEQ ID NO: 657687 - RNA, 19 nt, Artificial Sequence
  Description of Artificial Sequence: Synthetic oligonucleotide
  Antisense strand to SEQ ID NO: 657686
guacauaaggaaagaucca

SEQ ID NO: 657688 - RNA, 19 nt, Artificial Sequence
  Description of Artificial Sequence: Synthetic oligonucleotide
  Sense strand starting at position 983 of SEQ ID NO: 585663
acuuaacagugucugaaau

SEQ ID NO: 657689 - RNA, 19 nt, Artificial Sequence
  Description of Artificial Sequence: Synthetic oligonucleotide
  Antisense strand to SEQ ID NO: 657688
auuucagacacuguuaagu

SEQ ID NO: 657690 - RNA, 19 nt, Artificial Sequence
  Description of Artificial Sequence: Synthetic oligonucleotide
  Sense strand starting at position 984 of SEQ ID NO: 585663
cuuaacagugucugaaaug

SEQ ID NO: 657691 - RNA, 19 nt, Artificial Sequence
  Description of Artificial Sequence: Synthetic oligonucleotide
  Antisense strand to SEQ ID NO: 657690
cauuucagacacuguuaag

SEQ ID NO: 657692 - RNA, 19 nt, Artificial Sequence
  Description of Artificial Sequence: Synthetic oligonucleotide
  Sense strand starting at position 995 of SEQ ID NO: 585663
cugaaaugagcuuguuuau

SEQ ID NO: 657693 - RNA, 19 nt, Artificial Sequence
  Description of Artificial Sequence: Synthetic oligonucleotide
  Antisense strand to SEQ ID NO: 657692
auaaacaagcucauuucag

SEQ ID NO: 657694 - RNA, 19 nt, Artificial Sequence
  Description of Artificial Sequence: Synthetic oligonucleotide
  Sense strand starting at position 1121 of SEQ ID NO: 585663
uggcucucacauugaagga

SEQ ID NO: 657695 - RNA, 19 nt, Artificial Sequence
  Description of Artificial Sequence: Synthetic oligonucleotide
  Antisense strand to SEQ ID NO: 657694
uccuucaaugugagagcca

SEQ ID NO: 657696 - RNA, 19 nt, Artificial Sequence
  Description of Artificial Sequence: Synthetic oligonucleotide
  Sense strand starting at position 1140 of SEQ ID NO: 585663
acuugcuauuucuugaagu

SEQ ID NO: 657697 - RNA, 19 nt, Artificial Sequence
  Description of Artificial Sequence: Synthetic oligonucleotide
  Antisense strand to SEQ ID NO: 657696
acuucaagaaauagcaagu

SEQ ID NO: 657698 - RNA, 19 nt, Artificial Sequence
  Description of Artificial Sequence: Synthetic oligonucleotide
  Sense strand starting at position 1205 of SEQ ID NO: 585663
auccaagugggaugauauu

SEQ ID NO: 657699 - RNA, 19 nt, Artificial Sequence
  Description of Artificial Sequence: Synthetic oligonucleotide
  Antisense strand to SEQ ID NO: 657698
aauaucaucccacuuggau

SEQ ID NO: 657700 - RNA, 19 nt, Artificial Sequence
  Description of Artificial Sequence: Synthetic oligonucleotide
  Sense strand starting at position 1214 of SEQ ID NO: 585663
ggaugauauuuggagacua

SEQ ID NO: 657701 - RNA, 19 nt, Artificial Sequence
  Description of Artificial Sequence: Synthetic oligonucleotide
  Antisense strand to SEQ ID NO: 657700
uagucuccaaauaucaucc

SEQ ID NO: 657702 - RNA, 19 nt, Artificial Sequence
  Description of Artificial Sequence: Synthetic oligonucleotide
  Sense strand starting at position 1256 of SEQ ID NO: 585663
uggcgaauuuguuccuucu

SEQ ID NO: 657703 - RNA, 19 nt, Artificial Sequence
  Description of Artificial Sequence: Synthetic oligonucleotide
  Antisense strand to SEQ ID NO: 657702
agaaggaacaaauucgcca

SEQ ID NO: 657704 - RNA, 19 nt, Artificial Sequence
  Description of Artificial Sequence: Synthetic oligonucleotide
  Sense strand starting at position 1258 of SEQ ID NO: 585663
gcgaauuuguuccuucuuu

SEQ ID NO: 657705 - RNA, 19 nt, Artificial Sequence
  Description of Artificial Sequence: Synthetic oligonucleotide
  Antisense strand to SEQ ID NO: 657704
aaagaaggaacaaauucgc

SEQ ID NO: 657706 - RNA, 19 nt, Artificial Sequence
  Description of Artificial Sequence: Synthetic oligonucleotide
  Sense strand starting at position 1262 of SEQ ID NO: 585663
auuuguuccuucuuucgau

SEQ ID NO: 657707 - RNA, 19 nt, Artificial Sequence
  Description of Artificial Sequence: Synthetic oligonucleotide
  Antisense strand to SEQ ID NO: 657706
aucgaaagaaggaacaaau

SEQ ID NO: 657708 - RNA, 19 nt, Artificial Sequence
  Description of Artificial Sequence: Synthetic oligonucleotide
  Sense strand starting at position 1268 of SEQ ID NO: 585663
uccuucuuucgauagauau

SEQ ID NO: 657709 - RNA, 19 nt, Artificial Sequence
  Description of Artificial Sequence: Synthetic oligonucleotide
  Antisense strand to SEQ ID NO: 657708
auaucuaucgaaagaagga

SEQ ID NO: 657710 - RNA, 19 nt, Artificial Sequence
  Description of Artificial Sequence: Synthetic oligonucleotide
  Sense strand starting at position 1278 of SEQ ID NO: 585663
gauagauaucuuugagugc

SEQ ID NO: 657711 - RNA, 19 nt, Artificial Sequence
  Description of Artificial Sequence: Synthetic oligonucleotide
  Antisense strand to SEQ ID NO: 657710
gcacucaaagauaucuauc

SEQ ID NO: 657712 - RNA, 19 nt, Artificial Sequence
  Description of Artificial Sequence: Synthetic oligonucleotide
  Sense strand starting at position 1403 of SEQ ID NO: 585663
aggagcagugaaugugaau

SEQ ID NO: 657713 - RNA, 19 nt, Artificial Sequence
  Description of Artificial Sequence: Synthetic oligonucleotide
  Antisense strand to SEQ ID NO: 657712
auucacauucacugcuccu

SEQ ID NO: 657714 - RNA, 19 nt, Artificial Sequence
  Description of Artificial Sequence: Synthetic oligonucleotide
  Sense strand starting at position 2013 of SEQ ID NO: 585663
ggaggaccuuuaucuuauc

SEQ ID NO: 657715 - RNA, 19 nt, Artificial Sequence
  Description of Artificial Sequence: Synthetic oligonucleotide
  Antisense strand to SEQ ID NO: 657714
gauaagauaaagguccucc

SEQ ID NO: 657716 - RNA, 19 nt, Artificial Sequence
  Description of Artificial Sequence: Synthetic oligonucleotide
  Sense strand starting at position 2106 of SEQ ID NO: 585663
gucuguaggaacugcuaaa

SEQ ID NO: 657717 - RNA, 19 nt, Artificial Sequence
  Description of Artificial Sequence: Synthetic oligonucleotide
  Antisense strand to SEQ ID NO: 657716
uuuagcaguuccuacagac

SEQ ID NO: 657718 - RNA, 19 nt, Artificial Sequence
  Description of Artificial Sequence: Synthetic oligonucleotide
  Sense strand starting at position 2602 of SEQ ID NO: 585663
uccauagacuccuuacagu

SEQ ID NO: 657719 - RNA, 19 nt, Artificial Sequence
  Description of Artificial Sequence: Synthetic oligonucleotide
  Antisense strand to SEQ ID NO: 657718
acuguaaggagucuaugga

SEQ ID NO: 657720 - RNA, 19 nt, Artificial Sequence
  Description of Artificial Sequence: Synthetic oligonucleotide
  Sense strand starting at position 2675 of SEQ ID NO: 585663
cacccuauggauugugauu

SEQ ID NO: 657721 - RNA, 19 nt, Artificial Sequence
  Description of Artificial Sequence: Synthetic oligonucleotide
  Antisense strand to SEQ ID NO: 657720
aaucacaauccauagggug

SEQ ID NO: 657722 - RNA, 19 nt, Artificial Sequence
  Description of Artificial Sequence: Synthetic oligonucleotide
  Sense strand starting at position 2972 of SEQ ID NO: 585663
caucucugacuugggauau

SEQ ID NO: 657723 - RNA, 19 nt, Artificial Sequence
  Description of Artificial Sequence: Synthetic oligonucleotide
  Antisense strand to SEQ ID NO: 657722
auaucccaagucagagaug

SEQ ID NO: 657724 - RNA, 19 nt, Artificial Sequence
  Description of Artificial Sequence: Synthetic oligonucleotide
  Sense strand starting at position 3521 of SEQ ID NO: 585663
aaguaagcuuauucuggga

SEQ ID NO: 657725 - RNA, 19 nt, Artificial Sequence
  Description of Artificial Sequence: Synthetic oligonucleotide
  Antisense strand to SEQ ID NO: 657724
ucccagaauaagcuuacuu

SEQ ID NO: 657726 - RNA, 19 nt, Artificial Sequence
  Description of Artificial Sequence: Synthetic oligonucleotide
  Sense strand starting at position 3525 of SEQ ID NO: 585663
aagcuuauucugggaagca

SEQ ID NO: 657727 - RNA, 19 nt, Artificial Sequence
  Description of Artificial Sequence: Synthetic oligonucleotide
  Antisense strand to SEQ ID NO: 657726
ugcuucccagaauaagcuu

SEQ ID NO: 657728 - RNA, 19 nt, Artificial Sequence
  Description of Artificial Sequence: Synthetic oligonucleotide
  Sense strand starting at position 3599 of SEQ ID NO: 585663
cuugaaagguucucaauga

SEQ ID NO: 657729 - RNA, 19 nt, Artificial Sequence
  Description of Artificial Sequence: Synthetic oligonucleotide
  Antisense strand to SEQ ID NO: 657728
ucauugagaaccuuucaag

SEQ ID NO: 657730 - RNA, 19 nt, Artificial Sequence
  Description of Artificial Sequence: Synthetic oligonucleotide
  Sense strand starting at position 3614 of SEQ ID NO: 585663
augaauaugcagugagcaa

SEQ ID NO: 657731 - RNA, 19 nt, Artificial Sequence
  Description of Artificial Sequence: Synthetic oligonucleotide
  Antisense strand to SEQ ID NO: 657730
uugcucacugcauauucau

SEQ ID NO: 657732 - RNA, 19 nt, Artificial Sequence
  Description of Artificial Sequence: Synthetic oligonucleotide
  Sense strand starting at position 3615 of SEQ ID NO: 585663
ugaauaugcagugagcaaa

SEQ ID NO: 657733 - RNA, 19 nt, Artificial Sequence
  Description of Artificial Sequence: Synthetic oligonucleotide
  Antisense strand to SEQ ID NO: 657732
uuugcucacugcauauuca

SEQ ID NO: 657734 - RNA, 19 nt, Artificial Sequence
  Description of Artificial Sequence: Synthetic oligonucleotide
  Sense strand starting at position 3702 of SEQ ID NO: 585663
ugaccuaagaguugaggca

SEQ ID NO: 657735 - RNA, 19 nt, Artificial Sequence
  Description of Artificial Sequence: Synthetic oligonucleotide
  Antisense strand to SEQ ID NO: 657734
ugccucaacucuuagguca

SEQ ID NO: 657736 - RNA, 19 nt, Artificial Sequence
  Description of Artificial Sequence: Synthetic oligonucleotide
  Sense strand starting at position 3811 of SEQ ID NO: 585663
gaggguuucuggcccaaga

SEQ ID NO: 657737 - RNA, 19 nt, Artificial Sequence
  Description of Artificial Sequence: Synthetic oligonucleotide
  Antisense strand to SEQ ID NO: 657736
ucuugggccagaaacccuc

SEQ ID NO: 657738 - RNA, 19 nt, Artificial Sequence
  Description of Artificial Sequence: Synthetic oligonucleotide
  Sense strand starting at position 3813 of SEQ ID NO: 585663
ggguuucuggcccaagaaa

SEQ ID NO: 657739 - RNA, 19 nt, Artificial Sequence
  Description of Artificial Sequence: Synthetic oligonucleotide
  Antisense strand to SEQ ID NO: 657738
uuucuugggccagaaaccc

SEQ ID NO: 657740 - RNA, 19 nt, Artificial Sequence
  Description of Artificial Sequence: Synthetic oligonucleotide
  Sense strand starting at position 3838 of SEQ ID NO: 585663
gugcaaagacucugaguca

SEQ ID NO: 657741 - RNA, 19 nt, Artificial Sequence
  Description of Artificial Sequence: Synthetic oligonucleotide
  Antisense strand to SEQ ID NO: 657740
ugacucagagucuuugcac

SEQ ID NO: 657742 - RNA, 19 nt, Artificial Sequence
  Description of Artificial Sequence: Synthetic oligonucleotide
  Sense strand starting at position 3889 of SEQ ID NO: 585663
caguuagugggcuggaaag

SEQ ID NO: 657743 - RNA, 19 nt, Artificial Sequence
  Description of Artificial Sequence: Synthetic oligonucleotide
  Antisense strand to SEQ ID NO: 657742
cuuuccagcccacuaacug

SEQ ID NO: 657744 - RNA, 19 nt, Artificial Sequence
  Description of Artificial Sequence: Synthetic oligonucleotide
  Sense strand starting at position 3922 of SEQ ID NO: 585663
ugaauuagaugagaagaga

SEQ ID NO: 657745 - RNA, 19 nt, Artificial Sequence
  Description of Artificial Sequence: Synthetic oligonucleotide
  Antisense strand to SEQ ID NO: 657744
ucucuucucaucuaauuca

SEQ ID NO: 657746 - RNA, 19 nt, Artificial Sequence
  Description of Artificial Sequence: Synthetic oligonucleotide
  Sense strand starting at position 28 of SEQ ID NO: 585664
gguaaaguuacacaguuga

SEQ ID NO: 657747 - RNA, 19 nt, Artificial Sequence
  Description of Artificial Sequence: Synthetic oligonucleotide
  Antisense strand to SEQ ID NO: 657746
ucaacuguguaacuuuacc

SEQ ID NO: 657748 - RNA, 19 nt, Artificial Sequence
  Description of Artificial Sequence: Synthetic oligonucleotide
  Sense strand starting at position 147 of SEQ ID NO: 585664
ugugcaauccuauggauaa

SEQ ID NO: 657749 - RNA, 19 nt, Artificial Sequence
  Description of Artificial Sequence: Synthetic oligonucleotide
  Antisense strand to SEQ ID NO: 657748
uuauccauaggauugcaca

SEQ ID NO: 657750 - RNA, 19 nt, Artificial Sequence
  Description of Artificial Sequence: Synthetic oligonucleotide
  Sense strand starting at position 238 of SEQ ID NO: 585664
agcauauagcucuagacuu

SEQ ID NO: 657751 - RNA, 19 nt, Artificial Sequence
  Description of Artificial Sequence: Synthetic oligonucleotide
  Antisense strand to SEQ ID NO: 657750
aagucuagagcuauaugcu

SEQ ID NO: 657752 - RNA, 19 nt, Artificial Sequence
  Description of Artificial Sequence: Synthetic oligonucleotide
  Sense strand starting at position 246 of SEQ ID NO: 585664
gcucuagacuuaucuguau

SEQ ID NO: 657753 - RNA, 19 nt, Artificial Sequence
  Description of Artificial Sequence: Synthetic oligonucleotide
  Antisense strand to SEQ ID NO: 657752
auacagauaagucuagagc

SEQ ID NO: 657754 - RNA, 19 nt, Artificial Sequence
  Description of Artificial Sequence: Synthetic oligonucleotide
  Sense strand starting at position 479 of SEQ ID NO: 585664
aaguuaccucagugcuaag

SEQ ID NO: 657755 - RNA, 19 nt, Artificial Sequence
  Description of Artificial Sequence: Synthetic oligonucleotide
  Antisense strand to SEQ ID NO: 657754
cuuagcacugagguaacuu

SEQ ID NO: 657756 - RNA, 19 nt, Artificial Sequence
  Description of Artificial Sequence: Synthetic oligonucleotide
  Sense strand starting at position 516 of SEQ ID NO: 585664
cccaaauucugagucugau

SEQ ID NO: 657757 - RNA, 19 nt, Artificial Sequence
  Description of Artificial Sequence: Synthetic oligonucleotide
  Antisense strand to SEQ ID NO: 657756
aucagacucagaauuuggg

SEQ ID NO: 657758 - RNA, 19 nt, Artificial Sequence
  Description of Artificial Sequence: Synthetic oligonucleotide
  Sense strand starting at position 522 of SEQ ID NO: 585664
uucugagucugauccuacu

SEQ ID NO: 657759 - RNA, 19 nt, Artificial Sequence
  Description of Artificial Sequence: Synthetic oligonucleotide
  Antisense strand to SEQ ID NO: 657758
aguaggaucagacucagaa

SEQ ID NO: 657760 - RNA, 19 nt, Artificial Sequence
  Description of Artificial Sequence: Synthetic oligonucleotide
  Sense strand starting at position 830 of SEQ ID NO: 585664
auaugauacuuggccucua

SEQ ID NO: 657761 - RNA, 19 nt, Artificial Sequence
  Description of Artificial Sequence: Synthetic oligonucleotide
  Antisense strand to SEQ ID NO: 657760
uagaggccaaguaucauau

SEQ ID NO: 657762 - RNA, 19 nt, Artificial Sequence
  Description of Artificial Sequence: Synthetic oligonucleotide
  Sense strand starting at position 858 of SEQ ID NO: 585664
cuacaugucuuauuuggca

SEQ ID NO: 657763 - RNA, 19 nt, Artificial Sequence
  Description of Artificial Sequence: Synthetic oligonucleotide
  Antisense strand to SEQ ID NO: 657762
ugccaaauaagacauguag

SEQ ID NO: 657764 - RNA, 19 nt, Artificial Sequence
  Description of Artificial Sequence: Synthetic oligonucleotide
  Sense strand starting at position 951 of SEQ ID NO: 585664
uuuauaauccucuguggag

SEQ ID NO: 657765 - RNA, 19 nt, Artificial Sequence
  Description of Artificial Sequence: Synthetic oligonucleotide
  Antisense strand to SEQ ID NO: 657764
cuccacagaggauuauaaa

SEQ ID NO: 657766 - RNA, 19 nt, Artificial Sequence
  Description of Artificial Sequence: Synthetic oligonucleotide
  Sense strand starting at position 952 of SEQ ID NO: 585664
uuauaauccucuguggaga

SEQ ID NO: 657767 - RNA, 19 nt, Artificial Sequence
  Description of Artificial Sequence: Synthetic oligonucleotide
  Antisense strand to SEQ ID NO: 657766
ucuccacagaggauuauaa

SEQ ID NO: 657768 - RNA, 19 nt, Artificial Sequence
  Description of Artificial Sequence: Synthetic oligonucleotide
  Sense strand starting at position 963 of SEQ ID NO: 585664
uguggagacaaauguacuu

SEQ ID NO: 657769 - RNA, 19 nt, Artificial Sequence
  Description of Artificial Sequence: Synthetic oligonucleotide
  Antisense strand to SEQ ID NO: 657768
aaguacauuugucuccaca

SEQ ID NO: 657770 - RNA, 19 nt, Artificial Sequence
  Description of Artificial Sequence: Synthetic oligonucleotide
  Sense strand starting at position 968 of SEQ ID NO: 585664
agacaaauguacuucggau

SEQ ID NO: 657771 - RNA, 19 nt, Artificial Sequence
  Description of Artificial Sequence: Synthetic oligonucleotide
  Antisense strand to SEQ ID NO: 657770
auccgaaguacauuugucu

SEQ ID NO: 657772 - RNA, 19 nt, Artificial Sequence
  Description of Artificial Sequence: Synthetic oligonucleotide
  Sense strand starting at position 970 of SEQ ID NO: 585664
acaaauguacuucggauaa

SEQ ID NO: 657773 - RNA, 19 nt, Artificial Sequence
  Description of Artificial Sequence: Synthetic oligonucleotide
  Antisense strand to SEQ ID NO: 657772
uuauccgaaguacauuugu

SEQ ID NO: 657774 - RNA, 19 nt, Artificial Sequence
  Description of Artificial Sequence: Synthetic oligonucleotide
  Sense strand starting at position 1094 of SEQ ID NO: 585664
gcaaucaagcgggaguguu

SEQ ID NO: 657775 - RNA, 19 nt, Artificial Sequence
  Description of Artificial Sequence: Synthetic oligonucleotide
  Antisense strand to SEQ ID NO: 657774
aacacucccgcuugauugc

SEQ ID NO: 657776 - RNA, 19 nt, Artificial Sequence
  Description of Artificial Sequence: Synthetic oligonucleotide
  Sense strand starting at position 1413 of SEQ ID NO: 585664
gggagaggcuagcuuucau

SEQ ID NO: 657777 - RNA, 19 nt, Artificial Sequence
  Description of Artificial Sequence: Synthetic oligonucleotide
  Antisense strand to SEQ ID NO: 657776
augaaagcuagccucuccc

SEQ ID NO: 657778 - RNA, 19 nt, Artificial Sequence
  Description of Artificial Sequence: Synthetic oligonucleotide
  Sense strand starting at position 1525 of SEQ ID NO: 585664
gguacugcuuaagcagaaa

SEQ ID NO: 657779 - RNA, 19 nt, Artificial Sequence
  Description of Artificial Sequence: Synthetic oligonucleotide
  Antisense strand to SEQ ID NO: 657778
uuucugcuuaagcaguacc

SEQ ID NO: 657780 - RNA, 19 nt, Artificial Sequence
  Description of Artificial Sequence: Synthetic oligonucleotide
  Sense strand starting at position 1570 of SEQ ID NO: 585664
cauuguugucguuaauauu

SEQ ID NO: 657781 - RNA, 19 nt, Artificial Sequence
  Description of Artificial Sequence: Synthetic oligonucleotide
  Antisense strand to SEQ ID NO: 657780
aauauuaacgacaacaaug

SEQ ID NO: 657782 - RNA, 19 nt, Artificial Sequence
  Description of Artificial Sequence: Synthetic oligonucleotide
  Sense strand starting at position 1611 of SEQ ID NO: 585664
cagaauugccuaugggaag

SEQ ID NO: 657783 - RNA, 19 nt, Artificial Sequence
  Description of Artificial Sequence: Synthetic oligonucleotide
  Antisense strand to SEQ ID NO: 657782
cuucccauaggcaauucug

SEQ ID NO: 657784 - RNA, 19 nt, Artificial Sequence
  Description of Artificial Sequence: Synthetic oligonucleotide
  Sense strand starting at position 1623 of SEQ ID NO: 585664
ugggaagggugguuaguuu

SEQ ID NO: 657785 - RNA, 19 nt, Artificial Sequence
  Description of Artificial Sequence: Synthetic oligonucleotide
  Antisense strand to SEQ ID NO: 657784
aaacuaaccacccuuccca

SEQ ID NO: 657786 - RNA, 19 nt, Artificial Sequence
  Description of Artificial Sequence: Synthetic oligonucleotide
  Sense strand starting at position 1632 of SEQ ID NO: 585664
ugguuaguuucuuugagga

SEQ ID NO: 657787 - RNA, 19 nt, Artificial Sequence
  Description of Artificial Sequence: Synthetic oligonucleotide
  Antisense strand to SEQ ID NO: 657786
uccucaaagaaacuaacca

SEQ ID NO: 657788 - RNA, 19 nt, Artificial Sequence
  Description of Artificial Sequence: Synthetic oligonucleotide
  Sense strand starting at position 1662 of SEQ ID NO: 585664
ugucaaguuugaucccuuu

SEQ ID NO: 657789 - RNA, 19 nt, Artificial Sequence
  Description of Artificial Sequence: Synthetic oligonucleotide
  Antisense strand to SEQ ID NO: 657788
aaagggaucaaacuugaca

SEQ ID NO: 657790 - RNA, 19 nt, Artificial Sequence
  Description of Artificial Sequence: Synthetic oligonucleotide
  Sense strand starting at position 1720 of SEQ ID NO: 585664
ugccuuucucagggaaauu

SEQ ID NO: 657791 - RNA, 19 nt, Artificial Sequence
  Description of Artificial Sequence: Synthetic oligonucleotide
  Antisense strand to SEQ ID NO: 657790
aauuucccugagaaaggca

SEQ ID NO: 657792 - RNA, 19 nt, Artificial Sequence
  Description of Artificial Sequence: Synthetic oligonucleotide
  Sense strand starting at position 1729 of SEQ ID NO: 585664
cagggaaauuucuaaguuc

SEQ ID NO: 657793 - RNA, 19 nt, Artificial Sequence
  Description of Artificial Sequence: Synthetic oligonucleotide
  Antisense strand to SEQ ID NO: 657792
gaacuuagaaauuucccug

SEQ ID NO: 657794 - RNA, 19 nt, Artificial Sequence
  Description of Artificial Sequence: Synthetic oligonucleotide
  Sense strand starting at position 2237 of SEQ ID NO: 585664
aggaguuguucaguuaaga

SEQ ID NO: 657795 - RNA, 19 nt, Artificial Sequence
  Description of Artificial Sequence: Synthetic oligonucleotide
  Antisense strand to SEQ ID NO: 657794
ucuuaacugaacaacuccu

SEQ ID NO: 657796 - RNA, 19 nt, Artificial Sequence
  Description of Artificial Sequence: Synthetic oligonucleotide
  Sense strand starting at position 2348 of SEQ ID NO: 585664
ggaccuagcuucucuggau

SEQ ID NO: 657797 - RNA, 19 nt, Artificial Sequence
  Description of Artificial Sequence: Synthetic oligonucleotide
  Antisense strand to SEQ ID NO: 657796
auccagagaagcuaggucc

SEQ ID NO: 657798 - RNA, 19 nt, Artificial Sequence
  Description of Artificial Sequence: Synthetic oligonucleotide
  Sense strand starting at position 2531 of SEQ ID NO: 585664
gcgaguaaccuuuaagguc

SEQ ID NO: 657799 - RNA, 19 nt, Artificial Sequence
  Description of Artificial Sequence: Synthetic oligonucleotide
  Antisense strand to SEQ ID NO: 657798
gaccuuaaagguuacucgc

SEQ ID NO: 657800 - RNA, 19 nt, Artificial Sequence
  Description of Artificial Sequence: Synthetic oligonucleotide
  Sense strand starting at position 2665 of SEQ ID NO: 585664
caaauucuagugggugaca

SEQ ID NO: 657801 - RNA, 19 nt, Artificial Sequence
  Description of Artificial Sequence: Synthetic oligonucleotide
  Antisense strand to SEQ ID NO: 657800
ugucacccacuagaauuug

SEQ ID NO: 657802 - RNA, 19 nt, Artificial Sequence
  Description of Artificial Sequence: Synthetic oligonucleotide
  Sense strand starting at position 2910 of SEQ ID NO: 585664
ccucguuauacucaacgga

SEQ ID NO: 657803 - RNA, 19 nt, Artificial Sequence
  Description of Artificial Sequence: Synthetic oligonucleotide
  Antisense strand to SEQ ID NO: 657802
uccguugaguauaacgagg

SEQ ID NO: 657804 - RNA, 19 nt, Artificial Sequence
  Description of Artificial Sequence: Synthetic oligonucleotide
  Sense strand starting at position 2913 of SEQ ID NO: 585664
cguuauacucaacggacua

SEQ ID NO: 657805 - RNA, 19 nt, Artificial Sequence
  Description of Artificial Sequence: Synthetic oligonucleotide
  Antisense strand to SEQ ID NO: 657804
uaguccguugaguauaacg

SEQ ID NO: 657806 - RNA, 19 nt, Artificial Sequence
  Description of Artificial Sequence: Synthetic oligonucleotide
  Sense strand starting at position 3239 of SEQ ID NO: 585664
caguuagaauuaguucuga

SEQ ID NO: 657807 - RNA, 19 nt, Artificial Sequence
  Description of Artificial Sequence: Synthetic oligonucleotide
  Antisense strand to SEQ ID NO: 657806
ucagaacuaauucuaacug

SEQ ID NO: 657808 - RNA, 19 nt, Artificial Sequence
  Description of Artificial Sequence: Synthetic oligonucleotide
  Sense strand starting at position 3346 of SEQ ID NO: 585664
gcauuagacguggaacuaa

SEQ ID NO: 657809 - RNA, 19 nt, Artificial Sequence
  Description of Artificial Sequence: Synthetic oligonucleotide
  Antisense strand to SEQ ID NO: 657808
uuaguuccacgucuaaugc

SEQ ID NO: 657810 - RNA, 19 nt, Artificial Sequence
  Description of Artificial Sequence: Synthetic oligonucleotide
  Sense strand starting at position 3365 of SEQ ID NO: 585664
aaaguuugcuagucagaug

SEQ ID NO: 657811 - RNA, 19 nt, Artificial Sequence
  Description of Artificial Sequence: Synthetic oligonucleotide
  Antisense strand to SEQ ID NO: 657810
caucugacuagcaaacuuu

SEQ ID NO: 657812 - RNA, 19 nt, Artificial Sequence
  Description of Artificial Sequence: Synthetic oligonucleotide
  Sense strand starting at position 3424 of SEQ ID NO: 585664
gggaauuccgccugacacu

SEQ ID NO: 657813 - RNA, 19 nt, Artificial Sequence
  Description of Artificial Sequence: Synthetic oligonucleotide
  Antisense strand to SEQ ID NO: 657812
agugucaggcggaauuccc

SEQ ID NO: 657814 - RNA, 19 nt, Artificial Sequence
  Description of Artificial Sequence: Synthetic oligonucleotide
  Sense strand starting at position 3425 of SEQ ID NO: 585664
ggaauuccgccugacacua

SEQ ID NO: 657815 - RNA, 19 nt, Artificial Sequence
  Description of Artificial Sequence: Synthetic oligonucleotide
  Antisense strand to SEQ ID NO: 657814
uagugucaggcggaauucc

SEQ ID NO: 657816 - RNA, 19 nt, Artificial Sequence
  Description of Artificial Sequence: Synthetic oligonucleotide
  Sense strand starting at position 3539 of SEQ ID NO: 585664
ggauucuaacacuguauaa

SEQ ID NO: 657817 - RNA, 19 nt, Artificial Sequence
  Description of Artificial Sequence: Synthetic oligonucleotide
  Antisense strand to SEQ ID NO: 657816
uuauacaguguuagaaucc

SEQ ID NO: 657818 - RNA, 19 nt, Artificial Sequence
  Description of Artificial Sequence: Synthetic oligonucleotide
  Sense strand starting at position 3711 of SEQ ID NO: 585664
ggaucuauuccagguuguc

SEQ ID NO: 657819 - RNA, 19 nt, Artificial Sequence
  Description of Artificial Sequence: Synthetic oligonucleotide
  Antisense strand to SEQ ID NO: 657818
gacaaccuggaauagaucc

SEQ ID NO: 657820 - RNA, 19 nt, Artificial Sequence
  Description of Artificial Sequence: Synthetic oligonucleotide
  Sense strand starting at position 3714 of SEQ ID NO: 585664
ucuauuccagguugucuua

SEQ ID NO: 657821 - RNA, 19 nt, Artificial Sequence
  Description of Artificial Sequence: Synthetic oligonucleotide
  Antisense strand to SEQ ID NO: 657820
uaagacaaccuggaauaga

SEQ ID NO: 657822 - RNA, 19 nt, Artificial Sequence
  Description of Artificial Sequence: Synthetic oligonucleotide
  Sense strand starting at position 3779 of SEQ ID NO: 585664
uccugaugcuucguauuua

SEQ ID NO: 657823 - RNA, 19 nt, Artificial Sequence
  Description of Artificial Sequence: Synthetic oligonucleotide
  Antisense strand to SEQ ID NO: 657822
uaaauacgaagcaucagga

SEQ ID NO: 657824 - RNA, 19 nt, Artificial Sequence
  Description of Artificial Sequence: Synthetic oligonucleotide
  Sense strand starting at position 3783 of SEQ ID NO: 585664
gaugcuucguauuuacuau

SEQ ID NO: 657825 - RNA, 19 nt, Artificial Sequence
  Description of Artificial Sequence: Synthetic oligonucleotide
  Antisense strand to SEQ ID NO: 657824
auaguaaauacgaagcauc

SEQ ID NO: 657826 - RNA, 19 nt, Artificial Sequence
  Description of Artificial Sequence: Synthetic oligonucleotide
  Sense strand starting at position 11 of SEQ ID NO: 585665
aagagugcugagcgauaaa

SEQ ID NO: 657827 - RNA, 19 nt, Artificial Sequence
  Description of Artificial Sequence: Synthetic oligonucleotide
  Antisense strand to SEQ ID NO: 657826
uuuaucgcucagcacucuu

SEQ ID NO: 657828 - RNA, 19 nt, Artificial Sequence
  Description of Artificial Sequence: Synthetic oligonucleotide
  Sense strand starting at position 14 of SEQ ID NO: 585665
agugcugagcgauaaacaa

SEQ ID NO: 657829 - RNA, 19 nt, Artificial Sequence
  Description of Artificial Sequence: Synthetic oligonucleotide
  Antisense strand to SEQ ID NO: 657828
uuguuuaucgcucagcacu

SEQ ID NO: 657830 - RNA, 19 nt, Artificial Sequence
  Description of Artificial Sequence: Synthetic oligonucleotide
  Sense strand starting at position 195 of SEQ ID NO: 585665
gcaguaauggcuuaaacug

SEQ ID NO: 657831 - RNA, 19 nt, Artificial Sequence
  Description of Artificial Sequence: Synthetic oligonucleotide
  Antisense strand to SEQ ID NO: 657830
caguuuaagccauuacugc

SEQ ID NO: 657832 - RNA, 19 nt, Artificial Sequence
  Description of Artificial Sequence: Synthetic oligonucleotide
  Sense strand starting at position 240 of SEQ ID NO: 585665
acgaguagggcauacugaa

SEQ ID NO: 657833 - RNA, 19 nt, Artificial Sequence
  Description of Artificial Sequence: Synthetic oligonucleotide
  Antisense strand to SEQ ID NO: 657832
uucaguaugcccuacucgu

SEQ ID NO: 657834 - RNA, 19 nt, Artificial Sequence
  Description of Artificial Sequence: Synthetic oligonucleotide
  Sense strand starting at position 335 of SEQ ID NO: 585665
uagucaucacaggaagugu

SEQ ID NO: 657835 - RNA, 19 nt, Artificial Sequence
  Description of Artificial Sequence: Synthetic oligonucleotide
  Antisense strand to SEQ ID NO: 657834
acacuuccugugaugacua

SEQ ID NO: 657836 - RNA, 19 nt, Artificial Sequence
  Description of Artificial Sequence: Synthetic oligonucleotide
  Sense strand starting at position 349 of SEQ ID NO: 585665
aguguuaagguguauaaug

SEQ ID NO: 657837 - RNA, 19 nt, Artificial Sequence
  Description of Artificial Sequence: Synthetic oligonucleotide
  Antisense strand to SEQ ID NO: 657836
cauuauacaccuuaacacu

SEQ ID NO: 657838 - RNA, 19 nt, Artificial Sequence
  Description of Artificial Sequence: Synthetic oligonucleotide
  Sense strand starting at position 351 of SEQ ID NO: 585665
uguuaagguguauaaugga

SEQ ID NO: 657839 - RNA, 19 nt, Artificial Sequence
  Description of Artificial Sequence: Synthetic oligonucleotide
  Antisense strand to SEQ ID NO: 657838
uccauuauacaccuuaaca

SEQ ID NO: 657840 - RNA, 19 nt, Artificial Sequence
  Description of Artificial Sequence: Synthetic oligonucleotide
  Sense strand starting at position 376 of SEQ ID NO: 585665
uccauaaacucagugguga

SEQ ID NO: 657841 - RNA, 19 nt, Artificial Sequence
  Description of Artificial Sequence: Synthetic oligonucleotide
  Antisense strand to SEQ ID NO: 657840
ucaccacugaguuuaugga

SEQ ID NO: 657842 - RNA, 19 nt, Artificial Sequence
  Description of Artificial Sequence: Synthetic oligonucleotide
  Sense strand starting at position 377 of SEQ ID NO: 585665
ccauaaacucaguggugaa

SEQ ID NO: 657843 - RNA, 19 nt, Artificial Sequence
  Description of Artificial Sequence: Synthetic oligonucleotide
  Antisense strand to SEQ ID NO: 657842
uucaccacugaguuuaugg

SEQ ID NO: 657844 - RNA, 19 nt, Artificial Sequence
  Description of Artificial Sequence: Synthetic oligonucleotide
  Sense strand starting at position 391 of SEQ ID NO: 585665
gugaaauagcuaugaauua

SEQ ID NO: 657845 - RNA, 19 nt, Artificial Sequence
  Description of Artificial Sequence: Synthetic oligonucleotide
  Antisense strand to SEQ ID NO: 657844
uaauucauagcuauuucac

SEQ ID NO: 657846 - RNA, 19 nt, Artificial Sequence
  Description of Artificial Sequence: Synthetic oligonucleotide
  Sense strand starting at position 634 of SEQ ID NO: 585665
ccuuuaguggcagaaccaa

SEQ ID NO: 657847 - RNA, 19 nt, Artificial Sequence
  Description of Artificial Sequence: Synthetic oligonucleotide
  Antisense strand to SEQ ID NO: 657846
uugguucugccacuaaagg

SEQ ID NO: 657848 - RNA, 19 nt, Artificial Sequence
  Description of Artificial Sequence: Synthetic oligonucleotide
  Sense strand starting at position 661 of SEQ ID NO: 585665
ucagacuuucguuaucuuu

SEQ ID NO: 657849 - RNA, 19 nt, Artificial Sequence
  Description of Artificial Sequence: Synthetic oligonucleotide
  Antisense strand to SEQ ID NO: 657848
aaagauaacgaaagucuga

SEQ ID NO: 657850 - RNA, 19 nt, Artificial Sequence
  Description of Artificial Sequence: Synthetic oligonucleotide
  Sense strand starting at position 711 of SEQ ID NO: 585665
ucaaauuuaugaggaacca

SEQ ID NO: 657851 - RNA, 19 nt, Artificial Sequence
  Description of Artificial Sequence: Synthetic oligonucleotide
  Antisense strand to SEQ ID NO: 657850
ugguuccucauaaauuuga

SEQ ID NO: 657852 - RNA, 19 nt, Artificial Sequence
  Description of Artificial Sequence: Synthetic oligonucleotide
  Sense strand starting at position 949 of SEQ ID NO: 585665
aaggcuugauugguaacua

SEQ ID NO: 657853 - RNA, 19 nt, Artificial Sequence
  Description of Artificial Sequence: Synthetic oligonucleotide
  Antisense strand to SEQ ID NO: 657852
uaguuaccaaucaagccuu

SEQ ID NO: 657854 - RNA, 19 nt, Artificial Sequence
  Description of Artificial Sequence: Synthetic oligonucleotide
  Sense strand starting at position 953 of SEQ ID NO: 585665
cuugauugguaacuauaac

SEQ ID NO: 657855 - RNA, 19 nt, Artificial Sequence
  Description of Artificial Sequence: Synthetic oligonucleotide
  Antisense strand to SEQ ID NO: 657854
guuauaguuaccaaucaag

SEQ ID NO: 657856 - RNA, 19 nt, Artificial Sequence
  Description of Artificial Sequence: Synthetic oligonucleotide
  Sense strand starting at position 1300 of SEQ ID NO: 585665
ggcggcuacaauuagacau

SEQ ID NO: 657857 - RNA, 19 nt, Artificial Sequence
  Description of Artificial Sequence: Synthetic oligonucleotide
  Antisense strand to SEQ ID NO: 657856
augucuaauuguagccgcc

SEQ ID NO: 657858 - RNA, 19 nt, Artificial Sequence
  Description of Artificial Sequence: Synthetic oligonucleotide
  Sense strand starting at position 1444 of SEQ ID NO: 585665
aauggucuuccacagagca

SEQ ID NO: 657859 - RNA, 19 nt, Artificial Sequence
  Description of Artificial Sequence: Synthetic oligonucleotide
  Antisense strand to SEQ ID NO: 657858
ugcucuguggaagaccauu

SEQ ID NO: 657860 - RNA, 19 nt, Artificial Sequence
  Description of Artificial Sequence: Synthetic oligonucleotide
  Sense strand starting at position 1446 of SEQ ID NO: 585665
uggucuuccacagagcaga

SEQ ID NO: 657861 - RNA, 19 nt, Artificial Sequence
  Description of Artificial Sequence: Synthetic oligonucleotide
  Antisense strand to SEQ ID NO: 657860
ucugcucuguggaagacca

SEQ ID NO: 657862 - RNA, 19 nt, Artificial Sequence
  Description of Artificial Sequence: Synthetic oligonucleotide
  Sense strand starting at position 1886 of SEQ ID NO: 585665
ccgaauacauggcuguaga

SEQ ID NO: 657863 - RNA, 19 nt, Artificial Sequence
  Description of Artificial Sequence: Synthetic oligonucleotide
  Antisense strand to SEQ ID NO: 657862
ucuacagccauguauucgg

SEQ ID NO: 657864 - RNA, 19 nt, Artificial Sequence
  Description of Artificial Sequence: Synthetic oligonucleotide
  Sense strand starting at position 1943 of SEQ ID NO: 585665
ugcugucucacggcgagau

SEQ ID NO: 657865 - RNA, 19 nt, Artificial Sequence
  Description of Artificial Sequence: Synthetic oligonucleotide
  Antisense strand to SEQ ID NO: 657864
aucucgccgugagacagca

SEQ ID NO: 657866 - RNA, 19 nt, Artificial Sequence
  Description of Artificial Sequence: Synthetic oligonucleotide
  Sense strand starting at position 2061 of SEQ ID NO: 585665
gcggcuugucccuuuggua

SEQ ID NO: 657867 - RNA, 19 nt, Artificial Sequence
  Description of Artificial Sequence: Synthetic oligonucleotide
  Antisense strand to SEQ ID NO: 657866
uaccaaagggacaagccgc

SEQ ID NO: 657868 - RNA, 19 nt, Artificial Sequence
  Description of Artificial Sequence: Synthetic oligonucleotide
  Sense strand starting at position 2367 of SEQ ID NO: 585665
acauaugauuacgccacaa

SEQ ID NO: 657869 - RNA, 19 nt, Artificial Sequence
  Description of Artificial Sequence: Synthetic oligonucleotide
  Antisense strand to SEQ ID NO: 657868
uuguggcguaaucauaugu

SEQ ID NO: 657870 - RNA, 19 nt, Artificial Sequence
  Description of Artificial Sequence: Synthetic oligonucleotide
  Sense strand starting at position 2369 of SEQ ID NO: 585665
auaugauuacgccacaaug

SEQ ID NO: 657871 - RNA, 19 nt, Artificial Sequence
  Description of Artificial Sequence: Synthetic oligonucleotide
  Antisense strand to SEQ ID NO: 657870
cauuguggcguaaucauau

SEQ ID NO: 657872 - RNA, 19 nt, Artificial Sequence
  Description of Artificial Sequence: Synthetic oligonucleotide
  Sense strand starting at position 2371 of SEQ ID NO: 585665
augauuacgccacaaugaa

SEQ ID NO: 657873 - RNA, 19 nt, Artificial Sequence
  Description of Artificial Sequence: Synthetic oligonucleotide
  Antisense strand to SEQ ID NO: 657872
uucauuguggcguaaucau

SEQ ID NO: 657874 - RNA, 19 nt, Artificial Sequence
  Description of Artificial Sequence: Synthetic oligonucleotide
  Sense strand starting at position 2440 of SEQ ID NO: 585665
cggaaagagccaugugaca

SEQ ID NO: 657875 - RNA, 19 nt, Artificial Sequence
  Description of Artificial Sequence: Synthetic oligonucleotide
  Antisense strand to SEQ ID NO: 657874
ugucacauggcucuuuccg

SEQ ID NO: 657876 - RNA, 19 nt, Artificial Sequence
  Description of Artificial Sequence: Synthetic oligonucleotide
  Sense strand starting at position 2543 of SEQ ID NO: 585665
auucuacacgcuugaagau

SEQ ID NO: 657877 - RNA, 19 nt, Artificial Sequence
  Description of Artificial Sequence: Synthetic oligonucleotide
  Antisense strand to SEQ ID NO: 657876
aucuucaagcguguagaau

SEQ ID NO: 657878 - RNA, 19 nt, Artificial Sequence
  Description of Artificial Sequence: Synthetic oligonucleotide
  Sense strand starting at position 2564 of SEQ ID NO: 585665
gcuagcguucuugcugaca

SEQ ID NO: 657879 - RNA, 19 nt, Artificial Sequence
  Description of Artificial Sequence: Synthetic oligonucleotide
  Antisense strand to SEQ ID NO: 657878
ugucagcaagaacgcuagc

SEQ ID NO: 657880 - RNA, 19 nt, Artificial Sequence
  Description of Artificial Sequence: Synthetic oligonucleotide
  Sense strand starting at position 2623 of SEQ ID NO: 585665
ggcacugauucugucaauc

SEQ ID NO: 657881 - RNA, 19 nt, Artificial Sequence
  Description of Artificial Sequence: Synthetic oligonucleotide
  Antisense strand to SEQ ID NO: 657880
gauugacagaaucagugcc

SEQ ID NO: 657882 - RNA, 19 nt, Artificial Sequence
  Description of Artificial Sequence: Synthetic oligonucleotide
  Sense strand starting at position 2664 of SEQ ID NO: 585665
aaggguaagcacuguuauc

SEQ ID NO: 657883 - RNA, 19 nt, Artificial Sequence
  Description of Artificial Sequence: Synthetic oligonucleotide
  Antisense strand to SEQ ID NO: 657882
gauaacagugcuuacccuu

SEQ ID NO: 657884 - RNA, 19 nt, Artificial Sequence
  Description of Artificial Sequence: Synthetic oligonucleotide
  Sense strand starting at position 2723 of SEQ ID NO: 585665
agguaacuugucgaaggua

SEQ ID NO: 657885 - RNA, 19 nt, Artificial Sequence
  Description of Artificial Sequence: Synthetic oligonucleotide
  Antisense strand to SEQ ID NO: 657884
uaccuucgacaaguuaccu

SEQ ID NO: 657886 - RNA, 19 nt, Artificial Sequence
  Description of Artificial Sequence: Synthetic oligonucleotide
  Sense strand starting at position 3122 of SEQ ID NO: 585665
ugcagugacccagguaaca

SEQ ID NO: 657887 - RNA, 19 nt, Artificial Sequence
  Description of Artificial Sequence: Synthetic oligonucleotide
  Antisense strand to SEQ ID NO: 657886
uguuaccugggucacugca

SEQ ID NO: 657888 - RNA, 19 nt, Artificial Sequence
  Description of Artificial Sequence: Synthetic oligonucleotide
  Sense strand starting at position 3425 of SEQ ID NO: 585665
caucgaagacccuaaguuu

SEQ ID NO: 657889 - RNA, 19 nt, Artificial Sequence
  Description of Artificial Sequence: Synthetic oligonucleotide
  Antisense strand to SEQ ID NO: 657888
aaacuuagggucuucgaug

SEQ ID NO: 657890 - RNA, 19 nt, Artificial Sequence
  Description of Artificial Sequence: Synthetic oligonucleotide
  Sense strand starting at position 3545 of SEQ ID NO: 585665
uugucagaagccugagaca

SEQ ID NO: 657891 - RNA, 19 nt, Artificial Sequence
  Description of Artificial Sequence: Synthetic oligonucleotide
  Antisense strand to SEQ ID NO: 657890
ugucucaggcuucugacaa

SEQ ID NO: 657892 - RNA, 19 nt, Artificial Sequence
  Description of Artificial Sequence: Synthetic oligonucleotide
  Sense strand starting at position 3648 of SEQ ID NO: 585665
ccaaaucucuagguagacu

SEQ ID NO: 657893 - RNA, 19 nt, Artificial Sequence
  Description of Artificial Sequence: Synthetic oligonucleotide
  Antisense strand to SEQ ID NO: 657892
agucuaccuagagauuugg

SEQ ID NO: 657894 - RNA, 19 nt, Artificial Sequence
  Description of Artificial Sequence: Synthetic oligonucleotide
  Sense strand starting at position 3706 of SEQ ID NO: 585665
acuagaaggcuaugcagaa

SEQ ID NO: 657895 - RNA, 19 nt, Artificial Sequence
  Description of Artificial Sequence: Synthetic oligonucleotide
  Antisense strand to SEQ ID NO: 657894
uucugcauagccuucuagu

SEQ ID NO: 657896 - RNA, 19 nt, Artificial Sequence
  Description of Artificial Sequence: Synthetic oligonucleotide
  Sense strand starting at position 3707 of SEQ ID NO: 585665
cuagaaggcuaugcagaau

SEQ ID NO: 657897 - RNA, 19 nt, Artificial Sequence
  Description of Artificial Sequence: Synthetic oligonucleotide
  Antisense strand to SEQ ID NO: 657896
auucugcauagccuucuag

SEQ ID NO: 657898 - RNA, 19 nt, Artificial Sequence
  Description of Artificial Sequence: Synthetic oligonucleotide
  Sense strand starting at position 3811 of SEQ ID NO: 585665
gauaaauuagugcaguaau

SEQ ID NO: 657899 - RNA, 19 nt, Artificial Sequence
  Description of Artificial Sequence: Synthetic oligonucleotide
  Antisense strand to SEQ ID NO: 657898
auuacugcacuaauuuauc

SEQ ID NO: 657900 - RNA, 19 nt, Artificial Sequence
  Description of Artificial Sequence: Synthetic oligonucleotide
  Sense strand starting at position 3822 of SEQ ID NO: 585665
gcaguaaucacugugcggu

SEQ ID NO: 657901 - RNA, 19 nt, Artificial Sequence
  Description of Artificial Sequence: Synthetic oligonucleotide
  Antisense strand to SEQ ID NO: 657900
accgcacagugauuacugc

SEQ ID NO: 657902 - RNA, 19 nt, Artificial Sequence
  Description of Artificial Sequence: Synthetic oligonucleotide
  Sense strand starting at position 3845 of SEQ ID NO: 585665
ucuguagacuuacuugcaa

SEQ ID NO: 657903 - RNA, 19 nt, Artificial Sequence
  Description of Artificial Sequence: Synthetic oligonucleotide
  Antisense strand to SEQ ID NO: 657902
uugcaaguaagucuacaga

SEQ ID NO: 657904 - RNA, 19 nt, Artificial Sequence
  Description of Artificial Sequence: Synthetic oligonucleotide
  Sense strand starting at position 3880 of SEQ ID NO: 585665
accgaagguccuggauaaa

SEQ ID NO: 657905 - RNA, 19 nt, Artificial Sequence
  Description of Artificial Sequence: Synthetic oligonucleotide
  Antisense strand to SEQ ID NO: 657904
uuuauccaggaccuucggu

SEQ ID NO: 657906 - RNA, 19 nt, Artificial Sequence
  Description of Artificial Sequence: Synthetic oligonucleotide
  Sense strand starting at position 29 of SEQ ID NO: 585666
ccgagaauccacugcugca

SEQ ID NO: 657907 - RNA, 19 nt, Artificial Sequence
  Description of Artificial Sequence: Synthetic oligonucleotide
  Antisense strand to SEQ ID NO: 657906
ugcagcaguggauucucgg

SEQ ID NO: 657908 - RNA, 19 nt, Artificial Sequence
  Description of Artificial Sequence: Synthetic oligonucleotide
  Sense strand starting at position 139 of SEQ ID NO: 585666
ggaagaauucugugggcug

SEQ ID NO: 657909 - RNA, 19 nt, Artificial Sequence
  Description of Artificial Sequence: Synthetic oligonucleotide
  Antisense strand to SEQ ID NO: 657908
cagcccacagaauucuucc

SEQ ID NO: 657910 - RNA, 19 nt, Artificial Sequence
  Description of Artificial Sequence: Synthetic oligonucleotide
  Sense strand starting at position 140 of SEQ ID NO: 585666
gaagaauucugugggcuga

SEQ ID NO: 657911 - RNA, 19 nt, Artificial Sequence
  Description of Artificial Sequence: Synthetic oligonucleotide
  Antisense strand to SEQ ID NO: 657910
ucagcccacagaauucuuc

SEQ ID NO: 657912 - RNA, 19 nt, Artificial Sequence
  Description of Artificial Sequence: Synthetic oligonucleotide
  Sense strand starting at position 141 of SEQ ID NO: 585666
aagaauucugugggcugau

SEQ ID NO: 657913 - RNA, 19 nt, Artificial Sequence
  Description of Artificial Sequence: Synthetic oligonucleotide
  Antisense strand to SEQ ID NO: 657912
aucagcccacagaauucuu

SEQ ID NO: 657914 - RNA, 19 nt, Artificial Sequence
  Description of Artificial Sequence: Synthetic oligonucleotide
  Sense strand starting at position 142 of SEQ ID NO: 585666
agaauucugugggcugaua

SEQ ID NO: 657915 - RNA, 19 nt, Artificial Sequence
  Description of Artificial Sequence: Synthetic oligonucleotide
  Antisense strand to SEQ ID NO: 657914
uaucagcccacagaauucu

SEQ ID NO: 657916 - RNA, 19 nt, Artificial Sequence
  Description of Artificial Sequence: Synthetic oligonucleotide
  Sense strand starting at position 144 of SEQ ID NO: 585666
aauucugugggcugauaag

SEQ ID NO: 657917 - RNA, 19 nt, Artificial Sequence
  Description of Artificial Sequence: Synthetic oligonucleotide
  Antisense strand to SEQ ID NO: 657916
cuuaucagcccacagaauu

SEQ ID NO: 657918 - RNA, 19 nt, Artificial Sequence
  Description of Artificial Sequence: Synthetic oligonucleotide
  Sense strand starting at position 331 of SEQ ID NO: 585666
gaggcaugccaguaucaac

SEQ ID NO: 657919 - RNA, 19 nt, Artificial Sequence
  Description of Artificial Sequence: Synthetic oligonucleotide
  Antisense strand to SEQ ID NO: 657918
guugauacuggcaugccuc

SEQ ID NO: 657920 - RNA, 19 nt, Artificial Sequence
  Description of Artificial Sequence: Synthetic oligonucleotide
  Sense strand starting at position 426 of SEQ ID NO: 585666
aaggguuucuuccaugcau

SEQ ID NO: 657921 - RNA, 19 nt, Artificial Sequence
  Description of Artificial Sequence: Synthetic oligonucleotide
  Antisense strand to SEQ ID NO: 657920
augcauggaagaaacccuu

SEQ ID NO: 657922 - RNA, 19 nt, Artificial Sequence
  Description of Artificial Sequence: Synthetic oligonucleotide
  Sense strand starting at position 428 of SEQ ID NO: 585666
ggguuucuuccaugcauaa

SEQ ID NO: 657923 - RNA, 19 nt, Artificial Sequence
  Description of Artificial Sequence: Synthetic oligonucleotide
  Antisense strand to SEQ ID NO: 657922
uuaugcauggaagaaaccc

SEQ ID NO: 657924 - RNA, 19 nt, Artificial Sequence
  Description of Artificial Sequence: Synthetic oligonucleotide
  Sense strand starting at position 475 of SEQ ID NO: 585666
guaacaguauccucacuuu

SEQ ID NO: 657925 - RNA, 19 nt, Artificial Sequence
  Description of Artificial Sequence: Synthetic oligonucleotide
  Antisense strand to SEQ ID NO: 657924
aaagugaggauacuguuac

SEQ ID NO: 657926 - RNA, 19 nt, Artificial Sequence
  Description of Artificial Sequence: Synthetic oligonucleotide
  Sense strand starting at position 519 of SEQ ID NO: 585666
cuaagugacuuguucuaag

SEQ ID NO: 657927 - RNA, 19 nt, Artificial Sequence
  Description of Artificial Sequence: Synthetic oligonucleotide
  Antisense strand to SEQ ID NO: 657926
cuuagaacaagucacuuag

SEQ ID NO: 657928 - RNA, 19 nt, Artificial Sequence
  Description of Artificial Sequence: Synthetic oligonucleotide
  Sense strand starting at position 531 of SEQ ID NO: 585666
uucuaagucgcgcaacagu

SEQ ID NO: 657929 - RNA, 19 nt, Artificial Sequence
  Description of Artificial Sequence: Synthetic oligonucleotide
  Antisense strand to SEQ ID NO: 657928
acuguugcgcgacuuagaa

SEQ ID NO: 657930 - RNA, 19 nt, Artificial Sequence
  Description of Artificial Sequence: Synthetic oligonucleotide
  Sense strand starting at position 546 of SEQ ID NO: 585666
cagugaguugcugagagga

SEQ ID NO: 657931 - RNA, 19 nt, Artificial Sequence
  Description of Artificial Sequence: Synthetic oligonucleotide
  Antisense strand to SEQ ID NO: 657930
uccucucagcaacucacug

SEQ ID NO: 657932 - RNA, 19 nt, Artificial Sequence
  Description of Artificial Sequence: Synthetic oligonucleotide
  Sense strand starting at position 607 of SEQ ID NO: 585666
ccuccuauaucaugugaua

SEQ ID NO: 657933 - RNA, 19 nt, Artificial Sequence
  Description of Artificial Sequence: Synthetic oligonucleotide
  Antisense strand to SEQ ID NO: 657932
uaucacaugauauaggagg

SEQ ID NO: 657934 - RNA, 19 nt, Artificial Sequence
  Description of Artificial Sequence: Synthetic oligonucleotide
  Sense strand starting at position 666 of SEQ ID NO: 585666
gcaggaaaguucucuuguc

SEQ ID NO: 657935 - RNA, 19 nt, Artificial Sequence
  Description of Artificial Sequence: Synthetic oligonucleotide
  Antisense strand to SEQ ID NO: 657934
gacaagagaacuuuccugc

SEQ ID NO: 657936 - RNA, 19 nt, Artificial Sequence
  Description of Artificial Sequence: Synthetic oligonucleotide
  Sense strand starting at position 667 of SEQ ID NO: 585666
caggaaaguucucuugucu

SEQ ID NO: 657937 - RNA, 19 nt, Artificial Sequence
  Description of Artificial Sequence: Synthetic oligonucleotide
  Antisense strand to SEQ ID NO: 657936
agacaagagaacuuuccug

SEQ ID NO: 657938 - RNA, 19 nt, Artificial Sequence
  Description of Artificial Sequence: Synthetic oligonucleotide
  Sense strand starting at position 708 of SEQ ID NO: 585666
ccuguaacucuuuguccua

SEQ ID NO: 657939 - RNA, 19 nt, Artificial Sequence
  Description of Artificial Sequence: Synthetic oligonucleotide
  Antisense strand to SEQ ID NO: 657938
uaggacaaagaguuacagg

SEQ ID NO: 657940 - RNA, 19 nt, Artificial Sequence
  Description of Artificial Sequence: Synthetic oligonucleotide
  Sense strand starting at position 709 of SEQ ID NO: 585666
cuguaacucuuuguccuaa

SEQ ID NO: 657941 - RNA, 19 nt, Artificial Sequence
  Description of Artificial Sequence: Synthetic oligonucleotide
  Antisense strand to SEQ ID NO: 657940
uuaggacaaagaguuacag

SEQ ID NO: 657942 - RNA, 19 nt, Artificial Sequence
  Description of Artificial Sequence: Synthetic oligonucleotide
  Sense strand starting at position 711 of SEQ ID NO: 585666
guaacucuuuguccuaacu

SEQ ID NO: 657943 - RNA, 19 nt, Artificial Sequence
  Description of Artificial Sequence: Synthetic oligonucleotide
  Antisense strand to SEQ ID NO: 657942
aguuaggacaaagaguuac

SEQ ID NO: 657944 - RNA, 19 nt, Artificial Sequence
  Description of Artificial Sequence: Synthetic oligonucleotide
  Sense strand starting at position 1376 of SEQ ID NO: 585666
uggguagggucgugucauc

SEQ ID NO: 657945 - RNA, 19 nt, Artificial Sequence
  Description of Artificial Sequence: Synthetic oligonucleotide
  Antisense strand to SEQ ID NO: 657944
gaugacacgacccuaccca

SEQ ID NO: 657946 - RNA, 19 nt, Artificial Sequence
  Description of Artificial Sequence: Synthetic oligonucleotide
  Sense strand starting at position 1381 of SEQ ID NO: 585666
agggucgugucaucuaaag

SEQ ID NO: 657947 - RNA, 19 nt, Artificial Sequence
  Description of Artificial Sequence: Synthetic oligonucleotide
  Antisense strand to SEQ ID NO: 657946
cuuuagaugacacgacccu

SEQ ID NO: 657948 - RNA, 19 nt, Artificial Sequence
  Description of Artificial Sequence: Synthetic oligonucleotide
  Sense strand starting at position 1540 of SEQ ID NO: 585666
ggccaacugcaacagaaua

SEQ ID NO: 657949 - RNA, 19 nt, Artificial Sequence
  Description of Artificial Sequence: Synthetic oligonucleotide
  Antisense strand to SEQ ID NO: 657948
uauucuguugcaguuggcc

SEQ ID NO: 657950 - RNA, 19 nt, Artificial Sequence
  Description of Artificial Sequence: Synthetic oligonucleotide
  Sense strand starting at position 1596 of SEQ ID NO: 585666
gggcgcagucucugaaucu

SEQ ID NO: 657951 - RNA, 19 nt, Artificial Sequence
  Description of Artificial Sequence: Synthetic oligonucleotide
  Antisense strand to SEQ ID NO: 657950
agauucagagacugcgccc

SEQ ID NO: 657952 - RNA, 19 nt, Artificial Sequence
  Description of Artificial Sequence: Synthetic oligonucleotide
  Sense strand starting at position 1597 of SEQ ID NO: 585666
ggcgcagucucugaaucuu

SEQ ID NO: 657953 - RNA, 19 nt, Artificial Sequence
  Description of Artificial Sequence: Synthetic oligonucleotide
  Antisense strand to SEQ ID NO: 657952
aagauucagagacugcgcc

SEQ ID NO: 657954 - RNA, 19 nt, Artificial Sequence
  Description of Artificial Sequence: Synthetic oligonucleotide
  Sense strand starting at position 2196 of SEQ ID NO: 585666
aggagacauccgcagcuga

SEQ ID NO: 657955 - RNA, 19 nt, Artificial Sequence
  Description of Artificial Sequence: Synthetic oligonucleotide
  Antisense strand to SEQ ID NO: 657954
ucagcugcggaugucuccu

SEQ ID NO: 657956 - RNA, 19 nt, Artificial Sequence
  Description of Artificial Sequence: Synthetic oligonucleotide
  Sense strand starting at position 2240 of SEQ ID NO: 585666
ccguuuggugugccggaaa

SEQ ID NO: 657957 - RNA, 19 nt, Artificial Sequence
  Description of Artificial Sequence: Synthetic oligonucleotide
  Antisense strand to SEQ ID NO: 657956
uuuccggcacaccaaacgg

SEQ ID NO: 657958 - RNA, 19 nt, Artificial Sequence
  Description of Artificial Sequence: Synthetic oligonucleotide
  Sense strand starting at position 2243 of SEQ ID NO: 585666
uuuggugugccggaaacau

SEQ ID NO: 657959 - RNA, 19 nt, Artificial Sequence
  Description of Artificial Sequence: Synthetic oligonucleotide
  Antisense strand to SEQ ID NO: 657958
auguuuccggcacaccaaa

SEQ ID NO: 657960 - RNA, 19 nt, Artificial Sequence
  Description of Artificial Sequence: Synthetic oligonucleotide
  Sense strand starting at position 2316 of SEQ ID NO: 585666
guguuuaugggccagcaua

SEQ ID NO: 657961 - RNA, 19 nt, Artificial Sequence
  Description of Artificial Sequence: Synthetic oligonucleotide
  Antisense strand to SEQ ID NO: 657960
uaugcuggcccauaaacac

SEQ ID NO: 657962 - RNA, 19 nt, Artificial Sequence
  Description of Artificial Sequence: Synthetic oligonucleotide
  Sense strand starting at position 2357 of SEQ ID NO: 585666
agcugaucaucuuuccgua

SEQ ID NO: 657963 - RNA, 19 nt, Artificial Sequence
  Description of Artificial Sequence: Synthetic oligonucleotide
  Antisense strand to SEQ ID NO: 657962
uacggaaagaugaucagcu

SEQ ID NO: 657964 - RNA, 19 nt, Artificial Sequence
  Description of Artificial Sequence: Synthetic oligonucleotide
  Sense strand starting at position 2360 of SEQ ID NO: 585666
ugaucaucuuuccguacau

SEQ ID NO: 657965 - RNA, 19 nt, Artificial Sequence
  Description of Artificial Sequence: Synthetic oligonucleotide
  Antisense strand to SEQ ID NO: 657964
auguacggaaagaugauca

SEQ ID NO: 657966 - RNA, 19 nt, Artificial Sequence
  Description of Artificial Sequence: Synthetic oligonucleotide
  Sense strand starting at position 2369 of SEQ ID NO: 585666
uuccguacauucugaacau

SEQ ID NO: 657967 - RNA, 19 nt, Artificial Sequence
  Description of Artificial Sequence: Synthetic oligonucleotide
  Antisense strand to SEQ ID NO: 657966
auguucagaauguacggaa

SEQ ID NO: 657968 - RNA, 19 nt, Artificial Sequence
  Description of Artificial Sequence: Synthetic oligonucleotide
  Sense strand starting at position 2370 of SEQ ID NO: 585666
uccguacauucugaacauu

SEQ ID NO: 657969 - RNA, 19 nt, Artificial Sequence
  Description of Artificial Sequence: Synthetic oligonucleotide
  Antisense strand to SEQ ID NO: 657968
aauguucagaauguacgga

SEQ ID NO: 657970 - RNA, 19 nt, Artificial Sequence
  Description of Artificial Sequence: Synthetic oligonucleotide
  Sense strand starting at position 3549 of SEQ ID NO: 585666
auauuaugaggauggucuu

SEQ ID NO: 657971 - RNA, 19 nt, Artificial Sequence
  Description of Artificial Sequence: Synthetic oligonucleotide
  Antisense strand to SEQ ID NO: 657970
aagaccauccucauaauau

SEQ ID NO: 657972 - RNA, 19 nt, Artificial Sequence
  Description of Artificial Sequence: Synthetic oligonucleotide
  Sense strand starting at position 3570 of SEQ ID NO: 585666
ccuuauguuucgcuuuaga

SEQ ID NO: 657973 - RNA, 19 nt, Artificial Sequence
  Description of Artificial Sequence: Synthetic oligonucleotide
  Antisense strand to SEQ ID NO: 657972
ucuaaagcgaaacauaagg

SEQ ID NO: 657974 - RNA, 19 nt, Artificial Sequence
  Description of Artificial Sequence: Synthetic oligonucleotide
  Sense strand starting at position 3573 of SEQ ID NO: 585666
uauguuucgcuuuagaaau

SEQ ID NO: 657975 - RNA, 19 nt, Artificial Sequence
  Description of Artificial Sequence: Synthetic oligonucleotide
  Antisense strand to SEQ ID NO: 657974
auuucuaaagcgaaacaua

SEQ ID NO: 657976 - RNA, 19 nt, Artificial Sequence
  Description of Artificial Sequence: Synthetic oligonucleotide
  Sense strand starting at position 3913 of SEQ ID NO: 585666
cagucuguaguuuguagau

SEQ ID NO: 657977 - RNA, 19 nt, Artificial Sequence
  Description of Artificial Sequence: Synthetic oligonucleotide
  Antisense strand to SEQ ID NO: 657976
aucuacaaacuacagacug

SEQ ID NO: 657978 - RNA, 19 nt, Artificial Sequence
  Description of Artificial Sequence: Synthetic oligonucleotide
  Sense strand starting at position 3915 of SEQ ID NO: 585666
gucuguaguuuguagauag

SEQ ID NO: 657979 - RNA, 19 nt, Artificial Sequence
  Description of Artificial Sequence: Synthetic oligonucleotide
  Antisense strand to SEQ ID NO: 657978
cuaucuacaaacuacagac

SEQ ID NO: 657980 - RNA, 19 nt, Artificial Sequence
  Description of Artificial Sequence: Synthetic oligonucleotide
  Sense strand starting at position 3922 of SEQ ID NO: 585666
guuuguagauagucucuuu

SEQ ID NO: 657981 - RNA, 19 nt, Artificial Sequence
  Description of Artificial Sequence: Synthetic oligonucleotide
  Antisense strand to SEQ ID NO: 657980
aaagagacuaucuacaaac

SEQ ID NO: 657982 - RNA, 19 nt, Artificial Sequence
  Description of Artificial Sequence: Synthetic oligonucleotide
  Sense strand starting at position 3942 of SEQ ID NO: 585666
aacugauucuaggugucuu

SEQ ID NO: 657983 - RNA, 19 nt, Artificial Sequence
  Description of Artificial Sequence: Synthetic oligonucleotide
  Antisense strand to SEQ ID NO: 657982
aagacaccuagaaucaguu

SEQ ID NO: 657984 - RNA, 19 nt, Artificial Sequence
  Description of Artificial Sequence: Synthetic oligonucleotide
  Sense strand starting at position 3956 of SEQ ID NO: 585666
gucuuugccucgucuucua

SEQ ID NO: 657985 - RNA, 19 nt, Artificial Sequence
  Description of Artificial Sequence: Synthetic oligonucleotide
  Antisense strand to SEQ ID NO: 657984
uagaagacgaggcaaagac

SEQ ID NO: 657986 - RNA, 19 nt, Artificial Sequence
  Description of Artificial Sequence: Synthetic oligonucleotide
  Sense strand starting at position 18 of SEQ ID NO: 585667
aggaguauaugaugggaaa

SEQ ID NO: 657987 - RNA, 19 nt, Artificial Sequence
  Description of Artificial Sequence: Synthetic oligonucleotide
  Antisense strand to SEQ ID NO: 657986
uuucccaucauauacuccu

SEQ ID NO: 657988 - RNA, 19 nt, Artificial Sequence
  Description of Artificial Sequence: Synthetic oligonucleotide
  Sense strand starting at position 31 of SEQ ID NO: 585667
gggaaacagaucugucauc

SEQ ID NO: 657989 - RNA, 19 nt, Artificial Sequence
  Description of Artificial Sequence: Synthetic oligonucleotide
  Antisense strand to SEQ ID NO: 657988
gaugacagaucuguuuccc

SEQ ID NO: 657990 - RNA, 19 nt, Artificial Sequence
  Description of Artificial Sequence: Synthetic oligonucleotide
  Sense strand starting at position 36 of SEQ ID NO: 585667
acagaucugucauccauag

SEQ ID NO: 657991 - RNA, 19 nt, Artificial Sequence
  Description of Artificial Sequence: Synthetic oligonucleotide
  Antisense strand to SEQ ID NO: 657990
cuauggaugacagaucugu

SEQ ID NO: 657992 - RNA, 19 nt, Artificial Sequence
  Description of Artificial Sequence: Synthetic oligonucleotide
  Sense strand starting at position 112 of SEQ ID NO: 585667
agaucauacugcccauaga

SEQ ID NO: 657993 - RNA, 19 nt, Artificial Sequence
  Description of Artificial Sequence: Synthetic oligonucleotide
  Antisense strand to SEQ ID NO: 657992
ucuaugggcaguaugaucu

SEQ ID NO: 657994 - RNA, 19 nt, Artificial Sequence
  Description of Artificial Sequence: Synthetic oligonucleotide
  Sense strand starting at position 179 of SEQ ID NO: 585667
ggcugccgacacugaaaua

SEQ ID NO: 657995 - RNA, 19 nt, Artificial Sequence
  Description of Artificial Sequence: Synthetic oligonucleotide
  Antisense strand to SEQ ID NO: 657994
uauuucagugucggcagcc

SEQ ID NO: 657996 - RNA, 19 nt, Artificial Sequence
  Description of Artificial Sequence: Synthetic oligonucleotide
  Sense strand starting at position 199 of SEQ ID NO: 585667
guucuccauuucgcagaua

SEQ ID NO: 657997 - RNA, 19 nt, Artificial Sequence
  Description of Artificial Sequence: Synthetic oligonucleotide
  Antisense strand to SEQ ID NO: 657996
uaucugcgaaauggagaac

SEQ ID NO: 657998 - RNA, 19 nt, Artificial Sequence
  Description of Artificial Sequence: Synthetic oligonucleotide
  Sense strand starting at position 256 of SEQ ID NO: 585667
gagguuagcucuuuccaac

SEQ ID NO: 657999 - RNA, 19 nt, Artificial Sequence
  Description of Artificial Sequence: Synthetic oligonucleotide
  Antisense strand to SEQ ID NO: 657998
guuggaaagagcuaaccuc

SEQ ID NO: 658000 - RNA, 19 nt, Artificial Sequence
  Description of Artificial Sequence: Synthetic oligonucleotide
  Sense strand starting at position 332 of SEQ ID NO: 585667
aucuaaagaucagagaaag

SEQ ID NO: 658001 - RNA, 19 nt, Artificial Sequence
  Description of Artificial Sequence: Synthetic oligonucleotide
  Antisense strand to SEQ ID NO: 658000
cuuucucugaucuuuagau

SEQ ID NO: 658002 - RNA, 19 nt, Artificial Sequence
  Description of Artificial Sequence: Synthetic oligonucleotide
  Sense strand starting at position 414 of SEQ ID NO: 585667
gguggaugugucagugcua

SEQ ID NO: 658003 - RNA, 19 nt, Artificial Sequence
  Description of Artificial Sequence: Synthetic oligonucleotide
  Antisense strand to SEQ ID NO: 658002
uagcacugacacauccacc

SEQ ID NO: 658004 - RNA, 19 nt, Artificial Sequence
  Description of Artificial Sequence: Synthetic oligonucleotide
  Sense strand starting at position 427 of SEQ ID NO: 585667
gugcuaaauaccugacgua

SEQ ID NO: 658005 - RNA, 19 nt, Artificial Sequence
  Description of Artificial Sequence: Synthetic oligonucleotide
  Antisense strand to SEQ ID NO: 658004
uacgucagguauuuagcac

SEQ ID NO: 658006 - RNA, 19 nt, Artificial Sequence
  Description of Artificial Sequence: Synthetic oligonucleotide
  Sense strand starting at position 439 of SEQ ID NO: 585667
ugacguacuaucuggcuua

SEQ ID NO: 658007 - RNA, 19 nt, Artificial Sequence
  Description of Artificial Sequence: Synthetic oligonucleotide
  Antisense strand to SEQ ID NO: 658006
uaagccagauaguacguca

SEQ ID NO: 658008 - RNA, 19 nt, Artificial Sequence
  Description of Artificial Sequence: Synthetic oligonucleotide
  Sense strand starting at position 442 of SEQ ID NO: 585667
cguacuaucuggcuuauga

SEQ ID NO: 658009 - RNA, 19 nt, Artificial Sequence
  Description of Artificial Sequence: Synthetic oligonucleotide
  Antisense strand to SEQ ID NO: 658008
ucauaagccagauaguacg

SEQ ID NO: 658010 - RNA, 19 nt, Artificial Sequence
  Description of Artificial Sequence: Synthetic oligonucleotide
  Sense strand starting at position 452 of SEQ ID NO: 585667
ggcuuaugaguggagcaca

SEQ ID NO: 658011 - RNA, 19 nt, Artificial Sequence
  Description of Artificial Sequence: Synthetic oligonucleotide
  Antisense strand to SEQ ID NO: 658010
ugugcuccacucauaagcc

SEQ ID NO: 658012 - RNA, 19 nt, Artificial Sequence
  Description of Artificial Sequence: Synthetic oligonucleotide
  Sense strand starting at position 471 of SEQ ID NO: 585667
ggcugagauuugggagaag

SEQ ID NO: 658013 - RNA, 19 nt, Artificial Sequence
  Description of Artificial Sequence: Synthetic oligonucleotide
  Antisense strand to SEQ ID NO: 658012
cuucucccaaaucucagcc

SEQ ID NO: 658014 - RNA, 19 nt, Artificial Sequence
  Description of Artificial Sequence: Synthetic oligonucleotide
  Sense strand starting at position 564 of SEQ ID NO: 585667
gagcaaugaucugagagau

SEQ ID NO: 658015 - RNA, 19 nt, Artificial Sequence
  Description of Artificial Sequence: Synthetic oligonucleotide
  Antisense strand to SEQ ID NO: 658014
aucucucagaucauugcuc

SEQ ID NO: 658016 - RNA, 19 nt, Artificial Sequence
  Description of Artificial Sequence: Synthetic oligonucleotide
  Sense strand starting at position 870 of SEQ ID NO: 585667
ccagauucugccugcugga

SEQ ID NO: 658017 - RNA, 19 nt, Artificial Sequence
  Description of Artificial Sequence: Synthetic oligonucleotide
  Antisense strand to SEQ ID NO: 658016
uccagcaggcagaaucugg

SEQ ID NO: 658018 - RNA, 19 nt, Artificial Sequence
  Description of Artificial Sequence: Synthetic oligonucleotide
  Sense strand starting at position 890 of SEQ ID NO: 585667
cguauacacucacuaaugu

SEQ ID NO: 658019 - RNA, 19 nt, Artificial Sequence
  Description of Artificial Sequence: Synthetic oligonucleotide
  Antisense strand to SEQ ID NO: 658018
acauuagugaguguauacg

SEQ ID NO: 658020 - RNA, 19 nt, Artificial Sequence
  Description of Artificial Sequence: Synthetic oligonucleotide
  Sense strand starting at position 891 of SEQ ID NO: 585667
guauacacucacuaaugua

SEQ ID NO: 658021 - RNA, 19 nt, Artificial Sequence
  Description of Artificial Sequence: Synthetic oligonucleotide
  Antisense strand to SEQ ID NO: 658020
uacauuagugaguguauac

SEQ ID NO: 658022 - RNA, 19 nt, Artificial Sequence
  Description of Artificial Sequence: Synthetic oligonucleotide
  Sense strand starting at position 925 of SEQ ID NO: 585667
ccgagaauccacugcugca

SEQ ID NO: 658023 - RNA, 19 nt, Artificial Sequence
  Description of Artificial Sequence: Synthetic oligonucleotide
  Antisense strand to SEQ ID NO: 658022
ugcagcaguggauucucgg

SEQ ID NO: 658024 - RNA, 19 nt, Artificial Sequence
  Description of Artificial Sequence: Synthetic oligonucleotide
  Sense strand starting at position 1035 of SEQ ID NO: 585667
ggaagaauucugugggcug

SEQ ID NO: 658025 - RNA, 19 nt, Artificial Sequence
  Description of Artificial Sequence: Synthetic oligonucleotide
  Antisense strand to SEQ ID NO: 658024
cagcccacagaauucuucc

SEQ ID NO: 658026 - RNA, 19 nt, Artificial Sequence
  Description of Artificial Sequence: Synthetic oligonucleotide
  Sense strand starting at position 1037 of SEQ ID NO: 585667
aagaauucugugggcugau

SEQ ID NO: 658027 - RNA, 19 nt, Artificial Sequence
  Description of Artificial Sequence: Synthetic oligonucleotide
  Antisense strand to SEQ ID NO: 658026
aucagcccacagaauucuu

SEQ ID NO: 658028 - RNA, 19 nt, Artificial Sequence
  Description of Artificial Sequence: Synthetic oligonucleotide
  Sense strand starting at position 1038 of SEQ ID NO: 585667
agaauucugugggcugaua

SEQ ID NO: 658029 - RNA, 19 nt, Artificial Sequence
  Description of Artificial Sequence: Synthetic oligonucleotide
  Antisense strand to SEQ ID NO: 658028
uaucagcccacagaauucu

SEQ ID NO: 658030 - RNA, 19 nt, Artificial Sequence
  Description of Artificial Sequence: Synthetic oligonucleotide
  Sense strand starting at position 1040 of SEQ ID NO: 585667
aauucugugggcugauaag

SEQ ID NO: 658031 - RNA, 19 nt, Artificial Sequence
  Description of Artificial Sequence: Synthetic oligonucleotide
  Antisense strand to SEQ ID NO: 658030
cuuaucagcccacagaauu

SEQ ID NO: 658032 - RNA, 19 nt, Artificial Sequence
  Description of Artificial Sequence: Synthetic oligonucleotide
  Sense strand starting at position 1227 of SEQ ID NO: 585667
gaggcaugccaguaucaac

SEQ ID NO: 658033 - RNA, 19 nt, Artificial Sequence
  Description of Artificial Sequence: Synthetic oligonucleotide
  Antisense strand to SEQ ID NO: 658032
guugauacuggcaugccuc

SEQ ID NO: 658034 - RNA, 19 nt, Artificial Sequence
  Description of Artificial Sequence: Synthetic oligonucleotide
  Sense strand starting at position 1324 of SEQ ID NO: 585667
ggguuucuuccaugcauaa

SEQ ID NO: 658035 - RNA, 19 nt, Artificial Sequence
  Description of Artificial Sequence: Synthetic oligonucleotide
  Antisense strand to SEQ ID NO: 658034
uuaugcauggaagaaaccc

SEQ ID NO: 658036 - RNA, 19 nt, Artificial Sequence
  Description of Artificial Sequence: Synthetic oligonucleotide
  Sense strand starting at position 1371 of SEQ ID NO: 585667
guaacaguauccucacuuu

SEQ ID NO: 658037 - RNA, 19 nt, Artificial Sequence
  Description of Artificial Sequence: Synthetic oligonucleotide
  Antisense strand to SEQ ID NO: 658036
aaagugaggauacuguuac

SEQ ID NO: 658038 - RNA, 19 nt, Artificial Sequence
  Description of Artificial Sequence: Synthetic oligonucleotide
  Sense strand starting at position 1415 of SEQ ID NO: 585667
cuaagugacuuguucuaag

SEQ ID NO: 658039 - RNA, 19 nt, Artificial Sequence
  Description of Artificial Sequence: Synthetic oligonucleotide
  Antisense strand to SEQ ID NO: 658038
cuuagaacaagucacuuag

SEQ ID NO: 658040 - RNA, 19 nt, Artificial Sequence
  Description of Artificial Sequence: Synthetic oligonucleotide
  Sense strand starting at position 1442 of SEQ ID NO: 585667
cagugaguugcugagagga

SEQ ID NO: 658041 - RNA, 19 nt, Artificial Sequence
  Description of Artificial Sequence: Synthetic oligonucleotide
  Antisense strand to SEQ ID NO: 658040
uccucucagcaacucacug

SEQ ID NO: 658042 - RNA, 19 nt, Artificial Sequence
  Description of Artificial Sequence: Synthetic oligonucleotide
  Sense strand starting at position 1562 of SEQ ID NO: 585667
gcaggaaaguucucuuguc

SEQ ID NO: 658043 - RNA, 19 nt, Artificial Sequence
  Description of Artificial Sequence: Synthetic oligonucleotide
  Antisense strand to SEQ ID NO: 658042
gacaagagaacuuuccugc

SEQ ID NO: 658044 - RNA, 19 nt, Artificial Sequence
  Description of Artificial Sequence: Synthetic oligonucleotide
  Sense strand starting at position 1563 of SEQ ID NO: 585667
caggaaaguucucuugucu

SEQ ID NO: 658045 - RNA, 19 nt, Artificial Sequence
  Description of Artificial Sequence: Synthetic oligonucleotide
  Antisense strand to SEQ ID NO: 658044
agacaagagaacuuuccug

SEQ ID NO: 658046 - RNA, 19 nt, Artificial Sequence
  Description of Artificial Sequence: Synthetic oligonucleotide
  Sense strand starting at position 1604 of SEQ ID NO: 585667
ccuguaacucuuuguccua

SEQ ID NO: 658047 - RNA, 19 nt, Artificial Sequence
  Description of Artificial Sequence: Synthetic oligonucleotide
  Antisense strand to SEQ ID NO: 658046
uaggacaaagaguuacagg

SEQ ID NO: 658048 - RNA, 19 nt, Artificial Sequence
  Description of Artificial Sequence: Synthetic oligonucleotide
  Sense strand starting at position 1605 of SEQ ID NO: 585667
cuguaacucuuuguccuaa

SEQ ID NO: 658049 - RNA, 19 nt, Artificial Sequence
  Description of Artificial Sequence: Synthetic oligonucleotide
  Antisense strand to SEQ ID NO: 658048
uuaggacaaagaguuacag

SEQ ID NO: 658050 - RNA, 19 nt, Artificial Sequence
  Description of Artificial Sequence: Synthetic oligonucleotide
  Sense strand starting at position 1607 of SEQ ID NO: 585667
guaacucuuuguccuaacu

SEQ ID NO: 658051 - RNA, 19 nt, Artificial Sequence
  Description of Artificial Sequence: Synthetic oligonucleotide
  Antisense strand to SEQ ID NO: 658050
aguuaggacaaagaguuac

SEQ ID NO: 658052 - RNA, 19 nt, Artificial Sequence
  Description of Artificial Sequence: Synthetic oligonucleotide
  Sense strand starting at position 2277 of SEQ ID NO: 585667
agggucgugucaucuaaag

SEQ ID NO: 658053 - RNA, 19 nt, Artificial Sequence
  Description of Artificial Sequence: Synthetic oligonucleotide
  Antisense strand to SEQ ID NO: 658052
cuuuagaugacacgacccu

SEQ ID NO: 658054 - RNA, 19 nt, Artificial Sequence
  Description of Artificial Sequence: Synthetic oligonucleotide
  Sense strand starting at position 2436 of SEQ ID NO: 585667
ggccaacugcaacagaaua

SEQ ID NO: 658055 - RNA, 19 nt, Artificial Sequence
  Description of Artificial Sequence: Synthetic oligonucleotide
  Antisense strand to SEQ ID NO: 658054
uauucuguugcaguuggcc

SEQ ID NO: 658056 - RNA, 19 nt, Artificial Sequence
  Description of Artificial Sequence: Synthetic oligonucleotide
  Sense strand starting at position 3092 of SEQ ID NO: 585667
aggagacauccgcagcuga

SEQ ID NO: 658057 - RNA, 19 nt, Artificial Sequence
  Description of Artificial Sequence: Synthetic oligonucleotide
  Antisense strand to SEQ ID NO: 658056
ucagcugcggaugucuccu

SEQ ID NO: 658058 - RNA, 19 nt, Artificial Sequence
  Description of Artificial Sequence: Synthetic oligonucleotide
  Sense strand starting at position 3136 of SEQ ID NO: 585667
ccguuuggugugccggaaa

SEQ ID NO: 658059 - RNA, 19 nt, Artificial Sequence
  Description of Artificial Sequence: Synthetic oligonucleotide
  Antisense strand to SEQ ID NO: 658058
uuuccggcacaccaaacgg

SEQ ID NO: 658060 - RNA, 19 nt, Artificial Sequence
  Description of Artificial Sequence: Synthetic oligonucleotide
  Sense strand starting at position 3139 of SEQ ID NO: 585667
uuuggugugccggaaacau

SEQ ID NO: 658061 - RNA, 19 nt, Artificial Sequence
  Description of Artificial Sequence: Synthetic oligonucleotide
  Antisense strand to SEQ ID NO: 658060
auguuuccggcacaccaaa

SEQ ID NO: 658062 - RNA, 19 nt, Artificial Sequence
  Description of Artificial Sequence: Synthetic oligonucleotide
  Sense strand starting at position 3212 of SEQ ID NO: 585667
guguuuaugggccagcaua

SEQ ID NO: 658063 - RNA, 19 nt, Artificial Sequence
  Description of Artificial Sequence: Synthetic oligonucleotide
  Antisense strand to SEQ ID NO: 658062
uaugcuggcccauaaacac

SEQ ID NO: 658064 - RNA, 19 nt, Artificial Sequence
  Description of Artificial Sequence: Synthetic oligonucleotide
  Sense strand starting at position 3253 of SEQ ID NO: 585667
agcugaucaucuuuccgua

SEQ ID NO: 658065 - RNA, 19 nt, Artificial Sequence
  Description of Artificial Sequence: Synthetic oligonucleotide
  Antisense strand to SEQ ID NO: 658064
uacggaaagaugaucagcu

SEQ ID NO: 658066 - RNA, 19 nt, Artificial Sequence
  Description of Artificial Sequence: Synthetic oligonucleotide
  Sense strand starting at position 42 of SEQ ID NO: 585668
auggaaugucagggcaaga

SEQ ID NO: 658067 - RNA, 19 nt, Artificial Sequence
  Description of Artificial Sequence: Synthetic oligonucleotide
  Antisense strand to SEQ ID NO: 658066
ucuugcccugacauuccau

SEQ ID NO: 658068 - RNA, 19 nt, Artificial Sequence
  Description of Artificial Sequence: Synthetic oligonucleotide
  Sense strand starting at position 65 of SEQ ID NO: 585668
ccuugaugcccucauguua

SEQ ID NO: 658069 - RNA, 19 nt, Artificial Sequence
  Description of Artificial Sequence: Synthetic oligonucleotide
  Antisense strand to SEQ ID NO: 658068
uaacaugagggcaucaagg

SEQ ID NO: 658070 - RNA, 19 nt, Artificial Sequence
  Description of Artificial Sequence: Synthetic oligonucleotide
  Sense strand starting at position 253 of SEQ ID NO: 585668
aaagaacugugucccuaag

SEQ ID NO: 658071 - RNA, 19 nt, Artificial Sequence
  Description of Artificial Sequence: Synthetic oligonucleotide
  Antisense strand to SEQ ID NO: 658070
cuuagggacacaguucuuu

SEQ ID NO: 658072 - RNA, 19 nt, Artificial Sequence
  Description of Artificial Sequence: Synthetic oligonucleotide
  Sense strand starting at position 255 of SEQ ID NO: 585668
agaacugugucccuaaguu

SEQ ID NO: 658073 - RNA, 19 nt, Artificial Sequence
  Description of Artificial Sequence: Synthetic oligonucleotide
  Antisense strand to SEQ ID NO: 658072
aacuuagggacacaguucu

SEQ ID NO: 658074 - RNA, 19 nt, Artificial Sequence
  Description of Artificial Sequence: Synthetic oligonucleotide
  Sense strand starting at position 286 of SEQ ID NO: 585668
guggaauccucuccacugu

SEQ ID NO: 658075 - RNA, 19 nt, Artificial Sequence
  Description of Artificial Sequence: Synthetic oligonucleotide
  Antisense strand to SEQ ID NO: 658074
acaguggagaggauuccac

SEQ ID NO: 658076 - RNA, 19 nt, Artificial Sequence
  Description of Artificial Sequence: Synthetic oligonucleotide
  Sense strand starting at position 370 of SEQ ID NO: 585668
aacggaagggcucauagua

SEQ ID NO: 658077 - RNA, 19 nt, Artificial Sequence
  Description of Artificial Sequence: Synthetic oligonucleotide
  Antisense strand to SEQ ID NO: 658076
uacuaugagcccuuccguu

SEQ ID NO: 658078 - RNA, 19 nt, Artificial Sequence
  Description of Artificial Sequence: Synthetic oligonucleotide
  Sense strand starting at position 415 of SEQ ID NO: 585668
cagaguaauugacuaugau

SEQ ID NO: 658079 - RNA, 19 nt, Artificial Sequence
  Description of Artificial Sequence: Synthetic oligonucleotide
  Antisense strand to SEQ ID NO: 658078
aucauagucaauuacucug

SEQ ID NO: 658080 - RNA, 19 nt, Artificial Sequence
  Description of Artificial Sequence: Synthetic oligonucleotide
  Sense strand starting at position 418 of SEQ ID NO: 585668
aguaauugacuaugaucuu

SEQ ID NO: 658081 - RNA, 19 nt, Artificial Sequence
  Description of Artificial Sequence: Synthetic oligonucleotide
  Antisense strand to SEQ ID NO: 658080
aagaucauagucaauuacu

SEQ ID NO: 658082 - RNA, 19 nt, Artificial Sequence
  Description of Artificial Sequence: Synthetic oligonucleotide
  Sense strand starting at position 439 of SEQ ID NO: 585668
gaaacaaggucagucuauu

SEQ ID NO: 658083 - RNA, 19 nt, Artificial Sequence
  Description of Artificial Sequence: Synthetic oligonucleotide
  Antisense strand to SEQ ID NO: 658082
aauagacugaccuuguuuc

SEQ ID NO: 658084 - RNA, 19 nt, Artificial Sequence
  Description of Artificial Sequence: Synthetic oligonucleotide
  Sense strand starting at position 635 of SEQ ID NO: 585668
uauggaauuuccgaucaag

SEQ ID NO: 658085 - RNA, 19 nt, Artificial Sequence
  Description of Artificial Sequence: Synthetic oligonucleotide
  Antisense strand to SEQ ID NO: 658084
cuugaucggaaauuccaua

SEQ ID NO: 658086 - RNA, 19 nt, Artificial Sequence
  Description of Artificial Sequence: Synthetic oligonucleotide
  Sense strand starting at position 643 of SEQ ID NO: 585668
uuccgaucaagagguaaau

SEQ ID NO: 658087 - RNA, 19 nt, Artificial Sequence
  Description of Artificial Sequence: Synthetic oligonucleotide
  Antisense strand to SEQ ID NO: 658086
auuuaccucuugaucggaa

SEQ ID NO: 658088 - RNA, 19 nt, Artificial Sequence
  Description of Artificial Sequence: Synthetic oligonucleotide
  Sense strand starting at position 681 of SEQ ID NO: 585668
gagguaaauuuguaccaag

SEQ ID NO: 658089 - RNA, 19 nt, Artificial Sequence
  Description of Artificial Sequence: Synthetic oligonucleotide
  Antisense strand to SEQ ID NO: 658088
cuugguacaaauuuaccuc

SEQ ID NO: 658090 - RNA, 19 nt, Artificial Sequence
  Description of Artificial Sequence: Synthetic oligonucleotide
  Sense strand starting at position 684 of SEQ ID NO: 585668
guaaauuuguaccaagaga

SEQ ID NO: 658091 - RNA, 19 nt, Artificial Sequence
  Description of Artificial Sequence: Synthetic oligonucleotide
  Antisense strand to SEQ ID NO: 658090
ucucuugguacaaauuuac

SEQ ID NO: 658092 - RNA, 19 nt, Artificial Sequence
  Description of Artificial Sequence: Synthetic oligonucleotide
  Sense strand starting at position 703 of SEQ ID NO: 585668
uaauuugacugagaaguuu

SEQ ID NO: 658093 - RNA, 19 nt, Artificial Sequence
  Description of Artificial Sequence: Synthetic oligonucleotide
  Antisense strand to SEQ ID NO: 658092
aaacuucucagucaaauua

SEQ ID NO: 658094 - RNA, 19 nt, Artificial Sequence
  Description of Artificial Sequence: Synthetic oligonucleotide
  Sense strand starting at position 712 of SEQ ID NO: 585668
ugagaaguuuaagcugacu

SEQ ID NO: 658095 - RNA, 19 nt, Artificial Sequence
  Description of Artificial Sequence: Synthetic oligonucleotide
  Antisense strand to SEQ ID NO: 658094
agucagcuuaaacuucuca

SEQ ID NO: 658096 - RNA, 19 nt, Artificial Sequence
  Description of Artificial Sequence: Synthetic oligonucleotide
  Sense strand starting at position 786 of SEQ ID NO: 585668
uucuacuauugaguuggaa

SEQ ID NO: 658097 - RNA, 19 nt, Artificial Sequence
  Description of Artificial Sequence: Synthetic oligonucleotide
  Antisense strand to SEQ ID NO: 658096
uuccaacucaauaguagaa

SEQ ID NO: 658098 - RNA, 19 nt, Artificial Sequence
  Description of Artificial Sequence: Synthetic oligonucleotide
  Sense strand starting at position 873 of SEQ ID NO: 585668
gucacacagaguuaauagu

SEQ ID NO: 658099 - RNA, 19 nt, Artificial Sequence
  Description of Artificial Sequence: Synthetic oligonucleotide
  Antisense strand to SEQ ID NO: 658098
acuauuaacucugugugac

SEQ ID NO: 658100 - RNA, 19 nt, Artificial Sequence
  Description of Artificial Sequence: Synthetic oligonucleotide
  Sense strand starting at position 986 of SEQ ID NO: 585668
cccaaauuauaagugguuu

SEQ ID NO: 658101 - RNA, 19 nt, Artificial Sequence
  Description of Artificial Sequence: Synthetic oligonucleotide
  Antisense strand to SEQ ID NO: 658100
aaaccacuuauaauuuggg

SEQ ID NO: 658102 - RNA, 19 nt, Artificial Sequence
  Description of Artificial Sequence: Synthetic oligonucleotide
  Sense strand starting at position 1076 of SEQ ID NO: 585668
cggaccgacuuaucaugaa

SEQ ID NO: 658103 - RNA, 19 nt, Artificial Sequence
  Description of Artificial Sequence: Synthetic oligonucleotide
  Antisense strand to SEQ ID NO: 658102
uucaugauaagucgguccg

SEQ ID NO: 658104 - RNA, 19 nt, Artificial Sequence
  Description of Artificial Sequence: Synthetic oligonucleotide
  Sense strand starting at position 1128 of SEQ ID NO: 585668
agaggcuauuccucucuaa

SEQ ID NO: 658105 - RNA, 19 nt, Artificial Sequence
  Description of Artificial Sequence: Synthetic oligonucleotide
  Antisense strand to SEQ ID NO: 658104
uuagagaggaauagccucu

SEQ ID NO: 658106 - RNA, 19 nt, Artificial Sequence
  Description of Artificial Sequence: Synthetic oligonucleotide
  Sense strand starting at position 1174 of SEQ ID NO: 585668
ggcaguaguccagagcaga

SEQ ID NO: 658107 - RNA, 19 nt, Artificial Sequence
  Description of Artificial Sequence: Synthetic oligonucleotide
  Antisense strand to SEQ ID NO: 658106
ucugcucuggacuacugcc

SEQ ID NO: 658108 - RNA, 19 nt, Artificial Sequence
  Description of Artificial Sequence: Synthetic oligonucleotide
  Sense strand starting at position 1350 of SEQ ID NO: 585668
gggcaucacuaguuaacac

SEQ ID NO: 658109 - RNA, 19 nt, Artificial Sequence
  Description of Artificial Sequence: Synthetic oligonucleotide
  Antisense strand to SEQ ID NO: 658108
guguuaacuagugaugccc

SEQ ID NO: 658110 - RNA, 19 nt, Artificial Sequence
  Description of Artificial Sequence: Synthetic oligonucleotide
  Sense strand starting at position 1381 of SEQ ID NO: 585668
aucagugcuugggcuaaga

SEQ ID NO: 658111 - RNA, 19 nt, Artificial Sequence
  Description of Artificial Sequence: Synthetic oligonucleotide
  Antisense strand to SEQ ID NO: 658110
ucuuagcccaagcacugau

SEQ ID NO: 658112 - RNA, 19 nt, Artificial Sequence
  Description of Artificial Sequence: Synthetic oligonucleotide
  Sense strand starting at position 1383 of SEQ ID NO: 585668
cagugcuugggcuaagagu

SEQ ID NO: 658113 - RNA, 19 nt, Artificial Sequence
  Description of Artificial Sequence: Synthetic oligonucleotide
  Antisense strand to SEQ ID NO: 658112
acucuuagcccaagcacug

SEQ ID NO: 658114 - RNA, 19 nt, Artificial Sequence
  Description of Artificial Sequence: Synthetic oligonucleotide
  Sense strand starting at position 1435 of SEQ ID NO: 585668
augaguugguccuucucaa

SEQ ID NO: 658115 - RNA, 19 nt, Artificial Sequence
  Description of Artificial Sequence: Synthetic oligonucleotide
  Antisense strand to SEQ ID NO: 658114
uugagaaggaccaacucau

SEQ ID NO: 658116 - RNA, 19 nt, Artificial Sequence
  Description of Artificial Sequence: Synthetic oligonucleotide
  Sense strand starting at position 1584 of SEQ ID NO: 585668
agcgaaagcgcuuuagagu

SEQ ID NO: 658117 - RNA, 19 nt, Artificial Sequence
  Description of Artificial Sequence: Synthetic oligonucleotide
  Antisense strand to SEQ ID NO: 658116
acucuaaagcgcuuucgcu

SEQ ID NO: 658118 - RNA, 19 nt, Artificial Sequence
  Description of Artificial Sequence: Synthetic oligonucleotide
  Sense strand starting at position 1720 of SEQ ID NO: 585668
ugcucauugcggguugcaa

SEQ ID NO: 658119 - RNA, 19 nt, Artificial Sequence
  Description of Artificial Sequence: Synthetic oligonucleotide
  Antisense strand to SEQ ID NO: 658118
uugcaacccgcaaugagca

SEQ ID NO: 658120 - RNA, 19 nt, Artificial Sequence
  Description of Artificial Sequence: Synthetic oligonucleotide
  Sense strand starting at position 2290 of SEQ ID NO: 585668
ggaaguaggcguuaucuag

SEQ ID NO: 658121 - RNA, 19 nt, Artificial Sequence
  Description of Artificial Sequence: Synthetic oligonucleotide
  Antisense strand to SEQ ID NO: 658120
cuagauaacgccuacuucc

SEQ ID NO: 658122 - RNA, 19 nt, Artificial Sequence
  Description of Artificial Sequence: Synthetic oligonucleotide
  Sense strand starting at position 2942 of SEQ ID NO: 585668
cuucguugucaguuaugca

SEQ ID NO: 658123 - RNA, 19 nt, Artificial Sequence
  Description of Artificial Sequence: Synthetic oligonucleotide
  Antisense strand to SEQ ID NO: 658122
ugcauaacugacaacgaag

SEQ ID NO: 658124 - RNA, 19 nt, Artificial Sequence
  Description of Artificial Sequence: Synthetic oligonucleotide
  Sense strand starting at position 3180 of SEQ ID NO: 585668
agguaauugucaguaaggu

SEQ ID NO: 658125 - RNA, 19 nt, Artificial Sequence
  Description of Artificial Sequence: Synthetic oligonucleotide
  Antisense strand to SEQ ID NO: 658124
accuuacugacaauuaccu

SEQ ID NO: 658126 - RNA, 19 nt, Artificial Sequence
  Description of Artificial Sequence: Synthetic oligonucleotide
  Sense strand starting at position 3181 of SEQ ID NO: 585668
gguaauugucaguaaggua

SEQ ID NO: 658127 - RNA, 19 nt, Artificial Sequence
  Description of Artificial Sequence: Synthetic oligonucleotide
  Antisense strand to SEQ ID NO: 658126
uaccuuacugacaauuacc

SEQ ID NO: 658128 - RNA, 19 nt, Artificial Sequence
  Description of Artificial Sequence: Synthetic oligonucleotide
  Sense strand starting at position 3186 of SEQ ID NO: 585668
uugucaguaagguagagua

SEQ ID NO: 658129 - RNA, 19 nt, Artificial Sequence
  Description of Artificial Sequence: Synthetic oligonucleotide
  Antisense strand to SEQ ID NO: 658128
uacucuaccuuacugacaa

SEQ ID NO: 658130 - RNA, 19 nt, Artificial Sequence
  Description of Artificial Sequence: Synthetic oligonucleotide
  Sense strand starting at position 3260 of SEQ ID NO: 585668
acaccacuucgguguagaa

SEQ ID NO: 658131 - RNA, 19 nt, Artificial Sequence
  Description of Artificial Sequence: Synthetic oligonucleotide
  Antisense strand to SEQ ID NO: 658130
uucuacaccgaaguggugu

SEQ ID NO: 658132 - RNA, 19 nt, Artificial Sequence
  Description of Artificial Sequence: Synthetic oligonucleotide
  Sense strand starting at position 3262 of SEQ ID NO: 585668
accacuucgguguagaaga

SEQ ID NO: 658133 - RNA, 19 nt, Artificial Sequence
  Description of Artificial Sequence: Synthetic oligonucleotide
  Antisense strand to SEQ ID NO: 658132
ucuucuacaccgaaguggu

SEQ ID NO: 658134 - RNA, 19 nt, Artificial Sequence
  Description of Artificial Sequence: Synthetic oligonucleotide
  Sense strand starting at position 3546 of SEQ ID NO: 585668
gcugaugcccuccaggaua

SEQ ID NO: 658135 - RNA, 19 nt, Artificial Sequence
  Description of Artificial Sequence: Synthetic oligonucleotide
  Antisense strand to SEQ ID NO: 658134
uauccuggagggcaucagc

SEQ ID NO: 658136 - RNA, 19 nt, Artificial Sequence
  Description of Artificial Sequence: Synthetic oligonucleotide
  Sense strand starting at position 3548 of SEQ ID NO: 585668
ugaugcccuccaggauaau

SEQ ID NO: 658137 - RNA, 19 nt, Artificial Sequence
  Description of Artificial Sequence: Synthetic oligonucleotide
  Antisense strand to SEQ ID NO: 658136
auuauccuggagggcauca

SEQ ID NO: 658138 - RNA, 19 nt, Artificial Sequence
  Description of Artificial Sequence: Synthetic oligonucleotide
  Sense strand starting at position 3624 of SEQ ID NO: 585668
uaauauuugugcgugaccu

SEQ ID NO: 658139 - RNA, 19 nt, Artificial Sequence
  Description of Artificial Sequence: Synthetic oligonucleotide
  Antisense strand to SEQ ID NO: 658138
aggucacgcacaaauauua

SEQ ID NO: 658140 - RNA, 19 nt, Artificial Sequence
  Description of Artificial Sequence: Synthetic oligonucleotide
  Sense strand starting at position 3625 of SEQ ID NO: 585668
aauauuugugcgugaccuc

SEQ ID NO: 658141 - RNA, 19 nt, Artificial Sequence
  Description of Artificial Sequence: Synthetic oligonucleotide
  Antisense strand to SEQ ID NO: 658140
gaggucacgcacaaauauu

SEQ ID NO: 658142 - RNA, 19 nt, Artificial Sequence
  Description of Artificial Sequence: Synthetic oligonucleotide
  Sense strand starting at position 3634 of SEQ ID NO: 585668
gcgugaccucucuucucuu

SEQ ID NO: 658143 - RNA, 19 nt, Artificial Sequence
  Description of Artificial Sequence: Synthetic oligonucleotide
  Antisense strand to SEQ ID NO: 658142
aagagaagagaggucacgc

SEQ ID NO: 658144 - RNA, 19 nt, Artificial Sequence
  Description of Artificial Sequence: Synthetic oligonucleotide
  Sense strand starting at position 3710 of SEQ ID NO: 585668
caagauggcucagccgaua

SEQ ID NO: 658145 - RNA, 19 nt, Artificial Sequence
  Description of Artificial Sequence: Synthetic oligonucleotide
  Antisense strand to SEQ ID NO: 658144
uaucggcugagccaucuug

SEQ ID NO: 658146 - RNA, 19 nt, Artificial Sequence
  Description of Artificial Sequence: Synthetic oligonucleotide
  Sense strand starting at position 25 of SEQ ID NO: 585669
ggagcucuaagagguaaca

SEQ ID NO: 658147 - RNA, 19 nt, Artificial Sequence
  Description of Artificial Sequence: Synthetic oligonucleotide
  Antisense strand to SEQ ID NO: 658146
uguuaccucuuagagcucc

SEQ ID NO: 658148 - RNA, 19 nt, Artificial Sequence
  Description of Artificial Sequence: Synthetic oligonucleotide
  Sense strand starting at position 76 of SEQ ID NO: 585669
ccgaguucaccucgugaaa

SEQ ID NO: 658149 - RNA, 19 nt, Artificial Sequence
  Description of Artificial Sequence: Synthetic oligonucleotide
  Antisense strand to SEQ ID NO: 658148
uuucacgaggugaacucgg

SEQ ID NO: 658150 - RNA, 19 nt, Artificial Sequence
  Description of Artificial Sequence: Synthetic oligonucleotide
  Sense strand starting at position 79 of SEQ ID NO: 585669
aguucaccucgugaaaggu

SEQ ID NO: 658151 - RNA, 19 nt, Artificial Sequence
  Description of Artificial Sequence: Synthetic oligonucleotide
  Antisense strand to SEQ ID NO: 658150
accuuucacgaggugaacu

SEQ ID NO: 658152 - RNA, 19 nt, Artificial Sequence
  Description of Artificial Sequence: Synthetic oligonucleotide
  Sense strand starting at position 168 of SEQ ID NO: 585669
aguguuguggccugaauug

SEQ ID NO: 658153 - RNA, 19 nt, Artificial Sequence
  Description of Artificial Sequence: Synthetic oligonucleotide
  Antisense strand to SEQ ID NO: 658152
caauucaggccacaacacu

SEQ ID NO: 658154 - RNA, 19 nt, Artificial Sequence
  Description of Artificial Sequence: Synthetic oligonucleotide
  Sense strand starting at position 237 of SEQ ID NO: 585669
gugaccuuguuuguaaaca

SEQ ID NO: 658155 - RNA, 19 nt, Artificial Sequence
  Description of Artificial Sequence: Synthetic oligonucleotide
  Antisense strand to SEQ ID NO: 658154
uguuuacaaacaaggucac

SEQ ID NO: 658156 - RNA, 19 nt, Artificial Sequence
  Description of Artificial Sequence: Synthetic oligonucleotide
  Sense strand starting at position 908 of SEQ ID NO: 585669
gugacagugagcuauaaua

SEQ ID NO: 658157 - RNA, 19 nt, Artificial Sequence
  Description of Artificial Sequence: Synthetic oligonucleotide
  Antisense strand to SEQ ID NO: 658156
uauuauagcucacugucac

SEQ ID NO: 658158 - RNA, 19 nt, Artificial Sequence
  Description of Artificial Sequence: Synthetic oligonucleotide
  Sense strand starting at position 957 of SEQ ID NO: 585669
gagagaccuugucuacaga

SEQ ID NO: 658159 - RNA, 19 nt, Artificial Sequence
  Description of Artificial Sequence: Synthetic oligonucleotide
  Antisense strand to SEQ ID NO: 658158
ucuguagacaaggucucuc

SEQ ID NO: 658160 - RNA, 19 nt, Artificial Sequence
  Description of Artificial Sequence: Synthetic oligonucleotide
  Sense strand starting at position 960 of SEQ ID NO: 585669
agaccuugucuacagaucu

SEQ ID NO: 658161 - RNA, 19 nt, Artificial Sequence
  Description of Artificial Sequence: Synthetic oligonucleotide
  Antisense strand to SEQ ID NO: 658160
agaucuguagacaaggucu

SEQ ID NO: 658162 - RNA, 19 nt, Artificial Sequence
  Description of Artificial Sequence: Synthetic oligonucleotide
  Sense strand starting at position 967 of SEQ ID NO: 585669
gucuacagaucuuugagaa

SEQ ID NO: 658163 - RNA, 19 nt, Artificial Sequence
  Description of Artificial Sequence: Synthetic oligonucleotide
  Antisense strand to SEQ ID NO: 658162
uucucaaagaucuguagac

SEQ ID NO: 658164 - RNA, 19 nt, Artificial Sequence
  Description of Artificial Sequence: Synthetic oligonucleotide
  Sense strand starting at position 968 of SEQ ID NO: 585669
ucuacagaucuuugagaau

SEQ ID NO: 658165 - RNA, 19 nt, Artificial Sequence
  Description of Artificial Sequence: Synthetic oligonucleotide
  Antisense strand to SEQ ID NO: 658164
auucucaaagaucuguaga

SEQ ID NO: 658166 - RNA, 19 nt, Artificial Sequence
  Description of Artificial Sequence: Synthetic oligonucleotide
  Sense strand starting at position 971 of SEQ ID NO: 585669
acagaucuuugagaauaaa

SEQ ID NO: 658167 - RNA, 19 nt, Artificial Sequence
  Description of Artificial Sequence: Synthetic oligonucleotide
  Antisense strand to SEQ ID NO: 658166
uuuauucucaaagaucugu

SEQ ID NO: 658168 - RNA, 19 nt, Artificial Sequence
  Description of Artificial Sequence: Synthetic oligonucleotide
  Sense strand starting at position 1198 of SEQ ID NO: 585669
gcacguggagugugaagaa

SEQ ID NO: 658169 - RNA, 19 nt, Artificial Sequence
  Description of Artificial Sequence: Synthetic oligonucleotide
  Antisense strand to SEQ ID NO: 658168
uucuucacacuccacgugc

SEQ ID NO: 658170 - RNA, 19 nt, Artificial Sequence
  Description of Artificial Sequence: Synthetic oligonucleotide
  Sense strand starting at position 1201 of SEQ ID NO: 585669
cguggagugugaagaaaga

SEQ ID NO: 658171 - RNA, 19 nt, Artificial Sequence
  Description of Artificial Sequence: Synthetic oligonucleotide
  Antisense strand to SEQ ID NO: 658170
ucuuucuucacacuccacg

SEQ ID NO: 658172 - RNA, 19 nt, Artificial Sequence
  Description of Artificial Sequence: Synthetic oligonucleotide
  Sense strand starting at position 1314 of SEQ ID NO: 585669
agaagagagccugaugugu

SEQ ID NO: 658173 - RNA, 19 nt, Artificial Sequence
  Description of Artificial Sequence: Synthetic oligonucleotide
  Antisense strand to SEQ ID NO: 658172
acacaucaggcucucuucu

SEQ ID NO: 658174 - RNA, 19 nt, Artificial Sequence
  Description of Artificial Sequence: Synthetic oligonucleotide
  Sense strand starting at position 1325 of SEQ ID NO: 585669
ugaugugugccuagugcga

SEQ ID NO: 658175 - RNA, 19 nt, Artificial Sequence
  Description of Artificial Sequence: Synthetic oligonucleotide
  Antisense strand to SEQ ID NO: 658174
ucgcacuaggcacacauca

SEQ ID NO: 658176 - RNA, 19 nt, Artificial Sequence
  Description of Artificial Sequence: Synthetic oligonucleotide
  Sense strand starting at position 1338 of SEQ ID NO: 585669
gugcgaaaugccugagaca

SEQ ID NO: 658177 - RNA, 19 nt, Artificial Sequence
  Description of Artificial Sequence: Synthetic oligonucleotide
  Antisense strand to SEQ ID NO: 658176
ugucucaggcauuucgcac

SEQ ID NO: 658178 - RNA, 19 nt, Artificial Sequence
  Description of Artificial Sequence: Synthetic oligonucleotide
  Sense strand starting at position 1339 of SEQ ID NO: 585669
ugcgaaaugccugagacau

SEQ ID NO: 658179 - RNA, 19 nt, Artificial Sequence
  Description of Artificial Sequence: Synthetic oligonucleotide
  Antisense strand to SEQ ID NO: 658178
augucucaggcauuucgca

SEQ ID NO: 658180 - RNA, 19 nt, Artificial Sequence
  Description of Artificial Sequence: Synthetic oligonucleotide
  Sense strand starting at position 1347 of SEQ ID NO: 585669
gccugagacauccagugga

SEQ ID NO: 658181 - RNA, 19 nt, Artificial Sequence
  Description of Artificial Sequence: Synthetic oligonucleotide
  Antisense strand to SEQ ID NO: 658180
uccacuggaugucucaggc

SEQ ID NO: 658182 - RNA, 19 nt, Artificial Sequence
  Description of Artificial Sequence: Synthetic oligonucleotide
  Sense strand starting at position 2207 of SEQ ID NO: 585669
gacagugaccucuaggagu

SEQ ID NO: 658183 - RNA, 19 nt, Artificial Sequence
  Description of Artificial Sequence: Synthetic oligonucleotide
  Antisense strand to SEQ ID NO: 658182
acuccuagaggucacuguc

SEQ ID NO: 658184 - RNA, 19 nt, Artificial Sequence
  Description of Artificial Sequence: Synthetic oligonucleotide
  Sense strand starting at position 2495 of SEQ ID NO: 585669
uaagaauggcaacgguauu

SEQ ID NO: 658185 - RNA, 19 nt, Artificial Sequence
  Description of Artificial Sequence: Synthetic oligonucleotide
  Antisense strand to SEQ ID NO: 658184
aauaccguugccauucuua

SEQ ID NO: 658186 - RNA, 19 nt, Artificial Sequence
  Description of Artificial Sequence: Synthetic oligonucleotide
  Sense strand starting at position 2686 of SEQ ID NO: 585669
gccuuucggagacguggaa

SEQ ID NO: 658187 - RNA, 19 nt, Artificial Sequence
  Description of Artificial Sequence: Synthetic oligonucleotide
  Antisense strand to SEQ ID NO: 658186
uuccacgucuccgaaaggc

SEQ ID NO: 658188 - RNA, 19 nt, Artificial Sequence
  Description of Artificial Sequence: Synthetic oligonucleotide
  Sense strand starting at position 2700 of SEQ ID NO: 585669
uggaaaggaucucaagaga

SEQ ID NO: 658189 - RNA, 19 nt, Artificial Sequence
  Description of Artificial Sequence: Synthetic oligonucleotide
  Antisense strand to SEQ ID NO: 658188
ucucuugagauccuuucca

SEQ ID NO: 658190 - RNA, 19 nt, Artificial Sequence
  Description of Artificial Sequence: Synthetic oligonucleotide
  Sense strand starting at position 2815 of SEQ ID NO: 585669
ggaagccuugauggguuaa

SEQ ID NO: 658191 - RNA, 19 nt, Artificial Sequence
  Description of Artificial Sequence: Synthetic oligonucleotide
  Antisense strand to SEQ ID NO: 658190
uuaacccaucaaggcuucc

SEQ ID NO: 658192 - RNA, 19 nt, Artificial Sequence
  Description of Artificial Sequence: Synthetic oligonucleotide
  Sense strand starting at position 2817 of SEQ ID NO: 585669
aagccuugauggguuaaga

SEQ ID NO: 658193 - RNA, 19 nt, Artificial Sequence
  Description of Artificial Sequence: Synthetic oligonucleotide
  Antisense strand to SEQ ID NO: 658192
ucuuaacccaucaaggcuu

SEQ ID NO: 658194 - RNA, 19 nt, Artificial Sequence
  Description of Artificial Sequence: Synthetic oligonucleotide
  Sense strand starting at position 2876 of SEQ ID NO: 585669
uguuacaacugacuuuaga

SEQ ID NO: 658195 - RNA, 19 nt, Artificial Sequence
  Description of Artificial Sequence: Synthetic oligonucleotide
  Antisense strand to SEQ ID NO: 658194
ucuaaagucaguuguaaca

SEQ ID NO: 658196 - RNA, 19 nt, Artificial Sequence
  Description of Artificial Sequence: Synthetic oligonucleotide
  Sense strand starting at position 2894 of SEQ ID NO: 585669
agauuuaacuuggaacuau

SEQ ID NO: 658197 - RNA, 19 nt, Artificial Sequence
  Description of Artificial Sequence: Synthetic oligonucleotide
  Antisense strand to SEQ ID NO: 658196
auaguuccaaguuaaaucu

SEQ ID NO: 658198 - RNA, 19 nt, Artificial Sequence
  Description of Artificial Sequence: Synthetic oligonucleotide
  Sense strand starting at position 3099 of SEQ ID NO: 585669
aauugaagucuugacacgu

SEQ ID NO: 658199 - RNA, 19 nt, Artificial Sequence
  Description of Artificial Sequence: Synthetic oligonucleotide
  Antisense strand to SEQ ID NO: 658198
acgugucaagacuucaauu

SEQ ID NO: 658200 - RNA, 19 nt, Artificial Sequence
  Description of Artificial Sequence: Synthetic oligonucleotide
  Sense strand starting at position 3112 of SEQ ID NO: 585669
acacguuauagccagugaa

SEQ ID NO: 658201 - RNA, 19 nt, Artificial Sequence
  Description of Artificial Sequence: Synthetic oligonucleotide
  Antisense strand to SEQ ID NO: 658200
uucacuggcuauaacgugu

SEQ ID NO: 658202 - RNA, 19 nt, Artificial Sequence
  Description of Artificial Sequence: Synthetic oligonucleotide
  Sense strand starting at position 3115 of SEQ ID NO: 585669
cguuauagccagugaaauc

SEQ ID NO: 658203 - RNA, 19 nt, Artificial Sequence
  Description of Artificial Sequence: Synthetic oligonucleotide
  Antisense strand to SEQ ID NO: 658202
gauuucacuggcuauaacg

SEQ ID NO: 658204 - RNA, 19 nt, Artificial Sequence
  Description of Artificial Sequence: Synthetic oligonucleotide
  Sense strand starting at position 3343 of SEQ ID NO: 585669
aauggcuugugucuuugua

SEQ ID NO: 658205 - RNA, 19 nt, Artificial Sequence
  Description of Artificial Sequence: Synthetic oligonucleotide
  Antisense strand to SEQ ID NO: 658204
uacaaagacacaagccauu

SEQ ID NO: 658206 - RNA, 19 nt, Artificial Sequence
  Description of Artificial Sequence: Synthetic oligonucleotide
  Sense strand starting at position 3353 of SEQ ID NO: 585669
gucuuuguauuacuaagca

SEQ ID NO: 658207 - RNA, 19 nt, Artificial Sequence
  Description of Artificial Sequence: Synthetic oligonucleotide
  Antisense strand to SEQ ID NO: 658206
ugcuuaguaauacaaagac

SEQ ID NO: 658208 - RNA, 19 nt, Artificial Sequence
  Description of Artificial Sequence: Synthetic oligonucleotide
  Sense strand starting at position 3358 of SEQ ID NO: 585669
uguauuacuaagcaguguu

SEQ ID NO: 658209 - RNA, 19 nt, Artificial Sequence
  Description of Artificial Sequence: Synthetic oligonucleotide
  Antisense strand to SEQ ID NO: 658208
aacacugcuuaguaauaca

SEQ ID NO: 658210 - RNA, 19 nt, Artificial Sequence
  Description of Artificial Sequence: Synthetic oligonucleotide
  Sense strand starting at position 3406 of SEQ ID NO: 585669
aucccuuuacuuugugauu

SEQ ID NO: 658211 - RNA, 19 nt, Artificial Sequence
  Description of Artificial Sequence: Synthetic oligonucleotide
  Antisense strand to SEQ ID NO: 658210
aaucacaaaguaaagggau

SEQ ID NO: 658212 - RNA, 19 nt, Artificial Sequence
  Description of Artificial Sequence: Synthetic oligonucleotide
  Sense strand starting at position 3409 of SEQ ID NO: 585669
ccuuuacuuugugauuuga

SEQ ID NO: 658213 - RNA, 19 nt, Artificial Sequence
  Description of Artificial Sequence: Synthetic oligonucleotide
  Antisense strand to SEQ ID NO: 658212
ucaaaucacaaaguaaagg

SEQ ID NO: 658214 - RNA, 19 nt, Artificial Sequence
  Description of Artificial Sequence: Synthetic oligonucleotide
  Sense strand starting at position 3516 of SEQ ID NO: 585669
uuucucaaucuggauugua

SEQ ID NO: 658215 - RNA, 19 nt, Artificial Sequence
  Description of Artificial Sequence: Synthetic oligonucleotide
  Antisense strand to SEQ ID NO: 658214
uacaauccagauugagaaa

SEQ ID NO: 658216 - RNA, 19 nt, Artificial Sequence
  Description of Artificial Sequence: Synthetic oligonucleotide
  Sense strand starting at position 3519 of SEQ ID NO: 585669
cucaaucuggauuguaaug

SEQ ID NO: 658217 - RNA, 19 nt, Artificial Sequence
  Description of Artificial Sequence: Synthetic oligonucleotide
  Antisense strand to SEQ ID NO: 658216
cauuacaauccagauugag

SEQ ID NO: 658218 - RNA, 19 nt, Artificial Sequence
  Description of Artificial Sequence: Synthetic oligonucleotide
  Sense strand starting at position 3525 of SEQ ID NO: 585669
cuggauuguaaugaugguu

SEQ ID NO: 658219 - RNA, 19 nt, Artificial Sequence
  Description of Artificial Sequence: Synthetic oligonucleotide
  Antisense strand to SEQ ID NO: 658218
aaccaucauuacaauccag

SEQ ID NO: 658220 - RNA, 19 nt, Artificial Sequence
  Description of Artificial Sequence: Synthetic oligonucleotide
  Sense strand starting at position 3597 of SEQ ID NO: 585669
gcugucacugcucgggaaa

SEQ ID NO: 658221 - RNA, 19 nt, Artificial Sequence
  Description of Artificial Sequence: Synthetic oligonucleotide
  Antisense strand to SEQ ID NO: 658220
uuucccgagcagugacagc

SEQ ID NO: 658222 - RNA, 19 nt, Artificial Sequence
  Description of Artificial Sequence: Synthetic oligonucleotide
  Sense strand starting at position 3769 of SEQ ID NO: 585669
uucugauguuaugcagaaa

SEQ ID NO: 658223 - RNA, 19 nt, Artificial Sequence
  Description of Artificial Sequence: Synthetic oligonucleotide
  Antisense strand to SEQ ID NO: 658222
uuucugcauaacaucagaa

SEQ ID NO: 658224 - RNA, 19 nt, Artificial Sequence
  Description of Artificial Sequence: Synthetic oligonucleotide
  Sense strand starting at position 3897 of SEQ ID NO: 585669
agaugucccuccuuguaca

SEQ ID NO: 658225 - RNA, 19 nt, Artificial Sequence
  Description of Artificial Sequence: Synthetic oligonucleotide
  Antisense strand to SEQ ID NO: 658224
uguacaaggagggacaucu

SEQ ID NO: 658226 - RNA, 19 nt, Artificial Sequence
  Description of Artificial Sequence: Synthetic oligonucleotide
  Sense strand starting at position 247 of SEQ ID NO: 585670
cccaucucugagggcaaau

SEQ ID NO: 658227 - RNA, 19 nt, Artificial Sequence
  Description of Artificial Sequence: Synthetic oligonucleotide
  Antisense strand to SEQ ID NO: 658226
auuugcccucagagauggg

SEQ ID NO: 658228 - RNA, 19 nt, Artificial Sequence
  Description of Artificial Sequence: Synthetic oligonucleotide
  Sense strand starting at position 259 of SEQ ID NO: 585670
ggcaaauacuucuccagca

SEQ ID NO: 658229 - RNA, 19 nt, Artificial Sequence
  Description of Artificial Sequence: Synthetic oligonucleotide
  Antisense strand to SEQ ID NO: 658228
ugcuggagaaguauuugcc

SEQ ID NO: 658230 - RNA, 19 nt, Artificial Sequence
  Description of Artificial Sequence: Synthetic oligonucleotide
  Sense strand starting at position 525 of SEQ ID NO: 585670
uucccaauccaguggcaaa

SEQ ID NO: 658231 - RNA, 19 nt, Artificial Sequence
  Description of Artificial Sequence: Synthetic oligonucleotide
  Antisense strand to SEQ ID NO: 658230
uuugccacuggauugggaa

SEQ ID NO: 658232 - RNA, 19 nt, Artificial Sequence
  Description of Artificial Sequence: Synthetic oligonucleotide
  Sense strand starting at position 680 of SEQ ID NO: 585670
ccagcagugcuggaaagau

SEQ ID NO: 658233 - RNA, 19 nt, Artificial Sequence
  Description of Artificial Sequence: Synthetic oligonucleotide
  Antisense strand to SEQ ID NO: 658232
aucuuuccagcacugcugg

SEQ ID NO: 658234 - RNA, 19 nt, Artificial Sequence
  Description of Artificial Sequence: Synthetic oligonucleotide
  Sense strand starting at position 716 of SEQ ID NO: 585670
gggauauccuagcccaagu

SEQ ID NO: 658235 - RNA, 19 nt, Artificial Sequence
  Description of Artificial Sequence: Synthetic oligonucleotide
  Antisense strand to SEQ ID NO: 658234
acuugggcuaggauauccc

SEQ ID NO: 658236 - RNA, 19 nt, Artificial Sequence
  Description of Artificial Sequence: Synthetic oligonucleotide
  Sense strand starting at position 754 of SEQ ID NO: 585670
cuagcugacccugaaguuu

SEQ ID NO: 658237 - RNA, 19 nt, Artificial Sequence
  Description of Artificial Sequence: Synthetic oligonucleotide
  Antisense strand to SEQ ID NO: 658236
aaacuucagggucagcuag

SEQ ID NO: 658238 - RNA, 19 nt, Artificial Sequence
  Description of Artificial Sequence: Synthetic oligonucleotide
  Sense strand starting at position 786 of SEQ ID NO: 585670
agaguuacucaacagucca

SEQ ID NO: 658239 - RNA, 19 nt, Artificial Sequence
  Description of Artificial Sequence: Synthetic oligonucleotide
  Antisense strand to SEQ ID NO: 658238
uggacuguugaguaacucu

SEQ ID NO: 658240 - RNA, 19 nt, Artificial Sequence
  Description of Artificial Sequence: Synthetic oligonucleotide
  Sense strand starting at position 1098 of SEQ ID NO: 585670
ucccucuacuguguggaaa

SEQ ID NO: 658241 - RNA, 19 nt, Artificial Sequence
  Description of Artificial Sequence: Synthetic oligonucleotide
  Antisense strand to SEQ ID NO: 658240
uuuccacacaguagaggga

SEQ ID NO: 658242 - RNA, 19 nt, Artificial Sequence
  Description of Artificial Sequence: Synthetic oligonucleotide
  Sense strand starting at position 1099 of SEQ ID NO: 585670
cccucuacuguguggaaau

SEQ ID NO: 658243 - RNA, 19 nt, Artificial Sequence
  Description of Artificial Sequence: Synthetic oligonucleotide
  Antisense strand to SEQ ID NO: 658242
auuuccacacaguagaggg

SEQ ID NO: 658244 - RNA, 19 nt, Artificial Sequence
  Description of Artificial Sequence: Synthetic oligonucleotide
  Sense strand starting at position 1181 of SEQ ID NO: 585670
accucugacgccugaagaa

SEQ ID NO: 658245 - RNA, 19 nt, Artificial Sequence
  Description of Artificial Sequence: Synthetic oligonucleotide
  Antisense strand to SEQ ID NO: 658244
uucuucaggcgucagaggu

SEQ ID NO: 658246 - RNA, 19 nt, Artificial Sequence
  Description of Artificial Sequence: Synthetic oligonucleotide
  Sense strand starting at position 1238 of SEQ ID NO: 585670
gucaaaccaucaucuggaa

SEQ ID NO: 658247 - RNA, 19 nt, Artificial Sequence
  Description of Artificial Sequence: Synthetic oligonucleotide
  Antisense strand to SEQ ID NO: 658246
uuccagaugaugguuugac

SEQ ID NO: 658248 - RNA, 19 nt, Artificial Sequence
  Description of Artificial Sequence: Synthetic oligonucleotide
  Sense strand starting at position 1273 of SEQ ID NO: 585670
acugaccuuucuucgacau

SEQ ID NO: 658249 - RNA, 19 nt, Artificial Sequence
  Description of Artificial Sequence: Synthetic oligonucleotide
  Antisense strand to SEQ ID NO: 658248
augucgaagaaaggucagu

SEQ ID NO: 658250 - RNA, 19 nt, Artificial Sequence
  Description of Artificial Sequence: Synthetic oligonucleotide
  Sense strand starting at position 1442 of SEQ ID NO: 585670
ucccucagugcucagauga

SEQ ID NO: 658251 - RNA, 19 nt, Artificial Sequence
  Description of Artificial Sequence: Synthetic oligonucleotide
  Antisense strand to SEQ ID NO: 658250
ucaucugagcacugaggga

SEQ ID NO: 658252 - RNA, 19 nt, Artificial Sequence
  Description of Artificial Sequence: Synthetic oligonucleotide
  Sense strand starting at position 1455 of SEQ ID NO: 585670
agaugauucccugggugag

SEQ ID NO: 658253 - RNA, 19 nt, Artificial Sequence
  Description of Artificial Sequence: Synthetic oligonucleotide
  Antisense strand to SEQ ID NO: 658252
cucacccagggaaucaucu

SEQ ID NO: 658254 - RNA, 19 nt, Artificial Sequence
  Description of Artificial Sequence: Synthetic oligonucleotide
  Sense strand starting at position 1533 of SEQ ID NO: 585670
acagauggcucaguaaacu

SEQ ID NO: 658255 - RNA, 19 nt, Artificial Sequence
  Description of Artificial Sequence: Synthetic oligonucleotide
  Antisense strand to SEQ ID NO: 658254
aguuuacugagccaucugu

SEQ ID NO: 658256 - RNA, 19 nt, Artificial Sequence
  Description of Artificial Sequence: Synthetic oligonucleotide
  Sense strand starting at position 1639 of SEQ ID NO: 585670
gucucuguguuccucauuu

SEQ ID NO: 658257 - RNA, 19 nt, Artificial Sequence
  Description of Artificial Sequence: Synthetic oligonucleotide
  Antisense strand to SEQ ID NO: 658256
aaaugaggaacacagagac

SEQ ID NO: 658258 - RNA, 19 nt, Artificial Sequence
  Description of Artificial Sequence: Synthetic oligonucleotide
  Sense strand starting at position 1788 of SEQ ID NO: 585670
cucucauugcuccaggaaa

SEQ ID NO: 658259 - RNA, 19 nt, Artificial Sequence
  Description of Artificial Sequence: Synthetic oligonucleotide
  Antisense strand to SEQ ID NO: 658258
uuuccuggagcaaugagag

SEQ ID NO: 658260 - RNA, 19 nt, Artificial Sequence
  Description of Artificial Sequence: Synthetic oligonucleotide
  Sense strand starting at position 1790 of SEQ ID NO: 585670
cucauugcuccaggaaauc

SEQ ID NO: 658261 - RNA, 19 nt, Artificial Sequence
  Description of Artificial Sequence: Synthetic oligonucleotide
  Antisense strand to SEQ ID NO: 658260
gauuuccuggagcaaugag

SEQ ID NO: 658262 - RNA, 19 nt, Artificial Sequence
  Description of Artificial Sequence: Synthetic oligonucleotide
  Sense strand starting at position 2152 of SEQ ID NO: 585670
gugacucacuggccuagau

SEQ ID NO: 658263 - RNA, 19 nt, Artificial Sequence
  Description of Artificial Sequence: Synthetic oligonucleotide
  Antisense strand to SEQ ID NO: 658262
aucuaggccagugagucac

SEQ ID NO: 658264 - RNA, 19 nt, Artificial Sequence
  Description of Artificial Sequence: Synthetic oligonucleotide
  Sense strand starting at position 2154 of SEQ ID NO: 585670
gacucacuggccuagauca

SEQ ID NO: 658265 - RNA, 19 nt, Artificial Sequence
  Description of Artificial Sequence: Synthetic oligonucleotide
  Antisense strand to SEQ ID NO: 658264
ugaucuaggccagugaguc

SEQ ID NO: 658266 - RNA, 19 nt, Artificial Sequence
  Description of Artificial Sequence: Synthetic oligonucleotide
  Sense strand starting at position 2741 of SEQ ID NO: 585670
agagaaggcucucugaugu

SEQ ID NO: 658267 - RNA, 19 nt, Artificial Sequence
  Description of Artificial Sequence: Synthetic oligonucleotide
  Antisense strand to SEQ ID NO: 658266
acaucagagagccuucucu

SEQ ID NO: 658268 - RNA, 19 nt, Artificial Sequence
  Description of Artificial Sequence: Synthetic oligonucleotide
  Sense strand starting at position 3148 of SEQ ID NO: 585670
ccucuacuguuacuuggaa

SEQ ID NO: 658269 - RNA, 19 nt, Artificial Sequence
  Description of Artificial Sequence: Synthetic oligonucleotide
  Antisense strand to SEQ ID NO: 658268
uuccaaguaacaguagagg

SEQ ID NO: 658270 - RNA, 19 nt, Artificial Sequence
  Description of Artificial Sequence: Synthetic oligonucleotide
  Sense strand starting at position 3269 of SEQ ID NO: 585670
auccuaaucccuggaacgu

SEQ ID NO: 658271 - RNA, 19 nt, Artificial Sequence
  Description of Artificial Sequence: Synthetic oligonucleotide
  Antisense strand to SEQ ID NO: 658270
acguuccagggauuaggau

SEQ ID NO: 658272 - RNA, 19 nt, Artificial Sequence
  Description of Artificial Sequence: Synthetic oligonucleotide
  Sense strand starting at position 3270 of SEQ ID NO: 585670
uccuaaucccuggaacgua

SEQ ID NO: 658273 - RNA, 19 nt, Artificial Sequence
  Description of Artificial Sequence: Synthetic oligonucleotide
  Antisense strand to SEQ ID NO: 658272
uacguuccagggauuagga

SEQ ID NO: 658274 - RNA, 19 nt, Artificial Sequence
  Description of Artificial Sequence: Synthetic oligonucleotide
  Sense strand starting at position 3282 of SEQ ID NO: 585670
gaacguaggaauuagguua

SEQ ID NO: 658275 - RNA, 19 nt, Artificial Sequence
  Description of Artificial Sequence: Synthetic oligonucleotide
  Antisense strand to SEQ ID NO: 658274
uaaccuaauuccuacguuc

SEQ ID NO: 658276 - RNA, 19 nt, Artificial Sequence
  Description of Artificial Sequence: Synthetic oligonucleotide
  Sense strand starting at position 3329 of SEQ ID NO: 585670
ugggauuaagguugcuauu

SEQ ID NO: 658277 - RNA, 19 nt, Artificial Sequence
  Description of Artificial Sequence: Synthetic oligonucleotide
  Antisense strand to SEQ ID NO: 658276
aauagcaaccuuaauccca

SEQ ID NO: 658278 - RNA, 19 nt, Artificial Sequence
  Description of Artificial Sequence: Synthetic oligonucleotide
  Sense strand starting at position 3339 of SEQ ID NO: 585670
guugcuauucggcugacuu

SEQ ID NO: 658279 - RNA, 19 nt, Artificial Sequence
  Description of Artificial Sequence: Synthetic oligonucleotide
  Antisense strand to SEQ ID NO: 658278
aagucagccgaauagcaac

SEQ ID NO: 658280 - RNA, 19 nt, Artificial Sequence
  Description of Artificial Sequence: Synthetic oligonucleotide
  Sense strand starting at position 3435 of SEQ ID NO: 585670
gaggaagucugagugauac

SEQ ID NO: 658281 - RNA, 19 nt, Artificial Sequence
  Description of Artificial Sequence: Synthetic oligonucleotide
  Antisense strand to SEQ ID NO: 658280
guaucacucagacuuccuc

SEQ ID NO: 658282 - RNA, 19 nt, Artificial Sequence
  Description of Artificial Sequence: Synthetic oligonucleotide
  Sense strand starting at position 3441 of SEQ ID NO: 585670
gucugagugauacagugua

SEQ ID NO: 658283 - RNA, 19 nt, Artificial Sequence
  Description of Artificial Sequence: Synthetic oligonucleotide
  Antisense strand to SEQ ID NO: 658282
uacacuguaucacucagac

SEQ ID NO: 658284 - RNA, 19 nt, Artificial Sequence
  Description of Artificial Sequence: Synthetic oligonucleotide
  Sense strand starting at position 3454 of SEQ ID NO: 585670
aguguaagaaauggcugau

SEQ ID NO: 658285 - RNA, 19 nt, Artificial Sequence
  Description of Artificial Sequence: Synthetic oligonucleotide
  Antisense strand to SEQ ID NO: 658284
aucagccauuucuuacacu

SEQ ID NO: 658286 - RNA, 19 nt, Artificial Sequence
  Description of Artificial Sequence: Synthetic oligonucleotide
  Sense strand starting at position 3521 of SEQ ID NO: 585670
augccucuagaaggugaaa

SEQ ID NO: 658287 - RNA, 19 nt, Artificial Sequence
  Description of Artificial Sequence: Synthetic oligonucleotide
  Antisense strand to SEQ ID NO: 658286
uuucaccuucuagaggcau

SEQ ID NO: 658288 - RNA, 19 nt, Artificial Sequence
  Description of Artificial Sequence: Synthetic oligonucleotide
  Sense strand starting at position 3669 of SEQ ID NO: 585670
uguuguaagccauucgguu

SEQ ID NO: 658289 - RNA, 19 nt, Artificial Sequence
  Description of Artificial Sequence: Synthetic oligonucleotide
  Antisense strand to SEQ ID NO: 658288
aaccgaauggcuuacaaca

SEQ ID NO: 658290 - RNA, 19 nt, Artificial Sequence
  Description of Artificial Sequence: Synthetic oligonucleotide
  Sense strand starting at position 3692 of SEQ ID NO: 585670
guaauuugucacugcagca

SEQ ID NO: 658291 - RNA, 19 nt, Artificial Sequence
  Description of Artificial Sequence: Synthetic oligonucleotide
  Antisense strand to SEQ ID NO: 658290
ugcugcagugacaaauuac

SEQ ID NO: 658292 - RNA, 19 nt, Artificial Sequence
  Description of Artificial Sequence: Synthetic oligonucleotide
  Sense strand starting at position 3711 of SEQ ID NO: 585670
gcaggaauuagucaguauc

SEQ ID NO: 658293 - RNA, 19 nt, Artificial Sequence
  Description of Artificial Sequence: Synthetic oligonucleotide
  Antisense strand to SEQ ID NO: 658292
gauacugacuaauuccugc

SEQ ID NO: 658294 - RNA, 19 nt, Artificial Sequence
  Description of Artificial Sequence: Synthetic oligonucleotide
  Sense strand starting at position 3713 of SEQ ID NO: 585670
aggaauuagucaguaucuc

SEQ ID NO: 658295 - RNA, 19 nt, Artificial Sequence
  Description of Artificial Sequence: Synthetic oligonucleotide
  Antisense strand to SEQ ID NO: 658294
gagauacugacuaauuccu

SEQ ID NO: 658296 - RNA, 19 nt, Artificial Sequence
  Description of Artificial Sequence: Synthetic oligonucleotide
  Sense strand starting at position 3714 of SEQ ID NO: 585670
ggaauuagucaguaucuca

SEQ ID NO: 658297 - RNA, 19 nt, Artificial Sequence
  Description of Artificial Sequence: Synthetic oligonucleotide
  Antisense strand to SEQ ID NO: 658296
ugagauacugacuaauucc

SEQ ID NO: 658298 - RNA, 19 nt, Artificial Sequence
  Description of Artificial Sequence: Synthetic oligonucleotide
  Sense strand starting at position 3717 of SEQ ID NO: 585670
auuagucaguaucucauaa

SEQ ID NO: 658299 - RNA, 19 nt, Artificial Sequence
  Description of Artificial Sequence: Synthetic oligonucleotide
  Antisense strand to SEQ ID NO: 658298
uuaugagauacugacuaau

SEQ ID NO: 658300 - RNA, 19 nt, Artificial Sequence
  Description of Artificial Sequence: Synthetic oligonucleotide
  Sense strand starting at position 3909 of SEQ ID NO: 585670
agaaacaaguguuucuguu

SEQ ID NO: 658301 - RNA, 19 nt, Artificial Sequence
  Description of Artificial Sequence: Synthetic oligonucleotide
  Antisense strand to SEQ ID NO: 658300
aacagaaacacuuguuucu

SEQ ID NO: 658302 - RNA, 19 nt, Artificial Sequence
  Description of Artificial Sequence: Synthetic oligonucleotide
  Sense strand starting at position 3965 of SEQ ID NO: 585670
ggagguccuuguguauaga

SEQ ID NO: 658303 - RNA, 19 nt, Artificial Sequence
  Description of Artificial Sequence: Synthetic oligonucleotide
  Antisense strand to SEQ ID NO: 658302
ucuauacacaaggaccucc

SEQ ID NO: 658304 - RNA, 19 nt, Artificial Sequence
  Description of Artificial Sequence: Synthetic oligonucleotide
  Sense strand starting at position 3968 of SEQ ID NO: 585670
gguccuuguguauagagaa

SEQ ID NO: 658305 - RNA, 19 nt, Artificial Sequence
  Description of Artificial Sequence: Synthetic oligonucleotide
  Antisense strand to SEQ ID NO: 658304
uucucuauacacaaggacc

SEQ ID NO: 658306 - RNA, 19 nt, Artificial Sequence
  Description of Artificial Sequence: Synthetic oligonucleotide
  Sense strand starting at position 144 of SEQ ID NO: 585671
gacccuaaguguuaguuaa

SEQ ID NO: 658307 - RNA, 19 nt, Artificial Sequence
  Description of Artificial Sequence: Synthetic oligonucleotide
  Antisense strand to SEQ ID NO: 658306
uuaacuaacacuuaggguc

SEQ ID NO: 658308 - RNA, 19 nt, Artificial Sequence
  Description of Artificial Sequence: Synthetic oligonucleotide
  Sense strand starting at position 146 of SEQ ID NO: 585671
cccuaaguguuaguuaaag

SEQ ID NO: 658309 - RNA, 19 nt, Artificial Sequence
  Description of Artificial Sequence: Synthetic oligonucleotide
  Antisense strand to SEQ ID NO: 658308
cuuuaacuaacacuuaggg

SEQ ID NO: 658310 - RNA, 19 nt, Artificial Sequence
  Description of Artificial Sequence: Synthetic oligonucleotide
  Sense strand starting at position 222 of SEQ ID NO: 585671
gcagcagcugucuacugau

SEQ ID NO: 658311 - RNA, 19 nt, Artificial Sequence
  Description of Artificial Sequence: Synthetic oligonucleotide
  Antisense strand to SEQ ID NO: 658310
aucaguagacagcugcugc

SEQ ID NO: 658312 - RNA, 19 nt, Artificial Sequence
  Description of Artificial Sequence: Synthetic oligonucleotide
  Sense strand starting at position 225 of SEQ ID NO: 585671
gcagcugucuacugauagu

SEQ ID NO: 658313 - RNA, 19 nt, Artificial Sequence
  Description of Artificial Sequence: Synthetic oligonucleotide
  Antisense strand to SEQ ID NO: 658312
acuaucaguagacagcugc

SEQ ID NO: 658314 - RNA, 19 nt, Artificial Sequence
  Description of Artificial Sequence: Synthetic oligonucleotide
  Sense strand starting at position 371 of SEQ ID NO: 585671
ggcuuaggcugucagagga

SEQ ID NO: 658315 - RNA, 19 nt, Artificial Sequence
  Description of Artificial Sequence: Synthetic oligonucleotide
  Antisense strand to SEQ ID NO: 658314
uccucugacagccuaagcc

SEQ ID NO: 658316 - RNA, 19 nt, Artificial Sequence
  Description of Artificial Sequence: Synthetic oligonucleotide
  Sense strand starting at position 399 of SEQ ID NO: 585671
cgaugugaggacuaaguau

SEQ ID NO: 658317 - RNA, 19 nt, Artificial Sequence
  Description of Artificial Sequence: Synthetic oligonucleotide
  Antisense strand to SEQ ID NO: 658316
auacuuaguccucacaucg

SEQ ID NO: 658318 - RNA, 19 nt, Artificial Sequence
  Description of Artificial Sequence: Synthetic oligonucleotide
  Sense strand starting at position 507 of SEQ ID NO: 585671
aggcuaaauugggaagaau

SEQ ID NO: 658319 - RNA, 19 nt, Artificial Sequence
  Description of Artificial Sequence: Synthetic oligonucleotide
  Antisense strand to SEQ ID NO: 658318
auucuucccaauuuagccu

SEQ ID NO: 658320 - RNA, 19 nt, Artificial Sequence
  Description of Artificial Sequence: Synthetic oligonucleotide
  Sense strand starting at position 564 of SEQ ID NO: 585671
ggagaugccugggaacaga

SEQ ID NO: 658321 - RNA, 19 nt, Artificial Sequence
  Description of Artificial Sequence: Synthetic oligonucleotide
  Antisense strand to SEQ ID NO: 658320
ucuguucccaggcaucucc

SEQ ID NO: 658322 - RNA, 19 nt, Artificial Sequence
  Description of Artificial Sequence: Synthetic oligonucleotide
  Sense strand starting at position 815 of SEQ ID NO: 585671
ggcggaggaucuucaaaga

SEQ ID NO: 658323 - RNA, 19 nt, Artificial Sequence
  Description of Artificial Sequence: Synthetic oligonucleotide
  Antisense strand to SEQ ID NO: 658322
ucuuugaagauccuccgcc

SEQ ID NO: 658324 - RNA, 19 nt, Artificial Sequence
  Description of Artificial Sequence: Synthetic oligonucleotide
  Sense strand starting at position 946 of SEQ ID NO: 585671
gccugagaugccuguaaag

SEQ ID NO: 658325 - RNA, 19 nt, Artificial Sequence
  Description of Artificial Sequence: Synthetic oligonucleotide
  Antisense strand to SEQ ID NO: 658324
cuuuacaggcaucucaggc

SEQ ID NO: 658326 - RNA, 19 nt, Artificial Sequence
  Description of Artificial Sequence: Synthetic oligonucleotide
  Sense strand starting at position 1097 of SEQ ID NO: 585671
caaagagcucucgguaggu

SEQ ID NO: 658327 - RNA, 19 nt, Artificial Sequence
  Description of Artificial Sequence: Synthetic oligonucleotide
  Antisense strand to SEQ ID NO: 658326
accuaccgagagcucuuug

SEQ ID NO: 658328 - RNA, 19 nt, Artificial Sequence
  Description of Artificial Sequence: Synthetic oligonucleotide
  Sense strand starting at position 1099 of SEQ ID NO: 585671
aagagcucucgguagguuu

SEQ ID NO: 658329 - RNA, 19 nt, Artificial Sequence
  Description of Artificial Sequence: Synthetic oligonucleotide
  Antisense strand to SEQ ID NO: 658328
aaaccuaccgagagcucuu

SEQ ID NO: 658330 - RNA, 19 nt, Artificial Sequence
  Description of Artificial Sequence: Synthetic oligonucleotide
  Sense strand starting at position 1106 of SEQ ID NO: 585671
cucgguagguuuguaaaua

SEQ ID NO: 658331 - RNA, 19 nt, Artificial Sequence
  Description of Artificial Sequence: Synthetic oligonucleotide
  Antisense strand to SEQ ID NO: 658330
uauuuacaaaccuaccgag

SEQ ID NO: 658332 - RNA, 19 nt, Artificial Sequence
  Description of Artificial Sequence: Synthetic oligonucleotide
  Sense strand starting at position 1107 of SEQ ID NO: 585671
ucgguagguuuguaaauac

SEQ ID NO: 658333 - RNA, 19 nt, Artificial Sequence
  Description of Artificial Sequence: Synthetic oligonucleotide
  Antisense strand to SEQ ID NO: 658332
guauuuacaaaccuaccga

SEQ ID NO: 658334 - RNA, 19 nt, Artificial Sequence
  Description of Artificial Sequence: Synthetic oligonucleotide
  Sense strand starting at position 1122 of SEQ ID NO: 585671
auacuuaacugaugguaaa

SEQ ID NO: 658335 - RNA, 19 nt, Artificial Sequence
  Description of Artificial Sequence: Synthetic oligonucleotide
  Antisense strand to SEQ ID NO: 658334
uuuaccaucaguuaaguau

SEQ ID NO: 658336 - RNA, 19 nt, Artificial Sequence
  Description of Artificial Sequence: Synthetic oligonucleotide
  Sense strand starting at position 1417 of SEQ ID NO: 585671
caaaccauuucuggugaga

SEQ ID NO: 658337 - RNA, 19 nt, Artificial Sequence
  Description of Artificial Sequence: Synthetic oligonucleotide
  Antisense strand to SEQ ID NO: 658336
ucucaccagaaaugguuug

SEQ ID NO: 658338 - RNA, 19 nt, Artificial Sequence
  Description of Artificial Sequence: Synthetic oligonucleotide
  Sense strand starting at position 1419 of SEQ ID NO: 585671
aaccauuucuggugagagc

SEQ ID NO: 658339 - RNA, 19 nt, Artificial Sequence
  Description of Artificial Sequence: Synthetic oligonucleotide
  Antisense strand to SEQ ID NO: 658338
gcucucaccagaaaugguu

SEQ ID NO: 658340 - RNA, 19 nt, Artificial Sequence
  Description of Artificial Sequence: Synthetic oligonucleotide
  Sense strand starting at position 1483 of SEQ ID NO: 585671
agccauuucuggugagcca

SEQ ID NO: 658341 - RNA, 19 nt, Artificial Sequence
  Description of Artificial Sequence: Synthetic oligonucleotide
  Antisense strand to SEQ ID NO: 658340
uggcucaccagaaauggcu

SEQ ID NO: 658342 - RNA, 19 nt, Artificial Sequence
  Description of Artificial Sequence: Synthetic oligonucleotide
  Sense strand starting at position 1566 of SEQ ID NO: 585671
ucuugaguaucccucauca

SEQ ID NO: 658343 - RNA, 19 nt, Artificial Sequence
  Description of Artificial Sequence: Synthetic oligonucleotide
  Antisense strand to SEQ ID NO: 658342
ugaugagggauacucaaga

SEQ ID NO: 658344 - RNA, 19 nt, Artificial Sequence
  Description of Artificial Sequence: Synthetic oligonucleotide
  Sense strand starting at position 1655 of SEQ ID NO: 585671
ggagcuuccaguugaggau

SEQ ID NO: 658345 - RNA, 19 nt, Artificial Sequence
  Description of Artificial Sequence: Synthetic oligonucleotide
  Antisense strand to SEQ ID NO: 658344
auccucaacuggaagcucc

SEQ ID NO: 658346 - RNA, 19 nt, Artificial Sequence
  Description of Artificial Sequence: Synthetic oligonucleotide
  Sense strand starting at position 1664 of SEQ ID NO: 585671
aguugaggaucauggcuau

SEQ ID NO: 658347 - RNA, 19 nt, Artificial Sequence
  Description of Artificial Sequence: Synthetic oligonucleotide
  Antisense strand to SEQ ID NO: 658346
auagccaugauccucaacu

SEQ ID NO: 658348 - RNA, 19 nt, Artificial Sequence
  Description of Artificial Sequence: Synthetic oligonucleotide
  Sense strand starting at position 1667 of SEQ ID NO: 585671
ugaggaucauggcuaugua

SEQ ID NO: 658349 - RNA, 19 nt, Artificial Sequence
  Description of Artificial Sequence: Synthetic oligonucleotide
  Antisense strand to SEQ ID NO: 658348
uacauagccaugauccuca

SEQ ID NO: 658350 - RNA, 19 nt, Artificial Sequence
  Description of Artificial Sequence: Synthetic oligonucleotide
  Sense strand starting at position 1668 of SEQ ID NO: 585671
gaggaucauggcuauguac

SEQ ID NO: 658351 - RNA, 19 nt, Artificial Sequence
  Description of Artificial Sequence: Synthetic oligonucleotide
  Antisense strand to SEQ ID NO: 658350
guacauagccaugauccuc

SEQ ID NO: 658352 - RNA, 19 nt, Artificial Sequence
  Description of Artificial Sequence: Synthetic oligonucleotide
  Sense strand starting at position 1670 of SEQ ID NO: 585671
ggaucauggcuauguacug

SEQ ID NO: 658353 - RNA, 19 nt, Artificial Sequence
  Description of Artificial Sequence: Synthetic oligonucleotide
  Antisense strand to SEQ ID NO: 658352
caguacauagccaugaucc

SEQ ID NO: 658354 - RNA, 19 nt, Artificial Sequence
  Description of Artificial Sequence: Synthetic oligonucleotide
  Sense strand starting at position 1783 of SEQ ID NO: 585671
ggaauaccaucagaacaga

SEQ ID NO: 658355 - RNA, 19 nt, Artificial Sequence
  Description of Artificial Sequence: Synthetic oligonucleotide
  Antisense strand to SEQ ID NO: 658354
ucuguucugaugguauucc

SEQ ID NO: 658356 - RNA, 19 nt, Artificial Sequence
  Description of Artificial Sequence: Synthetic oligonucleotide
  Sense strand starting at position 1981 of SEQ ID NO: 585671
cuuggcaucuccguaauca

SEQ ID NO: 658357 - RNA, 19 nt, Artificial Sequence
  Description of Artificial Sequence: Synthetic oligonucleotide
  Antisense strand to SEQ ID NO: 658356
ugauuacggagaugccaag

SEQ ID NO: 658358 - RNA, 19 nt, Artificial Sequence
  Description of Artificial Sequence: Synthetic oligonucleotide
  Sense strand starting at position 1982 of SEQ ID NO: 585671
uuggcaucuccguaaucac

SEQ ID NO: 658359 - RNA, 19 nt, Artificial Sequence
  Description of Artificial Sequence: Synthetic oligonucleotide
  Antisense strand to SEQ ID NO: 658358
gugauuacggagaugccaa

SEQ ID NO: 658360 - RNA, 19 nt, Artificial Sequence
  Description of Artificial Sequence: Synthetic oligonucleotide
  Sense strand starting at position 1985 of SEQ ID NO: 585671
gcaucuccguaaucacaga

SEQ ID NO: 658361 - RNA, 19 nt, Artificial Sequence
  Description of Artificial Sequence: Synthetic oligonucleotide
  Antisense strand to SEQ ID NO: 658360
ucugugauuacggagaugc

SEQ ID NO: 658362 - RNA, 19 nt, Artificial Sequence
  Description of Artificial Sequence: Synthetic oligonucleotide
  Sense strand starting at position 1990 of SEQ ID NO: 585671
uccguaaucacagagaugu

SEQ ID NO: 658363 - RNA, 19 nt, Artificial Sequence
  Description of Artificial Sequence: Synthetic oligonucleotide
  Antisense strand to SEQ ID NO: 658362
acaucucugugauuacgga

SEQ ID NO: 658364 - RNA, 19 nt, Artificial Sequence
  Description of Artificial Sequence: Synthetic oligonucleotide
  Sense strand starting at position 2153 of SEQ ID NO: 585671
gggacagugucagcuacua

SEQ ID NO: 658365 - RNA, 19 nt, Artificial Sequence
  Description of Artificial Sequence: Synthetic oligonucleotide
  Antisense strand to SEQ ID NO: 658364
uaguagcugacacuguccc

SEQ ID NO: 658366 - RNA, 19 nt, Artificial Sequence
  Description of Artificial Sequence: Synthetic oligonucleotide
  Sense strand starting at position 2776 of SEQ ID NO: 585671
cccagaaaccuucguuaca

SEQ ID NO: 658367 - RNA, 19 nt, Artificial Sequence
  Description of Artificial Sequence: Synthetic oligonucleotide
  Antisense strand to SEQ ID NO: 658366
uguaacgaagguuucuggg

SEQ ID NO: 658368 - RNA, 19 nt, Artificial Sequence
  Description of Artificial Sequence: Synthetic oligonucleotide
  Sense strand starting at position 2777 of SEQ ID NO: 585671
ccagaaaccuucguuacac

SEQ ID NO: 658369 - RNA, 19 nt, Artificial Sequence
  Description of Artificial Sequence: Synthetic oligonucleotide
  Antisense strand to SEQ ID NO: 658368
guguaacgaagguuucugg

SEQ ID NO: 658370 - RNA, 19 nt, Artificial Sequence
  Description of Artificial Sequence: Synthetic oligonucleotide
  Sense strand starting at position 3369 of SEQ ID NO: 585671
ggaguugugugcgcugcuu

SEQ ID NO: 658371 - RNA, 19 nt, Artificial Sequence
  Description of Artificial Sequence: Synthetic oligonucleotide
  Antisense strand to SEQ ID NO: 658370
aagcagcgcacacaacucc

SEQ ID NO: 658372 - RNA, 19 nt, Artificial Sequence
  Description of Artificial Sequence: Synthetic oligonucleotide
  Sense strand starting at position 3526 of SEQ ID NO: 585671
ugcggaaacugcucaauua

SEQ ID NO: 658373 - RNA, 19 nt, Artificial Sequence
  Description of Artificial Sequence: Synthetic oligonucleotide
  Antisense strand to SEQ ID NO: 658372
uaauugagcaguuuccgca

SEQ ID NO: 658374 - RNA, 19 nt, Artificial Sequence
  Description of Artificial Sequence: Synthetic oligonucleotide
  Sense strand starting at position 3527 of SEQ ID NO: 585671
gcggaaacugcucaauuau

SEQ ID NO: 658375 - RNA, 19 nt, Artificial Sequence
  Description of Artificial Sequence: Synthetic oligonucleotide
  Antisense strand to SEQ ID NO: 658374
auaauugagcaguuuccgc

SEQ ID NO: 658376 - RNA, 19 nt, Artificial Sequence
  Description of Artificial Sequence: Synthetic oligonucleotide
  Sense strand starting at position 3601 of SEQ ID NO: 585671
ggagcaaucgcugaccaca

SEQ ID NO: 658377 - RNA, 19 nt, Artificial Sequence
  Description of Artificial Sequence: Synthetic oligonucleotide
  Antisense strand to SEQ ID NO: 658376
uguggucagcgauugcucc

SEQ ID NO: 658378 - RNA, 19 nt, Artificial Sequence
  Description of Artificial Sequence: Synthetic oligonucleotide
  Sense strand starting at position 3613 of SEQ ID NO: 585671
gaccacagugcguggauau

SEQ ID NO: 658379 - RNA, 19 nt, Artificial Sequence
  Description of Artificial Sequence: Synthetic oligonucleotide
  Antisense strand to SEQ ID NO: 658378
auauccacgcacugugguc

SEQ ID NO: 658380 - RNA, 19 nt, Artificial Sequence
  Description of Artificial Sequence: Synthetic oligonucleotide
  Sense strand starting at position 3623 of SEQ ID NO: 585671
cguggauauguguaccuca

SEQ ID NO: 658381 - RNA, 19 nt, Artificial Sequence
  Description of Artificial Sequence: Synthetic oligonucleotide
  Antisense strand to SEQ ID NO: 658380
ugagguacacauauccacg

SEQ ID NO: 658382 - RNA, 19 nt, Artificial Sequence
  Description of Artificial Sequence: Synthetic oligonucleotide
  Sense strand starting at position 3699 of SEQ ID NO: 585671
uugcgucuucccuuuguuu

SEQ ID NO: 658383 - RNA, 19 nt, Artificial Sequence
  Description of Artificial Sequence: Synthetic oligonucleotide
  Antisense strand to SEQ ID NO: 658382
aaacaaagggaagacgcaa

SEQ ID NO: 658384 - RNA, 19 nt, Artificial Sequence
  Description of Artificial Sequence: Synthetic oligonucleotide
  Sense strand starting at position 3816 of SEQ ID NO: 585671
aacucagccucuggaguaa

SEQ ID NO: 658385 - RNA, 19 nt, Artificial Sequence
  Description of Artificial Sequence: Synthetic oligonucleotide
  Antisense strand to SEQ ID NO: 658384
uuacuccagaggcugaguu

SEQ ID NO: 658386 - RNA, 19 nt, Artificial Sequence
  Description of Artificial Sequence: Synthetic oligonucleotide
  Sense strand starting at position 130 of SEQ ID NO: 585672
guuauaagguuucccugaa

SEQ ID NO: 658387 - RNA, 19 nt, Artificial Sequence
  Description of Artificial Sequence: Synthetic oligonucleotide
  Antisense strand to SEQ ID NO: 658386
uucagggaaaccuuauaac

SEQ ID NO: 658388 - RNA, 19 nt, Artificial Sequence
  Description of Artificial Sequence: Synthetic oligonucleotide
  Sense strand starting at position 131 of SEQ ID NO: 585672
uuauaagguuucccugaag

SEQ ID NO: 658389 - RNA, 19 nt, Artificial Sequence
  Description of Artificial Sequence: Synthetic oligonucleotide
  Antisense strand to SEQ ID NO: 658388
cuucagggaaaccuuauaa

SEQ ID NO: 658390 - RNA, 19 nt, Artificial Sequence
  Description of Artificial Sequence: Synthetic oligonucleotide
  Sense strand starting at position 143 of SEQ ID NO: 585672
ccugaagaaucucuaguuu

SEQ ID NO: 658391 - RNA, 19 nt, Artificial Sequence
  Description of Artificial Sequence: Synthetic oligonucleotide
  Antisense strand to SEQ ID NO: 658390
aaacuagagauucuucagg

SEQ ID NO: 658392 - RNA, 19 nt, Artificial Sequence
  Description of Artificial Sequence: Synthetic oligonucleotide
  Sense strand starting at position 157 of SEQ ID NO: 585672
aguuucuaagugcauuaaa

SEQ ID NO: 658393 - RNA, 19 nt, Artificial Sequence
  Description of Artificial Sequence: Synthetic oligonucleotide
  Antisense strand to SEQ ID NO: 658392
uuuaaugcacuuagaaacu

SEQ ID NO: 658394 - RNA, 19 nt, Artificial Sequence
  Description of Artificial Sequence: Synthetic oligonucleotide
  Sense strand starting at position 241 of SEQ ID NO: 585672
uguauagaugccgacuaua

SEQ ID NO: 658395 - RNA, 19 nt, Artificial Sequence
  Description of Artificial Sequence: Synthetic oligonucleotide
  Antisense strand to SEQ ID NO: 658394
uauagucggcaucuauaca

SEQ ID NO: 658396 - RNA, 19 nt, Artificial Sequence
  Description of Artificial Sequence: Synthetic oligonucleotide
  Sense strand starting at position 244 of SEQ ID NO: 585672
auagaugccgacuauauca

SEQ ID NO: 658397 - RNA, 19 nt, Artificial Sequence
  Description of Artificial Sequence: Synthetic oligonucleotide
  Antisense strand to SEQ ID NO: 658396
ugauauagucggcaucuau

SEQ ID NO: 658398 - RNA, 19 nt, Artificial Sequence
  Description of Artificial Sequence: Synthetic oligonucleotide
  Sense strand starting at position 246 of SEQ ID NO: 585672
agaugccgacuauaucaaa

SEQ ID NO: 658399 - RNA, 19 nt, Artificial Sequence
  Description of Artificial Sequence: Synthetic oligonucleotide
  Antisense strand to SEQ ID NO: 658398
uuugauauagucggcaucu

SEQ ID NO: 658400 - RNA, 19 nt, Artificial Sequence
  Description of Artificial Sequence: Synthetic oligonucleotide
  Sense strand starting at position 535 of SEQ ID NO: 585672
caaucuugacaguguagaa

SEQ ID NO: 658401 - RNA, 19 nt, Artificial Sequence
  Description of Artificial Sequence: Synthetic oligonucleotide
  Antisense strand to SEQ ID NO: 658400
uucuacacugucaagauug

SEQ ID NO: 658402 - RNA, 19 nt, Artificial Sequence
  Description of Artificial Sequence: Synthetic oligonucleotide
  Sense strand starting at position 542 of SEQ ID NO: 585672
gacaguguagaaugaguuu

SEQ ID NO: 658403 - RNA, 19 nt, Artificial Sequence
  Description of Artificial Sequence: Synthetic oligonucleotide
  Antisense strand to SEQ ID NO: 658402
aaacucauucuacacuguc

SEQ ID NO: 658404 - RNA, 19 nt, Artificial Sequence
  Description of Artificial Sequence: Synthetic oligonucleotide
  Sense strand starting at position 545 of SEQ ID NO: 585672
aguguagaaugaguuuaga

SEQ ID NO: 658405 - RNA, 19 nt, Artificial Sequence
  Description of Artificial Sequence: Synthetic oligonucleotide
  Antisense strand to SEQ ID NO: 658404
ucuaaacucauucuacacu

SEQ ID NO: 658406 - RNA, 19 nt, Artificial Sequence
  Description of Artificial Sequence: Synthetic oligonucleotide
  Sense strand starting at position 703 of SEQ ID NO: 585672
uugcucucauuuggaauuu

SEQ ID NO: 658407 - RNA, 19 nt, Artificial Sequence
  Description of Artificial Sequence: Synthetic oligonucleotide
  Antisense strand to SEQ ID NO: 658406
aaauuccaaaugagagcaa

SEQ ID NO: 658408 - RNA, 19 nt, Artificial Sequence
  Description of Artificial Sequence: Synthetic oligonucleotide
  Sense strand starting at position 743 of SEQ ID NO: 585672
uggacucaguuaucuagua

SEQ ID NO: 658409 - RNA, 19 nt, Artificial Sequence
  Description of Artificial Sequence: Synthetic oligonucleotide
  Antisense strand to SEQ ID NO: 658408
uacuagauaacugagucca

SEQ ID NO: 658410 - RNA, 19 nt, Artificial Sequence
  Description of Artificial Sequence: Synthetic oligonucleotide
  Sense strand starting at position 750 of SEQ ID NO: 585672
aguuaucuaguacaucagu

SEQ ID NO: 658411 - RNA, 19 nt, Artificial Sequence
  Description of Artificial Sequence: Synthetic oligonucleotide
  Antisense strand to SEQ ID NO: 658410
acugauguacuagauaacu

SEQ ID NO: 658412 - RNA, 19 nt, Artificial Sequence
  Description of Artificial Sequence: Synthetic oligonucleotide
  Sense strand starting at position 935 of SEQ ID NO: 585672
ccaggcugaagauguaaau

SEQ ID NO: 658413 - RNA, 19 nt, Artificial Sequence
  Description of Artificial Sequence: Synthetic oligonucleotide
  Antisense strand to SEQ ID NO: 658412
auuuacaucuucagccugg

SEQ ID NO: 658414 - RNA, 19 nt, Artificial Sequence
  Description of Artificial Sequence: Synthetic oligonucleotide
  Sense strand starting at position 945 of SEQ ID NO: 585672
gauguaaauagguggauau

SEQ ID NO: 658415 - RNA, 19 nt, Artificial Sequence
  Description of Artificial Sequence: Synthetic oligonucleotide
  Antisense strand to SEQ ID NO: 658414
auauccaccuauuuacauc

SEQ ID NO: 658416 - RNA, 19 nt, Artificial Sequence
  Description of Artificial Sequence: Synthetic oligonucleotide
  Sense strand starting at position 968 of SEQ ID NO: 585672
ccagguggauguguaauca

SEQ ID NO: 658417 - RNA, 19 nt, Artificial Sequence
  Description of Artificial Sequence: Synthetic oligonucleotide
  Antisense strand to SEQ ID NO: 658416
ugauuacacauccaccugg

SEQ ID NO: 658418 - RNA, 19 nt, Artificial Sequence
  Description of Artificial Sequence: Synthetic oligonucleotide
  Sense strand starting at position 976 of SEQ ID NO: 585672
auguguaaucaguaauaag

SEQ ID NO: 658419 - RNA, 19 nt, Artificial Sequence
  Description of Artificial Sequence: Synthetic oligonucleotide
  Antisense strand to SEQ ID NO: 658418
cuuauuacugauuacacau

SEQ ID NO: 658420 - RNA, 19 nt, Artificial Sequence
  Description of Artificial Sequence: Synthetic oligonucleotide
  Sense strand starting at position 1160 of SEQ ID NO: 585672
uuuguuuggccuugaauuu

SEQ ID NO: 658421 - RNA, 19 nt, Artificial Sequence
  Description of Artificial Sequence: Synthetic oligonucleotide
  Antisense strand to SEQ ID NO: 658420
aaauucaaggccaaacaaa

SEQ ID NO: 658422 - RNA, 19 nt, Artificial Sequence
  Description of Artificial Sequence: Synthetic oligonucleotide
  Sense strand starting at position 1301 of SEQ ID NO: 585672
gcuuguuuagggcaagaaa

SEQ ID NO: 658423 - RNA, 19 nt, Artificial Sequence
  Description of Artificial Sequence: Synthetic oligonucleotide
  Antisense strand to SEQ ID NO: 658422
uuucuugcccuaaacaagc

SEQ ID NO: 658424 - RNA, 19 nt, Artificial Sequence
  Description of Artificial Sequence: Synthetic oligonucleotide
  Sense strand starting at position 1330 of SEQ ID NO: 585672
ccucuuuaauuggcagaag

SEQ ID NO: 658425 - RNA, 19 nt, Artificial Sequence
  Description of Artificial Sequence: Synthetic oligonucleotide
  Antisense strand to SEQ ID NO: 658424
cuucugccaauuaaagagg

SEQ ID NO: 658426 - RNA, 19 nt, Artificial Sequence
  Description of Artificial Sequence: Synthetic oligonucleotide
  Sense strand starting at position 1333 of SEQ ID NO: 585672
cuuuaauuggcagaagcau

SEQ ID NO: 658427 - RNA, 19 nt, Artificial Sequence
  Description of Artificial Sequence: Synthetic oligonucleotide
  Antisense strand to SEQ ID NO: 658426
augcuucugccaauuaaag

SEQ ID NO: 658428 - RNA, 19 nt, Artificial Sequence
  Description of Artificial Sequence: Synthetic oligonucleotide
  Sense strand starting at position 1409 of SEQ ID NO: 585672
ugucuuauuggagacggca

SEQ ID NO: 658429 - RNA, 19 nt, Artificial Sequence
  Description of Artificial Sequence: Synthetic oligonucleotide
  Antisense strand to SEQ ID NO: 658428
ugccgucuccaauaagaca

SEQ ID NO: 658430 - RNA, 19 nt, Artificial Sequence
  Description of Artificial Sequence: Synthetic oligonucleotide
  Sense strand starting at position 1470 of SEQ ID NO: 585672
acgcauuucuuauccugau

SEQ ID NO: 658431 - RNA, 19 nt, Artificial Sequence
  Description of Artificial Sequence: Synthetic oligonucleotide
  Antisense strand to SEQ ID NO: 658430
aucaggauaagaaaugcgu

SEQ ID NO: 658432 - RNA, 19 nt, Artificial Sequence
  Description of Artificial Sequence: Synthetic oligonucleotide
  Sense strand starting at position 1471 of SEQ ID NO: 585672
cgcauuucuuauccugauu

SEQ ID NO: 658433 - RNA, 19 nt, Artificial Sequence
  Description of Artificial Sequence: Synthetic oligonucleotide
  Antisense strand to SEQ ID NO: 658432
aaucaggauaagaaaugcg

SEQ ID NO: 658434 - RNA, 19 nt, Artificial Sequence
  Description of Artificial Sequence: Synthetic oligonucleotide
  Sense strand starting at position 1618 of SEQ ID NO: 585672
ggaggaucacccugccaua

SEQ ID NO: 658435 - RNA, 19 nt, Artificial Sequence
  Description of Artificial Sequence: Synthetic oligonucleotide
  Antisense strand to SEQ ID NO: 658434
uauggcagggugauccucc

SEQ ID NO: 658436 - RNA, 19 nt, Artificial Sequence
  Description of Artificial Sequence: Synthetic oligonucleotide
  Sense strand starting at position 2421 of SEQ ID NO: 585672
uguuguaagaagcagacau

SEQ ID NO: 658437 - RNA, 19 nt, Artificial Sequence
  Description of Artificial Sequence: Synthetic oligonucleotide
  Antisense strand to SEQ ID NO: 658436
augucugcuucuuacaaca

SEQ ID NO: 658438 - RNA, 19 nt, Artificial Sequence
  Description of Artificial Sequence: Synthetic oligonucleotide
  Sense strand starting at position 2587 of SEQ ID NO: 585672
gcuggagugaauugaagag

SEQ ID NO: 658439 - RNA, 19 nt, Artificial Sequence
  Description of Artificial Sequence: Synthetic oligonucleotide
  Antisense strand to SEQ ID NO: 658438
cucuucaauucacuccagc

SEQ ID NO: 658440 - RNA, 19 nt, Artificial Sequence
  Description of Artificial Sequence: Synthetic oligonucleotide
  Sense strand starting at position 2949 of SEQ ID NO: 585672
ggcauuugccaauagcagu

SEQ ID NO: 658441 - RNA, 19 nt, Artificial Sequence
  Description of Artificial Sequence: Synthetic oligonucleotide
  Antisense strand to SEQ ID NO: 658440
acugcuauuggcaaaugcc

SEQ ID NO: 658442 - RNA, 19 nt, Artificial Sequence
  Description of Artificial Sequence: Synthetic oligonucleotide
  Sense strand starting at position 2997 of SEQ ID NO: 585672
guguauugaaagugaagau

SEQ ID NO: 658443 - RNA, 19 nt, Artificial Sequence
  Description of Artificial Sequence: Synthetic oligonucleotide
  Antisense strand to SEQ ID NO: 658442
aucuucacuuucaauacac

SEQ ID NO: 658444 - RNA, 19 nt, Artificial Sequence
  Description of Artificial Sequence: Synthetic oligonucleotide
  Sense strand starting at position 3025 of SEQ ID NO: 585672
auaugagguuucucauaac

SEQ ID NO: 658445 - RNA, 19 nt, Artificial Sequence
  Description of Artificial Sequence: Synthetic oligonucleotide
  Antisense strand to SEQ ID NO: 658444
guuaugagaaaccucauau

SEQ ID NO: 658446 - RNA, 19 nt, Artificial Sequence
  Description of Artificial Sequence: Synthetic oligonucleotide
  Sense strand starting at position 3058 of SEQ ID NO: 585672
uucuguauucuugagauua

SEQ ID NO: 658447 - RNA, 19 nt, Artificial Sequence
  Description of Artificial Sequence: Synthetic oligonucleotide
  Antisense strand to SEQ ID NO: 658446
uaaucucaagaauacagaa

SEQ ID NO: 658448 - RNA, 19 nt, Artificial Sequence
  Description of Artificial Sequence: Synthetic oligonucleotide
  Sense strand starting at position 3498 of SEQ ID NO: 585672
ucuaaagugugauugugaa

SEQ ID NO: 658449 - RNA, 19 nt, Artificial Sequence
  Description of Artificial Sequence: Synthetic oligonucleotide
  Antisense strand to SEQ ID NO: 658448
uucacaaucacacuuuaga

SEQ ID NO: 658450 - RNA, 19 nt, Artificial Sequence
  Description of Artificial Sequence: Synthetic oligonucleotide
  Sense strand starting at position 3506 of SEQ ID NO: 585672
gugauugugaacuggagau

SEQ ID NO: 658451 - RNA, 19 nt, Artificial Sequence
  Description of Artificial Sequence: Synthetic oligonucleotide
  Antisense strand to SEQ ID NO: 658450
aucuccaguucacaaucac

SEQ ID NO: 658452 - RNA, 19 nt, Artificial Sequence
  Description of Artificial Sequence: Synthetic oligonucleotide
  Sense strand starting at position 3585 of SEQ ID NO: 585672
agauguucugugcacaauu

SEQ ID NO: 658453 - RNA, 19 nt, Artificial Sequence
  Description of Artificial Sequence: Synthetic oligonucleotide
  Antisense strand to SEQ ID NO: 658452
aauugugcacagaacaucu

SEQ ID NO: 658454 - RNA, 19 nt, Artificial Sequence
  Description of Artificial Sequence: Synthetic oligonucleotide
  Sense strand starting at position 3604 of SEQ ID NO: 585672
ucuuaauaacagugaaagu

SEQ ID NO: 658455 - RNA, 19 nt, Artificial Sequence
  Description of Artificial Sequence: Synthetic oligonucleotide
  Antisense strand to SEQ ID NO: 658454
acuuucacuguuauuaaga

SEQ ID NO: 658456 - RNA, 19 nt, Artificial Sequence
  Description of Artificial Sequence: Synthetic oligonucleotide
  Sense strand starting at position 3651 of SEQ ID NO: 585672
ggaaccaucuaugcauaca

SEQ ID NO: 658457 - RNA, 19 nt, Artificial Sequence
  Description of Artificial Sequence: Synthetic oligonucleotide
  Antisense strand to SEQ ID NO: 658456
uguaugcauagaugguucc

SEQ ID NO: 658458 - RNA, 19 nt, Artificial Sequence
  Description of Artificial Sequence: Synthetic oligonucleotide
  Sense strand starting at position 3774 of SEQ ID NO: 585672
agcgacaaugcuuaaggaa

SEQ ID NO: 658459 - RNA, 19 nt, Artificial Sequence
  Description of Artificial Sequence: Synthetic oligonucleotide
  Antisense strand to SEQ ID NO: 658458
uuccuuaagcauugucgcu

SEQ ID NO: 658460 - RNA, 19 nt, Artificial Sequence
  Description of Artificial Sequence: Synthetic oligonucleotide
  Sense strand starting at position 3798 of SEQ ID NO: 585672
ucuagaagaaggugucaua

SEQ ID NO: 658461 - RNA, 19 nt, Artificial Sequence
  Description of Artificial Sequence: Synthetic oligonucleotide
  Antisense strand to SEQ ID NO: 658460
uaugacaccuucuucuaga

SEQ ID NO: 658462 - RNA, 19 nt, Artificial Sequence
  Description of Artificial Sequence: Synthetic oligonucleotide
  Sense strand starting at position 3868 of SEQ ID NO: 585672
ggccauucuguuugaauuu

SEQ ID NO: 658463 - RNA, 19 nt, Artificial Sequence
  Description of Artificial Sequence: Synthetic oligonucleotide
  Antisense strand to SEQ ID NO: 658462
aaauucaaacagaauggcc

SEQ ID NO: 658464 - RNA, 19 nt, Artificial Sequence
  Description of Artificial Sequence: Synthetic oligonucleotide
  Sense strand starting at position 3908 of SEQ ID NO: 585672
ucuauauuaucucugguag

SEQ ID NO: 658465 - RNA, 19 nt, Artificial Sequence
  Description of Artificial Sequence: Synthetic oligonucleotide
  Antisense strand to SEQ ID NO: 658464
cuaccagagauaauauaga

SEQ ID NO: 658466 - RNA, 19 nt, Artificial Sequence
  Description of Artificial Sequence: Synthetic oligonucleotide
  Sense strand starting at position 105 of SEQ ID NO: 585673
gugagucccaauggucuca

SEQ ID NO: 658467 - RNA, 19 nt, Artificial Sequence
  Description of Artificial Sequence: Synthetic oligonucleotide
  Antisense strand to SEQ ID NO: 658466
ugagaccauugggacucac

SEQ ID NO: 658468 - RNA, 19 nt, Artificial Sequence
  Description of Artificial Sequence: Synthetic oligonucleotide
  Sense strand starting at position 405 of SEQ ID NO: 585673
agagcaaacucugucuaau

SEQ ID NO: 658469 - RNA, 19 nt, Artificial Sequence
  Description of Artificial Sequence: Synthetic oligonucleotide
  Antisense strand to SEQ ID NO: 658468
auuagacagaguuugcucu

SEQ ID NO: 658470 - RNA, 19 nt, Artificial Sequence
  Description of Artificial Sequence: Synthetic oligonucleotide
  Sense strand starting at position 841 of SEQ ID NO: 585673
gaguaaaggccauaagugu

SEQ ID NO: 658471 - RNA, 19 nt, Artificial Sequence
  Description of Artificial Sequence: Synthetic oligonucleotide
  Antisense strand to SEQ ID NO: 658470
acacuuauggccuuuacuc

SEQ ID NO: 658472 - RNA, 19 nt, Artificial Sequence
  Description of Artificial Sequence: Synthetic oligonucleotide
  Sense strand starting at position 864 of SEQ ID NO: 585673
ugcccuggcagauaaguau

SEQ ID NO: 658473 - RNA, 19 nt, Artificial Sequence
  Description of Artificial Sequence: Synthetic oligonucleotide
  Antisense strand to SEQ ID NO: 658472
auacuuaucugccagggca

SEQ ID NO: 658474 - RNA, 19 nt, Artificial Sequence
  Description of Artificial Sequence: Synthetic oligonucleotide
  Sense strand starting at position 868 of SEQ ID NO: 585673
cuggcagauaaguauuagu

SEQ ID NO: 658475 - RNA, 19 nt, Artificial Sequence
  Description of Artificial Sequence: Synthetic oligonucleotide
  Antisense strand to SEQ ID NO: 658474
acuaauacuuaucugccag

SEQ ID NO: 658476 - RNA, 19 nt, Artificial Sequence
  Description of Artificial Sequence: Synthetic oligonucleotide
  Sense strand starting at position 871 of SEQ ID NO: 585673
gcagauaaguauuagugca

SEQ ID NO: 658477 - RNA, 19 nt, Artificial Sequence
  Description of Artificial Sequence: Synthetic oligonucleotide
  Antisense strand to SEQ ID NO: 658476
ugcacuaauacuuaucugc

SEQ ID NO: 658478 - RNA, 19 nt, Artificial Sequence
  Description of Artificial Sequence: Synthetic oligonucleotide
  Sense strand starting at position 873 of SEQ ID NO: 585673
agauaaguauuagugcaau

SEQ ID NO: 658479 - RNA, 19 nt, Artificial Sequence
  Description of Artificial Sequence: Synthetic oligonucleotide
  Antisense strand to SEQ ID NO: 658478
auugcacuaauacuuaucu

SEQ ID NO: 658480 - RNA, 19 nt, Artificial Sequence
  Description of Artificial Sequence: Synthetic oligonucleotide
  Sense strand starting at position 876 of SEQ ID NO: 585673
uaaguauuagugcaauugu

SEQ ID NO: 658481 - RNA, 19 nt, Artificial Sequence
  Description of Artificial Sequence: Synthetic oligonucleotide
  Antisense strand to SEQ ID NO: 658480
acaauugcacuaauacuua

SEQ ID NO: 658482 - RNA, 19 nt, Artificial Sequence
  Description of Artificial Sequence: Synthetic oligonucleotide
  Sense strand starting at position 883 of SEQ ID NO: 585673
uagugcaauuguugauauu

SEQ ID NO: 658483 - RNA, 19 nt, Artificial Sequence
  Description of Artificial Sequence: Synthetic oligonucleotide
  Antisense strand to SEQ ID NO: 658482
aauaucaacaauugcacua

SEQ ID NO: 658484 - RNA, 19 nt, Artificial Sequence
  Description of Artificial Sequence: Synthetic oligonucleotide
  Sense strand starting at position 884 of SEQ ID NO: 585673
agugcaauuguugauauua

SEQ ID NO: 658485 - RNA, 19 nt, Artificial Sequence
  Description of Artificial Sequence: Synthetic oligonucleotide
  Antisense strand to SEQ ID NO: 658484
uaauaucaacaauugcacu

SEQ ID NO: 658486 - RNA, 19 nt, Artificial Sequence
  Description of Artificial Sequence: Synthetic oligonucleotide
  Sense strand starting at position 1035 of SEQ ID NO: 585673
ugaagcaucccaggauugu

SEQ ID NO: 658487 - RNA, 19 nt, Artificial Sequence
  Description of Artificial Sequence: Synthetic oligonucleotide
  Antisense strand to SEQ ID NO: 658486
acaauccugggaugcuuca

SEQ ID NO: 658488 - RNA, 19 nt, Artificial Sequence
  Description of Artificial Sequence: Synthetic oligonucleotide
  Sense strand starting at position 1044 of SEQ ID NO: 585673
ccaggauugucccugcuua

SEQ ID NO: 658489 - RNA, 19 nt, Artificial Sequence
  Description of Artificial Sequence: Synthetic oligonucleotide
  Antisense strand to SEQ ID NO: 658488
uaagcagggacaauccugg

SEQ ID NO: 658490 - RNA, 19 nt, Artificial Sequence
  Description of Artificial Sequence: Synthetic oligonucleotide
  Sense strand starting at position 1045 of SEQ ID NO: 585673
caggauugucccugcuuac

SEQ ID NO: 658491 - RNA, 19 nt, Artificial Sequence
  Description of Artificial Sequence: Synthetic oligonucleotide
  Antisense strand to SEQ ID NO: 658490
guaagcagggacaauccug

SEQ ID NO: 658492 - RNA, 19 nt, Artificial Sequence
  Description of Artificial Sequence: Synthetic oligonucleotide
  Sense strand starting at position 1107 of SEQ ID NO: 585673
cccuguguuccacauaggu

SEQ ID NO: 658493 - RNA, 19 nt, Artificial Sequence
  Description of Artificial Sequence: Synthetic oligonucleotide
  Antisense strand to SEQ ID NO: 658492
accuauguggaacacaggg

SEQ ID NO: 658494 - RNA, 19 nt, Artificial Sequence
  Description of Artificial Sequence: Synthetic oligonucleotide
  Sense strand starting at position 1109 of SEQ ID NO: 585673
cuguguuccacauaggugu

SEQ ID NO: 658495 - RNA, 19 nt, Artificial Sequence
  Description of Artificial Sequence: Synthetic oligonucleotide
  Antisense strand to SEQ ID NO: 658494
acaccuauguggaacacag

SEQ ID NO: 658496 - RNA, 19 nt, Artificial Sequence
  Description of Artificial Sequence: Synthetic oligonucleotide
  Sense strand starting at position 1115 of SEQ ID NO: 585673
uccacauaggugugguuua

SEQ ID NO: 658497 - RNA, 19 nt, Artificial Sequence
  Description of Artificial Sequence: Synthetic oligonucleotide
  Antisense strand to SEQ ID NO: 658496
uaaaccacaccuaugugga

SEQ ID NO: 658498 - RNA, 19 nt, Artificial Sequence
  Description of Artificial Sequence: Synthetic oligonucleotide
  Sense strand starting at position 1116 of SEQ ID NO: 585673
ccacauaggugugguuuau

SEQ ID NO: 658499 - RNA, 19 nt, Artificial Sequence
  Description of Artificial Sequence: Synthetic oligonucleotide
  Antisense strand to SEQ ID NO: 658498
auaaaccacaccuaugugg

SEQ ID NO: 658500 - RNA, 19 nt, Artificial Sequence
  Description of Artificial Sequence: Synthetic oligonucleotide
  Sense strand starting at position 1125 of SEQ ID NO: 585673
ugugguuuaucucccuaau

SEQ ID NO: 658501 - RNA, 19 nt, Artificial Sequence
  Description of Artificial Sequence: Synthetic oligonucleotide
  Antisense strand to SEQ ID NO: 658500
auuagggagauaaaccaca

SEQ ID NO: 658502 - RNA, 19 nt, Artificial Sequence
  Description of Artificial Sequence: Synthetic oligonucleotide
  Sense strand starting at position 1127 of SEQ ID NO: 585673
ugguuuaucucccuaauga

SEQ ID NO: 658503 - RNA, 19 nt, Artificial Sequence
  Description of Artificial Sequence: Synthetic oligonucleotide
  Antisense strand to SEQ ID NO: 658502
ucauuagggagauaaacca

SEQ ID NO: 658504 - RNA, 19 nt, Artificial Sequence
  Description of Artificial Sequence: Synthetic oligonucleotide
  Sense strand starting at position 1128 of SEQ ID NO: 585673
gguuuaucucccuaaugaa

SEQ ID NO: 658505 - RNA, 19 nt, Artificial Sequence
  Description of Artificial Sequence: Synthetic oligonucleotide
  Antisense strand to SEQ ID NO: 658504
uucauuagggagauaaacc

SEQ ID NO: 658506 - RNA, 19 nt, Artificial Sequence
  Description of Artificial Sequence: Synthetic oligonucleotide
  Sense strand starting at position 1131 of SEQ ID NO: 585673
uuaucucccuaaugaagga

SEQ ID NO: 658507 - RNA, 19 nt, Artificial Sequence
  Description of Artificial Sequence: Synthetic oligonucleotide
  Antisense strand to SEQ ID NO: 658506
uccuucauuagggagauaa

SEQ ID NO: 658508 - RNA, 19 nt, Artificial Sequence
  Description of Artificial Sequence: Synthetic oligonucleotide
  Sense strand starting at position 1148 of SEQ ID NO: 585673
gagugccugugagauacuu

SEQ ID NO: 658509 - RNA, 19 nt, Artificial Sequence
  Description of Artificial Sequence: Synthetic oligonucleotide
  Antisense strand to SEQ ID NO: 658508
aaguaucucacaggcacuc

SEQ ID NO: 658510 - RNA, 19 nt, Artificial Sequence
  Description of Artificial Sequence: Synthetic oligonucleotide
  Sense strand starting at position 1242 of SEQ ID NO: 585673
ugcacaugcuucuagauga

SEQ ID NO: 658511 - RNA, 19 nt, Artificial Sequence
  Description of Artificial Sequence: Synthetic oligonucleotide
  Antisense strand to SEQ ID NO: 658510
ucaucuagaagcaugugca

SEQ ID NO: 658512 - RNA, 19 nt, Artificial Sequence
  Description of Artificial Sequence: Synthetic oligonucleotide
  Sense strand starting at position 1280 of SEQ ID NO: 585673
aaacaugaguccuuuggcu

SEQ ID NO: 658513 - RNA, 19 nt, Artificial Sequence
  Description of Artificial Sequence: Synthetic oligonucleotide
  Antisense strand to SEQ ID NO: 658512
agccaaaggacucauguuu

SEQ ID NO: 658514 - RNA, 19 nt, Artificial Sequence
  Description of Artificial Sequence: Synthetic oligonucleotide
  Sense strand starting at position 1358 of SEQ ID NO: 585673
uccugagcccacugauaag

SEQ ID NO: 658515 - RNA, 19 nt, Artificial Sequence
  Description of Artificial Sequence: Synthetic oligonucleotide
  Antisense strand to SEQ ID NO: 658514
cuuaucagugggcucagga

SEQ ID NO: 658516 - RNA, 19 nt, Artificial Sequence
  Description of Artificial Sequence: Synthetic oligonucleotide
  Sense strand starting at position 1374 of SEQ ID NO: 585673
aagcgugagcugugaguga

SEQ ID NO: 658517 - RNA, 19 nt, Artificial Sequence
  Description of Artificial Sequence: Synthetic oligonucleotide
  Antisense strand to SEQ ID NO: 658516
ucacucacagcucacgcuu

SEQ ID NO: 658518 - RNA, 19 nt, Artificial Sequence
  Description of Artificial Sequence: Synthetic oligonucleotide
  Sense strand starting at position 1376 of SEQ ID NO: 585673
gcgugagcugugagugaac

SEQ ID NO: 658519 - RNA, 19 nt, Artificial Sequence
  Description of Artificial Sequence: Synthetic oligonucleotide
  Antisense strand to SEQ ID NO: 658518
guucacucacagcucacgc

SEQ ID NO: 658520 - RNA, 19 nt, Artificial Sequence
  Description of Artificial Sequence: Synthetic oligonucleotide
  Sense strand starting at position 1378 of SEQ ID NO: 585673
gugagcugugagugaacuu

SEQ ID NO: 658521 - RNA, 19 nt, Artificial Sequence
  Description of Artificial Sequence: Synthetic oligonucleotide
  Antisense strand to SEQ ID NO: 658520
aaguucacucacagcucac

SEQ ID NO: 658522 - RNA, 19 nt, Artificial Sequence
  Description of Artificial Sequence: Synthetic oligonucleotide
  Sense strand starting at position 2151 of SEQ ID NO: 585673
ugcacucccucugaagaga

SEQ ID NO: 658523 - RNA, 19 nt, Artificial Sequence
  Description of Artificial Sequence: Synthetic oligonucleotide
  Antisense strand to SEQ ID NO: 658522
ucucuucagagggagugca

SEQ ID NO: 658524 - RNA, 19 nt, Artificial Sequence
  Description of Artificial Sequence: Synthetic oligonucleotide
  Sense strand starting at position 2389 of SEQ ID NO: 585673
uuagauggcuggcuuuauu

SEQ ID NO: 658525 - RNA, 19 nt, Artificial Sequence
  Description of Artificial Sequence: Synthetic oligonucleotide
  Antisense strand to SEQ ID NO: 658524
aauaaagccagccaucuaa

SEQ ID NO: 658526 - RNA, 19 nt, Artificial Sequence
  Description of Artificial Sequence: Synthetic oligonucleotide
  Sense strand starting at position 2392 of SEQ ID NO: 585673
gauggcuggcuuuauuaua

SEQ ID NO: 658527 - RNA, 19 nt, Artificial Sequence
  Description of Artificial Sequence: Synthetic oligonucleotide
  Antisense strand to SEQ ID NO: 658526
uauaauaaagccagccauc

SEQ ID NO: 658528 - RNA, 19 nt, Artificial Sequence
  Description of Artificial Sequence: Synthetic oligonucleotide
  Sense strand starting at position 2397 of SEQ ID NO: 585673
cuggcuuuauuauaggcaa

SEQ ID NO: 658529 - RNA, 19 nt, Artificial Sequence
  Description of Artificial Sequence: Synthetic oligonucleotide
  Antisense strand to SEQ ID NO: 658528
uugccuauaauaaagccag

SEQ ID NO: 658530 - RNA, 19 nt, Artificial Sequence
  Description of Artificial Sequence: Synthetic oligonucleotide
  Sense strand starting at position 2991 of SEQ ID NO: 585673
ugccuauguugguuucgua

SEQ ID NO: 658531 - RNA, 19 nt, Artificial Sequence
  Description of Artificial Sequence: Synthetic oligonucleotide
  Antisense strand to SEQ ID NO: 658530
uacgaaaccaacauaggca

SEQ ID NO: 658532 - RNA, 19 nt, Artificial Sequence
  Description of Artificial Sequence: Synthetic oligonucleotide
  Sense strand starting at position 3072 of SEQ ID NO: 585673
ccacaugccuggcauuuau

SEQ ID NO: 658533 - RNA, 19 nt, Artificial Sequence
  Description of Artificial Sequence: Synthetic oligonucleotide
  Antisense strand to SEQ ID NO: 658532
auaaaugccaggcaugugg

SEQ ID NO: 658534 - RNA, 19 nt, Artificial Sequence
  Description of Artificial Sequence: Synthetic oligonucleotide
  Sense strand starting at position 3237 of SEQ ID NO: 585673
uggagacagucuggcuuua

SEQ ID NO: 658535 - RNA, 19 nt, Artificial Sequence
  Description of Artificial Sequence: Synthetic oligonucleotide
  Antisense strand to SEQ ID NO: 658534
uaaagccagacugucucca

SEQ ID NO: 658536 - RNA, 19 nt, Artificial Sequence
  Description of Artificial Sequence: Synthetic oligonucleotide
  Sense strand starting at position 3239 of SEQ ID NO: 585673
gagacagucuggcuuuauc

SEQ ID NO: 658537 - RNA, 19 nt, Artificial Sequence
  Description of Artificial Sequence: Synthetic oligonucleotide
  Antisense strand to SEQ ID NO: 658536
gauaaagccagacugucuc

SEQ ID NO: 658538 - RNA, 19 nt, Artificial Sequence
  Description of Artificial Sequence: Synthetic oligonucleotide
  Sense strand starting at position 3400 of SEQ ID NO: 585673
ugcagagacuggguuucau

SEQ ID NO: 658539 - RNA, 19 nt, Artificial Sequence
  Description of Artificial Sequence: Synthetic oligonucleotide
  Antisense strand to SEQ ID NO: 658538
augaaacccagucucugca

SEQ ID NO: 658540 - RNA, 19 nt, Artificial Sequence
  Description of Artificial Sequence: Synthetic oligonucleotide
  Sense strand starting at position 3547 of SEQ ID NO: 585673
auuccuuuauuguuagaca

SEQ ID NO: 658541 - RNA, 19 nt, Artificial Sequence
  Description of Artificial Sequence: Synthetic oligonucleotide
  Antisense strand to SEQ ID NO: 658540
ugucuaacaauaaaggaau

SEQ ID NO: 658542 - RNA, 19 nt, Artificial Sequence
  Description of Artificial Sequence: Synthetic oligonucleotide
  Sense strand starting at position 3548 of SEQ ID NO: 585673
uuccuuuauuguuagacau

SEQ ID NO: 658543 - RNA, 19 nt, Artificial Sequence
  Description of Artificial Sequence: Synthetic oligonucleotide
  Antisense strand to SEQ ID NO: 658542
augucuaacaauaaaggaa

SEQ ID NO: 658544 - RNA, 19 nt, Artificial Sequence
  Description of Artificial Sequence: Synthetic oligonucleotide
  Sense strand starting at position 3550 of SEQ ID NO: 585673
ccuuuauuguuagacauuu

SEQ ID NO: 658545 - RNA, 19 nt, Artificial Sequence
  Description of Artificial Sequence: Synthetic oligonucleotide
  Antisense strand to SEQ ID NO: 658544
aaaugucuaacaauaaagg

SEQ ID NO: 658546 - RNA, 19 nt, Artificial Sequence
  Description of Artificial Sequence: Synthetic oligonucleotide
  Sense strand starting at position 88 of SEQ ID NO: 585674
aucucaaaguuuggaaagu

SEQ ID NO: 658547 - RNA, 19 nt, Artificial Sequence
  Description of Artificial Sequence: Synthetic oligonucleotide
  Antisense strand to SEQ ID NO: 658546
acuuuccaaacuuugagau

SEQ ID NO: 658548 - RNA, 19 nt, Artificial Sequence
  Description of Artificial Sequence: Synthetic oligonucleotide
  Sense strand starting at position 89 of SEQ ID NO: 585674
ucucaaaguuuggaaagua

SEQ ID NO: 658549 - RNA, 19 nt, Artificial Sequence
  Description of Artificial Sequence: Synthetic oligonucleotide
  Antisense strand to SEQ ID NO: 658548
uacuuuccaaacuuugaga

SEQ ID NO: 658550 - RNA, 19 nt, Artificial Sequence
  Description of Artificial Sequence: Synthetic oligonucleotide
  Sense strand starting at position 109 of SEQ ID NO: 585674
cucugccauuuauggcaua

SEQ ID NO: 658551 - RNA, 19 nt, Artificial Sequence
  Description of Artificial Sequence: Synthetic oligonucleotide
  Antisense strand to SEQ ID NO: 658550
uaugccauaaauggcagag

SEQ ID NO: 658552 - RNA, 19 nt, Artificial Sequence
  Description of Artificial Sequence: Synthetic oligonucleotide
  Sense strand starting at position 110 of SEQ ID NO: 585674
ucugccauuuauggcauaa

SEQ ID NO: 658553 - RNA, 19 nt, Artificial Sequence
  Description of Artificial Sequence: Synthetic oligonucleotide
  Antisense strand to SEQ ID NO: 658552
uuaugccauaaauggcaga

SEQ ID NO: 658554 - RNA, 19 nt, Artificial Sequence
  Description of Artificial Sequence: Synthetic oligonucleotide
  Sense strand starting at position 112 of SEQ ID NO: 585674
ugccauuuauggcauaauu

SEQ ID NO: 658555 - RNA, 19 nt, Artificial Sequence
  Description of Artificial Sequence: Synthetic oligonucleotide
  Antisense strand to SEQ ID NO: 658554
aauuaugccauaaauggca

SEQ ID NO: 658556 - RNA, 19 nt, Artificial Sequence
  Description of Artificial Sequence: Synthetic oligonucleotide
  Sense strand starting at position 121 of SEQ ID NO: 585674
uggcauaauuacccagacu

SEQ ID NO: 658557 - RNA, 19 nt, Artificial Sequence
  Description of Artificial Sequence: Synthetic oligonucleotide
  Antisense strand to SEQ ID NO: 658556
agucuggguaauuaugcca

SEQ ID NO: 658558 - RNA, 19 nt, Artificial Sequence
  Description of Artificial Sequence: Synthetic oligonucleotide
  Sense strand starting at position 190 of SEQ ID NO: 585674
ccuuauuaacagugggauc

SEQ ID NO: 658559 - RNA, 19 nt, Artificial Sequence
  Description of Artificial Sequence: Synthetic oligonucleotide
  Antisense strand to SEQ ID NO: 658558
gaucccacuguuaauaagg

SEQ ID NO: 658560 - RNA, 19 nt, Artificial Sequence
  Description of Artificial Sequence: Synthetic oligonucleotide
  Sense strand starting at position 309 of SEQ ID NO: 585674
uggguugagucccaggauu

SEQ ID NO: 658561 - RNA, 19 nt, Artificial Sequence
  Description of Artificial Sequence: Synthetic oligonucleotide
  Antisense strand to SEQ ID NO: 658560
aauccugggacucaaccca

SEQ ID NO: 658562 - RNA, 19 nt, Artificial Sequence
  Description of Artificial Sequence: Synthetic oligonucleotide
  Sense strand starting at position 349 of SEQ ID NO: 585674
cucggccuccacugaaauu

SEQ ID NO: 658563 - RNA, 19 nt, Artificial Sequence
  Description of Artificial Sequence: Synthetic oligonucleotide
  Antisense strand to SEQ ID NO: 658562
aauuucaguggaggccgag

SEQ ID NO: 658564 - RNA, 19 nt, Artificial Sequence
  Description of Artificial Sequence: Synthetic oligonucleotide
  Sense strand starting at position 359 of SEQ ID NO: 585674
acugaaauuguuuacagca

SEQ ID NO: 658565 - RNA, 19 nt, Artificial Sequence
  Description of Artificial Sequence: Synthetic oligonucleotide
  Antisense strand to SEQ ID NO: 658564
ugcuguaaacaauuucagu

SEQ ID NO: 658566 - RNA, 19 nt, Artificial Sequence
  Description of Artificial Sequence: Synthetic oligonucleotide
  Sense strand starting at position 361 of SEQ ID NO: 585674
ugaaauuguuuacagcaca

SEQ ID NO: 658567 - RNA, 19 nt, Artificial Sequence
  Description of Artificial Sequence: Synthetic oligonucleotide
  Antisense strand to SEQ ID NO: 658566
ugugcuguaaacaauuuca

SEQ ID NO: 658568 - RNA, 19 nt, Artificial Sequence
  Description of Artificial Sequence: Synthetic oligonucleotide
  Sense strand starting at position 398 of SEQ ID NO: 585674
aggcacauuugguggaauu

SEQ ID NO: 658569 - RNA, 19 nt, Artificial Sequence
  Description of Artificial Sequence: Synthetic oligonucleotide
  Antisense strand to SEQ ID NO: 658568
aauuccaccaaaugugccu

SEQ ID NO: 658570 - RNA, 19 nt, Artificial Sequence
  Description of Artificial Sequence: Synthetic oligonucleotide
  Sense strand starting at position 441 of SEQ ID NO: 585674
uccuuuguugagcacaaga

SEQ ID NO: 658571 - RNA, 19 nt, Artificial Sequence
  Description of Artificial Sequence: Synthetic oligonucleotide
  Antisense strand to SEQ ID NO: 658570
ucuugugcucaacaaagga

SEQ ID NO: 658572 - RNA, 19 nt, Artificial Sequence
  Description of Artificial Sequence: Synthetic oligonucleotide
  Sense strand starting at position 443 of SEQ ID NO: 585674
cuuuguugagcacaagaca

SEQ ID NO: 658573 - RNA, 19 nt, Artificial Sequence
  Description of Artificial Sequence: Synthetic oligonucleotide
  Antisense strand to SEQ ID NO: 658572
ugucuugugcucaacaaag

SEQ ID NO: 658574 - RNA, 19 nt, Artificial Sequence
  Description of Artificial Sequence: Synthetic oligonucleotide
  Sense strand starting at position 589 of SEQ ID NO: 585674
gucaauuaacaucagaguc

SEQ ID NO: 658575 - RNA, 19 nt, Artificial Sequence
  Description of Artificial Sequence: Synthetic oligonucleotide
  Antisense strand to SEQ ID NO: 658574
gacucugauguuaauugac

SEQ ID NO: 658576 - RNA, 19 nt, Artificial Sequence
  Description of Artificial Sequence: Synthetic oligonucleotide
  Sense strand starting at position 602 of SEQ ID NO: 585674
agagucaucuucucaugga

SEQ ID NO: 658577 - RNA, 19 nt, Artificial Sequence
  Description of Artificial Sequence: Synthetic oligonucleotide
  Antisense strand to SEQ ID NO: 658576
uccaugagaagaugacucu

SEQ ID NO: 658578 - RNA, 19 nt, Artificial Sequence
  Description of Artificial Sequence: Synthetic oligonucleotide
  Sense strand starting at position 603 of SEQ ID NO: 585674
gagucaucuucucauggaa

SEQ ID NO: 658579 - RNA, 19 nt, Artificial Sequence
  Description of Artificial Sequence: Synthetic oligonucleotide
  Antisense strand to SEQ ID NO: 658578
uuccaugagaagaugacuc

SEQ ID NO: 658580 - RNA, 19 nt, Artificial Sequence
  Description of Artificial Sequence: Synthetic oligonucleotide
  Sense strand starting at position 828 of SEQ ID NO: 585674
uuccauacuuccucuggga

SEQ ID NO: 658581 - RNA, 19 nt, Artificial Sequence
  Description of Artificial Sequence: Synthetic oligonucleotide
  Antisense strand to SEQ ID NO: 658580
ucccagaggaaguauggaa

SEQ ID NO: 658582 - RNA, 19 nt, Artificial Sequence
  Description of Artificial Sequence: Synthetic oligonucleotide
  Sense strand starting at position 854 of SEQ ID NO: 585674
uggauucugccacgagcaa

SEQ ID NO: 658583 - RNA, 19 nt, Artificial Sequence
  Description of Artificial Sequence: Synthetic oligonucleotide
  Antisense strand to SEQ ID NO: 658582
uugcucguggcagaaucca

SEQ ID NO: 658584 - RNA, 19 nt, Artificial Sequence
  Description of Artificial Sequence: Synthetic oligonucleotide
  Sense strand starting at position 855 of SEQ ID NO: 585674
ggauucugccacgagcaau

SEQ ID NO: 658585 - RNA, 19 nt, Artificial Sequence
  Description of Artificial Sequence: Synthetic oligonucleotide
  Antisense strand to SEQ ID NO: 658584
auugcucguggcagaaucc

SEQ ID NO: 658586 - RNA, 19 nt, Artificial Sequence
  Description of Artificial Sequence: Synthetic oligonucleotide
  Sense strand starting at position 922 of SEQ ID NO: 585674
ccuccaaaucccuggagau

SEQ ID NO: 658587 - RNA, 19 nt, Artificial Sequence
  Description of Artificial Sequence: Synthetic oligonucleotide
  Antisense strand to SEQ ID NO: 658586
aucuccagggauuuggagg

SEQ ID NO: 658588 - RNA, 19 nt, Artificial Sequence
  Description of Artificial Sequence: Synthetic oligonucleotide
  Sense strand starting at position 923 of SEQ ID NO: 585674
cuccaaaucccuggagauu

SEQ ID NO: 658589 - RNA, 19 nt, Artificial Sequence
  Description of Artificial Sequence: Synthetic oligonucleotide
  Antisense strand to SEQ ID NO: 658588
aaucuccagggauuuggag

SEQ ID NO: 658590 - RNA, 19 nt, Artificial Sequence
  Description of Artificial Sequence: Synthetic oligonucleotide
  Sense strand starting at position 932 of SEQ ID NO: 585674
ccuggagauuggucucuuu

SEQ ID NO: 658591 - RNA, 19 nt, Artificial Sequence
  Description of Artificial Sequence: Synthetic oligonucleotide
  Antisense strand to SEQ ID NO: 658590
aaagagaccaaucuccagg

SEQ ID NO: 658592 - RNA, 19 nt, Artificial Sequence
  Description of Artificial Sequence: Synthetic oligonucleotide
  Sense strand starting at position 935 of SEQ ID NO: 585674
ggagauuggucucuuuccu

SEQ ID NO: 658593 - RNA, 19 nt, Artificial Sequence
  Description of Artificial Sequence: Synthetic oligonucleotide
  Antisense strand to SEQ ID NO: 658592
aggaaagagaccaaucucc

SEQ ID NO: 658594 - RNA, 19 nt, Artificial Sequence
  Description of Artificial Sequence: Synthetic oligonucleotide
  Sense strand starting at position 943 of SEQ ID NO: 585674
gucucuuuccuggguuaca

SEQ ID NO: 658595 - RNA, 19 nt, Artificial Sequence
  Description of Artificial Sequence: Synthetic oligonucleotide
  Antisense strand to SEQ ID NO: 658594
uguaacccaggaaagagac

SEQ ID NO: 658596 - RNA, 19 nt, Artificial Sequence
  Description of Artificial Sequence: Synthetic oligonucleotide
  Sense strand starting at position 944 of SEQ ID NO: 585674
ucucuuuccuggguuacau

SEQ ID NO: 658597 - RNA, 19 nt, Artificial Sequence
  Description of Artificial Sequence: Synthetic oligonucleotide
  Antisense strand to SEQ ID NO: 658596
auguaacccaggaaagaga

SEQ ID NO: 658598 - RNA, 19 nt, Artificial Sequence
  Description of Artificial Sequence: Synthetic oligonucleotide
  Sense strand starting at position 1039 of SEQ ID NO: 585674
ccagaaagauauuagaaag

SEQ ID NO: 658599 - RNA, 19 nt, Artificial Sequence
  Description of Artificial Sequence: Synthetic oligonucleotide
  Antisense strand to SEQ ID NO: 658598
cuuucuaauaucuuucugg

SEQ ID NO: 658600 - RNA, 19 nt, Artificial Sequence
  Description of Artificial Sequence: Synthetic oligonucleotide
  Sense strand starting at position 1271 of SEQ ID NO: 585674
agugaugacucuuaggugu

SEQ ID NO: 658601 - RNA, 19 nt, Artificial Sequence
  Description of Artificial Sequence: Synthetic oligonucleotide
  Antisense strand to SEQ ID NO: 658600
acaccuaagagucaucacu

SEQ ID NO: 658602 - RNA, 19 nt, Artificial Sequence
  Description of Artificial Sequence: Synthetic oligonucleotide
  Sense strand starting at position 1273 of SEQ ID NO: 585674
ugaugacucuuagguguga

SEQ ID NO: 658603 - RNA, 19 nt, Artificial Sequence
  Description of Artificial Sequence: Synthetic oligonucleotide
  Antisense strand to SEQ ID NO: 658602
ucacaccuaagagucauca

SEQ ID NO: 658604 - RNA, 19 nt, Artificial Sequence
  Description of Artificial Sequence: Synthetic oligonucleotide
  Sense strand starting at position 1277 of SEQ ID NO: 585674
gacucuuaggugugaccaa

SEQ ID NO: 658605 - RNA, 19 nt, Artificial Sequence
  Description of Artificial Sequence: Synthetic oligonucleotide
  Antisense strand to SEQ ID NO: 658604
uuggucacaccuaagaguc

SEQ ID NO: 658606 - RNA, 19 nt, Artificial Sequence
  Description of Artificial Sequence: Synthetic oligonucleotide
  Sense strand starting at position 1288 of SEQ ID NO: 585674
gugaccaagccaggaaaua

SEQ ID NO: 658607 - RNA, 19 nt, Artificial Sequence
  Description of Artificial Sequence: Synthetic oligonucleotide
  Antisense strand to SEQ ID NO: 658606
uauuuccuggcuuggucac

SEQ ID NO: 658608 - RNA, 19 nt, Artificial Sequence
  Description of Artificial Sequence: Synthetic oligonucleotide
  Sense strand starting at position 1332 of SEQ ID NO: 585674
ugcugucugcccuggugau

SEQ ID NO: 658609 - RNA, 19 nt, Artificial Sequence
  Description of Artificial Sequence: Synthetic oligonucleotide
  Antisense strand to SEQ ID NO: 658608
aucaccagggcagacagca

SEQ ID NO: 658610 - RNA, 19 nt, Artificial Sequence
  Description of Artificial Sequence: Synthetic oligonucleotide
  Sense strand starting at position 1353 of SEQ ID NO: 585674
gggccacacccucguuaaa

SEQ ID NO: 658611 - RNA, 19 nt, Artificial Sequence
  Description of Artificial Sequence: Synthetic oligonucleotide
  Antisense strand to SEQ ID NO: 658610
uuuaacgaggguguggccc

SEQ ID NO: 658612 - RNA, 19 nt, Artificial Sequence
  Description of Artificial Sequence: Synthetic oligonucleotide
  Sense strand starting at position 1438 of SEQ ID NO: 585674
uuccuuuccucugugagga

SEQ ID NO: 658613 - RNA, 19 nt, Artificial Sequence
  Description of Artificial Sequence: Synthetic oligonucleotide
  Antisense strand to SEQ ID NO: 658612
uccucacagaggaaaggaa

SEQ ID NO: 658614 - RNA, 19 nt, Artificial Sequence
  Description of Artificial Sequence: Synthetic oligonucleotide
  Sense strand starting at position 1546 of SEQ ID NO: 585674
cacauuagucaccgcgaca

SEQ ID NO: 658615 - RNA, 19 nt, Artificial Sequence
  Description of Artificial Sequence: Synthetic oligonucleotide
  Antisense strand to SEQ ID NO: 658614
ugucgcggugacuaaugug

SEQ ID NO: 658616 - RNA, 19 nt, Artificial Sequence
  Description of Artificial Sequence: Synthetic oligonucleotide
  Sense strand starting at position 2911 of SEQ ID NO: 585674
acagcaggguguccuuaau

SEQ ID NO: 658617 - RNA, 19 nt, Artificial Sequence
  Description of Artificial Sequence: Synthetic oligonucleotide
  Antisense strand to SEQ ID NO: 658616
auuaaggacacccugcugu

SEQ ID NO: 658618 - RNA, 19 nt, Artificial Sequence
  Description of Artificial Sequence: Synthetic oligonucleotide
  Sense strand starting at position 2970 of SEQ ID NO: 585674
ggcugaagugugcaugacu

SEQ ID NO: 658619 - RNA, 19 nt, Artificial Sequence
  Description of Artificial Sequence: Synthetic oligonucleotide
  Antisense strand to SEQ ID NO: 658618
agucaugcacacuucagcc

SEQ ID NO: 658620 - RNA, 19 nt, Artificial Sequence
  Description of Artificial Sequence: Synthetic oligonucleotide
  Sense strand starting at position 3203 of SEQ ID NO: 585674
auucuuucuuuguugugaa

SEQ ID NO: 658621 - RNA, 19 nt, Artificial Sequence
  Description of Artificial Sequence: Synthetic oligonucleotide
  Antisense strand to SEQ ID NO: 658620
uucacaacaaagaaagaau

SEQ ID NO: 658622 - RNA, 19 nt, Artificial Sequence
  Description of Artificial Sequence: Synthetic oligonucleotide
  Sense strand starting at position 3286 of SEQ ID NO: 585674
ugcucaggccuccaagaua

SEQ ID NO: 658623 - RNA, 19 nt, Artificial Sequence
  Description of Artificial Sequence: Synthetic oligonucleotide
  Antisense strand to SEQ ID NO: 658622
uaucuuggaggccugagca

SEQ ID NO: 658624 - RNA, 19 nt, Artificial Sequence
  Description of Artificial Sequence: Synthetic oligonucleotide
  Sense strand starting at position 3561 of SEQ ID NO: 585674
ggcccugcuggagaugaua

SEQ ID NO: 658625 - RNA, 19 nt, Artificial Sequence
  Description of Artificial Sequence: Synthetic oligonucleotide
  Antisense strand to SEQ ID NO: 658624
uaucaucuccagcagggcc

SEQ ID NO: 658626 - RNA, 19 nt, Artificial Sequence
  Description of Artificial Sequence: Synthetic oligonucleotide
  Sense strand starting at position 43 of SEQ ID NO: 585675
gucaauuaacaucagaguc

SEQ ID NO: 658627 - RNA, 19 nt, Artificial Sequence
  Description of Artificial Sequence: Synthetic oligonucleotide
  Antisense strand to SEQ ID NO: 658626
gacucugauguuaauugac

SEQ ID NO: 658628 - RNA, 19 nt, Artificial Sequence
  Description of Artificial Sequence: Synthetic oligonucleotide
  Sense strand starting at position 56 of SEQ ID NO: 585675
agagucaucuucucaugga

SEQ ID NO: 658629 - RNA, 19 nt, Artificial Sequence
  Description of Artificial Sequence: Synthetic oligonucleotide
  Antisense strand to SEQ ID NO: 658628
uccaugagaagaugacucu

SEQ ID NO: 658630 - RNA, 19 nt, Artificial Sequence
  Description of Artificial Sequence: Synthetic oligonucleotide
  Sense strand starting at position 57 of SEQ ID NO: 585675
gagucaucuucucauggaa

SEQ ID NO: 658631 - RNA, 19 nt, Artificial Sequence
  Description of Artificial Sequence: Synthetic oligonucleotide
  Antisense strand to SEQ ID NO: 658630
uuccaugagaagaugacuc

SEQ ID NO: 658632 - RNA, 19 nt, Artificial Sequence
  Description of Artificial Sequence: Synthetic oligonucleotide
  Sense strand starting at position 282 of SEQ ID NO: 585675
uuccauacuuccucuggga

SEQ ID NO: 658633 - RNA, 19 nt, Artificial Sequence
  Description of Artificial Sequence: Synthetic oligonucleotide
  Antisense strand to SEQ ID NO: 658632
ucccagaggaaguauggaa

SEQ ID NO: 658634 - RNA, 19 nt, Artificial Sequence
  Description of Artificial Sequence: Synthetic oligonucleotide
  Sense strand starting at position 308 of SEQ ID NO: 585675
uggauucugccacgagcaa

SEQ ID NO: 658635 - RNA, 19 nt, Artificial Sequence
  Description of Artificial Sequence: Synthetic oligonucleotide
  Antisense strand to SEQ ID NO: 658634
uugcucguggcagaaucca

SEQ ID NO: 658636 - RNA, 19 nt, Artificial Sequence
  Description of Artificial Sequence: Synthetic oligonucleotide
  Sense strand starting at position 309 of SEQ ID NO: 585675
ggauucugccacgagcaau

SEQ ID NO: 658637 - RNA, 19 nt, Artificial Sequence
  Description of Artificial Sequence: Synthetic oligonucleotide
  Antisense strand to SEQ ID NO: 658636
auugcucguggcagaaucc

SEQ ID NO: 658638 - RNA, 19 nt, Artificial Sequence
  Description of Artificial Sequence: Synthetic oligonucleotide
  Sense strand starting at position 376 of SEQ ID NO: 585675
ccuccaaaucccuggagau

SEQ ID NO: 658639 - RNA, 19 nt, Artificial Sequence
  Description of Artificial Sequence: Synthetic oligonucleotide
  Antisense strand to SEQ ID NO: 658638
aucuccagggauuuggagg

SEQ ID NO: 658640 - RNA, 19 nt, Artificial Sequence
  Description of Artificial Sequence: Synthetic oligonucleotide
  Sense strand starting at position 377 of SEQ ID NO: 585675
cuccaaaucccuggagauu

SEQ ID NO: 658641 - RNA, 19 nt, Artificial Sequence
  Description of Artificial Sequence: Synthetic oligonucleotide
  Antisense strand to SEQ ID NO: 658640
aaucuccagggauuuggag

SEQ ID NO: 658642 - RNA, 19 nt, Artificial Sequence
  Description of Artificial Sequence: Synthetic oligonucleotide
  Sense strand starting at position 386 of SEQ ID NO: 585675
ccuggagauuggucucuuu

SEQ ID NO: 658643 - RNA, 19 nt, Artificial Sequence
  Description of Artificial Sequence: Synthetic oligonucleotide
  Antisense strand to SEQ ID NO: 658642
aaagagaccaaucuccagg

SEQ ID NO: 658644 - RNA, 19 nt, Artificial Sequence
  Description of Artificial Sequence: Synthetic oligonucleotide
  Sense strand starting at position 389 of SEQ ID NO: 585675
ggagauuggucucuuuccu

SEQ ID NO: 658645 - RNA, 19 nt, Artificial Sequence
  Description of Artificial Sequence: Synthetic oligonucleotide
  Antisense strand to SEQ ID NO: 658644
aggaaagagaccaaucucc

SEQ ID NO: 658646 - RNA, 19 nt, Artificial Sequence
  Description of Artificial Sequence: Synthetic oligonucleotide
  Sense strand starting at position 395 of SEQ ID NO: 585675
uggucucuuuccuggguua

SEQ ID NO: 658647 - RNA, 19 nt, Artificial Sequence
  Description of Artificial Sequence: Synthetic oligonucleotide
  Antisense strand to SEQ ID NO: 658646
uaacccaggaaagagacca

SEQ ID NO: 658648 - RNA, 19 nt, Artificial Sequence
  Description of Artificial Sequence: Synthetic oligonucleotide
  Sense strand starting at position 397 of SEQ ID NO: 585675
gucucuuuccuggguuaca

SEQ ID NO: 658649 - RNA, 19 nt, Artificial Sequence
  Description of Artificial Sequence: Synthetic oligonucleotide
  Antisense strand to SEQ ID NO: 658648
uguaacccaggaaagagac

SEQ ID NO: 658650 - RNA, 19 nt, Artificial Sequence
  Description of Artificial Sequence: Synthetic oligonucleotide
  Sense strand starting at position 398 of SEQ ID NO: 585675
ucucuuuccuggguuacau

SEQ ID NO: 658651 - RNA, 19 nt, Artificial Sequence
  Description of Artificial Sequence: Synthetic oligonucleotide
  Antisense strand to SEQ ID NO: 658650
auguaacccaggaaagaga

SEQ ID NO: 658652 - RNA, 19 nt, Artificial Sequence
  Description of Artificial Sequence: Synthetic oligonucleotide
  Sense strand starting at position 493 of SEQ ID NO: 585675
ccagaaagauauuagaaag

SEQ ID NO: 658653 - RNA, 19 nt, Artificial Sequence
  Description of Artificial Sequence: Synthetic oligonucleotide
  Antisense strand to SEQ ID NO: 658652
cuuucuaauaucuuucugg

SEQ ID NO: 658654 - RNA, 19 nt, Artificial Sequence
  Description of Artificial Sequence: Synthetic oligonucleotide
  Sense strand starting at position 725 of SEQ ID NO: 585675
agugaugacucuuaggugu

SEQ ID NO: 658655 - RNA, 19 nt, Artificial Sequence
  Description of Artificial Sequence: Synthetic oligonucleotide
  Antisense strand to SEQ ID NO: 658654
acaccuaagagucaucacu

SEQ ID NO: 658656 - RNA, 19 nt, Artificial Sequence
  Description of Artificial Sequence: Synthetic oligonucleotide
  Sense strand starting at position 727 of SEQ ID NO: 585675
ugaugacucuuagguguga

SEQ ID NO: 658657 - RNA, 19 nt, Artificial Sequence
  Description of Artificial Sequence: Synthetic oligonucleotide
  Antisense strand to SEQ ID NO: 658656
ucacaccuaagagucauca

SEQ ID NO: 658658 - RNA, 19 nt, Artificial Sequence
  Description of Artificial Sequence: Synthetic oligonucleotide
  Sense strand starting at position 731 of SEQ ID NO: 585675
gacucuuaggugugaccaa

SEQ ID NO: 658659 - RNA, 19 nt, Artificial Sequence
  Description of Artificial Sequence: Synthetic oligonucleotide
  Antisense strand to SEQ ID NO: 658658
uuggucacaccuaagaguc

SEQ ID NO: 658660 - RNA, 19 nt, Artificial Sequence
  Description of Artificial Sequence: Synthetic oligonucleotide
  Sense strand starting at position 742 of SEQ ID NO: 585675
gugaccaagccaggaaaua

SEQ ID NO: 658661 - RNA, 19 nt, Artificial Sequence
  Description of Artificial Sequence: Synthetic oligonucleotide
  Antisense strand to SEQ ID NO: 658660
uauuuccuggcuuggucac

SEQ ID NO: 658662 - RNA, 19 nt, Artificial Sequence
  Description of Artificial Sequence: Synthetic oligonucleotide
  Sense strand starting at position 786 of SEQ ID NO: 585675
ugcugucugcccuggugau

SEQ ID NO: 658663 - RNA, 19 nt, Artificial Sequence
  Description of Artificial Sequence: Synthetic oligonucleotide
  Antisense strand to SEQ ID NO: 658662
aucaccagggcagacagca

SEQ ID NO: 658664 - RNA, 19 nt, Artificial Sequence
  Description of Artificial Sequence: Synthetic oligonucleotide
  Sense strand starting at position 807 of SEQ ID NO: 585675
gggccacacccucguuaaa

SEQ ID NO: 658665 - RNA, 19 nt, Artificial Sequence
  Description of Artificial Sequence: Synthetic oligonucleotide
  Antisense strand to SEQ ID NO: 658664
uuuaacgaggguguggccc

SEQ ID NO: 658666 - RNA, 19 nt, Artificial Sequence
  Description of Artificial Sequence: Synthetic oligonucleotide
  Sense strand starting at position 892 of SEQ ID NO: 585675
uuccuuuccucugugagga

SEQ ID NO: 658667 - RNA, 19 nt, Artificial Sequence
  Description of Artificial Sequence: Synthetic oligonucleotide
  Antisense strand to SEQ ID NO: 658666
uccucacagaggaaaggaa

SEQ ID NO: 658668 - RNA, 19 nt, Artificial Sequence
  Description of Artificial Sequence: Synthetic oligonucleotide
  Sense strand starting at position 1000 of SEQ ID NO: 585675
cacauuagucaccgcgaca

SEQ ID NO: 658669 - RNA, 19 nt, Artificial Sequence
  Description of Artificial Sequence: Synthetic oligonucleotide
  Antisense strand to SEQ ID NO: 658668
ugucgcggugacuaaugug

SEQ ID NO: 658670 - RNA, 19 nt, Artificial Sequence
  Description of Artificial Sequence: Synthetic oligonucleotide
  Sense strand starting at position 2200 of SEQ ID NO: 585675
cuaagugacuugugcgauu

SEQ ID NO: 658671 - RNA, 19 nt, Artificial Sequence
  Description of Artificial Sequence: Synthetic oligonucleotide
  Antisense strand to SEQ ID NO: 658670
aaucgcacaagucacuuag

SEQ ID NO: 658672 - RNA, 19 nt, Artificial Sequence
  Description of Artificial Sequence: Synthetic oligonucleotide
  Sense strand starting at position 2365 of SEQ ID NO: 585675
acagcaggguguccuuaau

SEQ ID NO: 658673 - RNA, 19 nt, Artificial Sequence
  Description of Artificial Sequence: Synthetic oligonucleotide
  Antisense strand to SEQ ID NO: 658672
auuaaggacacccugcugu

SEQ ID NO: 658674 - RNA, 19 nt, Artificial Sequence
  Description of Artificial Sequence: Synthetic oligonucleotide
  Sense strand starting at position 2424 of SEQ ID NO: 585675
ggcugaagugugcaugacu

SEQ ID NO: 658675 - RNA, 19 nt, Artificial Sequence
  Description of Artificial Sequence: Synthetic oligonucleotide
  Antisense strand to SEQ ID NO: 658674
agucaugcacacuucagcc

SEQ ID NO: 658676 - RNA, 19 nt, Artificial Sequence
  Description of Artificial Sequence: Synthetic oligonucleotide
  Sense strand starting at position 2510 of SEQ ID NO: 585675
gcugaagucugcuaacuga

SEQ ID NO: 658677 - RNA, 19 nt, Artificial Sequence
  Description of Artificial Sequence: Synthetic oligonucleotide
  Antisense strand to SEQ ID NO: 658676
ucaguuagcagacuucagc

SEQ ID NO: 658678 - RNA, 19 nt, Artificial Sequence
  Description of Artificial Sequence: Synthetic oligonucleotide
  Sense strand starting at position 2657 of SEQ ID NO: 585675
auucuuucuuuguugugaa

SEQ ID NO: 658679 - RNA, 19 nt, Artificial Sequence
  Description of Artificial Sequence: Synthetic oligonucleotide
  Antisense strand to SEQ ID NO: 658678
uucacaacaaagaaagaau

SEQ ID NO: 658680 - RNA, 19 nt, Artificial Sequence
  Description of Artificial Sequence: Synthetic oligonucleotide
  Sense strand starting at position 2658 of SEQ ID NO: 585675
uucuuucuuuguugugaaa

SEQ ID NO: 658681 - RNA, 19 nt, Artificial Sequence
  Description of Artificial Sequence: Synthetic oligonucleotide
  Antisense strand to SEQ ID NO: 658680
uuucacaacaaagaaagaa

SEQ ID NO: 658682 - RNA, 19 nt, Artificial Sequence
  Description of Artificial Sequence: Synthetic oligonucleotide
  Sense strand starting at position 2661 of SEQ ID NO: 585675
uuucuuuguugugaaagca

SEQ ID NO: 658683 - RNA, 19 nt, Artificial Sequence
  Description of Artificial Sequence: Synthetic oligonucleotide
  Antisense strand to SEQ ID NO: 658682
ugcuuucacaacaaagaaa

SEQ ID NO: 658684 - RNA, 19 nt, Artificial Sequence
  Description of Artificial Sequence: Synthetic oligonucleotide
  Sense strand starting at position 2740 of SEQ ID NO: 585675
ugcucaggccuccaagaua

SEQ ID NO: 658685 - RNA, 19 nt, Artificial Sequence
  Description of Artificial Sequence: Synthetic oligonucleotide
  Antisense strand to SEQ ID NO: 658684
uaucuuggaggccugagca

SEQ ID NO: 658686 - RNA, 19 nt, Artificial Sequence
  Description of Artificial Sequence: Synthetic oligonucleotide
  Sense strand starting at position 3015 of SEQ ID NO: 585675
ggcccugcuggagaugaua

SEQ ID NO: 658687 - RNA, 19 nt, Artificial Sequence
  Description of Artificial Sequence: Synthetic oligonucleotide
  Antisense strand to SEQ ID NO: 658686
uaucaucuccagcagggcc

SEQ ID NO: 658688 - RNA, 19 nt, Artificial Sequence
  Description of Artificial Sequence: Synthetic oligonucleotide
  Sense strand starting at position 3732 of SEQ ID NO: 585675
caguguaucucuggaccua

SEQ ID NO: 658689 - RNA, 19 nt, Artificial Sequence
  Description of Artificial Sequence: Synthetic oligonucleotide
  Antisense strand to SEQ ID NO: 658688
uagguccagagauacacug

SEQ ID NO: 658690 - RNA, 19 nt, Artificial Sequence
  Description of Artificial Sequence: Synthetic oligonucleotide
  Sense strand starting at position 3827 of SEQ ID NO: 585675
gccacaaucugguggagaa

SEQ ID NO: 658691 - RNA, 19 nt, Artificial Sequence
  Description of Artificial Sequence: Synthetic oligonucleotide
  Antisense strand to SEQ ID NO: 658690
uucuccaccagauuguggc

SEQ ID NO: 658692 - RNA, 19 nt, Artificial Sequence
  Description of Artificial Sequence: Synthetic oligonucleotide
  Sense strand starting at position 3860 of SEQ ID NO: 585675
ccacaugaauacuggcaua

SEQ ID NO: 658693 - RNA, 19 nt, Artificial Sequence
  Description of Artificial Sequence: Synthetic oligonucleotide
  Antisense strand to SEQ ID NO: 658692
uaugccaguauucaugugg

SEQ ID NO: 658694 - RNA, 19 nt, Artificial Sequence
  Description of Artificial Sequence: Synthetic oligonucleotide
  Sense strand starting at position 3865 of SEQ ID NO: 585675
ugaauacuggcauauacuu

SEQ ID NO: 658695 - RNA, 19 nt, Artificial Sequence
  Description of Artificial Sequence: Synthetic oligonucleotide
  Antisense strand to SEQ ID NO: 658694
aaguauaugccaguauuca

SEQ ID NO: 658696 - RNA, 19 nt, Artificial Sequence
  Description of Artificial Sequence: Synthetic oligonucleotide
  Sense strand starting at position 3873 of SEQ ID NO: 585675
ggcauauacuuguguguug

SEQ ID NO: 658697 - RNA, 19 nt, Artificial Sequence
  Description of Artificial Sequence: Synthetic oligonucleotide
  Antisense strand to SEQ ID NO: 658696
caacacacaaguauaugcc

SEQ ID NO: 658698 - RNA, 19 nt, Artificial Sequence
  Description of Artificial Sequence: Synthetic oligonucleotide
  Sense strand starting at position 3874 of SEQ ID NO: 585675
gcauauacuuguguguuga

SEQ ID NO: 658699 - RNA, 19 nt, Artificial Sequence
  Description of Artificial Sequence: Synthetic oligonucleotide
  Antisense strand to SEQ ID NO: 658698
ucaacacacaaguauaugc

SEQ ID NO: 658700 - RNA, 19 nt, Artificial Sequence
  Description of Artificial Sequence: Synthetic oligonucleotide
  Sense strand starting at position 3875 of SEQ ID NO: 585675
cauauacuuguguguugau

SEQ ID NO: 658701 - RNA, 19 nt, Artificial Sequence
  Description of Artificial Sequence: Synthetic oligonucleotide
  Antisense strand to SEQ ID NO: 658700
aucaacacacaaguauaug

SEQ ID NO: 658702 - RNA, 19 nt, Artificial Sequence
  Description of Artificial Sequence: Synthetic oligonucleotide
  Sense strand starting at position 3876 of SEQ ID NO: 585675
auauacuuguguguugaua

SEQ ID NO: 658703 - RNA, 19 nt, Artificial Sequence
  Description of Artificial Sequence: Synthetic oligonucleotide
  Antisense strand to SEQ ID NO: 658702
uaucaacacacaaguauau

SEQ ID NO: 658704 - RNA, 19 nt, Artificial Sequence
  Description of Artificial Sequence: Synthetic oligonucleotide
  Sense strand starting at position 3878 of SEQ ID NO: 585675
auacuuguguguugauaca

SEQ ID NO: 658705 - RNA, 19 nt, Artificial Sequence
  Description of Artificial Sequence: Synthetic oligonucleotide
  Antisense strand to SEQ ID NO: 658704
uguaucaacacacaaguau

SEQ ID NO: 658706 - RNA, 19 nt, Artificial Sequence
  Description of Artificial Sequence: Synthetic oligonucleotide
  Sense strand starting at position 89 of SEQ ID NO: 585676
cacagagcucagggauagu

SEQ ID NO: 658707 - RNA, 19 nt, Artificial Sequence
  Description of Artificial Sequence: Synthetic oligonucleotide
  Antisense strand to SEQ ID NO: 658706
acuaucccugagcucugug

SEQ ID NO: 658708 - RNA, 19 nt, Artificial Sequence
  Description of Artificial Sequence: Synthetic oligonucleotide
  Sense strand starting at position 98 of SEQ ID NO: 585676
cagggauaguucuaaacag

SEQ ID NO: 658709 - RNA, 19 nt, Artificial Sequence
  Description of Artificial Sequence: Synthetic oligonucleotide
  Antisense strand to SEQ ID NO: 658708
cuguuuagaacuaucccug

SEQ ID NO: 658710 - RNA, 19 nt, Artificial Sequence
  Description of Artificial Sequence: Synthetic oligonucleotide
  Sense strand starting at position 192 of SEQ ID NO: 585676
guccuucgcgucaguguaa

SEQ ID NO: 658711 - RNA, 19 nt, Artificial Sequence
  Description of Artificial Sequence: Synthetic oligonucleotide
  Antisense strand to SEQ ID NO: 658710
uuacacugacgcgaaggac

SEQ ID NO: 658712 - RNA, 19 nt, Artificial Sequence
  Description of Artificial Sequence: Synthetic oligonucleotide
  Sense strand starting at position 195 of SEQ ID NO: 585676
cuucgcgucaguguaacua

SEQ ID NO: 658713 - RNA, 19 nt, Artificial Sequence
  Description of Artificial Sequence: Synthetic oligonucleotide
  Antisense strand to SEQ ID NO: 658712
uaguuacacugacgcgaag

SEQ ID NO: 658714 - RNA, 19 nt, Artificial Sequence
  Description of Artificial Sequence: Synthetic oligonucleotide
  Sense strand starting at position 286 of SEQ ID NO: 585676
agacuagacuuguucccau

SEQ ID NO: 658715 - RNA, 19 nt, Artificial Sequence
  Description of Artificial Sequence: Synthetic oligonucleotide
  Antisense strand to SEQ ID NO: 658714
augggaacaagucuagucu

SEQ ID NO: 658716 - RNA, 19 nt, Artificial Sequence
  Description of Artificial Sequence: Synthetic oligonucleotide
  Sense strand starting at position 289 of SEQ ID NO: 585676
cuagacuuguucccauuau

SEQ ID NO: 658717 - RNA, 19 nt, Artificial Sequence
  Description of Artificial Sequence: Synthetic oligonucleotide
  Antisense strand to SEQ ID NO: 658716
auaaugggaacaagucuag

SEQ ID NO: 658718 - RNA, 19 nt, Artificial Sequence
  Description of Artificial Sequence: Synthetic oligonucleotide
  Sense strand starting at position 323 of SEQ ID NO: 585676
gggcgauaaauccggaaca

SEQ ID NO: 658719 - RNA, 19 nt, Artificial Sequence
  Description of Artificial Sequence: Synthetic oligonucleotide
  Antisense strand to SEQ ID NO: 658718
uguuccggauuuaucgccc

SEQ ID NO: 658720 - RNA, 19 nt, Artificial Sequence
  Description of Artificial Sequence: Synthetic oligonucleotide
  Sense strand starting at position 333 of SEQ ID NO: 585676
uccggaacagcucgaauua

SEQ ID NO: 658721 - RNA, 19 nt, Artificial Sequence
  Description of Artificial Sequence: Synthetic oligonucleotide
  Antisense strand to SEQ ID NO: 658720
uaauucgagcuguuccgga

SEQ ID NO: 658722 - RNA, 19 nt, Artificial Sequence
  Description of Artificial Sequence: Synthetic oligonucleotide
  Sense strand starting at position 1283 of SEQ ID NO: 585676
cggcuacucacaggaauau

SEQ ID NO: 658723 - RNA, 19 nt, Artificial Sequence
  Description of Artificial Sequence: Synthetic oligonucleotide
  Antisense strand to SEQ ID NO: 658722
auauuccugugaguagccg

SEQ ID NO: 658724 - RNA, 19 nt, Artificial Sequence
  Description of Artificial Sequence: Synthetic oligonucleotide
  Sense strand starting at position 1995 of SEQ ID NO: 585676
caucuuugccagugguuua

SEQ ID NO: 658725 - RNA, 19 nt, Artificial Sequence
  Description of Artificial Sequence: Synthetic oligonucleotide
  Antisense strand to SEQ ID NO: 658724
uaaaccacuggcaaagaug

SEQ ID NO: 658726 - RNA, 19 nt, Artificial Sequence
  Description of Artificial Sequence: Synthetic oligonucleotide
  Sense strand starting at position 2031 of SEQ ID NO: 585676
cgaguaccuucgucaucaa

SEQ ID NO: 658727 - RNA, 19 nt, Artificial Sequence
  Description of Artificial Sequence: Synthetic oligonucleotide
  Antisense strand to SEQ ID NO: 658726
uugaugacgaagguacucg

SEQ ID NO: 658728 - RNA, 19 nt, Artificial Sequence
  Description of Artificial Sequence: Synthetic oligonucleotide
  Sense strand starting at position 2034 of SEQ ID NO: 585676
guaccuucgucaucaaaua

SEQ ID NO: 658729 - RNA, 19 nt, Artificial Sequence
  Description of Artificial Sequence: Synthetic oligonucleotide
  Antisense strand to SEQ ID NO: 658728
uauuugaugacgaagguac

SEQ ID NO: 658730 - RNA, 19 nt, Artificial Sequence
  Description of Artificial Sequence: Synthetic oligonucleotide
  Sense strand starting at position 2053 of SEQ ID NO: 585676
auauuuaugucgcaagacc

SEQ ID NO: 658731 - RNA, 19 nt, Artificial Sequence
  Description of Artificial Sequence: Synthetic oligonucleotide
  Antisense strand to SEQ ID NO: 658730
ggucuugcgacauaaauau

SEQ ID NO: 658732 - RNA, 19 nt, Artificial Sequence
  Description of Artificial Sequence: Synthetic oligonucleotide
  Sense strand starting at position 2107 of SEQ ID NO: 585676
gccuuaggcuuggucaaga

SEQ ID NO: 658733 - RNA, 19 nt, Artificial Sequence
  Description of Artificial Sequence: Synthetic oligonucleotide
  Antisense strand to SEQ ID NO: 658732
ucuugaccaagccuaaggc

SEQ ID NO: 658734 - RNA, 19 nt, Artificial Sequence
  Description of Artificial Sequence: Synthetic oligonucleotide
  Sense strand starting at position 2159 of SEQ ID NO: 585676
ggagaaacuuaccuucgca

SEQ ID NO: 658735 - RNA, 19 nt, Artificial Sequence
  Description of Artificial Sequence: Synthetic oligonucleotide
  Antisense strand to SEQ ID NO: 658734
ugcgaagguaaguuucucc

SEQ ID NO: 658736 - RNA, 19 nt, Artificial Sequence
  Description of Artificial Sequence: Synthetic oligonucleotide
  Sense strand starting at position 2346 of SEQ ID NO: 585676
cuugauauguugucucaga

SEQ ID NO: 658737 - RNA, 19 nt, Artificial Sequence
  Description of Artificial Sequence: Synthetic oligonucleotide
  Antisense strand to SEQ ID NO: 658736
ucugagacaacauaucaag

SEQ ID NO: 658738 - RNA, 19 nt, Artificial Sequence
  Description of Artificial Sequence: Synthetic oligonucleotide
  Sense strand starting at position 2347 of SEQ ID NO: 585676
uugauauguugucucagau

SEQ ID NO: 658739 - RNA, 19 nt, Artificial Sequence
  Description of Artificial Sequence: Synthetic oligonucleotide
  Antisense strand to SEQ ID NO: 658738
aucugagacaacauaucaa

SEQ ID NO: 658740 - RNA, 19 nt, Artificial Sequence
  Description of Artificial Sequence: Synthetic oligonucleotide
  Sense strand starting at position 2423 of SEQ ID NO: 585676
uuugucaagcacugaugua

SEQ ID NO: 658741 - RNA, 19 nt, Artificial Sequence
  Description of Artificial Sequence: Synthetic oligonucleotide
  Antisense strand to SEQ ID NO: 658740
uacaucagugcuugacaaa

SEQ ID NO: 658742 - RNA, 19 nt, Artificial Sequence
  Description of Artificial Sequence: Synthetic oligonucleotide
  Sense strand starting at position 2439 of SEQ ID NO: 585676
guaauucuuugcgucaaag

SEQ ID NO: 658743 - RNA, 19 nt, Artificial Sequence
  Description of Artificial Sequence: Synthetic oligonucleotide
  Antisense strand to SEQ ID NO: 658742
cuuugacgcaaagaauuac

SEQ ID NO: 658744 - RNA, 19 nt, Artificial Sequence
  Description of Artificial Sequence: Synthetic oligonucleotide
  Sense strand starting at position 2441 of SEQ ID NO: 585676
aauucuuugcgucaaagcu

SEQ ID NO: 658745 - RNA, 19 nt, Artificial Sequence
  Description of Artificial Sequence: Synthetic oligonucleotide
  Antisense strand to SEQ ID NO: 658744
agcuuugacgcaaagaauu

SEQ ID NO: 658746 - RNA, 19 nt, Artificial Sequence
  Description of Artificial Sequence: Synthetic oligonucleotide
  Sense strand starting at position 2524 of SEQ ID NO: 585676
aguaaagucuuaucgcaau

SEQ ID NO: 658747 - RNA, 19 nt, Artificial Sequence
  Description of Artificial Sequence: Synthetic oligonucleotide
  Antisense strand to SEQ ID NO: 658746
auugcgauaagacuuuacu

SEQ ID NO: 658748 - RNA, 19 nt, Artificial Sequence
  Description of Artificial Sequence: Synthetic oligonucleotide
  Sense strand starting at position 2591 of SEQ ID NO: 585676
ucuccucagcucuggagaa

SEQ ID NO: 658749 - RNA, 19 nt, Artificial Sequence
  Description of Artificial Sequence: Synthetic oligonucleotide
  Antisense strand to SEQ ID NO: 658748
uucuccagagcugaggaga

SEQ ID NO: 658750 - RNA, 19 nt, Artificial Sequence
  Description of Artificial Sequence: Synthetic oligonucleotide
  Sense strand starting at position 2689 of SEQ ID NO: 585676
cgaguaugagauuggagag

SEQ ID NO: 658751 - RNA, 19 nt, Artificial Sequence
  Description of Artificial Sequence: Synthetic oligonucleotide
  Antisense strand to SEQ ID NO: 658750
cucuccaaucucauacucg

SEQ ID NO: 658752 - RNA, 19 nt, Artificial Sequence
  Description of Artificial Sequence: Synthetic oligonucleotide
  Sense strand starting at position 2745 of SEQ ID NO: 585676
ugcaacaucuuaggauuua

SEQ ID NO: 658753 - RNA, 19 nt, Artificial Sequence
  Description of Artificial Sequence: Synthetic oligonucleotide
  Antisense strand to SEQ ID NO: 658752
uaaauccuaagauguugca

SEQ ID NO: 658754 - RNA, 19 nt, Artificial Sequence
  Description of Artificial Sequence: Synthetic oligonucleotide
  Sense strand starting at position 2746 of SEQ ID NO: 585676
gcaacaucuuaggauuuau

SEQ ID NO: 658755 - RNA, 19 nt, Artificial Sequence
  Description of Artificial Sequence: Synthetic oligonucleotide
  Antisense strand to SEQ ID NO: 658754
auaaauccuaagauguugc

SEQ ID NO: 658756 - RNA, 19 nt, Artificial Sequence
  Description of Artificial Sequence: Synthetic oligonucleotide
  Sense strand starting at position 2776 of SEQ ID NO: 585676
uuuagagacugguuguaua

SEQ ID NO: 658757 - RNA, 19 nt, Artificial Sequence
  Description of Artificial Sequence: Synthetic oligonucleotide
  Antisense strand to SEQ ID NO: 658756
uauacaaccagucucuaaa

SEQ ID NO: 658758 - RNA, 19 nt, Artificial Sequence
  Description of Artificial Sequence: Synthetic oligonucleotide
  Sense strand starting at position 2804 of SEQ ID NO: 585676
cuuucuuaacucuguaagu

SEQ ID NO: 658759 - RNA, 19 nt, Artificial Sequence
  Description of Artificial Sequence: Synthetic oligonucleotide
  Antisense strand to SEQ ID NO: 658758
acuuacagaguuaagaaag

SEQ ID NO: 658760 - RNA, 19 nt, Artificial Sequence
  Description of Artificial Sequence: Synthetic oligonucleotide
  Sense strand starting at position 2805 of SEQ ID NO: 585676
uuucuuaacucuguaagua

SEQ ID NO: 658761 - RNA, 19 nt, Artificial Sequence
  Description of Artificial Sequence: Synthetic oligonucleotide
  Antisense strand to SEQ ID NO: 658760
uacuuacagaguuaagaaa

SEQ ID NO: 658762 - RNA, 19 nt, Artificial Sequence
  Description of Artificial Sequence: Synthetic oligonucleotide
  Sense strand starting at position 2891 of SEQ ID NO: 585676
cuucgucauuuggaagaaa

SEQ ID NO: 658763 - RNA, 19 nt, Artificial Sequence
  Description of Artificial Sequence: Synthetic oligonucleotide
  Antisense strand to SEQ ID NO: 658762
uuucuuccaaaugacgaag

SEQ ID NO: 658764 - RNA, 19 nt, Artificial Sequence
  Description of Artificial Sequence: Synthetic oligonucleotide
  Sense strand starting at position 2965 of SEQ ID NO: 585676
ugagaaauaugucccuuua

SEQ ID NO: 658765 - RNA, 19 nt, Artificial Sequence
  Description of Artificial Sequence: Synthetic oligonucleotide
  Antisense strand to SEQ ID NO: 658764
uaaagggacauauuucuca

SEQ ID NO: 658766 - RNA, 19 nt, Artificial Sequence
  Description of Artificial Sequence: Synthetic oligonucleotide
  Sense strand starting at position 3200 of SEQ ID NO: 585676
acuucauggguaggguuaa

SEQ ID NO: 658767 - RNA, 19 nt, Artificial Sequence
  Description of Artificial Sequence: Synthetic oligonucleotide
  Antisense strand to SEQ ID NO: 658766
uuaacccuacccaugaagu

SEQ ID NO: 658768 - RNA, 19 nt, Artificial Sequence
  Description of Artificial Sequence: Synthetic oligonucleotide
  Sense strand starting at position 3225 of SEQ ID NO: 585676
aagcuuggccaauguauau

SEQ ID NO: 658769 - RNA, 19 nt, Artificial Sequence
  Description of Artificial Sequence: Synthetic oligonucleotide
  Antisense strand to SEQ ID NO: 658768
auauacauuggccaagcuu

SEQ ID NO: 658770 - RNA, 19 nt, Artificial Sequence
  Description of Artificial Sequence: Synthetic oligonucleotide
  Sense strand starting at position 3229 of SEQ ID NO: 585676
uuggccaauguauauaaua

SEQ ID NO: 658771 - RNA, 19 nt, Artificial Sequence
  Description of Artificial Sequence: Synthetic oligonucleotide
  Antisense strand to SEQ ID NO: 658770
uauuauauacauuggccaa

SEQ ID NO: 658772 - RNA, 19 nt, Artificial Sequence
  Description of Artificial Sequence: Synthetic oligonucleotide
  Sense strand starting at position 3303 of SEQ ID NO: 585676
cacagauaauuggaauagu

SEQ ID NO: 658773 - RNA, 19 nt, Artificial Sequence
  Description of Artificial Sequence: Synthetic oligonucleotide
  Antisense strand to SEQ ID NO: 658772
acuauuccaauuaucugug

SEQ ID NO: 658774 - RNA, 19 nt, Artificial Sequence
  Description of Artificial Sequence: Synthetic oligonucleotide
  Sense strand starting at position 3351 of SEQ ID NO: 585676
aaauacauuuggugggaca

SEQ ID NO: 658775 - RNA, 19 nt, Artificial Sequence
  Description of Artificial Sequence: Synthetic oligonucleotide
  Antisense strand to SEQ ID NO: 658774
ugucccaccaaauguauuu

SEQ ID NO: 658776 - RNA, 19 nt, Artificial Sequence
  Description of Artificial Sequence: Synthetic oligonucleotide
  Sense strand starting at position 3354 of SEQ ID NO: 585676
uacauuuggugggacaaga

SEQ ID NO: 658777 - RNA, 19 nt, Artificial Sequence
  Description of Artificial Sequence: Synthetic oligonucleotide
  Antisense strand to SEQ ID NO: 658776
ucuugucccaccaaaugua

SEQ ID NO: 658778 - RNA, 19 nt, Artificial Sequence
  Description of Artificial Sequence: Synthetic oligonucleotide
  Sense strand starting at position 3508 of SEQ ID NO: 585676
gucagcuaugcucaucaag

SEQ ID NO: 658779 - RNA, 19 nt, Artificial Sequence
  Description of Artificial Sequence: Synthetic oligonucleotide
  Antisense strand to SEQ ID NO: 658778
cuugaugagcauagcugac

SEQ ID NO: 658780 - RNA, 19 nt, Artificial Sequence
  Description of Artificial Sequence: Synthetic oligonucleotide
  Sense strand starting at position 3940 of SEQ ID NO: 585676
aagauauaaguguggucuu

SEQ ID NO: 658781 - RNA, 19 nt, Artificial Sequence
  Description of Artificial Sequence: Synthetic oligonucleotide
  Antisense strand to SEQ ID NO: 658780
aagaccacacuuauaucuu

SEQ ID NO: 658782 - RNA, 19 nt, Artificial Sequence
  Description of Artificial Sequence: Synthetic oligonucleotide
  Sense strand starting at position 3943 of SEQ ID NO: 585676
auauaaguguggucuugcu

SEQ ID NO: 658783 - RNA, 19 nt, Artificial Sequence
  Description of Artificial Sequence: Synthetic oligonucleotide
  Antisense strand to SEQ ID NO: 658782
agcaagaccacacuuauau

SEQ ID NO: 658784 - RNA, 19 nt, Artificial Sequence
  Description of Artificial Sequence: Synthetic oligonucleotide
  Sense strand starting at position 3950 of SEQ ID NO: 585676
uguggucuugcugaccaau

SEQ ID NO: 658785 - RNA, 19 nt, Artificial Sequence
  Description of Artificial Sequence: Synthetic oligonucleotide
  Antisense strand to SEQ ID NO: 658784
auuggucagcaagaccaca

SEQ ID NO: 658786 - RNA, 19 nt, Artificial Sequence
  Description of Artificial Sequence: Synthetic oligonucleotide
  Sense strand starting at position 16 of SEQ ID NO: 585677
aguaaugcuuacuccagaa

SEQ ID NO: 658787 - RNA, 19 nt, Artificial Sequence
  Description of Artificial Sequence: Synthetic oligonucleotide
  Antisense strand to SEQ ID NO: 658786
uucuggaguaagcauuacu

SEQ ID NO: 658788 - RNA, 19 nt, Artificial Sequence
  Description of Artificial Sequence: Synthetic oligonucleotide
  Sense strand starting at position 72 of SEQ ID NO: 585677
agcuguuacccucugcgua

SEQ ID NO: 658789 - RNA, 19 nt, Artificial Sequence
  Description of Artificial Sequence: Synthetic oligonucleotide
  Antisense strand to SEQ ID NO: 658788
uacgcagaggguaacagcu

SEQ ID NO: 658790 - RNA, 19 nt, Artificial Sequence
  Description of Artificial Sequence: Synthetic oligonucleotide
  Sense strand starting at position 82 of SEQ ID NO: 585677
cucugcguacaucaauuau

SEQ ID NO: 658791 - RNA, 19 nt, Artificial Sequence
  Description of Artificial Sequence: Synthetic oligonucleotide
  Antisense strand to SEQ ID NO: 658790
auaauugauguacgcagag

SEQ ID NO: 658792 - RNA, 19 nt, Artificial Sequence
  Description of Artificial Sequence: Synthetic oligonucleotide
  Sense strand starting at position 170 of SEQ ID NO: 585677
cugaaucuguuguuuaacu

SEQ ID NO: 658793 - RNA, 19 nt, Artificial Sequence
  Description of Artificial Sequence: Synthetic oligonucleotide
  Antisense strand to SEQ ID NO: 658792
aguuaaacaacagauucag

SEQ ID NO: 658794 - RNA, 19 nt, Artificial Sequence
  Description of Artificial Sequence: Synthetic oligonucleotide
  Sense strand starting at position 269 of SEQ ID NO: 585677
ugaguuuauuuccaggaaa

SEQ ID NO: 658795 - RNA, 19 nt, Artificial Sequence
  Description of Artificial Sequence: Synthetic oligonucleotide
  Antisense strand to SEQ ID NO: 658794
uuuccuggaaauaaacuca

SEQ ID NO: 658796 - RNA, 19 nt, Artificial Sequence
  Description of Artificial Sequence: Synthetic oligonucleotide
  Sense strand starting at position 469 of SEQ ID NO: 585677
uggguagguuggccagaaa

SEQ ID NO: 658797 - RNA, 19 nt, Artificial Sequence
  Description of Artificial Sequence: Synthetic oligonucleotide
  Antisense strand to SEQ ID NO: 658796
uuucuggccaaccuaccca

SEQ ID NO: 658798 - RNA, 19 nt, Artificial Sequence
  Description of Artificial Sequence: Synthetic oligonucleotide
  Sense strand starting at position 926 of SEQ ID NO: 585677
cagaguggguccuuagaac

SEQ ID NO: 658799 - RNA, 19 nt, Artificial Sequence
  Description of Artificial Sequence: Synthetic oligonucleotide
  Antisense strand to SEQ ID NO: 658798
guucuaaggacccacucug

SEQ ID NO: 658800 - RNA, 19 nt, Artificial Sequence
  Description of Artificial Sequence: Synthetic oligonucleotide
  Sense strand starting at position 1105 of SEQ ID NO: 585677
gagguuauucccgggacaa

SEQ ID NO: 658801 - RNA, 19 nt, Artificial Sequence
  Description of Artificial Sequence: Synthetic oligonucleotide
  Antisense strand to SEQ ID NO: 658800
uugucccgggaauaaccuc

SEQ ID NO: 658802 - RNA, 19 nt, Artificial Sequence
  Description of Artificial Sequence: Synthetic oligonucleotide
  Sense strand starting at position 1106 of SEQ ID NO: 585677
agguuauucccgggacaaa

SEQ ID NO: 658803 - RNA, 19 nt, Artificial Sequence
  Description of Artificial Sequence: Synthetic oligonucleotide
  Antisense strand to SEQ ID NO: 658802
uuugucccgggaauaaccu

SEQ ID NO: 658804 - RNA, 19 nt, Artificial Sequence
  Description of Artificial Sequence: Synthetic oligonucleotide
  Sense strand starting at position 1180 of SEQ ID NO: 585677
aauggcuucccagggaauu

SEQ ID NO: 658805 - RNA, 19 nt, Artificial Sequence
  Description of Artificial Sequence: Synthetic oligonucleotide
  Antisense strand to SEQ ID NO: 658804
aauucccugggaagccauu

SEQ ID NO: 658806 - RNA, 19 nt, Artificial Sequence
  Description of Artificial Sequence: Synthetic oligonucleotide
  Sense strand starting at position 1673 of SEQ ID NO: 585677
agucguauccaugccgagu

SEQ ID NO: 658807 - RNA, 19 nt, Artificial Sequence
  Description of Artificial Sequence: Synthetic oligonucleotide
  Antisense strand to SEQ ID NO: 658806
acucggcauggauacgacu

SEQ ID NO: 658808 - RNA, 19 nt, Artificial Sequence
  Description of Artificial Sequence: Synthetic oligonucleotide
  Sense strand starting at position 1674 of SEQ ID NO: 585677
gucguauccaugccgaguu

SEQ ID NO: 658809 - RNA, 19 nt, Artificial Sequence
  Description of Artificial Sequence: Synthetic oligonucleotide
  Antisense strand to SEQ ID NO: 658808
aacucggcauggauacgac

SEQ ID NO: 658810 - RNA, 19 nt, Artificial Sequence
  Description of Artificial Sequence: Synthetic oligonucleotide
  Sense strand starting at position 1686 of SEQ ID NO: 585677
ccgaguuugggagaaguuu

SEQ ID NO: 658811 - RNA, 19 nt, Artificial Sequence
  Description of Artificial Sequence: Synthetic oligonucleotide
  Antisense strand to SEQ ID NO: 658810
aaacuucucccaaacucgg

SEQ ID NO: 658812 - RNA, 19 nt, Artificial Sequence
  Description of Artificial Sequence: Synthetic oligonucleotide
  Sense strand starting at position 1917 of SEQ ID NO: 585677
ccuguuagucaagaguuac

SEQ ID NO: 658813 - RNA, 19 nt, Artificial Sequence
  Description of Artificial Sequence: Synthetic oligonucleotide
  Antisense strand to SEQ ID NO: 658812
guaacucuugacuaacagg

SEQ ID NO: 658814 - RNA, 19 nt, Artificial Sequence
  Description of Artificial Sequence: Synthetic oligonucleotide
  Sense strand starting at position 2163 of SEQ ID NO: 585677
ugcccuguuccagaacuca

SEQ ID NO: 658815 - RNA, 19 nt, Artificial Sequence
  Description of Artificial Sequence: Synthetic oligonucleotide
  Antisense strand to SEQ ID NO: 658814
ugaguucuggaacagggca

SEQ ID NO: 658816 - RNA, 19 nt, Artificial Sequence
  Description of Artificial Sequence: Synthetic oligonucleotide
  Sense strand starting at position 2178 of SEQ ID NO: 585677
cucagaauuugagaggcga

SEQ ID NO: 658817 - RNA, 19 nt, Artificial Sequence
  Description of Artificial Sequence: Synthetic oligonucleotide
  Antisense strand to SEQ ID NO: 658816
ucgccucucaaauucugag

SEQ ID NO: 658818 - RNA, 19 nt, Artificial Sequence
  Description of Artificial Sequence: Synthetic oligonucleotide
  Sense strand starting at position 2498 of SEQ ID NO: 585677
gcgugucuccuuucugguu

SEQ ID NO: 658819 - RNA, 19 nt, Artificial Sequence
  Description of Artificial Sequence: Synthetic oligonucleotide
  Antisense strand to SEQ ID NO: 658818
aaccagaaaggagacacgc

SEQ ID NO: 658820 - RNA, 19 nt, Artificial Sequence
  Description of Artificial Sequence: Synthetic oligonucleotide
  Sense strand starting at position 2503 of SEQ ID NO: 585677
ucuccuuucugguuuauuu

SEQ ID NO: 658821 - RNA, 19 nt, Artificial Sequence
  Description of Artificial Sequence: Synthetic oligonucleotide
  Antisense strand to SEQ ID NO: 658820
aaauaaaccagaaaggaga

SEQ ID NO: 658822 - RNA, 19 nt, Artificial Sequence
  Description of Artificial Sequence: Synthetic oligonucleotide
  Sense strand starting at position 2514 of SEQ ID NO: 585677
guuuauuugucauuggcca

SEQ ID NO: 658823 - RNA, 19 nt, Artificial Sequence
  Description of Artificial Sequence: Synthetic oligonucleotide
  Antisense strand to SEQ ID NO: 658822
uggccaaugacaaauaaac

SEQ ID NO: 658824 - RNA, 19 nt, Artificial Sequence
  Description of Artificial Sequence: Synthetic oligonucleotide
  Sense strand starting at position 2515 of SEQ ID NO: 585677
uuuauuugucauuggccaa

SEQ ID NO: 658825 - RNA, 19 nt, Artificial Sequence
  Description of Artificial Sequence: Synthetic oligonucleotide
  Antisense strand to SEQ ID NO: 658824
uuggccaaugacaaauaaa

SEQ ID NO: 658826 - RNA, 19 nt, Artificial Sequence
  Description of Artificial Sequence: Synthetic oligonucleotide
  Sense strand starting at position 2518 of SEQ ID NO: 585677
auuugucauuggccaagua

SEQ ID NO: 658827 - RNA, 19 nt, Artificial Sequence
  Description of Artificial Sequence: Synthetic oligonucleotide
  Antisense strand to SEQ ID NO: 658826
uacuuggccaaugacaaau

SEQ ID NO: 658828 - RNA, 19 nt, Artificial Sequence
  Description of Artificial Sequence: Synthetic oligonucleotide
  Sense strand starting at position 2519 of SEQ ID NO: 585677
uuugucauuggccaaguau

SEQ ID NO: 658829 - RNA, 19 nt, Artificial Sequence
  Description of Artificial Sequence: Synthetic oligonucleotide
  Antisense strand to SEQ ID NO: 658828
auacuuggccaaugacaaa

SEQ ID NO: 658830 - RNA, 19 nt, Artificial Sequence
  Description of Artificial Sequence: Synthetic oligonucleotide
  Sense strand starting at position 2528 of SEQ ID NO: 585677
ggccaaguauuuggauuua

SEQ ID NO: 658831 - RNA, 19 nt, Artificial Sequence
  Description of Artificial Sequence: Synthetic oligonucleotide
  Antisense strand to SEQ ID NO: 658830
uaaauccaaauacuuggcc

SEQ ID NO: 658832 - RNA, 19 nt, Artificial Sequence
  Description of Artificial Sequence: Synthetic oligonucleotide
  Sense strand starting at position 2681 of SEQ ID NO: 585677
auaucuaguagguaguuaa

SEQ ID NO: 658833 - RNA, 19 nt, Artificial Sequence
  Description of Artificial Sequence: Synthetic oligonucleotide
  Antisense strand to SEQ ID NO: 658832
uuaacuaccuacuagauau

SEQ ID NO: 658834 - RNA, 19 nt, Artificial Sequence
  Description of Artificial Sequence: Synthetic oligonucleotide
  Sense strand starting at position 2685 of SEQ ID NO: 585677
cuaguagguaguuaagaca

SEQ ID NO: 658835 - RNA, 19 nt, Artificial Sequence
  Description of Artificial Sequence: Synthetic oligonucleotide
  Antisense strand to SEQ ID NO: 658834
ugucuuaacuaccuacuag

SEQ ID NO: 658836 - RNA, 19 nt, Artificial Sequence
  Description of Artificial Sequence: Synthetic oligonucleotide
  Sense strand starting at position 2826 of SEQ ID NO: 585677
gcuugaagugguuucgcca

SEQ ID NO: 658837 - RNA, 19 nt, Artificial Sequence
  Description of Artificial Sequence: Synthetic oligonucleotide
  Antisense strand to SEQ ID NO: 658836
uggcgaaaccacuucaagc

SEQ ID NO: 658838 - RNA, 19 nt, Artificial Sequence
  Description of Artificial Sequence: Synthetic oligonucleotide
  Sense strand starting at position 2874 of SEQ ID NO: 585677
gacuguauggugcauacuu

SEQ ID NO: 658839 - RNA, 19 nt, Artificial Sequence
  Description of Artificial Sequence: Synthetic oligonucleotide
  Antisense strand to SEQ ID NO: 658838
aaguaugcaccauacaguc

SEQ ID NO: 658840 - RNA, 19 nt, Artificial Sequence
  Description of Artificial Sequence: Synthetic oligonucleotide
  Sense strand starting at position 2876 of SEQ ID NO: 585677
cuguauggugcauacuuua

SEQ ID NO: 658841 - RNA, 19 nt, Artificial Sequence
  Description of Artificial Sequence: Synthetic oligonucleotide
  Antisense strand to SEQ ID NO: 658840
uaaaguaugcaccauacag

SEQ ID NO: 658842 - RNA, 19 nt, Artificial Sequence
  Description of Artificial Sequence: Synthetic oligonucleotide
  Sense strand starting at position 3015 of SEQ ID NO: 585677
ucucucaguuucucagaca

SEQ ID NO: 658843 - RNA, 19 nt, Artificial Sequence
  Description of Artificial Sequence: Synthetic oligonucleotide
  Antisense strand to SEQ ID NO: 658842
ugucugagaaacugagaga

SEQ ID NO: 658844 - RNA, 19 nt, Artificial Sequence
  Description of Artificial Sequence: Synthetic oligonucleotide
  Sense strand starting at position 3126 of SEQ ID NO: 585677
ugcuauuaaugaccagacu

SEQ ID NO: 658845 - RNA, 19 nt, Artificial Sequence
  Description of Artificial Sequence: Synthetic oligonucleotide
  Antisense strand to SEQ ID NO: 658844
agucuggucauuaauagca

SEQ ID NO: 658846 - RNA, 19 nt, Artificial Sequence
  Description of Artificial Sequence: Synthetic oligonucleotide
  Sense strand starting at position 3127 of SEQ ID NO: 585677
gcuauuaaugaccagacuu

SEQ ID NO: 658847 - RNA, 19 nt, Artificial Sequence
  Description of Artificial Sequence: Synthetic oligonucleotide
  Antisense strand to SEQ ID NO: 658846
aagucuggucauuaauagc

SEQ ID NO: 658848 - RNA, 19 nt, Artificial Sequence
  Description of Artificial Sequence: Synthetic oligonucleotide
  Sense strand starting at position 3539 of SEQ ID NO: 585677
cccuacugucuguauacua

SEQ ID NO: 658849 - RNA, 19 nt, Artificial Sequence
  Description of Artificial Sequence: Synthetic oligonucleotide
  Antisense strand to SEQ ID NO: 658848
uaguauacagacaguaggg

SEQ ID NO: 658850 - RNA, 19 nt, Artificial Sequence
  Description of Artificial Sequence: Synthetic oligonucleotide
  Sense strand starting at position 3604 of SEQ ID NO: 585677
gugguaauuuguuuguuua

SEQ ID NO: 658851 - RNA, 19 nt, Artificial Sequence
  Description of Artificial Sequence: Synthetic oligonucleotide
  Antisense strand to SEQ ID NO: 658850
uaaacaaacaaauuaccac

SEQ ID NO: 658852 - RNA, 19 nt, Artificial Sequence
  Description of Artificial Sequence: Synthetic oligonucleotide
  Sense strand starting at position 3747 of SEQ ID NO: 585677
uuucucuaucauggaagua

SEQ ID NO: 658853 - RNA, 19 nt, Artificial Sequence
  Description of Artificial Sequence: Synthetic oligonucleotide
  Antisense strand to SEQ ID NO: 658852
uacuuccaugauagagaaa

SEQ ID NO: 658854 - RNA, 19 nt, Artificial Sequence
  Description of Artificial Sequence: Synthetic oligonucleotide
  Sense strand starting at position 3775 of SEQ ID NO: 585677
gcagguaauguuuagaaag

SEQ ID NO: 658855 - RNA, 19 nt, Artificial Sequence
  Description of Artificial Sequence: Synthetic oligonucleotide
  Antisense strand to SEQ ID NO: 658854
cuuucuaaacauuaccugc

SEQ ID NO: 658856 - RNA, 19 nt, Artificial Sequence
  Description of Artificial Sequence: Synthetic oligonucleotide
  Sense strand starting at position 3813 of SEQ ID NO: 585677
acugucuuagaguauacaa

SEQ ID NO: 658857 - RNA, 19 nt, Artificial Sequence
  Description of Artificial Sequence: Synthetic oligonucleotide
  Antisense strand to SEQ ID NO: 658856
uuguauacucuaagacagu

SEQ ID NO: 658858 - RNA, 19 nt, Artificial Sequence
  Description of Artificial Sequence: Synthetic oligonucleotide
  Sense strand starting at position 3815 of SEQ ID NO: 585677
ugucuuagaguauacaaug

SEQ ID NO: 658859 - RNA, 19 nt, Artificial Sequence
  Description of Artificial Sequence: Synthetic oligonucleotide
  Antisense strand to SEQ ID NO: 658858
cauuguauacucuaagaca

SEQ ID NO: 658860 - RNA, 19 nt, Artificial Sequence
  Description of Artificial Sequence: Synthetic oligonucleotide
  Sense strand starting at position 3876 of SEQ ID NO: 585677
gucaacaauuccgugaaga

SEQ ID NO: 658861 - RNA, 19 nt, Artificial Sequence
  Description of Artificial Sequence: Synthetic oligonucleotide
  Antisense strand to SEQ ID NO: 658860
ucuucacggaauuguugac

SEQ ID NO: 658862 - RNA, 19 nt, Artificial Sequence
  Description of Artificial Sequence: Synthetic oligonucleotide
  Sense strand starting at position 3877 of SEQ ID NO: 585677
ucaacaauuccgugaagac

SEQ ID NO: 658863 - RNA, 19 nt, Artificial Sequence
  Description of Artificial Sequence: Synthetic oligonucleotide
  Antisense strand to SEQ ID NO: 658862
gucuucacggaauuguuga

SEQ ID NO: 658864 - RNA, 19 nt, Artificial Sequence
  Description of Artificial Sequence: Synthetic oligonucleotide
  Sense strand starting at position 3886 of SEQ ID NO: 585677
ccgugaagacuuugguaca

SEQ ID NO: 658865 - RNA, 19 nt, Artificial Sequence
  Description of Artificial Sequence: Synthetic oligonucleotide
  Antisense strand to SEQ ID NO: 658864
uguaccaaagucuucacgg

SEQ ID NO: 658866 - RNA, 19 nt, Artificial Sequence
  Description of Artificial Sequence: Synthetic oligonucleotide
  Sense strand starting at position 125 of SEQ ID NO: 585678
gcuaauuauccacguaauu

SEQ ID NO: 658867 - RNA, 19 nt, Artificial Sequence
  Description of Artificial Sequence: Synthetic oligonucleotide
  Antisense strand to SEQ ID NO: 658866
aauuacguggauaauuagc

SEQ ID NO: 658868 - RNA, 19 nt, Artificial Sequence
  Description of Artificial Sequence: Synthetic oligonucleotide
  Sense strand starting at position 177 of SEQ ID NO: 585678
agcacagguuaucucaaga

SEQ ID NO: 658869 - RNA, 19 nt, Artificial Sequence
  Description of Artificial Sequence: Synthetic oligonucleotide
  Antisense strand to SEQ ID NO: 658868
ucuugagauaaccugugcu

SEQ ID NO: 658870 - RNA, 19 nt, Artificial Sequence
  Description of Artificial Sequence: Synthetic oligonucleotide
  Sense strand starting at position 182 of SEQ ID NO: 585678
agguuaucucaagaacgca

SEQ ID NO: 658871 - RNA, 19 nt, Artificial Sequence
  Description of Artificial Sequence: Synthetic oligonucleotide
  Antisense strand to SEQ ID NO: 658870
ugcguucuugagauaaccu

SEQ ID NO: 658872 - RNA, 19 nt, Artificial Sequence
  Description of Artificial Sequence: Synthetic oligonucleotide
  Sense strand starting at position 271 of SEQ ID NO: 585678
gaggucucugcuuagagga

SEQ ID NO: 658873 - RNA, 19 nt, Artificial Sequence
  Description of Artificial Sequence: Synthetic oligonucleotide
  Antisense strand to SEQ ID NO: 658872
uccucuaagcagagaccuc

SEQ ID NO: 658874 - RNA, 19 nt, Artificial Sequence
  Description of Artificial Sequence: Synthetic oligonucleotide
  Sense strand starting at position 374 of SEQ ID NO: 585678
ucggaaguccuccagucuu

SEQ ID NO: 658875 - RNA, 19 nt, Artificial Sequence
  Description of Artificial Sequence: Synthetic oligonucleotide
  Antisense strand to SEQ ID NO: 658874
aagacuggaggacuuccga

SEQ ID NO: 658876 - RNA, 19 nt, Artificial Sequence
  Description of Artificial Sequence: Synthetic oligonucleotide
  Sense strand starting at position 588 of SEQ ID NO: 585678
caagaauucccgcgagcca

SEQ ID NO: 658877 - RNA, 19 nt, Artificial Sequence
  Description of Artificial Sequence: Synthetic oligonucleotide
  Antisense strand to SEQ ID NO: 658876
uggcucgcgggaauucuug

SEQ ID NO: 658878 - RNA, 19 nt, Artificial Sequence
  Description of Artificial Sequence: Synthetic oligonucleotide
  Sense strand starting at position 843 of SEQ ID NO: 585678
gcaguuaacugcucccaga

SEQ ID NO: 658879 - RNA, 19 nt, Artificial Sequence
  Description of Artificial Sequence: Synthetic oligonucleotide
  Antisense strand to SEQ ID NO: 658878
ucugggagcaguuaacugc

SEQ ID NO: 658880 - RNA, 19 nt, Artificial Sequence
  Description of Artificial Sequence: Synthetic oligonucleotide
  Sense strand starting at position 969 of SEQ ID NO: 585678
ggaagugacucguccucag

SEQ ID NO: 658881 - RNA, 19 nt, Artificial Sequence
  Description of Artificial Sequence: Synthetic oligonucleotide
  Antisense strand to SEQ ID NO: 658880
cugaggacgagucacuucc

SEQ ID NO: 658882 - RNA, 19 nt, Artificial Sequence
  Description of Artificial Sequence: Synthetic oligonucleotide
  Sense strand starting at position 1170 of SEQ ID NO: 585678
agucgcaaucucgguugaa

SEQ ID NO: 658883 - RNA, 19 nt, Artificial Sequence
  Description of Artificial Sequence: Synthetic oligonucleotide
  Antisense strand to SEQ ID NO: 658882
uucaaccgagauugcgacu

SEQ ID NO: 658884 - RNA, 19 nt, Artificial Sequence
  Description of Artificial Sequence: Synthetic oligonucleotide
  Sense strand starting at position 1171 of SEQ ID NO: 585678
gucgcaaucucgguugaag

SEQ ID NO: 658885 - RNA, 19 nt, Artificial Sequence
  Description of Artificial Sequence: Synthetic oligonucleotide
  Antisense strand to SEQ ID NO: 658884
cuucaaccgagauugcgac

SEQ ID NO: 658886 - RNA, 19 nt, Artificial Sequence
  Description of Artificial Sequence: Synthetic oligonucleotide
  Sense strand starting at position 1173 of SEQ ID NO: 585678
cgcaaucucgguugaaguc

SEQ ID NO: 658887 - RNA, 19 nt, Artificial Sequence
  Description of Artificial Sequence: Synthetic oligonucleotide
  Antisense strand to SEQ ID NO: 658886
gacuucaaccgagauugcg

SEQ ID NO: 658888 - RNA, 19 nt, Artificial Sequence
  Description of Artificial Sequence: Synthetic oligonucleotide
  Sense strand starting at position 2518 of SEQ ID NO: 585678
gccguuccuaguuggaaga

SEQ ID NO: 658889 - RNA, 19 nt, Artificial Sequence
  Description of Artificial Sequence: Synthetic oligonucleotide
  Antisense strand to SEQ ID NO: 658888
ucuuccaacuaggaacggc

SEQ ID NO: 658890 - RNA, 19 nt, Artificial Sequence
  Description of Artificial Sequence: Synthetic oligonucleotide
  Sense strand starting at position 2542 of SEQ ID NO: 585678
aauagcacuuguuugagaa

SEQ ID NO: 658891 - RNA, 19 nt, Artificial Sequence
  Description of Artificial Sequence: Synthetic oligonucleotide
  Antisense strand to SEQ ID NO: 658890
uucucaaacaagugcuauu

SEQ ID NO: 658892 - RNA, 19 nt, Artificial Sequence
  Description of Artificial Sequence: Synthetic oligonucleotide
  Sense strand starting at position 2543 of SEQ ID NO: 585678
auagcacuuguuugagaau

SEQ ID NO: 658893 - RNA, 19 nt, Artificial Sequence
  Description of Artificial Sequence: Synthetic oligonucleotide
  Antisense strand to SEQ ID NO: 658892
auucucaaacaagugcuau

SEQ ID NO: 658894 - RNA, 19 nt, Artificial Sequence
  Description of Artificial Sequence: Synthetic oligonucleotide
  Sense strand starting at position 2552 of SEQ ID NO: 585678
guuugagaauuacaaguua

SEQ ID NO: 658895 - RNA, 19 nt, Artificial Sequence
  Description of Artificial Sequence: Synthetic oligonucleotide
  Antisense strand to SEQ ID NO: 658894
uaacuuguaauucucaaac

SEQ ID NO: 658896 - RNA, 19 nt, Artificial Sequence
  Description of Artificial Sequence: Synthetic oligonucleotide
  Sense strand starting at position 2560 of SEQ ID NO: 585678
auuacaaguuaguuccaga

SEQ ID NO: 658897 - RNA, 19 nt, Artificial Sequence
  Description of Artificial Sequence: Synthetic oligonucleotide
  Antisense strand to SEQ ID NO: 658896
ucuggaacuaacuuguaau

SEQ ID NO: 658898 - RNA, 19 nt, Artificial Sequence
  Description of Artificial Sequence: Synthetic oligonucleotide
  Sense strand starting at position 2574 of SEQ ID NO: 585678
ccagaaaugaaucgaguga

SEQ ID NO: 658899 - RNA, 19 nt, Artificial Sequence
  Description of Artificial Sequence: Synthetic oligonucleotide
  Antisense strand to SEQ ID NO: 658898
ucacucgauucauuucugg

SEQ ID NO: 658900 - RNA, 19 nt, Artificial Sequence
  Description of Artificial Sequence: Synthetic oligonucleotide
  Sense strand starting at position 2578 of SEQ ID NO: 585678
aaaugaaucgagugaccuc

SEQ ID NO: 658901 - RNA, 19 nt, Artificial Sequence
  Description of Artificial Sequence: Synthetic oligonucleotide
  Antisense strand to SEQ ID NO: 658900
gaggucacucgauucauuu

SEQ ID NO: 658902 - RNA, 19 nt, Artificial Sequence
  Description of Artificial Sequence: Synthetic oligonucleotide
  Sense strand starting at position 2698 of SEQ ID NO: 585678
ggaaauguuagaggcccaa

SEQ ID NO: 658903 - RNA, 19 nt, Artificial Sequence
  Description of Artificial Sequence: Synthetic oligonucleotide
  Antisense strand to SEQ ID NO: 658902
uugggccucuaacauuucc

SEQ ID NO: 658904 - RNA, 19 nt, Artificial Sequence
  Description of Artificial Sequence: Synthetic oligonucleotide
  Sense strand starting at position 2864 of SEQ ID NO: 585678
gugacuugcagauagcaua

SEQ ID NO: 658905 - RNA, 19 nt, Artificial Sequence
  Description of Artificial Sequence: Synthetic oligonucleotide
  Antisense strand to SEQ ID NO: 658904
uaugcuaucugcaagucac

SEQ ID NO: 658906 - RNA, 19 nt, Artificial Sequence
  Description of Artificial Sequence: Synthetic oligonucleotide
  Sense strand starting at position 2926 of SEQ ID NO: 585678
gauggagagugucaagaga

SEQ ID NO: 658907 - RNA, 19 nt, Artificial Sequence
  Description of Artificial Sequence: Synthetic oligonucleotide
  Antisense strand to SEQ ID NO: 658906
ucucuugacacucuccauc

SEQ ID NO: 658908 - RNA, 19 nt, Artificial Sequence
  Description of Artificial Sequence: Synthetic oligonucleotide
  Sense strand starting at position 2928 of SEQ ID NO: 585678
uggagagugucaagagaga

SEQ ID NO: 658909 - RNA, 19 nt, Artificial Sequence
  Description of Artificial Sequence: Synthetic oligonucleotide
  Antisense strand to SEQ ID NO: 658908
ucucucuugacacucucca

SEQ ID NO: 658910 - RNA, 19 nt, Artificial Sequence
  Description of Artificial Sequence: Synthetic oligonucleotide
  Sense strand starting at position 2950 of SEQ ID NO: 585678
uugcuuugucuaugauguu

SEQ ID NO: 658911 - RNA, 19 nt, Artificial Sequence
  Description of Artificial Sequence: Synthetic oligonucleotide
  Antisense strand to SEQ ID NO: 658910
aacaucauagacaaagcaa

SEQ ID NO: 658912 - RNA, 19 nt, Artificial Sequence
  Description of Artificial Sequence: Synthetic oligonucleotide
  Sense strand starting at position 3134 of SEQ ID NO: 585678
ggcuuacucuguuuguaac

SEQ ID NO: 658913 - RNA, 19 nt, Artificial Sequence
  Description of Artificial Sequence: Synthetic oligonucleotide
  Antisense strand to SEQ ID NO: 658912
guuacaaacagaguaagcc

SEQ ID NO: 658914 - RNA, 19 nt, Artificial Sequence
  Description of Artificial Sequence: Synthetic oligonucleotide
  Sense strand starting at position 3135 of SEQ ID NO: 585678
gcuuacucuguuuguaaca

SEQ ID NO: 658915 - RNA, 19 nt, Artificial Sequence
  Description of Artificial Sequence: Synthetic oligonucleotide
  Antisense strand to SEQ ID NO: 658914
uguuacaaacagaguaagc

SEQ ID NO: 658916 - RNA, 19 nt, Artificial Sequence
  Description of Artificial Sequence: Synthetic oligonucleotide
  Sense strand starting at position 3160 of SEQ ID NO: 585678
aguuaccuugcagguauaa

SEQ ID NO: 658917 - RNA, 19 nt, Artificial Sequence
  Description of Artificial Sequence: Synthetic oligonucleotide
  Antisense strand to SEQ ID NO: 658916
uuauaccugcaagguaacu

SEQ ID NO: 658918 - RNA, 19 nt, Artificial Sequence
  Description of Artificial Sequence: Synthetic oligonucleotide
  Sense strand starting at position 3169 of SEQ ID NO: 585678
gcagguauaacagagccaa

SEQ ID NO: 658919 - RNA, 19 nt, Artificial Sequence
  Description of Artificial Sequence: Synthetic oligonucleotide
  Antisense strand to SEQ ID NO: 658918
uuggcucuguuauaccugc

SEQ ID NO: 658920 - RNA, 19 nt, Artificial Sequence
  Description of Artificial Sequence: Synthetic oligonucleotide
  Sense strand starting at position 3259 of SEQ ID NO: 585678
aacuauucgucuccuugga

SEQ ID NO: 658921 - RNA, 19 nt, Artificial Sequence
  Description of Artificial Sequence: Synthetic oligonucleotide
  Antisense strand to SEQ ID NO: 658920
uccaaggagacgaauaguu

SEQ ID NO: 658922 - RNA, 19 nt, Artificial Sequence
  Description of Artificial Sequence: Synthetic oligonucleotide
  Sense strand starting at position 3263 of SEQ ID NO: 585678
auucgucuccuuggaacga

SEQ ID NO: 658923 - RNA, 19 nt, Artificial Sequence
  Description of Artificial Sequence: Synthetic oligonucleotide
  Antisense strand to SEQ ID NO: 658922
ucguuccaaggagacgaau

SEQ ID NO: 658924 - RNA, 19 nt, Artificial Sequence
  Description of Artificial Sequence: Synthetic oligonucleotide
  Sense strand starting at position 3334 of SEQ ID NO: 585678
ggucucuuggcccagaaga

SEQ ID NO: 658925 - RNA, 19 nt, Artificial Sequence
  Description of Artificial Sequence: Synthetic oligonucleotide
  Antisense strand to SEQ ID NO: 658924
ucuucugggccaagagacc

SEQ ID NO: 658926 - RNA, 19 nt, Artificial Sequence
  Description of Artificial Sequence: Synthetic oligonucleotide
  Sense strand starting at position 3336 of SEQ ID NO: 585678
ucucuuggcccagaagaua

SEQ ID NO: 658927 - RNA, 19 nt, Artificial Sequence
  Description of Artificial Sequence: Synthetic oligonucleotide
  Antisense strand to SEQ ID NO: 658926
uaucuucugggccaagaga

SEQ ID NO: 658928 - RNA, 19 nt, Artificial Sequence
  Description of Artificial Sequence: Synthetic oligonucleotide
  Sense strand starting at position 3454 of SEQ ID NO: 585678
gcccucugcuuccuuagaa

SEQ ID NO: 658929 - RNA, 19 nt, Artificial Sequence
  Description of Artificial Sequence: Synthetic oligonucleotide
  Antisense strand to SEQ ID NO: 658928
uucuaaggaagcagagggc

SEQ ID NO: 658930 - RNA, 19 nt, Artificial Sequence
  Description of Artificial Sequence: Synthetic oligonucleotide
  Sense strand starting at position 3564 of SEQ ID NO: 585678
aaggcaguaccaugguauu

SEQ ID NO: 658931 - RNA, 19 nt, Artificial Sequence
  Description of Artificial Sequence: Synthetic oligonucleotide
  Antisense strand to SEQ ID NO: 658930
aauaccaugguacugccuu

SEQ ID NO: 658932 - RNA, 19 nt, Artificial Sequence
  Description of Artificial Sequence: Synthetic oligonucleotide
  Sense strand starting at position 3575 of SEQ ID NO: 585678
augguauugcuuccgugua

SEQ ID NO: 658933 - RNA, 19 nt, Artificial Sequence
  Description of Artificial Sequence: Synthetic oligonucleotide
  Antisense strand to SEQ ID NO: 658932
uacacggaagcaauaccau

SEQ ID NO: 658934 - RNA, 19 nt, Artificial Sequence
  Description of Artificial Sequence: Synthetic oligonucleotide
  Sense strand starting at position 3655 of SEQ ID NO: 585678
ucacacuucggcuguaaca

SEQ ID NO: 658935 - RNA, 19 nt, Artificial Sequence
  Description of Artificial Sequence: Synthetic oligonucleotide
  Antisense strand to SEQ ID NO: 658934
uguuacagccgaaguguga

SEQ ID NO: 658936 - RNA, 19 nt, Artificial Sequence
  Description of Artificial Sequence: Synthetic oligonucleotide
  Sense strand starting at position 3692 of SEQ ID NO: 585678
gggcguaugcuguaaguga

SEQ ID NO: 658937 - RNA, 19 nt, Artificial Sequence
  Description of Artificial Sequence: Synthetic oligonucleotide
  Antisense strand to SEQ ID NO: 658936
ucacuuacagcauacgccc

SEQ ID NO: 658938 - RNA, 19 nt, Artificial Sequence
  Description of Artificial Sequence: Synthetic oligonucleotide
  Sense strand starting at position 3696 of SEQ ID NO: 585678
guaugcuguaagugacuuu

SEQ ID NO: 658939 - RNA, 19 nt, Artificial Sequence
  Description of Artificial Sequence: Synthetic oligonucleotide
  Antisense strand to SEQ ID NO: 658938
aaagucacuuacagcauac

SEQ ID NO: 658940 - RNA, 19 nt, Artificial Sequence
  Description of Artificial Sequence: Synthetic oligonucleotide
  Sense strand starting at position 3699 of SEQ ID NO: 585678
ugcuguaagugacuuugua

SEQ ID NO: 658941 - RNA, 19 nt, Artificial Sequence
  Description of Artificial Sequence: Synthetic oligonucleotide
  Antisense strand to SEQ ID NO: 658940
uacaaagucacuuacagca

SEQ ID NO: 658942 - RNA, 19 nt, Artificial Sequence
  Description of Artificial Sequence: Synthetic oligonucleotide
  Sense strand starting at position 3844 of SEQ ID NO: 585678
cacacuguggaauguaauu

SEQ ID NO: 658943 - RNA, 19 nt, Artificial Sequence
  Description of Artificial Sequence: Synthetic oligonucleotide
  Antisense strand to SEQ ID NO: 658942
aauuacauuccacagugug

SEQ ID NO: 658944 - RNA, 19 nt, Artificial Sequence
  Description of Artificial Sequence: Synthetic oligonucleotide
  Sense strand starting at position 3849 of SEQ ID NO: 585678
uguggaauguaauuucguu

SEQ ID NO: 658945 - RNA, 19 nt, Artificial Sequence
  Description of Artificial Sequence: Synthetic oligonucleotide
  Antisense strand to SEQ ID NO: 658944
aacgaaauuacauuccaca

SEQ ID NO: 658946 - RNA, 19 nt, Artificial Sequence
  Description of Artificial Sequence: Synthetic oligonucleotide
  Sense strand starting at position 28 of SEQ ID NO: 585679
auaauaagacucgguaguu

SEQ ID NO: 658947 - RNA, 19 nt, Artificial Sequence
  Description of Artificial Sequence: Synthetic oligonucleotide
  Antisense strand to SEQ ID NO: 658946
aacuaccgagucuuauuau

SEQ ID NO: 658948 - RNA, 19 nt, Artificial Sequence
  Description of Artificial Sequence: Synthetic oligonucleotide
  Sense strand starting at position 29 of SEQ ID NO: 585679
uaauaagacucgguaguua

SEQ ID NO: 658949 - RNA, 19 nt, Artificial Sequence
  Description of Artificial Sequence: Synthetic oligonucleotide
  Antisense strand to SEQ ID NO: 658948
uaacuaccgagucuuauua

SEQ ID NO: 658950 - RNA, 19 nt, Artificial Sequence
  Description of Artificial Sequence: Synthetic oligonucleotide
  Sense strand starting at position 40 of SEQ ID NO: 585679
gguaguuagccugauucuc

SEQ ID NO: 658951 - RNA, 19 nt, Artificial Sequence
  Description of Artificial Sequence: Synthetic oligonucleotide
  Antisense strand to SEQ ID NO: 658950
gagaaucaggcuaacuacc

SEQ ID NO: 658952 - RNA, 19 nt, Artificial Sequence
  Description of Artificial Sequence: Synthetic oligonucleotide
  Sense strand starting at position 352 of SEQ ID NO: 585679
gcuguaacacuguacuuua

SEQ ID NO: 658953 - RNA, 19 nt, Artificial Sequence
  Description of Artificial Sequence: Synthetic oligonucleotide
  Antisense strand to SEQ ID NO: 658952
uaaaguacaguguuacagc

SEQ ID NO: 658954 - RNA, 19 nt, Artificial Sequence
  Description of Artificial Sequence: Synthetic oligonucleotide
  Sense strand starting at position 355 of SEQ ID NO: 585679
guaacacuguacuuuauaa

SEQ ID NO: 658955 - RNA, 19 nt, Artificial Sequence
  Description of Artificial Sequence: Synthetic oligonucleotide
  Antisense strand to SEQ ID NO: 658954
uuauaaaguacaguguuac

SEQ ID NO: 658956 - RNA, 19 nt, Artificial Sequence
  Description of Artificial Sequence: Synthetic oligonucleotide
  Sense strand starting at position 412 of SEQ ID NO: 585679
gcugcuacuguuguaaagu

SEQ ID NO: 658957 - RNA, 19 nt, Artificial Sequence
  Description of Artificial Sequence: Synthetic oligonucleotide
  Antisense strand to SEQ ID NO: 658956
acuuuacaacaguagcagc

SEQ ID NO: 658958 - RNA, 19 nt, Artificial Sequence
  Description of Artificial Sequence: Synthetic oligonucleotide
  Sense strand starting at position 427 of SEQ ID NO: 585679
aaguuuggagccuauaacu

SEQ ID NO: 658959 - RNA, 19 nt, Artificial Sequence
  Description of Artificial Sequence: Synthetic oligonucleotide
  Antisense strand to SEQ ID NO: 658958
aguuauaggcuccaaacuu

SEQ ID NO: 658960 - RNA, 19 nt, Artificial Sequence
  Description of Artificial Sequence: Synthetic oligonucleotide
  Sense strand starting at position 557 of SEQ ID NO: 585679
ccuggugacuaguucagga

SEQ ID NO: 658961 - RNA, 19 nt, Artificial Sequence
  Description of Artificial Sequence: Synthetic oligonucleotide
  Antisense strand to SEQ ID NO: 658960
uccugaacuagucaccagg

SEQ ID NO: 658962 - RNA, 19 nt, Artificial Sequence
  Description of Artificial Sequence: Synthetic oligonucleotide
  Sense strand starting at position 577 of SEQ ID NO: 585679
agugaaacgucagcagaag

SEQ ID NO: 658963 - RNA, 19 nt, Artificial Sequence
  Description of Artificial Sequence: Synthetic oligonucleotide
  Antisense strand to SEQ ID NO: 658962
cuucugcugacguuucacu

SEQ ID NO: 658964 - RNA, 19 nt, Artificial Sequence
  Description of Artificial Sequence: Synthetic oligonucleotide
  Sense strand starting at position 578 of SEQ ID NO: 585679
gugaaacgucagcagaagu

SEQ ID NO: 658965 - RNA, 19 nt, Artificial Sequence
  Description of Artificial Sequence: Synthetic oligonucleotide
  Antisense strand to SEQ ID NO: 658964
acuucugcugacguuucac

SEQ ID NO: 658966 - RNA, 19 nt, Artificial Sequence
  Description of Artificial Sequence: Synthetic oligonucleotide
  Sense strand starting at position 775 of SEQ ID NO: 585679
cuaguccauguugagauaa

SEQ ID NO: 658967 - RNA, 19 nt, Artificial Sequence
  Description of Artificial Sequence: Synthetic oligonucleotide
  Antisense strand to SEQ ID NO: 658966
uuaucucaacauggacuag

SEQ ID NO: 658968 - RNA, 19 nt, Artificial Sequence
  Description of Artificial Sequence: Synthetic oligonucleotide
  Sense strand starting at position 946 of SEQ ID NO: 585679
cuauacaaguauccguuaa

SEQ ID NO: 658969 - RNA, 19 nt, Artificial Sequence
  Description of Artificial Sequence: Synthetic oligonucleotide
  Antisense strand to SEQ ID NO: 658968
uuaacggauacuuguauag

SEQ ID NO: 658970 - RNA, 19 nt, Artificial Sequence
  Description of Artificial Sequence: Synthetic oligonucleotide
  Sense strand starting at position 1594 of SEQ ID NO: 585679
cuugcuuccgguugauuua

SEQ ID NO: 658971 - RNA, 19 nt, Artificial Sequence
  Description of Artificial Sequence: Synthetic oligonucleotide
  Antisense strand to SEQ ID NO: 658970
uaaaucaaccggaagcaag

SEQ ID NO: 658972 - RNA, 19 nt, Artificial Sequence
  Description of Artificial Sequence: Synthetic oligonucleotide
  Sense strand starting at position 1619 of SEQ ID NO: 585679
guaauacaccuuuguaaua

SEQ ID NO: 658973 - RNA, 19 nt, Artificial Sequence
  Description of Artificial Sequence: Synthetic oligonucleotide
  Antisense strand to SEQ ID NO: 658972
uauuacaaagguguauuac

SEQ ID NO: 658974 - RNA, 19 nt, Artificial Sequence
  Description of Artificial Sequence: Synthetic oligonucleotide
  Sense strand starting at position 1705 of SEQ ID NO: 585679
aauguauauccaggguagu

SEQ ID NO: 658975 - RNA, 19 nt, Artificial Sequence
  Description of Artificial Sequence: Synthetic oligonucleotide
  Antisense strand to SEQ ID NO: 658974
acuacccuggauauacauu

SEQ ID NO: 658976 - RNA, 19 nt, Artificial Sequence
  Description of Artificial Sequence: Synthetic oligonucleotide
  Sense strand starting at position 1799 of SEQ ID NO: 585679
agaucaggguuccacauuu

SEQ ID NO: 658977 - RNA, 19 nt, Artificial Sequence
  Description of Artificial Sequence: Synthetic oligonucleotide
  Antisense strand to SEQ ID NO: 658976
aaauguggaacccugaucu

SEQ ID NO: 658978 - RNA, 19 nt, Artificial Sequence
  Description of Artificial Sequence: Synthetic oligonucleotide
  Sense strand starting at position 2240 of SEQ ID NO: 585679
acgguuucgggcgcgaaga

SEQ ID NO: 658979 - RNA, 19 nt, Artificial Sequence
  Description of Artificial Sequence: Synthetic oligonucleotide
  Antisense strand to SEQ ID NO: 658978
ucuucgcgcccgaaaccgu

SEQ ID NO: 658980 - RNA, 19 nt, Artificial Sequence
  Description of Artificial Sequence: Synthetic oligonucleotide
  Sense strand starting at position 2491 of SEQ ID NO: 585679
gcugaaguguaacuugacu

SEQ ID NO: 658981 - RNA, 19 nt, Artificial Sequence
  Description of Artificial Sequence: Synthetic oligonucleotide
  Antisense strand to SEQ ID NO: 658980
agucaaguuacacuucagc

SEQ ID NO: 658982 - RNA, 19 nt, Artificial Sequence
  Description of Artificial Sequence: Synthetic oligonucleotide
  Sense strand starting at position 2561 of SEQ ID NO: 585679
ggcgagaaccuggaguguu

SEQ ID NO: 658983 - RNA, 19 nt, Artificial Sequence
  Description of Artificial Sequence: Synthetic oligonucleotide
  Antisense strand to SEQ ID NO: 658982
aacacuccagguucucgcc

SEQ ID NO: 658984 - RNA, 19 nt, Artificial Sequence
  Description of Artificial Sequence: Synthetic oligonucleotide
  Sense strand starting at position 2571 of SEQ ID NO: 585679
uggaguguugacuggcaaa

SEQ ID NO: 658985 - RNA, 19 nt, Artificial Sequence
  Description of Artificial Sequence: Synthetic oligonucleotide
  Antisense strand to SEQ ID NO: 658984
uuugccagucaacacucca

SEQ ID NO: 658986 - RNA, 19 nt, Artificial Sequence
  Description of Artificial Sequence: Synthetic oligonucleotide
  Sense strand starting at position 2855 of SEQ ID NO: 585679
ccaguucugcacuaugaga

SEQ ID NO: 658987 - RNA, 19 nt, Artificial Sequence
  Description of Artificial Sequence: Synthetic oligonucleotide
  Antisense strand to SEQ ID NO: 658986
ucucauagugcagaacugg

SEQ ID NO: 658988 - RNA, 19 nt, Artificial Sequence
  Description of Artificial Sequence: Synthetic oligonucleotide
  Sense strand starting at position 2857 of SEQ ID NO: 585679
aguucugcacuaugagaaa

SEQ ID NO: 658989 - RNA, 19 nt, Artificial Sequence
  Description of Artificial Sequence: Synthetic oligonucleotide
  Antisense strand to SEQ ID NO: 658988
uuucucauagugcagaacu

SEQ ID NO: 658990 - RNA, 19 nt, Artificial Sequence
  Description of Artificial Sequence: Synthetic oligonucleotide
  Sense strand starting at position 2892 of SEQ ID NO: 585679
guuugugauucuuucugaa

SEQ ID NO: 658991 - RNA, 19 nt, Artificial Sequence
  Description of Artificial Sequence: Synthetic oligonucleotide
  Antisense strand to SEQ ID NO: 658990
uucagaaagaaucacaaac

SEQ ID NO: 658992 - RNA, 19 nt, Artificial Sequence
  Description of Artificial Sequence: Synthetic oligonucleotide
  Sense strand starting at position 2979 of SEQ ID NO: 585679
cugugaaggaacuguuuaa

SEQ ID NO: 658993 - RNA, 19 nt, Artificial Sequence
  Description of Artificial Sequence: Synthetic oligonucleotide
  Antisense strand to SEQ ID NO: 658992
uuaaacaguuccuucacag

SEQ ID NO: 658994 - RNA, 19 nt, Artificial Sequence
  Description of Artificial Sequence: Synthetic oligonucleotide
  Sense strand starting at position 2992 of SEQ ID NO: 585679
guuuaaccagcuuaugaaa

SEQ ID NO: 658995 - RNA, 19 nt, Artificial Sequence
  Description of Artificial Sequence: Synthetic oligonucleotide
  Antisense strand to SEQ ID NO: 658994
uuucauaagcugguuaaac

SEQ ID NO: 658996 - RNA, 19 nt, Artificial Sequence
  Description of Artificial Sequence: Synthetic oligonucleotide
  Sense strand starting at position 3108 of SEQ ID NO: 585679
gucggaugugaugaaucca

SEQ ID NO: 658997 - RNA, 19 nt, Artificial Sequence
  Description of Artificial Sequence: Synthetic oligonucleotide
  Antisense strand to SEQ ID NO: 658996
uggauucaucacauccgac

SEQ ID NO: 658998 - RNA, 19 nt, Artificial Sequence
  Description of Artificial Sequence: Synthetic oligonucleotide
  Sense strand starting at position 3191 of SEQ ID NO: 585679
acagaagauuguuccuuag

SEQ ID NO: 658999 - RNA, 19 nt, Artificial Sequence
  Description of Artificial Sequence: Synthetic oligonucleotide
  Antisense strand to SEQ ID NO: 658998
cuaaggaacaaucuucugu

SEQ ID NO: 659000 - RNA, 19 nt, Artificial Sequence
  Description of Artificial Sequence: Synthetic oligonucleotide
  Sense strand starting at position 3193 of SEQ ID NO: 585679
agaagauuguuccuuagua

SEQ ID NO: 659001 - RNA, 19 nt, Artificial Sequence
  Description of Artificial Sequence: Synthetic oligonucleotide
  Antisense strand to SEQ ID NO: 659000
uacuaaggaacaaucuucu

SEQ ID NO: 659002 - RNA, 19 nt, Artificial Sequence
  Description of Artificial Sequence: Synthetic oligonucleotide
  Sense strand starting at position 3194 of SEQ ID NO: 585679
gaagauuguuccuuaguaa

SEQ ID NO: 659003 - RNA, 19 nt, Artificial Sequence
  Description of Artificial Sequence: Synthetic oligonucleotide
  Antisense strand to SEQ ID NO: 659002
uuacuaaggaacaaucuuc

SEQ ID NO: 659004 - RNA, 19 nt, Artificial Sequence
  Description of Artificial Sequence: Synthetic oligonucleotide
  Sense strand starting at position 3207 of SEQ ID NO: 585679
uaguaauaagguugcagua

SEQ ID NO: 659005 - RNA, 19 nt, Artificial Sequence
  Description of Artificial Sequence: Synthetic oligonucleotide
  Antisense strand to SEQ ID NO: 659004
uacugcaaccuuauuacua

SEQ ID NO: 659006 - RNA, 19 nt, Artificial Sequence
  Description of Artificial Sequence: Synthetic oligonucleotide
  Sense strand starting at position 3270 of SEQ ID NO: 585679
ggucccugagucugggauu

SEQ ID NO: 659007 - RNA, 19 nt, Artificial Sequence
  Description of Artificial Sequence: Synthetic oligonucleotide
  Antisense strand to SEQ ID NO: 659006
aaucccagacucagggacc

SEQ ID NO: 659008 - RNA, 19 nt, Artificial Sequence
  Description of Artificial Sequence: Synthetic oligonucleotide
  Sense strand starting at position 3273 of SEQ ID NO: 585679
cccugagucugggauuuaa

SEQ ID NO: 659009 - RNA, 19 nt, Artificial Sequence
  Description of Artificial Sequence: Synthetic oligonucleotide
  Antisense strand to SEQ ID NO: 659008
uuaaaucccagacucaggg

SEQ ID NO: 659010 - RNA, 19 nt, Artificial Sequence
  Description of Artificial Sequence: Synthetic oligonucleotide
  Sense strand starting at position 3307 of SEQ ID NO: 585679
cuuggucuguuacugauga

SEQ ID NO: 659011 - RNA, 19 nt, Artificial Sequence
  Description of Artificial Sequence: Synthetic oligonucleotide
  Antisense strand to SEQ ID NO: 659010
ucaucaguaacagaccaag

SEQ ID NO: 659012 - RNA, 19 nt, Artificial Sequence
  Description of Artificial Sequence: Synthetic oligonucleotide
  Sense strand starting at position 3309 of SEQ ID NO: 585679
uggucuguuacugaugauc

SEQ ID NO: 659013 - RNA, 19 nt, Artificial Sequence
  Description of Artificial Sequence: Synthetic oligonucleotide
  Antisense strand to SEQ ID NO: 659012
gaucaucaguaacagacca

SEQ ID NO: 659014 - RNA, 19 nt, Artificial Sequence
  Description of Artificial Sequence: Synthetic oligonucleotide
  Sense strand starting at position 3700 of SEQ ID NO: 585679
cauggccuugacugucaua

SEQ ID NO: 659015 - RNA, 19 nt, Artificial Sequence
  Description of Artificial Sequence: Synthetic oligonucleotide
  Antisense strand to SEQ ID NO: 659014
uaugacagucaaggccaug

SEQ ID NO: 659016 - RNA, 19 nt, Artificial Sequence
  Description of Artificial Sequence: Synthetic oligonucleotide
  Sense strand starting at position 3710 of SEQ ID NO: 585679
acugucauauuaucuggua

SEQ ID NO: 659017 - RNA, 19 nt, Artificial Sequence
  Description of Artificial Sequence: Synthetic oligonucleotide
  Antisense strand to SEQ ID NO: 659016
uaccagauaauaugacagu

SEQ ID NO: 659018 - RNA, 19 nt, Artificial Sequence
  Description of Artificial Sequence: Synthetic oligonucleotide
  Sense strand starting at position 3711 of SEQ ID NO: 585679
cugucauauuaucugguau

SEQ ID NO: 659019 - RNA, 19 nt, Artificial Sequence
  Description of Artificial Sequence: Synthetic oligonucleotide
  Antisense strand to SEQ ID NO: 659018
auaccagauaauaugacag

SEQ ID NO: 659020 - RNA, 19 nt, Artificial Sequence
  Description of Artificial Sequence: Synthetic oligonucleotide
  Sense strand starting at position 3787 of SEQ ID NO: 585679
aucaaauaccugcguaaug

SEQ ID NO: 659021 - RNA, 19 nt, Artificial Sequence
  Description of Artificial Sequence: Synthetic oligonucleotide
  Antisense strand to SEQ ID NO: 659020
cauuacgcagguauuugau

SEQ ID NO: 659022 - RNA, 19 nt, Artificial Sequence
  Description of Artificial Sequence: Synthetic oligonucleotide
  Sense strand starting at position 3961 of SEQ ID NO: 585679
auuuguuccuuccuguuau

SEQ ID NO: 659023 - RNA, 19 nt, Artificial Sequence
  Description of Artificial Sequence: Synthetic oligonucleotide
  Antisense strand to SEQ ID NO: 659022
auaacaggaaggaacaaau

SEQ ID NO: 659024 - RNA, 19 nt, Artificial Sequence
  Description of Artificial Sequence: Synthetic oligonucleotide
  Sense strand starting at position 3972 of SEQ ID NO: 585679
ccuguuaugccagaaauac

SEQ ID NO: 659025 - RNA, 19 nt, Artificial Sequence
  Description of Artificial Sequence: Synthetic oligonucleotide
  Antisense strand to SEQ ID NO: 659024
guauuucuggcauaacagg

SEQ ID NO: 659026 - RNA, 19 nt, Artificial Sequence
  Description of Artificial Sequence: Synthetic oligonucleotide
  Sense strand starting at position 322 of SEQ ID NO: 585680
cagguacugcuaugagaac

SEQ ID NO: 659027 - RNA, 19 nt, Artificial Sequence
  Description of Artificial Sequence: Synthetic oligonucleotide
  Antisense strand to SEQ ID NO: 659026
guucucauagcaguaccug

SEQ ID NO: 659028 - RNA, 19 nt, Artificial Sequence
  Description of Artificial Sequence: Synthetic oligonucleotide
  Sense strand starting at position 353 of SEQ ID NO: 585680
uuccaaaguuggucaacau

SEQ ID NO: 659029 - RNA, 19 nt, Artificial Sequence
  Description of Artificial Sequence: Synthetic oligonucleotide
  Antisense strand to SEQ ID NO: 659028
auguugaccaacuuuggaa

SEQ ID NO: 659030 - RNA, 19 nt, Artificial Sequence
  Description of Artificial Sequence: Synthetic oligonucleotide
  Sense strand starting at position 354 of SEQ ID NO: 585680
uccaaaguuggucaacauu

SEQ ID NO: 659031 - RNA, 19 nt, Artificial Sequence
  Description of Artificial Sequence: Synthetic oligonucleotide
  Antisense strand to SEQ ID NO: 659030
aauguugaccaacuuugga

SEQ ID NO: 659032 - RNA, 19 nt, Artificial Sequence
  Description of Artificial Sequence: Synthetic oligonucleotide
  Sense strand starting at position 360 of SEQ ID NO: 585680
guuggucaacauuaaucuu

SEQ ID NO: 659033 - RNA, 19 nt, Artificial Sequence
  Description of Artificial Sequence: Synthetic oligonucleotide
  Antisense strand to SEQ ID NO: 659032
aagauuaauguugaccaac

SEQ ID NO: 659034 - RNA, 19 nt, Artificial Sequence
  Description of Artificial Sequence: Synthetic oligonucleotide
  Sense strand starting at position 419 of SEQ ID NO: 585680
uuggaaacuuuggcucaau

SEQ ID NO: 659035 - RNA, 19 nt, Artificial Sequence
  Description of Artificial Sequence: Synthetic oligonucleotide
  Antisense strand to SEQ ID NO: 659034
auugagccaaaguuuccaa

SEQ ID NO: 659036 - RNA, 19 nt, Artificial Sequence
  Description of Artificial Sequence: Synthetic oligonucleotide
  Sense strand starting at position 420 of SEQ ID NO: 585680
uggaaacuuuggcucaauu

SEQ ID NO: 659037 - RNA, 19 nt, Artificial Sequence
  Description of Artificial Sequence: Synthetic oligonucleotide
  Antisense strand to SEQ ID NO: 659036
aauugagccaaaguuucca

SEQ ID NO: 659038 - RNA, 19 nt, Artificial Sequence
  Description of Artificial Sequence: Synthetic oligonucleotide
  Sense strand starting at position 462 of SEQ ID NO: 585680
ucgaaacccuguccuacaa

SEQ ID NO: 659039 - RNA, 19 nt, Artificial Sequence
  Description of Artificial Sequence: Synthetic oligonucleotide
  Antisense strand to SEQ ID NO: 659038
uuguaggacaggguuucga

SEQ ID NO: 659040 - RNA, 19 nt, Artificial Sequence
  Description of Artificial Sequence: Synthetic oligonucleotide
  Sense strand starting at position 546 of SEQ ID NO: 585680
cgaucugucaucgcguuau

SEQ ID NO: 659041 - RNA, 19 nt, Artificial Sequence
  Description of Artificial Sequence: Synthetic oligonucleotide
  Antisense strand to SEQ ID NO: 659040
auaacgcgaugacagaucg

SEQ ID NO: 659042 - RNA, 19 nt, Artificial Sequence
  Description of Artificial Sequence: Synthetic oligonucleotide
  Sense strand starting at position 694 of SEQ ID NO: 585680
agcauaauuucggucuccu

SEQ ID NO: 659043 - RNA, 19 nt, Artificial Sequence
  Description of Artificial Sequence: Synthetic oligonucleotide
  Antisense strand to SEQ ID NO: 659042
aggagaccgaaauuaugcu

SEQ ID NO: 659044 - RNA, 19 nt, Artificial Sequence
  Description of Artificial Sequence: Synthetic oligonucleotide
  Sense strand starting at position 702 of SEQ ID NO: 585680
uucggucuccuacggaauu

SEQ ID NO: 659045 - RNA, 19 nt, Artificial Sequence
  Description of Artificial Sequence: Synthetic oligonucleotide
  Antisense strand to SEQ ID NO: 659044
aauuccguaggagaccgaa

SEQ ID NO: 659046 - RNA, 19 nt, Artificial Sequence
  Description of Artificial Sequence: Synthetic oligonucleotide
  Sense strand starting at position 797 of SEQ ID NO: 585680
cgcuuuaguccucacggga

SEQ ID NO: 659047 - RNA, 19 nt, Artificial Sequence
  Description of Artificial Sequence: Synthetic oligonucleotide
  Antisense strand to SEQ ID NO: 659046
ucccgugaggacuaaagcg

SEQ ID NO: 659048 - RNA, 19 nt, Artificial Sequence
  Description of Artificial Sequence: Synthetic oligonucleotide
  Sense strand starting at position 995 of SEQ ID NO: 585680
cggaaaugugaccgccgaa

SEQ ID NO: 659049 - RNA, 19 nt, Artificial Sequence
  Description of Artificial Sequence: Synthetic oligonucleotide
  Antisense strand to SEQ ID NO: 659048
uucggcggucacauuuccg

SEQ ID NO: 659050 - RNA, 19 nt, Artificial Sequence
  Description of Artificial Sequence: Synthetic oligonucleotide
  Sense strand starting at position 2862 of SEQ ID NO: 585680
aggauaagaguuugaggcu

SEQ ID NO: 659051 - RNA, 19 nt, Artificial Sequence
  Description of Artificial Sequence: Synthetic oligonucleotide
  Antisense strand to SEQ ID NO: 659050
agccucaaacucuuauccu

SEQ ID NO: 659052 - RNA, 19 nt, Artificial Sequence
  Description of Artificial Sequence: Synthetic oligonucleotide
  Sense strand starting at position 3008 of SEQ ID NO: 585680
cuucuuucgguguucguga

SEQ ID NO: 659053 - RNA, 19 nt, Artificial Sequence
  Description of Artificial Sequence: Synthetic oligonucleotide
  Antisense strand to SEQ ID NO: 659052
ucacgaacaccgaaagaag

SEQ ID NO: 659054 - RNA, 19 nt, Artificial Sequence
  Description of Artificial Sequence: Synthetic oligonucleotide
  Sense strand starting at position 3186 of SEQ ID NO: 585680
ccuucccguuauucugaaa

SEQ ID NO: 659055 - RNA, 19 nt, Artificial Sequence
  Description of Artificial Sequence: Synthetic oligonucleotide
  Antisense strand to SEQ ID NO: 659054
uuucagaauaacgggaagg

SEQ ID NO: 659056 - RNA, 19 nt, Artificial Sequence
  Description of Artificial Sequence: Synthetic oligonucleotide
  Sense strand starting at position 3254 of SEQ ID NO: 585680
agcgucagucgugcucgaa

SEQ ID NO: 659057 - RNA, 19 nt, Artificial Sequence
  Description of Artificial Sequence: Synthetic oligonucleotide
  Antisense strand to SEQ ID NO: 659056
uucgagcacgacugacgcu

SEQ ID NO: 659058 - RNA, 19 nt, Artificial Sequence
  Description of Artificial Sequence: Synthetic oligonucleotide
  Sense strand starting at position 3255 of SEQ ID NO: 585680
gcgucagucgugcucgaaa

SEQ ID NO: 659059 - RNA, 19 nt, Artificial Sequence
  Description of Artificial Sequence: Synthetic oligonucleotide
  Antisense strand to SEQ ID NO: 659058
uuucgagcacgacugacgc

SEQ ID NO: 659060 - RNA, 19 nt, Artificial Sequence
  Description of Artificial Sequence: Synthetic oligonucleotide
  Sense strand starting at position 3402 of SEQ ID NO: 585680
agaggucuuucucugcagu

SEQ ID NO: 659061 - RNA, 19 nt, Artificial Sequence
  Description of Artificial Sequence: Synthetic oligonucleotide
  Antisense strand to SEQ ID NO: 659060
acugcagagaaagaccucu

SEQ ID NO: 659062 - RNA, 19 nt, Artificial Sequence
  Description of Artificial Sequence: Synthetic oligonucleotide
  Sense strand starting at position 3438 of SEQ ID NO: 585680
uuuagacuuguuuggaaga

SEQ ID NO: 659063 - RNA, 19 nt, Artificial Sequence
  Description of Artificial Sequence: Synthetic oligonucleotide
  Antisense strand to SEQ ID NO: 659062
ucuuccaaacaagucuaaa

SEQ ID NO: 659064 - RNA, 19 nt, Artificial Sequence
  Description of Artificial Sequence: Synthetic oligonucleotide
  Sense strand starting at position 3476 of SEQ ID NO: 585680
ugaaguccuugaucuauag

SEQ ID NO: 659065 - RNA, 19 nt, Artificial Sequence
  Description of Artificial Sequence: Synthetic oligonucleotide
  Antisense strand to SEQ ID NO: 659064
cuauagaucaaggacuuca

SEQ ID NO: 659066 - RNA, 19 nt, Artificial Sequence
  Description of Artificial Sequence: Synthetic oligonucleotide
  Sense strand starting at position 3480 of SEQ ID NO: 585680
guccuugaucuauagaagu

SEQ ID NO: 659067 - RNA, 19 nt, Artificial Sequence
  Description of Artificial Sequence: Synthetic oligonucleotide
  Antisense strand to SEQ ID NO: 659066
acuucuauagaucaaggac

SEQ ID NO: 659068 - RNA, 19 nt, Artificial Sequence
  Description of Artificial Sequence: Synthetic oligonucleotide
  Sense strand starting at position 3497 of SEQ ID NO: 585680
gucggcagucccuaaaucu

SEQ ID NO: 659069 - RNA, 19 nt, Artificial Sequence
  Description of Artificial Sequence: Synthetic oligonucleotide
  Antisense strand to SEQ ID NO: 659068
agauuuagggacugccgac

SEQ ID NO: 659070 - RNA, 19 nt, Artificial Sequence
  Description of Artificial Sequence: Synthetic oligonucleotide
  Sense strand starting at position 3566 of SEQ ID NO: 585680
agaguuauuuaauauccag

SEQ ID NO: 659071 - RNA, 19 nt, Artificial Sequence
  Description of Artificial Sequence: Synthetic oligonucleotide
  Antisense strand to SEQ ID NO: 659070
cuggauauuaaauaacucu

SEQ ID NO: 659072 - RNA, 19 nt, Artificial Sequence
  Description of Artificial Sequence: Synthetic oligonucleotide
  Sense strand starting at position 3581 of SEQ ID NO: 585680
ccaguuggccaucgugaga

SEQ ID NO: 659073 - RNA, 19 nt, Artificial Sequence
  Description of Artificial Sequence: Synthetic oligonucleotide
  Antisense strand to SEQ ID NO: 659072
ucucacgauggccaacugg

SEQ ID NO: 659074 - RNA, 19 nt, Artificial Sequence
  Description of Artificial Sequence: Synthetic oligonucleotide
  Sense strand starting at position 3584 of SEQ ID NO: 585680
guuggccaucgugagagua

SEQ ID NO: 659075 - RNA, 19 nt, Artificial Sequence
  Description of Artificial Sequence: Synthetic oligonucleotide
  Antisense strand to SEQ ID NO: 659074
uacucucacgauggccaac

SEQ ID NO: 659076 - RNA, 19 nt, Artificial Sequence
  Description of Artificial Sequence: Synthetic oligonucleotide
  Sense strand starting at position 3601 of SEQ ID NO: 585680
uaauucgcggcugagauuu

SEQ ID NO: 659077 - RNA, 19 nt, Artificial Sequence
  Description of Artificial Sequence: Synthetic oligonucleotide
  Antisense strand to SEQ ID NO: 659076
aaaucucagccgcgaauua

SEQ ID NO: 659078 - RNA, 19 nt, Artificial Sequence
  Description of Artificial Sequence: Synthetic oligonucleotide
  Sense strand starting at position 3625 of SEQ ID NO: 585680
aucauucugucuucugacu

SEQ ID NO: 659079 - RNA, 19 nt, Artificial Sequence
  Description of Artificial Sequence: Synthetic oligonucleotide
  Antisense strand to SEQ ID NO: 659078
agucagaagacagaaugau

SEQ ID NO: 659080 - RNA, 19 nt, Artificial Sequence
  Description of Artificial Sequence: Synthetic oligonucleotide
  Sense strand starting at position 3638 of SEQ ID NO: 585680
cugacuuaacagugaacgu

SEQ ID NO: 659081 - RNA, 19 nt, Artificial Sequence
  Description of Artificial Sequence: Synthetic oligonucleotide
  Antisense strand to SEQ ID NO: 659080
acguucacuguuaagucag

SEQ ID NO: 659082 - RNA, 19 nt, Artificial Sequence
  Description of Artificial Sequence: Synthetic oligonucleotide
  Sense strand starting at position 3639 of SEQ ID NO: 585680
ugacuuaacagugaacgua

SEQ ID NO: 659083 - RNA, 19 nt, Artificial Sequence
  Description of Artificial Sequence: Synthetic oligonucleotide
  Antisense strand to SEQ ID NO: 659082
uacguucacuguuaaguca

SEQ ID NO: 659084 - RNA, 19 nt, Artificial Sequence
  Description of Artificial Sequence: Synthetic oligonucleotide
  Sense strand starting at position 3647 of SEQ ID NO: 585680
cagugaacguaggugauuu

SEQ ID NO: 659085 - RNA, 19 nt, Artificial Sequence
  Description of Artificial Sequence: Synthetic oligonucleotide
  Antisense strand to SEQ ID NO: 659084
aaaucaccuacguucacug

SEQ ID NO: 659086 - RNA, 19 nt, Artificial Sequence
  Description of Artificial Sequence: Synthetic oligonucleotide
  Sense strand starting at position 3687 of SEQ ID NO: 585680
caugaauugugagaaucac

SEQ ID NO: 659087 - RNA, 19 nt, Artificial Sequence
  Description of Artificial Sequence: Synthetic oligonucleotide
  Antisense strand to SEQ ID NO: 659086
gugauucucacaauucaug

SEQ ID NO: 659088 - RNA, 19 nt, Artificial Sequence
  Description of Artificial Sequence: Synthetic oligonucleotide
  Sense strand starting at position 3693 of SEQ ID NO: 585680
uugugagaaucaccucuaa

SEQ ID NO: 659089 - RNA, 19 nt, Artificial Sequence
  Description of Artificial Sequence: Synthetic oligonucleotide
  Antisense strand to SEQ ID NO: 659088
uuagaggugauucucacaa

SEQ ID NO: 659090 - RNA, 19 nt, Artificial Sequence
  Description of Artificial Sequence: Synthetic oligonucleotide
  Sense strand starting at position 3714 of SEQ ID NO: 585680
uugaauuguacugaaggca

SEQ ID NO: 659091 - RNA, 19 nt, Artificial Sequence
  Description of Artificial Sequence: Synthetic oligonucleotide
  Antisense strand to SEQ ID NO: 659090
ugccuucaguacaauucaa

SEQ ID NO: 659092 - RNA, 19 nt, Artificial Sequence
  Description of Artificial Sequence: Synthetic oligonucleotide
  Sense strand starting at position 3817 of SEQ ID NO: 585680
aaguuacuuugacagagga

SEQ ID NO: 659093 - RNA, 19 nt, Artificial Sequence
  Description of Artificial Sequence: Synthetic oligonucleotide
  Antisense strand to SEQ ID NO: 659092
uccucugucaaaguaacuu

SEQ ID NO: 659094 - RNA, 19 nt, Artificial Sequence
  Description of Artificial Sequence: Synthetic oligonucleotide
  Sense strand starting at position 3837 of SEQ ID NO: 585680
auguaauagccuugguaga

SEQ ID NO: 659095 - RNA, 19 nt, Artificial Sequence
  Description of Artificial Sequence: Synthetic oligonucleotide
  Antisense strand to SEQ ID NO: 659094
ucuaccaaggcuauuacau

SEQ ID NO: 659096 - RNA, 19 nt, Artificial Sequence
  Description of Artificial Sequence: Synthetic oligonucleotide
  Sense strand starting at position 3838 of SEQ ID NO: 585680
uguaauagccuugguagac

SEQ ID NO: 659097 - RNA, 19 nt, Artificial Sequence
  Description of Artificial Sequence: Synthetic oligonucleotide
  Antisense strand to SEQ ID NO: 659096
gucuaccaaggcuauuaca

SEQ ID NO: 659098 - RNA, 19 nt, Artificial Sequence
  Description of Artificial Sequence: Synthetic oligonucleotide
  Sense strand starting at position 3839 of SEQ ID NO: 585680
guaauagccuugguagaca

SEQ ID NO: 659099 - RNA, 19 nt, Artificial Sequence
  Description of Artificial Sequence: Synthetic oligonucleotide
  Antisense strand to SEQ ID NO: 659098
ugucuaccaaggcuauuac

SEQ ID NO: 659100 - RNA, 19 nt, Artificial Sequence
  Description of Artificial Sequence: Synthetic oligonucleotide
  Sense strand starting at position 3937 of SEQ ID NO: 585680
ugaauugccuguuuaaaga

SEQ ID NO: 659101 - RNA, 19 nt, Artificial Sequence
  Description of Artificial Sequence: Synthetic oligonucleotide
  Antisense strand to SEQ ID NO: 659100
ucuuuaaacaggcaauuca

SEQ ID NO: 659102 - RNA, 19 nt, Artificial Sequence
  Description of Artificial Sequence: Synthetic oligonucleotide
  Sense strand starting at position 3961 of SEQ ID NO: 585680
uuucuaaaugcagggaaua

SEQ ID NO: 659103 - RNA, 19 nt, Artificial Sequence
  Description of Artificial Sequence: Synthetic oligonucleotide
  Antisense strand to SEQ ID NO: 659102
uauucccugcauuuagaaa

SEQ ID NO: 659104 - RNA, 19 nt, Artificial Sequence
  Description of Artificial Sequence: Synthetic oligonucleotide
  Sense strand starting at position 3972 of SEQ ID NO: 585680
agggaauaguaacuugcaa

SEQ ID NO: 659105 - RNA, 19 nt, Artificial Sequence
  Description of Artificial Sequence: Synthetic oligonucleotide
  Antisense strand to SEQ ID NO: 659104
uugcaaguuacuauucccu

SEQ ID NO: 659106 - RNA, 19 nt, Artificial Sequence
  Description of Artificial Sequence: Synthetic oligonucleotide
  Sense strand starting at position 41 of SEQ ID NO: 585681
gauccuuguggccaaggau

SEQ ID NO: 659107 - RNA, 19 nt, Artificial Sequence
  Description of Artificial Sequence: Synthetic oligonucleotide
  Antisense strand to SEQ ID NO: 659106
auccuuggccacaaggauc

SEQ ID NO: 659108 - RNA, 19 nt, Artificial Sequence
  Description of Artificial Sequence: Synthetic oligonucleotide
  Sense strand starting at position 125 of SEQ ID NO: 585681
cuucuugaauaggcacaua

SEQ ID NO: 659109 - RNA, 19 nt, Artificial Sequence
  Description of Artificial Sequence: Synthetic oligonucleotide
  Antisense strand to SEQ ID NO: 659108
uaugugccuauucaagaag

SEQ ID NO: 659110 - RNA, 19 nt, Artificial Sequence
  Description of Artificial Sequence: Synthetic oligonucleotide
  Sense strand starting at position 128 of SEQ ID NO: 585681
cuugaauaggcacauaguu

SEQ ID NO: 659111 - RNA, 19 nt, Artificial Sequence
  Description of Artificial Sequence: Synthetic oligonucleotide
  Antisense strand to SEQ ID NO: 659110
aacuaugugccuauucaag

SEQ ID NO: 659112 - RNA, 19 nt, Artificial Sequence
  Description of Artificial Sequence: Synthetic oligonucleotide
  Sense strand starting at position 135 of SEQ ID NO: 585681
aggcacauaguuuacaaua

SEQ ID NO: 659113 - RNA, 19 nt, Artificial Sequence
  Description of Artificial Sequence: Synthetic oligonucleotide
  Antisense strand to SEQ ID NO: 659112
uauuguaaacuaugugccu

SEQ ID NO: 659114 - RNA, 19 nt, Artificial Sequence
  Description of Artificial Sequence: Synthetic oligonucleotide
  Sense strand starting at position 214 of SEQ ID NO: 585681
uguuacuuagauugacagu

SEQ ID NO: 659115 - RNA, 19 nt, Artificial Sequence
  Description of Artificial Sequence: Synthetic oligonucleotide
  Antisense strand to SEQ ID NO: 659114
acugucaaucuaaguaaca

SEQ ID NO: 659116 - RNA, 19 nt, Artificial Sequence
  Description of Artificial Sequence: Synthetic oligonucleotide
  Sense strand starting at position 298 of SEQ ID NO: 585681
gguguugucuguuuauuua

SEQ ID NO: 659117 - RNA, 19 nt, Artificial Sequence
  Description of Artificial Sequence: Synthetic oligonucleotide
  Antisense strand to SEQ ID NO: 659116
uaaauaaacagacaacacc

SEQ ID NO: 659118 - RNA, 19 nt, Artificial Sequence
  Description of Artificial Sequence: Synthetic oligonucleotide
  Sense strand starting at position 796 of SEQ ID NO: 585681
caacuucuaggguggaaua

SEQ ID NO: 659119 - RNA, 19 nt, Artificial Sequence
  Description of Artificial Sequence: Synthetic oligonucleotide
  Antisense strand to SEQ ID NO: 659118
uauuccacccuagaaguug

SEQ ID NO: 659120 - RNA, 19 nt, Artificial Sequence
  Description of Artificial Sequence: Synthetic oligonucleotide
  Sense strand starting at position 912 of SEQ ID NO: 585681
agcucuaauuaagucuaga

SEQ ID NO: 659121 - RNA, 19 nt, Artificial Sequence
  Description of Artificial Sequence: Synthetic oligonucleotide
  Antisense strand to SEQ ID NO: 659120
ucuagacuuaauuagagcu

SEQ ID NO: 659122 - RNA, 19 nt, Artificial Sequence
  Description of Artificial Sequence: Synthetic oligonucleotide
  Sense strand starting at position 915 of SEQ ID NO: 585681
ucuaauuaagucuagagug

SEQ ID NO: 659123 - RNA, 19 nt, Artificial Sequence
  Description of Artificial Sequence: Synthetic oligonucleotide
  Antisense strand to SEQ ID NO: 659122
cacucuagacuuaauuaga

SEQ ID NO: 659124 - RNA, 19 nt, Artificial Sequence
  Description of Artificial Sequence: Synthetic oligonucleotide
  Sense strand starting at position 994 of SEQ ID NO: 585681
caguucuaagguugaguga

SEQ ID NO: 659125 - RNA, 19 nt, Artificial Sequence
  Description of Artificial Sequence: Synthetic oligonucleotide
  Antisense strand to SEQ ID NO: 659124
ucacucaaccuuagaacug

SEQ ID NO: 659126 - RNA, 19 nt, Artificial Sequence
  Description of Artificial Sequence: Synthetic oligonucleotide
  Sense strand starting at position 1298 of SEQ ID NO: 585681
augugacauuuagaagaac

SEQ ID NO: 659127 - RNA, 19 nt, Artificial Sequence
  Description of Artificial Sequence: Synthetic oligonucleotide
  Antisense strand to SEQ ID NO: 659126
guucuucuaaaugucacau

SEQ ID NO: 659128 - RNA, 19 nt, Artificial Sequence
  Description of Artificial Sequence: Synthetic oligonucleotide
  Sense strand starting at position 1400 of SEQ ID NO: 585681
aucuuagugguagguaaau

SEQ ID NO: 659129 - RNA, 19 nt, Artificial Sequence
  Description of Artificial Sequence: Synthetic oligonucleotide
  Antisense strand to SEQ ID NO: 659128
auuuaccuaccacuaagau

SEQ ID NO: 659130 - RNA, 19 nt, Artificial Sequence
  Description of Artificial Sequence: Synthetic oligonucleotide
  Sense strand starting at position 1604 of SEQ ID NO: 585681
agagcaaaugucuaauggu

SEQ ID NO: 659131 - RNA, 19 nt, Artificial Sequence
  Description of Artificial Sequence: Synthetic oligonucleotide
  Antisense strand to SEQ ID NO: 659130
accauuagacauuugcucu

SEQ ID NO: 659132 - RNA, 19 nt, Artificial Sequence
  Description of Artificial Sequence: Synthetic oligonucleotide
  Sense strand starting at position 1656 of SEQ ID NO: 585681
ugcagagauuucccugcua

SEQ ID NO: 659133 - RNA, 19 nt, Artificial Sequence
  Description of Artificial Sequence: Synthetic oligonucleotide
  Antisense strand to SEQ ID NO: 659132
uagcagggaaaucucugca

SEQ ID NO: 659134 - RNA, 19 nt, Artificial Sequence
  Description of Artificial Sequence: Synthetic oligonucleotide
  Sense strand starting at position 1700 of SEQ ID NO: 585681
gcgaguacacccgaagaau

SEQ ID NO: 659135 - RNA, 19 nt, Artificial Sequence
  Description of Artificial Sequence: Synthetic oligonucleotide
  Antisense strand to SEQ ID NO: 659134
auucuucggguguacucgc

SEQ ID NO: 659136 - RNA, 19 nt, Artificial Sequence
  Description of Artificial Sequence: Synthetic oligonucleotide
  Sense strand starting at position 1739 of SEQ ID NO: 585681
cucaguucuagaggaagca

SEQ ID NO: 659137 - RNA, 19 nt, Artificial Sequence
  Description of Artificial Sequence: Synthetic oligonucleotide
  Antisense strand to SEQ ID NO: 659136
ugcuuccucuagaacugag

SEQ ID NO: 659138 - RNA, 19 nt, Artificial Sequence
  Description of Artificial Sequence: Synthetic oligonucleotide
  Sense strand starting at position 1789 of SEQ ID NO: 585681
agggacucuuugucaacga

SEQ ID NO: 659139 - RNA, 19 nt, Artificial Sequence
  Description of Artificial Sequence: Synthetic oligonucleotide
  Antisense strand to SEQ ID NO: 659138
ucguugacaaagagucccu

SEQ ID NO: 659140 - RNA, 19 nt, Artificial Sequence
  Description of Artificial Sequence: Synthetic oligonucleotide
  Sense strand starting at position 1803 of SEQ ID NO: 585681
aacgaaguccguuaaacuu

SEQ ID NO: 659141 - RNA, 19 nt, Artificial Sequence
  Description of Artificial Sequence: Synthetic oligonucleotide
  Antisense strand to SEQ ID NO: 659140
aaguuuaacggacuucguu

SEQ ID NO: 659142 - RNA, 19 nt, Artificial Sequence
  Description of Artificial Sequence: Synthetic oligonucleotide
  Sense strand starting at position 2005 of SEQ ID NO: 585681
gaguacuuggauugguuga

SEQ ID NO: 659143 - RNA, 19 nt, Artificial Sequence
  Description of Artificial Sequence: Synthetic oligonucleotide
  Antisense strand to SEQ ID NO: 659142
ucaaccaauccaaguacuc

SEQ ID NO: 659144 - RNA, 19 nt, Artificial Sequence
  Description of Artificial Sequence: Synthetic oligonucleotide
  Sense strand starting at position 2006 of SEQ ID NO: 585681
aguacuuggauugguugaa

SEQ ID NO: 659145 - RNA, 19 nt, Artificial Sequence
  Description of Artificial Sequence: Synthetic oligonucleotide
  Antisense strand to SEQ ID NO: 659144
uucaaccaauccaaguacu

SEQ ID NO: 659146 - RNA, 19 nt, Artificial Sequence
  Description of Artificial Sequence: Synthetic oligonucleotide
  Sense strand starting at position 2007 of SEQ ID NO: 585681
guacuuggauugguugaau

SEQ ID NO: 659147 - RNA, 19 nt, Artificial Sequence
  Description of Artificial Sequence: Synthetic oligonucleotide
  Antisense strand to SEQ ID NO: 659146
auucaaccaauccaaguac

SEQ ID NO: 659148 - RNA, 19 nt, Artificial Sequence
  Description of Artificial Sequence: Synthetic oligonucleotide
  Sense strand starting at position 2030 of SEQ ID NO: 585681
gcccgaggaaaugaucuuu

SEQ ID NO: 659149 - RNA, 19 nt, Artificial Sequence
  Description of Artificial Sequence: Synthetic oligonucleotide
  Antisense strand to SEQ ID NO: 659148
aaagaucauuuccucgggc

SEQ ID NO: 659150 - RNA, 19 nt, Artificial Sequence
  Description of Artificial Sequence: Synthetic oligonucleotide
  Sense strand starting at position 2036 of SEQ ID NO: 585681
ggaaaugaucuuuguaggc

SEQ ID NO: 659151 - RNA, 19 nt, Artificial Sequence
  Description of Artificial Sequence: Synthetic oligonucleotide
  Antisense strand to SEQ ID NO: 659150
gccuacaaagaucauuucc

SEQ ID NO: 659152 - RNA, 19 nt, Artificial Sequence
  Description of Artificial Sequence: Synthetic oligonucleotide
  Sense strand starting at position 2314 of SEQ ID NO: 585681
uacugacuggaacguuaau

SEQ ID NO: 659153 - RNA, 19 nt, Artificial Sequence
  Description of Artificial Sequence: Synthetic oligonucleotide
  Antisense strand to SEQ ID NO: 659152
auuaacguuccagucagua

SEQ ID NO: 659154 - RNA, 19 nt, Artificial Sequence
  Description of Artificial Sequence: Synthetic oligonucleotide
  Sense strand starting at position 2457 of SEQ ID NO: 585681
uuggcagaauuugacugaa

SEQ ID NO: 659155 - RNA, 19 nt, Artificial Sequence
  Description of Artificial Sequence: Synthetic oligonucleotide
  Antisense strand to SEQ ID NO: 659154
uucagucaaauucugccaa

SEQ ID NO: 659156 - RNA, 19 nt, Artificial Sequence
  Description of Artificial Sequence: Synthetic oligonucleotide
  Sense strand starting at position 2512 of SEQ ID NO: 585681
ugaauuugagcacgcaguu

SEQ ID NO: 659157 - RNA, 19 nt, Artificial Sequence
  Description of Artificial Sequence: Synthetic oligonucleotide
  Antisense strand to SEQ ID NO: 659156
aacugcgugcucaaauuca

SEQ ID NO: 659158 - RNA, 19 nt, Artificial Sequence
  Description of Artificial Sequence: Synthetic oligonucleotide
  Sense strand starting at position 2535 of SEQ ID NO: 585681
caguguuuacaauggaauu

SEQ ID NO: 659159 - RNA, 19 nt, Artificial Sequence
  Description of Artificial Sequence: Synthetic oligonucleotide
  Antisense strand to SEQ ID NO: 659158
aauuccauuguaaacacug

SEQ ID NO: 659160 - RNA, 19 nt, Artificial Sequence
  Description of Artificial Sequence: Synthetic oligonucleotide
  Sense strand starting at position 2556 of SEQ ID NO: 585681
ugaagacuuguguacuuag

SEQ ID NO: 659161 - RNA, 19 nt, Artificial Sequence
  Description of Artificial Sequence: Synthetic oligonucleotide
  Antisense strand to SEQ ID NO: 659160
cuaaguacacaagucuuca

SEQ ID NO: 659162 - RNA, 19 nt, Artificial Sequence
  Description of Artificial Sequence: Synthetic oligonucleotide
  Sense strand starting at position 2559 of SEQ ID NO: 585681
agacuuguguacuuagaag

SEQ ID NO: 659163 - RNA, 19 nt, Artificial Sequence
  Description of Artificial Sequence: Synthetic oligonucleotide
  Antisense strand to SEQ ID NO: 659162
cuucuaaguacacaagucu

SEQ ID NO: 659164 - RNA, 19 nt, Artificial Sequence
  Description of Artificial Sequence: Synthetic oligonucleotide
  Sense strand starting at position 2595 of SEQ ID NO: 585681
uuugcuucuggagaagcaa

SEQ ID NO: 659165 - RNA, 19 nt, Artificial Sequence
  Description of Artificial Sequence: Synthetic oligonucleotide
  Antisense strand to SEQ ID NO: 659164
uugcuucuccagaagcaaa

SEQ ID NO: 659166 - RNA, 19 nt, Artificial Sequence
  Description of Artificial Sequence: Synthetic oligonucleotide
  Sense strand starting at position 2645 of SEQ ID NO: 585681
aguacuaccucuccuagga

SEQ ID NO: 659167 - RNA, 19 nt, Artificial Sequence
  Description of Artificial Sequence: Synthetic oligonucleotide
  Antisense strand to SEQ ID NO: 659166
uccuaggagagguaguacu

SEQ ID NO: 659168 - RNA, 19 nt, Artificial Sequence
  Description of Artificial Sequence: Synthetic oligonucleotide
  Sense strand starting at position 2674 of SEQ ID NO: 585681
gccugcuugggugauagau

SEQ ID NO: 659169 - RNA, 19 nt, Artificial Sequence
  Description of Artificial Sequence: Synthetic oligonucleotide
  Antisense strand to SEQ ID NO: 659168
aucuaucacccaagcaggc

SEQ ID NO: 659170 - RNA, 19 nt, Artificial Sequence
  Description of Artificial Sequence: Synthetic oligonucleotide
  Sense strand starting at position 2730 of SEQ ID NO: 585681
acaugaugaugccuaucau

SEQ ID NO: 659171 - RNA, 19 nt, Artificial Sequence
  Description of Artificial Sequence: Synthetic oligonucleotide
  Antisense strand to SEQ ID NO: 659170
augauaggcaucaucaugu

SEQ ID NO: 659172 - RNA, 19 nt, Artificial Sequence
  Description of Artificial Sequence: Synthetic oligonucleotide
  Sense strand starting at position 2790 of SEQ ID NO: 585681
guguaaauccuauagacgu

SEQ ID NO: 659173 - RNA, 19 nt, Artificial Sequence
  Description of Artificial Sequence: Synthetic oligonucleotide
  Antisense strand to SEQ ID NO: 659172
acgucuauaggauuuacac

SEQ ID NO: 659174 - RNA, 19 nt, Artificial Sequence
  Description of Artificial Sequence: Synthetic oligonucleotide
  Sense strand starting at position 2797 of SEQ ID NO: 585681
uccuauagacguuaauaug

SEQ ID NO: 659175 - RNA, 19 nt, Artificial Sequence
  Description of Artificial Sequence: Synthetic oligonucleotide
  Antisense strand to SEQ ID NO: 659174
cauauuaacgucuauagga

SEQ ID NO: 659176 - RNA, 19 nt, Artificial Sequence
  Description of Artificial Sequence: Synthetic oligonucleotide
  Sense strand starting at position 2898 of SEQ ID NO: 585681
gcuucuuugguuuacauaa

SEQ ID NO: 659177 - RNA, 19 nt, Artificial Sequence
  Description of Artificial Sequence: Synthetic oligonucleotide
  Antisense strand to SEQ ID NO: 659176
uuauguaaaccaaagaagc

SEQ ID NO: 659178 - RNA, 19 nt, Artificial Sequence
  Description of Artificial Sequence: Synthetic oligonucleotide
  Sense strand starting at position 3060 of SEQ ID NO: 585681
agacuugagaacugugucu

SEQ ID NO: 659179 - RNA, 19 nt, Artificial Sequence
  Description of Artificial Sequence: Synthetic oligonucleotide
  Antisense strand to SEQ ID NO: 659178
agacacaguucucaagucu

SEQ ID NO: 659180 - RNA, 19 nt, Artificial Sequence
  Description of Artificial Sequence: Synthetic oligonucleotide
  Sense strand starting at position 3437 of SEQ ID NO: 585681
aggcuucggaaguauaguu

SEQ ID NO: 659181 - RNA, 19 nt, Artificial Sequence
  Description of Artificial Sequence: Synthetic oligonucleotide
  Antisense strand to SEQ ID NO: 659180
aacuauacuuccgaagccu

SEQ ID NO: 659182 - RNA, 19 nt, Artificial Sequence
  Description of Artificial Sequence: Synthetic oligonucleotide
  Sense strand starting at position 3839 of SEQ ID NO: 585681
uacugugauugucucauga

SEQ ID NO: 659183 - RNA, 19 nt, Artificial Sequence
  Description of Artificial Sequence: Synthetic oligonucleotide
  Antisense strand to SEQ ID NO: 659182
ucaugagacaaucacagua

SEQ ID NO: 659184 - RNA, 19 nt, Artificial Sequence
  Description of Artificial Sequence: Synthetic oligonucleotide
  Sense strand starting at position 3934 of SEQ ID NO: 585681
uuauauuaggcuugaagag

SEQ ID NO: 659185 - RNA, 19 nt, Artificial Sequence
  Description of Artificial Sequence: Synthetic oligonucleotide
  Antisense strand to SEQ ID NO: 659184
cucuucaagccuaauauaa

SEQ ID NO: 659186 - RNA, 19 nt, Artificial Sequence
  Description of Artificial Sequence: Synthetic oligonucleotide
  Sense strand starting at position 219 of SEQ ID NO: 585682
guggcauauccacauaaua

SEQ ID NO: 659187 - RNA, 19 nt, Artificial Sequence
  Description of Artificial Sequence: Synthetic oligonucleotide
  Antisense strand to SEQ ID NO: 659186
uauuauguggauaugccac

SEQ ID NO: 659188 - RNA, 19 nt, Artificial Sequence
  Description of Artificial Sequence: Synthetic oligonucleotide
  Sense strand starting at position 277 of SEQ ID NO: 585682
ugaaacaacuuggagaaau

SEQ ID NO: 659189 - RNA, 19 nt, Artificial Sequence
  Description of Artificial Sequence: Synthetic oligonucleotide
  Antisense strand to SEQ ID NO: 659188
auuucuccaaguuguuuca

SEQ ID NO: 659190 - RNA, 19 nt, Artificial Sequence
  Description of Artificial Sequence: Synthetic oligonucleotide
  Sense strand starting at position 388 of SEQ ID NO: 585682
ggguaaggaguaugauaua

SEQ ID NO: 659191 - RNA, 19 nt, Artificial Sequence
  Description of Artificial Sequence: Synthetic oligonucleotide
  Antisense strand to SEQ ID NO: 659190
uauaucauacuccuuaccc

SEQ ID NO: 659192 - RNA, 19 nt, Artificial Sequence
  Description of Artificial Sequence: Synthetic oligonucleotide
  Sense strand starting at position 399 of SEQ ID NO: 585682
augauauaaugggaucaca

SEQ ID NO: 659193 - RNA, 19 nt, Artificial Sequence
  Description of Artificial Sequence: Synthetic oligonucleotide
  Antisense strand to SEQ ID NO: 659192
ugugaucccauuauaucau

SEQ ID NO: 659194 - RNA, 19 nt, Artificial Sequence
  Description of Artificial Sequence: Synthetic oligonucleotide
  Sense strand starting at position 444 of SEQ ID NO: 585682
gcgauagauuuguucuaca

SEQ ID NO: 659195 - RNA, 19 nt, Artificial Sequence
  Description of Artificial Sequence: Synthetic oligonucleotide
  Antisense strand to SEQ ID NO: 659194
uguagaacaaaucuaucgc

SEQ ID NO: 659196 - RNA, 19 nt, Artificial Sequence
  Description of Artificial Sequence: Synthetic oligonucleotide
  Sense strand starting at position 455 of SEQ ID NO: 585682
guucuacauccuuacugua

SEQ ID NO: 659197 - RNA, 19 nt, Artificial Sequence
  Description of Artificial Sequence: Synthetic oligonucleotide
  Antisense strand to SEQ ID NO: 659196
uacaguaaggauguagaac

SEQ ID NO: 659198 - RNA, 19 nt, Artificial Sequence
  Description of Artificial Sequence: Synthetic oligonucleotide
  Sense strand starting at position 499 of SEQ ID NO: 585682
cgcagaacuguacaucgaa

SEQ ID NO: 659199 - RNA, 19 nt, Artificial Sequence
  Description of Artificial Sequence: Synthetic oligonucleotide
  Antisense strand to SEQ ID NO: 659198
uucgauguacaguucugcg

SEQ ID NO: 659200 - RNA, 19 nt, Artificial Sequence
  Description of Artificial Sequence: Synthetic oligonucleotide
  Sense strand starting at position 661 of SEQ ID NO: 585682
acaauuacguuccuagaaa

SEQ ID NO: 659201 - RNA, 19 nt, Artificial Sequence
  Description of Artificial Sequence: Synthetic oligonucleotide
  Antisense strand to SEQ ID NO: 659200
uuucuaggaacguaauugu

SEQ ID NO: 659202 - RNA, 19 nt, Artificial Sequence
  Description of Artificial Sequence: Synthetic oligonucleotide
  Sense strand starting at position 683 of SEQ ID NO: 585682
gcauacuucugaguacaau

SEQ ID NO: 659203 - RNA, 19 nt, Artificial Sequence
  Description of Artificial Sequence: Synthetic oligonucleotide
  Antisense strand to SEQ ID NO: 659202
auuguacucagaaguaugc

SEQ ID NO: 659204 - RNA, 19 nt, Artificial Sequence
  Description of Artificial Sequence: Synthetic oligonucleotide
  Sense strand starting at position 762 of SEQ ID NO: 585682
gcuaaugcggucuaauaaa

SEQ ID NO: 659205 - RNA, 19 nt, Artificial Sequence
  Description of Artificial Sequence: Synthetic oligonucleotide
  Antisense strand to SEQ ID NO: 659204
uuuauuagaccgcauuagc

SEQ ID NO: 659206 - RNA, 19 nt, Artificial Sequence
  Description of Artificial Sequence: Synthetic oligonucleotide
  Sense strand starting at position 848 of SEQ ID NO: 585682
aguagaaguacagguuaua

SEQ ID NO: 659207 - RNA, 19 nt, Artificial Sequence
  Description of Artificial Sequence: Synthetic oligonucleotide
  Antisense strand to SEQ ID NO: 659206
uauaaccuguacuucuacu

SEQ ID NO: 659208 - RNA, 19 nt, Artificial Sequence
  Description of Artificial Sequence: Synthetic oligonucleotide
  Sense strand starting at position 976 of SEQ ID NO: 585682
ucacuagcuccugauaaug

SEQ ID NO: 659209 - RNA, 19 nt, Artificial Sequence
  Description of Artificial Sequence: Synthetic oligonucleotide
  Antisense strand to SEQ ID NO: 659208
cauuaucaggagcuaguga

SEQ ID NO: 659210 - RNA, 19 nt, Artificial Sequence
  Description of Artificial Sequence: Synthetic oligonucleotide
  Sense strand starting at position 1021 of SEQ ID NO: 585682
guucuuacuccugggaacu

SEQ ID NO: 659211 - RNA, 19 nt, Artificial Sequence
  Description of Artificial Sequence: Synthetic oligonucleotide
  Antisense strand to SEQ ID NO: 659210
aguucccaggaguaagaac

SEQ ID NO: 659212 - RNA, 19 nt, Artificial Sequence
  Description of Artificial Sequence: Synthetic oligonucleotide
  Sense strand starting at position 1053 of SEQ ID NO: 585682
cggaucuccgaguaaaguu

SEQ ID NO: 659213 - RNA, 19 nt, Artificial Sequence
  Description of Artificial Sequence: Synthetic oligonucleotide
  Antisense strand to SEQ ID NO: 659212
aacuuuacucggagauccg

SEQ ID NO: 659214 - RNA, 19 nt, Artificial Sequence
  Description of Artificial Sequence: Synthetic oligonucleotide
  Sense strand starting at position 1062 of SEQ ID NO: 585682
gaguaaaguuaauucugua

SEQ ID NO: 659215 - RNA, 19 nt, Artificial Sequence
  Description of Artificial Sequence: Synthetic oligonucleotide
  Antisense strand to SEQ ID NO: 659214
uacagaauuaacuuuacuc

SEQ ID NO: 659216 - RNA, 19 nt, Artificial Sequence
  Description of Artificial Sequence: Synthetic oligonucleotide
  Sense strand starting at position 1221 of SEQ ID NO: 585682
ggacucucuucgccaucaa

SEQ ID NO: 659217 - RNA, 19 nt, Artificial Sequence
  Description of Artificial Sequence: Synthetic oligonucleotide
  Antisense strand to SEQ ID NO: 659216
uugauggcgaagagagucc

SEQ ID NO: 659218 - RNA, 19 nt, Artificial Sequence
  Description of Artificial Sequence: Synthetic oligonucleotide
  Sense strand starting at position 2130 of SEQ ID NO: 585682
cgagcaggaucuccuagau

SEQ ID NO: 659219 - RNA, 19 nt, Artificial Sequence
  Description of Artificial Sequence: Synthetic oligonucleotide
  Antisense strand to SEQ ID NO: 659218
aucuaggagauccugcucg

SEQ ID NO: 659220 - RNA, 19 nt, Artificial Sequence
  Description of Artificial Sequence: Synthetic oligonucleotide
  Sense strand starting at position 2140 of SEQ ID NO: 585682
cuccuagaucgugaacucu

SEQ ID NO: 659221 - RNA, 19 nt, Artificial Sequence
  Description of Artificial Sequence: Synthetic oligonucleotide
  Antisense strand to SEQ ID NO: 659220
agaguucacgaucuaggag

SEQ ID NO: 659222 - RNA, 19 nt, Artificial Sequence
  Description of Artificial Sequence: Synthetic oligonucleotide
  Sense strand starting at position 2190 of SEQ ID NO: 585682
augaguuucgccuacagag

SEQ ID NO: 659223 - RNA, 19 nt, Artificial Sequence
  Description of Artificial Sequence: Synthetic oligonucleotide
  Antisense strand to SEQ ID NO: 659222
cucuguaggcgaaacucau

SEQ ID NO: 659224 - RNA, 19 nt, Artificial Sequence
  Description of Artificial Sequence: Synthetic oligonucleotide
  Sense strand starting at position 2192 of SEQ ID NO: 585682
gaguuucgccuacagaguu

SEQ ID NO: 659225 - RNA, 19 nt, Artificial Sequence
  Description of Artificial Sequence: Synthetic oligonucleotide
  Antisense strand to SEQ ID NO: 659224
aacucuguaggcgaaacuc

SEQ ID NO: 659226 - RNA, 19 nt, Artificial Sequence
  Description of Artificial Sequence: Synthetic oligonucleotide
  Sense strand starting at position 2200 of SEQ ID NO: 585682
ccuacagaguuaucacacu

SEQ ID NO: 659227 - RNA, 19 nt, Artificial Sequence
  Description of Artificial Sequence: Synthetic oligonucleotide
  Antisense strand to SEQ ID NO: 659226
agugugauaacucuguagg

SEQ ID NO: 659228 - RNA, 19 nt, Artificial Sequence
  Description of Artificial Sequence: Synthetic oligonucleotide
  Sense strand starting at position 2357 of SEQ ID NO: 585682
agaagccugagaugguuaa

SEQ ID NO: 659229 - RNA, 19 nt, Artificial Sequence
  Description of Artificial Sequence: Synthetic oligonucleotide
  Antisense strand to SEQ ID NO: 659228
uuaaccaucucaggcuucu

SEQ ID NO: 659230 - RNA, 19 nt, Artificial Sequence
  Description of Artificial Sequence: Synthetic oligonucleotide
  Sense strand starting at position 2358 of SEQ ID NO: 585682
gaagccugagaugguuaau

SEQ ID NO: 659231 - RNA, 19 nt, Artificial Sequence
  Description of Artificial Sequence: Synthetic oligonucleotide
  Antisense strand to SEQ ID NO: 659230
auuaaccaucucaggcuuc

SEQ ID NO: 659232 - RNA, 19 nt, Artificial Sequence
  Description of Artificial Sequence: Synthetic oligonucleotide
  Sense strand starting at position 2361 of SEQ ID NO: 585682
gccugagaugguuaauuau

SEQ ID NO: 659233 - RNA, 19 nt, Artificial Sequence
  Description of Artificial Sequence: Synthetic oligonucleotide
  Antisense strand to SEQ ID NO: 659232
auaauuaaccaucucaggc

SEQ ID NO: 659234 - RNA, 19 nt, Artificial Sequence
  Description of Artificial Sequence: Synthetic oligonucleotide
  Sense strand starting at position 2505 of SEQ ID NO: 585682
gauguagaguaacugcauu

SEQ ID NO: 659235 - RNA, 19 nt, Artificial Sequence
  Description of Artificial Sequence: Synthetic oligonucleotide
  Antisense strand to SEQ ID NO: 659234
aaugcaguuacucuacauc

SEQ ID NO: 659236 - RNA, 19 nt, Artificial Sequence
  Description of Artificial Sequence: Synthetic oligonucleotide
  Sense strand starting at position 2826 of SEQ ID NO: 585682
aggcaauaacgugaaucaa

SEQ ID NO: 659237 - RNA, 19 nt, Artificial Sequence
  Description of Artificial Sequence: Synthetic oligonucleotide
  Antisense strand to SEQ ID NO: 659236
uugauucacguuauugccu

SEQ ID NO: 659238 - RNA, 19 nt, Artificial Sequence
  Description of Artificial Sequence: Synthetic oligonucleotide
  Sense strand starting at position 2937 of SEQ ID NO: 585682
ggcucaaaguuagcauaau

SEQ ID NO: 659239 - RNA, 19 nt, Artificial Sequence
  Description of Artificial Sequence: Synthetic oligonucleotide
  Antisense strand to SEQ ID NO: 659238
auuaugcuaacuuugagcc

SEQ ID NO: 659240 - RNA, 19 nt, Artificial Sequence
  Description of Artificial Sequence: Synthetic oligonucleotide
  Sense strand starting at position 2987 of SEQ ID NO: 585682
gaaggaguuagcgacuaga

SEQ ID NO: 659241 - RNA, 19 nt, Artificial Sequence
  Description of Artificial Sequence: Synthetic oligonucleotide
  Antisense strand to SEQ ID NO: 659240
ucuagucgcuaacuccuuc

SEQ ID NO: 659242 - RNA, 19 nt, Artificial Sequence
  Description of Artificial Sequence: Synthetic oligonucleotide
  Sense strand starting at position 2990 of SEQ ID NO: 585682
ggaguuagcgacuagaaga

SEQ ID NO: 659243 - RNA, 19 nt, Artificial Sequence
  Description of Artificial Sequence: Synthetic oligonucleotide
  Antisense strand to SEQ ID NO: 659242
ucuucuagucgcuaacucc

SEQ ID NO: 659244 - RNA, 19 nt, Artificial Sequence
  Description of Artificial Sequence: Synthetic oligonucleotide
  Sense strand starting at position 3016 of SEQ ID NO: 585682
ccaguuagcaacuggaaga

SEQ ID NO: 659245 - RNA, 19 nt, Artificial Sequence
  Description of Artificial Sequence: Synthetic oligonucleotide
  Antisense strand to SEQ ID NO: 659244
ucuuccaguugcuaacugg

SEQ ID NO: 659246 - RNA, 19 nt, Artificial Sequence
  Description of Artificial Sequence: Synthetic oligonucleotide
  Sense strand starting at position 3229 of SEQ ID NO: 585682
ucaaguagcuaacagauuu

SEQ ID NO: 659247 - RNA, 19 nt, Artificial Sequence
  Description of Artificial Sequence: Synthetic oligonucleotide
  Antisense strand to SEQ ID NO: 659246
aaaucuguuagcuacuuga

SEQ ID NO: 659248 - RNA, 19 nt, Artificial Sequence
  Description of Artificial Sequence: Synthetic oligonucleotide
  Sense strand starting at position 3252 of SEQ ID NO: 585682
cuaggauuugguuggcagu

SEQ ID NO: 659249 - RNA, 19 nt, Artificial Sequence
  Description of Artificial Sequence: Synthetic oligonucleotide
  Antisense strand to SEQ ID NO: 659248
acugccaaccaaauccuag

SEQ ID NO: 659250 - RNA, 19 nt, Artificial Sequence
  Description of Artificial Sequence: Synthetic oligonucleotide
  Sense strand starting at position 3263 of SEQ ID NO: 585682
uuggcaguaucucuuaaac

SEQ ID NO: 659251 - RNA, 19 nt, Artificial Sequence
  Description of Artificial Sequence: Synthetic oligonucleotide
  Antisense strand to SEQ ID NO: 659250
guuuaagagauacugccaa

SEQ ID NO: 659252 - RNA, 19 nt, Artificial Sequence
  Description of Artificial Sequence: Synthetic oligonucleotide
  Sense strand starting at position 3274 of SEQ ID NO: 585682
ucuuaaacuugaguaacgu

SEQ ID NO: 659253 - RNA, 19 nt, Artificial Sequence
  Description of Artificial Sequence: Synthetic oligonucleotide
  Antisense strand to SEQ ID NO: 659252
acguuacucaaguuuaaga

SEQ ID NO: 659254 - RNA, 19 nt, Artificial Sequence
  Description of Artificial Sequence: Synthetic oligonucleotide
  Sense strand starting at position 3275 of SEQ ID NO: 585682
cuuaaacuugaguaacgua

SEQ ID NO: 659255 - RNA, 19 nt, Artificial Sequence
  Description of Artificial Sequence: Synthetic oligonucleotide
  Antisense strand to SEQ ID NO: 659254
uacguuacucaaguuuaag

SEQ ID NO: 659256 - RNA, 19 nt, Artificial Sequence
  Description of Artificial Sequence: Synthetic oligonucleotide
  Sense strand starting at position 3280 of SEQ ID NO: 585682
acuugaguaacguacugau

SEQ ID NO: 659257 - RNA, 19 nt, Artificial Sequence
  Description of Artificial Sequence: Synthetic oligonucleotide
  Antisense strand to SEQ ID NO: 659256
aucaguacguuacucaagu

SEQ ID NO: 659258 - RNA, 19 nt, Artificial Sequence
  Description of Artificial Sequence: Synthetic oligonucleotide
  Sense strand starting at position 3334 of SEQ ID NO: 585682
guuggcaaaugacuugaau

SEQ ID NO: 659259 - RNA, 19 nt, Artificial Sequence
  Description of Artificial Sequence: Synthetic oligonucleotide
  Antisense strand to SEQ ID NO: 659258
auucaagucauuugccaac

SEQ ID NO: 659260 - RNA, 19 nt, Artificial Sequence
  Description of Artificial Sequence: Synthetic oligonucleotide
  Sense strand starting at position 3382 of SEQ ID NO: 585682
ggccgaugagcacaugaaa

SEQ ID NO: 659261 - RNA, 19 nt, Artificial Sequence
  Description of Artificial Sequence: Synthetic oligonucleotide
  Antisense strand to SEQ ID NO: 659260
uuucaugugcucaucggcc

SEQ ID NO: 659262 - RNA, 19 nt, Artificial Sequence
  Description of Artificial Sequence: Synthetic oligonucleotide
  Sense strand starting at position 3507 of SEQ ID NO: 585682
auaugaguguuggcaagga

SEQ ID NO: 659263 - RNA, 19 nt, Artificial Sequence
  Description of Artificial Sequence: Synthetic oligonucleotide
  Antisense strand to SEQ ID NO: 659262
uccuugccaacacucauau

SEQ ID NO: 659264 - RNA, 19 nt, Artificial Sequence
  Description of Artificial Sequence: Synthetic oligonucleotide
  Sense strand starting at position 3853 of SEQ ID NO: 585682
gagguaucccuguaauccc

SEQ ID NO: 659265 - RNA, 19 nt, Artificial Sequence
  Description of Artificial Sequence: Synthetic oligonucleotide
  Antisense strand to SEQ ID NO: 659264
gggauuacagggauaccuc

SEQ ID NO: 659266 - RNA, 19 nt, Artificial Sequence
  Description of Artificial Sequence: Synthetic oligonucleotide
  Sense strand starting at position 147 of SEQ ID NO: 585683
agggaaagcuaaguaaauc

SEQ ID NO: 659267 - RNA, 19 nt, Artificial Sequence
  Description of Artificial Sequence: Synthetic oligonucleotide
  Antisense strand to SEQ ID NO: 659266
gauuuacuuagcuuucccu

SEQ ID NO: 659268 - RNA, 19 nt, Artificial Sequence
  Description of Artificial Sequence: Synthetic oligonucleotide
  Sense strand starting at position 156 of SEQ ID NO: 585683
uaaguaaaucaguggaaca

SEQ ID NO: 659269 - RNA, 19 nt, Artificial Sequence
  Description of Artificial Sequence: Synthetic oligonucleotide
  Antisense strand to SEQ ID NO: 659268
uguuccacugauuuacuua

SEQ ID NO: 659270 - RNA, 19 nt, Artificial Sequence
  Description of Artificial Sequence: Synthetic oligonucleotide
  Sense strand starting at position 399 of SEQ ID NO: 585683
ugaccuguuaggcagaguu

SEQ ID NO: 659271 - RNA, 19 nt, Artificial Sequence
  Description of Artificial Sequence: Synthetic oligonucleotide
  Antisense strand to SEQ ID NO: 659270
aacucugccuaacagguca

SEQ ID NO: 659272 - RNA, 19 nt, Artificial Sequence
  Description of Artificial Sequence: Synthetic oligonucleotide
  Sense strand starting at position 481 of SEQ ID NO: 585683
aaacauugcugucugaaag

SEQ ID NO: 659273 - RNA, 19 nt, Artificial Sequence
  Description of Artificial Sequence: Synthetic oligonucleotide
  Antisense strand to SEQ ID NO: 659272
cuuucagacagcaauguuu

SEQ ID NO: 659274 - RNA, 19 nt, Artificial Sequence
  Description of Artificial Sequence: Synthetic oligonucleotide
  Sense strand starting at position 482 of SEQ ID NO: 585683
aacauugcugucugaaaga

SEQ ID NO: 659275 - RNA, 19 nt, Artificial Sequence
  Description of Artificial Sequence: Synthetic oligonucleotide
  Antisense strand to SEQ ID NO: 659274
ucuuucagacagcaauguu

SEQ ID NO: 659276 - RNA, 19 nt, Artificial Sequence
  Description of Artificial Sequence: Synthetic oligonucleotide
  Sense strand starting at position 492 of SEQ ID NO: 585683
ucugaaagacacuguuaga

SEQ ID NO: 659277 - RNA, 19 nt, Artificial Sequence
  Description of Artificial Sequence: Synthetic oligonucleotide
  Antisense strand to SEQ ID NO: 659276
ucuaacagugucuuucaga

SEQ ID NO: 659278 - RNA, 19 nt, Artificial Sequence
  Description of Artificial Sequence: Synthetic oligonucleotide
  Sense strand starting at position 635 of SEQ ID NO: 585683
gcaagagacuuugccagau

SEQ ID NO: 659279 - RNA, 19 nt, Artificial Sequence
  Description of Artificial Sequence: Synthetic oligonucleotide
  Antisense strand to SEQ ID NO: 659278
aucuggcaaagucucuugc

SEQ ID NO: 659280 - RNA, 19 nt, Artificial Sequence
  Description of Artificial Sequence: Synthetic oligonucleotide
  Sense strand starting at position 639 of SEQ ID NO: 585683
gagacuuugccagauaccu

SEQ ID NO: 659281 - RNA, 19 nt, Artificial Sequence
  Description of Artificial Sequence: Synthetic oligonucleotide
  Antisense strand to SEQ ID NO: 659280
agguaucuggcaaagucuc

SEQ ID NO: 659282 - RNA, 19 nt, Artificial Sequence
  Description of Artificial Sequence: Synthetic oligonucleotide
  Sense strand starting at position 697 of SEQ ID NO: 585683
uguacaucuuuagccauua

SEQ ID NO: 659283 - RNA, 19 nt, Artificial Sequence
  Description of Artificial Sequence: Synthetic oligonucleotide
  Antisense strand to SEQ ID NO: 659282
uaauggcuaaagauguaca

SEQ ID NO: 659284 - RNA, 19 nt, Artificial Sequence
  Description of Artificial Sequence: Synthetic oligonucleotide
  Sense strand starting at position 791 of SEQ ID NO: 585683
cuaucaaaugcugggagua

SEQ ID NO: 659285 - RNA, 19 nt, Artificial Sequence
  Description of Artificial Sequence: Synthetic oligonucleotide
  Antisense strand to SEQ ID NO: 659284
uacucccagcauuugauag

SEQ ID NO: 659286 - RNA, 19 nt, Artificial Sequence
  Description of Artificial Sequence: Synthetic oligonucleotide
  Sense strand starting at position 792 of SEQ ID NO: 585683
uaucaaaugcugggaguau

SEQ ID NO: 659287 - RNA, 19 nt, Artificial Sequence
  Description of Artificial Sequence: Synthetic oligonucleotide
  Antisense strand to SEQ ID NO: 659286
auacucccagcauuugaua

SEQ ID NO: 659288 - RNA, 19 nt, Artificial Sequence
  Description of Artificial Sequence: Synthetic oligonucleotide
  Sense strand starting at position 1072 of SEQ ID NO: 585683
guggcauauccacauaaua

SEQ ID NO: 659289 - RNA, 19 nt, Artificial Sequence
  Description of Artificial Sequence: Synthetic oligonucleotide
  Antisense strand to SEQ ID NO: 659288
uauuauguggauaugccac

SEQ ID NO: 659290 - RNA, 19 nt, Artificial Sequence
  Description of Artificial Sequence: Synthetic oligonucleotide
  Sense strand starting at position 1130 of SEQ ID NO: 585683
ugaaacaacuuggagaaau

SEQ ID NO: 659291 - RNA, 19 nt, Artificial Sequence
  Description of Artificial Sequence: Synthetic oligonucleotide
  Antisense strand to SEQ ID NO: 659290
auuucuccaaguuguuuca

SEQ ID NO: 659292 - RNA, 19 nt, Artificial Sequence
  Description of Artificial Sequence: Synthetic oligonucleotide
  Sense strand starting at position 1241 of SEQ ID NO: 585683
ggguaaggaguaugauaua

SEQ ID NO: 659293 - RNA, 19 nt, Artificial Sequence
  Description of Artificial Sequence: Synthetic oligonucleotide
  Antisense strand to SEQ ID NO: 659292
uauaucauacuccuuaccc

SEQ ID NO: 659294 - RNA, 19 nt, Artificial Sequence
  Description of Artificial Sequence: Synthetic oligonucleotide
  Sense strand starting at position 1252 of SEQ ID NO: 585683
augauauaaugggaucaca

SEQ ID NO: 659295 - RNA, 19 nt, Artificial Sequence
  Description of Artificial Sequence: Synthetic oligonucleotide
  Antisense strand to SEQ ID NO: 659294
ugugaucccauuauaucau

SEQ ID NO: 659296 - RNA, 19 nt, Artificial Sequence
  Description of Artificial Sequence: Synthetic oligonucleotide
  Sense strand starting at position 1297 of SEQ ID NO: 585683
gcgauagauuuguucuaca

SEQ ID NO: 659297 - RNA, 19 nt, Artificial Sequence
  Description of Artificial Sequence: Synthetic oligonucleotide
  Antisense strand to SEQ ID NO: 659296
uguagaacaaaucuaucgc

SEQ ID NO: 659298 - RNA, 19 nt, Artificial Sequence
  Description of Artificial Sequence: Synthetic oligonucleotide
  Sense strand starting at position 1308 of SEQ ID NO: 585683
guucuacauccuuacugua

SEQ ID NO: 659299 - RNA, 19 nt, Artificial Sequence
  Description of Artificial Sequence: Synthetic oligonucleotide
  Antisense strand to SEQ ID NO: 659298
uacaguaaggauguagaac

SEQ ID NO: 659300 - RNA, 19 nt, Artificial Sequence
  Description of Artificial Sequence: Synthetic oligonucleotide
  Sense strand starting at position 1352 of SEQ ID NO: 585683
cgcagaacuguacaucgaa

SEQ ID NO: 659301 - RNA, 19 nt, Artificial Sequence
  Description of Artificial Sequence: Synthetic oligonucleotide
  Antisense strand to SEQ ID NO: 659300
uucgauguacaguucugcg

SEQ ID NO: 659302 - RNA, 19 nt, Artificial Sequence
  Description of Artificial Sequence: Synthetic oligonucleotide
  Sense strand starting at position 1514 of SEQ ID NO: 585683
acaauuacguuccuagaaa

SEQ ID NO: 659303 - RNA, 19 nt, Artificial Sequence
  Description of Artificial Sequence: Synthetic oligonucleotide
  Antisense strand to SEQ ID NO: 659302
uuucuaggaacguaauugu

SEQ ID NO: 659304 - RNA, 19 nt, Artificial Sequence
  Description of Artificial Sequence: Synthetic oligonucleotide
  Sense strand starting at position 1536 of SEQ ID NO: 585683
gcauacuucugaguacaau

SEQ ID NO: 659305 - RNA, 19 nt, Artificial Sequence
  Description of Artificial Sequence: Synthetic oligonucleotide
  Antisense strand to SEQ ID NO: 659304
auuguacucagaaguaugc

SEQ ID NO: 659306 - RNA, 19 nt, Artificial Sequence
  Description of Artificial Sequence: Synthetic oligonucleotide
  Sense strand starting at position 1615 of SEQ ID NO: 585683
gcuaaugcggucuaauaaa

SEQ ID NO: 659307 - RNA, 19 nt, Artificial Sequence
  Description of Artificial Sequence: Synthetic oligonucleotide
  Antisense strand to SEQ ID NO: 659306
uuuauuagaccgcauuagc

SEQ ID NO: 659308 - RNA, 19 nt, Artificial Sequence
  Description of Artificial Sequence: Synthetic oligonucleotide
  Sense strand starting at position 1701 of SEQ ID NO: 585683
aguagaaguacagguuaua

SEQ ID NO: 659309 - RNA, 19 nt, Artificial Sequence
  Description of Artificial Sequence: Synthetic oligonucleotide
  Antisense strand to SEQ ID NO: 659308
uauaaccuguacuucuacu

SEQ ID NO: 659310 - RNA, 19 nt, Artificial Sequence
  Description of Artificial Sequence: Synthetic oligonucleotide
  Sense strand starting at position 1829 of SEQ ID NO: 585683
ucacuagcuccugauaaug

SEQ ID NO: 659311 - RNA, 19 nt, Artificial Sequence
  Description of Artificial Sequence: Synthetic oligonucleotide
  Antisense strand to SEQ ID NO: 659310
cauuaucaggagcuaguga

SEQ ID NO: 659312 - RNA, 19 nt, Artificial Sequence
  Description of Artificial Sequence: Synthetic oligonucleotide
  Sense strand starting at position 1874 of SEQ ID NO: 585683
guucuuacuccugggaacu

SEQ ID NO: 659313 - RNA, 19 nt, Artificial Sequence
  Description of Artificial Sequence: Synthetic oligonucleotide
  Antisense strand to SEQ ID NO: 659312
aguucccaggaguaagaac

SEQ ID NO: 659314 - RNA, 19 nt, Artificial Sequence
  Description of Artificial Sequence: Synthetic oligonucleotide
  Sense strand starting at position 1906 of SEQ ID NO: 585683
cggaucuccgaguaaaguu

SEQ ID NO: 659315 - RNA, 19 nt, Artificial Sequence
  Description of Artificial Sequence: Synthetic oligonucleotide
  Antisense strand to SEQ ID NO: 659314
aacuuuacucggagauccg

SEQ ID NO: 659316 - RNA, 19 nt, Artificial Sequence
  Description of Artificial Sequence: Synthetic oligonucleotide
  Sense strand starting at position 1915 of SEQ ID NO: 585683
gaguaaaguuaauucugua

SEQ ID NO: 659317 - RNA, 19 nt, Artificial Sequence
  Description of Artificial Sequence: Synthetic oligonucleotide
  Antisense strand to SEQ ID NO: 659316
uacagaauuaacuuuacuc

SEQ ID NO: 659318 - RNA, 19 nt, Artificial Sequence
  Description of Artificial Sequence: Synthetic oligonucleotide
  Sense strand starting at position 2074 of SEQ ID NO: 585683
ggacucucuucgccaucaa

SEQ ID NO: 659319 - RNA, 19 nt, Artificial Sequence
  Description of Artificial Sequence: Synthetic oligonucleotide
  Antisense strand to SEQ ID NO: 659318
uugauggcgaagagagucc

SEQ ID NO: 659320 - RNA, 19 nt, Artificial Sequence
  Description of Artificial Sequence: Synthetic oligonucleotide
  Sense strand starting at position 2983 of SEQ ID NO: 585683
cgagcaggaucuccuagau

SEQ ID NO: 659321 - RNA, 19 nt, Artificial Sequence
  Description of Artificial Sequence: Synthetic oligonucleotide
  Antisense strand to SEQ ID NO: 659320
aucuaggagauccugcucg

SEQ ID NO: 659322 - RNA, 19 nt, Artificial Sequence
  Description of Artificial Sequence: Synthetic oligonucleotide
  Sense strand starting at position 2993 of SEQ ID NO: 585683
cuccuagaucgugaacucu

SEQ ID NO: 659323 - RNA, 19 nt, Artificial Sequence
  Description of Artificial Sequence: Synthetic oligonucleotide
  Antisense strand to SEQ ID NO: 659322
agaguucacgaucuaggag

SEQ ID NO: 659324 - RNA, 19 nt, Artificial Sequence
  Description of Artificial Sequence: Synthetic oligonucleotide
  Sense strand starting at position 3043 of SEQ ID NO: 585683
augaguuucgccuacagag

SEQ ID NO: 659325 - RNA, 19 nt, Artificial Sequence
  Description of Artificial Sequence: Synthetic oligonucleotide
  Antisense strand to SEQ ID NO: 659324
cucuguaggcgaaacucau

SEQ ID NO: 659326 - RNA, 19 nt, Artificial Sequence
  Description of Artificial Sequence: Synthetic oligonucleotide
  Sense strand starting at position 3053 of SEQ ID NO: 585683
ccuacagaguuaucacacu

SEQ ID NO: 659327 - RNA, 19 nt, Artificial Sequence
  Description of Artificial Sequence: Synthetic oligonucleotide
  Antisense strand to SEQ ID NO: 659326
agugugauaacucuguagg

SEQ ID NO: 659328 - RNA, 19 nt, Artificial Sequence
  Description of Artificial Sequence: Synthetic oligonucleotide
  Sense strand starting at position 3210 of SEQ ID NO: 585683
agaagccugagaugguuaa

SEQ ID NO: 659329 - RNA, 19 nt, Artificial Sequence
  Description of Artificial Sequence: Synthetic oligonucleotide
  Antisense strand to SEQ ID NO: 659328
uuaaccaucucaggcuucu

SEQ ID NO: 659330 - RNA, 19 nt, Artificial Sequence
  Description of Artificial Sequence: Synthetic oligonucleotide
  Sense strand starting at position 3211 of SEQ ID NO: 585683
gaagccugagaugguuaau

SEQ ID NO: 659331 - RNA, 19 nt, Artificial Sequence
  Description of Artificial Sequence: Synthetic oligonucleotide
  Antisense strand to SEQ ID NO: 659330
auuaaccaucucaggcuuc

SEQ ID NO: 659332 - RNA, 19 nt, Artificial Sequence
  Description of Artificial Sequence: Synthetic oligonucleotide
  Sense strand starting at position 3214 of SEQ ID NO: 585683
gccugagaugguuaauuau

SEQ ID NO: 659333 - RNA, 19 nt, Artificial Sequence
  Description of Artificial Sequence: Synthetic oligonucleotide
  Antisense strand to SEQ ID NO: 659332
auaauuaaccaucucaggc

SEQ ID NO: 659334 - RNA, 19 nt, Artificial Sequence
  Description of Artificial Sequence: Synthetic oligonucleotide
  Sense strand starting at position 3358 of SEQ ID NO: 585683
gauguagaguaacugcauu

SEQ ID NO: 659335 - RNA, 19 nt, Artificial Sequence
  Description of Artificial Sequence: Synthetic oligonucleotide
  Antisense strand to SEQ ID NO: 659334
aaugcaguuacucuacauc

SEQ ID NO: 659336 - RNA, 19 nt, Artificial Sequence
  Description of Artificial Sequence: Synthetic oligonucleotide
  Sense strand starting at position 3679 of SEQ ID NO: 585683
aggcaauaacgugaaucaa

SEQ ID NO: 659337 - RNA, 19 nt, Artificial Sequence
  Description of Artificial Sequence: Synthetic oligonucleotide
  Antisense strand to SEQ ID NO: 659336
uugauucacguuauugccu

SEQ ID NO: 659338 - RNA, 19 nt, Artificial Sequence
  Description of Artificial Sequence: Synthetic oligonucleotide
  Sense strand starting at position 3790 of SEQ ID NO: 585683
ggcucaaaguuagcauaau

SEQ ID NO: 659339 - RNA, 19 nt, Artificial Sequence
  Description of Artificial Sequence: Synthetic oligonucleotide
  Antisense strand to SEQ ID NO: 659338
auuaugcuaacuuugagcc

SEQ ID NO: 659340 - RNA, 19 nt, Artificial Sequence
  Description of Artificial Sequence: Synthetic oligonucleotide
  Sense strand starting at position 3840 of SEQ ID NO: 585683
gaaggaguuagcgacuaga

SEQ ID NO: 659341 - RNA, 19 nt, Artificial Sequence
  Description of Artificial Sequence: Synthetic oligonucleotide
  Antisense strand to SEQ ID NO: 659340
ucuagucgcuaacuccuuc

SEQ ID NO: 659342 - RNA, 19 nt, Artificial Sequence
  Description of Artificial Sequence: Synthetic oligonucleotide
  Sense strand starting at position 3843 of SEQ ID NO: 585683
ggaguuagcgacuagaaga

SEQ ID NO: 659343 - RNA, 19 nt, Artificial Sequence
  Description of Artificial Sequence: Synthetic oligonucleotide
  Antisense strand to SEQ ID NO: 659342
ucuucuagucgcuaacucc

SEQ ID NO: 659344 - RNA, 19 nt, Artificial Sequence
  Description of Artificial Sequence: Synthetic oligonucleotide
  Sense strand starting at position 3869 of SEQ ID NO: 585683
ccaguuagcaacuggaaga

SEQ ID NO: 659345 - RNA, 19 nt, Artificial Sequence
  Description of Artificial Sequence: Synthetic oligonucleotide
  Antisense strand to SEQ ID NO: 659344
ucuuccaguugcuaacugg

SEQ ID NO: 659346 - RNA, 19 nt, Artificial Sequence
  Description of Artificial Sequence: Synthetic oligonucleotide
  Sense strand starting at position 37 of SEQ ID NO: 585684
cugagucccuggcugauua

SEQ ID NO: 659347 - RNA, 19 nt, Artificial Sequence
  Description of Artificial Sequence: Synthetic oligonucleotide
  Antisense strand to SEQ ID NO: 659346
uaaucagccagggacucag

SEQ ID NO: 659348 - RNA, 19 nt, Artificial Sequence
  Description of Artificial Sequence: Synthetic oligonucleotide
  Sense strand starting at position 72 of SEQ ID NO: 585684
aacugaguugcauacaguu

SEQ ID NO: 659349 - RNA, 19 nt, Artificial Sequence
  Description of Artificial Sequence: Synthetic oligonucleotide
  Antisense strand to SEQ ID NO: 659348
aacuguaugcaacucaguu

SEQ ID NO: 659350 - RNA, 19 nt, Artificial Sequence
  Description of Artificial Sequence: Synthetic oligonucleotide
  Sense strand starting at position 105 of SEQ ID NO: 585684
gggacagaaaugugcucuu

SEQ ID NO: 659351 - RNA, 19 nt, Artificial Sequence
  Description of Artificial Sequence: Synthetic oligonucleotide
  Antisense strand to SEQ ID NO: 659350
aagagcacauuucuguccc

SEQ ID NO: 659352 - RNA, 19 nt, Artificial Sequence
  Description of Artificial Sequence: Synthetic oligonucleotide
  Sense strand starting at position 108 of SEQ ID NO: 585684
acagaaaugugcucuuaaa

SEQ ID NO: 659353 - RNA, 19 nt, Artificial Sequence
  Description of Artificial Sequence: Synthetic oligonucleotide
  Antisense strand to SEQ ID NO: 659352
uuuaagagcacauuucugu

SEQ ID NO: 659354 - RNA, 19 nt, Artificial Sequence
  Description of Artificial Sequence: Synthetic oligonucleotide
  Sense strand starting at position 119 of SEQ ID NO: 585684
cucuuaaaugaaugaguua

SEQ ID NO: 659355 - RNA, 19 nt, Artificial Sequence
  Description of Artificial Sequence: Synthetic oligonucleotide
  Antisense strand to SEQ ID NO: 659354
uaacucauucauuuaagag

SEQ ID NO: 659356 - RNA, 19 nt, Artificial Sequence
  Description of Artificial Sequence: Synthetic oligonucleotide
  Sense strand starting at position 131 of SEQ ID NO: 585684
ugaguuauagguuacaauu

SEQ ID NO: 659357 - RNA, 19 nt, Artificial Sequence
  Description of Artificial Sequence: Synthetic oligonucleotide
  Antisense strand to SEQ ID NO: 659356
aauuguaaccuauaacuca

SEQ ID NO: 659358 - RNA, 19 nt, Artificial Sequence
  Description of Artificial Sequence: Synthetic oligonucleotide
  Sense strand starting at position 276 of SEQ ID NO: 585684
caguguagggacuguagaa

SEQ ID NO: 659359 - RNA, 19 nt, Artificial Sequence
  Description of Artificial Sequence: Synthetic oligonucleotide
  Antisense strand to SEQ ID NO: 659358
uucuacagucccuacacug

SEQ ID NO: 659360 - RNA, 19 nt, Artificial Sequence
  Description of Artificial Sequence: Synthetic oligonucleotide
  Sense strand starting at position 303 of SEQ ID NO: 585684
ggccucagguguccucuaa

SEQ ID NO: 659361 - RNA, 19 nt, Artificial Sequence
  Description of Artificial Sequence: Synthetic oligonucleotide
  Antisense strand to SEQ ID NO: 659360
uuagaggacaccugaggcc

SEQ ID NO: 659362 - RNA, 19 nt, Artificial Sequence
  Description of Artificial Sequence: Synthetic oligonucleotide
  Sense strand starting at position 310 of SEQ ID NO: 585684
gguguccucuaacccuaaa

SEQ ID NO: 659363 - RNA, 19 nt, Artificial Sequence
  Description of Artificial Sequence: Synthetic oligonucleotide
  Antisense strand to SEQ ID NO: 659362
uuuaggguuagaggacacc

SEQ ID NO: 659364 - RNA, 19 nt, Artificial Sequence
  Description of Artificial Sequence: Synthetic oligonucleotide
  Sense strand starting at position 557 of SEQ ID NO: 585684
cgaccacacuugucuaauu

SEQ ID NO: 659365 - RNA, 19 nt, Artificial Sequence
  Description of Artificial Sequence: Synthetic oligonucleotide
  Antisense strand to SEQ ID NO: 659364
aauuagacaaguguggucg

SEQ ID NO: 659366 - RNA, 19 nt, Artificial Sequence
  Description of Artificial Sequence: Synthetic oligonucleotide
  Sense strand starting at position 1042 of SEQ ID NO: 585684
agcaaaguauuugaggaau

SEQ ID NO: 659367 - RNA, 19 nt, Artificial Sequence
  Description of Artificial Sequence: Synthetic oligonucleotide
  Antisense strand to SEQ ID NO: 659366
auuccucaaauacuuugcu

SEQ ID NO: 659368 - RNA, 19 nt, Artificial Sequence
  Description of Artificial Sequence: Synthetic oligonucleotide
  Sense strand starting at position 1172 of SEQ ID NO: 585684
cggguuaagucacccaauc

SEQ ID NO: 659369 - RNA, 19 nt, Artificial Sequence
  Description of Artificial Sequence: Synthetic oligonucleotide
  Antisense strand to SEQ ID NO: 659368
gauugggugacuuaacccg

SEQ ID NO: 659370 - RNA, 19 nt, Artificial Sequence
  Description of Artificial Sequence: Synthetic oligonucleotide
  Sense strand starting at position 1245 of SEQ ID NO: 585684
ucaacuaguccugguguau

SEQ ID NO: 659371 - RNA, 19 nt, Artificial Sequence
  Description of Artificial Sequence: Synthetic oligonucleotide
  Antisense strand to SEQ ID NO: 659370
auacaccaggacuaguuga

SEQ ID NO: 659372 - RNA, 19 nt, Artificial Sequence
  Description of Artificial Sequence: Synthetic oligonucleotide
  Sense strand starting at position 1249 of SEQ ID NO: 585684
cuaguccugguguauguau

SEQ ID NO: 659373 - RNA, 19 nt, Artificial Sequence
  Description of Artificial Sequence: Synthetic oligonucleotide
  Antisense strand to SEQ ID NO: 659372
auacauacaccaggacuag

SEQ ID NO: 659374 - RNA, 19 nt, Artificial Sequence
  Description of Artificial Sequence: Synthetic oligonucleotide
  Sense strand starting at position 2360 of SEQ ID NO: 585684
aagccucuggccuggaaau

SEQ ID NO: 659375 - RNA, 19 nt, Artificial Sequence
  Description of Artificial Sequence: Synthetic oligonucleotide
  Antisense strand to SEQ ID NO: 659374
auuuccaggccagaggcuu

SEQ ID NO: 659376 - RNA, 19 nt, Artificial Sequence
  Description of Artificial Sequence: Synthetic oligonucleotide
  Sense strand starting at position 2539 of SEQ ID NO: 585684
gagugaaccuccguagggu

SEQ ID NO: 659377 - RNA, 19 nt, Artificial Sequence
  Description of Artificial Sequence: Synthetic oligonucleotide
  Antisense strand to SEQ ID NO: 659376
acccuacggagguucacuc

SEQ ID NO: 659378 - RNA, 19 nt, Artificial Sequence
  Description of Artificial Sequence: Synthetic oligonucleotide
  Sense strand starting at position 2540 of SEQ ID NO: 585684
agugaaccuccguaggguu

SEQ ID NO: 659379 - RNA, 19 nt, Artificial Sequence
  Description of Artificial Sequence: Synthetic oligonucleotide
  Antisense strand to SEQ ID NO: 659378
aacccuacggagguucacu

SEQ ID NO: 659380 - RNA, 19 nt, Artificial Sequence
  Description of Artificial Sequence: Synthetic oligonucleotide
  Sense strand starting at position 2620 of SEQ ID NO: 585684
gcacaucaccgacacuuau

SEQ ID NO: 659381 - RNA, 19 nt, Artificial Sequence
  Description of Artificial Sequence: Synthetic oligonucleotide
  Antisense strand to SEQ ID NO: 659380
auaagugucggugaugugc

SEQ ID NO: 659382 - RNA, 19 nt, Artificial Sequence
  Description of Artificial Sequence: Synthetic oligonucleotide
  Sense strand starting at position 2629 of SEQ ID NO: 585684
cgacacuuauuaucgcuua

SEQ ID NO: 659383 - RNA, 19 nt, Artificial Sequence
  Description of Artificial Sequence: Synthetic oligonucleotide
  Antisense strand to SEQ ID NO: 659382
uaagcgauaauaagugucg

SEQ ID NO: 659384 - RNA, 19 nt, Artificial Sequence
  Description of Artificial Sequence: Synthetic oligonucleotide
  Sense strand starting at position 2732 of SEQ ID NO: 585684
cuuauaccuguuggcaauu

SEQ ID NO: 659385 - RNA, 19 nt, Artificial Sequence
  Description of Artificial Sequence: Synthetic oligonucleotide
  Antisense strand to SEQ ID NO: 659384
aauugccaacagguauaag

SEQ ID NO: 659386 - RNA, 19 nt, Artificial Sequence
  Description of Artificial Sequence: Synthetic oligonucleotide
  Sense strand starting at position 2787 of SEQ ID NO: 585684
cauccuuugcccguuaguu

SEQ ID NO: 659387 - RNA, 19 nt, Artificial Sequence
  Description of Artificial Sequence: Synthetic oligonucleotide
  Antisense strand to SEQ ID NO: 659386
aacuaacgggcaaaggaug

SEQ ID NO: 659388 - RNA, 19 nt, Artificial Sequence
  Description of Artificial Sequence: Synthetic oligonucleotide
  Sense strand starting at position 2836 of SEQ ID NO: 585684
gaguucugugaacguaaug

SEQ ID NO: 659389 - RNA, 19 nt, Artificial Sequence
  Description of Artificial Sequence: Synthetic oligonucleotide
  Antisense strand to SEQ ID NO: 659388
cauuacguucacagaacuc

SEQ ID NO: 659390 - RNA, 19 nt, Artificial Sequence
  Description of Artificial Sequence: Synthetic oligonucleotide
  Sense strand starting at position 2936 of SEQ ID NO: 585684
gauuauuuccuaugcggug

SEQ ID NO: 659391 - RNA, 19 nt, Artificial Sequence
  Description of Artificial Sequence: Synthetic oligonucleotide
  Antisense strand to SEQ ID NO: 659390
caccgcauaggaaauaauc

SEQ ID NO: 659392 - RNA, 19 nt, Artificial Sequence
  Description of Artificial Sequence: Synthetic oligonucleotide
  Sense strand starting at position 2981 of SEQ ID NO: 585684
ccauuuaucuagguuugcu

SEQ ID NO: 659393 - RNA, 19 nt, Artificial Sequence
  Description of Artificial Sequence: Synthetic oligonucleotide
  Antisense strand to SEQ ID NO: 659392
agcaaaccuagauaaaugg

SEQ ID NO: 659394 - RNA, 19 nt, Artificial Sequence
  Description of Artificial Sequence: Synthetic oligonucleotide
  Sense strand starting at position 3063 of SEQ ID NO: 585684
ucccucuucuggguguaua

SEQ ID NO: 659395 - RNA, 19 nt, Artificial Sequence
  Description of Artificial Sequence: Synthetic oligonucleotide
  Antisense strand to SEQ ID NO: 659394
uauacacccagaagaggga

SEQ ID NO: 659396 - RNA, 19 nt, Artificial Sequence
  Description of Artificial Sequence: Synthetic oligonucleotide
  Sense strand starting at position 3145 of SEQ ID NO: 585684
uugcgaagauuuggaaaca

SEQ ID NO: 659397 - RNA, 19 nt, Artificial Sequence
  Description of Artificial Sequence: Synthetic oligonucleotide
  Antisense strand to SEQ ID NO: 659396
uguuuccaaaucuucgcaa

SEQ ID NO: 659398 - RNA, 19 nt, Artificial Sequence
  Description of Artificial Sequence: Synthetic oligonucleotide
  Sense strand starting at position 3146 of SEQ ID NO: 585684
ugcgaagauuuggaaacaa

SEQ ID NO: 659399 - RNA, 19 nt, Artificial Sequence
  Description of Artificial Sequence: Synthetic oligonucleotide
  Antisense strand to SEQ ID NO: 659398
uuguuuccaaaucuucgca

SEQ ID NO: 659400 - RNA, 19 nt, Artificial Sequence
  Description of Artificial Sequence: Synthetic oligonucleotide
  Sense strand starting at position 3170 of SEQ ID NO: 585684
gugucuguuaacgaugaau

SEQ ID NO: 659401 - RNA, 19 nt, Artificial Sequence
  Description of Artificial Sequence: Synthetic oligonucleotide
  Antisense strand to SEQ ID NO: 659400
auucaucguuaacagacac

SEQ ID NO: 659402 - RNA, 19 nt, Artificial Sequence
  Description of Artificial Sequence: Synthetic oligonucleotide
  Sense strand starting at position 3176 of SEQ ID NO: 585684
guuaacgaugaauggauaa

SEQ ID NO: 659403 - RNA, 19 nt, Artificial Sequence
  Description of Artificial Sequence: Synthetic oligonucleotide
  Antisense strand to SEQ ID NO: 659402
uuauccauucaucguuaac

SEQ ID NO: 659404 - RNA, 19 nt, Artificial Sequence
  Description of Artificial Sequence: Synthetic oligonucleotide
  Sense strand starting at position 3359 of SEQ ID NO: 585684
gaaagauacugugcaauau

SEQ ID NO: 659405 - RNA, 19 nt, Artificial Sequence
  Description of Artificial Sequence: Synthetic oligonucleotide
  Antisense strand to SEQ ID NO: 659404
auauugcacaguaucuuuc

SEQ ID NO: 659406 - RNA, 19 nt, Artificial Sequence
  Description of Artificial Sequence: Synthetic oligonucleotide
  Sense strand starting at position 3424 of SEQ ID NO: 585684
cacggaauacguggaaaca

SEQ ID NO: 659407 - RNA, 19 nt, Artificial Sequence
  Description of Artificial Sequence: Synthetic oligonucleotide
  Antisense strand to SEQ ID NO: 659406
uguuuccacguauuccgug

SEQ ID NO: 659408 - RNA, 19 nt, Artificial Sequence
  Description of Artificial Sequence: Synthetic oligonucleotide
  Sense strand starting at position 3426 of SEQ ID NO: 585684
cggaauacguggaaacagu

SEQ ID NO: 659409 - RNA, 19 nt, Artificial Sequence
  Description of Artificial Sequence: Synthetic oligonucleotide
  Antisense strand to SEQ ID NO: 659408
acuguuuccacguauuccg

SEQ ID NO: 659410 - RNA, 19 nt, Artificial Sequence
  Description of Artificial Sequence: Synthetic oligonucleotide
  Sense strand starting at position 3471 of SEQ ID NO: 585684
cggaaugaugcaggucaaa

SEQ ID NO: 659411 - RNA, 19 nt, Artificial Sequence
  Description of Artificial Sequence: Synthetic oligonucleotide
  Antisense strand to SEQ ID NO: 659410
uuugaccugcaucauuccg

SEQ ID NO: 659412 - RNA, 19 nt, Artificial Sequence
  Description of Artificial Sequence: Synthetic oligonucleotide
  Sense strand starting at position 3521 of SEQ ID NO: 585684
gaguccuaaugaucuaaug

SEQ ID NO: 659413 - RNA, 19 nt, Artificial Sequence
  Description of Artificial Sequence: Synthetic oligonucleotide
  Antisense strand to SEQ ID NO: 659412
cauuagaucauuaggacuc

SEQ ID NO: 659414 - RNA, 19 nt, Artificial Sequence
  Description of Artificial Sequence: Synthetic oligonucleotide
  Sense strand starting at position 3539 of SEQ ID NO: 585684
guagcaugagcguuauagu

SEQ ID NO: 659415 - RNA, 19 nt, Artificial Sequence
  Description of Artificial Sequence: Synthetic oligonucleotide
  Antisense strand to SEQ ID NO: 659414
acuauaacgcucaugcuac

SEQ ID NO: 659416 - RNA, 19 nt, Artificial Sequence
  Description of Artificial Sequence: Synthetic oligonucleotide
  Sense strand starting at position 3540 of SEQ ID NO: 585684
uagcaugagcguuauaguu

SEQ ID NO: 659417 - RNA, 19 nt, Artificial Sequence
  Description of Artificial Sequence: Synthetic oligonucleotide
  Antisense strand to SEQ ID NO: 659416
aacuauaacgcucaugcua

SEQ ID NO: 659418 - RNA, 19 nt, Artificial Sequence
  Description of Artificial Sequence: Synthetic oligonucleotide
  Sense strand starting at position 3591 of SEQ ID NO: 585684
aagagaguagacuguaagu

SEQ ID NO: 659419 - RNA, 19 nt, Artificial Sequence
  Description of Artificial Sequence: Synthetic oligonucleotide
  Antisense strand to SEQ ID NO: 659418
acuuacagucuacucucuu

SEQ ID NO: 659420 - RNA, 19 nt, Artificial Sequence
  Description of Artificial Sequence: Synthetic oligonucleotide
  Sense strand starting at position 3728 of SEQ ID NO: 585684
gcuuaaucgcaccacugua

SEQ ID NO: 659421 - RNA, 19 nt, Artificial Sequence
  Description of Artificial Sequence: Synthetic oligonucleotide
  Antisense strand to SEQ ID NO: 659420
uacaguggugcgauuaagc

SEQ ID NO: 659422 - RNA, 19 nt, Artificial Sequence
  Description of Artificial Sequence: Synthetic oligonucleotide
  Sense strand starting at position 3824 of SEQ ID NO: 585684
uuguguaacuaugugagau

SEQ ID NO: 659423 - RNA, 19 nt, Artificial Sequence
  Description of Artificial Sequence: Synthetic oligonucleotide
  Antisense strand to SEQ ID NO: 659422
aucucacauaguuacacaa

SEQ ID NO: 659424 - RNA, 19 nt, Artificial Sequence
  Description of Artificial Sequence: Synthetic oligonucleotide
  Sense strand starting at position 3911 of SEQ ID NO: 585684
ugccguauaccuuagauau

SEQ ID NO: 659425 - RNA, 19 nt, Artificial Sequence
  Description of Artificial Sequence: Synthetic oligonucleotide
  Antisense strand to SEQ ID NO: 659424
auaucuaagguauacggca

SEQ ID NO: 659426 - RNA, 19 nt, Artificial Sequence
  Description of Artificial Sequence: Synthetic oligonucleotide
  Sense strand starting at position 26 of SEQ ID NO: 585685
aaaggugaauucuauuuga

SEQ ID NO: 659427 - RNA, 19 nt, Artificial Sequence
  Description of Artificial Sequence: Synthetic oligonucleotide
  Antisense strand to SEQ ID NO: 659426
ucaaauagaauucaccuuu

SEQ ID NO: 659428 - RNA, 19 nt, Artificial Sequence
  Description of Artificial Sequence: Synthetic oligonucleotide
  Sense strand starting at position 142 of SEQ ID NO: 585685
ccaugaugucagugguaga

SEQ ID NO: 659429 - RNA, 19 nt, Artificial Sequence
  Description of Artificial Sequence: Synthetic oligonucleotide
  Antisense strand to SEQ ID NO: 659428
ucuaccacugacaucaugg

SEQ ID NO: 659430 - RNA, 19 nt, Artificial Sequence
  Description of Artificial Sequence: Synthetic oligonucleotide
  Sense strand starting at position 223 of SEQ ID NO: 585685
ggcucuucccugggcagaa

SEQ ID NO: 659431 - RNA, 19 nt, Artificial Sequence
  Description of Artificial Sequence: Synthetic oligonucleotide
  Antisense strand to SEQ ID NO: 659430
uucugcccagggaagagcc

SEQ ID NO: 659432 - RNA, 19 nt, Artificial Sequence
  Description of Artificial Sequence: Synthetic oligonucleotide
  Sense strand starting at position 393 of SEQ ID NO: 585685
agauaagauucccugugca

SEQ ID NO: 659433 - RNA, 19 nt, Artificial Sequence
  Description of Artificial Sequence: Synthetic oligonucleotide
  Antisense strand to SEQ ID NO: 659432
ugcacagggaaucuuaucu

SEQ ID NO: 659434 - RNA, 19 nt, Artificial Sequence
  Description of Artificial Sequence: Synthetic oligonucleotide
  Sense strand starting at position 396 of SEQ ID NO: 585685
uaagauucccugugcagaa

SEQ ID NO: 659435 - RNA, 19 nt, Artificial Sequence
  Description of Artificial Sequence: Synthetic oligonucleotide
  Antisense strand to SEQ ID NO: 659434
uucugcacagggaaucuua

SEQ ID NO: 659436 - RNA, 19 nt, Artificial Sequence
  Description of Artificial Sequence: Synthetic oligonucleotide
  Sense strand starting at position 424 of SEQ ID NO: 585685
agcaaaguccacugugaug

SEQ ID NO: 659437 - RNA, 19 nt, Artificial Sequence
  Description of Artificial Sequence: Synthetic oligonucleotide
  Antisense strand to SEQ ID NO: 659436
caucacaguggacuuugcu

SEQ ID NO: 659438 - RNA, 19 nt, Artificial Sequence
  Description of Artificial Sequence: Synthetic oligonucleotide
  Sense strand starting at position 474 of SEQ ID NO: 585685
acagguguaggauguuaga

SEQ ID NO: 659439 - RNA, 19 nt, Artificial Sequence
  Description of Artificial Sequence: Synthetic oligonucleotide
  Antisense strand to SEQ ID NO: 659438
ucuaacauccuacaccugu

SEQ ID NO: 659440 - RNA, 19 nt, Artificial Sequence
  Description of Artificial Sequence: Synthetic oligonucleotide
  Sense strand starting at position 556 of SEQ ID NO: 585685
gggaguuccuagccaagcu

SEQ ID NO: 659441 - RNA, 19 nt, Artificial Sequence
  Description of Artificial Sequence: Synthetic oligonucleotide
  Antisense strand to SEQ ID NO: 659440
agcuuggcuaggaacuccc

SEQ ID NO: 659442 - RNA, 19 nt, Artificial Sequence
  Description of Artificial Sequence: Synthetic oligonucleotide
  Sense strand starting at position 557 of SEQ ID NO: 585685
ggaguuccuagccaagcua

SEQ ID NO: 659443 - RNA, 19 nt, Artificial Sequence
  Description of Artificial Sequence: Synthetic oligonucleotide
  Antisense strand to SEQ ID NO: 659442
uagcuuggcuaggaacucc

SEQ ID NO: 659444 - RNA, 19 nt, Artificial Sequence
  Description of Artificial Sequence: Synthetic oligonucleotide
  Sense strand starting at position 944 of SEQ ID NO: 585685
ucagucaauccacaaaugu

SEQ ID NO: 659445 - RNA, 19 nt, Artificial Sequence
  Description of Artificial Sequence: Synthetic oligonucleotide
  Antisense strand to SEQ ID NO: 659444
acauuuguggauugacuga

SEQ ID NO: 659446 - RNA, 19 nt, Artificial Sequence
  Description of Artificial Sequence: Synthetic oligonucleotide
  Sense strand starting at position 1564 of SEQ ID NO: 585685
uguaaauaauagccacagu

SEQ ID NO: 659447 - RNA, 19 nt, Artificial Sequence
  Description of Artificial Sequence: Synthetic oligonucleotide
  Antisense strand to SEQ ID NO: 659446
acuguggcuauuauuuaca

SEQ ID NO: 659448 - RNA, 19 nt, Artificial Sequence
  Description of Artificial Sequence: Synthetic oligonucleotide
  Sense strand starting at position 1633 of SEQ ID NO: 585685
cuuguuccagucuacuuau

SEQ ID NO: 659449 - RNA, 19 nt, Artificial Sequence
  Description of Artificial Sequence: Synthetic oligonucleotide
  Antisense strand to SEQ ID NO: 659448
auaaguagacuggaacaag

SEQ ID NO: 659450 - RNA, 19 nt, Artificial Sequence
  Description of Artificial Sequence: Synthetic oligonucleotide
  Sense strand starting at position 1703 of SEQ ID NO: 585685
ggugacuugcccuagguca

SEQ ID NO: 659451 - RNA, 19 nt, Artificial Sequence
  Description of Artificial Sequence: Synthetic oligonucleotide
  Antisense strand to SEQ ID NO: 659450
ugaccuagggcaagucacc

SEQ ID NO: 659452 - RNA, 19 nt, Artificial Sequence
  Description of Artificial Sequence: Synthetic oligonucleotide
  Sense strand starting at position 1802 of SEQ ID NO: 585685
gcuccaaaugcaggagaaa

SEQ ID NO: 659453 - RNA, 19 nt, Artificial Sequence
  Description of Artificial Sequence: Synthetic oligonucleotide
  Antisense strand to SEQ ID NO: 659452
uuucuccugcauuuggagc

SEQ ID NO: 659454 - RNA, 19 nt, Artificial Sequence
  Description of Artificial Sequence: Synthetic oligonucleotide
  Sense strand starting at position 2014 of SEQ ID NO: 585685
ccacgagcucuagaacugu

SEQ ID NO: 659455 - RNA, 19 nt, Artificial Sequence
  Description of Artificial Sequence: Synthetic oligonucleotide
  Antisense strand to SEQ ID NO: 659454
acaguucuagagcucgugg

SEQ ID NO: 659456 - RNA, 19 nt, Artificial Sequence
  Description of Artificial Sequence: Synthetic oligonucleotide
  Sense strand starting at position 2170 of SEQ ID NO: 585685
ccugauuggugucuugaag

SEQ ID NO: 659457 - RNA, 19 nt, Artificial Sequence
  Description of Artificial Sequence: Synthetic oligonucleotide
  Antisense strand to SEQ ID NO: 659456
cuucaagacaccaaucagg

SEQ ID NO: 659458 - RNA, 19 nt, Artificial Sequence
  Description of Artificial Sequence: Synthetic oligonucleotide
  Sense strand starting at position 2177 of SEQ ID NO: 585685
ggugucuugaaguggagaa

SEQ ID NO: 659459 - RNA, 19 nt, Artificial Sequence
  Description of Artificial Sequence: Synthetic oligonucleotide
  Antisense strand to SEQ ID NO: 659458
uucuccacuucaagacacc

SEQ ID NO: 659460 - RNA, 19 nt, Artificial Sequence
  Description of Artificial Sequence: Synthetic oligonucleotide
  Sense strand starting at position 2178 of SEQ ID NO: 585685
gugucuugaaguggagaau

SEQ ID NO: 659461 - RNA, 19 nt, Artificial Sequence
  Description of Artificial Sequence: Synthetic oligonucleotide
  Antisense strand to SEQ ID NO: 659460
auucuccacuucaagacac

SEQ ID NO: 659462 - RNA, 19 nt, Artificial Sequence
  Description of Artificial Sequence: Synthetic oligonucleotide
  Sense strand starting at position 2315 of SEQ ID NO: 585685
ggcaaugccuuaucccaga

SEQ ID NO: 659463 - RNA, 19 nt, Artificial Sequence
  Description of Artificial Sequence: Synthetic oligonucleotide
  Antisense strand to SEQ ID NO: 659462
ucugggauaaggcauugcc

SEQ ID NO: 659464 - RNA, 19 nt, Artificial Sequence
  Description of Artificial Sequence: Synthetic oligonucleotide
  Sense strand starting at position 2320 of SEQ ID NO: 585685
ugccuuaucccagacagca

SEQ ID NO: 659465 - RNA, 19 nt, Artificial Sequence
  Description of Artificial Sequence: Synthetic oligonucleotide
  Antisense strand to SEQ ID NO: 659464
ugcugucugggauaaggca

SEQ ID NO: 659466 - RNA, 19 nt, Artificial Sequence
  Description of Artificial Sequence: Synthetic oligonucleotide
  Sense strand starting at position 2483 of SEQ ID NO: 585685
ggaacaaucuagucugaua

SEQ ID NO: 659467 - RNA, 19 nt, Artificial Sequence
  Description of Artificial Sequence: Synthetic oligonucleotide
  Antisense strand to SEQ ID NO: 659466
uaucagacuagauuguucc

SEQ ID NO: 659468 - RNA, 19 nt, Artificial Sequence
  Description of Artificial Sequence: Synthetic oligonucleotide
  Sense strand starting at position 2526 of SEQ ID NO: 585685
ccaucagaacaguguggaa

SEQ ID NO: 659469 - RNA, 19 nt, Artificial Sequence
  Description of Artificial Sequence: Synthetic oligonucleotide
  Antisense strand to SEQ ID NO: 659468
uuccacacuguucugaugg

SEQ ID NO: 659470 - RNA, 19 nt, Artificial Sequence
  Description of Artificial Sequence: Synthetic oligonucleotide
  Sense strand starting at position 2539 of SEQ ID NO: 585685
guggaauuggagcaugacu

SEQ ID NO: 659471 - RNA, 19 nt, Artificial Sequence
  Description of Artificial Sequence: Synthetic oligonucleotide
  Antisense strand to SEQ ID NO: 659470
agucaugcuccaauuccac

SEQ ID NO: 659472 - RNA, 19 nt, Artificial Sequence
  Description of Artificial Sequence: Synthetic oligonucleotide
  Sense strand starting at position 2541 of SEQ ID NO: 585685
ggaauuggagcaugacuau

SEQ ID NO: 659473 - RNA, 19 nt, Artificial Sequence
  Description of Artificial Sequence: Synthetic oligonucleotide
  Antisense strand to SEQ ID NO: 659472
auagucaugcuccaauucc

SEQ ID NO: 659474 - RNA, 19 nt, Artificial Sequence
  Description of Artificial Sequence: Synthetic oligonucleotide
  Sense strand starting at position 2597 of SEQ ID NO: 585685
cucaaauauuugugggaca

SEQ ID NO: 659475 - RNA, 19 nt, Artificial Sequence
  Description of Artificial Sequence: Synthetic oligonucleotide
  Antisense strand to SEQ ID NO: 659474
ugucccacaaauauuugag

SEQ ID NO: 659476 - RNA, 19 nt, Artificial Sequence
  Description of Artificial Sequence: Synthetic oligonucleotide
  Sense strand starting at position 2600 of SEQ ID NO: 585685
aaauauuugugggacagga

SEQ ID NO: 659477 - RNA, 19 nt, Artificial Sequence
  Description of Artificial Sequence: Synthetic oligonucleotide
  Antisense strand to SEQ ID NO: 659476
uccugucccacaaauauuu

SEQ ID NO: 659478 - RNA, 19 nt, Artificial Sequence
  Description of Artificial Sequence: Synthetic oligonucleotide
  Sense strand starting at position 2640 of SEQ ID NO: 585685
gauuuaguguaucauaaag

SEQ ID NO: 659479 - RNA, 19 nt, Artificial Sequence
  Description of Artificial Sequence: Synthetic oligonucleotide
  Antisense strand to SEQ ID NO: 659478
cuuuaugauacacuaaauc

SEQ ID NO: 659480 - RNA, 19 nt, Artificial Sequence
  Description of Artificial Sequence: Synthetic oligonucleotide
  Sense strand starting at position 2695 of SEQ ID NO: 585685
ucaauaaacuauguuggga

SEQ ID NO: 659481 - RNA, 19 nt, Artificial Sequence
  Description of Artificial Sequence: Synthetic oligonucleotide
  Antisense strand to SEQ ID NO: 659480
ucccaacauaguuuauuga

SEQ ID NO: 659482 - RNA, 19 nt, Artificial Sequence
  Description of Artificial Sequence: Synthetic oligonucleotide
  Sense strand starting at position 2717 of SEQ ID NO: 585685
ugggcuagguaucugcaaa

SEQ ID NO: 659483 - RNA, 19 nt, Artificial Sequence
  Description of Artificial Sequence: Synthetic oligonucleotide
  Antisense strand to SEQ ID NO: 659482
uuugcagauaccuagccca

SEQ ID NO: 659484 - RNA, 19 nt, Artificial Sequence
  Description of Artificial Sequence: Synthetic oligonucleotide
  Sense strand starting at position 2759 of SEQ ID NO: 585685
agcauuccagauggauaaa

SEQ ID NO: 659485 - RNA, 19 nt, Artificial Sequence
  Description of Artificial Sequence: Synthetic oligonucleotide
  Antisense strand to SEQ ID NO: 659484
uuuauccaucuggaaugcu

SEQ ID NO: 659486 - RNA, 19 nt, Artificial Sequence
  Description of Artificial Sequence: Synthetic oligonucleotide
  Sense strand starting at position 2810 of SEQ ID NO: 585685
aauuauauguuguuuggga

SEQ ID NO: 659487 - RNA, 19 nt, Artificial Sequence
  Description of Artificial Sequence: Synthetic oligonucleotide
  Antisense strand to SEQ ID NO: 659486
ucccaaacaacauauaauu

SEQ ID NO: 659488 - RNA, 19 nt, Artificial Sequence
  Description of Artificial Sequence: Synthetic oligonucleotide
  Sense strand starting at position 2812 of SEQ ID NO: 585685
uuauauguuguuugggauu

SEQ ID NO: 659489 - RNA, 19 nt, Artificial Sequence
  Description of Artificial Sequence: Synthetic oligonucleotide
  Antisense strand to SEQ ID NO: 659488
aaucccaaacaacauauaa

SEQ ID NO: 659490 - RNA, 19 nt, Artificial Sequence
  Description of Artificial Sequence: Synthetic oligonucleotide
  Sense strand starting at position 2842 of SEQ ID NO: 585685
uauugaagaguguggagaa

SEQ ID NO: 659491 - RNA, 19 nt, Artificial Sequence
  Description of Artificial Sequence: Synthetic oligonucleotide
  Antisense strand to SEQ ID NO: 659490
uucuccacacucuucaaua

SEQ ID NO: 659492 - RNA, 19 nt, Artificial Sequence
  Description of Artificial Sequence: Synthetic oligonucleotide
  Sense strand starting at position 2845 of SEQ ID NO: 585685
ugaagaguguggagaauag

SEQ ID NO: 659493 - RNA, 19 nt, Artificial Sequence
  Description of Artificial Sequence: Synthetic oligonucleotide
  Antisense strand to SEQ ID NO: 659492
cuauucuccacacucuuca

SEQ ID NO: 659494 - RNA, 19 nt, Artificial Sequence
  Description of Artificial Sequence: Synthetic oligonucleotide
  Sense strand starting at position 2912 of SEQ ID NO: 585685
gcuggaguuaaugagggua

SEQ ID NO: 659495 - RNA, 19 nt, Artificial Sequence
  Description of Artificial Sequence: Synthetic oligonucleotide
  Antisense strand to SEQ ID NO: 659494
uacccucauuaacuccagc

SEQ ID NO: 659496 - RNA, 19 nt, Artificial Sequence
  Description of Artificial Sequence: Synthetic oligonucleotide
  Sense strand starting at position 3293 of SEQ ID NO: 585685
uagaucugucaugggauag

SEQ ID NO: 659497 - RNA, 19 nt, Artificial Sequence
  Description of Artificial Sequence: Synthetic oligonucleotide
  Antisense strand to SEQ ID NO: 659496
cuaucccaugacagaucua

SEQ ID NO: 659498 - RNA, 19 nt, Artificial Sequence
  Description of Artificial Sequence: Synthetic oligonucleotide
  Sense strand starting at position 3519 of SEQ ID NO: 585685
aagagaucaugggauaauu

SEQ ID NO: 659499 - RNA, 19 nt, Artificial Sequence
  Description of Artificial Sequence: Synthetic oligonucleotide
  Antisense strand to SEQ ID NO: 659498
aauuaucccaugaucucuu

SEQ ID NO: 659500 - RNA, 19 nt, Artificial Sequence
  Description of Artificial Sequence: Synthetic oligonucleotide
  Sense strand starting at position 3759 of SEQ ID NO: 585685
ccugcagaucaaugaaaga

SEQ ID NO: 659501 - RNA, 19 nt, Artificial Sequence
  Description of Artificial Sequence: Synthetic oligonucleotide
  Antisense strand to SEQ ID NO: 659500
ucuuucauugaucugcagg

SEQ ID NO: 659502 - RNA, 19 nt, Artificial Sequence
  Description of Artificial Sequence: Synthetic oligonucleotide
  Sense strand starting at position 3793 of SEQ ID NO: 585685
agaaauuggcaccauaugu

SEQ ID NO: 659503 - RNA, 19 nt, Artificial Sequence
  Description of Artificial Sequence: Synthetic oligonucleotide
  Antisense strand to SEQ ID NO: 659502
acauauggugccaauuucu

SEQ ID NO: 659504 - RNA, 19 nt, Artificial Sequence
  Description of Artificial Sequence: Synthetic oligonucleotide
  Sense strand starting at position 3798 of SEQ ID NO: 585685
uuggcaccauaugugaaua

SEQ ID NO: 659505 - RNA, 19 nt, Artificial Sequence
  Description of Artificial Sequence: Synthetic oligonucleotide
  Antisense strand to SEQ ID NO: 659504
uauucacauauggugccaa

SEQ ID NO: 659506 - RNA, 19 nt, Artificial Sequence
  Description of Artificial Sequence: Synthetic oligonucleotide
  Sense strand starting at position 14 of SEQ ID NO: 585686
aagagaaggccuggauguu

SEQ ID NO: 659507 - RNA, 19 nt, Artificial Sequence
  Description of Artificial Sequence: Synthetic oligonucleotide
  Antisense strand to SEQ ID NO: 659506
aacauccaggccuucucuu

SEQ ID NO: 659508 - RNA, 19 nt, Artificial Sequence
  Description of Artificial Sequence: Synthetic oligonucleotide
  Sense strand starting at position 15 of SEQ ID NO: 585686
agagaaggccuggauguuu

SEQ ID NO: 659509 - RNA, 19 nt, Artificial Sequence
  Description of Artificial Sequence: Synthetic oligonucleotide
  Antisense strand to SEQ ID NO: 659508
aaacauccaggccuucucu

SEQ ID NO: 659510 - RNA, 19 nt, Artificial Sequence
  Description of Artificial Sequence: Synthetic oligonucleotide
  Sense strand starting at position 26 of SEQ ID NO: 585686
ggauguuugcaaugacaca

SEQ ID NO: 659511 - RNA, 19 nt, Artificial Sequence
  Description of Artificial Sequence: Synthetic oligonucleotide
  Antisense strand to SEQ ID NO: 659510
ugugucauugcaaacaucc

SEQ ID NO: 659512 - RNA, 19 nt, Artificial Sequence
  Description of Artificial Sequence: Synthetic oligonucleotide
  Sense strand starting at position 58 of SEQ ID NO: 585686
ccauuuagcagugggucau

SEQ ID NO: 659513 - RNA, 19 nt, Artificial Sequence
  Description of Artificial Sequence: Synthetic oligonucleotide
  Antisense strand to SEQ ID NO: 659512
augacccacugcuaaaugg

SEQ ID NO: 659514 - RNA, 19 nt, Artificial Sequence
  Description of Artificial Sequence: Synthetic oligonucleotide
  Sense strand starting at position 59 of SEQ ID NO: 585686
cauuuagcagugggucauu

SEQ ID NO: 659515 - RNA, 19 nt, Artificial Sequence
  Description of Artificial Sequence: Synthetic oligonucleotide
  Antisense strand to SEQ ID NO: 659514
aaugacccacugcuaaaug

SEQ ID NO: 659516 - RNA, 19 nt, Artificial Sequence
  Description of Artificial Sequence: Synthetic oligonucleotide
  Sense strand starting at position 70 of SEQ ID NO: 585686
gggucauugugacuggauc

SEQ ID NO: 659517 - RNA, 19 nt, Artificial Sequence
  Description of Artificial Sequence: Synthetic oligonucleotide
  Antisense strand to SEQ ID NO: 659516
gauccagucacaaugaccc

SEQ ID NO: 659518 - RNA, 19 nt, Artificial Sequence
  Description of Artificial Sequence: Synthetic oligonucleotide
  Sense strand starting at position 71 of SEQ ID NO: 585686
ggucauugugacuggauca

SEQ ID NO: 659519 - RNA, 19 nt, Artificial Sequence
  Description of Artificial Sequence: Synthetic oligonucleotide
  Antisense strand to SEQ ID NO: 659518
ugauccagucacaaugacc

SEQ ID NO: 659520 - RNA, 19 nt, Artificial Sequence
  Description of Artificial Sequence: Synthetic oligonucleotide
  Sense strand starting at position 72 of SEQ ID NO: 585686
gucauugugacuggaucau

SEQ ID NO: 659521 - RNA, 19 nt, Artificial Sequence
  Description of Artificial Sequence: Synthetic oligonucleotide
  Antisense strand to SEQ ID NO: 659520
augauccagucacaaugac

SEQ ID NO: 659522 - RNA, 19 nt, Artificial Sequence
  Description of Artificial Sequence: Synthetic oligonucleotide
  Sense strand starting at position 78 of SEQ ID NO: 585686
gugacuggaucauugguua

SEQ ID NO: 659523 - RNA, 19 nt, Artificial Sequence
  Description of Artificial Sequence: Synthetic oligonucleotide
  Antisense strand to SEQ ID NO: 659522
uaaccaaugauccagucac

SEQ ID NO: 659524 - RNA, 19 nt, Artificial Sequence
  Description of Artificial Sequence: Synthetic oligonucleotide
  Sense strand starting at position 81 of SEQ ID NO: 585686
acuggaucauugguuaaug

SEQ ID NO: 659525 - RNA, 19 nt, Artificial Sequence
  Description of Artificial Sequence: Synthetic oligonucleotide
  Antisense strand to SEQ ID NO: 659524
cauuaaccaaugauccagu

SEQ ID NO: 659526 - RNA, 19 nt, Artificial Sequence
  Description of Artificial Sequence: Synthetic oligonucleotide
  Sense strand starting at position 105 of SEQ ID NO: 585686
ggguuucuacacugaggaa

SEQ ID NO: 659527 - RNA, 19 nt, Artificial Sequence
  Description of Artificial Sequence: Synthetic oligonucleotide
  Antisense strand to SEQ ID NO: 659526
uuccucaguguagaaaccc

SEQ ID NO: 659528 - RNA, 19 nt, Artificial Sequence
  Description of Artificial Sequence: Synthetic oligonucleotide
  Sense strand starting at position 333 of SEQ ID NO: 585686
cucccagugcccuaagaau

SEQ ID NO: 659529 - RNA, 19 nt, Artificial Sequence
  Description of Artificial Sequence: Synthetic oligonucleotide
  Antisense strand to SEQ ID NO: 659528
auucuuagggcacugggag

SEQ ID NO: 659530 - RNA, 19 nt, Artificial Sequence
  Description of Artificial Sequence: Synthetic oligonucleotide
  Sense strand starting at position 344 of SEQ ID NO: 585686
cuaagaauucccugagcca

SEQ ID NO: 659531 - RNA, 19 nt, Artificial Sequence
  Description of Artificial Sequence: Synthetic oligonucleotide
  Antisense strand to SEQ ID NO: 659530
uggcucagggaauucuuag

SEQ ID NO: 659532 - RNA, 19 nt, Artificial Sequence
  Description of Artificial Sequence: Synthetic oligonucleotide
  Sense strand starting at position 423 of SEQ ID NO: 585686
ccaugucuccuugaucuua

SEQ ID NO: 659533 - RNA, 19 nt, Artificial Sequence
  Description of Artificial Sequence: Synthetic oligonucleotide
  Antisense strand to SEQ ID NO: 659532
uaagaucaaggagacaugg

SEQ ID NO: 659534 - RNA, 19 nt, Artificial Sequence
  Description of Artificial Sequence: Synthetic oligonucleotide
  Sense strand starting at position 454 of SEQ ID NO: 585686
uuaauuacuguccagguca

SEQ ID NO: 659535 - RNA, 19 nt, Artificial Sequence
  Description of Artificial Sequence: Synthetic oligonucleotide
  Antisense strand to SEQ ID NO: 659534
ugaccuggacaguaauuaa

SEQ ID NO: 659536 - RNA, 19 nt, Artificial Sequence
  Description of Artificial Sequence: Synthetic oligonucleotide
  Sense strand starting at position 624 of SEQ ID NO: 585686
cuuugagaaguccaucauc

SEQ ID NO: 659537 - RNA, 19 nt, Artificial Sequence
  Description of Artificial Sequence: Synthetic oligonucleotide
  Antisense strand to SEQ ID NO: 659536
gaugauggacuucucaaag

SEQ ID NO: 659538 - RNA, 19 nt, Artificial Sequence
  Description of Artificial Sequence: Synthetic oligonucleotide
  Sense strand starting at position 656 of SEQ ID NO: 585686
aguguuucucugcacauuu

SEQ ID NO: 659539 - RNA, 19 nt, Artificial Sequence
  Description of Artificial Sequence: Synthetic oligonucleotide
  Antisense strand to SEQ ID NO: 659538
aaaugugcagagaaacacu

SEQ ID NO: 659540 - RNA, 19 nt, Artificial Sequence
  Description of Artificial Sequence: Synthetic oligonucleotide
  Sense strand starting at position 1276 of SEQ ID NO: 585686
gacugucugggaugagaua

SEQ ID NO: 659541 - RNA, 19 nt, Artificial Sequence
  Description of Artificial Sequence: Synthetic oligonucleotide
  Antisense strand to SEQ ID NO: 659540
uaucucaucccagacaguc

SEQ ID NO: 659542 - RNA, 19 nt, Artificial Sequence
  Description of Artificial Sequence: Synthetic oligonucleotide
  Sense strand starting at position 1285 of SEQ ID NO: 585686
ggaugagauacuugauggu

SEQ ID NO: 659543 - RNA, 19 nt, Artificial Sequence
  Description of Artificial Sequence: Synthetic oligonucleotide
  Antisense strand to SEQ ID NO: 659542
accaucaaguaucucaucc

SEQ ID NO: 659544 - RNA, 19 nt, Artificial Sequence
  Description of Artificial Sequence: Synthetic oligonucleotide
  Sense strand starting at position 1289 of SEQ ID NO: 585686
gagauacuugaugguacca

SEQ ID NO: 659545 - RNA, 19 nt, Artificial Sequence
  Description of Artificial Sequence: Synthetic oligonucleotide
  Antisense strand to SEQ ID NO: 659544
ugguaccaucaaguaucuc

SEQ ID NO: 659546 - RNA, 19 nt, Artificial Sequence
  Description of Artificial Sequence: Synthetic oligonucleotide
  Sense strand starting at position 1338 of SEQ ID NO: 585686
guguuaacaggaggauuca

SEQ ID NO: 659547 - RNA, 19 nt, Artificial Sequence
  Description of Artificial Sequence: Synthetic oligonucleotide
  Antisense strand to SEQ ID NO: 659546
ugaauccuccuguuaacac

SEQ ID NO: 659548 - RNA, 19 nt, Artificial Sequence
  Description of Artificial Sequence: Synthetic oligonucleotide
  Sense strand starting at position 1404 of SEQ ID NO: 585686
cagacaagccaguguauga

SEQ ID NO: 659549 - RNA, 19 nt, Artificial Sequence
  Description of Artificial Sequence: Synthetic oligonucleotide
  Antisense strand to SEQ ID NO: 659548
ucauacacuggcuugucug

SEQ ID NO: 659550 - RNA, 19 nt, Artificial Sequence
  Description of Artificial Sequence: Synthetic oligonucleotide
  Sense strand starting at position 1417 of SEQ ID NO: 585686
guaugaccuccugagacuu

SEQ ID NO: 659551 - RNA, 19 nt, Artificial Sequence
  Description of Artificial Sequence: Synthetic oligonucleotide
  Antisense strand to SEQ ID NO: 659550
aagucucaggaggucauac

SEQ ID NO: 659552 - RNA, 19 nt, Artificial Sequence
  Description of Artificial Sequence: Synthetic oligonucleotide
  Sense strand starting at position 1517 of SEQ ID NO: 585686
ggucccagauguucaggaa

SEQ ID NO: 659553 - RNA, 19 nt, Artificial Sequence
  Description of Artificial Sequence: Synthetic oligonucleotide
  Antisense strand to SEQ ID NO: 659552
uuccugaacaucugggacc

SEQ ID NO: 659554 - RNA, 19 nt, Artificial Sequence
  Description of Artificial Sequence: Synthetic oligonucleotide
  Sense strand starting at position 1531 of SEQ ID NO: 585686
aggaaagugaccuggagua

SEQ ID NO: 659555 - RNA, 19 nt, Artificial Sequence
  Description of Artificial Sequence: Synthetic oligonucleotide
  Antisense strand to SEQ ID NO: 659554
uacuccaggucacuuuccu

SEQ ID NO: 659556 - RNA, 19 nt, Artificial Sequence
  Description of Artificial Sequence: Synthetic oligonucleotide
  Sense strand starting at position 1622 of SEQ ID NO: 585686
ucccaugaacuggguguaa

SEQ ID NO: 659557 - RNA, 19 nt, Artificial Sequence
  Description of Artificial Sequence: Synthetic oligonucleotide
  Antisense strand to SEQ ID NO: 659556
uuacacccaguucauggga

SEQ ID NO: 659558 - RNA, 19 nt, Artificial Sequence
  Description of Artificial Sequence: Synthetic oligonucleotide
  Sense strand starting at position 1624 of SEQ ID NO: 585686
ccaugaacuggguguaaca

SEQ ID NO: 659559 - RNA, 19 nt, Artificial Sequence
  Description of Artificial Sequence: Synthetic oligonucleotide
  Antisense strand to SEQ ID NO: 659558
uguuacacccaguucaugg

SEQ ID NO: 659560 - RNA, 19 nt, Artificial Sequence
  Description of Artificial Sequence: Synthetic oligonucleotide
  Sense strand starting at position 1637 of SEQ ID NO: 585686
guaacaucccagggauccu

SEQ ID NO: 659561 - RNA, 19 nt, Artificial Sequence
  Description of Artificial Sequence: Synthetic oligonucleotide
  Antisense strand to SEQ ID NO: 659560
aggaucccugggauguuac

SEQ ID NO: 659562 - RNA, 19 nt, Artificial Sequence
  Description of Artificial Sequence: Synthetic oligonucleotide
  Sense strand starting at position 1841 of SEQ ID NO: 585686
gcuagaagucagggauauu

SEQ ID NO: 659563 - RNA, 19 nt, Artificial Sequence
  Description of Artificial Sequence: Synthetic oligonucleotide
  Antisense strand to SEQ ID NO: 659562
aauaucccugacuucuagc

SEQ ID NO: 659564 - RNA, 19 nt, Artificial Sequence
  Description of Artificial Sequence: Synthetic oligonucleotide
  Sense strand starting at position 1919 of SEQ ID NO: 585686
ugguauggugaagaaaugu

SEQ ID NO: 659565 - RNA, 19 nt, Artificial Sequence
  Description of Artificial Sequence: Synthetic oligonucleotide
  Antisense strand to SEQ ID NO: 659564
acauuucuucaccauacca

SEQ ID NO: 659566 - RNA, 19 nt, Artificial Sequence
  Description of Artificial Sequence: Synthetic oligonucleotide
  Sense strand starting at position 2351 of SEQ ID NO: 585686
ccucuuaaaugguugagau

SEQ ID NO: 659567 - RNA, 19 nt, Artificial Sequence
  Description of Artificial Sequence: Synthetic oligonucleotide
  Antisense strand to SEQ ID NO: 659566
aucucaaccauuuaagagg

SEQ ID NO: 659568 - RNA, 19 nt, Artificial Sequence
  Description of Artificial Sequence: Synthetic oligonucleotide
  Sense strand starting at position 2352 of SEQ ID NO: 585686
cucuuaaaugguugagauu

SEQ ID NO: 659569 - RNA, 19 nt, Artificial Sequence
  Description of Artificial Sequence: Synthetic oligonucleotide
  Antisense strand to SEQ ID NO: 659568
aaucucaaccauuuaagag

SEQ ID NO: 659570 - RNA, 19 nt, Artificial Sequence
  Description of Artificial Sequence: Synthetic oligonucleotide
  Sense strand starting at position 2425 of SEQ ID NO: 585686
aguggucuaccaugacaga

SEQ ID NO: 659571 - RNA, 19 nt, Artificial Sequence
  Description of Artificial Sequence: Synthetic oligonucleotide
  Antisense strand to SEQ ID NO: 659570
ucugucaugguagaccacu

SEQ ID NO: 659572 - RNA, 19 nt, Artificial Sequence
  Description of Artificial Sequence: Synthetic oligonucleotide
  Sense strand starting at position 2426 of SEQ ID NO: 585686
guggucuaccaugacagau

SEQ ID NO: 659573 - RNA, 19 nt, Artificial Sequence
  Description of Artificial Sequence: Synthetic oligonucleotide
  Antisense strand to SEQ ID NO: 659572
aucugucaugguagaccac

SEQ ID NO: 659574 - RNA, 19 nt, Artificial Sequence
  Description of Artificial Sequence: Synthetic oligonucleotide
  Sense strand starting at position 2510 of SEQ ID NO: 585686
gagugucuacuacauguau

SEQ ID NO: 659575 - RNA, 19 nt, Artificial Sequence
  Description of Artificial Sequence: Synthetic oligonucleotide
  Antisense strand to SEQ ID NO: 659574
auacauguaguagacacuc

SEQ ID NO: 659576 - RNA, 19 nt, Artificial Sequence
  Description of Artificial Sequence: Synthetic oligonucleotide
  Sense strand starting at position 2524 of SEQ ID NO: 585686
uguaucaggcacuaucaua

SEQ ID NO: 659577 - RNA, 19 nt, Artificial Sequence
  Description of Artificial Sequence: Synthetic oligonucleotide
  Antisense strand to SEQ ID NO: 659576
uaugauagugccugauaca

SEQ ID NO: 659578 - RNA, 19 nt, Artificial Sequence
  Description of Artificial Sequence: Synthetic oligonucleotide
  Sense strand starting at position 2910 of SEQ ID NO: 585686
ggucaacucucaccuauga

SEQ ID NO: 659579 - RNA, 19 nt, Artificial Sequence
  Description of Artificial Sequence: Synthetic oligonucleotide
  Antisense strand to SEQ ID NO: 659578
ucauaggugagaguugacc

SEQ ID NO: 659580 - RNA, 19 nt, Artificial Sequence
  Description of Artificial Sequence: Synthetic oligonucleotide
  Sense strand starting at position 3223 of SEQ ID NO: 585686
guucuagauccguaaggaa

SEQ ID NO: 659581 - RNA, 19 nt, Artificial Sequence
  Description of Artificial Sequence: Synthetic oligonucleotide
  Antisense strand to SEQ ID NO: 659580
uuccuuacggaucuagaac

SEQ ID NO: 659582 - RNA, 19 nt, Artificial Sequence
  Description of Artificial Sequence: Synthetic oligonucleotide
  Sense strand starting at position 3350 of SEQ ID NO: 585686
uuuaaugaacgucauucua

SEQ ID NO: 659583 - RNA, 19 nt, Artificial Sequence
  Description of Artificial Sequence: Synthetic oligonucleotide
  Antisense strand to SEQ ID NO: 659582
uagaaugacguucauuaaa

SEQ ID NO: 659584 - RNA, 19 nt, Artificial Sequence
  Description of Artificial Sequence: Synthetic oligonucleotide
  Sense strand starting at position 3730 of SEQ ID NO: 585686
aaaggaagucuuugcccau

SEQ ID NO: 659585 - RNA, 19 nt, Artificial Sequence
  Description of Artificial Sequence: Synthetic oligonucleotide
  Antisense strand to SEQ ID NO: 659584
augggcaaagacuuccuuu

SEQ ID NO: 659586 - RNA, 19 nt, Artificial Sequence
  Description of Artificial Sequence: Synthetic oligonucleotide
  Sense strand starting at position 199 of SEQ ID NO: 585687
acuccucuucuugaggagu

SEQ ID NO: 659587 - RNA, 19 nt, Artificial Sequence
  Description of Artificial Sequence: Synthetic oligonucleotide
  Antisense strand to SEQ ID NO: 659586
acuccucaagaagaggagu

SEQ ID NO: 659588 - RNA, 19 nt, Artificial Sequence
  Description of Artificial Sequence: Synthetic oligonucleotide
  Sense strand starting at position 513 of SEQ ID NO: 585687
auugauacuugaguauucu

SEQ ID NO: 659589 - RNA, 19 nt, Artificial Sequence
  Description of Artificial Sequence: Synthetic oligonucleotide
  Antisense strand to SEQ ID NO: 659588
agaauacucaaguaucaau

SEQ ID NO: 659590 - RNA, 19 nt, Artificial Sequence
  Description of Artificial Sequence: Synthetic oligonucleotide
  Sense strand starting at position 514 of SEQ ID NO: 585687
uugauacuugaguauucuu

SEQ ID NO: 659591 - RNA, 19 nt, Artificial Sequence
  Description of Artificial Sequence: Synthetic oligonucleotide
  Antisense strand to SEQ ID NO: 659590
aagaauacucaaguaucaa

SEQ ID NO: 659592 - RNA, 19 nt, Artificial Sequence
  Description of Artificial Sequence: Synthetic oligonucleotide
  Sense strand starting at position 642 of SEQ ID NO: 585687
ccuagcauuuguuagaaca

SEQ ID NO: 659593 - RNA, 19 nt, Artificial Sequence
  Description of Artificial Sequence: Synthetic oligonucleotide
  Antisense strand to SEQ ID NO: 659592
uguucuaacaaaugcuagg

SEQ ID NO: 659594 - RNA, 19 nt, Artificial Sequence
  Description of Artificial Sequence: Synthetic oligonucleotide
  Sense strand starting at position 644 of SEQ ID NO: 585687
uagcauuuguuagaacaug

SEQ ID NO: 659595 - RNA, 19 nt, Artificial Sequence
  Description of Artificial Sequence: Synthetic oligonucleotide
  Antisense strand to SEQ ID NO: 659594
cauguucuaacaaaugcua

SEQ ID NO: 659596 - RNA, 19 nt, Artificial Sequence
  Description of Artificial Sequence: Synthetic oligonucleotide
  Sense strand starting at position 674 of SEQ ID NO: 585687
uggaguuguuuguuauuau

SEQ ID NO: 659597 - RNA, 19 nt, Artificial Sequence
  Description of Artificial Sequence: Synthetic oligonucleotide
  Antisense strand to SEQ ID NO: 659596
auaauaacaaacaacucca

SEQ ID NO: 659598 - RNA, 19 nt, Artificial Sequence
  Description of Artificial Sequence: Synthetic oligonucleotide
  Sense strand starting at position 713 of SEQ ID NO: 585687
cuguuaguucgugaaacuc

SEQ ID NO: 659599 - RNA, 19 nt, Artificial Sequence
  Description of Artificial Sequence: Synthetic oligonucleotide
  Antisense strand to SEQ ID NO: 659598
gaguuucacgaacuaacag

SEQ ID NO: 659600 - RNA, 19 nt, Artificial Sequence
  Description of Artificial Sequence: Synthetic oligonucleotide
  Sense strand starting at position 835 of SEQ ID NO: 585687
uuuccuaucuuuguggauu

SEQ ID NO: 659601 - RNA, 19 nt, Artificial Sequence
  Description of Artificial Sequence: Synthetic oligonucleotide
  Antisense strand to SEQ ID NO: 659600
aauccacaaagauaggaaa

SEQ ID NO: 659602 - RNA, 19 nt, Artificial Sequence
  Description of Artificial Sequence: Synthetic oligonucleotide
  Sense strand starting at position 1468 of SEQ ID NO: 585687
gagguccuuccagaugagu

SEQ ID NO: 659603 - RNA, 19 nt, Artificial Sequence
  Description of Artificial Sequence: Synthetic oligonucleotide
  Antisense strand to SEQ ID NO: 659602
acucaucuggaaggaccuc

SEQ ID NO: 659604 - RNA, 19 nt, Artificial Sequence
  Description of Artificial Sequence: Synthetic oligonucleotide
  Sense strand starting at position 1470 of SEQ ID NO: 585687
gguccuuccagaugaguuu

SEQ ID NO: 659605 - RNA, 19 nt, Artificial Sequence
  Description of Artificial Sequence: Synthetic oligonucleotide
  Antisense strand to SEQ ID NO: 659604
aaacucaucuggaaggacc

SEQ ID NO: 659606 - RNA, 19 nt, Artificial Sequence
  Description of Artificial Sequence: Synthetic oligonucleotide
  Sense strand starting at position 1489 of SEQ ID NO: 585687
uguaauagacuccagcagu

SEQ ID NO: 659607 - RNA, 19 nt, Artificial Sequence
  Description of Artificial Sequence: Synthetic oligonucleotide
  Antisense strand to SEQ ID NO: 659606
acugcuggagucuauuaca

SEQ ID NO: 659608 - RNA, 19 nt, Artificial Sequence
  Description of Artificial Sequence: Synthetic oligonucleotide
  Sense strand starting at position 1536 of SEQ ID NO: 585687
ccaagucuaucauugggaa

SEQ ID NO: 659609 - RNA, 19 nt, Artificial Sequence
  Description of Artificial Sequence: Synthetic oligonucleotide
  Antisense strand to SEQ ID NO: 659608
uucccaaugauagacuugg

SEQ ID NO: 659610 - RNA, 19 nt, Artificial Sequence
  Description of Artificial Sequence: Synthetic oligonucleotide
  Sense strand starting at position 1537 of SEQ ID NO: 585687
caagucuaucauugggaaa

SEQ ID NO: 659611 - RNA, 19 nt, Artificial Sequence
  Description of Artificial Sequence: Synthetic oligonucleotide
  Antisense strand to SEQ ID NO: 659610
uuucccaaugauagacuug

SEQ ID NO: 659612 - RNA, 19 nt, Artificial Sequence
  Description of Artificial Sequence: Synthetic oligonucleotide
  Sense strand starting at position 1557 of SEQ ID NO: 585687
gucuuagggcucuaaguuu

SEQ ID NO: 659613 - RNA, 19 nt, Artificial Sequence
  Description of Artificial Sequence: Synthetic oligonucleotide
  Antisense strand to SEQ ID NO: 659612
aaacuuagagcccuaagac

SEQ ID NO: 659614 - RNA, 19 nt, Artificial Sequence
  Description of Artificial Sequence: Synthetic oligonucleotide
  Sense strand starting at position 1781 of SEQ ID NO: 585687
ucuuaccuuccuggaagau

SEQ ID NO: 659615 - RNA, 19 nt, Artificial Sequence
  Description of Artificial Sequence: Synthetic oligonucleotide
  Antisense strand to SEQ ID NO: 659614
aucuuccaggaagguaaga

SEQ ID NO: 659616 - RNA, 19 nt, Artificial Sequence
  Description of Artificial Sequence: Synthetic oligonucleotide
  Sense strand starting at position 1867 of SEQ ID NO: 585687
ggcugucuuccuguuguau

SEQ ID NO: 659617 - RNA, 19 nt, Artificial Sequence
  Description of Artificial Sequence: Synthetic oligonucleotide
  Antisense strand to SEQ ID NO: 659616
auacaacaggaagacagcc

SEQ ID NO: 659618 - RNA, 19 nt, Artificial Sequence
  Description of Artificial Sequence: Synthetic oligonucleotide
  Sense strand starting at position 1876 of SEQ ID NO: 585687
ccuguuguauccucacaca

SEQ ID NO: 659619 - RNA, 19 nt, Artificial Sequence
  Description of Artificial Sequence: Synthetic oligonucleotide
  Antisense strand to SEQ ID NO: 659618
ugugugaggauacaacagg

SEQ ID NO: 659620 - RNA, 19 nt, Artificial Sequence
  Description of Artificial Sequence: Synthetic oligonucleotide
  Sense strand starting at position 1949 of SEQ ID NO: 585687
cuccacucacaugaguuau

SEQ ID NO: 659621 - RNA, 19 nt, Artificial Sequence
  Description of Artificial Sequence: Synthetic oligonucleotide
  Antisense strand to SEQ ID NO: 659620
auaacucaugugaguggag

SEQ ID NO: 659622 - RNA, 19 nt, Artificial Sequence
  Description of Artificial Sequence: Synthetic oligonucleotide
  Sense strand starting at position 1951 of SEQ ID NO: 585687
ccacucacaugaguuauga

SEQ ID NO: 659623 - RNA, 19 nt, Artificial Sequence
  Description of Artificial Sequence: Synthetic oligonucleotide
  Antisense strand to SEQ ID NO: 659622
ucauaacucaugugagugg

SEQ ID NO: 659624 - RNA, 19 nt, Artificial Sequence
  Description of Artificial Sequence: Synthetic oligonucleotide
  Sense strand starting at position 1978 of SEQ ID NO: 585687
auagcaucaccuugagaau

SEQ ID NO: 659625 - RNA, 19 nt, Artificial Sequence
  Description of Artificial Sequence: Synthetic oligonucleotide
  Antisense strand to SEQ ID NO: 659624
auucucaaggugaugcuau

SEQ ID NO: 659626 - RNA, 19 nt, Artificial Sequence
  Description of Artificial Sequence: Synthetic oligonucleotide
  Sense strand starting at position 1987 of SEQ ID NO: 585687
ccuugagaauuaggauuuc

SEQ ID NO: 659627 - RNA, 19 nt, Artificial Sequence
  Description of Artificial Sequence: Synthetic oligonucleotide
  Antisense strand to SEQ ID NO: 659626
gaaauccuaauucucaagg

SEQ ID NO: 659628 - RNA, 19 nt, Artificial Sequence
  Description of Artificial Sequence: Synthetic oligonucleotide
  Sense strand starting at position 2030 of SEQ ID NO: 585687
aaacaugcggccuguaaca

SEQ ID NO: 659629 - RNA, 19 nt, Artificial Sequence
  Description of Artificial Sequence: Synthetic oligonucleotide
  Antisense strand to SEQ ID NO: 659628
uguuacaggccgcauguuu

SEQ ID NO: 659630 - RNA, 19 nt, Artificial Sequence
  Description of Artificial Sequence: Synthetic oligonucleotide
  Sense strand starting at position 2177 of SEQ ID NO: 585687
uaagguaagugggucuuua

SEQ ID NO: 659631 - RNA, 19 nt, Artificial Sequence
  Description of Artificial Sequence: Synthetic oligonucleotide
  Antisense strand to SEQ ID NO: 659630
uaaagacccacuuaccuua

SEQ ID NO: 659632 - RNA, 19 nt, Artificial Sequence
  Description of Artificial Sequence: Synthetic oligonucleotide
  Sense strand starting at position 2201 of SEQ ID NO: 585687
guccuuucuuaacuagaug

SEQ ID NO: 659633 - RNA, 19 nt, Artificial Sequence
  Description of Artificial Sequence: Synthetic oligonucleotide
  Antisense strand to SEQ ID NO: 659632
caucuaguuaagaaaggac

SEQ ID NO: 659634 - RNA, 19 nt, Artificial Sequence
  Description of Artificial Sequence: Synthetic oligonucleotide
  Sense strand starting at position 2310 of SEQ ID NO: 585687
gggucaagcguuugaagga

SEQ ID NO: 659635 - RNA, 19 nt, Artificial Sequence
  Description of Artificial Sequence: Synthetic oligonucleotide
  Antisense strand to SEQ ID NO: 659634
uccuucaaacgcuugaccc

SEQ ID NO: 659636 - RNA, 19 nt, Artificial Sequence
  Description of Artificial Sequence: Synthetic oligonucleotide
  Sense strand starting at position 2362 of SEQ ID NO: 585687
ugugguucucugucugcua

SEQ ID NO: 659637 - RNA, 19 nt, Artificial Sequence
  Description of Artificial Sequence: Synthetic oligonucleotide
  Antisense strand to SEQ ID NO: 659636
uagcagacagagaaccaca

SEQ ID NO: 659638 - RNA, 19 nt, Artificial Sequence
  Description of Artificial Sequence: Synthetic oligonucleotide
  Sense strand starting at position 2373 of SEQ ID NO: 585687
gucugcuaagguuaaagaa

SEQ ID NO: 659639 - RNA, 19 nt, Artificial Sequence
  Description of Artificial Sequence: Synthetic oligonucleotide
  Antisense strand to SEQ ID NO: 659638
uucuuuaaccuuagcagac

SEQ ID NO: 659640 - RNA, 19 nt, Artificial Sequence
  Description of Artificial Sequence: Synthetic oligonucleotide
  Sense strand starting at position 2415 of SEQ ID NO: 585687
caccucuuggucuggagaa

SEQ ID NO: 659641 - RNA, 19 nt, Artificial Sequence
  Description of Artificial Sequence: Synthetic oligonucleotide
  Antisense strand to SEQ ID NO: 659640
uucuccagaccaagaggug

SEQ ID NO: 659642 - RNA, 19 nt, Artificial Sequence
  Description of Artificial Sequence: Synthetic oligonucleotide
  Sense strand starting at position 2438 of SEQ ID NO: 585687
ucucaaaucuguccugagu

SEQ ID NO: 659643 - RNA, 19 nt, Artificial Sequence
  Description of Artificial Sequence: Synthetic oligonucleotide
  Antisense strand to SEQ ID NO: 659642
acucaggacagauuugaga

SEQ ID NO: 659644 - RNA, 19 nt, Artificial Sequence
  Description of Artificial Sequence: Synthetic oligonucleotide
  Sense strand starting at position 2441 of SEQ ID NO: 585687
caaaucuguccugagugga

SEQ ID NO: 659645 - RNA, 19 nt, Artificial Sequence
  Description of Artificial Sequence: Synthetic oligonucleotide
  Antisense strand to SEQ ID NO: 659644
uccacucaggacagauuug

SEQ ID NO: 659646 - RNA, 19 nt, Artificial Sequence
  Description of Artificial Sequence: Synthetic oligonucleotide
  Sense strand starting at position 2457 of SEQ ID NO: 585687
ggagccuguucuguacaca

SEQ ID NO: 659647 - RNA, 19 nt, Artificial Sequence
  Description of Artificial Sequence: Synthetic oligonucleotide
  Antisense strand to SEQ ID NO: 659646
uguguacagaacaggcucc

SEQ ID NO: 659648 - RNA, 19 nt, Artificial Sequence
  Description of Artificial Sequence: Synthetic oligonucleotide
  Sense strand starting at position 2458 of SEQ ID NO: 585687
gagccuguucuguacacau

SEQ ID NO: 659649 - RNA, 19 nt, Artificial Sequence
  Description of Artificial Sequence: Synthetic oligonucleotide
  Antisense strand to SEQ ID NO: 659648
auguguacagaacaggcuc

SEQ ID NO: 659650 - RNA, 19 nt, Artificial Sequence
  Description of Artificial Sequence: Synthetic oligonucleotide
  Sense strand starting at position 2642 of SEQ ID NO: 585687
ugauaugaccacugaguag

SEQ ID NO: 659651 - RNA, 19 nt, Artificial Sequence
  Description of Artificial Sequence: Synthetic oligonucleotide
  Antisense strand to SEQ ID NO: 659650
cuacucaguggucauauca

SEQ ID NO: 659652 - RNA, 19 nt, Artificial Sequence
  Description of Artificial Sequence: Synthetic oligonucleotide
  Sense strand starting at position 3294 of SEQ ID NO: 585687
aaguaagaagcgggugaua

SEQ ID NO: 659653 - RNA, 19 nt, Artificial Sequence
  Description of Artificial Sequence: Synthetic oligonucleotide
  Antisense strand to SEQ ID NO: 659652
uaucacccgcuucuuacuu

SEQ ID NO: 659654 - RNA, 19 nt, Artificial Sequence
  Description of Artificial Sequence: Synthetic oligonucleotide
  Sense strand starting at position 3296 of SEQ ID NO: 585687
guaagaagcgggugauaag

SEQ ID NO: 659655 - RNA, 19 nt, Artificial Sequence
  Description of Artificial Sequence: Synthetic oligonucleotide
  Antisense strand to SEQ ID NO: 659654
cuuaucacccgcuucuuac

SEQ ID NO: 659656 - RNA, 19 nt, Artificial Sequence
  Description of Artificial Sequence: Synthetic oligonucleotide
  Sense strand starting at position 3347 of SEQ ID NO: 585687
ggaagcccguugcuauaaa

SEQ ID NO: 659657 - RNA, 19 nt, Artificial Sequence
  Description of Artificial Sequence: Synthetic oligonucleotide
  Antisense strand to SEQ ID NO: 659656
uuuauagcaacgggcuucc

SEQ ID NO: 659658 - RNA, 19 nt, Artificial Sequence
  Description of Artificial Sequence: Synthetic oligonucleotide
  Sense strand starting at position 3407 of SEQ ID NO: 585687
aaugaauuggacugcaguu

SEQ ID NO: 659659 - RNA, 19 nt, Artificial Sequence
  Description of Artificial Sequence: Synthetic oligonucleotide
  Antisense strand to SEQ ID NO: 659658
aacugcaguccaauucauu

SEQ ID NO: 659660 - RNA, 19 nt, Artificial Sequence
  Description of Artificial Sequence: Synthetic oligonucleotide
  Sense strand starting at position 3572 of SEQ ID NO: 585687
uguggaagccuuggcauaa

SEQ ID NO: 659661 - RNA, 19 nt, Artificial Sequence
  Description of Artificial Sequence: Synthetic oligonucleotide
  Antisense strand to SEQ ID NO: 659660
uuaugccaaggcuuccaca

SEQ ID NO: 659662 - RNA, 19 nt, Artificial Sequence
  Description of Artificial Sequence: Synthetic oligonucleotide
  Sense strand starting at position 3597 of SEQ ID NO: 585687
gggaggaucugagggagaa

SEQ ID NO: 659663 - RNA, 19 nt, Artificial Sequence
  Description of Artificial Sequence: Synthetic oligonucleotide
  Antisense strand to SEQ ID NO: 659662
uucucccucagauccuccc

SEQ ID NO: 659664 - RNA, 19 nt, Artificial Sequence
  Description of Artificial Sequence: Synthetic oligonucleotide
  Sense strand starting at position 3971 of SEQ ID NO: 585687
gcaggagauguuuguccuu

SEQ ID NO: 659665 - RNA, 19 nt, Artificial Sequence
  Description of Artificial Sequence: Synthetic oligonucleotide
  Antisense strand to SEQ ID NO: 659664
aaggacaaacaucuccugc

SEQ ID NO: 659666 - RNA, 19 nt, Artificial Sequence
  Description of Artificial Sequence: Synthetic oligonucleotide
  Sense strand starting at position 33 of SEQ ID NO: 585688
acaggcaauccaugaauga

SEQ ID NO: 659667 - RNA, 19 nt, Artificial Sequence
  Description of Artificial Sequence: Synthetic oligonucleotide
  Antisense strand to SEQ ID NO: 659666
ucauucauggauugccugu

SEQ ID NO: 659668 - RNA, 19 nt, Artificial Sequence
  Description of Artificial Sequence: Synthetic oligonucleotide
  Sense strand starting at position 65 of SEQ ID NO: 585688
ugccuuaagugcccaauga

SEQ ID NO: 659669 - RNA, 19 nt, Artificial Sequence
  Description of Artificial Sequence: Synthetic oligonucleotide
  Antisense strand to SEQ ID NO: 659668
ucauugggcacuuaaggca

SEQ ID NO: 659670 - RNA, 19 nt, Artificial Sequence
  Description of Artificial Sequence: Synthetic oligonucleotide
  Sense strand starting at position 120 of SEQ ID NO: 585688
uccaaugucuaauuggaga

SEQ ID NO: 659671 - RNA, 19 nt, Artificial Sequence
  Description of Artificial Sequence: Synthetic oligonucleotide
  Antisense strand to SEQ ID NO: 659670
ucuccaauuagacauugga

SEQ ID NO: 659672 - RNA, 19 nt, Artificial Sequence
  Description of Artificial Sequence: Synthetic oligonucleotide
  Sense strand starting at position 131 of SEQ ID NO: 585688
auuggagaaucacaacaua

SEQ ID NO: 659673 - RNA, 19 nt, Artificial Sequence
  Description of Artificial Sequence: Synthetic oligonucleotide
  Antisense strand to SEQ ID NO: 659672
uauguugugauucuccaau

SEQ ID NO: 659674 - RNA, 19 nt, Artificial Sequence
  Description of Artificial Sequence: Synthetic oligonucleotide
  Sense strand starting at position 214 of SEQ ID NO: 585688
aagugucuccuguagagua

SEQ ID NO: 659675 - RNA, 19 nt, Artificial Sequence
  Description of Artificial Sequence: Synthetic oligonucleotide
  Antisense strand to SEQ ID NO: 659674
uacucuacaggagacacuu

SEQ ID NO: 659676 - RNA, 19 nt, Artificial Sequence
  Description of Artificial Sequence: Synthetic oligonucleotide
  Sense strand starting at position 335 of SEQ ID NO: 585688
ggaagagaggucuggcagu

SEQ ID NO: 659677 - RNA, 19 nt, Artificial Sequence
  Description of Artificial Sequence: Synthetic oligonucleotide
  Antisense strand to SEQ ID NO: 659676
acugccagaccucucuucc

SEQ ID NO: 659678 - RNA, 19 nt, Artificial Sequence
  Description of Artificial Sequence: Synthetic oligonucleotide
  Sense strand starting at position 688 of SEQ ID NO: 585688
guacuauuugcugguacac

SEQ ID NO: 659679 - RNA, 19 nt, Artificial Sequence
  Description of Artificial Sequence: Synthetic oligonucleotide
  Antisense strand to SEQ ID NO: 659678
guguaccagcaaauaguac

SEQ ID NO: 659680 - RNA, 19 nt, Artificial Sequence
  Description of Artificial Sequence: Synthetic oligonucleotide
  Sense strand starting at position 783 of SEQ ID NO: 585688
ccugcuguugcucugcaaa

SEQ ID NO: 659681 - RNA, 19 nt, Artificial Sequence
  Description of Artificial Sequence: Synthetic oligonucleotide
  Antisense strand to SEQ ID NO: 659680
uuugcagagcaacagcagg

SEQ ID NO: 659682 - RNA, 19 nt, Artificial Sequence
  Description of Artificial Sequence: Synthetic oligonucleotide
  Sense strand starting at position 1323 of SEQ ID NO: 585688
ggaagguuugugugguuga

SEQ ID NO: 659683 - RNA, 19 nt, Artificial Sequence
  Description of Artificial Sequence: Synthetic oligonucleotide
  Antisense strand to SEQ ID NO: 659682
ucaaccacacaaaccuucc

SEQ ID NO: 659684 - RNA, 19 nt, Artificial Sequence
  Description of Artificial Sequence: Synthetic oligonucleotide
  Sense strand starting at position 1326 of SEQ ID NO: 585688
agguuugugugguugagag

SEQ ID NO: 659685 - RNA, 19 nt, Artificial Sequence
  Description of Artificial Sequence: Synthetic oligonucleotide
  Antisense strand to SEQ ID NO: 659684
cucucaaccacacaaaccu

SEQ ID NO: 659686 - RNA, 19 nt, Artificial Sequence
  Description of Artificial Sequence: Synthetic oligonucleotide
  Sense strand starting at position 1918 of SEQ ID NO: 585688
gcucgcaggcugucugaau

SEQ ID NO: 659687 - RNA, 19 nt, Artificial Sequence
  Description of Artificial Sequence: Synthetic oligonucleotide
  Antisense strand to SEQ ID NO: 659686
auucagacagccugcgagc

SEQ ID NO: 659688 - RNA, 19 nt, Artificial Sequence
  Description of Artificial Sequence: Synthetic oligonucleotide
  Sense strand starting at position 2058 of SEQ ID NO: 585688
agccaaguugcucauccaa

SEQ ID NO: 659689 - RNA, 19 nt, Artificial Sequence
  Description of Artificial Sequence: Synthetic oligonucleotide
  Antisense strand to SEQ ID NO: 659688
uuggaugagcaacuuggcu

SEQ ID NO: 659690 - RNA, 19 nt, Artificial Sequence
  Description of Artificial Sequence: Synthetic oligonucleotide
  Sense strand starting at position 2060 of SEQ ID NO: 585688
ccaaguugcucauccaagu

SEQ ID NO: 659691 - RNA, 19 nt, Artificial Sequence
  Description of Artificial Sequence: Synthetic oligonucleotide
  Antisense strand to SEQ ID NO: 659690
acuuggaugagcaacuugg

SEQ ID NO: 659692 - RNA, 19 nt, Artificial Sequence
  Description of Artificial Sequence: Synthetic oligonucleotide
  Sense strand starting at position 2166 of SEQ ID NO: 585688
gccaaaggcuucuuuccau

SEQ ID NO: 659693 - RNA, 19 nt, Artificial Sequence
  Description of Artificial Sequence: Synthetic oligonucleotide
  Antisense strand to SEQ ID NO: 659692
auggaaagaagccuuuggc

SEQ ID NO: 659694 - RNA, 19 nt, Artificial Sequence
  Description of Artificial Sequence: Synthetic oligonucleotide
  Sense strand starting at position 2192 of SEQ ID NO: 585688
ucauguaaucaucaccgca

SEQ ID NO: 659695 - RNA, 19 nt, Artificial Sequence
  Description of Artificial Sequence: Synthetic oligonucleotide
  Antisense strand to SEQ ID NO: 659694
ugcggugaugauuacauga

SEQ ID NO: 659696 - RNA, 19 nt, Artificial Sequence
  Description of Artificial Sequence: Synthetic oligonucleotide
  Sense strand starting at position 2194 of SEQ ID NO: 585688
auguaaucaucaccgcaau

SEQ ID NO: 659697 - RNA, 19 nt, Artificial Sequence
  Description of Artificial Sequence: Synthetic oligonucleotide
  Antisense strand to SEQ ID NO: 659696
auugcggugaugauuacau

SEQ ID NO: 659698 - RNA, 19 nt, Artificial Sequence
  Description of Artificial Sequence: Synthetic oligonucleotide
  Sense strand starting at position 2195 of SEQ ID NO: 585688
uguaaucaucaccgcaauu

SEQ ID NO: 659699 - RNA, 19 nt, Artificial Sequence
  Description of Artificial Sequence: Synthetic oligonucleotide
  Antisense strand to SEQ ID NO: 659698
aauugcggugaugauuaca

SEQ ID NO: 659700 - RNA, 19 nt, Artificial Sequence
  Description of Artificial Sequence: Synthetic oligonucleotide
  Sense strand starting at position 2224 of SEQ ID NO: 585688
guauuaauccaauguggau

SEQ ID NO: 659701 - RNA, 19 nt, Artificial Sequence
  Description of Artificial Sequence: Synthetic oligonucleotide
  Antisense strand to SEQ ID NO: 659700
auccacauuggauuaauac

SEQ ID NO: 659702 - RNA, 19 nt, Artificial Sequence
  Description of Artificial Sequence: Synthetic oligonucleotide
  Sense strand starting at position 2924 of SEQ ID NO: 585688
auaugugucuugcugggau

SEQ ID NO: 659703 - RNA, 19 nt, Artificial Sequence
  Description of Artificial Sequence: Synthetic oligonucleotide
  Antisense strand to SEQ ID NO: 659702
aucccagcaagacacauau

SEQ ID NO: 659704 - RNA, 19 nt, Artificial Sequence
  Description of Artificial Sequence: Synthetic oligonucleotide
  Sense strand starting at position 2946 of SEQ ID NO: 585688
cccaauucggauuggcaaa

SEQ ID NO: 659705 - RNA, 19 nt, Artificial Sequence
  Description of Artificial Sequence: Synthetic oligonucleotide
  Antisense strand to SEQ ID NO: 659704
uuugccaauccgaauuggg

SEQ ID NO: 659706 - RNA, 19 nt, Artificial Sequence
  Description of Artificial Sequence: Synthetic oligonucleotide
  Sense strand starting at position 3046 of SEQ ID NO: 585688
cuugcugauuuagaaagca

SEQ ID NO: 659707 - RNA, 19 nt, Artificial Sequence
  Description of Artificial Sequence: Synthetic oligonucleotide
  Antisense strand to SEQ ID NO: 659706
ugcuuucuaaaucagcaag

SEQ ID NO: 659708 - RNA, 19 nt, Artificial Sequence
  Description of Artificial Sequence: Synthetic oligonucleotide
  Sense strand starting at position 3058 of SEQ ID NO: 585688
gaaagcacaucagagagau

SEQ ID NO: 659709 - RNA, 19 nt, Artificial Sequence
  Description of Artificial Sequence: Synthetic oligonucleotide
  Antisense strand to SEQ ID NO: 659708
aucucucugaugugcuuuc

SEQ ID NO: 659710 - RNA, 19 nt, Artificial Sequence
  Description of Artificial Sequence: Synthetic oligonucleotide
  Sense strand starting at position 3071 of SEQ ID NO: 585688
agagauugacccugagcuc

SEQ ID NO: 659711 - RNA, 19 nt, Artificial Sequence
  Description of Artificial Sequence: Synthetic oligonucleotide
  Antisense strand to SEQ ID NO: 659710
gagcucagggucaaucucu

SEQ ID NO: 659712 - RNA, 19 nt, Artificial Sequence
  Description of Artificial Sequence: Synthetic oligonucleotide
  Sense strand starting at position 3336 of SEQ ID NO: 585688
cggaucucccugugugaca

SEQ ID NO: 659713 - RNA, 19 nt, Artificial Sequence
  Description of Artificial Sequence: Synthetic oligonucleotide
  Antisense strand to SEQ ID NO: 659712
ugucacacagggagauccg

SEQ ID NO: 659714 - RNA, 19 nt, Artificial Sequence
  Description of Artificial Sequence: Synthetic oligonucleotide
  Sense strand starting at position 3337 of SEQ ID NO: 585688
ggaucucccugugugacaa

SEQ ID NO: 659715 - RNA, 19 nt, Artificial Sequence
  Description of Artificial Sequence: Synthetic oligonucleotide
  Antisense strand to SEQ ID NO: 659714
uugucacacagggagaucc

SEQ ID NO: 659716 - RNA, 19 nt, Artificial Sequence
  Description of Artificial Sequence: Synthetic oligonucleotide
  Sense strand starting at position 3338 of SEQ ID NO: 585688
gaucucccugugugacaaa

SEQ ID NO: 659717 - RNA, 19 nt, Artificial Sequence
  Description of Artificial Sequence: Synthetic oligonucleotide
  Antisense strand to SEQ ID NO: 659716
uuugucacacagggagauc

SEQ ID NO: 659718 - RNA, 19 nt, Artificial Sequence
  Description of Artificial Sequence: Synthetic oligonucleotide
  Sense strand starting at position 3348 of SEQ ID NO: 585688
ugugacaaaugcucacaca

SEQ ID NO: 659719 - RNA, 19 nt, Artificial Sequence
  Description of Artificial Sequence: Synthetic oligonucleotide
  Antisense strand to SEQ ID NO: 659718
ugugugagcauuugucaca

SEQ ID NO: 659720 - RNA, 19 nt, Artificial Sequence
  Description of Artificial Sequence: Synthetic oligonucleotide
  Sense strand starting at position 3349 of SEQ ID NO: 585688
gugacaaaugcucacacau

SEQ ID NO: 659721 - RNA, 19 nt, Artificial Sequence
  Description of Artificial Sequence: Synthetic oligonucleotide
  Antisense strand to SEQ ID NO: 659720
augugugagcauuugucac

SEQ ID NO: 659722 - RNA, 19 nt, Artificial Sequence
  Description of Artificial Sequence: Synthetic oligonucleotide
  Sense strand starting at position 3374 of SEQ ID NO: 585688
gcuucucuacuagaagcau

SEQ ID NO: 659723 - RNA, 19 nt, Artificial Sequence
  Description of Artificial Sequence: Synthetic oligonucleotide
  Antisense strand to SEQ ID NO: 659722
augcuucuaguagagaagc

SEQ ID NO: 659724 - RNA, 19 nt, Artificial Sequence
  Description of Artificial Sequence: Synthetic oligonucleotide
  Sense strand starting at position 3389 of SEQ ID NO: 585688
gcaugaggucuuugagacu

SEQ ID NO: 659725 - RNA, 19 nt, Artificial Sequence
  Description of Artificial Sequence: Synthetic oligonucleotide
  Antisense strand to SEQ ID NO: 659724
agucucaaagaccucaugc

SEQ ID NO: 659726 - RNA, 19 nt, Artificial Sequence
  Description of Artificial Sequence: Synthetic oligonucleotide
  Sense strand starting at position 3408 of SEQ ID NO: 585688
auacuagaucuguguacag

SEQ ID NO: 659727 - RNA, 19 nt, Artificial Sequence
  Description of Artificial Sequence: Synthetic oligonucleotide
  Antisense strand to SEQ ID NO: 659726
cuguacacagaucuaguau

SEQ ID NO: 659728 - RNA, 19 nt, Artificial Sequence
  Description of Artificial Sequence: Synthetic oligonucleotide
  Sense strand starting at position 3410 of SEQ ID NO: 585688
acuagaucuguguacagcu

SEQ ID NO: 659729 - RNA, 19 nt, Artificial Sequence
  Description of Artificial Sequence: Synthetic oligonucleotide
  Antisense strand to SEQ ID NO: 659728
agcuguacacagaucuagu

SEQ ID NO: 659730 - RNA, 19 nt, Artificial Sequence
  Description of Artificial Sequence: Synthetic oligonucleotide
  Sense strand starting at position 3462 of SEQ ID NO: 585688
gcucaauuggaaugugauc

SEQ ID NO: 659731 - RNA, 19 nt, Artificial Sequence
  Description of Artificial Sequence: Synthetic oligonucleotide
  Antisense strand to SEQ ID NO: 659730
gaucacauuccaauugagc

SEQ ID NO: 659732 - RNA, 19 nt, Artificial Sequence
  Description of Artificial Sequence: Synthetic oligonucleotide
  Sense strand starting at position 3467 of SEQ ID NO: 585688
auuggaaugugaucaauug

SEQ ID NO: 659733 - RNA, 19 nt, Artificial Sequence
  Description of Artificial Sequence: Synthetic oligonucleotide
  Antisense strand to SEQ ID NO: 659732
caauugaucacauuccaau

SEQ ID NO: 659734 - RNA, 19 nt, Artificial Sequence
  Description of Artificial Sequence: Synthetic oligonucleotide
  Sense strand starting at position 3468 of SEQ ID NO: 585688
uuggaaugugaucaauugu

SEQ ID NO: 659735 - RNA, 19 nt, Artificial Sequence
  Description of Artificial Sequence: Synthetic oligonucleotide
  Antisense strand to SEQ ID NO: 659734
acaauugaucacauuccaa

SEQ ID NO: 659736 - RNA, 19 nt, Artificial Sequence
  Description of Artificial Sequence: Synthetic oligonucleotide
  Sense strand starting at position 3568 of SEQ ID NO: 585688
cauugaugccuggauccau

SEQ ID NO: 659737 - RNA, 19 nt, Artificial Sequence
  Description of Artificial Sequence: Synthetic oligonucleotide
  Antisense strand to SEQ ID NO: 659736
auggauccaggcaucaaug

SEQ ID NO: 659738 - RNA, 19 nt, Artificial Sequence
  Description of Artificial Sequence: Synthetic oligonucleotide
  Sense strand starting at position 3650 of SEQ ID NO: 585688
ccaauuguauccuugucuu

SEQ ID NO: 659739 - RNA, 19 nt, Artificial Sequence
  Description of Artificial Sequence: Synthetic oligonucleotide
  Antisense strand to SEQ ID NO: 659738
aagacaaggauacaauugg

SEQ ID NO: 659740 - RNA, 19 nt, Artificial Sequence
  Description of Artificial Sequence: Synthetic oligonucleotide
  Sense strand starting at position 3653 of SEQ ID NO: 585688
auuguauccuugucuuaau

SEQ ID NO: 659741 - RNA, 19 nt, Artificial Sequence
  Description of Artificial Sequence: Synthetic oligonucleotide
  Antisense strand to SEQ ID NO: 659740
auuaagacaaggauacaau

SEQ ID NO: 659742 - RNA, 19 nt, Artificial Sequence
  Description of Artificial Sequence: Synthetic oligonucleotide
  Sense strand starting at position 3654 of SEQ ID NO: 585688
uuguauccuugucuuaauu

SEQ ID NO: 659743 - RNA, 19 nt, Artificial Sequence
  Description of Artificial Sequence: Synthetic oligonucleotide
  Antisense strand to SEQ ID NO: 659742
aauuaagacaaggauacaa

SEQ ID NO: 659744 - RNA, 19 nt, Artificial Sequence
  Description of Artificial Sequence: Synthetic oligonucleotide
  Sense strand starting at position 3741 of SEQ ID NO: 585688
cugugaagggcuuagcuua

SEQ ID NO: 659745 - RNA, 19 nt, Artificial Sequence
  Description of Artificial Sequence: Synthetic oligonucleotide
  Antisense strand to SEQ ID NO: 659744
uaagcuaagcccuucacag

SEQ ID NO: 659746 - RNA, 19 nt, Artificial Sequence
  Description of Artificial Sequence: Synthetic oligonucleotide
  Sense strand starting at position 7 of SEQ ID NO: 585689
auguaaagguguucaggga

SEQ ID NO: 659747 - RNA, 19 nt, Artificial Sequence
  Description of Artificial Sequence: Synthetic oligonucleotide
  Antisense strand to SEQ ID NO: 659746
ucccugaacaccuuuacau

SEQ ID NO: 659748 - RNA, 19 nt, Artificial Sequence
  Description of Artificial Sequence: Synthetic oligonucleotide
  Sense strand starting at position 8 of SEQ ID NO: 585689
uguaaagguguucagggaa

SEQ ID NO: 659749 - RNA, 19 nt, Artificial Sequence
  Description of Artificial Sequence: Synthetic oligonucleotide
  Antisense strand to SEQ ID NO: 659748
uucccugaacaccuuuaca

SEQ ID NO: 659750 - RNA, 19 nt, Artificial Sequence
  Description of Artificial Sequence: Synthetic oligonucleotide
  Sense strand starting at position 156 of SEQ ID NO: 585689
agguacauguggucacaau

SEQ ID NO: 659751 - RNA, 19 nt, Artificial Sequence
  Description of Artificial Sequence: Synthetic oligonucleotide
  Antisense strand to SEQ ID NO: 659750
auugugaccacauguaccu

SEQ ID NO: 659752 - RNA, 19 nt, Artificial Sequence
  Description of Artificial Sequence: Synthetic oligonucleotide
  Sense strand starting at position 157 of SEQ ID NO: 585689
gguacauguggucacaaug

SEQ ID NO: 659753 - RNA, 19 nt, Artificial Sequence
  Description of Artificial Sequence: Synthetic oligonucleotide
  Antisense strand to SEQ ID NO: 659752
cauugugaccacauguacc

SEQ ID NO: 659754 - RNA, 19 nt, Artificial Sequence
  Description of Artificial Sequence: Synthetic oligonucleotide
  Sense strand starting at position 169 of SEQ ID NO: 585689
cacaaugucuaauuggaga

SEQ ID NO: 659755 - RNA, 19 nt, Artificial Sequence
  Description of Artificial Sequence: Synthetic oligonucleotide
  Antisense strand to SEQ ID NO: 659754
ucuccaauuagacauugug

SEQ ID NO: 659756 - RNA, 19 nt, Artificial Sequence
  Description of Artificial Sequence: Synthetic oligonucleotide
  Sense strand starting at position 180 of SEQ ID NO: 585689
auuggagaaucacaacaga

SEQ ID NO: 659757 - RNA, 19 nt, Artificial Sequence
  Description of Artificial Sequence: Synthetic oligonucleotide
  Antisense strand to SEQ ID NO: 659756
ucuguugugauucuccaau

SEQ ID NO: 659758 - RNA, 19 nt, Artificial Sequence
  Description of Artificial Sequence: Synthetic oligonucleotide
  Sense strand starting at position 356 of SEQ ID NO: 585689
gaagcuuagggaugccuau

SEQ ID NO: 659759 - RNA, 19 nt, Artificial Sequence
  Description of Artificial Sequence: Synthetic oligonucleotide
  Antisense strand to SEQ ID NO: 659758
auaggcaucccuaagcuuc

SEQ ID NO: 659760 - RNA, 19 nt, Artificial Sequence
  Description of Artificial Sequence: Synthetic oligonucleotide
  Sense strand starting at position 363 of SEQ ID NO: 585689
agggaugccuauuccugaa

SEQ ID NO: 659761 - RNA, 19 nt, Artificial Sequence
  Description of Artificial Sequence: Synthetic oligonucleotide
  Antisense strand to SEQ ID NO: 659760
uucaggaauaggcaucccu

SEQ ID NO: 659762 - RNA, 19 nt, Artificial Sequence
  Description of Artificial Sequence: Synthetic oligonucleotide
  Sense strand starting at position 385 of SEQ ID NO: 585689
cucagagcugcccauuacu

SEQ ID NO: 659763 - RNA, 19 nt, Artificial Sequence
  Description of Artificial Sequence: Synthetic oligonucleotide
  Antisense strand to SEQ ID NO: 659762
aguaaugggcagcucugag

SEQ ID NO: 659764 - RNA, 19 nt, Artificial Sequence
  Description of Artificial Sequence: Synthetic oligonucleotide
  Sense strand starting at position 432 of SEQ ID NO: 585689
ggaagauaggcccagcagu

SEQ ID NO: 659765 - RNA, 19 nt, Artificial Sequence
  Description of Artificial Sequence: Synthetic oligonucleotide
  Antisense strand to SEQ ID NO: 659764
acugcugggccuaucuucc

SEQ ID NO: 659766 - RNA, 19 nt, Artificial Sequence
  Description of Artificial Sequence: Synthetic oligonucleotide
  Sense strand starting at position 742 of SEQ ID NO: 585689
agacaucacuuggagauga

SEQ ID NO: 659767 - RNA, 19 nt, Artificial Sequence
  Description of Artificial Sequence: Synthetic oligonucleotide
  Antisense strand to SEQ ID NO: 659766
ucaucuccaagugaugucu

SEQ ID NO: 659768 - RNA, 19 nt, Artificial Sequence
  Description of Artificial Sequence: Synthetic oligonucleotide
  Sense strand starting at position 912 of SEQ ID NO: 585689
acccauggccugcaaagau

SEQ ID NO: 659769 - RNA, 19 nt, Artificial Sequence
  Description of Artificial Sequence: Synthetic oligonucleotide
  Antisense strand to SEQ ID NO: 659768
aucuuugcaggccaugggu

SEQ ID NO: 659770 - RNA, 19 nt, Artificial Sequence
  Description of Artificial Sequence: Synthetic oligonucleotide
  Sense strand starting at position 1403 of SEQ ID NO: 585689
ggaggguuugugugguaga

SEQ ID NO: 659771 - RNA, 19 nt, Artificial Sequence
  Description of Artificial Sequence: Synthetic oligonucleotide
  Antisense strand to SEQ ID NO: 659770
ucuaccacacaaacccucc

SEQ ID NO: 659772 - RNA, 19 nt, Artificial Sequence
  Description of Artificial Sequence: Synthetic oligonucleotide
  Sense strand starting at position 1408 of SEQ ID NO: 585689
guuugugugguagagagca

SEQ ID NO: 659773 - RNA, 19 nt, Artificial Sequence
  Description of Artificial Sequence: Synthetic oligonucleotide
  Antisense strand to SEQ ID NO: 659772
ugcucucuaccacacaaac

SEQ ID NO: 659774 - RNA, 19 nt, Artificial Sequence
  Description of Artificial Sequence: Synthetic oligonucleotide
  Sense strand starting at position 1746 of SEQ ID NO: 585689
ggagaucucccuuguccuu

SEQ ID NO: 659775 - RNA, 19 nt, Artificial Sequence
  Description of Artificial Sequence: Synthetic oligonucleotide
  Antisense strand to SEQ ID NO: 659774
aaggacaagggagaucucc

SEQ ID NO: 659776 - RNA, 19 nt, Artificial Sequence
  Description of Artificial Sequence: Synthetic oligonucleotide
  Sense strand starting at position 1978 of SEQ ID NO: 585689
gguggauccuggaagauga

SEQ ID NO: 659777 - RNA, 19 nt, Artificial Sequence
  Description of Artificial Sequence: Synthetic oligonucleotide
  Antisense strand to SEQ ID NO: 659776
ucaucuuccaggauccacc

SEQ ID NO: 659778 - RNA, 19 nt, Artificial Sequence
  Description of Artificial Sequence: Synthetic oligonucleotide
  Sense strand starting at position 1995 of SEQ ID NO: 585689
gaaaucaccucugugcuga

SEQ ID NO: 659779 - RNA, 19 nt, Artificial Sequence
  Description of Artificial Sequence: Synthetic oligonucleotide
  Antisense strand to SEQ ID NO: 659778
ucagcacagaggugauuuc

SEQ ID NO: 659780 - RNA, 19 nt, Artificial Sequence
  Description of Artificial Sequence: Synthetic oligonucleotide
  Sense strand starting at position 2010 of SEQ ID NO: 585689
cugaaaggcuggcuuauau

SEQ ID NO: 659781 - RNA, 19 nt, Artificial Sequence
  Description of Artificial Sequence: Synthetic oligonucleotide
  Antisense strand to SEQ ID NO: 659780
auauaagccagccuuucag

SEQ ID NO: 659782 - RNA, 19 nt, Artificial Sequence
  Description of Artificial Sequence: Synthetic oligonucleotide
  Sense strand starting at position 2055 of SEQ ID NO: 585689
gggaaugagucaccucgau

SEQ ID NO: 659783 - RNA, 19 nt, Artificial Sequence
  Description of Artificial Sequence: Synthetic oligonucleotide
  Antisense strand to SEQ ID NO: 659782
aucgaggugacucauuccc

SEQ ID NO: 659784 - RNA, 19 nt, Artificial Sequence
  Description of Artificial Sequence: Synthetic oligonucleotide
  Sense strand starting at position 2299 of SEQ ID NO: 585689
aaacgugcagaggaauauu

SEQ ID NO: 659785 - RNA, 19 nt, Artificial Sequence
  Description of Artificial Sequence: Synthetic oligonucleotide
  Antisense strand to SEQ ID NO: 659784
aauauuccucugcacguuu

SEQ ID NO: 659786 - RNA, 19 nt, Artificial Sequence
  Description of Artificial Sequence: Synthetic oligonucleotide
  Sense strand starting at position 2880 of SEQ ID NO: 585689
auuggugaagaugguaaau

SEQ ID NO: 659787 - RNA, 19 nt, Artificial Sequence
  Description of Artificial Sequence: Synthetic oligonucleotide
  Antisense strand to SEQ ID NO: 659786
auuuaccaucuucaccaau

SEQ ID NO: 659788 - RNA, 19 nt, Artificial Sequence
  Description of Artificial Sequence: Synthetic oligonucleotide
  Sense strand starting at position 2891 of SEQ ID NO: 585689
ugguaaauucuauguucua

SEQ ID NO: 659789 - RNA, 19 nt, Artificial Sequence
  Description of Artificial Sequence: Synthetic oligonucleotide
  Antisense strand to SEQ ID NO: 659788
uagaacauagaauuuacca

SEQ ID NO: 659790 - RNA, 19 nt, Artificial Sequence
  Description of Artificial Sequence: Synthetic oligonucleotide
  Sense strand starting at position 2892 of SEQ ID NO: 585689
gguaaauucuauguucuau

SEQ ID NO: 659791 - RNA, 19 nt, Artificial Sequence
  Description of Artificial Sequence: Synthetic oligonucleotide
  Antisense strand to SEQ ID NO: 659790
auagaacauagaauuuacc

SEQ ID NO: 659792 - RNA, 19 nt, Artificial Sequence
  Description of Artificial Sequence: Synthetic oligonucleotide
  Sense strand starting at position 3053 of SEQ ID NO: 585689
gugacacgcuugcugauuu

SEQ ID NO: 659793 - RNA, 19 nt, Artificial Sequence
  Description of Artificial Sequence: Synthetic oligonucleotide
  Antisense strand to SEQ ID NO: 659792
aaaucagcaagcgugucac

SEQ ID NO: 659794 - RNA, 19 nt, Artificial Sequence
  Description of Artificial Sequence: Synthetic oligonucleotide
  Sense strand starting at position 3057 of SEQ ID NO: 585689
cacgcuugcugauuuagaa

SEQ ID NO: 659795 - RNA, 19 nt, Artificial Sequence
  Description of Artificial Sequence: Synthetic oligonucleotide
  Antisense strand to SEQ ID NO: 659794
uucuaaaucagcaagcgug

SEQ ID NO: 659796 - RNA, 19 nt, Artificial Sequence
  Description of Artificial Sequence: Synthetic oligonucleotide
  Sense strand starting at position 3070 of SEQ ID NO: 585689
uuagaaagcuccucagaga

SEQ ID NO: 659797 - RNA, 19 nt, Artificial Sequence
  Description of Artificial Sequence: Synthetic oligonucleotide
  Antisense strand to SEQ ID NO: 659796
ucucugaggagcuuucuaa

SEQ ID NO: 659798 - RNA, 19 nt, Artificial Sequence
  Description of Artificial Sequence: Synthetic oligonucleotide
  Sense strand starting at position 3086 of SEQ ID NO: 585689
agagauuaccucugagcuc

SEQ ID NO: 659799 - RNA, 19 nt, Artificial Sequence
  Description of Artificial Sequence: Synthetic oligonucleotide
  Antisense strand to SEQ ID NO: 659798
gagcucagagguaaucucu

SEQ ID NO: 659800 - RNA, 19 nt, Artificial Sequence
  Description of Artificial Sequence: Synthetic oligonucleotide
  Sense strand starting at position 3349 of SEQ ID NO: 585689
uccagaucucccuguguga

SEQ ID NO: 659801 - RNA, 19 nt, Artificial Sequence
  Description of Artificial Sequence: Synthetic oligonucleotide
  Antisense strand to SEQ ID NO: 659800
ucacacagggagaucugga

SEQ ID NO: 659802 - RNA, 19 nt, Artificial Sequence
  Description of Artificial Sequence: Synthetic oligonucleotide
  Sense strand starting at position 3351 of SEQ ID NO: 585689
cagaucucccugugugaca

SEQ ID NO: 659803 - RNA, 19 nt, Artificial Sequence
  Description of Artificial Sequence: Synthetic oligonucleotide
  Antisense strand to SEQ ID NO: 659802
ugucacacagggagaucug

SEQ ID NO: 659804 - RNA, 19 nt, Artificial Sequence
  Description of Artificial Sequence: Synthetic oligonucleotide
  Sense strand starting at position 3352 of SEQ ID NO: 585689
agaucucccugugugacaa

SEQ ID NO: 659805 - RNA, 19 nt, Artificial Sequence
  Description of Artificial Sequence: Synthetic oligonucleotide
  Antisense strand to SEQ ID NO: 659804
uugucacacagggagaucu

SEQ ID NO: 659806 - RNA, 19 nt, Artificial Sequence
  Description of Artificial Sequence: Synthetic oligonucleotide
  Sense strand starting at position 3353 of SEQ ID NO: 585689
gaucucccugugugacaau

SEQ ID NO: 659807 - RNA, 19 nt, Artificial Sequence
  Description of Artificial Sequence: Synthetic oligonucleotide
  Antisense strand to SEQ ID NO: 659806
auugucacacagggagauc

SEQ ID NO: 659808 - RNA, 19 nt, Artificial Sequence
  Description of Artificial Sequence: Synthetic oligonucleotide
  Sense strand starting at position 3363 of SEQ ID NO: 585689
ugugacaauugcucacaca

SEQ ID NO: 659809 - RNA, 19 nt, Artificial Sequence
  Description of Artificial Sequence: Synthetic oligonucleotide
  Antisense strand to SEQ ID NO: 659808
ugugugagcaauugucaca

SEQ ID NO: 659810 - RNA, 19 nt, Artificial Sequence
  Description of Artificial Sequence: Synthetic oligonucleotide
  Sense strand starting at position 3364 of SEQ ID NO: 585689
gugacaauugcucacacau

SEQ ID NO: 659811 - RNA, 19 nt, Artificial Sequence
  Description of Artificial Sequence: Synthetic oligonucleotide
  Antisense strand to SEQ ID NO: 659810
augugugagcaauugucac

SEQ ID NO: 659812 - RNA, 19 nt, Artificial Sequence
  Description of Artificial Sequence: Synthetic oligonucleotide
  Sense strand starting at position 3404 of SEQ ID NO: 585689
gcaugaggucuuugagaau

SEQ ID NO: 659813 - RNA, 19 nt, Artificial Sequence
  Description of Artificial Sequence: Synthetic oligonucleotide
  Antisense strand to SEQ ID NO: 659812
auucucaaagaccucaugc

SEQ ID NO: 659814 - RNA, 19 nt, Artificial Sequence
  Description of Artificial Sequence: Synthetic oligonucleotide
  Sense strand starting at position 3472 of SEQ ID NO: 585689
guaaucaauuguguuucca

SEQ ID NO: 659815 - RNA, 19 nt, Artificial Sequence
  Description of Artificial Sequence: Synthetic oligonucleotide
  Antisense strand to SEQ ID NO: 659814
uggaaacacaauugauuac

SEQ ID NO: 659816 - RNA, 19 nt, Artificial Sequence
  Description of Artificial Sequence: Synthetic oligonucleotide
  Sense strand starting at position 3476 of SEQ ID NO: 585689
ucaauuguguuuccacgaa

SEQ ID NO: 659817 - RNA, 19 nt, Artificial Sequence
  Description of Artificial Sequence: Synthetic oligonucleotide
  Antisense strand to SEQ ID NO: 659816
uucguggaaacacaauuga

SEQ ID NO: 659818 - RNA, 19 nt, Artificial Sequence
  Description of Artificial Sequence: Synthetic oligonucleotide
  Sense strand starting at position 3480 of SEQ ID NO: 585689
uuguguuuccacgaagagc

SEQ ID NO: 659819 - RNA, 19 nt, Artificial Sequence
  Description of Artificial Sequence: Synthetic oligonucleotide
  Antisense strand to SEQ ID NO: 659818
gcucuucguggaaacacaa

SEQ ID NO: 659820 - RNA, 19 nt, Artificial Sequence
  Description of Artificial Sequence: Synthetic oligonucleotide
  Sense strand starting at position 3606 of SEQ ID NO: 585689
ccuagauggucacuggacu

SEQ ID NO: 659821 - RNA, 19 nt, Artificial Sequence
  Description of Artificial Sequence: Synthetic oligonucleotide
  Antisense strand to SEQ ID NO: 659820
aguccagugaccaucuagg

SEQ ID NO: 659822 - RNA, 19 nt, Artificial Sequence
  Description of Artificial Sequence: Synthetic oligonucleotide
  Sense strand starting at position 3656 of SEQ ID NO: 585689
uugucuuagucaccaugaa

SEQ ID NO: 659823 - RNA, 19 nt, Artificial Sequence
  Description of Artificial Sequence: Synthetic oligonucleotide
  Antisense strand to SEQ ID NO: 659822
uucauggugacuaagacaa

SEQ ID NO: 659824 - RNA, 19 nt, Artificial Sequence
  Description of Artificial Sequence: Synthetic oligonucleotide
  Sense strand starting at position 3657 of SEQ ID NO: 585689
ugucuuagucaccaugaag

SEQ ID NO: 659825 - RNA, 19 nt, Artificial Sequence
  Description of Artificial Sequence: Synthetic oligonucleotide
  Antisense strand to SEQ ID NO: 659824
cuucauggugacuaagaca

SEQ ID NO: 659826 - RNA, 19 nt, Artificial Sequence
  Description of Artificial Sequence: Synthetic oligonucleotide
  Sense strand starting at position 30 of SEQ ID NO: 585690
ugauauugugaaugaaacg

SEQ ID NO: 659827 - RNA, 19 nt, Artificial Sequence
  Description of Artificial Sequence: Synthetic oligonucleotide
  Antisense strand to SEQ ID NO: 659826
cguuucauucacaauauca

SEQ ID NO: 659828 - RNA, 19 nt, Artificial Sequence
  Description of Artificial Sequence: Synthetic oligonucleotide
  Sense strand starting at position 47 of SEQ ID NO: 585690
cguucagacguuuagauua

SEQ ID NO: 659829 - RNA, 19 nt, Artificial Sequence
  Description of Artificial Sequence: Synthetic oligonucleotide
  Antisense strand to SEQ ID NO: 659828
uaaucuaaacgucugaacg

SEQ ID NO: 659830 - RNA, 19 nt, Artificial Sequence
  Description of Artificial Sequence: Synthetic oligonucleotide
  Sense strand starting at position 82 of SEQ ID NO: 585690
gaaguacuucuuuggaugu

SEQ ID NO: 659831 - RNA, 19 nt, Artificial Sequence
  Description of Artificial Sequence: Synthetic oligonucleotide
  Antisense strand to SEQ ID NO: 659830
acauccaaagaaguacuuc

SEQ ID NO: 659832 - RNA, 19 nt, Artificial Sequence
  Description of Artificial Sequence: Synthetic oligonucleotide
  Sense strand starting at position 155 of SEQ ID NO: 585690
gcagccaaaucauuuggua

SEQ ID NO: 659833 - RNA, 19 nt, Artificial Sequence
  Description of Artificial Sequence: Synthetic oligonucleotide
  Antisense strand to SEQ ID NO: 659832
uaccaaaugauuuggcugc

SEQ ID NO: 659834 - RNA, 19 nt, Artificial Sequence
  Description of Artificial Sequence: Synthetic oligonucleotide
  Sense strand starting at position 189 of SEQ ID NO: 585690
ucgccuuucugauuaaaua

SEQ ID NO: 659835 - RNA, 19 nt, Artificial Sequence
  Description of Artificial Sequence: Synthetic oligonucleotide
  Antisense strand to SEQ ID NO: 659834
uauuuaaucagaaaggcga

SEQ ID NO: 659836 - RNA, 19 nt, Artificial Sequence
  Description of Artificial Sequence: Synthetic oligonucleotide
  Sense strand starting at position 190 of SEQ ID NO: 585690
cgccuuucugauuaaauag

SEQ ID NO: 659837 - RNA, 19 nt, Artificial Sequence
  Description of Artificial Sequence: Synthetic oligonucleotide
  Antisense strand to SEQ ID NO: 659836
cuauuuaaucagaaaggcg

SEQ ID NO: 659838 - RNA, 19 nt, Artificial Sequence
  Description of Artificial Sequence: Synthetic oligonucleotide
  Sense strand starting at position 289 of SEQ ID NO: 585690
acauacaugucacuaggau

SEQ ID NO: 659839 - RNA, 19 nt, Artificial Sequence
  Description of Artificial Sequence: Synthetic oligonucleotide
  Antisense strand to SEQ ID NO: 659838
auccuagugacauguaugu

SEQ ID NO: 659840 - RNA, 19 nt, Artificial Sequence
  Description of Artificial Sequence: Synthetic oligonucleotide
  Sense strand starting at position 338 of SEQ ID NO: 585690
ugaggcugccgugaaugua

SEQ ID NO: 659841 - RNA, 19 nt, Artificial Sequence
  Description of Artificial Sequence: Synthetic oligonucleotide
  Antisense strand to SEQ ID NO: 659840
uacauucacggcagccuca

SEQ ID NO: 659842 - RNA, 19 nt, Artificial Sequence
  Description of Artificial Sequence: Synthetic oligonucleotide
  Sense strand starting at position 391 of SEQ ID NO: 585690
uggauuuguuuccagacaa

SEQ ID NO: 659843 - RNA, 19 nt, Artificial Sequence
  Description of Artificial Sequence: Synthetic oligonucleotide
  Antisense strand to SEQ ID NO: 659842
uugucuggaaacaaaucca

SEQ ID NO: 659844 - RNA, 19 nt, Artificial Sequence
  Description of Artificial Sequence: Synthetic oligonucleotide
  Sense strand starting at position 412 of SEQ ID NO: 585690
cugauacguuagguugauu

SEQ ID NO: 659845 - RNA, 19 nt, Artificial Sequence
  Description of Artificial Sequence: Synthetic oligonucleotide
  Antisense strand to SEQ ID NO: 659844
aaucaaccuaacguaucag

SEQ ID NO: 659846 - RNA, 19 nt, Artificial Sequence
  Description of Artificial Sequence: Synthetic oligonucleotide
  Sense strand starting at position 465 of SEQ ID NO: 585690
cuauuaaauugggcuacau

SEQ ID NO: 659847 - RNA, 19 nt, Artificial Sequence
  Description of Artificial Sequence: Synthetic oligonucleotide
  Antisense strand to SEQ ID NO: 659846
auguagcccaauuuaauag

SEQ ID NO: 659848 - RNA, 19 nt, Artificial Sequence
  Description of Artificial Sequence: Synthetic oligonucleotide
  Sense strand starting at position 859 of SEQ ID NO: 585690
cuagacaaucucuggccua

SEQ ID NO: 659849 - RNA, 19 nt, Artificial Sequence
  Description of Artificial Sequence: Synthetic oligonucleotide
  Antisense strand to SEQ ID NO: 659848
uaggccagagauugucuag

SEQ ID NO: 659850 - RNA, 19 nt, Artificial Sequence
  Description of Artificial Sequence: Synthetic oligonucleotide
  Sense strand starting at position 1044 of SEQ ID NO: 585690
agauuuaucucccagggaa

SEQ ID NO: 659851 - RNA, 19 nt, Artificial Sequence
  Description of Artificial Sequence: Synthetic oligonucleotide
  Antisense strand to SEQ ID NO: 659850
uucccugggagauaaaucu

SEQ ID NO: 659852 - RNA, 19 nt, Artificial Sequence
  Description of Artificial Sequence: Synthetic oligonucleotide
  Sense strand starting at position 1047 of SEQ ID NO: 585690
uuuaucucccagggaaauc

SEQ ID NO: 659853 - RNA, 19 nt, Artificial Sequence
  Description of Artificial Sequence: Synthetic oligonucleotide
  Antisense strand to SEQ ID NO: 659852
gauuucccugggagauaaa

SEQ ID NO: 659854 - RNA, 19 nt, Artificial Sequence
  Description of Artificial Sequence: Synthetic oligonucleotide
  Sense strand starting at position 1071 of SEQ ID NO: 585690
gccaguucuguccugucau

SEQ ID NO: 659855 - RNA, 19 nt, Artificial Sequence
  Description of Artificial Sequence: Synthetic oligonucleotide
  Antisense strand to SEQ ID NO: 659854
augacaggacagaacuggc

SEQ ID NO: 659856 - RNA, 19 nt, Artificial Sequence
  Description of Artificial Sequence: Synthetic oligonucleotide
  Sense strand starting at position 2610 of SEQ ID NO: 585690
cguccaggcgagaguaauc

SEQ ID NO: 659857 - RNA, 19 nt, Artificial Sequence
  Description of Artificial Sequence: Synthetic oligonucleotide
  Antisense strand to SEQ ID NO: 659856
gauuacucucgccuggacg

SEQ ID NO: 659858 - RNA, 19 nt, Artificial Sequence
  Description of Artificial Sequence: Synthetic oligonucleotide
  Sense strand starting at position 2801 of SEQ ID NO: 585690
uguuuaauuccguagcauu

SEQ ID NO: 659859 - RNA, 19 nt, Artificial Sequence
  Description of Artificial Sequence: Synthetic oligonucleotide
  Antisense strand to SEQ ID NO: 659858
aaugcuacggaauuaaaca

SEQ ID NO: 659860 - RNA, 19 nt, Artificial Sequence
  Description of Artificial Sequence: Synthetic oligonucleotide
  Sense strand starting at position 2898 of SEQ ID NO: 585690
gaggacucacagugaacuu

SEQ ID NO: 659861 - RNA, 19 nt, Artificial Sequence
  Description of Artificial Sequence: Synthetic oligonucleotide
  Antisense strand to SEQ ID NO: 659860
aaguucacugugaguccuc

SEQ ID NO: 659862 - RNA, 19 nt, Artificial Sequence
  Description of Artificial Sequence: Synthetic oligonucleotide
  Sense strand starting at position 2910 of SEQ ID NO: 585690
ugaacuuaacagugguaga

SEQ ID NO: 659863 - RNA, 19 nt, Artificial Sequence
  Description of Artificial Sequence: Synthetic oligonucleotide
  Antisense strand to SEQ ID NO: 659862
ucuaccacuguuaaguuca

SEQ ID NO: 659864 - RNA, 19 nt, Artificial Sequence
  Description of Artificial Sequence: Synthetic oligonucleotide
  Sense strand starting at position 2920 of SEQ ID NO: 585690
agugguagaagaugucauu

SEQ ID NO: 659865 - RNA, 19 nt, Artificial Sequence
  Description of Artificial Sequence: Synthetic oligonucleotide
  Antisense strand to SEQ ID NO: 659864
aaugacaucuucuaccacu

SEQ ID NO: 659866 - RNA, 19 nt, Artificial Sequence
  Description of Artificial Sequence: Synthetic oligonucleotide
  Sense strand starting at position 2929 of SEQ ID NO: 585690
agaugucauuaauaaagac

SEQ ID NO: 659867 - RNA, 19 nt, Artificial Sequence
  Description of Artificial Sequence: Synthetic oligonucleotide
  Antisense strand to SEQ ID NO: 659866
gucuuuauuaaugacaucu

SEQ ID NO: 659868 - RNA, 19 nt, Artificial Sequence
  Description of Artificial Sequence: Synthetic oligonucleotide
  Sense strand starting at position 3001 of SEQ ID NO: 585690
guguguuuaggaagggcuu

SEQ ID NO: 659869 - RNA, 19 nt, Artificial Sequence
  Description of Artificial Sequence: Synthetic oligonucleotide
  Antisense strand to SEQ ID NO: 659868
aagcccuuccuaaacacac

SEQ ID NO: 659870 - RNA, 19 nt, Artificial Sequence
  Description of Artificial Sequence: Synthetic oligonucleotide
  Sense strand starting at position 3015 of SEQ ID NO: 585690
ggcuucuagagacgucaga

SEQ ID NO: 659871 - RNA, 19 nt, Artificial Sequence
  Description of Artificial Sequence: Synthetic oligonucleotide
  Antisense strand to SEQ ID NO: 659870
ucugacgucucuagaagcc

SEQ ID NO: 659872 - RNA, 19 nt, Artificial Sequence
  Description of Artificial Sequence: Synthetic oligonucleotide
  Sense strand starting at position 3059 of SEQ ID NO: 585690
auaacaggguucuuaggua

SEQ ID NO: 659873 - RNA, 19 nt, Artificial Sequence
  Description of Artificial Sequence: Synthetic oligonucleotide
  Antisense strand to SEQ ID NO: 659872
uaccuaagaacccuguuau

SEQ ID NO: 659874 - RNA, 19 nt, Artificial Sequence
  Description of Artificial Sequence: Synthetic oligonucleotide
  Sense strand starting at position 3107 of SEQ ID NO: 585690
ggaaauauuuaccgagauc

SEQ ID NO: 659875 - RNA, 19 nt, Artificial Sequence
  Description of Artificial Sequence: Synthetic oligonucleotide
  Antisense strand to SEQ ID NO: 659874
gaucucgguaaauauuucc

SEQ ID NO: 659876 - RNA, 19 nt, Artificial Sequence
  Description of Artificial Sequence: Synthetic oligonucleotide
  Sense strand starting at position 3118 of SEQ ID NO: 585690
ccgagaucagcagagucaa

SEQ ID NO: 659877 - RNA, 19 nt, Artificial Sequence
  Description of Artificial Sequence: Synthetic oligonucleotide
  Antisense strand to SEQ ID NO: 659876
uugacucugcugaucucgg

SEQ ID NO: 659878 - RNA, 19 nt, Artificial Sequence
  Description of Artificial Sequence: Synthetic oligonucleotide
  Sense strand starting at position 3141 of SEQ ID NO: 585690
aggacuuccuacuuugcaa

SEQ ID NO: 659879 - RNA, 19 nt, Artificial Sequence
  Description of Artificial Sequence: Synthetic oligonucleotide
  Antisense strand to SEQ ID NO: 659878
uugcaaaguaggaaguccu

SEQ ID NO: 659880 - RNA, 19 nt, Artificial Sequence
  Description of Artificial Sequence: Synthetic oligonucleotide
  Sense strand starting at position 3165 of SEQ ID NO: 585690
aauagaaugcuucgucgac

SEQ ID NO: 659881 - RNA, 19 nt, Artificial Sequence
  Description of Artificial Sequence: Synthetic oligonucleotide
  Antisense strand to SEQ ID NO: 659880
gucgacgaagcauucuauu

SEQ ID NO: 659882 - RNA, 19 nt, Artificial Sequence
  Description of Artificial Sequence: Synthetic oligonucleotide
  Sense strand starting at position 3169 of SEQ ID NO: 585690
gaaugcuucgucgacuaau

SEQ ID NO: 659883 - RNA, 19 nt, Artificial Sequence
  Description of Artificial Sequence: Synthetic oligonucleotide
  Antisense strand to SEQ ID NO: 659882
auuagucgacgaagcauuc

SEQ ID NO: 659884 - RNA, 19 nt, Artificial Sequence
  Description of Artificial Sequence: Synthetic oligonucleotide
  Sense strand starting at position 3180 of SEQ ID NO: 585690
cgacuaauuuggcacaacu

SEQ ID NO: 659885 - RNA, 19 nt, Artificial Sequence
  Description of Artificial Sequence: Synthetic oligonucleotide
  Antisense strand to SEQ ID NO: 659884
aguugugccaaauuagucg

SEQ ID NO: 659886 - RNA, 19 nt, Artificial Sequence
  Description of Artificial Sequence: Synthetic oligonucleotide
  Sense strand starting at position 3290 of SEQ ID NO: 585690
ucaggcuuugcauauguaa

SEQ ID NO: 659887 - RNA, 19 nt, Artificial Sequence
  Description of Artificial Sequence: Synthetic oligonucleotide
  Antisense strand to SEQ ID NO: 659886
uuacauaugcaaagccuga

SEQ ID NO: 659888 - RNA, 19 nt, Artificial Sequence
  Description of Artificial Sequence: Synthetic oligonucleotide
  Sense strand starting at position 3293 of SEQ ID NO: 585690
ggcuuugcauauguaaauu

SEQ ID NO: 659889 - RNA, 19 nt, Artificial Sequence
  Description of Artificial Sequence: Synthetic oligonucleotide
  Antisense strand to SEQ ID NO: 659888
aauuuacauaugcaaagcc

SEQ ID NO: 659890 - RNA, 19 nt, Artificial Sequence
  Description of Artificial Sequence: Synthetic oligonucleotide
  Sense strand starting at position 3299 of SEQ ID NO: 585690
gcauauguaaauuguguga

SEQ ID NO: 659891 - RNA, 19 nt, Artificial Sequence
  Description of Artificial Sequence: Synthetic oligonucleotide
  Antisense strand to SEQ ID NO: 659890
ucacacaauuuacauaugc

SEQ ID NO: 659892 - RNA, 19 nt, Artificial Sequence
  Description of Artificial Sequence: Synthetic oligonucleotide
  Sense strand starting at position 3347 of SEQ ID NO: 585690
aagauaugaugguaaucau

SEQ ID NO: 659893 - RNA, 19 nt, Artificial Sequence
  Description of Artificial Sequence: Synthetic oligonucleotide
  Antisense strand to SEQ ID NO: 659892
augauuaccaucauaucuu

SEQ ID NO: 659894 - RNA, 19 nt, Artificial Sequence
  Description of Artificial Sequence: Synthetic oligonucleotide
  Sense strand starting at position 3356 of SEQ ID NO: 585690
ugguaaucauuuggucaaa

SEQ ID NO: 659895 - RNA, 19 nt, Artificial Sequence
  Description of Artificial Sequence: Synthetic oligonucleotide
  Antisense strand to SEQ ID NO: 659894
uuugaccaaaugauuacca

SEQ ID NO: 659896 - RNA, 19 nt, Artificial Sequence
  Description of Artificial Sequence: Synthetic oligonucleotide
  Sense strand starting at position 3474 of SEQ ID NO: 585690
cagagucauucggccuaau

SEQ ID NO: 659897 - RNA, 19 nt, Artificial Sequence
  Description of Artificial Sequence: Synthetic oligonucleotide
  Antisense strand to SEQ ID NO: 659896
auuaggccgaaugacucug

SEQ ID NO: 659898 - RNA, 19 nt, Artificial Sequence
  Description of Artificial Sequence: Synthetic oligonucleotide
  Sense strand starting at position 3515 of SEQ ID NO: 585690
acuagauguucuguuguac

SEQ ID NO: 659899 - RNA, 19 nt, Artificial Sequence
  Description of Artificial Sequence: Synthetic oligonucleotide
  Antisense strand to SEQ ID NO: 659898
guacaacagaacaucuagu

SEQ ID NO: 659900 - RNA, 19 nt, Artificial Sequence
  Description of Artificial Sequence: Synthetic oligonucleotide
  Sense strand starting at position 3823 of SEQ ID NO: 585690
ucuguuguaguuugauaga

SEQ ID NO: 659901 - RNA, 19 nt, Artificial Sequence
  Description of Artificial Sequence: Synthetic oligonucleotide
  Antisense strand to SEQ ID NO: 659900
ucuaucaaacuacaacaga

SEQ ID NO: 659902 - RNA, 19 nt, Artificial Sequence
  Description of Artificial Sequence: Synthetic oligonucleotide
  Sense strand starting at position 3856 of SEQ ID NO: 585690
uuaaccuguuguuugauga

SEQ ID NO: 659903 - RNA, 19 nt, Artificial Sequence
  Description of Artificial Sequence: Synthetic oligonucleotide
  Antisense strand to SEQ ID NO: 659902
ucaucaaacaacagguuaa

SEQ ID NO: 659904 - RNA, 19 nt, Artificial Sequence
  Description of Artificial Sequence: Synthetic oligonucleotide
  Sense strand starting at position 3914 of SEQ ID NO: 585690
cuguauuuacaguguucua

SEQ ID NO: 659905 - RNA, 19 nt, Artificial Sequence
  Description of Artificial Sequence: Synthetic oligonucleotide
  Antisense strand to SEQ ID NO: 659904
uagaacacuguaaauacag

SEQ ID NO: 659906 - RNA, 19 nt, Artificial Sequence
  Description of Artificial Sequence: Synthetic oligonucleotide
  Sense strand starting at position 206 of SEQ ID NO: 585691
ugauaugguuuacugucua

SEQ ID NO: 659907 - RNA, 19 nt, Artificial Sequence
  Description of Artificial Sequence: Synthetic oligonucleotide
  Antisense strand to SEQ ID NO: 659906
uagacaguaaaccauauca

SEQ ID NO: 659908 - RNA, 19 nt, Artificial Sequence
  Description of Artificial Sequence: Synthetic oligonucleotide
  Sense strand starting at position 210 of SEQ ID NO: 585691
augguuuacugucuacauu

SEQ ID NO: 659909 - RNA, 19 nt, Artificial Sequence
  Description of Artificial Sequence: Synthetic oligonucleotide
  Antisense strand to SEQ ID NO: 659908
aauguagacaguaaaccau

SEQ ID NO: 659910 - RNA, 19 nt, Artificial Sequence
  Description of Artificial Sequence: Synthetic oligonucleotide
  Sense strand starting at position 211 of SEQ ID NO: 585691
ugguuuacugucuacauua

SEQ ID NO: 659911 - RNA, 19 nt, Artificial Sequence
  Description of Artificial Sequence: Synthetic oligonucleotide
  Antisense strand to SEQ ID NO: 659910
uaauguagacaguaaacca

SEQ ID NO: 659912 - RNA, 19 nt, Artificial Sequence
  Description of Artificial Sequence: Synthetic oligonucleotide
  Sense strand starting at position 267 of SEQ ID NO: 585691
uuuacuguucuagaagacu

SEQ ID NO: 659913 - RNA, 19 nt, Artificial Sequence
  Description of Artificial Sequence: Synthetic oligonucleotide
  Antisense strand to SEQ ID NO: 659912
agucuucuagaacaguaaa

SEQ ID NO: 659914 - RNA, 19 nt, Artificial Sequence
  Description of Artificial Sequence: Synthetic oligonucleotide
  Sense strand starting at position 732 of SEQ ID NO: 585691
cuuaaaccgcuguaucaga

SEQ ID NO: 659915 - RNA, 19 nt, Artificial Sequence
  Description of Artificial Sequence: Synthetic oligonucleotide
  Antisense strand to SEQ ID NO: 659914
ucugauacagcgguuuaag

SEQ ID NO: 659916 - RNA, 19 nt, Artificial Sequence
  Description of Artificial Sequence: Synthetic oligonucleotide
  Sense strand starting at position 889 of SEQ ID NO: 585691
gguguucuuccuuauccca

SEQ ID NO: 659917 - RNA, 19 nt, Artificial Sequence
  Description of Artificial Sequence: Synthetic oligonucleotide
  Antisense strand to SEQ ID NO: 659916
ugggauaaggaagaacacc

SEQ ID NO: 659918 - RNA, 19 nt, Artificial Sequence
  Description of Artificial Sequence: Synthetic oligonucleotide
  Sense strand starting at position 904 of SEQ ID NO: 585691
cccagugagcaauaaauuc

SEQ ID NO: 659919 - RNA, 19 nt, Artificial Sequence
  Description of Artificial Sequence: Synthetic oligonucleotide
  Antisense strand to SEQ ID NO: 659918
gaauuuauugcucacuggg

SEQ ID NO: 659920 - RNA, 19 nt, Artificial Sequence
  Description of Artificial Sequence: Synthetic oligonucleotide
  Sense strand starting at position 936 of SEQ ID NO: 585691
aaaugucauguuggugaua

SEQ ID NO: 659921 - RNA, 19 nt, Artificial Sequence
  Description of Artificial Sequence: Synthetic oligonucleotide
  Antisense strand to SEQ ID NO: 659920
uaucaccaacaugacauuu

SEQ ID NO: 659922 - RNA, 19 nt, Artificial Sequence
  Description of Artificial Sequence: Synthetic oligonucleotide
  Sense strand starting at position 937 of SEQ ID NO: 585691
aaugucauguuggugauau

SEQ ID NO: 659923 - RNA, 19 nt, Artificial Sequence
  Description of Artificial Sequence: Synthetic oligonucleotide
  Antisense strand to SEQ ID NO: 659922
auaucaccaacaugacauu

SEQ ID NO: 659924 - RNA, 19 nt, Artificial Sequence
  Description of Artificial Sequence: Synthetic oligonucleotide
  Sense strand starting at position 945 of SEQ ID NO: 585691
guuggugauauuuggcgaa

SEQ ID NO: 659925 - RNA, 19 nt, Artificial Sequence
  Description of Artificial Sequence: Synthetic oligonucleotide
  Antisense strand to SEQ ID NO: 659924
uucgccaaauaucaccaac

SEQ ID NO: 659926 - RNA, 19 nt, Artificial Sequence
  Description of Artificial Sequence: Synthetic oligonucleotide
  Sense strand starting at position 958 of SEQ ID NO: 585691
ggcgaauuaucaccggaca

SEQ ID NO: 659927 - RNA, 19 nt, Artificial Sequence
  Description of Artificial Sequence: Synthetic oligonucleotide
  Antisense strand to SEQ ID NO: 659926
uguccggugauaauucgcc

SEQ ID NO: 659928 - RNA, 19 nt, Artificial Sequence
  Description of Artificial Sequence: Synthetic oligonucleotide
  Sense strand starting at position 959 of SEQ ID NO: 585691
gcgaauuaucaccggacag

SEQ ID NO: 659929 - RNA, 19 nt, Artificial Sequence
  Description of Artificial Sequence: Synthetic oligonucleotide
  Antisense strand to SEQ ID NO: 659928
cuguccggugauaauucgc

SEQ ID NO: 659930 - RNA, 19 nt, Artificial Sequence
  Description of Artificial Sequence: Synthetic oligonucleotide
  Sense strand starting at position 960 of SEQ ID NO: 585691
cgaauuaucaccggacagg

SEQ ID NO: 659931 - RNA, 19 nt, Artificial Sequence
  Description of Artificial Sequence: Synthetic oligonucleotide
  Antisense strand to SEQ ID NO: 659930
ccuguccggugauaauucg

SEQ ID NO: 659932 - RNA, 19 nt, Artificial Sequence
  Description of Artificial Sequence: Synthetic oligonucleotide
  Sense strand starting at position 1095 of SEQ ID NO: 585691
auccauuaaucagaaggaa

SEQ ID NO: 659933 - RNA, 19 nt, Artificial Sequence
  Description of Artificial Sequence: Synthetic oligonucleotide
  Antisense strand to SEQ ID NO: 659932
uuccuucugauuaauggau

SEQ ID NO: 659934 - RNA, 19 nt, Artificial Sequence
  Description of Artificial Sequence: Synthetic oligonucleotide
  Sense strand starting at position 1110 of SEQ ID NO: 585691
ggaaauggguuagccaaga

SEQ ID NO: 659935 - RNA, 19 nt, Artificial Sequence
  Description of Artificial Sequence: Synthetic oligonucleotide
  Antisense strand to SEQ ID NO: 659934
ucuuggcuaacccauuucc

SEQ ID NO: 659936 - RNA, 19 nt, Artificial Sequence
  Description of Artificial Sequence: Synthetic oligonucleotide
  Sense strand starting at position 1134 of SEQ ID NO: 585691
auagaaaguuuccuugcaa

SEQ ID NO: 659937 - RNA, 19 nt, Artificial Sequence
  Description of Artificial Sequence: Synthetic oligonucleotide
  Antisense strand to SEQ ID NO: 659936
uugcaaggaaacuuucuau

SEQ ID NO: 659938 - RNA, 19 nt, Artificial Sequence
  Description of Artificial Sequence: Synthetic oligonucleotide
  Sense strand starting at position 1135 of SEQ ID NO: 585691
uagaaaguuuccuugcaag

SEQ ID NO: 659939 - RNA, 19 nt, Artificial Sequence
  Description of Artificial Sequence: Synthetic oligonucleotide
  Antisense strand to SEQ ID NO: 659938
cuugcaaggaaacuuucua

SEQ ID NO: 659940 - RNA, 19 nt, Artificial Sequence
  Description of Artificial Sequence: Synthetic oligonucleotide
  Sense strand starting at position 1429 of SEQ ID NO: 585691
agucucagauagcucuuau

SEQ ID NO: 659941 - RNA, 19 nt, Artificial Sequence
  Description of Artificial Sequence: Synthetic oligonucleotide
  Antisense strand to SEQ ID NO: 659940
auaagagcuaucugagacu

SEQ ID NO: 659942 - RNA, 19 nt, Artificial Sequence
  Description of Artificial Sequence: Synthetic oligonucleotide
  Sense strand starting at position 1448 of SEQ ID NO: 585691
aucuuugggcguuaccaaa

SEQ ID NO: 659943 - RNA, 19 nt, Artificial Sequence
  Description of Artificial Sequence: Synthetic oligonucleotide
  Antisense strand to SEQ ID NO: 659942
uuugguaacgcccaaagau

SEQ ID NO: 659944 - RNA, 19 nt, Artificial Sequence
  Description of Artificial Sequence: Synthetic oligonucleotide
  Sense strand starting at position 1554 of SEQ ID NO: 585691
ucaucaaugucacuaaagu

SEQ ID NO: 659945 - RNA, 19 nt, Artificial Sequence
  Description of Artificial Sequence: Synthetic oligonucleotide
  Antisense strand to SEQ ID NO: 659944
acuuuagugacauugauga

SEQ ID NO: 659946 - RNA, 19 nt, Artificial Sequence
  Description of Artificial Sequence: Synthetic oligonucleotide
  Sense strand starting at position 1595 of SEQ ID NO: 585691
gggucuaaucauggucuaa

SEQ ID NO: 659947 - RNA, 19 nt, Artificial Sequence
  Description of Artificial Sequence: Synthetic oligonucleotide
  Antisense strand to SEQ ID NO: 659946
uuagaccaugauuagaccc

SEQ ID NO: 659948 - RNA, 19 nt, Artificial Sequence
  Description of Artificial Sequence: Synthetic oligonucleotide
  Sense strand starting at position 1597 of SEQ ID NO: 585691
gucuaaucauggucuaaug

SEQ ID NO: 659949 - RNA, 19 nt, Artificial Sequence
  Description of Artificial Sequence: Synthetic oligonucleotide
  Antisense strand to SEQ ID NO: 659948
cauuagaccaugauuagac

SEQ ID NO: 659950 - RNA, 19 nt, Artificial Sequence
  Description of Artificial Sequence: Synthetic oligonucleotide
  Sense strand starting at position 2038 of SEQ ID NO: 585691
ggugaugccagccaaucaa

SEQ ID NO: 659951 - RNA, 19 nt, Artificial Sequence
  Description of Artificial Sequence: Synthetic oligonucleotide
  Antisense strand to SEQ ID NO: 659950
uugauuggcuggcaucacc

SEQ ID NO: 659952 - RNA, 19 nt, Artificial Sequence
  Description of Artificial Sequence: Synthetic oligonucleotide
  Sense strand starting at position 2160 of SEQ ID NO: 585691
guccucgaugucuaaggua

SEQ ID NO: 659953 - RNA, 19 nt, Artificial Sequence
  Description of Artificial Sequence: Synthetic oligonucleotide
  Antisense strand to SEQ ID NO: 659952
uaccuuagacaucgaggac

SEQ ID NO: 659954 - RNA, 19 nt, Artificial Sequence
  Description of Artificial Sequence: Synthetic oligonucleotide
  Sense strand starting at position 2372 of SEQ ID NO: 585691
gugguauggcuaggaggau

SEQ ID NO: 659955 - RNA, 19 nt, Artificial Sequence
  Description of Artificial Sequence: Synthetic oligonucleotide
  Antisense strand to SEQ ID NO: 659954
auccuccuagccauaccac

SEQ ID NO: 659956 - RNA, 19 nt, Artificial Sequence
  Description of Artificial Sequence: Synthetic oligonucleotide
  Sense strand starting at position 2413 of SEQ ID NO: 585691
gucggauguccugaugaug

SEQ ID NO: 659957 - RNA, 19 nt, Artificial Sequence
  Description of Artificial Sequence: Synthetic oligonucleotide
  Antisense strand to SEQ ID NO: 659956
caucaucaggacauccgac

SEQ ID NO: 659958 - RNA, 19 nt, Artificial Sequence
  Description of Artificial Sequence: Synthetic oligonucleotide
  Sense strand starting at position 2492 of SEQ ID NO: 585691
ccaagaugcagugguaaac

SEQ ID NO: 659959 - RNA, 19 nt, Artificial Sequence
  Description of Artificial Sequence: Synthetic oligonucleotide
  Antisense strand to SEQ ID NO: 659958
guuuaccacugcaucuugg

SEQ ID NO: 659960 - RNA, 19 nt, Artificial Sequence
  Description of Artificial Sequence: Synthetic oligonucleotide
  Sense strand starting at position 2533 of SEQ ID NO: 585691
ucaagaaagucgguaaaca

SEQ ID NO: 659961 - RNA, 19 nt, Artificial Sequence
  Description of Artificial Sequence: Synthetic oligonucleotide
  Antisense strand to SEQ ID NO: 659960
uguuuaccgacuuucuuga

SEQ ID NO: 659962 - RNA, 19 nt, Artificial Sequence
  Description of Artificial Sequence: Synthetic oligonucleotide
  Sense strand starting at position 2700 of SEQ ID NO: 585691
augaguagaaguuagguua

SEQ ID NO: 659963 - RNA, 19 nt, Artificial Sequence
  Description of Artificial Sequence: Synthetic oligonucleotide
  Antisense strand to SEQ ID NO: 659962
uaaccuaacuucuacucau

SEQ ID NO: 659964 - RNA, 19 nt, Artificial Sequence
  Description of Artificial Sequence: Synthetic oligonucleotide
  Sense strand starting at position 2740 of SEQ ID NO: 585691
gagagaacagcauguuucu

SEQ ID NO: 659965 - RNA, 19 nt, Artificial Sequence
  Description of Artificial Sequence: Synthetic oligonucleotide
  Antisense strand to SEQ ID NO: 659964
agaaacaugcuguucucuc

SEQ ID NO: 659966 - RNA, 19 nt, Artificial Sequence
  Description of Artificial Sequence: Synthetic oligonucleotide
  Sense strand starting at position 2753 of SEQ ID NO: 585691
guuucuucggcccagaaga

SEQ ID NO: 659967 - RNA, 19 nt, Artificial Sequence
  Description of Artificial Sequence: Synthetic oligonucleotide
  Antisense strand to SEQ ID NO: 659966
ucuucugggccgaagaaac

SEQ ID NO: 659968 - RNA, 19 nt, Artificial Sequence
  Description of Artificial Sequence: Synthetic oligonucleotide
  Sense strand starting at position 2755 of SEQ ID NO: 585691
uucuucggcccagaagaua

SEQ ID NO: 659969 - RNA, 19 nt, Artificial Sequence
  Description of Artificial Sequence: Synthetic oligonucleotide
  Antisense strand to SEQ ID NO: 659968
uaucuucugggccgaagaa

SEQ ID NO: 659970 - RNA, 19 nt, Artificial Sequence
  Description of Artificial Sequence: Synthetic oligonucleotide
  Sense strand starting at position 2943 of SEQ ID NO: 585691
gacauaguguaguugguaa

SEQ ID NO: 659971 - RNA, 19 nt, Artificial Sequence
  Description of Artificial Sequence: Synthetic oligonucleotide
  Antisense strand to SEQ ID NO: 659970
uuaccaacuacacuauguc

SEQ ID NO: 659972 - RNA, 19 nt, Artificial Sequence
  Description of Artificial Sequence: Synthetic oligonucleotide
  Sense strand starting at position 2962 of SEQ ID NO: 585691
gaagauaagcccuagagcu

SEQ ID NO: 659973 - RNA, 19 nt, Artificial Sequence
  Description of Artificial Sequence: Synthetic oligonucleotide
  Antisense strand to SEQ ID NO: 659972
agcucuagggcuuaucuuc

SEQ ID NO: 659974 - RNA, 19 nt, Artificial Sequence
  Description of Artificial Sequence: Synthetic oligonucleotide
  Sense strand starting at position 3200 of SEQ ID NO: 585691
aaaguaagaccuugaguuc

SEQ ID NO: 659975 - RNA, 19 nt, Artificial Sequence
  Description of Artificial Sequence: Synthetic oligonucleotide
  Antisense strand to SEQ ID NO: 659974
gaacucaaggucuuacuuu

SEQ ID NO: 659976 - RNA, 19 nt, Artificial Sequence
  Description of Artificial Sequence: Synthetic oligonucleotide
  Sense strand starting at position 3201 of SEQ ID NO: 585691
aaguaagaccuugaguucu

SEQ ID NO: 659977 - RNA, 19 nt, Artificial Sequence
  Description of Artificial Sequence: Synthetic oligonucleotide
  Antisense strand to SEQ ID NO: 659976
agaacucaaggucuuacuu

SEQ ID NO: 659978 - RNA, 19 nt, Artificial Sequence
  Description of Artificial Sequence: Synthetic oligonucleotide
  Sense strand starting at position 3203 of SEQ ID NO: 585691
guaagaccuugaguucuau

SEQ ID NO: 659979 - RNA, 19 nt, Artificial Sequence
  Description of Artificial Sequence: Synthetic oligonucleotide
  Antisense strand to SEQ ID NO: 659978
auagaacucaaggucuuac

SEQ ID NO: 659980 - RNA, 19 nt, Artificial Sequence
  Description of Artificial Sequence: Synthetic oligonucleotide
  Sense strand starting at position 3247 of SEQ ID NO: 585691
aguuaagcugucugagaaa

SEQ ID NO: 659981 - RNA, 19 nt, Artificial Sequence
  Description of Artificial Sequence: Synthetic oligonucleotide
  Antisense strand to SEQ ID NO: 659980
uuucucagacagcuuaacu

SEQ ID NO: 659982 - RNA, 19 nt, Artificial Sequence
  Description of Artificial Sequence: Synthetic oligonucleotide
  Sense strand starting at position 3322 of SEQ ID NO: 585691
ugaagaaggcuaugucaug

SEQ ID NO: 659983 - RNA, 19 nt, Artificial Sequence
  Description of Artificial Sequence: Synthetic oligonucleotide
  Antisense strand to SEQ ID NO: 659982
caugacauagccuucuuca

SEQ ID NO: 659984 - RNA, 19 nt, Artificial Sequence
  Description of Artificial Sequence: Synthetic oligonucleotide
  Sense strand starting at position 3503 of SEQ ID NO: 585691
uauaauguucuguagguuu

SEQ ID NO: 659985 - RNA, 19 nt, Artificial Sequence
  Description of Artificial Sequence: Synthetic oligonucleotide
  Antisense strand to SEQ ID NO: 659984
aaaccuacagaacauuaua

SEQ ID NO: 659986 - RNA, 19 nt, Artificial Sequence
  Description of Artificial Sequence: Synthetic oligonucleotide
  Sense strand starting at position 18 of SEQ ID NO: 585692
aggcuuaggagugaagagu

SEQ ID NO: 659987 - RNA, 19 nt, Artificial Sequence
  Description of Artificial Sequence: Synthetic oligonucleotide
  Antisense strand to SEQ ID NO: 659986
acucuucacuccuaagccu

SEQ ID NO: 659988 - RNA, 19 nt, Artificial Sequence
  Description of Artificial Sequence: Synthetic oligonucleotide
  Sense strand starting at position 60 of SEQ ID NO: 585692
aguaaaguugccugaccaa

SEQ ID NO: 659989 - RNA, 19 nt, Artificial Sequence
  Description of Artificial Sequence: Synthetic oligonucleotide
  Antisense strand to SEQ ID NO: 659988
uuggucaggcaacuuuacu

SEQ ID NO: 659990 - RNA, 19 nt, Artificial Sequence
  Description of Artificial Sequence: Synthetic oligonucleotide
  Sense strand starting at position 63 of SEQ ID NO: 585692
aaaguugccugaccaaaga

SEQ ID NO: 659991 - RNA, 19 nt, Artificial Sequence
  Description of Artificial Sequence: Synthetic oligonucleotide
  Antisense strand to SEQ ID NO: 659990
ucuuuggucaggcaacuuu

SEQ ID NO: 659992 - RNA, 19 nt, Artificial Sequence
  Description of Artificial Sequence: Synthetic oligonucleotide
  Sense strand starting at position 140 of SEQ ID NO: 585692
uguuguaaauaauccaaga

SEQ ID NO: 659993 - RNA, 19 nt, Artificial Sequence
  Description of Artificial Sequence: Synthetic oligonucleotide
  Antisense strand to SEQ ID NO: 659992
ucuuggauuauuuacaaca

SEQ ID NO: 659994 - RNA, 19 nt, Artificial Sequence
  Description of Artificial Sequence: Synthetic oligonucleotide
  Sense strand starting at position 264 of SEQ ID NO: 585692
agcauaggguucuugagua

SEQ ID NO: 659995 - RNA, 19 nt, Artificial Sequence
  Description of Artificial Sequence: Synthetic oligonucleotide
  Antisense strand to SEQ ID NO: 659994
uacucaagaacccuaugcu

SEQ ID NO: 659996 - RNA, 19 nt, Artificial Sequence
  Description of Artificial Sequence: Synthetic oligonucleotide
  Sense strand starting at position 271 of SEQ ID NO: 585692
gguucuugaguaggugcaa

SEQ ID NO: 659997 - RNA, 19 nt, Artificial Sequence
  Description of Artificial Sequence: Synthetic oligonucleotide
  Antisense strand to SEQ ID NO: 659996
uugcaccuacucaagaacc

SEQ ID NO: 659998 - RNA, 19 nt, Artificial Sequence
  Description of Artificial Sequence: Synthetic oligonucleotide
  Sense strand starting at position 304 of SEQ ID NO: 585692
gauugcuaauacucuguga

SEQ ID NO: 659999 - RNA, 19 nt, Artificial Sequence
  Description of Artificial Sequence: Synthetic oligonucleotide
  Antisense strand to SEQ ID NO: 659998
ucacagaguauuagcaauc

SEQ ID NO: 660000 - RNA, 19 nt, Artificial Sequence
  Description of Artificial Sequence: Synthetic oligonucleotide
  Sense strand starting at position 306 of SEQ ID NO: 585692
uugcuaauacucugugauu

SEQ ID NO: 660001 - RNA, 19 nt, Artificial Sequence
  Description of Artificial Sequence: Synthetic oligonucleotide
  Antisense strand to SEQ ID NO: 660000
aaucacagaguauuagcaa

SEQ ID NO: 660002 - RNA, 19 nt, Artificial Sequence
  Description of Artificial Sequence: Synthetic oligonucleotide
  Sense strand starting at position 307 of SEQ ID NO: 585692
ugcuaauacucugugauuu

SEQ ID NO: 660003 - RNA, 19 nt, Artificial Sequence
  Description of Artificial Sequence: Synthetic oligonucleotide
  Antisense strand to SEQ ID NO: 660002
aaaucacagaguauuagca

SEQ ID NO: 660004 - RNA, 19 nt, Artificial Sequence
  Description of Artificial Sequence: Synthetic oligonucleotide
  Sense strand starting at position 765 of SEQ ID NO: 585692
ggaaguauauuagcugaag

SEQ ID NO: 660005 - RNA, 19 nt, Artificial Sequence
  Description of Artificial Sequence: Synthetic oligonucleotide
  Antisense strand to SEQ ID NO: 660004
cuucagcuaauauacuucc

SEQ ID NO: 660006 - RNA, 19 nt, Artificial Sequence
  Description of Artificial Sequence: Synthetic oligonucleotide
  Sense strand starting at position 766 of SEQ ID NO: 585692
gaaguauauuagcugaagu

SEQ ID NO: 660007 - RNA, 19 nt, Artificial Sequence
  Description of Artificial Sequence: Synthetic oligonucleotide
  Antisense strand to SEQ ID NO: 660006
acuucagcuaauauacuuc

SEQ ID NO: 660008 - RNA, 19 nt, Artificial Sequence
  Description of Artificial Sequence: Synthetic oligonucleotide
  Sense strand starting at position 774 of SEQ ID NO: 585692
uuagcugaagucgacaaau

SEQ ID NO: 660009 - RNA, 19 nt, Artificial Sequence
  Description of Artificial Sequence: Synthetic oligonucleotide
  Antisense strand to SEQ ID NO: 660008
auuugucgacuucagcuaa

SEQ ID NO: 660010 - RNA, 19 nt, Artificial Sequence
  Description of Artificial Sequence: Synthetic oligonucleotide
  Sense strand starting at position 809 of SEQ ID NO: 585692
acaugugaauuaucuacag

SEQ ID NO: 660011 - RNA, 19 nt, Artificial Sequence
  Description of Artificial Sequence: Synthetic oligonucleotide
  Antisense strand to SEQ ID NO: 660010
cuguagauaauucacaugu

SEQ ID NO: 660012 - RNA, 19 nt, Artificial Sequence
  Description of Artificial Sequence: Synthetic oligonucleotide
  Sense strand starting at position 985 of SEQ ID NO: 585692
uauguuuaaugccuuggua

SEQ ID NO: 660013 - RNA, 19 nt, Artificial Sequence
  Description of Artificial Sequence: Synthetic oligonucleotide
  Antisense strand to SEQ ID NO: 660012
uaccaaggcauuaaacaua

SEQ ID NO: 660014 - RNA, 19 nt, Artificial Sequence
  Description of Artificial Sequence: Synthetic oligonucleotide
  Sense strand starting at position 987 of SEQ ID NO: 585692
uguuuaaugccuugguaga

SEQ ID NO: 660015 - RNA, 19 nt, Artificial Sequence
  Description of Artificial Sequence: Synthetic oligonucleotide
  Antisense strand to SEQ ID NO: 660014
ucuaccaaggcauuaaaca

SEQ ID NO: 660016 - RNA, 19 nt, Artificial Sequence
  Description of Artificial Sequence: Synthetic oligonucleotide
  Sense strand starting at position 988 of SEQ ID NO: 585692
guuuaaugccuugguagaa

SEQ ID NO: 660017 - RNA, 19 nt, Artificial Sequence
  Description of Artificial Sequence: Synthetic oligonucleotide
  Antisense strand to SEQ ID NO: 660016
uucuaccaaggcauuaaac

SEQ ID NO: 660018 - RNA, 19 nt, Artificial Sequence
  Description of Artificial Sequence: Synthetic oligonucleotide
  Sense strand starting at position 989 of SEQ ID NO: 585692
uuuaaugccuugguagaau

SEQ ID NO: 660019 - RNA, 19 nt, Artificial Sequence
  Description of Artificial Sequence: Synthetic oligonucleotide
  Antisense strand to SEQ ID NO: 660018
auucuaccaaggcauuaaa

SEQ ID NO: 660020 - RNA, 19 nt, Artificial Sequence
  Description of Artificial Sequence: Synthetic oligonucleotide
  Sense strand starting at position 1517 of SEQ ID NO: 585692
cgaaaucuuaaggguguua

SEQ ID NO: 660021 - RNA, 19 nt, Artificial Sequence
  Description of Artificial Sequence: Synthetic oligonucleotide
  Antisense strand to SEQ ID NO: 660020
uaacacccuuaagauuucg

SEQ ID NO: 660022 - RNA, 19 nt, Artificial Sequence
  Description of Artificial Sequence: Synthetic oligonucleotide
  Sense strand starting at position 1519 of SEQ ID NO: 585692
aaaucuuaaggguguuagu

SEQ ID NO: 660023 - RNA, 19 nt, Artificial Sequence
  Description of Artificial Sequence: Synthetic oligonucleotide
  Antisense strand to SEQ ID NO: 660022
acuaacacccuuaagauuu

SEQ ID NO: 660024 - RNA, 19 nt, Artificial Sequence
  Description of Artificial Sequence: Synthetic oligonucleotide
  Sense strand starting at position 1560 of SEQ ID NO: 585692
gccuaaauucuuggaacuc

SEQ ID NO: 660025 - RNA, 19 nt, Artificial Sequence
  Description of Artificial Sequence: Synthetic oligonucleotide
  Antisense strand to SEQ ID NO: 660024
gaguuccaagaauuuaggc

SEQ ID NO: 660026 - RNA, 19 nt, Artificial Sequence
  Description of Artificial Sequence: Synthetic oligonucleotide
  Sense strand starting at position 1635 of SEQ ID NO: 585692
caccguuugcuuuaaagaa

SEQ ID NO: 660027 - RNA, 19 nt, Artificial Sequence
  Description of Artificial Sequence: Synthetic oligonucleotide
  Antisense strand to SEQ ID NO: 660026
uucuuuaaagcaaacggug

SEQ ID NO: 660028 - RNA, 19 nt, Artificial Sequence
  Description of Artificial Sequence: Synthetic oligonucleotide
  Sense strand starting at position 1739 of SEQ ID NO: 585692
gcucuucggcagcugaauu

SEQ ID NO: 660029 - RNA, 19 nt, Artificial Sequence
  Description of Artificial Sequence: Synthetic oligonucleotide
  Antisense strand to SEQ ID NO: 660028
aauucagcugccgaagagc

SEQ ID NO: 660030 - RNA, 19 nt, Artificial Sequence
  Description of Artificial Sequence: Synthetic oligonucleotide
  Sense strand starting at position 1750 of SEQ ID NO: 585692
gcugaauuugcacgcuuaa

SEQ ID NO: 660031 - RNA, 19 nt, Artificial Sequence
  Description of Artificial Sequence: Synthetic oligonucleotide
  Antisense strand to SEQ ID NO: 660030
uuaagcgugcaaauucagc

SEQ ID NO: 660032 - RNA, 19 nt, Artificial Sequence
  Description of Artificial Sequence: Synthetic oligonucleotide
  Sense strand starting at position 1761 of SEQ ID NO: 585692
acgcuuaaaucucuaggaa

SEQ ID NO: 660033 - RNA, 19 nt, Artificial Sequence
  Description of Artificial Sequence: Synthetic oligonucleotide
  Antisense strand to SEQ ID NO: 660032
uuccuagagauuuaagcgu

SEQ ID NO: 660034 - RNA, 19 nt, Artificial Sequence
  Description of Artificial Sequence: Synthetic oligonucleotide
  Sense strand starting at position 1762 of SEQ ID NO: 585692
cgcuuaaaucucuaggaag

SEQ ID NO: 660035 - RNA, 19 nt, Artificial Sequence
  Description of Artificial Sequence: Synthetic oligonucleotide
  Antisense strand to SEQ ID NO: 660034
cuuccuagagauuuaagcg

SEQ ID NO: 660036 - RNA, 19 nt, Artificial Sequence
  Description of Artificial Sequence: Synthetic oligonucleotide
  Sense strand starting at position 1765 of SEQ ID NO: 585692
uuaaaucucuaggaaggaa

SEQ ID NO: 660037 - RNA, 19 nt, Artificial Sequence
  Description of Artificial Sequence: Synthetic oligonucleotide
  Antisense strand to SEQ ID NO: 660036
uuccuuccuagagauuuaa

SEQ ID NO: 660038 - RNA, 19 nt, Artificial Sequence
  Description of Artificial Sequence: Synthetic oligonucleotide
  Sense strand starting at position 1797 of SEQ ID NO: 585692
uguuucaguucggcaaaga

SEQ ID NO: 660039 - RNA, 19 nt, Artificial Sequence
  Description of Artificial Sequence: Synthetic oligonucleotide
  Antisense strand to SEQ ID NO: 660038
ucuuugccgaacugaaaca

SEQ ID NO: 660040 - RNA, 19 nt, Artificial Sequence
  Description of Artificial Sequence: Synthetic oligonucleotide
  Sense strand starting at position 1798 of SEQ ID NO: 585692
guuucaguucggcaaagag

SEQ ID NO: 660041 - RNA, 19 nt, Artificial Sequence
  Description of Artificial Sequence: Synthetic oligonucleotide
  Antisense strand to SEQ ID NO: 660040
cucuuugccgaacugaaac

SEQ ID NO: 660042 - RNA, 19 nt, Artificial Sequence
  Description of Artificial Sequence: Synthetic oligonucleotide
  Sense strand starting at position 1816 of SEQ ID NO: 585692
gcccuaggaucaugauuua

SEQ ID NO: 660043 - RNA, 19 nt, Artificial Sequence
  Description of Artificial Sequence: Synthetic oligonucleotide
  Antisense strand to SEQ ID NO: 660042
uaaaucaugauccuagggc

SEQ ID NO: 660044 - RNA, 19 nt, Artificial Sequence
  Description of Artificial Sequence: Synthetic oligonucleotide
  Sense strand starting at position 2754 of SEQ ID NO: 585692
ccggaucgucuggauuaga

SEQ ID NO: 660045 - RNA, 19 nt, Artificial Sequence
  Description of Artificial Sequence: Synthetic oligonucleotide
  Antisense strand to SEQ ID NO: 660044
ucuaauccagacgauccgg

SEQ ID NO: 660046 - RNA, 19 nt, Artificial Sequence
  Description of Artificial Sequence: Synthetic oligonucleotide
  Sense strand starting at position 2757 of SEQ ID NO: 585692
gaucgucuggauuagaauc

SEQ ID NO: 660047 - RNA, 19 nt, Artificial Sequence
  Description of Artificial Sequence: Synthetic oligonucleotide
  Antisense strand to SEQ ID NO: 660046
gauucuaauccagacgauc

SEQ ID NO: 660048 - RNA, 19 nt, Artificial Sequence
  Description of Artificial Sequence: Synthetic oligonucleotide
  Sense strand starting at position 2777 of SEQ ID NO: 585692
gguucuauagaaugugcaa

SEQ ID NO: 660049 - RNA, 19 nt, Artificial Sequence
  Description of Artificial Sequence: Synthetic oligonucleotide
  Antisense strand to SEQ ID NO: 660048
uugcacauucuauagaacc

SEQ ID NO: 660050 - RNA, 19 nt, Artificial Sequence
  Description of Artificial Sequence: Synthetic oligonucleotide
  Sense strand starting at position 2834 of SEQ ID NO: 585692
aagagaggguaguucucaa

SEQ ID NO: 660051 - RNA, 19 nt, Artificial Sequence
  Description of Artificial Sequence: Synthetic oligonucleotide
  Antisense strand to SEQ ID NO: 660050
uugagaacuacccucucuu

SEQ ID NO: 660052 - RNA, 19 nt, Artificial Sequence
  Description of Artificial Sequence: Synthetic oligonucleotide
  Sense strand starting at position 2842 of SEQ ID NO: 585692
guaguucucaagcgaagaa

SEQ ID NO: 660053 - RNA, 19 nt, Artificial Sequence
  Description of Artificial Sequence: Synthetic oligonucleotide
  Antisense strand to SEQ ID NO: 660052
uucuucgcuugagaacuac

SEQ ID NO: 660054 - RNA, 19 nt, Artificial Sequence
  Description of Artificial Sequence: Synthetic oligonucleotide
  Sense strand starting at position 2863 of SEQ ID NO: 585692
gggugcuuuagagguagau

SEQ ID NO: 660055 - RNA, 19 nt, Artificial Sequence
  Description of Artificial Sequence: Synthetic oligonucleotide
  Antisense strand to SEQ ID NO: 660054
aucuaccucuaaagcaccc

SEQ ID NO: 660056 - RNA, 19 nt, Artificial Sequence
  Description of Artificial Sequence: Synthetic oligonucleotide
  Sense strand starting at position 3028 of SEQ ID NO: 585692
cgccgugggaucuggaaga

SEQ ID NO: 660057 - RNA, 19 nt, Artificial Sequence
  Description of Artificial Sequence: Synthetic oligonucleotide
  Antisense strand to SEQ ID NO: 660056
ucuuccagaucccacggcg

SEQ ID NO: 660058 - RNA, 19 nt, Artificial Sequence
  Description of Artificial Sequence: Synthetic oligonucleotide
  Sense strand starting at position 3744 of SEQ ID NO: 585692
cggagauaccuauguccau

SEQ ID NO: 660059 - RNA, 19 nt, Artificial Sequence
  Description of Artificial Sequence: Synthetic oligonucleotide
  Antisense strand to SEQ ID NO: 660058
auggacauagguaucuccg

SEQ ID NO: 660060 - RNA, 19 nt, Artificial Sequence
  Description of Artificial Sequence: Synthetic oligonucleotide
  Sense strand starting at position 3745 of SEQ ID NO: 585692
ggagauaccuauguccauc

SEQ ID NO: 660061 - RNA, 19 nt, Artificial Sequence
  Description of Artificial Sequence: Synthetic oligonucleotide
  Antisense strand to SEQ ID NO: 660060
gauggacauagguaucucc

SEQ ID NO: 660062 - RNA, 19 nt, Artificial Sequence
  Description of Artificial Sequence: Synthetic oligonucleotide
  Sense strand starting at position 3853 of SEQ ID NO: 585692
caggaagauugguacagau

SEQ ID NO: 660063 - RNA, 19 nt, Artificial Sequence
  Description of Artificial Sequence: Synthetic oligonucleotide
  Antisense strand to SEQ ID NO: 660062
aucuguaccaaucuuccug

SEQ ID NO: 660064 - RNA, 19 nt, Artificial Sequence
  Description of Artificial Sequence: Synthetic oligonucleotide
  Sense strand starting at position 3866 of SEQ ID NO: 585692
acagaugucuuagcauaag

SEQ ID NO: 660065 - RNA, 19 nt, Artificial Sequence
  Description of Artificial Sequence: Synthetic oligonucleotide
  Antisense strand to SEQ ID NO: 660064
cuuaugcuaagacaucugu

SEQ ID NO: 660066 - RNA, 19 nt, Artificial Sequence
  Description of Artificial Sequence: Synthetic oligonucleotide
  Sense strand starting at position 279 of SEQ ID NO: 585693
ggaaguauauuagcugaag

SEQ ID NO: 660067 - RNA, 19 nt, Artificial Sequence
  Description of Artificial Sequence: Synthetic oligonucleotide
  Antisense strand to SEQ ID NO: 660066
cuucagcuaauauacuucc

SEQ ID NO: 660068 - RNA, 19 nt, Artificial Sequence
  Description of Artificial Sequence: Synthetic oligonucleotide
  Sense strand starting at position 280 of SEQ ID NO: 585693
gaaguauauuagcugaagu

SEQ ID NO: 660069 - RNA, 19 nt, Artificial Sequence
  Description of Artificial Sequence: Synthetic oligonucleotide
  Antisense strand to SEQ ID NO: 660068
acuucagcuaauauacuuc

SEQ ID NO: 660070 - RNA, 19 nt, Artificial Sequence
  Description of Artificial Sequence: Synthetic oligonucleotide
  Sense strand starting at position 288 of SEQ ID NO: 585693
uuagcugaagucgacaaau

SEQ ID NO: 660071 - RNA, 19 nt, Artificial Sequence
  Description of Artificial Sequence: Synthetic oligonucleotide
  Antisense strand to SEQ ID NO: 660070
auuugucgacuucagcuaa

SEQ ID NO: 660072 - RNA, 19 nt, Artificial Sequence
  Description of Artificial Sequence: Synthetic oligonucleotide
  Sense strand starting at position 323 of SEQ ID NO: 585693
acaugugaauuaucuacag

SEQ ID NO: 660073 - RNA, 19 nt, Artificial Sequence
  Description of Artificial Sequence: Synthetic oligonucleotide
  Antisense strand to SEQ ID NO: 660072
cuguagauaauucacaugu

SEQ ID NO: 660074 - RNA, 19 nt, Artificial Sequence
  Description of Artificial Sequence: Synthetic oligonucleotide
  Sense strand starting at position 499 of SEQ ID NO: 585693
uauguuuaaugccuuggua

SEQ ID NO: 660075 - RNA, 19 nt, Artificial Sequence
  Description of Artificial Sequence: Synthetic oligonucleotide
  Antisense strand to SEQ ID NO: 660074
uaccaaggcauuaaacaua

SEQ ID NO: 660076 - RNA, 19 nt, Artificial Sequence
  Description of Artificial Sequence: Synthetic oligonucleotide
  Sense strand starting at position 501 of SEQ ID NO: 585693
uguuuaaugccuugguaga

SEQ ID NO: 660077 - RNA, 19 nt, Artificial Sequence
  Description of Artificial Sequence: Synthetic oligonucleotide
  Antisense strand to SEQ ID NO: 660076
ucuaccaaggcauuaaaca

SEQ ID NO: 660078 - RNA, 19 nt, Artificial Sequence
  Description of Artificial Sequence: Synthetic oligonucleotide
  Sense strand starting at position 502 of SEQ ID NO: 585693
guuuaaugccuugguagaa

SEQ ID NO: 660079 - RNA, 19 nt, Artificial Sequence
  Description of Artificial Sequence: Synthetic oligonucleotide
  Antisense strand to SEQ ID NO: 660078
uucuaccaaggcauuaaac

SEQ ID NO: 660080 - RNA, 19 nt, Artificial Sequence
  Description of Artificial Sequence: Synthetic oligonucleotide
  Sense strand starting at position 503 of SEQ ID NO: 585693
uuuaaugccuugguagaau

SEQ ID NO: 660081 - RNA, 19 nt, Artificial Sequence
  Description of Artificial Sequence: Synthetic oligonucleotide
  Antisense strand to SEQ ID NO: 660080
auucuaccaaggcauuaaa

SEQ ID NO: 660082 - RNA, 19 nt, Artificial Sequence
  Description of Artificial Sequence: Synthetic oligonucleotide
  Sense strand starting at position 1031 of SEQ ID NO: 585693
cgaaaucuuaaggguguua

SEQ ID NO: 660083 - RNA, 19 nt, Artificial Sequence
  Description of Artificial Sequence: Synthetic oligonucleotide
  Antisense strand to SEQ ID NO: 660082
uaacacccuuaagauuucg

SEQ ID NO: 660084 - RNA, 19 nt, Artificial Sequence
  Description of Artificial Sequence: Synthetic oligonucleotide
  Sense strand starting at position 1033 of SEQ ID NO: 585693
aaaucuuaaggguguuagu

SEQ ID NO: 660085 - RNA, 19 nt, Artificial Sequence
  Description of Artificial Sequence: Synthetic oligonucleotide
  Antisense strand to SEQ ID NO: 660084
acuaacacccuuaagauuu

SEQ ID NO: 660086 - RNA, 19 nt, Artificial Sequence
  Description of Artificial Sequence: Synthetic oligonucleotide
  Sense strand starting at position 1074 of SEQ ID NO: 585693
gccuaaauucuuggaacuc

SEQ ID NO: 660087 - RNA, 19 nt, Artificial Sequence
  Description of Artificial Sequence: Synthetic oligonucleotide
  Antisense strand to SEQ ID NO: 660086
gaguuccaagaauuuaggc

SEQ ID NO: 660088 - RNA, 19 nt, Artificial Sequence
  Description of Artificial Sequence: Synthetic oligonucleotide
  Sense strand starting at position 1149 of SEQ ID NO: 585693
caccguuugcuuuaaagaa

SEQ ID NO: 660089 - RNA, 19 nt, Artificial Sequence
  Description of Artificial Sequence: Synthetic oligonucleotide
  Antisense strand to SEQ ID NO: 660088
uucuuuaaagcaaacggug

SEQ ID NO: 660090 - RNA, 19 nt, Artificial Sequence
  Description of Artificial Sequence: Synthetic oligonucleotide
  Sense strand starting at position 1253 of SEQ ID NO: 585693
gcucuucggcagcugaauu

SEQ ID NO: 660091 - RNA, 19 nt, Artificial Sequence
  Description of Artificial Sequence: Synthetic oligonucleotide
  Antisense strand to SEQ ID NO: 660090
aauucagcugccgaagagc

SEQ ID NO: 660092 - RNA, 19 nt, Artificial Sequence
  Description of Artificial Sequence: Synthetic oligonucleotide
  Sense strand starting at position 1264 of SEQ ID NO: 585693
gcugaauuugcacgcuuaa

SEQ ID NO: 660093 - RNA, 19 nt, Artificial Sequence
  Description of Artificial Sequence: Synthetic oligonucleotide
  Antisense strand to SEQ ID NO: 660092
uuaagcgugcaaauucagc

SEQ ID NO: 660094 - RNA, 19 nt, Artificial Sequence
  Description of Artificial Sequence: Synthetic oligonucleotide
  Sense strand starting at position 1275 of SEQ ID NO: 585693
acgcuuaaaucucuaggaa

SEQ ID NO: 660095 - RNA, 19 nt, Artificial Sequence
  Description of Artificial Sequence: Synthetic oligonucleotide
  Antisense strand to SEQ ID NO: 660094
uuccuagagauuuaagcgu

SEQ ID NO: 660096 - RNA, 19 nt, Artificial Sequence
  Description of Artificial Sequence: Synthetic oligonucleotide
  Sense strand starting at position 1276 of SEQ ID NO: 585693
cgcuuaaaucucuaggaag

SEQ ID NO: 660097 - RNA, 19 nt, Artificial Sequence
  Description of Artificial Sequence: Synthetic oligonucleotide
  Antisense strand to SEQ ID NO: 660096
cuuccuagagauuuaagcg

SEQ ID NO: 660098 - RNA, 19 nt, Artificial Sequence
  Description of Artificial Sequence: Synthetic oligonucleotide
  Sense strand starting at position 1279 of SEQ ID NO: 585693
uuaaaucucuaggaaggaa

SEQ ID NO: 660099 - RNA, 19 nt, Artificial Sequence
  Description of Artificial Sequence: Synthetic oligonucleotide
  Antisense strand to SEQ ID NO: 660098
uuccuuccuagagauuuaa

SEQ ID NO: 660100 - RNA, 19 nt, Artificial Sequence
  Description of Artificial Sequence: Synthetic oligonucleotide
  Sense strand starting at position 1311 of SEQ ID NO: 585693
uguuucaguucggcaaaga

SEQ ID NO: 660101 - RNA, 19 nt, Artificial Sequence
  Description of Artificial Sequence: Synthetic oligonucleotide
  Antisense strand to SEQ ID NO: 660100
ucuuugccgaacugaaaca

SEQ ID NO: 660102 - RNA, 19 nt, Artificial Sequence
  Description of Artificial Sequence: Synthetic oligonucleotide
  Sense strand starting at position 1312 of SEQ ID NO: 585693
guuucaguucggcaaagag

SEQ ID NO: 660103 - RNA, 19 nt, Artificial Sequence
  Description of Artificial Sequence: Synthetic oligonucleotide
  Antisense strand to SEQ ID NO: 660102
cucuuugccgaacugaaac

SEQ ID NO: 660104 - RNA, 19 nt, Artificial Sequence
  Description of Artificial Sequence: Synthetic oligonucleotide
  Sense strand starting at position 1330 of SEQ ID NO: 585693
gcccuaggaucaugauuua

SEQ ID NO: 660105 - RNA, 19 nt, Artificial Sequence
  Description of Artificial Sequence: Synthetic oligonucleotide
  Antisense strand to SEQ ID NO: 660104
uaaaucaugauccuagggc

SEQ ID NO: 660106 - RNA, 19 nt, Artificial Sequence
  Description of Artificial Sequence: Synthetic oligonucleotide
  Sense strand starting at position 2268 of SEQ ID NO: 585693
ccggaucgucuggauuaga

SEQ ID NO: 660107 - RNA, 19 nt, Artificial Sequence
  Description of Artificial Sequence: Synthetic oligonucleotide
  Antisense strand to SEQ ID NO: 660106
ucuaauccagacgauccgg

SEQ ID NO: 660108 - RNA, 19 nt, Artificial Sequence
  Description of Artificial Sequence: Synthetic oligonucleotide
  Sense strand starting at position 2271 of SEQ ID NO: 585693
gaucgucuggauuagaauc

SEQ ID NO: 660109 - RNA, 19 nt, Artificial Sequence
  Description of Artificial Sequence: Synthetic oligonucleotide
  Antisense strand to SEQ ID NO: 660108
gauucuaauccagacgauc

SEQ ID NO: 660110 - RNA, 19 nt, Artificial Sequence
  Description of Artificial Sequence: Synthetic oligonucleotide
  Sense strand starting at position 2291 of SEQ ID NO: 585693
gguucuauagaaugugcaa

SEQ ID NO: 660111 - RNA, 19 nt, Artificial Sequence
  Description of Artificial Sequence: Synthetic oligonucleotide
  Antisense strand to SEQ ID NO: 660110
uugcacauucuauagaacc

SEQ ID NO: 660112 - RNA, 19 nt, Artificial Sequence
  Description of Artificial Sequence: Synthetic oligonucleotide
  Sense strand starting at position 2348 of SEQ ID NO: 585693
aagagaggguaguucucaa

SEQ ID NO: 660113 - RNA, 19 nt, Artificial Sequence
  Description of Artificial Sequence: Synthetic oligonucleotide
  Antisense strand to SEQ ID NO: 660112
uugagaacuacccucucuu

SEQ ID NO: 660114 - RNA, 19 nt, Artificial Sequence
  Description of Artificial Sequence: Synthetic oligonucleotide
  Sense strand starting at position 2356 of SEQ ID NO: 585693
guaguucucaagcgaagaa

SEQ ID NO: 660115 - RNA, 19 nt, Artificial Sequence
  Description of Artificial Sequence: Synthetic oligonucleotide
  Antisense strand to SEQ ID NO: 660114
uucuucgcuugagaacuac

SEQ ID NO: 660116 - RNA, 19 nt, Artificial Sequence
  Description of Artificial Sequence: Synthetic oligonucleotide
  Sense strand starting at position 2377 of SEQ ID NO: 585693
gggugcuuuagagguagau

SEQ ID NO: 660117 - RNA, 19 nt, Artificial Sequence
  Description of Artificial Sequence: Synthetic oligonucleotide
  Antisense strand to SEQ ID NO: 660116
aucuaccucuaaagcaccc

SEQ ID NO: 660118 - RNA, 19 nt, Artificial Sequence
  Description of Artificial Sequence: Synthetic oligonucleotide
  Sense strand starting at position 2542 of SEQ ID NO: 585693
cgccgugggaucuggaaga

SEQ ID NO: 660119 - RNA, 19 nt, Artificial Sequence
  Description of Artificial Sequence: Synthetic oligonucleotide
  Antisense strand to SEQ ID NO: 660118
ucuuccagaucccacggcg

SEQ ID NO: 660120 - RNA, 19 nt, Artificial Sequence
  Description of Artificial Sequence: Synthetic oligonucleotide
  Sense strand starting at position 3258 of SEQ ID NO: 585693
cggagauaccuauguccau

SEQ ID NO: 660121 - RNA, 19 nt, Artificial Sequence
  Description of Artificial Sequence: Synthetic oligonucleotide
  Antisense strand to SEQ ID NO: 660120
auggacauagguaucuccg

SEQ ID NO: 660122 - RNA, 19 nt, Artificial Sequence
  Description of Artificial Sequence: Synthetic oligonucleotide
  Sense strand starting at position 3259 of SEQ ID NO: 585693
ggagauaccuauguccauc

SEQ ID NO: 660123 - RNA, 19 nt, Artificial Sequence
  Description of Artificial Sequence: Synthetic oligonucleotide
  Antisense strand to SEQ ID NO: 660122
gauggacauagguaucucc

SEQ ID NO: 660124 - RNA, 19 nt, Artificial Sequence
  Description of Artificial Sequence: Synthetic oligonucleotide
  Sense strand starting at position 3367 of SEQ ID NO: 585693
caggaagauugguacagau

SEQ ID NO: 660125 - RNA, 19 nt, Artificial Sequence
  Description of Artificial Sequence: Synthetic oligonucleotide
  Antisense strand to SEQ ID NO: 660124
aucuguaccaaucuuccug

SEQ ID NO: 660126 - RNA, 19 nt, Artificial Sequence
  Description of Artificial Sequence: Synthetic oligonucleotide
  Sense strand starting at position 3380 of SEQ ID NO: 585693
acagaugucuuagcauaag

SEQ ID NO: 660127 - RNA, 19 nt, Artificial Sequence
  Description of Artificial Sequence: Synthetic oligonucleotide
  Antisense strand to SEQ ID NO: 660126
cuuaugcuaagacaucugu

SEQ ID NO: 660128 - RNA, 19 nt, Artificial Sequence
  Description of Artificial Sequence: Synthetic oligonucleotide
  Sense strand starting at position 3679 of SEQ ID NO: 585693
ucagucauacuugagguuu

SEQ ID NO: 660129 - RNA, 19 nt, Artificial Sequence
  Description of Artificial Sequence: Synthetic oligonucleotide
  Antisense strand to SEQ ID NO: 660128
aaaccucaaguaugacuga

SEQ ID NO: 660130 - RNA, 19 nt, Artificial Sequence
  Description of Artificial Sequence: Synthetic oligonucleotide
  Sense strand starting at position 3762 of SEQ ID NO: 585693
aaguccuuucuacgggagu

SEQ ID NO: 660131 - RNA, 19 nt, Artificial Sequence
  Description of Artificial Sequence: Synthetic oligonucleotide
  Antisense strand to SEQ ID NO: 660130
acucccguagaaaggacuu

SEQ ID NO: 660132 - RNA, 19 nt, Artificial Sequence
  Description of Artificial Sequence: Synthetic oligonucleotide
  Sense strand starting at position 3765 of SEQ ID NO: 585693
uccuuucuacgggagucua

SEQ ID NO: 660133 - RNA, 19 nt, Artificial Sequence
  Description of Artificial Sequence: Synthetic oligonucleotide
  Antisense strand to SEQ ID NO: 660132
uagacucccguagaaagga

SEQ ID NO: 660134 - RNA, 19 nt, Artificial Sequence
  Description of Artificial Sequence: Synthetic oligonucleotide
  Sense strand starting at position 3778 of SEQ ID NO: 585693
agucuacagucccuacauu

SEQ ID NO: 660135 - RNA, 19 nt, Artificial Sequence
  Description of Artificial Sequence: Synthetic oligonucleotide
  Antisense strand to SEQ ID NO: 660134
aauguagggacuguagacu

SEQ ID NO: 660136 - RNA, 19 nt, Artificial Sequence
  Description of Artificial Sequence: Synthetic oligonucleotide
  Sense strand starting at position 3779 of SEQ ID NO: 585693
gucuacagucccuacauua

SEQ ID NO: 660137 - RNA, 19 nt, Artificial Sequence
  Description of Artificial Sequence: Synthetic oligonucleotide
  Antisense strand to SEQ ID NO: 660136
uaauguagggacuguagac

SEQ ID NO: 660138 - RNA, 19 nt, Artificial Sequence
  Description of Artificial Sequence: Synthetic oligonucleotide
  Sense strand starting at position 3841 of SEQ ID NO: 585693
uauguuaaccguuagagag

SEQ ID NO: 660139 - RNA, 19 nt, Artificial Sequence
  Description of Artificial Sequence: Synthetic oligonucleotide
  Antisense strand to SEQ ID NO: 660138
cucucuaacgguuaacaua

SEQ ID NO: 660140 - RNA, 19 nt, Artificial Sequence
  Description of Artificial Sequence: Synthetic oligonucleotide
  Sense strand starting at position 3868 of SEQ ID NO: 585693
ucuguuucucuccaggaca

SEQ ID NO: 660141 - RNA, 19 nt, Artificial Sequence
  Description of Artificial Sequence: Synthetic oligonucleotide
  Antisense strand to SEQ ID NO: 660140
uguccuggagagaaacaga

SEQ ID NO: 660142 - RNA, 19 nt, Artificial Sequence
  Description of Artificial Sequence: Synthetic oligonucleotide
  Sense strand starting at position 3905 of SEQ ID NO: 585693
gagggugagaaauguugca

SEQ ID NO: 660143 - RNA, 19 nt, Artificial Sequence
  Description of Artificial Sequence: Synthetic oligonucleotide
  Antisense strand to SEQ ID NO: 660142
ugcaacauuucucacccuc

SEQ ID NO: 660144 - RNA, 19 nt, Artificial Sequence
  Description of Artificial Sequence: Synthetic oligonucleotide
  Sense strand starting at position 3932 of SEQ ID NO: 585693
ggcuaaugggaaugcaaau

SEQ ID NO: 660145 - RNA, 19 nt, Artificial Sequence
  Description of Artificial Sequence: Synthetic oligonucleotide
  Antisense strand to SEQ ID NO: 660144
auuugcauucccauuagcc

SEQ ID NO: 660146 - RNA, 19 nt, Artificial Sequence
  Description of Artificial Sequence: Synthetic oligonucleotide
  Sense strand starting at position 68 of SEQ ID NO: 585694
ucuuuauuugugcaugguu

SEQ ID NO: 660147 - RNA, 19 nt, Artificial Sequence
  Description of Artificial Sequence: Synthetic oligonucleotide
  Antisense strand to SEQ ID NO: 660146
aaccaugcacaaauaaaga

SEQ ID NO: 660148 - RNA, 19 nt, Artificial Sequence
  Description of Artificial Sequence: Synthetic oligonucleotide
  Sense strand starting at position 77 of SEQ ID NO: 585694
gugcaugguuaggcauuua

SEQ ID NO: 660149 - RNA, 19 nt, Artificial Sequence
  Description of Artificial Sequence: Synthetic oligonucleotide
  Antisense strand to SEQ ID NO: 660148
uaaaugccuaaccaugcac

SEQ ID NO: 660150 - RNA, 19 nt, Artificial Sequence
  Description of Artificial Sequence: Synthetic oligonucleotide
  Sense strand starting at position 546 of SEQ ID NO: 585694
uuuaacgcccaugaauauu

SEQ ID NO: 660151 - RNA, 19 nt, Artificial Sequence
  Description of Artificial Sequence: Synthetic oligonucleotide
  Antisense strand to SEQ ID NO: 660150
aauauucaugggcguuaaa

SEQ ID NO: 660152 - RNA, 19 nt, Artificial Sequence
  Description of Artificial Sequence: Synthetic oligonucleotide
  Sense strand starting at position 623 of SEQ ID NO: 585694
gugucaaccucuucccaaa

SEQ ID NO: 660153 - RNA, 19 nt, Artificial Sequence
  Description of Artificial Sequence: Synthetic oligonucleotide
  Antisense strand to SEQ ID NO: 660152
uuugggaagagguugacac

SEQ ID NO: 660154 - RNA, 19 nt, Artificial Sequence
  Description of Artificial Sequence: Synthetic oligonucleotide
  Sense strand starting at position 655 of SEQ ID NO: 585694
aggcuuaggagugaagagu

SEQ ID NO: 660155 - RNA, 19 nt, Artificial Sequence
  Description of Artificial Sequence: Synthetic oligonucleotide
  Antisense strand to SEQ ID NO: 660154
acucuucacuccuaagccu

SEQ ID NO: 660156 - RNA, 19 nt, Artificial Sequence
  Description of Artificial Sequence: Synthetic oligonucleotide
  Sense strand starting at position 697 of SEQ ID NO: 585694
aguaaaguugccugaccaa

SEQ ID NO: 660157 - RNA, 19 nt, Artificial Sequence
  Description of Artificial Sequence: Synthetic oligonucleotide
  Antisense strand to SEQ ID NO: 660156
uuggucaggcaacuuuacu

SEQ ID NO: 660158 - RNA, 19 nt, Artificial Sequence
  Description of Artificial Sequence: Synthetic oligonucleotide
  Sense strand starting at position 700 of SEQ ID NO: 585694
aaaguugccugaccaaaga

SEQ ID NO: 660159 - RNA, 19 nt, Artificial Sequence
  Description of Artificial Sequence: Synthetic oligonucleotide
  Antisense strand to SEQ ID NO: 660158
ucuuuggucaggcaacuuu

SEQ ID NO: 660160 - RNA, 19 nt, Artificial Sequence
  Description of Artificial Sequence: Synthetic oligonucleotide
  Sense strand starting at position 777 of SEQ ID NO: 585694
uguuguaaauaauccaaga

SEQ ID NO: 660161 - RNA, 19 nt, Artificial Sequence
  Description of Artificial Sequence: Synthetic oligonucleotide
  Antisense strand to SEQ ID NO: 660160
ucuuggauuauuuacaaca

SEQ ID NO: 660162 - RNA, 19 nt, Artificial Sequence
  Description of Artificial Sequence: Synthetic oligonucleotide
  Sense strand starting at position 901 of SEQ ID NO: 585694
agcauaggguucuugagua

SEQ ID NO: 660163 - RNA, 19 nt, Artificial Sequence
  Description of Artificial Sequence: Synthetic oligonucleotide
  Antisense strand to SEQ ID NO: 660162
uacucaagaacccuaugcu

SEQ ID NO: 660164 - RNA, 19 nt, Artificial Sequence
  Description of Artificial Sequence: Synthetic oligonucleotide
  Sense strand starting at position 908 of SEQ ID NO: 585694
gguucuugaguaggugcaa

SEQ ID NO: 660165 - RNA, 19 nt, Artificial Sequence
  Description of Artificial Sequence: Synthetic oligonucleotide
  Antisense strand to SEQ ID NO: 660164
uugcaccuacucaagaacc

SEQ ID NO: 660166 - RNA, 19 nt, Artificial Sequence
  Description of Artificial Sequence: Synthetic oligonucleotide
  Sense strand starting at position 941 of SEQ ID NO: 585694
gauugcuaauacucuguga

SEQ ID NO: 660167 - RNA, 19 nt, Artificial Sequence
  Description of Artificial Sequence: Synthetic oligonucleotide
  Antisense strand to SEQ ID NO: 660166
ucacagaguauuagcaauc

SEQ ID NO: 660168 - RNA, 19 nt, Artificial Sequence
  Description of Artificial Sequence: Synthetic oligonucleotide
  Sense strand starting at position 943 of SEQ ID NO: 585694
uugcuaauacucugugauu

SEQ ID NO: 660169 - RNA, 19 nt, Artificial Sequence
  Description of Artificial Sequence: Synthetic oligonucleotide
  Antisense strand to SEQ ID NO: 660168
aaucacagaguauuagcaa

SEQ ID NO: 660170 - RNA, 19 nt, Artificial Sequence
  Description of Artificial Sequence: Synthetic oligonucleotide
  Sense strand starting at position 944 of SEQ ID NO: 585694
ugcuaauacucugugauuu

SEQ ID NO: 660171 - RNA, 19 nt, Artificial Sequence
  Description of Artificial Sequence: Synthetic oligonucleotide
  Antisense strand to SEQ ID NO: 660170
aaaucacagaguauuagca

SEQ ID NO: 660172 - RNA, 19 nt, Artificial Sequence
  Description of Artificial Sequence: Synthetic oligonucleotide
  Sense strand starting at position 1402 of SEQ ID NO: 585694
ggaaguauauuagcugaag

SEQ ID NO: 660173 - RNA, 19 nt, Artificial Sequence
  Description of Artificial Sequence: Synthetic oligonucleotide
  Antisense strand to SEQ ID NO: 660172
cuucagcuaauauacuucc

SEQ ID NO: 660174 - RNA, 19 nt, Artificial Sequence
  Description of Artificial Sequence: Synthetic oligonucleotide
  Sense strand starting at position 1403 of SEQ ID NO: 585694
gaaguauauuagcugaagu

SEQ ID NO: 660175 - RNA, 19 nt, Artificial Sequence
  Description of Artificial Sequence: Synthetic oligonucleotide
  Antisense strand to SEQ ID NO: 660174
acuucagcuaauauacuuc

SEQ ID NO: 660176 - RNA, 19 nt, Artificial Sequence
  Description of Artificial Sequence: Synthetic oligonucleotide
  Sense strand starting at position 1411 of SEQ ID NO: 585694
uuagcugaagucgacaaau

SEQ ID NO: 660177 - RNA, 19 nt, Artificial Sequence
  Description of Artificial Sequence: Synthetic oligonucleotide
  Antisense strand to SEQ ID NO: 660176
auuugucgacuucagcuaa

SEQ ID NO: 660178 - RNA, 19 nt, Artificial Sequence
  Description of Artificial Sequence: Synthetic oligonucleotide
  Sense strand starting at position 1446 of SEQ ID NO: 585694
acaugugaauuaucuacag

SEQ ID NO: 660179 - RNA, 19 nt, Artificial Sequence
  Description of Artificial Sequence: Synthetic oligonucleotide
  Antisense strand to SEQ ID NO: 660178
cuguagauaauucacaugu

SEQ ID NO: 660180 - RNA, 19 nt, Artificial Sequence
  Description of Artificial Sequence: Synthetic oligonucleotide
  Sense strand starting at position 1622 of SEQ ID NO: 585694
uauguuuaaugccuuggua

SEQ ID NO: 660181 - RNA, 19 nt, Artificial Sequence
  Description of Artificial Sequence: Synthetic oligonucleotide
  Antisense strand to SEQ ID NO: 660180
uaccaaggcauuaaacaua

SEQ ID NO: 660182 - RNA, 19 nt, Artificial Sequence
  Description of Artificial Sequence: Synthetic oligonucleotide
  Sense strand starting at position 1624 of SEQ ID NO: 585694
uguuuaaugccuugguaga

SEQ ID NO: 660183 - RNA, 19 nt, Artificial Sequence
  Description of Artificial Sequence: Synthetic oligonucleotide
  Antisense strand to SEQ ID NO: 660182
ucuaccaaggcauuaaaca

SEQ ID NO: 660184 - RNA, 19 nt, Artificial Sequence
  Description of Artificial Sequence: Synthetic oligonucleotide
  Sense strand starting at position 1625 of SEQ ID NO: 585694
guuuaaugccuugguagaa

SEQ ID NO: 660185 - RNA, 19 nt, Artificial Sequence
  Description of Artificial Sequence: Synthetic oligonucleotide
  Antisense strand to SEQ ID NO: 660184
uucuaccaaggcauuaaac

SEQ ID NO: 660186 - RNA, 19 nt, Artificial Sequence
  Description of Artificial Sequence: Synthetic oligonucleotide
  Sense strand starting at position 1626 of SEQ ID NO: 585694
uuuaaugccuugguagaau

SEQ ID NO: 660187 - RNA, 19 nt, Artificial Sequence
  Description of Artificial Sequence: Synthetic oligonucleotide
  Antisense strand to SEQ ID NO: 660186
auucuaccaaggcauuaaa

SEQ ID NO: 660188 - RNA, 19 nt, Artificial Sequence
  Description of Artificial Sequence: Synthetic oligonucleotide
  Sense strand starting at position 2154 of SEQ ID NO: 585694
cgaaaucuuaaggguguua

SEQ ID NO: 660189 - RNA, 19 nt, Artificial Sequence
  Description of Artificial Sequence: Synthetic oligonucleotide
  Antisense strand to SEQ ID NO: 660188
uaacacccuuaagauuucg

SEQ ID NO: 660190 - RNA, 19 nt, Artificial Sequence
  Description of Artificial Sequence: Synthetic oligonucleotide
  Sense strand starting at position 2156 of SEQ ID NO: 585694
aaaucuuaaggguguuagu

SEQ ID NO: 660191 - RNA, 19 nt, Artificial Sequence
  Description of Artificial Sequence: Synthetic oligonucleotide
  Antisense strand to SEQ ID NO: 660190
acuaacacccuuaagauuu

SEQ ID NO: 660192 - RNA, 19 nt, Artificial Sequence
  Description of Artificial Sequence: Synthetic oligonucleotide
  Sense strand starting at position 2197 of SEQ ID NO: 585694
gccuaaauucuuggaacuc

SEQ ID NO: 660193 - RNA, 19 nt, Artificial Sequence
  Description of Artificial Sequence: Synthetic oligonucleotide
  Antisense strand to SEQ ID NO: 660192
gaguuccaagaauuuaggc

SEQ ID NO: 660194 - RNA, 19 nt, Artificial Sequence
  Description of Artificial Sequence: Synthetic oligonucleotide
  Sense strand starting at position 2272 of SEQ ID NO: 585694
caccguuugcuuuaaagaa

SEQ ID NO: 660195 - RNA, 19 nt, Artificial Sequence
  Description of Artificial Sequence: Synthetic oligonucleotide
  Antisense strand to SEQ ID NO: 660194
uucuuuaaagcaaacggug

SEQ ID NO: 660196 - RNA, 19 nt, Artificial Sequence
  Description of Artificial Sequence: Synthetic oligonucleotide
  Sense strand starting at position 2376 of SEQ ID NO: 585694
gcucuucggcagcugaauu

SEQ ID NO: 660197 - RNA, 19 nt, Artificial Sequence
  Description of Artificial Sequence: Synthetic oligonucleotide
  Antisense strand to SEQ ID NO: 660196
aauucagcugccgaagagc

SEQ ID NO: 660198 - RNA, 19 nt, Artificial Sequence
  Description of Artificial Sequence: Synthetic oligonucleotide
  Sense strand starting at position 2387 of SEQ ID NO: 585694
gcugaauuugcacgcuuaa

SEQ ID NO: 660199 - RNA, 19 nt, Artificial Sequence
  Description of Artificial Sequence: Synthetic oligonucleotide
  Antisense strand to SEQ ID NO: 660198
uuaagcgugcaaauucagc

SEQ ID NO: 660200 - RNA, 19 nt, Artificial Sequence
  Description of Artificial Sequence: Synthetic oligonucleotide
  Sense strand starting at position 2398 of SEQ ID NO: 585694
acgcuuaaaucucuaggaa

SEQ ID NO: 660201 - RNA, 19 nt, Artificial Sequence
  Description of Artificial Sequence: Synthetic oligonucleotide
  Antisense strand to SEQ ID NO: 660200
uuccuagagauuuaagcgu

SEQ ID NO: 660202 - RNA, 19 nt, Artificial Sequence
  Description of Artificial Sequence: Synthetic oligonucleotide
  Sense strand starting at position 2399 of SEQ ID NO: 585694
cgcuuaaaucucuaggaag

SEQ ID NO: 660203 - RNA, 19 nt, Artificial Sequence
  Description of Artificial Sequence: Synthetic oligonucleotide
  Antisense strand to SEQ ID NO: 660202
cuuccuagagauuuaagcg

SEQ ID NO: 660204 - RNA, 19 nt, Artificial Sequence
  Description of Artificial Sequence: Synthetic oligonucleotide
  Sense strand starting at position 2402 of SEQ ID NO: 585694
uuaaaucucuaggaaggaa

SEQ ID NO: 660205 - RNA, 19 nt, Artificial Sequence
  Description of Artificial Sequence: Synthetic oligonucleotide
  Antisense strand to SEQ ID NO: 660204
uuccuuccuagagauuuaa

SEQ ID NO: 660206 - RNA, 19 nt, Artificial Sequence
  Description of Artificial Sequence: Synthetic oligonucleotide
  Sense strand starting at position 2434 of SEQ ID NO: 585694
uguuucaguucggcaaaga

SEQ ID NO: 660207 - RNA, 19 nt, Artificial Sequence
  Description of Artificial Sequence: Synthetic oligonucleotide
  Antisense strand to SEQ ID NO: 660206
ucuuugccgaacugaaaca

SEQ ID NO: 660208 - RNA, 19 nt, Artificial Sequence
  Description of Artificial Sequence: Synthetic oligonucleotide
  Sense strand starting at position 2435 of SEQ ID NO: 585694
guuucaguucggcaaagag

SEQ ID NO: 660209 - RNA, 19 nt, Artificial Sequence
  Description of Artificial Sequence: Synthetic oligonucleotide
  Antisense strand to SEQ ID NO: 660208
cucuuugccgaacugaaac

SEQ ID NO: 660210 - RNA, 19 nt, Artificial Sequence
  Description of Artificial Sequence: Synthetic oligonucleotide
  Sense strand starting at position 2453 of SEQ ID NO: 585694
gcccuaggaucaugauuua

SEQ ID NO: 660211 - RNA, 19 nt, Artificial Sequence
  Description of Artificial Sequence: Synthetic oligonucleotide
  Antisense strand to SEQ ID NO: 660210
uaaaucaugauccuagggc

SEQ ID NO: 660212 - RNA, 19 nt, Artificial Sequence
  Description of Artificial Sequence: Synthetic oligonucleotide
  Sense strand starting at position 3391 of SEQ ID NO: 585694
ccggaucgucuggauuaga

SEQ ID NO: 660213 - RNA, 19 nt, Artificial Sequence
  Description of Artificial Sequence: Synthetic oligonucleotide
  Antisense strand to SEQ ID NO: 660212
ucuaauccagacgauccgg

SEQ ID NO: 660214 - RNA, 19 nt, Artificial Sequence
  Description of Artificial Sequence: Synthetic oligonucleotide
  Sense strand starting at position 3394 of SEQ ID NO: 585694
gaucgucuggauuagaauc

SEQ ID NO: 660215 - RNA, 19 nt, Artificial Sequence
  Description of Artificial Sequence: Synthetic oligonucleotide
  Antisense strand to SEQ ID NO: 660214
gauucuaauccagacgauc

SEQ ID NO: 660216 - RNA, 19 nt, Artificial Sequence
  Description of Artificial Sequence: Synthetic oligonucleotide
  Sense strand starting at position 3414 of SEQ ID NO: 585694
gguucuauagaaugugcaa

SEQ ID NO: 660217 - RNA, 19 nt, Artificial Sequence
  Description of Artificial Sequence: Synthetic oligonucleotide
  Antisense strand to SEQ ID NO: 660216
uugcacauucuauagaacc

SEQ ID NO: 660218 - RNA, 19 nt, Artificial Sequence
  Description of Artificial Sequence: Synthetic oligonucleotide
  Sense strand starting at position 3471 of SEQ ID NO: 585694
aagagaggguaguucucaa

SEQ ID NO: 660219 - RNA, 19 nt, Artificial Sequence
  Description of Artificial Sequence: Synthetic oligonucleotide
  Antisense strand to SEQ ID NO: 660218
uugagaacuacccucucuu

SEQ ID NO: 660220 - RNA, 19 nt, Artificial Sequence
  Description of Artificial Sequence: Synthetic oligonucleotide
  Sense strand starting at position 3479 of SEQ ID NO: 585694
guaguucucaagcgaagaa

SEQ ID NO: 660221 - RNA, 19 nt, Artificial Sequence
  Description of Artificial Sequence: Synthetic oligonucleotide
  Antisense strand to SEQ ID NO: 660220
uucuucgcuugagaacuac

SEQ ID NO: 660222 - RNA, 19 nt, Artificial Sequence
  Description of Artificial Sequence: Synthetic oligonucleotide
  Sense strand starting at position 3500 of SEQ ID NO: 585694
gggugcuuuagagguagau

SEQ ID NO: 660223 - RNA, 19 nt, Artificial Sequence
  Description of Artificial Sequence: Synthetic oligonucleotide
  Antisense strand to SEQ ID NO: 660222
aucuaccucuaaagcaccc

SEQ ID NO: 660224 - RNA, 19 nt, Artificial Sequence
  Description of Artificial Sequence: Synthetic oligonucleotide
  Sense strand starting at position 3665 of SEQ ID NO: 585694
cgccgugggaucuggaaga

SEQ ID NO: 660225 - RNA, 19 nt, Artificial Sequence
  Description of Artificial Sequence: Synthetic oligonucleotide
  Antisense strand to SEQ ID NO: 660224
ucuuccagaucccacggcg

SEQ ID NO: 660226 - RNA, 19 nt, Artificial Sequence
  Description of Artificial Sequence: Synthetic oligonucleotide
  Sense strand starting at position 1 of SEQ ID NO: 585695
guacauuuguucuucguuu

SEQ ID NO: 660227 - RNA, 19 nt, Artificial Sequence
  Description of Artificial Sequence: Synthetic oligonucleotide
  Antisense strand to SEQ ID NO: 660226
aaacgaagaacaaauguac

SEQ ID NO: 660228 - RNA, 19 nt, Artificial Sequence
  Description of Artificial Sequence: Synthetic oligonucleotide
  Sense strand starting at position 46 of SEQ ID NO: 585695
aggugugaaacuugaguug

SEQ ID NO: 660229 - RNA, 19 nt, Artificial Sequence
  Description of Artificial Sequence: Synthetic oligonucleotide
  Antisense strand to SEQ ID NO: 660228
caacucaaguuucacaccu

SEQ ID NO: 660230 - RNA, 19 nt, Artificial Sequence
  Description of Artificial Sequence: Synthetic oligonucleotide
  Sense strand starting at position 106 of SEQ ID NO: 585695
gcaugauaaguugagugaa

SEQ ID NO: 660231 - RNA, 19 nt, Artificial Sequence
  Description of Artificial Sequence: Synthetic oligonucleotide
  Antisense strand to SEQ ID NO: 660230
uucacucaacuuaucaugc

SEQ ID NO: 660232 - RNA, 19 nt, Artificial Sequence
  Description of Artificial Sequence: Synthetic oligonucleotide
  Sense strand starting at position 108 of SEQ ID NO: 585695
augauaaguugagugaaau

SEQ ID NO: 660233 - RNA, 19 nt, Artificial Sequence
  Description of Artificial Sequence: Synthetic oligonucleotide
  Antisense strand to SEQ ID NO: 660232
auuucacucaacuuaucau

SEQ ID NO: 660234 - RNA, 19 nt, Artificial Sequence
  Description of Artificial Sequence: Synthetic oligonucleotide
  Sense strand starting at position 109 of SEQ ID NO: 585695
ugauaaguugagugaaauu

SEQ ID NO: 660235 - RNA, 19 nt, Artificial Sequence
  Description of Artificial Sequence: Synthetic oligonucleotide
  Antisense strand to SEQ ID NO: 660234
aauuucacucaacuuauca

SEQ ID NO: 660236 - RNA, 19 nt, Artificial Sequence
  Description of Artificial Sequence: Synthetic oligonucleotide
  Sense strand starting at position 142 of SEQ ID NO: 585695
agagaagugugagcuggaa

SEQ ID NO: 660237 - RNA, 19 nt, Artificial Sequence
  Description of Artificial Sequence: Synthetic oligonucleotide
  Antisense strand to SEQ ID NO: 660236
uuccagcucacacuucucu

SEQ ID NO: 660238 - RNA, 19 nt, Artificial Sequence
  Description of Artificial Sequence: Synthetic oligonucleotide
  Sense strand starting at position 144 of SEQ ID NO: 585695
agaagugugagcuggaaug

SEQ ID NO: 660239 - RNA, 19 nt, Artificial Sequence
  Description of Artificial Sequence: Synthetic oligonucleotide
  Antisense strand to SEQ ID NO: 660238
cauuccagcucacacuucu

SEQ ID NO: 660240 - RNA, 19 nt, Artificial Sequence
  Description of Artificial Sequence: Synthetic oligonucleotide
  Sense strand starting at position 358 of SEQ ID NO: 585695
gcagaaguaccucgaagaa

SEQ ID NO: 660241 - RNA, 19 nt, Artificial Sequence
  Description of Artificial Sequence: Synthetic oligonucleotide
  Antisense strand to SEQ ID NO: 660240
uucuucgagguacuucugc

SEQ ID NO: 660242 - RNA, 19 nt, Artificial Sequence
  Description of Artificial Sequence: Synthetic oligonucleotide
  Sense strand starting at position 474 of SEQ ID NO: 585695
uggugacuucuggagcgaa

SEQ ID NO: 660243 - RNA, 19 nt, Artificial Sequence
  Description of Artificial Sequence: Synthetic oligonucleotide
  Antisense strand to SEQ ID NO: 660242
uucgcuccagaagucacca

SEQ ID NO: 660244 - RNA, 19 nt, Artificial Sequence
  Description of Artificial Sequence: Synthetic oligonucleotide
  Sense strand starting at position 660 of SEQ ID NO: 585695
aagggaucucucgaucuuc

SEQ ID NO: 660245 - RNA, 19 nt, Artificial Sequence
  Description of Artificial Sequence: Synthetic oligonucleotide
  Antisense strand to SEQ ID NO: 660244
gaagaucgagagaucccuu

SEQ ID NO: 660246 - RNA, 19 nt, Artificial Sequence
  Description of Artificial Sequence: Synthetic oligonucleotide
  Sense strand starting at position 1790 of SEQ ID NO: 585695
agacucuucuuaccagaug

SEQ ID NO: 660247 - RNA, 19 nt, Artificial Sequence
  Description of Artificial Sequence: Synthetic oligonucleotide
  Antisense strand to SEQ ID NO: 660246
caucugguaagaagagucu

SEQ ID NO: 660248 - RNA, 19 nt, Artificial Sequence
  Description of Artificial Sequence: Synthetic oligonucleotide
  Sense strand starting at position 2061 of SEQ ID NO: 585695
guugguauccuacagcaaa

SEQ ID NO: 660249 - RNA, 19 nt, Artificial Sequence
  Description of Artificial Sequence: Synthetic oligonucleotide
  Antisense strand to SEQ ID NO: 660248
uuugcuguaggauaccaac

SEQ ID NO: 660250 - RNA, 19 nt, Artificial Sequence
  Description of Artificial Sequence: Synthetic oligonucleotide
  Sense strand starting at position 2110 of SEQ ID NO: 585695
agaucuguugcucaacaaa

SEQ ID NO: 660251 - RNA, 19 nt, Artificial Sequence
  Description of Artificial Sequence: Synthetic oligonucleotide
  Antisense strand to SEQ ID NO: 660250
uuuguugagcaacagaucu

SEQ ID NO: 660252 - RNA, 19 nt, Artificial Sequence
  Description of Artificial Sequence: Synthetic oligonucleotide
  Sense strand starting at position 2113 of SEQ ID NO: 585695
ucuguugcucaacaaaguu

SEQ ID NO: 660253 - RNA, 19 nt, Artificial Sequence
  Description of Artificial Sequence: Synthetic oligonucleotide
  Antisense strand to SEQ ID NO: 660252
aacuuuguugagcaacaga

SEQ ID NO: 660254 - RNA, 19 nt, Artificial Sequence
  Description of Artificial Sequence: Synthetic oligonucleotide
  Sense strand starting at position 2143 of SEQ ID NO: 585695
aagucucugcuuuacggaa

SEQ ID NO: 660255 - RNA, 19 nt, Artificial Sequence
  Description of Artificial Sequence: Synthetic oligonucleotide
  Antisense strand to SEQ ID NO: 660254
uuccguaaagcagagacuu

SEQ ID NO: 660256 - RNA, 19 nt, Artificial Sequence
  Description of Artificial Sequence: Synthetic oligonucleotide
  Sense strand starting at position 2150 of SEQ ID NO: 585695
ugcuuuacggaauaaagca

SEQ ID NO: 660257 - RNA, 19 nt, Artificial Sequence
  Description of Artificial Sequence: Synthetic oligonucleotide
  Antisense strand to SEQ ID NO: 660256
ugcuuuauuccguaaagca

SEQ ID NO: 660258 - RNA, 19 nt, Artificial Sequence
  Description of Artificial Sequence: Synthetic oligonucleotide
  Sense strand starting at position 2232 of SEQ ID NO: 585695
auggcaagagaaugugaau

SEQ ID NO: 660259 - RNA, 19 nt, Artificial Sequence
  Description of Artificial Sequence: Synthetic oligonucleotide
  Antisense strand to SEQ ID NO: 660258
auucacauucucuugccau

SEQ ID NO: 660260 - RNA, 19 nt, Artificial Sequence
  Description of Artificial Sequence: Synthetic oligonucleotide
  Sense strand starting at position 2317 of SEQ ID NO: 585695
gggagugaauaacauuuaa

SEQ ID NO: 660261 - RNA, 19 nt, Artificial Sequence
  Description of Artificial Sequence: Synthetic oligonucleotide
  Antisense strand to SEQ ID NO: 660260
uuaaauguuauucacuccc

SEQ ID NO: 660262 - RNA, 19 nt, Artificial Sequence
  Description of Artificial Sequence: Synthetic oligonucleotide
  Sense strand starting at position 2341 of SEQ ID NO: 585695
guuuguguucugucaucuu

SEQ ID NO: 660263 - RNA, 19 nt, Artificial Sequence
  Description of Artificial Sequence: Synthetic oligonucleotide
  Antisense strand to SEQ ID NO: 660262
aagaugacagaacacaaac

SEQ ID NO: 660264 - RNA, 19 nt, Artificial Sequence
  Description of Artificial Sequence: Synthetic oligonucleotide
  Sense strand starting at position 2359 of SEQ ID NO: 585695
uucgaauugcugcauaaau

SEQ ID NO: 660265 - RNA, 19 nt, Artificial Sequence
  Description of Artificial Sequence: Synthetic oligonucleotide
  Antisense strand to SEQ ID NO: 660264
auuuaugcagcaauucgaa

SEQ ID NO: 660266 - RNA, 19 nt, Artificial Sequence
  Description of Artificial Sequence: Synthetic oligonucleotide
  Sense strand starting at position 2361 of SEQ ID NO: 585695
cgaauugcugcauaaauaa

SEQ ID NO: 660267 - RNA, 19 nt, Artificial Sequence
  Description of Artificial Sequence: Synthetic oligonucleotide
  Antisense strand to SEQ ID NO: 660266
uuauuuaugcagcaauucg

SEQ ID NO: 660268 - RNA, 19 nt, Artificial Sequence
  Description of Artificial Sequence: Synthetic oligonucleotide
  Sense strand starting at position 2555 of SEQ ID NO: 585695
ggcucuucucucugauuaa

SEQ ID NO: 660269 - RNA, 19 nt, Artificial Sequence
  Description of Artificial Sequence: Synthetic oligonucleotide
  Antisense strand to SEQ ID NO: 660268
uuaaucagagagaagagcc

SEQ ID NO: 660270 - RNA, 19 nt, Artificial Sequence
  Description of Artificial Sequence: Synthetic oligonucleotide
  Sense strand starting at position 2647 of SEQ ID NO: 585695
ugcauaaaucuguaauuag

SEQ ID NO: 660271 - RNA, 19 nt, Artificial Sequence
  Description of Artificial Sequence: Synthetic oligonucleotide
  Antisense strand to SEQ ID NO: 660270
cuaauuacagauuuaugca

SEQ ID NO: 660272 - RNA, 19 nt, Artificial Sequence
  Description of Artificial Sequence: Synthetic oligonucleotide
  Sense strand starting at position 2657 of SEQ ID NO: 585695
uguaauuagucguugauuu

SEQ ID NO: 660273 - RNA, 19 nt, Artificial Sequence
  Description of Artificial Sequence: Synthetic oligonucleotide
  Antisense strand to SEQ ID NO: 660272
aaaucaacgacuaauuaca

SEQ ID NO: 660274 - RNA, 19 nt, Artificial Sequence
  Description of Artificial Sequence: Synthetic oligonucleotide
  Sense strand starting at position 2658 of SEQ ID NO: 585695
guaauuagucguugauuua

SEQ ID NO: 660275 - RNA, 19 nt, Artificial Sequence
  Description of Artificial Sequence: Synthetic oligonucleotide
  Antisense strand to SEQ ID NO: 660274
uaaaucaacgacuaauuac

SEQ ID NO: 660276 - RNA, 19 nt, Artificial Sequence
  Description of Artificial Sequence: Synthetic oligonucleotide
  Sense strand starting at position 2689 of SEQ ID NO: 585695
uuggguuagaauugucuga

SEQ ID NO: 660277 - RNA, 19 nt, Artificial Sequence
  Description of Artificial Sequence: Synthetic oligonucleotide
  Antisense strand to SEQ ID NO: 660276
ucagacaauucuaacccaa

SEQ ID NO: 660278 - RNA, 19 nt, Artificial Sequence
  Description of Artificial Sequence: Synthetic oligonucleotide
  Sense strand starting at position 2691 of SEQ ID NO: 585695
ggguuagaauugucugaaa

SEQ ID NO: 660279 - RNA, 19 nt, Artificial Sequence
  Description of Artificial Sequence: Synthetic oligonucleotide
  Antisense strand to SEQ ID NO: 660278
uuucagacaauucuaaccc

SEQ ID NO: 660280 - RNA, 19 nt, Artificial Sequence
  Description of Artificial Sequence: Synthetic oligonucleotide
  Sense strand starting at position 2693 of SEQ ID NO: 585695
guuagaauugucugaaagg

SEQ ID NO: 660281 - RNA, 19 nt, Artificial Sequence
  Description of Artificial Sequence: Synthetic oligonucleotide
  Antisense strand to SEQ ID NO: 660280
ccuuucagacaauucuaac

SEQ ID NO: 660282 - RNA, 19 nt, Artificial Sequence
  Description of Artificial Sequence: Synthetic oligonucleotide
  Sense strand starting at position 2902 of SEQ ID NO: 585695
ucucacuuauuauuaguga

SEQ ID NO: 660283 - RNA, 19 nt, Artificial Sequence
  Description of Artificial Sequence: Synthetic oligonucleotide
  Antisense strand to SEQ ID NO: 660282
ucacuaauaauaagugaga

SEQ ID NO: 660284 - RNA, 19 nt, Artificial Sequence
  Description of Artificial Sequence: Synthetic oligonucleotide
  Sense strand starting at position 2925 of SEQ ID NO: 585695
uuccuagaaucuucgucaa

SEQ ID NO: 660285 - RNA, 19 nt, Artificial Sequence
  Description of Artificial Sequence: Synthetic oligonucleotide
  Antisense strand to SEQ ID NO: 660284
uugacgaagauucuaggaa

SEQ ID NO: 660286 - RNA, 19 nt, Artificial Sequence
  Description of Artificial Sequence: Synthetic oligonucleotide
  Sense strand starting at position 2927 of SEQ ID NO: 585695
ccuagaaucuucgucaaac

SEQ ID NO: 660287 - RNA, 19 nt, Artificial Sequence
  Description of Artificial Sequence: Synthetic oligonucleotide
  Antisense strand to SEQ ID NO: 660286
guuugacgaagauucuagg

SEQ ID NO: 660288 - RNA, 19 nt, Artificial Sequence
  Description of Artificial Sequence: Synthetic oligonucleotide
  Sense strand starting at position 2929 of SEQ ID NO: 585695
uagaaucuucgucaaacug

SEQ ID NO: 660289 - RNA, 19 nt, Artificial Sequence
  Description of Artificial Sequence: Synthetic oligonucleotide
  Antisense strand to SEQ ID NO: 660288
caguuugacgaagauucua

SEQ ID NO: 660290 - RNA, 19 nt, Artificial Sequence
  Description of Artificial Sequence: Synthetic oligonucleotide
  Sense strand starting at position 3067 of SEQ ID NO: 585695
aggauuuaaucugagaacu

SEQ ID NO: 660291 - RNA, 19 nt, Artificial Sequence
  Description of Artificial Sequence: Synthetic oligonucleotide
  Antisense strand to SEQ ID NO: 660290
aguucucagauuaaauccu

SEQ ID NO: 660292 - RNA, 19 nt, Artificial Sequence
  Description of Artificial Sequence: Synthetic oligonucleotide
  Sense strand starting at position 3133 of SEQ ID NO: 585695
agugauacucaauauaugu

SEQ ID NO: 660293 - RNA, 19 nt, Artificial Sequence
  Description of Artificial Sequence: Synthetic oligonucleotide
  Antisense strand to SEQ ID NO: 660292
acauauauugaguaucacu

SEQ ID NO: 660294 - RNA, 19 nt, Artificial Sequence
  Description of Artificial Sequence: Synthetic oligonucleotide
  Sense strand starting at position 3265 of SEQ ID NO: 585695
aagagaaauucuguguuug

SEQ ID NO: 660295 - RNA, 19 nt, Artificial Sequence
  Description of Artificial Sequence: Synthetic oligonucleotide
  Antisense strand to SEQ ID NO: 660294
caaacacagaauuucucuu

SEQ ID NO: 660296 - RNA, 19 nt, Artificial Sequence
  Description of Artificial Sequence: Synthetic oligonucleotide
  Sense strand starting at position 3347 of SEQ ID NO: 585695
cauguuguuuaccuugaga

SEQ ID NO: 660297 - RNA, 19 nt, Artificial Sequence
  Description of Artificial Sequence: Synthetic oligonucleotide
  Antisense strand to SEQ ID NO: 660296
ucucaagguaaacaacaug

SEQ ID NO: 660298 - RNA, 19 nt, Artificial Sequence
  Description of Artificial Sequence: Synthetic oligonucleotide
  Sense strand starting at position 3349 of SEQ ID NO: 585695
uguuguuuaccuugagaag

SEQ ID NO: 660299 - RNA, 19 nt, Artificial Sequence
  Description of Artificial Sequence: Synthetic oligonucleotide
  Antisense strand to SEQ ID NO: 660298
cuucucaagguaaacaaca

SEQ ID NO: 660300 - RNA, 19 nt, Artificial Sequence
  Description of Artificial Sequence: Synthetic oligonucleotide
  Sense strand starting at position 3350 of SEQ ID NO: 585695
guuguuuaccuugagaaga

SEQ ID NO: 660301 - RNA, 19 nt, Artificial Sequence
  Description of Artificial Sequence: Synthetic oligonucleotide
  Antisense strand to SEQ ID NO: 660300
ucuucucaagguaaacaac

SEQ ID NO: 660302 - RNA, 19 nt, Artificial Sequence
  Description of Artificial Sequence: Synthetic oligonucleotide
  Sense strand starting at position 3750 of SEQ ID NO: 585695
agacuagacugccucucaa

SEQ ID NO: 660303 - RNA, 19 nt, Artificial Sequence
  Description of Artificial Sequence: Synthetic oligonucleotide
  Antisense strand to SEQ ID NO: 660302
uugagaggcagucuagucu

SEQ ID NO: 660304 - RNA, 19 nt, Artificial Sequence
  Description of Artificial Sequence: Synthetic oligonucleotide
  Sense strand starting at position 3941 of SEQ ID NO: 585695
aaccaaaguccguaguuua

SEQ ID NO: 660305 - RNA, 19 nt, Artificial Sequence
  Description of Artificial Sequence: Synthetic oligonucleotide
  Antisense strand to SEQ ID NO: 660304
uaaacuacggacuuugguu

SEQ ID NO: 660306 - RNA, 19 nt, Artificial Sequence
  Description of Artificial Sequence: Synthetic oligonucleotide
  Sense strand starting at position 26 of SEQ ID NO: 585696
auugauuucugggaggcau

SEQ ID NO: 660307 - RNA, 19 nt, Artificial Sequence
  Description of Artificial Sequence: Synthetic oligonucleotide
  Antisense strand to SEQ ID NO: 660306
augccucccagaaaucaau

SEQ ID NO: 660308 - RNA, 19 nt, Artificial Sequence
  Description of Artificial Sequence: Synthetic oligonucleotide
  Sense strand starting at position 153 of SEQ ID NO: 585696
aaaugagaccucggugauu

SEQ ID NO: 660309 - RNA, 19 nt, Artificial Sequence
  Description of Artificial Sequence: Synthetic oligonucleotide
  Antisense strand to SEQ ID NO: 660308
aaucaccgaggucucauuu

SEQ ID NO: 660310 - RNA, 19 nt, Artificial Sequence
  Description of Artificial Sequence: Synthetic oligonucleotide
  Sense strand starting at position 209 of SEQ ID NO: 585696
uaugacugucugcaaauga

SEQ ID NO: 660311 - RNA, 19 nt, Artificial Sequence
  Description of Artificial Sequence: Synthetic oligonucleotide
  Antisense strand to SEQ ID NO: 660310
ucauuugcagacagucaua

SEQ ID NO: 660312 - RNA, 19 nt, Artificial Sequence
  Description of Artificial Sequence: Synthetic oligonucleotide
  Sense strand starting at position 216 of SEQ ID NO: 585696
gucugcaaaugauuacaca

SEQ ID NO: 660313 - RNA, 19 nt, Artificial Sequence
  Description of Artificial Sequence: Synthetic oligonucleotide
  Antisense strand to SEQ ID NO: 660312
uguguaaucauuugcagac

SEQ ID NO: 660314 - RNA, 19 nt, Artificial Sequence
  Description of Artificial Sequence: Synthetic oligonucleotide
  Sense strand starting at position 393 of SEQ ID NO: 585696
agaaucauguagcuuuaga

SEQ ID NO: 660315 - RNA, 19 nt, Artificial Sequence
  Description of Artificial Sequence: Synthetic oligonucleotide
  Antisense strand to SEQ ID NO: 660314
ucuaaagcuacaugauucu

SEQ ID NO: 660316 - RNA, 19 nt, Artificial Sequence
  Description of Artificial Sequence: Synthetic oligonucleotide
  Sense strand starting at position 400 of SEQ ID NO: 585696
uguagcuuuagaugagaac

SEQ ID NO: 660317 - RNA, 19 nt, Artificial Sequence
  Description of Artificial Sequence: Synthetic oligonucleotide
  Antisense strand to SEQ ID NO: 660316
guucucaucuaaagcuaca

SEQ ID NO: 660318 - RNA, 19 nt, Artificial Sequence
  Description of Artificial Sequence: Synthetic oligonucleotide
  Sense strand starting at position 477 of SEQ ID NO: 585696
ugauuugauuugcagugga

SEQ ID NO: 660319 - RNA, 19 nt, Artificial Sequence
  Description of Artificial Sequence: Synthetic oligonucleotide
  Antisense strand to SEQ ID NO: 660318
uccacugcaaaucaaauca

SEQ ID NO: 660320 - RNA, 19 nt, Artificial Sequence
  Description of Artificial Sequence: Synthetic oligonucleotide
  Sense strand starting at position 542 of SEQ ID NO: 585696
ggcugaucauacuuaauau

SEQ ID NO: 660321 - RNA, 19 nt, Artificial Sequence
  Description of Artificial Sequence: Synthetic oligonucleotide
  Antisense strand to SEQ ID NO: 660320
auauuaaguaugaucagcc

SEQ ID NO: 660322 - RNA, 19 nt, Artificial Sequence
  Description of Artificial Sequence: Synthetic oligonucleotide
  Sense strand starting at position 557 of SEQ ID NO: 585696
auauaauagcucuaaggcu

SEQ ID NO: 660323 - RNA, 19 nt, Artificial Sequence
  Description of Artificial Sequence: Synthetic oligonucleotide
  Antisense strand to SEQ ID NO: 660322
agccuuagagcuauuauau

SEQ ID NO: 660324 - RNA, 19 nt, Artificial Sequence
  Description of Artificial Sequence: Synthetic oligonucleotide
  Sense strand starting at position 790 of SEQ ID NO: 585696
aggugugaaacuugaguug

SEQ ID NO: 660325 - RNA, 19 nt, Artificial Sequence
  Description of Artificial Sequence: Synthetic oligonucleotide
  Antisense strand to SEQ ID NO: 660324
caacucaaguuucacaccu

SEQ ID NO: 660326 - RNA, 19 nt, Artificial Sequence
  Description of Artificial Sequence: Synthetic oligonucleotide
  Sense strand starting at position 850 of SEQ ID NO: 585696
gcaugauaaguugagugaa

SEQ ID NO: 660327 - RNA, 19 nt, Artificial Sequence
  Description of Artificial Sequence: Synthetic oligonucleotide
  Antisense strand to SEQ ID NO: 660326
uucacucaacuuaucaugc

SEQ ID NO: 660328 - RNA, 19 nt, Artificial Sequence
  Description of Artificial Sequence: Synthetic oligonucleotide
  Sense strand starting at position 852 of SEQ ID NO: 585696
augauaaguugagugaaau

SEQ ID NO: 660329 - RNA, 19 nt, Artificial Sequence
  Description of Artificial Sequence: Synthetic oligonucleotide
  Antisense strand to SEQ ID NO: 660328
auuucacucaacuuaucau

SEQ ID NO: 660330 - RNA, 19 nt, Artificial Sequence
  Description of Artificial Sequence: Synthetic oligonucleotide
  Sense strand starting at position 853 of SEQ ID NO: 585696
ugauaaguugagugaaauu

SEQ ID NO: 660331 - RNA, 19 nt, Artificial Sequence
  Description of Artificial Sequence: Synthetic oligonucleotide
  Antisense strand to SEQ ID NO: 660330
aauuucacucaacuuauca

SEQ ID NO: 660332 - RNA, 19 nt, Artificial Sequence
  Description of Artificial Sequence: Synthetic oligonucleotide
  Sense strand starting at position 886 of SEQ ID NO: 585696
agagaagugugagcuggaa

SEQ ID NO: 660333 - RNA, 19 nt, Artificial Sequence
  Description of Artificial Sequence: Synthetic oligonucleotide
  Antisense strand to SEQ ID NO: 660332
uuccagcucacacuucucu

SEQ ID NO: 660334 - RNA, 19 nt, Artificial Sequence
  Description of Artificial Sequence: Synthetic oligonucleotide
  Sense strand starting at position 888 of SEQ ID NO: 585696
agaagugugagcuggaaug

SEQ ID NO: 660335 - RNA, 19 nt, Artificial Sequence
  Description of Artificial Sequence: Synthetic oligonucleotide
  Antisense strand to SEQ ID NO: 660334
cauuccagcucacacuucu

SEQ ID NO: 660336 - RNA, 19 nt, Artificial Sequence
  Description of Artificial Sequence: Synthetic oligonucleotide
  Sense strand starting at position 1102 of SEQ ID NO: 585696
gcagaaguaccucgaagaa

SEQ ID NO: 660337 - RNA, 19 nt, Artificial Sequence
  Description of Artificial Sequence: Synthetic oligonucleotide
  Antisense strand to SEQ ID NO: 660336
uucuucgagguacuucugc

SEQ ID NO: 660338 - RNA, 19 nt, Artificial Sequence
  Description of Artificial Sequence: Synthetic oligonucleotide
  Sense strand starting at position 1218 of SEQ ID NO: 585696
uggugacuucuggagcgaa

SEQ ID NO: 660339 - RNA, 19 nt, Artificial Sequence
  Description of Artificial Sequence: Synthetic oligonucleotide
  Antisense strand to SEQ ID NO: 660338
uucgcuccagaagucacca

SEQ ID NO: 660340 - RNA, 19 nt, Artificial Sequence
  Description of Artificial Sequence: Synthetic oligonucleotide
  Sense strand starting at position 1404 of SEQ ID NO: 585696
aagggaucucucgaucuuc

SEQ ID NO: 660341 - RNA, 19 nt, Artificial Sequence
  Description of Artificial Sequence: Synthetic oligonucleotide
  Antisense strand to SEQ ID NO: 660340
gaagaucgagagaucccuu

SEQ ID NO: 660342 - RNA, 19 nt, Artificial Sequence
  Description of Artificial Sequence: Synthetic oligonucleotide
  Sense strand starting at position 2534 of SEQ ID NO: 585696
agacucuucuuaccagaug

SEQ ID NO: 660343 - RNA, 19 nt, Artificial Sequence
  Description of Artificial Sequence: Synthetic oligonucleotide
  Antisense strand to SEQ ID NO: 660342
caucugguaagaagagucu

SEQ ID NO: 660344 - RNA, 19 nt, Artificial Sequence
  Description of Artificial Sequence: Synthetic oligonucleotide
  Sense strand starting at position 2805 of SEQ ID NO: 585696
guugguauccuacagcaaa

SEQ ID NO: 660345 - RNA, 19 nt, Artificial Sequence
  Description of Artificial Sequence: Synthetic oligonucleotide
  Antisense strand to SEQ ID NO: 660344
uuugcuguaggauaccaac

SEQ ID NO: 660346 - RNA, 19 nt, Artificial Sequence
  Description of Artificial Sequence: Synthetic oligonucleotide
  Sense strand starting at position 2854 of SEQ ID NO: 585696
agaucuguugcucaacaaa

SEQ ID NO: 660347 - RNA, 19 nt, Artificial Sequence
  Description of Artificial Sequence: Synthetic oligonucleotide
  Antisense strand to SEQ ID NO: 660346
uuuguugagcaacagaucu

SEQ ID NO: 660348 - RNA, 19 nt, Artificial Sequence
  Description of Artificial Sequence: Synthetic oligonucleotide
  Sense strand starting at position 2857 of SEQ ID NO: 585696
ucuguugcucaacaaaguu

SEQ ID NO: 660349 - RNA, 19 nt, Artificial Sequence
  Description of Artificial Sequence: Synthetic oligonucleotide
  Antisense strand to SEQ ID NO: 660348
aacuuuguugagcaacaga

SEQ ID NO: 660350 - RNA, 19 nt, Artificial Sequence
  Description of Artificial Sequence: Synthetic oligonucleotide
  Sense strand starting at position 2887 of SEQ ID NO: 585696
aagucucugcuuuacggaa

SEQ ID NO: 660351 - RNA, 19 nt, Artificial Sequence
  Description of Artificial Sequence: Synthetic oligonucleotide
  Antisense strand to SEQ ID NO: 660350
uuccguaaagcagagacuu

SEQ ID NO: 660352 - RNA, 19 nt, Artificial Sequence
  Description of Artificial Sequence: Synthetic oligonucleotide
  Sense strand starting at position 2894 of SEQ ID NO: 585696
ugcuuuacggaauaaagca

SEQ ID NO: 660353 - RNA, 19 nt, Artificial Sequence
  Description of Artificial Sequence: Synthetic oligonucleotide
  Antisense strand to SEQ ID NO: 660352
ugcuuuauuccguaaagca

SEQ ID NO: 660354 - RNA, 19 nt, Artificial Sequence
  Description of Artificial Sequence: Synthetic oligonucleotide
  Sense strand starting at position 2976 of SEQ ID NO: 585696
auggcaagagaaugugaau

SEQ ID NO: 660355 - RNA, 19 nt, Artificial Sequence
  Description of Artificial Sequence: Synthetic oligonucleotide
  Antisense strand to SEQ ID NO: 660354
auucacauucucuugccau

SEQ ID NO: 660356 - RNA, 19 nt, Artificial Sequence
  Description of Artificial Sequence: Synthetic oligonucleotide
  Sense strand starting at position 3061 of SEQ ID NO: 585696
gggagugaauaacauuuaa

SEQ ID NO: 660357 - RNA, 19 nt, Artificial Sequence
  Description of Artificial Sequence: Synthetic oligonucleotide
  Antisense strand to SEQ ID NO: 660356
uuaaauguuauucacuccc

SEQ ID NO: 660358 - RNA, 19 nt, Artificial Sequence
  Description of Artificial Sequence: Synthetic oligonucleotide
  Sense strand starting at position 3085 of SEQ ID NO: 585696
guuuguguucugucaucuu

SEQ ID NO: 660359 - RNA, 19 nt, Artificial Sequence
  Description of Artificial Sequence: Synthetic oligonucleotide
  Antisense strand to SEQ ID NO: 660358
aagaugacagaacacaaac

SEQ ID NO: 660360 - RNA, 19 nt, Artificial Sequence
  Description of Artificial Sequence: Synthetic oligonucleotide
  Sense strand starting at position 3103 of SEQ ID NO: 585696
uucgaauugcugcauaaau

SEQ ID NO: 660361 - RNA, 19 nt, Artificial Sequence
  Description of Artificial Sequence: Synthetic oligonucleotide
  Antisense strand to SEQ ID NO: 660360
auuuaugcagcaauucgaa

SEQ ID NO: 660362 - RNA, 19 nt, Artificial Sequence
  Description of Artificial Sequence: Synthetic oligonucleotide
  Sense strand starting at position 3105 of SEQ ID NO: 585696
cgaauugcugcauaaauaa

SEQ ID NO: 660363 - RNA, 19 nt, Artificial Sequence
  Description of Artificial Sequence: Synthetic oligonucleotide
  Antisense strand to SEQ ID NO: 660362
uuauuuaugcagcaauucg

SEQ ID NO: 660364 - RNA, 19 nt, Artificial Sequence
  Description of Artificial Sequence: Synthetic oligonucleotide
  Sense strand starting at position 3391 of SEQ ID NO: 585696
ugcauaaaucuguaauuag

SEQ ID NO: 660365 - RNA, 19 nt, Artificial Sequence
  Description of Artificial Sequence: Synthetic oligonucleotide
  Antisense strand to SEQ ID NO: 660364
cuaauuacagauuuaugca

SEQ ID NO: 660366 - RNA, 19 nt, Artificial Sequence
  Description of Artificial Sequence: Synthetic oligonucleotide
  Sense strand starting at position 3401 of SEQ ID NO: 585696
uguaauuagucguugauuu

SEQ ID NO: 660367 - RNA, 19 nt, Artificial Sequence
  Description of Artificial Sequence: Synthetic oligonucleotide
  Antisense strand to SEQ ID NO: 660366
aaaucaacgacuaauuaca

SEQ ID NO: 660368 - RNA, 19 nt, Artificial Sequence
  Description of Artificial Sequence: Synthetic oligonucleotide
  Sense strand starting at position 3402 of SEQ ID NO: 585696
guaauuagucguugauuua

SEQ ID NO: 660369 - RNA, 19 nt, Artificial Sequence
  Description of Artificial Sequence: Synthetic oligonucleotide
  Antisense strand to SEQ ID NO: 660368
uaaaucaacgacuaauuac

SEQ ID NO: 660370 - RNA, 19 nt, Artificial Sequence
  Description of Artificial Sequence: Synthetic oligonucleotide
  Sense strand starting at position 3433 of SEQ ID NO: 585696
uuggguuagaauugucuga

SEQ ID NO: 660371 - RNA, 19 nt, Artificial Sequence
  Description of Artificial Sequence: Synthetic oligonucleotide
  Antisense strand to SEQ ID NO: 660370
ucagacaauucuaacccaa

SEQ ID NO: 660372 - RNA, 19 nt, Artificial Sequence
  Description of Artificial Sequence: Synthetic oligonucleotide
  Sense strand starting at position 3435 of SEQ ID NO: 585696
ggguuagaauugucugaaa

SEQ ID NO: 660373 - RNA, 19 nt, Artificial Sequence
  Description of Artificial Sequence: Synthetic oligonucleotide
  Antisense strand to SEQ ID NO: 660372
uuucagacaauucuaaccc

SEQ ID NO: 660374 - RNA, 19 nt, Artificial Sequence
  Description of Artificial Sequence: Synthetic oligonucleotide
  Sense strand starting at position 3437 of SEQ ID NO: 585696
guuagaauugucugaaagg

SEQ ID NO: 660375 - RNA, 19 nt, Artificial Sequence
  Description of Artificial Sequence: Synthetic oligonucleotide
  Antisense strand to SEQ ID NO: 660374
ccuuucagacaauucuaac

SEQ ID NO: 660376 - RNA, 19 nt, Artificial Sequence
  Description of Artificial Sequence: Synthetic oligonucleotide
  Sense strand starting at position 3646 of SEQ ID NO: 585696
ucucacuuauuauuaguga

SEQ ID NO: 660377 - RNA, 19 nt, Artificial Sequence
  Description of Artificial Sequence: Synthetic oligonucleotide
  Antisense strand to SEQ ID NO: 660376
ucacuaauaauaagugaga

SEQ ID NO: 660378 - RNA, 19 nt, Artificial Sequence
  Description of Artificial Sequence: Synthetic oligonucleotide
  Sense strand starting at position 3671 of SEQ ID NO: 585696
ccuagaaucuucgucaaac

SEQ ID NO: 660379 - RNA, 19 nt, Artificial Sequence
  Description of Artificial Sequence: Synthetic oligonucleotide
  Antisense strand to SEQ ID NO: 660378
guuugacgaagauucuagg

SEQ ID NO: 660380 - RNA, 19 nt, Artificial Sequence
  Description of Artificial Sequence: Synthetic oligonucleotide
  Sense strand starting at position 3673 of SEQ ID NO: 585696
uagaaucuucgucaaacug

SEQ ID NO: 660381 - RNA, 19 nt, Artificial Sequence
  Description of Artificial Sequence: Synthetic oligonucleotide
  Antisense strand to SEQ ID NO: 660380
caguuugacgaagauucua

SEQ ID NO: 660382 - RNA, 19 nt, Artificial Sequence
  Description of Artificial Sequence: Synthetic oligonucleotide
  Sense strand starting at position 3811 of SEQ ID NO: 585696
aggauuuaaucugagaacu

SEQ ID NO: 660383 - RNA, 19 nt, Artificial Sequence
  Description of Artificial Sequence: Synthetic oligonucleotide
  Antisense strand to SEQ ID NO: 660382
aguucucagauuaaauccu

SEQ ID NO: 660384 - RNA, 19 nt, Artificial Sequence
  Description of Artificial Sequence: Synthetic oligonucleotide
  Sense strand starting at position 3877 of SEQ ID NO: 585696
agugauacucaauauaugu

SEQ ID NO: 660385 - RNA, 19 nt, Artificial Sequence
  Description of Artificial Sequence: Synthetic oligonucleotide
  Antisense strand to SEQ ID NO: 660384
acauauauugaguaucacu

SEQ ID NO: 660386 - RNA, 19 nt, Artificial Sequence
  Description of Artificial Sequence: Synthetic oligonucleotide
  Sense strand starting at position 45 of SEQ ID NO: 585697
agggcaaguguguaaacaa

SEQ ID NO: 660387 - RNA, 19 nt, Artificial Sequence
  Description of Artificial Sequence: Synthetic oligonucleotide
  Antisense strand to SEQ ID NO: 660386
uuguuuacacacuugcccu

SEQ ID NO: 660388 - RNA, 19 nt, Artificial Sequence
  Description of Artificial Sequence: Synthetic oligonucleotide
  Sense strand starting at position 104 of SEQ ID NO: 585697
uucuccauagauggaauua

SEQ ID NO: 660389 - RNA, 19 nt, Artificial Sequence
  Description of Artificial Sequence: Synthetic oligonucleotide
  Antisense strand to SEQ ID NO: 660388
uaauuccaucuauggagaa

SEQ ID NO: 660390 - RNA, 19 nt, Artificial Sequence
  Description of Artificial Sequence: Synthetic oligonucleotide
  Sense strand starting at position 136 of SEQ ID NO: 585697
acuggaagaugucucucua

SEQ ID NO: 660391 - RNA, 19 nt, Artificial Sequence
  Description of Artificial Sequence: Synthetic oligonucleotide
  Antisense strand to SEQ ID NO: 660390
uagagagacaucuuccagu

SEQ ID NO: 660392 - RNA, 19 nt, Artificial Sequence
  Description of Artificial Sequence: Synthetic oligonucleotide
  Sense strand starting at position 140 of SEQ ID NO: 585697
gaagaugucucucuaccug

SEQ ID NO: 660393 - RNA, 19 nt, Artificial Sequence
  Description of Artificial Sequence: Synthetic oligonucleotide
  Antisense strand to SEQ ID NO: 660392
cagguagagagacaucuuc

SEQ ID NO: 660394 - RNA, 19 nt, Artificial Sequence
  Description of Artificial Sequence: Synthetic oligonucleotide
  Sense strand starting at position 320 of SEQ ID NO: 585697
ucauaugacaggugguaga

SEQ ID NO: 660395 - RNA, 19 nt, Artificial Sequence
  Description of Artificial Sequence: Synthetic oligonucleotide
  Antisense strand to SEQ ID NO: 660394
ucuaccaccugucauauga

SEQ ID NO: 660396 - RNA, 19 nt, Artificial Sequence
  Description of Artificial Sequence: Synthetic oligonucleotide
  Sense strand starting at position 447 of SEQ ID NO: 585697
ugcaaucuugaaugacaua

SEQ ID NO: 660397 - RNA, 19 nt, Artificial Sequence
  Description of Artificial Sequence: Synthetic oligonucleotide
  Antisense strand to SEQ ID NO: 660396
uaugucauucaagauugca

SEQ ID NO: 660398 - RNA, 19 nt, Artificial Sequence
  Description of Artificial Sequence: Synthetic oligonucleotide
  Sense strand starting at position 471 of SEQ ID NO: 585697
gugcuaugccaagaacaca

SEQ ID NO: 660399 - RNA, 19 nt, Artificial Sequence
  Description of Artificial Sequence: Synthetic oligonucleotide
  Antisense strand to SEQ ID NO: 660398
uguguucuuggcauagcac

SEQ ID NO: 660400 - RNA, 19 nt, Artificial Sequence
  Description of Artificial Sequence: Synthetic oligonucleotide
  Sense strand starting at position 580 of SEQ ID NO: 585697
gaugguaaaugauuaugca

SEQ ID NO: 660401 - RNA, 19 nt, Artificial Sequence
  Description of Artificial Sequence: Synthetic oligonucleotide
  Antisense strand to SEQ ID NO: 660400
ugcauaaucauuuaccauc

SEQ ID NO: 660402 - RNA, 19 nt, Artificial Sequence
  Description of Artificial Sequence: Synthetic oligonucleotide
  Sense strand starting at position 810 of SEQ ID NO: 585697
gacgauuaccuaugacaag

SEQ ID NO: 660403 - RNA, 19 nt, Artificial Sequence
  Description of Artificial Sequence: Synthetic oligonucleotide
  Antisense strand to SEQ ID NO: 660402
cuugucauagguaaucguc

SEQ ID NO: 660404 - RNA, 19 nt, Artificial Sequence
  Description of Artificial Sequence: Synthetic oligonucleotide
  Sense strand starting at position 853 of SEQ ID NO: 585697
ugaggaccagcauguauaa

SEQ ID NO: 660405 - RNA, 19 nt, Artificial Sequence
  Description of Artificial Sequence: Synthetic oligonucleotide
  Antisense strand to SEQ ID NO: 660404
uuauacaugcugguccuca

SEQ ID NO: 660406 - RNA, 19 nt, Artificial Sequence
  Description of Artificial Sequence: Synthetic oligonucleotide
  Sense strand starting at position 941 of SEQ ID NO: 585697
cuuucuuugccugacaaag

SEQ ID NO: 660407 - RNA, 19 nt, Artificial Sequence
  Description of Artificial Sequence: Synthetic oligonucleotide
  Antisense strand to SEQ ID NO: 660406
cuuugucaggcaaagaaag

SEQ ID NO: 660408 - RNA, 19 nt, Artificial Sequence
  Description of Artificial Sequence: Synthetic oligonucleotide
  Sense strand starting at position 1377 of SEQ ID NO: 585697
gcauuucuagcgcagacua

SEQ ID NO: 660409 - RNA, 19 nt, Artificial Sequence
  Description of Artificial Sequence: Synthetic oligonucleotide
  Antisense strand to SEQ ID NO: 660408
uagucugcgcuagaaaugc

SEQ ID NO: 660410 - RNA, 19 nt, Artificial Sequence
  Description of Artificial Sequence: Synthetic oligonucleotide
  Sense strand starting at position 1502 of SEQ ID NO: 585697
uuaaccuccugauugguaa

SEQ ID NO: 660411 - RNA, 19 nt, Artificial Sequence
  Description of Artificial Sequence: Synthetic oligonucleotide
  Antisense strand to SEQ ID NO: 660410
uuaccaaucaggagguuaa

SEQ ID NO: 660412 - RNA, 19 nt, Artificial Sequence
  Description of Artificial Sequence: Synthetic oligonucleotide
  Sense strand starting at position 1505 of SEQ ID NO: 585697
accuccugauugguaaaga

SEQ ID NO: 660413 - RNA, 19 nt, Artificial Sequence
  Description of Artificial Sequence: Synthetic oligonucleotide
  Antisense strand to SEQ ID NO: 660412
ucuuuaccaaucaggaggu

SEQ ID NO: 660414 - RNA, 19 nt, Artificial Sequence
  Description of Artificial Sequence: Synthetic oligonucleotide
  Sense strand starting at position 1646 of SEQ ID NO: 585697
agagcuuccagauggauau

SEQ ID NO: 660415 - RNA, 19 nt, Artificial Sequence
  Description of Artificial Sequence: Synthetic oligonucleotide
  Antisense strand to SEQ ID NO: 660414
auauccaucuggaagcucu

SEQ ID NO: 660416 - RNA, 19 nt, Artificial Sequence
  Description of Artificial Sequence: Synthetic oligonucleotide
  Sense strand starting at position 1647 of SEQ ID NO: 585697
gagcuuccagauggauauu

SEQ ID NO: 660417 - RNA, 19 nt, Artificial Sequence
  Description of Artificial Sequence: Synthetic oligonucleotide
  Antisense strand to SEQ ID NO: 660416
aauauccaucuggaagcuc

SEQ ID NO: 660418 - RNA, 19 nt, Artificial Sequence
  Description of Artificial Sequence: Synthetic oligonucleotide
  Sense strand starting at position 1892 of SEQ ID NO: 585697
gaacaugauuaugugcuaa

SEQ ID NO: 660419 - RNA, 19 nt, Artificial Sequence
  Description of Artificial Sequence: Synthetic oligonucleotide
  Antisense strand to SEQ ID NO: 660418
uuagcacauaaucauguuc

SEQ ID NO: 660420 - RNA, 19 nt, Artificial Sequence
  Description of Artificial Sequence: Synthetic oligonucleotide
  Sense strand starting at position 2050 of SEQ ID NO: 585697
gguguaauucugcagauga

SEQ ID NO: 660421 - RNA, 19 nt, Artificial Sequence
  Description of Artificial Sequence: Synthetic oligonucleotide
  Antisense strand to SEQ ID NO: 660420
ucaucugcagaauuacacc

SEQ ID NO: 660422 - RNA, 19 nt, Artificial Sequence
  Description of Artificial Sequence: Synthetic oligonucleotide
  Sense strand starting at position 2076 of SEQ ID NO: 585697
gagguuaagguuugacaau

SEQ ID NO: 660423 - RNA, 19 nt, Artificial Sequence
  Description of Artificial Sequence: Synthetic oligonucleotide
  Antisense strand to SEQ ID NO: 660422
auugucaaaccuuaaccuc

SEQ ID NO: 660424 - RNA, 19 nt, Artificial Sequence
  Description of Artificial Sequence: Synthetic oligonucleotide
  Sense strand starting at position 2210 of SEQ ID NO: 585697
cgggcaugggcugaauaga

SEQ ID NO: 660425 - RNA, 19 nt, Artificial Sequence
  Description of Artificial Sequence: Synthetic oligonucleotide
  Antisense strand to SEQ ID NO: 660424
ucuauucagcccaugcccg

SEQ ID NO: 660426 - RNA, 19 nt, Artificial Sequence
  Description of Artificial Sequence: Synthetic oligonucleotide
  Sense strand starting at position 2233 of SEQ ID NO: 585697
cguucuuggagugacuaaa

SEQ ID NO: 660427 - RNA, 19 nt, Artificial Sequence
  Description of Artificial Sequence: Synthetic oligonucleotide
  Antisense strand to SEQ ID NO: 660426
uuuagucacuccaagaacg

SEQ ID NO: 660428 - RNA, 19 nt, Artificial Sequence
  Description of Artificial Sequence: Synthetic oligonucleotide
  Sense strand starting at position 2289 of SEQ ID NO: 585697
gagauaauuagagguuugu

SEQ ID NO: 660429 - RNA, 19 nt, Artificial Sequence
  Description of Artificial Sequence: Synthetic oligonucleotide
  Antisense strand to SEQ ID NO: 660428
acaaaccucuaauuaucuc

SEQ ID NO: 660430 - RNA, 19 nt, Artificial Sequence
  Description of Artificial Sequence: Synthetic oligonucleotide
  Sense strand starting at position 2293 of SEQ ID NO: 585697
uaauuagagguuuguggaa

SEQ ID NO: 660431 - RNA, 19 nt, Artificial Sequence
  Description of Artificial Sequence: Synthetic oligonucleotide
  Antisense strand to SEQ ID NO: 660430
uuccacaaaccucuaauua

SEQ ID NO: 660432 - RNA, 19 nt, Artificial Sequence
  Description of Artificial Sequence: Synthetic oligonucleotide
  Sense strand starting at position 2449 of SEQ ID NO: 585697
gacagauggcagggucuaa

SEQ ID NO: 660433 - RNA, 19 nt, Artificial Sequence
  Description of Artificial Sequence: Synthetic oligonucleotide
  Antisense strand to SEQ ID NO: 660432
uuagacccugccaucuguc

SEQ ID NO: 660434 - RNA, 19 nt, Artificial Sequence
  Description of Artificial Sequence: Synthetic oligonucleotide
  Sense strand starting at position 2647 of SEQ ID NO: 585697
agaagaugauacuuguuua

SEQ ID NO: 660435 - RNA, 19 nt, Artificial Sequence
  Description of Artificial Sequence: Synthetic oligonucleotide
  Antisense strand to SEQ ID NO: 660434
uaaacaaguaucaucuucu

SEQ ID NO: 660436 - RNA, 19 nt, Artificial Sequence
  Description of Artificial Sequence: Synthetic oligonucleotide
  Sense strand starting at position 2790 of SEQ ID NO: 585697
aguaucuauccuuaagagu

SEQ ID NO: 660437 - RNA, 19 nt, Artificial Sequence
  Description of Artificial Sequence: Synthetic oligonucleotide
  Antisense strand to SEQ ID NO: 660436
acucuuaaggauagauacu

SEQ ID NO: 660438 - RNA, 19 nt, Artificial Sequence
  Description of Artificial Sequence: Synthetic oligonucleotide
  Sense strand starting at position 2840 of SEQ ID NO: 585697
ccugauuuauaacagauug

SEQ ID NO: 660439 - RNA, 19 nt, Artificial Sequence
  Description of Artificial Sequence: Synthetic oligonucleotide
  Antisense strand to SEQ ID NO: 660438
caaucuguuauaaaucagg

SEQ ID NO: 660440 - RNA, 19 nt, Artificial Sequence
  Description of Artificial Sequence: Synthetic oligonucleotide
  Sense strand starting at position 2845 of SEQ ID NO: 585697
uuuauaacagauugguacu

SEQ ID NO: 660441 - RNA, 19 nt, Artificial Sequence
  Description of Artificial Sequence: Synthetic oligonucleotide
  Antisense strand to SEQ ID NO: 660440
aguaccaaucuguuauaaa

SEQ ID NO: 660442 - RNA, 19 nt, Artificial Sequence
  Description of Artificial Sequence: Synthetic oligonucleotide
  Sense strand starting at position 2951 of SEQ ID NO: 585697
auuuguccucauuggugua

SEQ ID NO: 660443 - RNA, 19 nt, Artificial Sequence
  Description of Artificial Sequence: Synthetic oligonucleotide
  Antisense strand to SEQ ID NO: 660442
uacaccaaugaggacaaau

SEQ ID NO: 660444 - RNA, 19 nt, Artificial Sequence
  Description of Artificial Sequence: Synthetic oligonucleotide
  Sense strand starting at position 3018 of SEQ ID NO: 585697
guaaucaggccacaaauau

SEQ ID NO: 660445 - RNA, 19 nt, Artificial Sequence
  Description of Artificial Sequence: Synthetic oligonucleotide
  Antisense strand to SEQ ID NO: 660444
auauuuguggccugauuac

SEQ ID NO: 660446 - RNA, 19 nt, Artificial Sequence
  Description of Artificial Sequence: Synthetic oligonucleotide
  Sense strand starting at position 3034 of SEQ ID NO: 585697
uauggauauuuagacugau

SEQ ID NO: 660447 - RNA, 19 nt, Artificial Sequence
  Description of Artificial Sequence: Synthetic oligonucleotide
  Antisense strand to SEQ ID NO: 660446
aucagucuaaauauccaua

SEQ ID NO: 660448 - RNA, 19 nt, Artificial Sequence
  Description of Artificial Sequence: Synthetic oligonucleotide
  Sense strand starting at position 3160 of SEQ ID NO: 585697
ucaaguaaugacuaugcaa

SEQ ID NO: 660449 - RNA, 19 nt, Artificial Sequence
  Description of Artificial Sequence: Synthetic oligonucleotide
  Antisense strand to SEQ ID NO: 660448
uugcauagucauuacuuga

SEQ ID NO: 660450 - RNA, 19 nt, Artificial Sequence
  Description of Artificial Sequence: Synthetic oligonucleotide
  Sense strand starting at position 3298 of SEQ ID NO: 585697
gauggugauggcugaauag

SEQ ID NO: 660451 - RNA, 19 nt, Artificial Sequence
  Description of Artificial Sequence: Synthetic oligonucleotide
  Antisense strand to SEQ ID NO: 660450
cuauucagccaucaccauc

SEQ ID NO: 660452 - RNA, 19 nt, Artificial Sequence
  Description of Artificial Sequence: Synthetic oligonucleotide
  Sense strand starting at position 3390 of SEQ ID NO: 585697
gcaggugagcaucaaagaa

SEQ ID NO: 660453 - RNA, 19 nt, Artificial Sequence
  Description of Artificial Sequence: Synthetic oligonucleotide
  Antisense strand to SEQ ID NO: 660452
uucuuugaugcucaccugc

SEQ ID NO: 660454 - RNA, 19 nt, Artificial Sequence
  Description of Artificial Sequence: Synthetic oligonucleotide
  Sense strand starting at position 3423 of SEQ ID NO: 585697
ugcucugaccuugaaauac

SEQ ID NO: 660455 - RNA, 19 nt, Artificial Sequence
  Description of Artificial Sequence: Synthetic oligonucleotide
  Antisense strand to SEQ ID NO: 660454
guauuucaaggucagagca

SEQ ID NO: 660456 - RNA, 19 nt, Artificial Sequence
  Description of Artificial Sequence: Synthetic oligonucleotide
  Sense strand starting at position 3655 of SEQ ID NO: 585697
gggaucuaccuguacaagu

SEQ ID NO: 660457 - RNA, 19 nt, Artificial Sequence
  Description of Artificial Sequence: Synthetic oligonucleotide
  Antisense strand to SEQ ID NO: 660456
acuuguacagguagauccc

SEQ ID NO: 660458 - RNA, 19 nt, Artificial Sequence
  Description of Artificial Sequence: Synthetic oligonucleotide
  Sense strand starting at position 3872 of SEQ ID NO: 585697
cgucaauuucuauggugua

SEQ ID NO: 660459 - RNA, 19 nt, Artificial Sequence
  Description of Artificial Sequence: Synthetic oligonucleotide
  Antisense strand to SEQ ID NO: 660458
uacaccauagaaauugacg

SEQ ID NO: 660460 - RNA, 19 nt, Artificial Sequence
  Description of Artificial Sequence: Synthetic oligonucleotide
  Sense strand starting at position 3887 of SEQ ID NO: 585697
uguaaauaugcucaucaug

SEQ ID NO: 660461 - RNA, 19 nt, Artificial Sequence
  Description of Artificial Sequence: Synthetic oligonucleotide
  Antisense strand to SEQ ID NO: 660460
caugaugagcauauuuaca

SEQ ID NO: 660462 - RNA, 19 nt, Artificial Sequence
  Description of Artificial Sequence: Synthetic oligonucleotide
  Sense strand starting at position 3895 of SEQ ID NO: 585697
ugcucaucauggcugauuu

SEQ ID NO: 660463 - RNA, 19 nt, Artificial Sequence
  Description of Artificial Sequence: Synthetic oligonucleotide
  Antisense strand to SEQ ID NO: 660462
aaaucagccaugaugagca

SEQ ID NO: 660464 - RNA, 19 nt, Artificial Sequence
  Description of Artificial Sequence: Synthetic oligonucleotide
  Sense strand starting at position 3952 of SEQ ID NO: 585697
ggaagacaugcauguaauc

SEQ ID NO: 660465 - RNA, 19 nt, Artificial Sequence
  Description of Artificial Sequence: Synthetic oligonucleotide
  Antisense strand to SEQ ID NO: 660464
gauuacaugcaugucuucc

SEQ ID NO: 660466 - RNA, 19 nt, Artificial Sequence
  Description of Artificial Sequence: Synthetic oligonucleotide
  Sense strand starting at position 181 of SEQ ID NO: 585698
ucauucuguggaugaacau

SEQ ID NO: 660467 - RNA, 19 nt, Artificial Sequence
  Description of Artificial Sequence: Synthetic oligonucleotide
  Antisense strand to SEQ ID NO: 660466
auguucauccacagaauga

SEQ ID NO: 660468 - RNA, 19 nt, Artificial Sequence
  Description of Artificial Sequence: Synthetic oligonucleotide
  Sense strand starting at position 243 of SEQ ID NO: 585698
gcugguuaacagcagagua

SEQ ID NO: 660469 - RNA, 19 nt, Artificial Sequence
  Description of Artificial Sequence: Synthetic oligonucleotide
  Antisense strand to SEQ ID NO: 660468
uacucugcuguuaaccagc

SEQ ID NO: 660470 - RNA, 19 nt, Artificial Sequence
  Description of Artificial Sequence: Synthetic oligonucleotide
  Sense strand starting at position 321 of SEQ ID NO: 585698
cuauacauguggcuuuaaa

SEQ ID NO: 660471 - RNA, 19 nt, Artificial Sequence
  Description of Artificial Sequence: Synthetic oligonucleotide
  Antisense strand to SEQ ID NO: 660470
uuuaaagccacauguauag

SEQ ID NO: 660472 - RNA, 19 nt, Artificial Sequence
  Description of Artificial Sequence: Synthetic oligonucleotide
  Sense strand starting at position 350 of SEQ ID NO: 585698
guggauaacuagcuuggau

SEQ ID NO: 660473 - RNA, 19 nt, Artificial Sequence
  Description of Artificial Sequence: Synthetic oligonucleotide
  Antisense strand to SEQ ID NO: 660472
auccaagcuaguuauccac

SEQ ID NO: 660474 - RNA, 19 nt, Artificial Sequence
  Description of Artificial Sequence: Synthetic oligonucleotide
  Sense strand starting at position 352 of SEQ ID NO: 585698
ggauaacuagcuuggauca

SEQ ID NO: 660475 - RNA, 19 nt, Artificial Sequence
  Description of Artificial Sequence: Synthetic oligonucleotide
  Antisense strand to SEQ ID NO: 660474
ugauccaagcuaguuaucc

SEQ ID NO: 660476 - RNA, 19 nt, Artificial Sequence
  Description of Artificial Sequence: Synthetic oligonucleotide
  Sense strand starting at position 641 of SEQ ID NO: 585698
uuccacaaaugcuuucgaa

SEQ ID NO: 660477 - RNA, 19 nt, Artificial Sequence
  Description of Artificial Sequence: Synthetic oligonucleotide
  Antisense strand to SEQ ID NO: 660476
uucgaaagcauuuguggaa

SEQ ID NO: 660478 - RNA, 19 nt, Artificial Sequence
  Description of Artificial Sequence: Synthetic oligonucleotide
  Sense strand starting at position 724 of SEQ ID NO: 585698
uuguaugccuacuuguaaa

SEQ ID NO: 660479 - RNA, 19 nt, Artificial Sequence
  Description of Artificial Sequence: Synthetic oligonucleotide
  Antisense strand to SEQ ID NO: 660478
uuuacaaguaggcauacaa

SEQ ID NO: 660480 - RNA, 19 nt, Artificial Sequence
  Description of Artificial Sequence: Synthetic oligonucleotide
  Sense strand starting at position 897 of SEQ ID NO: 585698
cuuuacuacucugcaggau

SEQ ID NO: 660481 - RNA, 19 nt, Artificial Sequence
  Description of Artificial Sequence: Synthetic oligonucleotide
  Antisense strand to SEQ ID NO: 660480
auccugcagaguaguaaag

SEQ ID NO: 660482 - RNA, 19 nt, Artificial Sequence
  Description of Artificial Sequence: Synthetic oligonucleotide
  Sense strand starting at position 926 of SEQ ID NO: 585698
cucuauaugccagguucua

SEQ ID NO: 660483 - RNA, 19 nt, Artificial Sequence
  Description of Artificial Sequence: Synthetic oligonucleotide
  Antisense strand to SEQ ID NO: 660482
uagaaccuggcauauagag

SEQ ID NO: 660484 - RNA, 19 nt, Artificial Sequence
  Description of Artificial Sequence: Synthetic oligonucleotide
  Sense strand starting at position 1381 of SEQ ID NO: 585698
uaguauuucugcuccgcau

SEQ ID NO: 660485 - RNA, 19 nt, Artificial Sequence
  Description of Artificial Sequence: Synthetic oligonucleotide
  Antisense strand to SEQ ID NO: 660484
augcggagcagaaauacua

SEQ ID NO: 660486 - RNA, 19 nt, Artificial Sequence
  Description of Artificial Sequence: Synthetic oligonucleotide
  Sense strand starting at position 1406 of SEQ ID NO: 585698
gcguuaagccuuccaucuu

SEQ ID NO: 660487 - RNA, 19 nt, Artificial Sequence
  Description of Artificial Sequence: Synthetic oligonucleotide
  Antisense strand to SEQ ID NO: 660486
aagauggaaggcuuaacgc

SEQ ID NO: 660488 - RNA, 19 nt, Artificial Sequence
  Description of Artificial Sequence: Synthetic oligonucleotide
  Sense strand starting at position 1856 of SEQ ID NO: 585698
gcgcuucccggaaaguugu

SEQ ID NO: 660489 - RNA, 19 nt, Artificial Sequence
  Description of Artificial Sequence: Synthetic oligonucleotide
  Antisense strand to SEQ ID NO: 660488
acaacuuuccgggaagcgc

SEQ ID NO: 660490 - RNA, 19 nt, Artificial Sequence
  Description of Artificial Sequence: Synthetic oligonucleotide
  Sense strand starting at position 1876 of SEQ ID NO: 585698
gggcuucgaaccuaaaguu

SEQ ID NO: 660491 - RNA, 19 nt, Artificial Sequence
  Description of Artificial Sequence: Synthetic oligonucleotide
  Antisense strand to SEQ ID NO: 660490
aacuuuagguucgaagccc

SEQ ID NO: 660492 - RNA, 19 nt, Artificial Sequence
  Description of Artificial Sequence: Synthetic oligonucleotide
  Sense strand starting at position 2160 of SEQ ID NO: 585698
cggagaucucagcagcaag

SEQ ID NO: 660493 - RNA, 19 nt, Artificial Sequence
  Description of Artificial Sequence: Synthetic oligonucleotide
  Antisense strand to SEQ ID NO: 660492
cuugcugcugagaucuccg

SEQ ID NO: 660494 - RNA, 19 nt, Artificial Sequence
  Description of Artificial Sequence: Synthetic oligonucleotide
  Sense strand starting at position 2217 of SEQ ID NO: 585698
gcucauuaagaccgagaua

SEQ ID NO: 660495 - RNA, 19 nt, Artificial Sequence
  Description of Artificial Sequence: Synthetic oligonucleotide
  Antisense strand to SEQ ID NO: 660494
uaucucggucuuaaugagc

SEQ ID NO: 660496 - RNA, 19 nt, Artificial Sequence
  Description of Artificial Sequence: Synthetic oligonucleotide
  Sense strand starting at position 2235 of SEQ ID NO: 585698
aacuaagauccggguugca

SEQ ID NO: 660497 - RNA, 19 nt, Artificial Sequence
  Description of Artificial Sequence: Synthetic oligonucleotide
  Antisense strand to SEQ ID NO: 660496
ugcaacccggaucuuaguu

SEQ ID NO: 660498 - RNA, 19 nt, Artificial Sequence
  Description of Artificial Sequence: Synthetic oligonucleotide
  Sense strand starting at position 2277 of SEQ ID NO: 585698
guccuaagcgucugaauaa

SEQ ID NO: 660499 - RNA, 19 nt, Artificial Sequence
  Description of Artificial Sequence: Synthetic oligonucleotide
  Antisense strand to SEQ ID NO: 660498
uuauucagacgcuuaggac

SEQ ID NO: 660500 - RNA, 19 nt, Artificial Sequence
  Description of Artificial Sequence: Synthetic oligonucleotide
  Sense strand starting at position 2284 of SEQ ID NO: 585698
gcgucugaauaauuggauu

SEQ ID NO: 660501 - RNA, 19 nt, Artificial Sequence
  Description of Artificial Sequence: Synthetic oligonucleotide
  Antisense strand to SEQ ID NO: 660500
aauccaauuauucagacgc

SEQ ID NO: 660502 - RNA, 19 nt, Artificial Sequence
  Description of Artificial Sequence: Synthetic oligonucleotide
  Sense strand starting at position 2286 of SEQ ID NO: 585698
gucugaauaauuggauuga

SEQ ID NO: 660503 - RNA, 19 nt, Artificial Sequence
  Description of Artificial Sequence: Synthetic oligonucleotide
  Antisense strand to SEQ ID NO: 660502
ucaauccaauuauucagac

SEQ ID NO: 660504 - RNA, 19 nt, Artificial Sequence
  Description of Artificial Sequence: Synthetic oligonucleotide
  Sense strand starting at position 2287 of SEQ ID NO: 585698
ucugaauaauuggauugaa

SEQ ID NO: 660505 - RNA, 19 nt, Artificial Sequence
  Description of Artificial Sequence: Synthetic oligonucleotide
  Antisense strand to SEQ ID NO: 660504
uucaauccaauuauucaga

SEQ ID NO: 660506 - RNA, 19 nt, Artificial Sequence
  Description of Artificial Sequence: Synthetic oligonucleotide
  Sense strand starting at position 2308 of SEQ ID NO: 585698
gggagccuuguucagguua

SEQ ID NO: 660507 - RNA, 19 nt, Artificial Sequence
  Description of Artificial Sequence: Synthetic oligonucleotide
  Antisense strand to SEQ ID NO: 660506
uaaccugaacaaggcuccc

SEQ ID NO: 660508 - RNA, 19 nt, Artificial Sequence
  Description of Artificial Sequence: Synthetic oligonucleotide
  Sense strand starting at position 2321 of SEQ ID NO: 585698
agguuauuaucauucuauc

SEQ ID NO: 660509 - RNA, 19 nt, Artificial Sequence
  Description of Artificial Sequence: Synthetic oligonucleotide
  Antisense strand to SEQ ID NO: 660508
gauagaaugauaauaaccu

SEQ ID NO: 660510 - RNA, 19 nt, Artificial Sequence
  Description of Artificial Sequence: Synthetic oligonucleotide
  Sense strand starting at position 2373 of SEQ ID NO: 585698
guauuuccaucuguucuga

SEQ ID NO: 660511 - RNA, 19 nt, Artificial Sequence
  Description of Artificial Sequence: Synthetic oligonucleotide
  Antisense strand to SEQ ID NO: 660510
ucagaacagauggaaauac

SEQ ID NO: 660512 - RNA, 19 nt, Artificial Sequence
  Description of Artificial Sequence: Synthetic oligonucleotide
  Sense strand starting at position 2381 of SEQ ID NO: 585698
aucuguucugaagggcuau

SEQ ID NO: 660513 - RNA, 19 nt, Artificial Sequence
  Description of Artificial Sequence: Synthetic oligonucleotide
  Antisense strand to SEQ ID NO: 660512
auagcccuucagaacagau

SEQ ID NO: 660514 - RNA, 19 nt, Artificial Sequence
  Description of Artificial Sequence: Synthetic oligonucleotide
  Sense strand starting at position 2387 of SEQ ID NO: 585698
ucugaagggcuaugaacau

SEQ ID NO: 660515 - RNA, 19 nt, Artificial Sequence
  Description of Artificial Sequence: Synthetic oligonucleotide
  Antisense strand to SEQ ID NO: 660514
auguucauagcccuucaga

SEQ ID NO: 660516 - RNA, 19 nt, Artificial Sequence
  Description of Artificial Sequence: Synthetic oligonucleotide
  Sense strand starting at position 2484 of SEQ ID NO: 585698
aagccauguuuaccugaga

SEQ ID NO: 660517 - RNA, 19 nt, Artificial Sequence
  Description of Artificial Sequence: Synthetic oligonucleotide
  Antisense strand to SEQ ID NO: 660516
ucucagguaaacauggcuu

SEQ ID NO: 660518 - RNA, 19 nt, Artificial Sequence
  Description of Artificial Sequence: Synthetic oligonucleotide
  Sense strand starting at position 2485 of SEQ ID NO: 585698
agccauguuuaccugagaa

SEQ ID NO: 660519 - RNA, 19 nt, Artificial Sequence
  Description of Artificial Sequence: Synthetic oligonucleotide
  Antisense strand to SEQ ID NO: 660518
uucucagguaaacauggcu

SEQ ID NO: 660520 - RNA, 19 nt, Artificial Sequence
  Description of Artificial Sequence: Synthetic oligonucleotide
  Sense strand starting at position 2799 of SEQ ID NO: 585698
ggcagaauuacccagaguu

SEQ ID NO: 660521 - RNA, 19 nt, Artificial Sequence
  Description of Artificial Sequence: Synthetic oligonucleotide
  Antisense strand to SEQ ID NO: 660520
aacucuggguaauucugcc

SEQ ID NO: 660522 - RNA, 19 nt, Artificial Sequence
  Description of Artificial Sequence: Synthetic oligonucleotide
  Sense strand starting at position 2839 of SEQ ID NO: 585698
acaaguuguuucccagagu

SEQ ID NO: 660523 - RNA, 19 nt, Artificial Sequence
  Description of Artificial Sequence: Synthetic oligonucleotide
  Antisense strand to SEQ ID NO: 660522
acucugggaaacaacuugu

SEQ ID NO: 660524 - RNA, 19 nt, Artificial Sequence
  Description of Artificial Sequence: Synthetic oligonucleotide
  Sense strand starting at position 2960 of SEQ ID NO: 585698
uuuguaacccuuuggaagu

SEQ ID NO: 660525 - RNA, 19 nt, Artificial Sequence
  Description of Artificial Sequence: Synthetic oligonucleotide
  Antisense strand to SEQ ID NO: 660524
acuuccaaaggguuacaaa

SEQ ID NO: 660526 - RNA, 19 nt, Artificial Sequence
  Description of Artificial Sequence: Synthetic oligonucleotide
  Sense strand starting at position 3016 of SEQ ID NO: 585698
cuaagcuugcaugaagcua

SEQ ID NO: 660527 - RNA, 19 nt, Artificial Sequence
  Description of Artificial Sequence: Synthetic oligonucleotide
  Antisense strand to SEQ ID NO: 660526
uagcuucaugcaagcuuag

SEQ ID NO: 660528 - RNA, 19 nt, Artificial Sequence
  Description of Artificial Sequence: Synthetic oligonucleotide
  Sense strand starting at position 3082 of SEQ ID NO: 585698
acuccaggucuuuguagaa

SEQ ID NO: 660529 - RNA, 19 nt, Artificial Sequence
  Description of Artificial Sequence: Synthetic oligonucleotide
  Antisense strand to SEQ ID NO: 660528
uucuacaaagaccuggagu

SEQ ID NO: 660530 - RNA, 19 nt, Artificial Sequence
  Description of Artificial Sequence: Synthetic oligonucleotide
  Sense strand starting at position 3086 of SEQ ID NO: 585698
caggucuuuguagaauguu

SEQ ID NO: 660531 - RNA, 19 nt, Artificial Sequence
  Description of Artificial Sequence: Synthetic oligonucleotide
  Antisense strand to SEQ ID NO: 660530
aacauucuacaaagaccug

SEQ ID NO: 660532 - RNA, 19 nt, Artificial Sequence
  Description of Artificial Sequence: Synthetic oligonucleotide
  Sense strand starting at position 3089 of SEQ ID NO: 585698
gucuuuguagaauguuaau

SEQ ID NO: 660533 - RNA, 19 nt, Artificial Sequence
  Description of Artificial Sequence: Synthetic oligonucleotide
  Antisense strand to SEQ ID NO: 660532
auuaacauucuacaaagac

SEQ ID NO: 660534 - RNA, 19 nt, Artificial Sequence
  Description of Artificial Sequence: Synthetic oligonucleotide
  Sense strand starting at position 3148 of SEQ ID NO: 585698
uaagaaagauaagggauuu

SEQ ID NO: 660535 - RNA, 19 nt, Artificial Sequence
  Description of Artificial Sequence: Synthetic oligonucleotide
  Antisense strand to SEQ ID NO: 660534
aaaucccuuaucuuucuua

SEQ ID NO: 660536 - RNA, 19 nt, Artificial Sequence
  Description of Artificial Sequence: Synthetic oligonucleotide
  Sense strand starting at position 3172 of SEQ ID NO: 585698
cugucaaugucuucugacu

SEQ ID NO: 660537 - RNA, 19 nt, Artificial Sequence
  Description of Artificial Sequence: Synthetic oligonucleotide
  Antisense strand to SEQ ID NO: 660536
agucagaagacauugacag

SEQ ID NO: 660538 - RNA, 19 nt, Artificial Sequence
  Description of Artificial Sequence: Synthetic oligonucleotide
  Sense strand starting at position 3183 of SEQ ID NO: 585698
uucugacuugacuaguagu

SEQ ID NO: 660539 - RNA, 19 nt, Artificial Sequence
  Description of Artificial Sequence: Synthetic oligonucleotide
  Antisense strand to SEQ ID NO: 660538
acuacuagucaagucagaa

SEQ ID NO: 660540 - RNA, 19 nt, Artificial Sequence
  Description of Artificial Sequence: Synthetic oligonucleotide
  Sense strand starting at position 3189 of SEQ ID NO: 585698
cuugacuaguaguauuuga

SEQ ID NO: 660541 - RNA, 19 nt, Artificial Sequence
  Description of Artificial Sequence: Synthetic oligonucleotide
  Antisense strand to SEQ ID NO: 660540
ucaaauacuacuagucaag

SEQ ID NO: 660542 - RNA, 19 nt, Artificial Sequence
  Description of Artificial Sequence: Synthetic oligonucleotide
  Sense strand starting at position 3194 of SEQ ID NO: 585698
cuaguaguauuugauaaag

SEQ ID NO: 660543 - RNA, 19 nt, Artificial Sequence
  Description of Artificial Sequence: Synthetic oligonucleotide
  Antisense strand to SEQ ID NO: 660542
cuuuaucaaauacuacuag

SEQ ID NO: 660544 - RNA, 19 nt, Artificial Sequence
  Description of Artificial Sequence: Synthetic oligonucleotide
  Sense strand starting at position 3196 of SEQ ID NO: 585698
aguaguauuugauaaaggu

SEQ ID NO: 660545 - RNA, 19 nt, Artificial Sequence
  Description of Artificial Sequence: Synthetic oligonucleotide
  Antisense strand to SEQ ID NO: 660544
accuuuaucaaauacuacu

SEQ ID NO: 660546 - RNA, 19 nt, Artificial Sequence
  Description of Artificial Sequence: Synthetic oligonucleotide
  Sense strand starting at position 866 of SEQ ID NO: 585699
ucuugucacgcacgagaga

SEQ ID NO: 660547 - RNA, 19 nt, Artificial Sequence
  Description of Artificial Sequence: Synthetic oligonucleotide
  Antisense strand to SEQ ID NO: 660546
ucucucgugcgugacaaga

SEQ ID NO: 660548 - RNA, 19 nt, Artificial Sequence
  Description of Artificial Sequence: Synthetic oligonucleotide
  Sense strand starting at position 1385 of SEQ ID NO: 585699
gagagaagcccucgagcuu

SEQ ID NO: 660549 - RNA, 19 nt, Artificial Sequence
  Description of Artificial Sequence: Synthetic oligonucleotide
  Antisense strand to SEQ ID NO: 660548
aagcucgagggcuucucuc

SEQ ID NO: 660550 - RNA, 19 nt, Artificial Sequence
  Description of Artificial Sequence: Synthetic oligonucleotide
  Sense strand starting at position 1386 of SEQ ID NO: 585699
agagaagcccucgagcuuu

SEQ ID NO: 660551 - RNA, 19 nt, Artificial Sequence
  Description of Artificial Sequence: Synthetic oligonucleotide
  Antisense strand to SEQ ID NO: 660550
aaagcucgagggcuucucu

SEQ ID NO: 660552 - RNA, 19 nt, Artificial Sequence
  Description of Artificial Sequence: Synthetic oligonucleotide
  Sense strand starting at position 1478 of SEQ ID NO: 585699
ucuuguugccaugaugaug

SEQ ID NO: 660553 - RNA, 19 nt, Artificial Sequence
  Description of Artificial Sequence: Synthetic oligonucleotide
  Antisense strand to SEQ ID NO: 660552
caucaucauggcaacaaga

SEQ ID NO: 660554 - RNA, 19 nt, Artificial Sequence
  Description of Artificial Sequence: Synthetic oligonucleotide
  Sense strand starting at position 1492 of SEQ ID NO: 585699
ugaugaugucacggacgca

SEQ ID NO: 660555 - RNA, 19 nt, Artificial Sequence
  Description of Artificial Sequence: Synthetic oligonucleotide
  Antisense strand to SEQ ID NO: 660554
ugcguccgugacaucauca

SEQ ID NO: 660556 - RNA, 19 nt, Artificial Sequence
  Description of Artificial Sequence: Synthetic oligonucleotide
  Sense strand starting at position 1493 of SEQ ID NO: 585699
gaugaugucacggacgcaa

SEQ ID NO: 660557 - RNA, 19 nt, Artificial Sequence
  Description of Artificial Sequence: Synthetic oligonucleotide
  Antisense strand to SEQ ID NO: 660556
uugcguccgugacaucauc

SEQ ID NO: 660558 - RNA, 19 nt, Artificial Sequence
  Description of Artificial Sequence: Synthetic oligonucleotide
  Sense strand starting at position 2141 of SEQ ID NO: 585699
gcgggcuucggccuauaaa

SEQ ID NO: 660559 - RNA, 19 nt, Artificial Sequence
  Description of Artificial Sequence: Synthetic oligonucleotide
  Antisense strand to SEQ ID NO: 660558
uuuauaggccgaagcccgc

SEQ ID NO: 660560 - RNA, 19 nt, Artificial Sequence
  Description of Artificial Sequence: Synthetic oligonucleotide
  Sense strand starting at position 2497 of SEQ ID NO: 585699
gauuaacagucuuuccgag

SEQ ID NO: 660561 - RNA, 19 nt, Artificial Sequence
  Description of Artificial Sequence: Synthetic oligonucleotide
  Antisense strand to SEQ ID NO: 660560
cucggaaagacuguuaauc

SEQ ID NO: 660562 - RNA, 19 nt, Artificial Sequence
  Description of Artificial Sequence: Synthetic oligonucleotide
  Sense strand starting at position 2499 of SEQ ID NO: 585699
uuaacagucuuuccgagaa

SEQ ID NO: 660563 - RNA, 19 nt, Artificial Sequence
  Description of Artificial Sequence: Synthetic oligonucleotide
  Antisense strand to SEQ ID NO: 660562
uucucggaaagacuguuaa

SEQ ID NO: 660564 - RNA, 19 nt, Artificial Sequence
  Description of Artificial Sequence: Synthetic oligonucleotide
  Sense strand starting at position 2581 of SEQ ID NO: 585699
ucacuaacacguuauggaa

SEQ ID NO: 660565 - RNA, 19 nt, Artificial Sequence
  Description of Artificial Sequence: Synthetic oligonucleotide
  Antisense strand to SEQ ID NO: 660564
uuccauaacguguuaguga

SEQ ID NO: 660566 - RNA, 19 nt, Artificial Sequence
  Description of Artificial Sequence: Synthetic oligonucleotide
  Sense strand starting at position 2687 of SEQ ID NO: 585699
aagcgaugcaguuagggaa

SEQ ID NO: 660567 - RNA, 19 nt, Artificial Sequence
  Description of Artificial Sequence: Synthetic oligonucleotide
  Antisense strand to SEQ ID NO: 660566
uucccuaacugcaucgcuu

SEQ ID NO: 660568 - RNA, 19 nt, Artificial Sequence
  Description of Artificial Sequence: Synthetic oligonucleotide
  Sense strand starting at position 2743 of SEQ ID NO: 585699
gcuauuaaauuggaaacaa

SEQ ID NO: 660569 - RNA, 19 nt, Artificial Sequence
  Description of Artificial Sequence: Synthetic oligonucleotide
  Antisense strand to SEQ ID NO: 660568
uuguuuccaauuuaauagc

SEQ ID NO: 660570 - RNA, 19 nt, Artificial Sequence
  Description of Artificial Sequence: Synthetic oligonucleotide
  Sense strand starting at position 2771 of SEQ ID NO: 585699
cucugacuuggccacugau

SEQ ID NO: 660571 - RNA, 19 nt, Artificial Sequence
  Description of Artificial Sequence: Synthetic oligonucleotide
  Antisense strand to SEQ ID NO: 660570
aucaguggccaagucagag

SEQ ID NO: 660572 - RNA, 19 nt, Artificial Sequence
  Description of Artificial Sequence: Synthetic oligonucleotide
  Sense strand starting at position 2774 of SEQ ID NO: 585699
ugacuuggccacugauauu

SEQ ID NO: 660573 - RNA, 19 nt, Artificial Sequence
  Description of Artificial Sequence: Synthetic oligonucleotide
  Antisense strand to SEQ ID NO: 660572
aauaucaguggccaaguca

SEQ ID NO: 660574 - RNA, 19 nt, Artificial Sequence
  Description of Artificial Sequence: Synthetic oligonucleotide
  Sense strand starting at position 2786 of SEQ ID NO: 585699
ugauauugggcgugaccuu

SEQ ID NO: 660575 - RNA, 19 nt, Artificial Sequence
  Description of Artificial Sequence: Synthetic oligonucleotide
  Antisense strand to SEQ ID NO: 660574
aaggucacgcccaauauca

SEQ ID NO: 660576 - RNA, 19 nt, Artificial Sequence
  Description of Artificial Sequence: Synthetic oligonucleotide
  Sense strand starting at position 2793 of SEQ ID NO: 585699
gggcgugaccuuggacaaa

SEQ ID NO: 660577 - RNA, 19 nt, Artificial Sequence
  Description of Artificial Sequence: Synthetic oligonucleotide
  Antisense strand to SEQ ID NO: 660576
uuuguccaaggucacgccc

SEQ ID NO: 660578 - RNA, 19 nt, Artificial Sequence
  Description of Artificial Sequence: Synthetic oligonucleotide
  Sense strand starting at position 2851 of SEQ ID NO: 585699
acgggaagguuucucuuaa

SEQ ID NO: 660579 - RNA, 19 nt, Artificial Sequence
  Description of Artificial Sequence: Synthetic oligonucleotide
  Antisense strand to SEQ ID NO: 660578
uuaagagaaaccuucccgu

SEQ ID NO: 660580 - RNA, 19 nt, Artificial Sequence
  Description of Artificial Sequence: Synthetic oligonucleotide
  Sense strand starting at position 2852 of SEQ ID NO: 585699
cgggaagguuucucuuaaa

SEQ ID NO: 660581 - RNA, 19 nt, Artificial Sequence
  Description of Artificial Sequence: Synthetic oligonucleotide
  Antisense strand to SEQ ID NO: 660580
uuuaagagaaaccuucccg

SEQ ID NO: 660582 - RNA, 19 nt, Artificial Sequence
  Description of Artificial Sequence: Synthetic oligonucleotide
  Sense strand starting at position 2931 of SEQ ID NO: 585699
uggguucaaguucgaaauu

SEQ ID NO: 660583 - RNA, 19 nt, Artificial Sequence
  Description of Artificial Sequence: Synthetic oligonucleotide
  Antisense strand to SEQ ID NO: 660582
aauuucgaacuugaaccca

SEQ ID NO: 660584 - RNA, 19 nt, Artificial Sequence
  Description of Artificial Sequence: Synthetic oligonucleotide
  Sense strand starting at position 2932 of SEQ ID NO: 585699
ggguucaaguucgaaauuu

SEQ ID NO: 660585 - RNA, 19 nt, Artificial Sequence
  Description of Artificial Sequence: Synthetic oligonucleotide
  Antisense strand to SEQ ID NO: 660584
aaauuucgaacuugaaccc

SEQ ID NO: 660586 - RNA, 19 nt, Artificial Sequence
  Description of Artificial Sequence: Synthetic oligonucleotide
  Sense strand starting at position 2989 of SEQ ID NO: 585699
ccaaguagagaucguucuu

SEQ ID NO: 660587 - RNA, 19 nt, Artificial Sequence
  Description of Artificial Sequence: Synthetic oligonucleotide
  Antisense strand to SEQ ID NO: 660586
aagaacgaucucuacuugg

SEQ ID NO: 660588 - RNA, 19 nt, Artificial Sequence
  Description of Artificial Sequence: Synthetic oligonucleotide
  Sense strand starting at position 3010 of SEQ ID NO: 585699
acauuuguguguuauacag

SEQ ID NO: 660589 - RNA, 19 nt, Artificial Sequence
  Description of Artificial Sequence: Synthetic oligonucleotide
  Antisense strand to SEQ ID NO: 660588
cuguauaacacacaaaugu

SEQ ID NO: 660590 - RNA, 19 nt, Artificial Sequence
  Description of Artificial Sequence: Synthetic oligonucleotide
  Sense strand starting at position 3018 of SEQ ID NO: 585699
guguuauacaggugcauuu

SEQ ID NO: 660591 - RNA, 19 nt, Artificial Sequence
  Description of Artificial Sequence: Synthetic oligonucleotide
  Antisense strand to SEQ ID NO: 660590
aaaugcaccuguauaacac

SEQ ID NO: 660592 - RNA, 19 nt, Artificial Sequence
  Description of Artificial Sequence: Synthetic oligonucleotide
  Sense strand starting at position 3133 of SEQ ID NO: 585699
gagacagcucacugguaag

SEQ ID NO: 660593 - RNA, 19 nt, Artificial Sequence
  Description of Artificial Sequence: Synthetic oligonucleotide
  Antisense strand to SEQ ID NO: 660592
cuuaccagugagcugucuc

SEQ ID NO: 660594 - RNA, 19 nt, Artificial Sequence
  Description of Artificial Sequence: Synthetic oligonucleotide
  Sense strand starting at position 3144 of SEQ ID NO: 585699
cugguaagaagcugucuau

SEQ ID NO: 660595 - RNA, 19 nt, Artificial Sequence
  Description of Artificial Sequence: Synthetic oligonucleotide
  Antisense strand to SEQ ID NO: 660594
auagacagcuucuuaccag

SEQ ID NO: 660596 - RNA, 19 nt, Artificial Sequence
  Description of Artificial Sequence: Synthetic oligonucleotide
  Sense strand starting at position 3147 of SEQ ID NO: 585699
guaagaagcugucuauaaa

SEQ ID NO: 660597 - RNA, 19 nt, Artificial Sequence
  Description of Artificial Sequence: Synthetic oligonucleotide
  Antisense strand to SEQ ID NO: 660596
uuuauagacagcuucuuac

SEQ ID NO: 660598 - RNA, 19 nt, Artificial Sequence
  Description of Artificial Sequence: Synthetic oligonucleotide
  Sense strand starting at position 3150 of SEQ ID NO: 585699
agaagcugucuauaaauuc

SEQ ID NO: 660599 - RNA, 19 nt, Artificial Sequence
  Description of Artificial Sequence: Synthetic oligonucleotide
  Antisense strand to SEQ ID NO: 660598
gaauuuauagacagcuucu

SEQ ID NO: 660600 - RNA, 19 nt, Artificial Sequence
  Description of Artificial Sequence: Synthetic oligonucleotide
  Sense strand starting at position 3230 of SEQ ID NO: 585699
aguaaauuagcuuguaguu

SEQ ID NO: 660601 - RNA, 19 nt, Artificial Sequence
  Description of Artificial Sequence: Synthetic oligonucleotide
  Antisense strand to SEQ ID NO: 660600
aacuacaagcuaauuuacu

SEQ ID NO: 660602 - RNA, 19 nt, Artificial Sequence
  Description of Artificial Sequence: Synthetic oligonucleotide
  Sense strand starting at position 3250 of SEQ ID NO: 585699
uuaaccucagagcaugauu

SEQ ID NO: 660603 - RNA, 19 nt, Artificial Sequence
  Description of Artificial Sequence: Synthetic oligonucleotide
  Antisense strand to SEQ ID NO: 660602
aaucaugcucugagguuaa

SEQ ID NO: 660604 - RNA, 19 nt, Artificial Sequence
  Description of Artificial Sequence: Synthetic oligonucleotide
  Sense strand starting at position 3255 of SEQ ID NO: 585699
cucagagcaugauuauaaa

SEQ ID NO: 660605 - RNA, 19 nt, Artificial Sequence
  Description of Artificial Sequence: Synthetic oligonucleotide
  Antisense strand to SEQ ID NO: 660604
uuuauaaucaugcucugag

SEQ ID NO: 660606 - RNA, 19 nt, Artificial Sequence
  Description of Artificial Sequence: Synthetic oligonucleotide
  Sense strand starting at position 3280 of SEQ ID NO: 585699
uggcaagauuucuacuaau

SEQ ID NO: 660607 - RNA, 19 nt, Artificial Sequence
  Description of Artificial Sequence: Synthetic oligonucleotide
  Antisense strand to SEQ ID NO: 660606
auuaguagaaaucuugcca

SEQ ID NO: 660608 - RNA, 19 nt, Artificial Sequence
  Description of Artificial Sequence: Synthetic oligonucleotide
  Sense strand starting at position 3301 of SEQ ID NO: 585699
gcuggaaauuagcuaauau

SEQ ID NO: 660609 - RNA, 19 nt, Artificial Sequence
  Description of Artificial Sequence: Synthetic oligonucleotide
  Antisense strand to SEQ ID NO: 660608
auauuagcuaauuuccagc

SEQ ID NO: 660610 - RNA, 19 nt, Artificial Sequence
  Description of Artificial Sequence: Synthetic oligonucleotide
  Sense strand starting at position 3455 of SEQ ID NO: 585699
agugauucucaguguucca

SEQ ID NO: 660611 - RNA, 19 nt, Artificial Sequence
  Description of Artificial Sequence: Synthetic oligonucleotide
  Antisense strand to SEQ ID NO: 660610
uggaacacugagaaucacu

SEQ ID NO: 660612 - RNA, 19 nt, Artificial Sequence
  Description of Artificial Sequence: Synthetic oligonucleotide
  Sense strand starting at position 3458 of SEQ ID NO: 585699
gauucucaguguuccauga

SEQ ID NO: 660613 - RNA, 19 nt, Artificial Sequence
  Description of Artificial Sequence: Synthetic oligonucleotide
  Antisense strand to SEQ ID NO: 660612
ucauggaacacugagaauc

SEQ ID NO: 660614 - RNA, 19 nt, Artificial Sequence
  Description of Artificial Sequence: Synthetic oligonucleotide
  Sense strand starting at position 3479 of SEQ ID NO: 585699
ccuagaauucuuuaagugu

SEQ ID NO: 660615 - RNA, 19 nt, Artificial Sequence
  Description of Artificial Sequence: Synthetic oligonucleotide
  Antisense strand to SEQ ID NO: 660614
acacuuaaagaauucuagg

SEQ ID NO: 660616 - RNA, 19 nt, Artificial Sequence
  Description of Artificial Sequence: Synthetic oligonucleotide
  Sense strand starting at position 3545 of SEQ ID NO: 585699
gaaucuguauuguuagcaa

SEQ ID NO: 660617 - RNA, 19 nt, Artificial Sequence
  Description of Artificial Sequence: Synthetic oligonucleotide
  Antisense strand to SEQ ID NO: 660616
uugcuaacaauacagauuc

SEQ ID NO: 660618 - RNA, 19 nt, Artificial Sequence
  Description of Artificial Sequence: Synthetic oligonucleotide
  Sense strand starting at position 3622 of SEQ ID NO: 585699
uuauaaucaguguauccau

SEQ ID NO: 660619 - RNA, 19 nt, Artificial Sequence
  Description of Artificial Sequence: Synthetic oligonucleotide
  Antisense strand to SEQ ID NO: 660618
auggauacacugauuauaa

SEQ ID NO: 660620 - RNA, 19 nt, Artificial Sequence
  Description of Artificial Sequence: Synthetic oligonucleotide
  Sense strand starting at position 3880 of SEQ ID NO: 585699
uuaaguugaugcucaaauu

SEQ ID NO: 660621 - RNA, 19 nt, Artificial Sequence
  Description of Artificial Sequence: Synthetic oligonucleotide
  Antisense strand to SEQ ID NO: 660620
aauuugagcaucaacuuaa

SEQ ID NO: 660622 - RNA, 19 nt, Artificial Sequence
  Description of Artificial Sequence: Synthetic oligonucleotide
  Sense strand starting at position 3946 of SEQ ID NO: 585699
auauguauauucuuccuga

SEQ ID NO: 660623 - RNA, 19 nt, Artificial Sequence
  Description of Artificial Sequence: Synthetic oligonucleotide
  Antisense strand to SEQ ID NO: 660622
ucaggaagaauauacauau

SEQ ID NO: 660624 - RNA, 19 nt, Artificial Sequence
  Description of Artificial Sequence: Synthetic oligonucleotide
  Sense strand starting at position 3949 of SEQ ID NO: 585699
uguauauucuuccugaagu

SEQ ID NO: 660625 - RNA, 19 nt, Artificial Sequence
  Description of Artificial Sequence: Synthetic oligonucleotide
  Antisense strand to SEQ ID NO: 660624
acuucaggaagaauauaca

SEQ ID NO: 660626 - RNA, 19 nt, Artificial Sequence
  Description of Artificial Sequence: Synthetic oligonucleotide
  Sense strand starting at position 325 of SEQ ID NO: 585700
gacaaaguguuauuagaug

SEQ ID NO: 660627 - RNA, 19 nt, Artificial Sequence
  Description of Artificial Sequence: Synthetic oligonucleotide
  Antisense strand to SEQ ID NO: 660626
caucuaauaacacuuuguc

SEQ ID NO: 660628 - RNA, 19 nt, Artificial Sequence
  Description of Artificial Sequence: Synthetic oligonucleotide
  Sense strand starting at position 330 of SEQ ID NO: 585700
aguguuauuagaugaaaug

SEQ ID NO: 660629 - RNA, 19 nt, Artificial Sequence
  Description of Artificial Sequence: Synthetic oligonucleotide
  Antisense strand to SEQ ID NO: 660628
cauuucaucuaauaacacu

SEQ ID NO: 660630 - RNA, 19 nt, Artificial Sequence
  Description of Artificial Sequence: Synthetic oligonucleotide
  Sense strand starting at position 370 of SEQ ID NO: 585700
cuaauuaaggcuugaauua

SEQ ID NO: 660631 - RNA, 19 nt, Artificial Sequence
  Description of Artificial Sequence: Synthetic oligonucleotide
  Antisense strand to SEQ ID NO: 660630
uaauucaagccuuaauuag

SEQ ID NO: 660632 - RNA, 19 nt, Artificial Sequence
  Description of Artificial Sequence: Synthetic oligonucleotide
  Sense strand starting at position 648 of SEQ ID NO: 585700
cuuugagauuaugugaaca

SEQ ID NO: 660633 - RNA, 19 nt, Artificial Sequence
  Description of Artificial Sequence: Synthetic oligonucleotide
  Antisense strand to SEQ ID NO: 660632
uguucacauaaucucaaag

SEQ ID NO: 660634 - RNA, 19 nt, Artificial Sequence
  Description of Artificial Sequence: Synthetic oligonucleotide
  Sense strand starting at position 666 of SEQ ID NO: 585700
agaggacuguucuccaaua

SEQ ID NO: 660635 - RNA, 19 nt, Artificial Sequence
  Description of Artificial Sequence: Synthetic oligonucleotide
  Antisense strand to SEQ ID NO: 660634
uauuggagaacaguccucu

SEQ ID NO: 660636 - RNA, 19 nt, Artificial Sequence
  Description of Artificial Sequence: Synthetic oligonucleotide
  Sense strand starting at position 667 of SEQ ID NO: 585700
gaggacuguucuccaauaa

SEQ ID NO: 660637 - RNA, 19 nt, Artificial Sequence
  Description of Artificial Sequence: Synthetic oligonucleotide
  Antisense strand to SEQ ID NO: 660636
uuauuggagaacaguccuc

SEQ ID NO: 660638 - RNA, 19 nt, Artificial Sequence
  Description of Artificial Sequence: Synthetic oligonucleotide
  Sense strand starting at position 671 of SEQ ID NO: 585700
acuguucuccaauaagagc

SEQ ID NO: 660639 - RNA, 19 nt, Artificial Sequence
  Description of Artificial Sequence: Synthetic oligonucleotide
  Antisense strand to SEQ ID NO: 660638
gcucuuauuggagaacagu

SEQ ID NO: 660640 - RNA, 19 nt, Artificial Sequence
  Description of Artificial Sequence: Synthetic oligonucleotide
  Sense strand starting at position 790 of SEQ ID NO: 585700
gcaucaacauuaccagaga

SEQ ID NO: 660641 - RNA, 19 nt, Artificial Sequence
  Description of Artificial Sequence: Synthetic oligonucleotide
  Antisense strand to SEQ ID NO: 660640
ucucugguaauguugaugc

SEQ ID NO: 660642 - RNA, 19 nt, Artificial Sequence
  Description of Artificial Sequence: Synthetic oligonucleotide
  Sense strand starting at position 837 of SEQ ID NO: 585700
gccuaagacugaguuacua

SEQ ID NO: 660643 - RNA, 19 nt, Artificial Sequence
  Description of Artificial Sequence: Synthetic oligonucleotide
  Antisense strand to SEQ ID NO: 660642
uaguaacucagucuuaggc

SEQ ID NO: 660644 - RNA, 19 nt, Artificial Sequence
  Description of Artificial Sequence: Synthetic oligonucleotide
  Sense strand starting at position 952 of SEQ ID NO: 585700
acacaaacguguguaauaa

SEQ ID NO: 660645 - RNA, 19 nt, Artificial Sequence
  Description of Artificial Sequence: Synthetic oligonucleotide
  Antisense strand to SEQ ID NO: 660644
uuauuacacacguuugugu

SEQ ID NO: 660646 - RNA, 19 nt, Artificial Sequence
  Description of Artificial Sequence: Synthetic oligonucleotide
  Sense strand starting at position 953 of SEQ ID NO: 585700
cacaaacguguguaauaaa

SEQ ID NO: 660647 - RNA, 19 nt, Artificial Sequence
  Description of Artificial Sequence: Synthetic oligonucleotide
  Antisense strand to SEQ ID NO: 660646
uuuauuacacacguuugug

SEQ ID NO: 660648 - RNA, 19 nt, Artificial Sequence
  Description of Artificial Sequence: Synthetic oligonucleotide
  Sense strand starting at position 960 of SEQ ID NO: 585700
guguguaauaaacagggua

SEQ ID NO: 660649 - RNA, 19 nt, Artificial Sequence
  Description of Artificial Sequence: Synthetic oligonucleotide
  Antisense strand to SEQ ID NO: 660648
uacccuguuuauuacacac

SEQ ID NO: 660650 - RNA, 19 nt, Artificial Sequence
  Description of Artificial Sequence: Synthetic oligonucleotide
  Sense strand starting at position 962 of SEQ ID NO: 585700
guguaauaaacaggguauc

SEQ ID NO: 660651 - RNA, 19 nt, Artificial Sequence
  Description of Artificial Sequence: Synthetic oligonucleotide
  Antisense strand to SEQ ID NO: 660650
gauacccuguuuauuacac

SEQ ID NO: 660652 - RNA, 19 nt, Artificial Sequence
  Description of Artificial Sequence: Synthetic oligonucleotide
  Sense strand starting at position 973 of SEQ ID NO: 585700
aggguaucugcccacauaa

SEQ ID NO: 660653 - RNA, 19 nt, Artificial Sequence
  Description of Artificial Sequence: Synthetic oligonucleotide
  Antisense strand to SEQ ID NO: 660652
uuaugugggcagauacccu

SEQ ID NO: 660654 - RNA, 19 nt, Artificial Sequence
  Description of Artificial Sequence: Synthetic oligonucleotide
  Sense strand starting at position 1003 of SEQ ID NO: 585700
ccaaguccugaucagcauu

SEQ ID NO: 660655 - RNA, 19 nt, Artificial Sequence
  Description of Artificial Sequence: Synthetic oligonucleotide
  Antisense strand to SEQ ID NO: 660654
aaugcugaucaggacuugg

SEQ ID NO: 660656 - RNA, 19 nt, Artificial Sequence
  Description of Artificial Sequence: Synthetic oligonucleotide
  Sense strand starting at position 1117 of SEQ ID NO: 585700
cuggaaaucuaauugccua

SEQ ID NO: 660657 - RNA, 19 nt, Artificial Sequence
  Description of Artificial Sequence: Synthetic oligonucleotide
  Antisense strand to SEQ ID NO: 660656
uaggcaauuagauuuccag

SEQ ID NO: 660658 - RNA, 19 nt, Artificial Sequence
  Description of Artificial Sequence: Synthetic oligonucleotide
  Sense strand starting at position 1142 of SEQ ID NO: 585700
cuuggaauguaucuaagaa

SEQ ID NO: 660659 - RNA, 19 nt, Artificial Sequence
  Description of Artificial Sequence: Synthetic oligonucleotide
  Antisense strand to SEQ ID NO: 660658
uucuuagauacauuccaag

SEQ ID NO: 660660 - RNA, 19 nt, Artificial Sequence
  Description of Artificial Sequence: Synthetic oligonucleotide
  Sense strand starting at position 1771 of SEQ ID NO: 585700
guuauaguuaaaggugaag

SEQ ID NO: 660661 - RNA, 19 nt, Artificial Sequence
  Description of Artificial Sequence: Synthetic oligonucleotide
  Antisense strand to SEQ ID NO: 660660
cuucaccuuuaacuauaac

SEQ ID NO: 660662 - RNA, 19 nt, Artificial Sequence
  Description of Artificial Sequence: Synthetic oligonucleotide
  Sense strand starting at position 1900 of SEQ ID NO: 585700
gcuuaaacagaagguauaa

SEQ ID NO: 660663 - RNA, 19 nt, Artificial Sequence
  Description of Artificial Sequence: Synthetic oligonucleotide
  Antisense strand to SEQ ID NO: 660662
uuauaccuucuguuuaagc

SEQ ID NO: 660664 - RNA, 19 nt, Artificial Sequence
  Description of Artificial Sequence: Synthetic oligonucleotide
  Sense strand starting at position 1912 of SEQ ID NO: 585700
gguauaacuuaccuugacu

SEQ ID NO: 660665 - RNA, 19 nt, Artificial Sequence
  Description of Artificial Sequence: Synthetic oligonucleotide
  Antisense strand to SEQ ID NO: 660664
agucaagguaaguuauacc

SEQ ID NO: 660666 - RNA, 19 nt, Artificial Sequence
  Description of Artificial Sequence: Synthetic oligonucleotide
  Sense strand starting at position 2002 of SEQ ID NO: 585700
ggaguuuccgcggagagac

SEQ ID NO: 660667 - RNA, 19 nt, Artificial Sequence
  Description of Artificial Sequence: Synthetic oligonucleotide
  Antisense strand to SEQ ID NO: 660666
gucucuccgcggaaacucc

SEQ ID NO: 660668 - RNA, 19 nt, Artificial Sequence
  Description of Artificial Sequence: Synthetic oligonucleotide
  Sense strand starting at position 2091 of SEQ ID NO: 585700
guaccacucuaaucugagu

SEQ ID NO: 660669 - RNA, 19 nt, Artificial Sequence
  Description of Artificial Sequence: Synthetic oligonucleotide
  Antisense strand to SEQ ID NO: 660668
acucagauuagagugguac

SEQ ID NO: 660670 - RNA, 19 nt, Artificial Sequence
  Description of Artificial Sequence: Synthetic oligonucleotide
  Sense strand starting at position 2129 of SEQ ID NO: 585700
uccguuuaugaugaugaca

SEQ ID NO: 660671 - RNA, 19 nt, Artificial Sequence
  Description of Artificial Sequence: Synthetic oligonucleotide
  Antisense strand to SEQ ID NO: 660670
ugucaucaucauaaacgga

SEQ ID NO: 660672 - RNA, 19 nt, Artificial Sequence
  Description of Artificial Sequence: Synthetic oligonucleotide
  Sense strand starting at position 2202 of SEQ ID NO: 585700
ccugaauuagagugaaucu

SEQ ID NO: 660673 - RNA, 19 nt, Artificial Sequence
  Description of Artificial Sequence: Synthetic oligonucleotide
  Antisense strand to SEQ ID NO: 660672
agauucacucuaauucagg

SEQ ID NO: 660674 - RNA, 19 nt, Artificial Sequence
  Description of Artificial Sequence: Synthetic oligonucleotide
  Sense strand starting at position 2290 of SEQ ID NO: 585700
acagaaaugcacugcugaa

SEQ ID NO: 660675 - RNA, 19 nt, Artificial Sequence
  Description of Artificial Sequence: Synthetic oligonucleotide
  Antisense strand to SEQ ID NO: 660674
uucagcagugcauuucugu

SEQ ID NO: 660676 - RNA, 19 nt, Artificial Sequence
  Description of Artificial Sequence: Synthetic oligonucleotide
  Sense strand starting at position 2324 of SEQ ID NO: 585700
ggcuaauguaaucauuggu

SEQ ID NO: 660677 - RNA, 19 nt, Artificial Sequence
  Description of Artificial Sequence: Synthetic oligonucleotide
  Antisense strand to SEQ ID NO: 660676
accaaugauuacauuagcc

SEQ ID NO: 660678 - RNA, 19 nt, Artificial Sequence
  Description of Artificial Sequence: Synthetic oligonucleotide
  Sense strand starting at position 2343 of SEQ ID NO: 585700
guuccuauuccugauagaa

SEQ ID NO: 660679 - RNA, 19 nt, Artificial Sequence
  Description of Artificial Sequence: Synthetic oligonucleotide
  Antisense strand to SEQ ID NO: 660678
uucuaucaggaauaggaac

SEQ ID NO: 660680 - RNA, 19 nt, Artificial Sequence
  Description of Artificial Sequence: Synthetic oligonucleotide
  Sense strand starting at position 2644 of SEQ ID NO: 585700
uagagaggaucgcuggaau

SEQ ID NO: 660681 - RNA, 19 nt, Artificial Sequence
  Description of Artificial Sequence: Synthetic oligonucleotide
  Antisense strand to SEQ ID NO: 660680
auuccagcgauccucucua

SEQ ID NO: 660682 - RNA, 19 nt, Artificial Sequence
  Description of Artificial Sequence: Synthetic oligonucleotide
  Sense strand starting at position 3004 of SEQ ID NO: 585700
aguuuaggagcucaaacuu

SEQ ID NO: 660683 - RNA, 19 nt, Artificial Sequence
  Description of Artificial Sequence: Synthetic oligonucleotide
  Antisense strand to SEQ ID NO: 660682
aaguuugagcuccuaaacu

SEQ ID NO: 660684 - RNA, 19 nt, Artificial Sequence
  Description of Artificial Sequence: Synthetic oligonucleotide
  Sense strand starting at position 3221 of SEQ ID NO: 585700
gucugauguauguauacac

SEQ ID NO: 660685 - RNA, 19 nt, Artificial Sequence
  Description of Artificial Sequence: Synthetic oligonucleotide
  Antisense strand to SEQ ID NO: 660684
guguauacauacaucagac

SEQ ID NO: 660686 - RNA, 19 nt, Artificial Sequence
  Description of Artificial Sequence: Synthetic oligonucleotide
  Sense strand starting at position 3337 of SEQ ID NO: 585700
uuaggugugcuauacauua

SEQ ID NO: 660687 - RNA, 19 nt, Artificial Sequence
  Description of Artificial Sequence: Synthetic oligonucleotide
  Antisense strand to SEQ ID NO: 660686
uaauguauagcacaccuaa

SEQ ID NO: 660688 - RNA, 19 nt, Artificial Sequence
  Description of Artificial Sequence: Synthetic oligonucleotide
  Sense strand starting at position 3342 of SEQ ID NO: 585700
ugugcuauacauuaucauu

SEQ ID NO: 660689 - RNA, 19 nt, Artificial Sequence
  Description of Artificial Sequence: Synthetic oligonucleotide
  Antisense strand to SEQ ID NO: 660688
aaugauaauguauagcaca

SEQ ID NO: 660690 - RNA, 19 nt, Artificial Sequence
  Description of Artificial Sequence: Synthetic oligonucleotide
  Sense strand starting at position 3363 of SEQ ID NO: 585700
uuauauccaccaugaugua

SEQ ID NO: 660691 - RNA, 19 nt, Artificial Sequence
  Description of Artificial Sequence: Synthetic oligonucleotide
  Antisense strand to SEQ ID NO: 660690
uacaucaugguggauauaa

SEQ ID NO: 660692 - RNA, 19 nt, Artificial Sequence
  Description of Artificial Sequence: Synthetic oligonucleotide
  Sense strand starting at position 3536 of SEQ ID NO: 585700
auuccacguauaggugaaa

SEQ ID NO: 660693 - RNA, 19 nt, Artificial Sequence
  Description of Artificial Sequence: Synthetic oligonucleotide
  Antisense strand to SEQ ID NO: 660692
uuucaccuauacguggaau

SEQ ID NO: 660694 - RNA, 19 nt, Artificial Sequence
  Description of Artificial Sequence: Synthetic oligonucleotide
  Sense strand starting at position 3539 of SEQ ID NO: 585700
ccacguauaggugaaauca

SEQ ID NO: 660695 - RNA, 19 nt, Artificial Sequence
  Description of Artificial Sequence: Synthetic oligonucleotide
  Antisense strand to SEQ ID NO: 660694
ugauuucaccuauacgugg

SEQ ID NO: 660696 - RNA, 19 nt, Artificial Sequence
  Description of Artificial Sequence: Synthetic oligonucleotide
  Sense strand starting at position 3548 of SEQ ID NO: 585700
ggugaaaucaugcagcauu

SEQ ID NO: 660697 - RNA, 19 nt, Artificial Sequence
  Description of Artificial Sequence: Synthetic oligonucleotide
  Antisense strand to SEQ ID NO: 660696
aaugcugcaugauuucacc

SEQ ID NO: 660698 - RNA, 19 nt, Artificial Sequence
  Description of Artificial Sequence: Synthetic oligonucleotide
  Sense strand starting at position 3634 of SEQ ID NO: 585700
agaauuucuuaagacucga

SEQ ID NO: 660699 - RNA, 19 nt, Artificial Sequence
  Description of Artificial Sequence: Synthetic oligonucleotide
  Antisense strand to SEQ ID NO: 660698
ucgagucuuaagaaauucu

SEQ ID NO: 660700 - RNA, 19 nt, Artificial Sequence
  Description of Artificial Sequence: Synthetic oligonucleotide
  Sense strand starting at position 3639 of SEQ ID NO: 585700
uucuuaagacucgauagua

SEQ ID NO: 660701 - RNA, 19 nt, Artificial Sequence
  Description of Artificial Sequence: Synthetic oligonucleotide
  Antisense strand to SEQ ID NO: 660700
uacuaucgagucuuaagaa

SEQ ID NO: 660702 - RNA, 19 nt, Artificial Sequence
  Description of Artificial Sequence: Synthetic oligonucleotide
  Sense strand starting at position 3647 of SEQ ID NO: 585700
acucgauaguauuccauca

SEQ ID NO: 660703 - RNA, 19 nt, Artificial Sequence
  Description of Artificial Sequence: Synthetic oligonucleotide
  Antisense strand to SEQ ID NO: 660702
ugauggaauacuaucgagu

SEQ ID NO: 660704 - RNA, 19 nt, Artificial Sequence
  Description of Artificial Sequence: Synthetic oligonucleotide
  Sense strand starting at position 3706 of SEQ ID NO: 585700
ggaauauccugauucuuua

SEQ ID NO: 660705 - RNA, 19 nt, Artificial Sequence
  Description of Artificial Sequence: Synthetic oligonucleotide
  Antisense strand to SEQ ID NO: 660704
uaaagaaucaggauauucc

SEQ ID NO: 660706 - RNA, 19 nt, Artificial Sequence
  Description of Artificial Sequence: Synthetic oligonucleotide
  Sense strand starting at position 100 of SEQ ID NO: 585701
ggaguaaucauucgaaaca

SEQ ID NO: 660707 - RNA, 19 nt, Artificial Sequence
  Description of Artificial Sequence: Synthetic oligonucleotide
  Antisense strand to SEQ ID NO: 660706
uguuucgaaugauuacucc

SEQ ID NO: 660708 - RNA, 19 nt, Artificial Sequence
  Description of Artificial Sequence: Synthetic oligonucleotide
  Sense strand starting at position 110 of SEQ ID NO: 585701
uucgaaacagcucaauaau

SEQ ID NO: 660709 - RNA, 19 nt, Artificial Sequence
  Description of Artificial Sequence: Synthetic oligonucleotide
  Antisense strand to SEQ ID NO: 660708
auuauugagcuguuucgaa

SEQ ID NO: 660710 - RNA, 19 nt, Artificial Sequence
  Description of Artificial Sequence: Synthetic oligonucleotide
  Sense strand starting at position 396 of SEQ ID NO: 585701
uuacuaguucuuuaucuug

SEQ ID NO: 660711 - RNA, 19 nt, Artificial Sequence
  Description of Artificial Sequence: Synthetic oligonucleotide
  Antisense strand to SEQ ID NO: 660710
caagauaaagaacuaguaa

SEQ ID NO: 660712 - RNA, 19 nt, Artificial Sequence
  Description of Artificial Sequence: Synthetic oligonucleotide
  Sense strand starting at position 420 of SEQ ID NO: 585701
uucuaaggcuccuuagauc

SEQ ID NO: 660713 - RNA, 19 nt, Artificial Sequence
  Description of Artificial Sequence: Synthetic oligonucleotide
  Antisense strand to SEQ ID NO: 660712
gaucuaaggagccuuagaa

SEQ ID NO: 660714 - RNA, 19 nt, Artificial Sequence
  Description of Artificial Sequence: Synthetic oligonucleotide
  Sense strand starting at position 426 of SEQ ID NO: 585701
ggcuccuuagaucauacuu

SEQ ID NO: 660715 - RNA, 19 nt, Artificial Sequence
  Description of Artificial Sequence: Synthetic oligonucleotide
  Antisense strand to SEQ ID NO: 660714
aaguaugaucuaaggagcc

SEQ ID NO: 660716 - RNA, 19 nt, Artificial Sequence
  Description of Artificial Sequence: Synthetic oligonucleotide
  Sense strand starting at position 512 of SEQ ID NO: 585701
uggaauuugugaggaaauu

SEQ ID NO: 660717 - RNA, 19 nt, Artificial Sequence
  Description of Artificial Sequence: Synthetic oligonucleotide
  Antisense strand to SEQ ID NO: 660716
aauuuccucacaaauucca

SEQ ID NO: 660718 - RNA, 19 nt, Artificial Sequence
  Description of Artificial Sequence: Synthetic oligonucleotide
  Sense strand starting at position 643 of SEQ ID NO: 585701
acugauaaauucuugguuu

SEQ ID NO: 660719 - RNA, 19 nt, Artificial Sequence
  Description of Artificial Sequence: Synthetic oligonucleotide
  Antisense strand to SEQ ID NO: 660718
aaaccaagaauuuaucagu

SEQ ID NO: 660720 - RNA, 19 nt, Artificial Sequence
  Description of Artificial Sequence: Synthetic oligonucleotide
  Sense strand starting at position 850 of SEQ ID NO: 585701
gaauaaaggcaguguuaag

SEQ ID NO: 660721 - RNA, 19 nt, Artificial Sequence
  Description of Artificial Sequence: Synthetic oligonucleotide
  Antisense strand to SEQ ID NO: 660720
cuuaacacugccuuuauuc

SEQ ID NO: 660722 - RNA, 19 nt, Artificial Sequence
  Description of Artificial Sequence: Synthetic oligonucleotide
  Sense strand starting at position 861 of SEQ ID NO: 585701
guguuaagauccuuccuca

SEQ ID NO: 660723 - RNA, 19 nt, Artificial Sequence
  Description of Artificial Sequence: Synthetic oligonucleotide
  Antisense strand to SEQ ID NO: 660722
ugaggaaggaucuuaacac

SEQ ID NO: 660724 - RNA, 19 nt, Artificial Sequence
  Description of Artificial Sequence: Synthetic oligonucleotide
  Sense strand starting at position 960 of SEQ ID NO: 585701
auauuaagccaguaaguca

SEQ ID NO: 660725 - RNA, 19 nt, Artificial Sequence
  Description of Artificial Sequence: Synthetic oligonucleotide
  Antisense strand to SEQ ID NO: 660724
ugacuuacuggcuuaauau

SEQ ID NO: 660726 - RNA, 19 nt, Artificial Sequence
  Description of Artificial Sequence: Synthetic oligonucleotide
  Sense strand starting at position 1075 of SEQ ID NO: 585701
ccaguacuuguauaagucu

SEQ ID NO: 660727 - RNA, 19 nt, Artificial Sequence
  Description of Artificial Sequence: Synthetic oligonucleotide
  Antisense strand to SEQ ID NO: 660726
agacuuauacaaguacugg

SEQ ID NO: 660728 - RNA, 19 nt, Artificial Sequence
  Description of Artificial Sequence: Synthetic oligonucleotide
  Sense strand starting at position 1082 of SEQ ID NO: 585701
uuguauaagucucuauacu

SEQ ID NO: 660729 - RNA, 19 nt, Artificial Sequence
  Description of Artificial Sequence: Synthetic oligonucleotide
  Antisense strand to SEQ ID NO: 660728
aguauagagacuuauacaa

SEQ ID NO: 660730 - RNA, 19 nt, Artificial Sequence
  Description of Artificial Sequence: Synthetic oligonucleotide
  Sense strand starting at position 1083 of SEQ ID NO: 585701
uguauaagucucuauacua

SEQ ID NO: 660731 - RNA, 19 nt, Artificial Sequence
  Description of Artificial Sequence: Synthetic oligonucleotide
  Antisense strand to SEQ ID NO: 660730
uaguauagagacuuauaca

SEQ ID NO: 660732 - RNA, 19 nt, Artificial Sequence
  Description of Artificial Sequence: Synthetic oligonucleotide
  Sense strand starting at position 1412 of SEQ ID NO: 585701
ugcauuucugauugccagu

SEQ ID NO: 660733 - RNA, 19 nt, Artificial Sequence
  Description of Artificial Sequence: Synthetic oligonucleotide
  Antisense strand to SEQ ID NO: 660732
acuggcaaucagaaaugca

SEQ ID NO: 660734 - RNA, 19 nt, Artificial Sequence
  Description of Artificial Sequence: Synthetic oligonucleotide
  Sense strand starting at position 1477 of SEQ ID NO: 585701
cuuuaaguguaccuuaacu

SEQ ID NO: 660735 - RNA, 19 nt, Artificial Sequence
  Description of Artificial Sequence: Synthetic oligonucleotide
  Antisense strand to SEQ ID NO: 660734
aguuaagguacacuuaaag

SEQ ID NO: 660736 - RNA, 19 nt, Artificial Sequence
  Description of Artificial Sequence: Synthetic oligonucleotide
  Sense strand starting at position 1553 of SEQ ID NO: 585701
augucaggucucuacuuga

SEQ ID NO: 660737 - RNA, 19 nt, Artificial Sequence
  Description of Artificial Sequence: Synthetic oligonucleotide
  Antisense strand to SEQ ID NO: 660736
ucaaguagagaccugacau

SEQ ID NO: 660738 - RNA, 19 nt, Artificial Sequence
  Description of Artificial Sequence: Synthetic oligonucleotide
  Sense strand starting at position 1556 of SEQ ID NO: 585701
ucaggucucuacuugacau

SEQ ID NO: 660739 - RNA, 19 nt, Artificial Sequence
  Description of Artificial Sequence: Synthetic oligonucleotide
  Antisense strand to SEQ ID NO: 660738
augucaaguagagaccuga

SEQ ID NO: 660740 - RNA, 19 nt, Artificial Sequence
  Description of Artificial Sequence: Synthetic oligonucleotide
  Sense strand starting at position 1587 of SEQ ID NO: 585701
auacaaagauuuggacaga

SEQ ID NO: 660741 - RNA, 19 nt, Artificial Sequence
  Description of Artificial Sequence: Synthetic oligonucleotide
  Antisense strand to SEQ ID NO: 660740
ucuguccaaaucuuuguau

SEQ ID NO: 660742 - RNA, 19 nt, Artificial Sequence
  Description of Artificial Sequence: Synthetic oligonucleotide
  Sense strand starting at position 1628 of SEQ ID NO: 585701
uuguucgggaugcauuauu

SEQ ID NO: 660743 - RNA, 19 nt, Artificial Sequence
  Description of Artificial Sequence: Synthetic oligonucleotide
  Antisense strand to SEQ ID NO: 660742
aauaaugcaucccgaacaa

SEQ ID NO: 660744 - RNA, 19 nt, Artificial Sequence
  Description of Artificial Sequence: Synthetic oligonucleotide
  Sense strand starting at position 1633 of SEQ ID NO: 585701
cgggaugcauuauuauuau

SEQ ID NO: 660745 - RNA, 19 nt, Artificial Sequence
  Description of Artificial Sequence: Synthetic oligonucleotide
  Antisense strand to SEQ ID NO: 660744
auaauaauaaugcaucccg

SEQ ID NO: 660746 - RNA, 19 nt, Artificial Sequence
  Description of Artificial Sequence: Synthetic oligonucleotide
  Sense strand starting at position 2328 of SEQ ID NO: 585701
cacugucuucugcagggaa

SEQ ID NO: 660747 - RNA, 19 nt, Artificial Sequence
  Description of Artificial Sequence: Synthetic oligonucleotide
  Antisense strand to SEQ ID NO: 660746
uucccugcagaagacagug

SEQ ID NO: 660748 - RNA, 19 nt, Artificial Sequence
  Description of Artificial Sequence: Synthetic oligonucleotide
  Sense strand starting at position 2529 of SEQ ID NO: 585701
cucagcauuugagggaaga

SEQ ID NO: 660749 - RNA, 19 nt, Artificial Sequence
  Description of Artificial Sequence: Synthetic oligonucleotide
  Antisense strand to SEQ ID NO: 660748
ucuucccucaaaugcugag

SEQ ID NO: 660750 - RNA, 19 nt, Artificial Sequence
  Description of Artificial Sequence: Synthetic oligonucleotide
  Sense strand starting at position 2688 of SEQ ID NO: 585701
gucccugacgauuacucau

SEQ ID NO: 660751 - RNA, 19 nt, Artificial Sequence
  Description of Artificial Sequence: Synthetic oligonucleotide
  Antisense strand to SEQ ID NO: 660750
augaguaaucgucagggac

SEQ ID NO: 660752 - RNA, 19 nt, Artificial Sequence
  Description of Artificial Sequence: Synthetic oligonucleotide
  Sense strand starting at position 2841 of SEQ ID NO: 585701
agacuugggauugguguua

SEQ ID NO: 660753 - RNA, 19 nt, Artificial Sequence
  Description of Artificial Sequence: Synthetic oligonucleotide
  Antisense strand to SEQ ID NO: 660752
uaacaccaaucccaagucu

SEQ ID NO: 660754 - RNA, 19 nt, Artificial Sequence
  Description of Artificial Sequence: Synthetic oligonucleotide
  Sense strand starting at position 2954 of SEQ ID NO: 585701
caaggauucugcuuuggau

SEQ ID NO: 660755 - RNA, 19 nt, Artificial Sequence
  Description of Artificial Sequence: Synthetic oligonucleotide
  Antisense strand to SEQ ID NO: 660754
auccaaagcagaauccuug

SEQ ID NO: 660756 - RNA, 19 nt, Artificial Sequence
  Description of Artificial Sequence: Synthetic oligonucleotide
  Sense strand starting at position 2956 of SEQ ID NO: 585701
aggauucugcuuuggauca

SEQ ID NO: 660757 - RNA, 19 nt, Artificial Sequence
  Description of Artificial Sequence: Synthetic oligonucleotide
  Antisense strand to SEQ ID NO: 660756
ugauccaaagcagaauccu

SEQ ID NO: 660758 - RNA, 19 nt, Artificial Sequence
  Description of Artificial Sequence: Synthetic oligonucleotide
  Sense strand starting at position 3006 of SEQ ID NO: 585701
cuucucuugcagcauuaga

SEQ ID NO: 660759 - RNA, 19 nt, Artificial Sequence
  Description of Artificial Sequence: Synthetic oligonucleotide
  Antisense strand to SEQ ID NO: 660758
ucuaaugcugcaagagaag

SEQ ID NO: 660760 - RNA, 19 nt, Artificial Sequence
  Description of Artificial Sequence: Synthetic oligonucleotide
  Sense strand starting at position 3115 of SEQ ID NO: 585701
guggcugaagggugaauua

SEQ ID NO: 660761 - RNA, 19 nt, Artificial Sequence
  Description of Artificial Sequence: Synthetic oligonucleotide
  Antisense strand to SEQ ID NO: 660760
uaauucacccuucagccac

SEQ ID NO: 660762 - RNA, 19 nt, Artificial Sequence
  Description of Artificial Sequence: Synthetic oligonucleotide
  Sense strand starting at position 3142 of SEQ ID NO: 585701
agcgauacagucuaaguaa

SEQ ID NO: 660763 - RNA, 19 nt, Artificial Sequence
  Description of Artificial Sequence: Synthetic oligonucleotide
  Antisense strand to SEQ ID NO: 660762
uuacuuagacuguaucgcu

SEQ ID NO: 660764 - RNA, 19 nt, Artificial Sequence
  Description of Artificial Sequence: Synthetic oligonucleotide
  Sense strand starting at position 3418 of SEQ ID NO: 585701
cuguauguacaguacuaaa

SEQ ID NO: 660765 - RNA, 19 nt, Artificial Sequence
  Description of Artificial Sequence: Synthetic oligonucleotide
  Antisense strand to SEQ ID NO: 660764
uuuaguacuguacauacag

SEQ ID NO: 660766 - RNA, 19 nt, Artificial Sequence
  Description of Artificial Sequence: Synthetic oligonucleotide
  Sense strand starting at position 3487 of SEQ ID NO: 585701
gggagucccagugauuaac

SEQ ID NO: 660767 - RNA, 19 nt, Artificial Sequence
  Description of Artificial Sequence: Synthetic oligonucleotide
  Antisense strand to SEQ ID NO: 660766
guuaaucacugggacuccc

SEQ ID NO: 660768 - RNA, 19 nt, Artificial Sequence
  Description of Artificial Sequence: Synthetic oligonucleotide
  Sense strand starting at position 3500 of SEQ ID NO: 585701
auuaacugugucuacuuau

SEQ ID NO: 660769 - RNA, 19 nt, Artificial Sequence
  Description of Artificial Sequence: Synthetic oligonucleotide
  Antisense strand to SEQ ID NO: 660768
auaaguagacacaguuaau

SEQ ID NO: 660770 - RNA, 19 nt, Artificial Sequence
  Description of Artificial Sequence: Synthetic oligonucleotide
  Sense strand starting at position 3623 of SEQ ID NO: 585701
guguaagucauacagacac

SEQ ID NO: 660771 - RNA, 19 nt, Artificial Sequence
  Description of Artificial Sequence: Synthetic oligonucleotide
  Antisense strand to SEQ ID NO: 660770
gugucuguaugacuuacac

SEQ ID NO: 660772 - RNA, 19 nt, Artificial Sequence
  Description of Artificial Sequence: Synthetic oligonucleotide
  Sense strand starting at position 3700 of SEQ ID NO: 585701
caguuaaggcccuaaguga

SEQ ID NO: 660773 - RNA, 19 nt, Artificial Sequence
  Description of Artificial Sequence: Synthetic oligonucleotide
  Antisense strand to SEQ ID NO: 660772
ucacuuagggccuuaacug

SEQ ID NO: 660774 - RNA, 19 nt, Artificial Sequence
  Description of Artificial Sequence: Synthetic oligonucleotide
  Sense strand starting at position 3765 of SEQ ID NO: 585701
ugugaaaguuauuugugcu

SEQ ID NO: 660775 - RNA, 19 nt, Artificial Sequence
  Description of Artificial Sequence: Synthetic oligonucleotide
  Antisense strand to SEQ ID NO: 660774
agcacaaauaacuuucaca

SEQ ID NO: 660776 - RNA, 19 nt, Artificial Sequence
  Description of Artificial Sequence: Synthetic oligonucleotide
  Sense strand starting at position 3766 of SEQ ID NO: 585701
gugaaaguuauuugugcuu

SEQ ID NO: 660777 - RNA, 19 nt, Artificial Sequence
  Description of Artificial Sequence: Synthetic oligonucleotide
  Antisense strand to SEQ ID NO: 660776
aagcacaaauaacuuucac

SEQ ID NO: 660778 - RNA, 19 nt, Artificial Sequence
  Description of Artificial Sequence: Synthetic oligonucleotide
  Sense strand starting at position 3771 of SEQ ID NO: 585701
aguuauuugugcuucuauu

SEQ ID NO: 660779 - RNA, 19 nt, Artificial Sequence
  Description of Artificial Sequence: Synthetic oligonucleotide
  Antisense strand to SEQ ID NO: 660778
aauagaagcacaaauaacu

SEQ ID NO: 660780 - RNA, 19 nt, Artificial Sequence
  Description of Artificial Sequence: Synthetic oligonucleotide
  Sense strand starting at position 3803 of SEQ ID NO: 585701
ucuaaauaggccuauagca

SEQ ID NO: 660781 - RNA, 19 nt, Artificial Sequence
  Description of Artificial Sequence: Synthetic oligonucleotide
  Antisense strand to SEQ ID NO: 660780
ugcuauaggccuauuuaga

SEQ ID NO: 660782 - RNA, 19 nt, Artificial Sequence
  Description of Artificial Sequence: Synthetic oligonucleotide
  Sense strand starting at position 3889 of SEQ ID NO: 585701
augagugauuuauaccaaa

SEQ ID NO: 660783 - RNA, 19 nt, Artificial Sequence
  Description of Artificial Sequence: Synthetic oligonucleotide
  Antisense strand to SEQ ID NO: 660782
uuugguauaaaucacucau

SEQ ID NO: 660784 - RNA, 19 nt, Artificial Sequence
  Description of Artificial Sequence: Synthetic oligonucleotide
  Sense strand starting at position 3946 of SEQ ID NO: 585701
augguauguggugaaagca

SEQ ID NO: 660785 - RNA, 19 nt, Artificial Sequence
  Description of Artificial Sequence: Synthetic oligonucleotide
  Antisense strand to SEQ ID NO: 660784
ugcuuucaccacauaccau

SEQ ID NO: 660786 - RNA, 19 nt, Artificial Sequence
  Description of Artificial Sequence: Synthetic oligonucleotide
  Sense strand starting at position 236 of SEQ ID NO: 585702
cuaucucagcccuaaggga

SEQ ID NO: 660787 - RNA, 19 nt, Artificial Sequence
  Description of Artificial Sequence: Synthetic oligonucleotide
  Antisense strand to SEQ ID NO: 660786
ucccuuagggcugagauag

SEQ ID NO: 660788 - RNA, 19 nt, Artificial Sequence
  Description of Artificial Sequence: Synthetic oligonucleotide
  Sense strand starting at position 689 of SEQ ID NO: 585702
ggagcugguuacuguggaa

SEQ ID NO: 660789 - RNA, 19 nt, Artificial Sequence
  Description of Artificial Sequence: Synthetic oligonucleotide
  Antisense strand to SEQ ID NO: 660788
uuccacaguaaccagcucc

SEQ ID NO: 660790 - RNA, 19 nt, Artificial Sequence
  Description of Artificial Sequence: Synthetic oligonucleotide
  Sense strand starting at position 692 of SEQ ID NO: 585702
gcugguuacuguggaaaca

SEQ ID NO: 660791 - RNA, 19 nt, Artificial Sequence
  Description of Artificial Sequence: Synthetic oligonucleotide
  Antisense strand to SEQ ID NO: 660790
uguuuccacaguaaccagc

SEQ ID NO: 660792 - RNA, 19 nt, Artificial Sequence
  Description of Artificial Sequence: Synthetic oligonucleotide
  Sense strand starting at position 755 of SEQ ID NO: 585702
agacacgacugcucagaga

SEQ ID NO: 660793 - RNA, 19 nt, Artificial Sequence
  Description of Artificial Sequence: Synthetic oligonucleotide
  Antisense strand to SEQ ID NO: 660792
ucucugagcagucgugucu

SEQ ID NO: 660794 - RNA, 19 nt, Artificial Sequence
  Description of Artificial Sequence: Synthetic oligonucleotide
  Sense strand starting at position 958 of SEQ ID NO: 585702
gcgagaauaacugaggcaa

SEQ ID NO: 660795 - RNA, 19 nt, Artificial Sequence
  Description of Artificial Sequence: Synthetic oligonucleotide
  Antisense strand to SEQ ID NO: 660794
uugccucaguuauucucgc

SEQ ID NO: 660796 - RNA, 19 nt, Artificial Sequence
  Description of Artificial Sequence: Synthetic oligonucleotide
  Sense strand starting at position 1360 of SEQ ID NO: 585702
gggaguucugcaggaaggu

SEQ ID NO: 660797 - RNA, 19 nt, Artificial Sequence
  Description of Artificial Sequence: Synthetic oligonucleotide
  Antisense strand to SEQ ID NO: 660796
accuuccugcagaacuccc

SEQ ID NO: 660798 - RNA, 19 nt, Artificial Sequence
  Description of Artificial Sequence: Synthetic oligonucleotide
  Sense strand starting at position 1361 of SEQ ID NO: 585702
ggaguucugcaggaagguu

SEQ ID NO: 660799 - RNA, 19 nt, Artificial Sequence
  Description of Artificial Sequence: Synthetic oligonucleotide
  Antisense strand to SEQ ID NO: 660798
aaccuuccugcagaacucc

SEQ ID NO: 660800 - RNA, 19 nt, Artificial Sequence
  Description of Artificial Sequence: Synthetic oligonucleotide
  Sense strand starting at position 1979 of SEQ ID NO: 585702
gaauguagcugaccgaaau

SEQ ID NO: 660801 - RNA, 19 nt, Artificial Sequence
  Description of Artificial Sequence: Synthetic oligonucleotide
  Antisense strand to SEQ ID NO: 660800
auuucggucagcuacauuc

SEQ ID NO: 660802 - RNA, 19 nt, Artificial Sequence
  Description of Artificial Sequence: Synthetic oligonucleotide
  Sense strand starting at position 2131 of SEQ ID NO: 585702
guguauccucgcuggugga

SEQ ID NO: 660803 - RNA, 19 nt, Artificial Sequence
  Description of Artificial Sequence: Synthetic oligonucleotide
  Antisense strand to SEQ ID NO: 660802
uccaccagcgaggauacac

SEQ ID NO: 660804 - RNA, 19 nt, Artificial Sequence
  Description of Artificial Sequence: Synthetic oligonucleotide
  Sense strand starting at position 2146 of SEQ ID NO: 585702
uggaguacccucugcuuga

SEQ ID NO: 660805 - RNA, 19 nt, Artificial Sequence
  Description of Artificial Sequence: Synthetic oligonucleotide
  Antisense strand to SEQ ID NO: 660804
ucaagcagaggguacucca

SEQ ID NO: 660806 - RNA, 19 nt, Artificial Sequence
  Description of Artificial Sequence: Synthetic oligonucleotide
  Sense strand starting at position 2213 of SEQ ID NO: 585702
gggcguucucugagcgguu

SEQ ID NO: 660807 - RNA, 19 nt, Artificial Sequence
  Description of Artificial Sequence: Synthetic oligonucleotide
  Antisense strand to SEQ ID NO: 660806
aaccgcucagagaacgccc

SEQ ID NO: 660808 - RNA, 19 nt, Artificial Sequence
  Description of Artificial Sequence: Synthetic oligonucleotide
  Sense strand starting at position 2215 of SEQ ID NO: 585702
gcguucucugagcgguuca

SEQ ID NO: 660809 - RNA, 19 nt, Artificial Sequence
  Description of Artificial Sequence: Synthetic oligonucleotide
  Antisense strand to SEQ ID NO: 660808
ugaaccgcucagagaacgc

SEQ ID NO: 660810 - RNA, 19 nt, Artificial Sequence
  Description of Artificial Sequence: Synthetic oligonucleotide
  Sense strand starting at position 2318 of SEQ ID NO: 585702
ggaauacagcuuuauuccu

SEQ ID NO: 660811 - RNA, 19 nt, Artificial Sequence
  Description of Artificial Sequence: Synthetic oligonucleotide
  Antisense strand to SEQ ID NO: 660810
aggaauaaagcuguauucc

SEQ ID NO: 660812 - RNA, 19 nt, Artificial Sequence
  Description of Artificial Sequence: Synthetic oligonucleotide
  Sense strand starting at position 2326 of SEQ ID NO: 585702
gcuuuauuccuacacgauu

SEQ ID NO: 660813 - RNA, 19 nt, Artificial Sequence
  Description of Artificial Sequence: Synthetic oligonucleotide
  Antisense strand to SEQ ID NO: 660812
aaucguguaggaauaaagc

SEQ ID NO: 660814 - RNA, 19 nt, Artificial Sequence
  Description of Artificial Sequence: Synthetic oligonucleotide
  Sense strand starting at position 2405 of SEQ ID NO: 585702
gccgcuuccuucgucaaca

SEQ ID NO: 660815 - RNA, 19 nt, Artificial Sequence
  Description of Artificial Sequence: Synthetic oligonucleotide
  Antisense strand to SEQ ID NO: 660814
uguugacgaaggaagcggc

SEQ ID NO: 660816 - RNA, 19 nt, Artificial Sequence
  Description of Artificial Sequence: Synthetic oligonucleotide
  Sense strand starting at position 2406 of SEQ ID NO: 585702
ccgcuuccuucgucaacau

SEQ ID NO: 660817 - RNA, 19 nt, Artificial Sequence
  Description of Artificial Sequence: Synthetic oligonucleotide
  Antisense strand to SEQ ID NO: 660816
auguugacgaaggaagcgg

SEQ ID NO: 660818 - RNA, 19 nt, Artificial Sequence
  Description of Artificial Sequence: Synthetic oligonucleotide
  Sense strand starting at position 2576 of SEQ ID NO: 585702
uaaauacaacuguggugaa

SEQ ID NO: 660819 - RNA, 19 nt, Artificial Sequence
  Description of Artificial Sequence: Synthetic oligonucleotide
  Antisense strand to SEQ ID NO: 660818
uucaccacaguuguauuua

SEQ ID NO: 660820 - RNA, 19 nt, Artificial Sequence
  Description of Artificial Sequence: Synthetic oligonucleotide
  Sense strand starting at position 2718 of SEQ ID NO: 585702
aggcguuugguucauugga

SEQ ID NO: 660821 - RNA, 19 nt, Artificial Sequence
  Description of Artificial Sequence: Synthetic oligonucleotide
  Antisense strand to SEQ ID NO: 660820
uccaaugaaccaaacgccu

SEQ ID NO: 660822 - RNA, 19 nt, Artificial Sequence
  Description of Artificial Sequence: Synthetic oligonucleotide
  Sense strand starting at position 2723 of SEQ ID NO: 585702
uuugguucauuggaggaaa

SEQ ID NO: 660823 - RNA, 19 nt, Artificial Sequence
  Description of Artificial Sequence: Synthetic oligonucleotide
  Antisense strand to SEQ ID NO: 660822
uuuccuccaaugaaccaaa

SEQ ID NO: 660824 - RNA, 19 nt, Artificial Sequence
  Description of Artificial Sequence: Synthetic oligonucleotide
  Sense strand starting at position 2740 of SEQ ID NO: 585702
aaggaauagcccugugugu

SEQ ID NO: 660825 - RNA, 19 nt, Artificial Sequence
  Description of Artificial Sequence: Synthetic oligonucleotide
  Antisense strand to SEQ ID NO: 660824
acacacagggcuauuccuu

SEQ ID NO: 660826 - RNA, 19 nt, Artificial Sequence
  Description of Artificial Sequence: Synthetic oligonucleotide
  Sense strand starting at position 2880 of SEQ ID NO: 585702
gaguacggguucuccaaau

SEQ ID NO: 660827 - RNA, 19 nt, Artificial Sequence
  Description of Artificial Sequence: Synthetic oligonucleotide
  Antisense strand to SEQ ID NO: 660826
auuuggagaacccguacuc

SEQ ID NO: 660828 - RNA, 19 nt, Artificial Sequence
  Description of Artificial Sequence: Synthetic oligonucleotide
  Sense strand starting at position 2910 of SEQ ID NO: 585702
ccuacagaucucugagacu

SEQ ID NO: 660829 - RNA, 19 nt, Artificial Sequence
  Description of Artificial Sequence: Synthetic oligonucleotide
  Antisense strand to SEQ ID NO: 660828
agucucagagaucuguagg

SEQ ID NO: 660830 - RNA, 19 nt, Artificial Sequence
  Description of Artificial Sequence: Synthetic oligonucleotide
  Sense strand starting at position 2913 of SEQ ID NO: 585702
acagaucucugagacuaug

SEQ ID NO: 660831 - RNA, 19 nt, Artificial Sequence
  Description of Artificial Sequence: Synthetic oligonucleotide
  Antisense strand to SEQ ID NO: 660830
cauagucucagagaucugu

SEQ ID NO: 660832 - RNA, 19 nt, Artificial Sequence
  Description of Artificial Sequence: Synthetic oligonucleotide
  Sense strand starting at position 3641 of SEQ ID NO: 585702
gaagcuacaugauauguau

SEQ ID NO: 660833 - RNA, 19 nt, Artificial Sequence
  Description of Artificial Sequence: Synthetic oligonucleotide
  Antisense strand to SEQ ID NO: 660832
auacauaucauguagcuuc

SEQ ID NO: 660834 - RNA, 19 nt, Artificial Sequence
  Description of Artificial Sequence: Synthetic oligonucleotide
  Sense strand starting at position 3644 of SEQ ID NO: 585702
gcuacaugauauguauuga

SEQ ID NO: 660835 - RNA, 19 nt, Artificial Sequence
  Description of Artificial Sequence: Synthetic oligonucleotide
  Antisense strand to SEQ ID NO: 660834
ucaauacauaucauguagc

SEQ ID NO: 660836 - RNA, 19 nt, Artificial Sequence
  Description of Artificial Sequence: Synthetic oligonucleotide
  Sense strand starting at position 3666 of SEQ ID NO: 585702
caugguucccacgaugaau

SEQ ID NO: 660837 - RNA, 19 nt, Artificial Sequence
  Description of Artificial Sequence: Synthetic oligonucleotide
  Antisense strand to SEQ ID NO: 660836
auucaucgugggaaccaug

SEQ ID NO: 660838 - RNA, 19 nt, Artificial Sequence
  Description of Artificial Sequence: Synthetic oligonucleotide
  Sense strand starting at position 3684 of SEQ ID NO: 585702
uagaaugugugccuaugua

SEQ ID NO: 660839 - RNA, 19 nt, Artificial Sequence
  Description of Artificial Sequence: Synthetic oligonucleotide
  Antisense strand to SEQ ID NO: 660838
uacauaggcacacauucua

SEQ ID NO: 660840 - RNA, 19 nt, Artificial Sequence
  Description of Artificial Sequence: Synthetic oligonucleotide
  Sense strand starting at position 3694 of SEQ ID NO: 585702
gccuauguauucucguguu

SEQ ID NO: 660841 - RNA, 19 nt, Artificial Sequence
  Description of Artificial Sequence: Synthetic oligonucleotide
  Antisense strand to SEQ ID NO: 660840
aacacgagaauacauaggc

SEQ ID NO: 660842 - RNA, 19 nt, Artificial Sequence
  Description of Artificial Sequence: Synthetic oligonucleotide
  Sense strand starting at position 3734 of SEQ ID NO: 585702
guucuaguaccauaaauau

SEQ ID NO: 660843 - RNA, 19 nt, Artificial Sequence
  Description of Artificial Sequence: Synthetic oligonucleotide
  Antisense strand to SEQ ID NO: 660842
auauuuaugguacuagaac

SEQ ID NO: 660844 - RNA, 19 nt, Artificial Sequence
  Description of Artificial Sequence: Synthetic oligonucleotide
  Sense strand starting at position 3842 of SEQ ID NO: 585702
guccuagagcuccaagaag

SEQ ID NO: 660845 - RNA, 19 nt, Artificial Sequence
  Description of Artificial Sequence: Synthetic oligonucleotide
  Antisense strand to SEQ ID NO: 660844
cuucuuggagcucuaggac

SEQ ID NO: 660846 - RNA, 19 nt, Artificial Sequence
  Description of Artificial Sequence: Synthetic oligonucleotide
  Sense strand starting at position 3854 of SEQ ID NO: 585702
caagaaggugaaugccaua

SEQ ID NO: 660847 - RNA, 19 nt, Artificial Sequence
  Description of Artificial Sequence: Synthetic oligonucleotide
  Antisense strand to SEQ ID NO: 660846
uauggcauucaccuucuug

SEQ ID NO: 660848 - RNA, 19 nt, Artificial Sequence
  Description of Artificial Sequence: Synthetic oligonucleotide
  Sense strand starting at position 3857 of SEQ ID NO: 585702
gaaggugaaugccauaaga

SEQ ID NO: 660849 - RNA, 19 nt, Artificial Sequence
  Description of Artificial Sequence: Synthetic oligonucleotide
  Antisense strand to SEQ ID NO: 660848
ucuuauggcauucaccuuc

SEQ ID NO: 660850 - RNA, 19 nt, Artificial Sequence
  Description of Artificial Sequence: Synthetic oligonucleotide
  Sense strand starting at position 3866 of SEQ ID NO: 585702
ugccauaagauguguguuu

SEQ ID NO: 660851 - RNA, 19 nt, Artificial Sequence
  Description of Artificial Sequence: Synthetic oligonucleotide
  Antisense strand to SEQ ID NO: 660850
aaacacacaucuuauggca

SEQ ID NO: 660852 - RNA, 19 nt, Artificial Sequence
  Description of Artificial Sequence: Synthetic oligonucleotide
  Sense strand starting at position 102 of SEQ ID NO: 585703
auuagauaggagugcuaua

SEQ ID NO: 660853 - RNA, 19 nt, Artificial Sequence
  Description of Artificial Sequence: Synthetic oligonucleotide
  Antisense strand to SEQ ID NO: 660852
uauagcacuccuaucuaau

SEQ ID NO: 660854 - RNA, 19 nt, Artificial Sequence
  Description of Artificial Sequence: Synthetic oligonucleotide
  Sense strand starting at position 107 of SEQ ID NO: 585703
auaggagugcuauaaugca

SEQ ID NO: 660855 - RNA, 19 nt, Artificial Sequence
  Description of Artificial Sequence: Synthetic oligonucleotide
  Antisense strand to SEQ ID NO: 660854
ugcauuauagcacuccuau

SEQ ID NO: 660856 - RNA, 19 nt, Artificial Sequence
  Description of Artificial Sequence: Synthetic oligonucleotide
  Sense strand starting at position 123 of SEQ ID NO: 585703
gcauauuucuuggauaaua

SEQ ID NO: 660857 - RNA, 19 nt, Artificial Sequence
  Description of Artificial Sequence: Synthetic oligonucleotide
  Antisense strand to SEQ ID NO: 660856
uauuauccaagaaauaugc

SEQ ID NO: 660858 - RNA, 19 nt, Artificial Sequence
  Description of Artificial Sequence: Synthetic oligonucleotide
  Sense strand starting at position 196 of SEQ ID NO: 585703
guuugcaaauuauuucgua

SEQ ID NO: 660859 - RNA, 19 nt, Artificial Sequence
  Description of Artificial Sequence: Synthetic oligonucleotide
  Antisense strand to SEQ ID NO: 660858
uacgaaauaauuugcaaac

SEQ ID NO: 660860 - RNA, 19 nt, Artificial Sequence
  Description of Artificial Sequence: Synthetic oligonucleotide
  Sense strand starting at position 220 of SEQ ID NO: 585703
agcgucuggcaguugugaa

SEQ ID NO: 660861 - RNA, 19 nt, Artificial Sequence
  Description of Artificial Sequence: Synthetic oligonucleotide
  Antisense strand to SEQ ID NO: 660860
uucacaacugccagacgcu

SEQ ID NO: 660862 - RNA, 19 nt, Artificial Sequence
  Description of Artificial Sequence: Synthetic oligonucleotide
  Sense strand starting at position 377 of SEQ ID NO: 585703
agaacugcuuauucuagau

SEQ ID NO: 660863 - RNA, 19 nt, Artificial Sequence
  Description of Artificial Sequence: Synthetic oligonucleotide
  Antisense strand to SEQ ID NO: 660862
aucuagaauaagcaguucu

SEQ ID NO: 660864 - RNA, 19 nt, Artificial Sequence
  Description of Artificial Sequence: Synthetic oligonucleotide
  Sense strand starting at position 381 of SEQ ID NO: 585703
cugcuuauucuagauggga

SEQ ID NO: 660865 - RNA, 19 nt, Artificial Sequence
  Description of Artificial Sequence: Synthetic oligonucleotide
  Antisense strand to SEQ ID NO: 660864
ucccaucuagaauaagcag

SEQ ID NO: 660866 - RNA, 19 nt, Artificial Sequence
  Description of Artificial Sequence: Synthetic oligonucleotide
  Sense strand starting at position 383 of SEQ ID NO: 585703
gcuuauucuagaugggaac

SEQ ID NO: 660867 - RNA, 19 nt, Artificial Sequence
  Description of Artificial Sequence: Synthetic oligonucleotide
  Antisense strand to SEQ ID NO: 660866
guucccaucuagaauaagc

SEQ ID NO: 660868 - RNA, 19 nt, Artificial Sequence
  Description of Artificial Sequence: Synthetic oligonucleotide
  Sense strand starting at position 492 of SEQ ID NO: 585703
cucugaagagugugaaguu

SEQ ID NO: 660869 - RNA, 19 nt, Artificial Sequence
  Description of Artificial Sequence: Synthetic oligonucleotide
  Antisense strand to SEQ ID NO: 660868
aacuucacacucuucagag

SEQ ID NO: 660870 - RNA, 19 nt, Artificial Sequence
  Description of Artificial Sequence: Synthetic oligonucleotide
  Sense strand starting at position 501 of SEQ ID NO: 585703
gugugaaguucuccagaca

SEQ ID NO: 660871 - RNA, 19 nt, Artificial Sequence
  Description of Artificial Sequence: Synthetic oligonucleotide
  Antisense strand to SEQ ID NO: 660870
ugucuggagaacuucacac

SEQ ID NO: 660872 - RNA, 19 nt, Artificial Sequence
  Description of Artificial Sequence: Synthetic oligonucleotide
  Sense strand starting at position 502 of SEQ ID NO: 585703
ugugaaguucuccagacaa

SEQ ID NO: 660873 - RNA, 19 nt, Artificial Sequence
  Description of Artificial Sequence: Synthetic oligonucleotide
  Antisense strand to SEQ ID NO: 660872
uugucuggagaacuucaca

SEQ ID NO: 660874 - RNA, 19 nt, Artificial Sequence
  Description of Artificial Sequence: Synthetic oligonucleotide
  Sense strand starting at position 577 of SEQ ID NO: 585703
agaguuaugccaggagcca

SEQ ID NO: 660875 - RNA, 19 nt, Artificial Sequence
  Description of Artificial Sequence: Synthetic oligonucleotide
  Antisense strand to SEQ ID NO: 660874
uggcuccuggcauaacucu

SEQ ID NO: 660876 - RNA, 19 nt, Artificial Sequence
  Description of Artificial Sequence: Synthetic oligonucleotide
  Sense strand starting at position 871 of SEQ ID NO: 585703
cuaguccuccggcauuuau

SEQ ID NO: 660877 - RNA, 19 nt, Artificial Sequence
  Description of Artificial Sequence: Synthetic oligonucleotide
  Antisense strand to SEQ ID NO: 660876
auaaaugccggaggacuag

SEQ ID NO: 660878 - RNA, 19 nt, Artificial Sequence
  Description of Artificial Sequence: Synthetic oligonucleotide
  Sense strand starting at position 1005 of SEQ ID NO: 585703
cuaugauuccaucgaucac

SEQ ID NO: 660879 - RNA, 19 nt, Artificial Sequence
  Description of Artificial Sequence: Synthetic oligonucleotide
  Antisense strand to SEQ ID NO: 660878
gugaucgauggaaucauag

SEQ ID NO: 660880 - RNA, 19 nt, Artificial Sequence
  Description of Artificial Sequence: Synthetic oligonucleotide
  Sense strand starting at position 1012 of SEQ ID NO: 585703
uccaucgaucacggaaaga

SEQ ID NO: 660881 - RNA, 19 nt, Artificial Sequence
  Description of Artificial Sequence: Synthetic oligonucleotide
  Antisense strand to SEQ ID NO: 660880
ucuuuccgugaucgaugga

SEQ ID NO: 660882 - RNA, 19 nt, Artificial Sequence
  Description of Artificial Sequence: Synthetic oligonucleotide
  Sense strand starting at position 1381 of SEQ ID NO: 585703
aggugaucagucgauugga

SEQ ID NO: 660883 - RNA, 19 nt, Artificial Sequence
  Description of Artificial Sequence: Synthetic oligonucleotide
  Antisense strand to SEQ ID NO: 660882
uccaaucgacugaucaccu

SEQ ID NO: 660884 - RNA, 19 nt, Artificial Sequence
  Description of Artificial Sequence: Synthetic oligonucleotide
  Sense strand starting at position 1391 of SEQ ID NO: 585703
ucgauuggacacuguugau

SEQ ID NO: 660885 - RNA, 19 nt, Artificial Sequence
  Description of Artificial Sequence: Synthetic oligonucleotide
  Antisense strand to SEQ ID NO: 660884
aucaacaguguccaaucga

SEQ ID NO: 660886 - RNA, 19 nt, Artificial Sequence
  Description of Artificial Sequence: Synthetic oligonucleotide
  Sense strand starting at position 2303 of SEQ ID NO: 585703
cccggagucccgagagcuu

SEQ ID NO: 660887 - RNA, 19 nt, Artificial Sequence
  Description of Artificial Sequence: Synthetic oligonucleotide
  Antisense strand to SEQ ID NO: 660886
aagcucucgggacuccggg

SEQ ID NO: 660888 - RNA, 19 nt, Artificial Sequence
  Description of Artificial Sequence: Synthetic oligonucleotide
  Sense strand starting at position 2315 of SEQ ID NO: 585703
agagcuucccugggugaca

SEQ ID NO: 660889 - RNA, 19 nt, Artificial Sequence
  Description of Artificial Sequence: Synthetic oligonucleotide
  Antisense strand to SEQ ID NO: 660888
ugucacccagggaagcucu

SEQ ID NO: 660890 - RNA, 19 nt, Artificial Sequence
  Description of Artificial Sequence: Synthetic oligonucleotide
  Sense strand starting at position 2486 of SEQ ID NO: 585703
gguucaaggaagugugaag

SEQ ID NO: 660891 - RNA, 19 nt, Artificial Sequence
  Description of Artificial Sequence: Synthetic oligonucleotide
  Antisense strand to SEQ ID NO: 660890
cuucacacuuccuugaacc

SEQ ID NO: 660892 - RNA, 19 nt, Artificial Sequence
  Description of Artificial Sequence: Synthetic oligonucleotide
  Sense strand starting at position 2498 of SEQ ID NO: 585703
ugugaaguuaagcaaguuu

SEQ ID NO: 660893 - RNA, 19 nt, Artificial Sequence
  Description of Artificial Sequence: Synthetic oligonucleotide
  Antisense strand to SEQ ID NO: 660892
aaacuugcuuaacuucaca

SEQ ID NO: 660894 - RNA, 19 nt, Artificial Sequence
  Description of Artificial Sequence: Synthetic oligonucleotide
  Sense strand starting at position 2765 of SEQ ID NO: 585703
aguuaccaggucugauaau

SEQ ID NO: 660895 - RNA, 19 nt, Artificial Sequence
  Description of Artificial Sequence: Synthetic oligonucleotide
  Antisense strand to SEQ ID NO: 660894
auuaucagaccugguaacu

SEQ ID NO: 660896 - RNA, 19 nt, Artificial Sequence
  Description of Artificial Sequence: Synthetic oligonucleotide
  Sense strand starting at position 2781 of SEQ ID NO: 585703
aaucguucugugcccaagu

SEQ ID NO: 660897 - RNA, 19 nt, Artificial Sequence
  Description of Artificial Sequence: Synthetic oligonucleotide
  Antisense strand to SEQ ID NO: 660896
acuugggcacagaacgauu

SEQ ID NO: 660898 - RNA, 19 nt, Artificial Sequence
  Description of Artificial Sequence: Synthetic oligonucleotide
  Sense strand starting at position 2857 of SEQ ID NO: 585703
uugcaucuccaaugauuag

SEQ ID NO: 660899 - RNA, 19 nt, Artificial Sequence
  Description of Artificial Sequence: Synthetic oligonucleotide
  Antisense strand to SEQ ID NO: 660898
cuaaucauuggagaugcaa

SEQ ID NO: 660900 - RNA, 19 nt, Artificial Sequence
  Description of Artificial Sequence: Synthetic oligonucleotide
  Sense strand starting at position 2881 of SEQ ID NO: 585703
aguguuugugcggaggaag

SEQ ID NO: 660901 - RNA, 19 nt, Artificial Sequence
  Description of Artificial Sequence: Synthetic oligonucleotide
  Antisense strand to SEQ ID NO: 660900
cuuccuccgcacaaacacu

SEQ ID NO: 660902 - RNA, 19 nt, Artificial Sequence
  Description of Artificial Sequence: Synthetic oligonucleotide
  Sense strand starting at position 2882 of SEQ ID NO: 585703
guguuugugcggaggaagu

SEQ ID NO: 660903 - RNA, 19 nt, Artificial Sequence
  Description of Artificial Sequence: Synthetic oligonucleotide
  Antisense strand to SEQ ID NO: 660902
acuuccuccgcacaaacac

SEQ ID NO: 660904 - RNA, 19 nt, Artificial Sequence
  Description of Artificial Sequence: Synthetic oligonucleotide
  Sense strand starting at position 2950 of SEQ ID NO: 585703
ggaguuccugcaggaguga

SEQ ID NO: 660905 - RNA, 19 nt, Artificial Sequence
  Description of Artificial Sequence: Synthetic oligonucleotide
  Antisense strand to SEQ ID NO: 660904
ucacuccugcaggaacucc

SEQ ID NO: 660906 - RNA, 19 nt, Artificial Sequence
  Description of Artificial Sequence: Synthetic oligonucleotide
  Sense strand starting at position 3048 of SEQ ID NO: 585703
uaagcaagcguuguguuau

SEQ ID NO: 660907 - RNA, 19 nt, Artificial Sequence
  Description of Artificial Sequence: Synthetic oligonucleotide
  Antisense strand to SEQ ID NO: 660906
auaacacaacgcuugcuua

SEQ ID NO: 660908 - RNA, 19 nt, Artificial Sequence
  Description of Artificial Sequence: Synthetic oligonucleotide
  Sense strand starting at position 3110 of SEQ ID NO: 585703
acggguacuuggguuaaau

SEQ ID NO: 660909 - RNA, 19 nt, Artificial Sequence
  Description of Artificial Sequence: Synthetic oligonucleotide
  Antisense strand to SEQ ID NO: 660908
auuuaacccaaguacccgu

SEQ ID NO: 660910 - RNA, 19 nt, Artificial Sequence
  Description of Artificial Sequence: Synthetic oligonucleotide
  Sense strand starting at position 3112 of SEQ ID NO: 585703
ggguacuuggguuaaauau

SEQ ID NO: 660911 - RNA, 19 nt, Artificial Sequence
  Description of Artificial Sequence: Synthetic oligonucleotide
  Antisense strand to SEQ ID NO: 660910
auauuuaacccaaguaccc

SEQ ID NO: 660912 - RNA, 19 nt, Artificial Sequence
  Description of Artificial Sequence: Synthetic oligonucleotide
  Sense strand starting at position 3157 of SEQ ID NO: 585703
cauggcuuugaguacuagu

SEQ ID NO: 660913 - RNA, 19 nt, Artificial Sequence
  Description of Artificial Sequence: Synthetic oligonucleotide
  Antisense strand to SEQ ID NO: 660912
acuaguacucaaagccaug

SEQ ID NO: 660914 - RNA, 19 nt, Artificial Sequence
  Description of Artificial Sequence: Synthetic oligonucleotide
  Sense strand starting at position 3212 of SEQ ID NO: 585703
agaaguauuugucuuuguc

SEQ ID NO: 660915 - RNA, 19 nt, Artificial Sequence
  Description of Artificial Sequence: Synthetic oligonucleotide
  Antisense strand to SEQ ID NO: 660914
gacaaagacaaauacuucu

SEQ ID NO: 660916 - RNA, 19 nt, Artificial Sequence
  Description of Artificial Sequence: Synthetic oligonucleotide
  Sense strand starting at position 3322 of SEQ ID NO: 585703
gaucaagauguaggcagau

SEQ ID NO: 660917 - RNA, 19 nt, Artificial Sequence
  Description of Artificial Sequence: Synthetic oligonucleotide
  Antisense strand to SEQ ID NO: 660916
aucugccuacaucuugauc

SEQ ID NO: 660918 - RNA, 19 nt, Artificial Sequence
  Description of Artificial Sequence: Synthetic oligonucleotide
  Sense strand starting at position 3521 of SEQ ID NO: 585703
caucaucuugaggguuaga

SEQ ID NO: 660919 - RNA, 19 nt, Artificial Sequence
  Description of Artificial Sequence: Synthetic oligonucleotide
  Antisense strand to SEQ ID NO: 660918
ucuaacccucaagaugaug

SEQ ID NO: 660920 - RNA, 19 nt, Artificial Sequence
  Description of Artificial Sequence: Synthetic oligonucleotide
  Sense strand starting at position 3531 of SEQ ID NO: 585703
aggguuagaaugcgaacau

SEQ ID NO: 660921 - RNA, 19 nt, Artificial Sequence
  Description of Artificial Sequence: Synthetic oligonucleotide
  Antisense strand to SEQ ID NO: 660920
auguucgcauucuaacccu

SEQ ID NO: 660922 - RNA, 19 nt, Artificial Sequence
  Description of Artificial Sequence: Synthetic oligonucleotide
  Sense strand starting at position 3577 of SEQ ID NO: 585703
aguccacugcaguauugau

SEQ ID NO: 660923 - RNA, 19 nt, Artificial Sequence
  Description of Artificial Sequence: Synthetic oligonucleotide
  Antisense strand to SEQ ID NO: 660922
aucaauacugcaguggacu

SEQ ID NO: 660924 - RNA, 19 nt, Artificial Sequence
  Description of Artificial Sequence: Synthetic oligonucleotide
  Sense strand starting at position 3632 of SEQ ID NO: 585703
ugauuugagcagcguugaa

SEQ ID NO: 660925 - RNA, 19 nt, Artificial Sequence
  Description of Artificial Sequence: Synthetic oligonucleotide
  Antisense strand to SEQ ID NO: 660924
uucaacgcugcucaaauca

SEQ ID NO: 660926 - RNA, 19 nt, Artificial Sequence
  Description of Artificial Sequence: Synthetic oligonucleotide
  Sense strand starting at position 3644 of SEQ ID NO: 585703
cguugaauccuauauaacu

SEQ ID NO: 660927 - RNA, 19 nt, Artificial Sequence
  Description of Artificial Sequence: Synthetic oligonucleotide
  Antisense strand to SEQ ID NO: 660926
aguuauauaggauucaacg

SEQ ID NO: 660928 - RNA, 19 nt, Artificial Sequence
  Description of Artificial Sequence: Synthetic oligonucleotide
  Sense strand starting at position 3815 of SEQ ID NO: 585703
uucguauucguuguucaca

SEQ ID NO: 660929 - RNA, 19 nt, Artificial Sequence
  Description of Artificial Sequence: Synthetic oligonucleotide
  Antisense strand to SEQ ID NO: 660928
ugugaacaacgaauacgaa

SEQ ID NO: 660930 - RNA, 19 nt, Artificial Sequence
  Description of Artificial Sequence: Synthetic oligonucleotide
  Sense strand starting at position 3857 of SEQ ID NO: 585703
uuauuaucaugguuaacag

SEQ ID NO: 660931 - RNA, 19 nt, Artificial Sequence
  Description of Artificial Sequence: Synthetic oligonucleotide
  Antisense strand to SEQ ID NO: 660930
cuguuaaccaugauaauaa

SEQ ID NO: 660932 - RNA, 19 nt, Artificial Sequence
  Description of Artificial Sequence: Synthetic oligonucleotide
  Sense strand starting at position 273 of SEQ ID NO: 585704
aaaugaccauguuuaguga

SEQ ID NO: 660933 - RNA, 19 nt, Artificial Sequence
  Description of Artificial Sequence: Synthetic oligonucleotide
  Antisense strand to SEQ ID NO: 660932
ucacuaaacauggucauuu

SEQ ID NO: 660934 - RNA, 19 nt, Artificial Sequence
  Description of Artificial Sequence: Synthetic oligonucleotide
  Sense strand starting at position 276 of SEQ ID NO: 585704
ugaccauguuuagugacuu

SEQ ID NO: 660935 - RNA, 19 nt, Artificial Sequence
  Description of Artificial Sequence: Synthetic oligonucleotide
  Antisense strand to SEQ ID NO: 660934
aagucacuaaacaugguca

SEQ ID NO: 660936 - RNA, 19 nt, Artificial Sequence
  Description of Artificial Sequence: Synthetic oligonucleotide
  Sense strand starting at position 483 of SEQ ID NO: 585704
uguuuacaaguguaucaga

SEQ ID NO: 660937 - RNA, 19 nt, Artificial Sequence
  Description of Artificial Sequence: Synthetic oligonucleotide
  Antisense strand to SEQ ID NO: 660936
ucugauacacuuguaaaca

SEQ ID NO: 660938 - RNA, 19 nt, Artificial Sequence
  Description of Artificial Sequence: Synthetic oligonucleotide
  Sense strand starting at position 490 of SEQ ID NO: 585704
aaguguaucagauagugga

SEQ ID NO: 660939 - RNA, 19 nt, Artificial Sequence
  Description of Artificial Sequence: Synthetic oligonucleotide
  Antisense strand to SEQ ID NO: 660938
uccacuaucugauacacuu

SEQ ID NO: 660940 - RNA, 19 nt, Artificial Sequence
  Description of Artificial Sequence: Synthetic oligonucleotide
  Sense strand starting at position 565 of SEQ ID NO: 585704
augcuuagugcuuaauaaa

SEQ ID NO: 660941 - RNA, 19 nt, Artificial Sequence
  Description of Artificial Sequence: Synthetic oligonucleotide
  Antisense strand to SEQ ID NO: 660940
uuuauuaagcacuaagcau

SEQ ID NO: 660942 - RNA, 19 nt, Artificial Sequence
  Description of Artificial Sequence: Synthetic oligonucleotide
  Sense strand starting at position 713 of SEQ ID NO: 585704
acaucuaugcaguguaaag

SEQ ID NO: 660943 - RNA, 19 nt, Artificial Sequence
  Description of Artificial Sequence: Synthetic oligonucleotide
  Antisense strand to SEQ ID NO: 660942
cuuuacacugcauagaugu

SEQ ID NO: 660944 - RNA, 19 nt, Artificial Sequence
  Description of Artificial Sequence: Synthetic oligonucleotide
  Sense strand starting at position 820 of SEQ ID NO: 585704
gcaacucuaggccauuauu

SEQ ID NO: 660945 - RNA, 19 nt, Artificial Sequence
  Description of Artificial Sequence: Synthetic oligonucleotide
  Antisense strand to SEQ ID NO: 660944
aauaauggccuagaguugc

SEQ ID NO: 660946 - RNA, 19 nt, Artificial Sequence
  Description of Artificial Sequence: Synthetic oligonucleotide
  Sense strand starting at position 926 of SEQ ID NO: 585704
agacauaugcuaugaagua

SEQ ID NO: 660947 - RNA, 19 nt, Artificial Sequence
  Description of Artificial Sequence: Synthetic oligonucleotide
  Antisense strand to SEQ ID NO: 660946
uacuucauagcauaugucu

SEQ ID NO: 660948 - RNA, 19 nt, Artificial Sequence
  Description of Artificial Sequence: Synthetic oligonucleotide
  Sense strand starting at position 1376 of SEQ ID NO: 585704
aggguucccuucuuauaac

SEQ ID NO: 660949 - RNA, 19 nt, Artificial Sequence
  Description of Artificial Sequence: Synthetic oligonucleotide
  Antisense strand to SEQ ID NO: 660948
guuauaagaagggaacccu

SEQ ID NO: 660950 - RNA, 19 nt, Artificial Sequence
  Description of Artificial Sequence: Synthetic oligonucleotide
  Sense strand starting at position 1687 of SEQ ID NO: 585704
caaagagcucaaggguuua

SEQ ID NO: 660951 - RNA, 19 nt, Artificial Sequence
  Description of Artificial Sequence: Synthetic oligonucleotide
  Antisense strand to SEQ ID NO: 660950
uaaacccuugagcucuuug

SEQ ID NO: 660952 - RNA, 19 nt, Artificial Sequence
  Description of Artificial Sequence: Synthetic oligonucleotide
  Sense strand starting at position 1692 of SEQ ID NO: 585704
agcucaaggguuuauagua

SEQ ID NO: 660953 - RNA, 19 nt, Artificial Sequence
  Description of Artificial Sequence: Synthetic oligonucleotide
  Antisense strand to SEQ ID NO: 660952
uacuauaaacccuugagcu

SEQ ID NO: 660954 - RNA, 19 nt, Artificial Sequence
  Description of Artificial Sequence: Synthetic oligonucleotide
  Sense strand starting at position 1770 of SEQ ID NO: 585704
uugccuacucacgaggaua

SEQ ID NO: 660955 - RNA, 19 nt, Artificial Sequence
  Description of Artificial Sequence: Synthetic oligonucleotide
  Antisense strand to SEQ ID NO: 660954
uauccucgugaguaggcaa

SEQ ID NO: 660956 - RNA, 19 nt, Artificial Sequence
  Description of Artificial Sequence: Synthetic oligonucleotide
  Sense strand starting at position 1772 of SEQ ID NO: 585704
gccuacucacgaggauaua

SEQ ID NO: 660957 - RNA, 19 nt, Artificial Sequence
  Description of Artificial Sequence: Synthetic oligonucleotide
  Antisense strand to SEQ ID NO: 660956
uauauccucgugaguaggc

SEQ ID NO: 660958 - RNA, 19 nt, Artificial Sequence
  Description of Artificial Sequence: Synthetic oligonucleotide
  Sense strand starting at position 1905 of SEQ ID NO: 585704
ggacuauagccaugagagg

SEQ ID NO: 660959 - RNA, 19 nt, Artificial Sequence
  Description of Artificial Sequence: Synthetic oligonucleotide
  Antisense strand to SEQ ID NO: 660958
ccucucauggcuauagucc

SEQ ID NO: 660960 - RNA, 19 nt, Artificial Sequence
  Description of Artificial Sequence: Synthetic oligonucleotide
  Sense strand starting at position 1924 of SEQ ID NO: 585704
gaaugugaaccucauguuu

SEQ ID NO: 660961 - RNA, 19 nt, Artificial Sequence
  Description of Artificial Sequence: Synthetic oligonucleotide
  Antisense strand to SEQ ID NO: 660960
aaacaugagguucacauuc

SEQ ID NO: 660962 - RNA, 19 nt, Artificial Sequence
  Description of Artificial Sequence: Synthetic oligonucleotide
  Sense strand starting at position 2018 of SEQ ID NO: 585704
guggaauuugacugcaugu

SEQ ID NO: 660963 - RNA, 19 nt, Artificial Sequence
  Description of Artificial Sequence: Synthetic oligonucleotide
  Antisense strand to SEQ ID NO: 660962
acaugcagucaaauuccac

SEQ ID NO: 660964 - RNA, 19 nt, Artificial Sequence
  Description of Artificial Sequence: Synthetic oligonucleotide
  Sense strand starting at position 2136 of SEQ ID NO: 585704
guucuaaauguugaucuga

SEQ ID NO: 660965 - RNA, 19 nt, Artificial Sequence
  Description of Artificial Sequence: Synthetic oligonucleotide
  Antisense strand to SEQ ID NO: 660964
ucagaucaacauuuagaac

SEQ ID NO: 660966 - RNA, 19 nt, Artificial Sequence
  Description of Artificial Sequence: Synthetic oligonucleotide
  Sense strand starting at position 2138 of SEQ ID NO: 585704
ucuaaauguugaucugaag

SEQ ID NO: 660967 - RNA, 19 nt, Artificial Sequence
  Description of Artificial Sequence: Synthetic oligonucleotide
  Antisense strand to SEQ ID NO: 660966
cuucagaucaacauuuaga

SEQ ID NO: 660968 - RNA, 19 nt, Artificial Sequence
  Description of Artificial Sequence: Synthetic oligonucleotide
  Sense strand starting at position 2160 of SEQ ID NO: 585704
augcaaugaaauugugaga

SEQ ID NO: 660969 - RNA, 19 nt, Artificial Sequence
  Description of Artificial Sequence: Synthetic oligonucleotide
  Antisense strand to SEQ ID NO: 660968
ucucacaauuucauugcau

SEQ ID NO: 660970 - RNA, 19 nt, Artificial Sequence
  Description of Artificial Sequence: Synthetic oligonucleotide
  Sense strand starting at position 2254 of SEQ ID NO: 585704
gggcuuauuguauaccaaa

SEQ ID NO: 660971 - RNA, 19 nt, Artificial Sequence
  Description of Artificial Sequence: Synthetic oligonucleotide
  Antisense strand to SEQ ID NO: 660970
uuugguauacaauaagccc

SEQ ID NO: 660972 - RNA, 19 nt, Artificial Sequence
  Description of Artificial Sequence: Synthetic oligonucleotide
  Sense strand starting at position 2285 of SEQ ID NO: 585704
cuuuguagaaggcaugaau

SEQ ID NO: 660973 - RNA, 19 nt, Artificial Sequence
  Description of Artificial Sequence: Synthetic oligonucleotide
  Antisense strand to SEQ ID NO: 660972
auucaugccuucuacaaag

SEQ ID NO: 660974 - RNA, 19 nt, Artificial Sequence
  Description of Artificial Sequence: Synthetic oligonucleotide
  Sense strand starting at position 2316 of SEQ ID NO: 585704
auauaauuggucuguuaac

SEQ ID NO: 660975 - RNA, 19 nt, Artificial Sequence
  Description of Artificial Sequence: Synthetic oligonucleotide
  Antisense strand to SEQ ID NO: 660974
guuaacagaccaauuauau

SEQ ID NO: 660976 - RNA, 19 nt, Artificial Sequence
  Description of Artificial Sequence: Synthetic oligonucleotide
  Sense strand starting at position 2326 of SEQ ID NO: 585704
ucuguuaacuucuugagaa

SEQ ID NO: 660977 - RNA, 19 nt, Artificial Sequence
  Description of Artificial Sequence: Synthetic oligonucleotide
  Antisense strand to SEQ ID NO: 660976
uucucaagaaguuaacaga

SEQ ID NO: 660978 - RNA, 19 nt, Artificial Sequence
  Description of Artificial Sequence: Synthetic oligonucleotide
  Sense strand starting at position 2464 of SEQ ID NO: 585704
gccuuaggccaagaacauu

SEQ ID NO: 660979 - RNA, 19 nt, Artificial Sequence
  Description of Artificial Sequence: Synthetic oligonucleotide
  Antisense strand to SEQ ID NO: 660978
aauguucuuggccuaaggc

SEQ ID NO: 660980 - RNA, 19 nt, Artificial Sequence
  Description of Artificial Sequence: Synthetic oligonucleotide
  Sense strand starting at position 2470 of SEQ ID NO: 585704
ggccaagaacauuagcaua

SEQ ID NO: 660981 - RNA, 19 nt, Artificial Sequence
  Description of Artificial Sequence: Synthetic oligonucleotide
  Antisense strand to SEQ ID NO: 660980
uaugcuaauguucuuggcc

SEQ ID NO: 660982 - RNA, 19 nt, Artificial Sequence
  Description of Artificial Sequence: Synthetic oligonucleotide
  Sense strand starting at position 2593 of SEQ ID NO: 585704
acggcaaucagucaagcaa

SEQ ID NO: 660983 - RNA, 19 nt, Artificial Sequence
  Description of Artificial Sequence: Synthetic oligonucleotide
  Antisense strand to SEQ ID NO: 660982
uugcuugacugauugccgu

SEQ ID NO: 660984 - RNA, 19 nt, Artificial Sequence
  Description of Artificial Sequence: Synthetic oligonucleotide
  Sense strand starting at position 2655 of SEQ ID NO: 585704
gagauaauguugucaugga

SEQ ID NO: 660985 - RNA, 19 nt, Artificial Sequence
  Description of Artificial Sequence: Synthetic oligonucleotide
  Antisense strand to SEQ ID NO: 660984
uccaugacaacauuaucuc

SEQ ID NO: 660986 - RNA, 19 nt, Artificial Sequence
  Description of Artificial Sequence: Synthetic oligonucleotide
  Sense strand starting at position 2916 of SEQ ID NO: 585704
cuuauagauagucaagugu

SEQ ID NO: 660987 - RNA, 19 nt, Artificial Sequence
  Description of Artificial Sequence: Synthetic oligonucleotide
  Antisense strand to SEQ ID NO: 660986
acacuugacuaucuauaag

SEQ ID NO: 660988 - RNA, 19 nt, Artificial Sequence
  Description of Artificial Sequence: Synthetic oligonucleotide
  Sense strand starting at position 2931 of SEQ ID NO: 585704
guguaaauaagaugcuaag

SEQ ID NO: 660989 - RNA, 19 nt, Artificial Sequence
  Description of Artificial Sequence: Synthetic oligonucleotide
  Antisense strand to SEQ ID NO: 660988
cuuagcaucuuauuuacac

SEQ ID NO: 660990 - RNA, 19 nt, Artificial Sequence
  Description of Artificial Sequence: Synthetic oligonucleotide
  Sense strand starting at position 2974 of SEQ ID NO: 585704
gaggaauucuugucuccuc

SEQ ID NO: 660991 - RNA, 19 nt, Artificial Sequence
  Description of Artificial Sequence: Synthetic oligonucleotide
  Antisense strand to SEQ ID NO: 660990
gaggagacaagaauuccuc

SEQ ID NO: 660992 - RNA, 19 nt, Artificial Sequence
  Description of Artificial Sequence: Synthetic oligonucleotide
  Sense strand starting at position 2998 of SEQ ID NO: 585704
aauuguucucauggcagaa

SEQ ID NO: 660993 - RNA, 19 nt, Artificial Sequence
  Description of Artificial Sequence: Synthetic oligonucleotide
  Antisense strand to SEQ ID NO: 660992
uucugccaugagaacaauu

SEQ ID NO: 660994 - RNA, 19 nt, Artificial Sequence
  Description of Artificial Sequence: Synthetic oligonucleotide
  Sense strand starting at position 3002 of SEQ ID NO: 585704
guucucauggcagaauaaa

SEQ ID NO: 660995 - RNA, 19 nt, Artificial Sequence
  Description of Artificial Sequence: Synthetic oligonucleotide
  Antisense strand to SEQ ID NO: 660994
uuuauucugccaugagaac

SEQ ID NO: 660996 - RNA, 19 nt, Artificial Sequence
  Description of Artificial Sequence: Synthetic oligonucleotide
  Sense strand starting at position 3222 of SEQ ID NO: 585704
aggacuaagugauauuuga

SEQ ID NO: 660997 - RNA, 19 nt, Artificial Sequence
  Description of Artificial Sequence: Synthetic oligonucleotide
  Antisense strand to SEQ ID NO: 660996
ucaaauaucacuuaguccu

SEQ ID NO: 660998 - RNA, 19 nt, Artificial Sequence
  Description of Artificial Sequence: Synthetic oligonucleotide
  Sense strand starting at position 3275 of SEQ ID NO: 585704
cuauuuccauuauucguua

SEQ ID NO: 660999 - RNA, 19 nt, Artificial Sequence
  Description of Artificial Sequence: Synthetic oligonucleotide
  Antisense strand to SEQ ID NO: 660998
uaacgaauaauggaaauag

SEQ ID NO: 661000 - RNA, 19 nt, Artificial Sequence
  Description of Artificial Sequence: Synthetic oligonucleotide
  Sense strand starting at position 3581 of SEQ ID NO: 585704
ucucuuucucugggacauu

SEQ ID NO: 661001 - RNA, 19 nt, Artificial Sequence
  Description of Artificial Sequence: Synthetic oligonucleotide
  Antisense strand to SEQ ID NO: 661000
aaugucccagagaaagaga

SEQ ID NO: 661002 - RNA, 19 nt, Artificial Sequence
  Description of Artificial Sequence: Synthetic oligonucleotide
  Sense strand starting at position 3662 of SEQ ID NO: 585704
ggacuaugccagcacuuga

SEQ ID NO: 661003 - RNA, 19 nt, Artificial Sequence
  Description of Artificial Sequence: Synthetic oligonucleotide
  Antisense strand to SEQ ID NO: 661002
ucaagugcuggcauagucc

SEQ ID NO: 661004 - RNA, 19 nt, Artificial Sequence
  Description of Artificial Sequence: Synthetic oligonucleotide
  Sense strand starting at position 3719 of SEQ ID NO: 585704
ccuuauucugaauguagac

SEQ ID NO: 661005 - RNA, 19 nt, Artificial Sequence
  Description of Artificial Sequence: Synthetic oligonucleotide
  Antisense strand to SEQ ID NO: 661004
gucuacauucagaauaagg

SEQ ID NO: 661006 - RNA, 19 nt, Artificial Sequence
  Description of Artificial Sequence: Synthetic oligonucleotide
  Sense strand starting at position 3762 of SEQ ID NO: 585704
gucuaccaucugggaaauu

SEQ ID NO: 661007 - RNA, 19 nt, Artificial Sequence
  Description of Artificial Sequence: Synthetic oligonucleotide
  Antisense strand to SEQ ID NO: 661006
aauuucccagaugguagac

SEQ ID NO: 661008 - RNA, 19 nt, Artificial Sequence
  Description of Artificial Sequence: Synthetic oligonucleotide
  Sense strand starting at position 3810 of SEQ ID NO: 585704
uucucuuuguaacuggaaa

SEQ ID NO: 661009 - RNA, 19 nt, Artificial Sequence
  Description of Artificial Sequence: Synthetic oligonucleotide
  Antisense strand to SEQ ID NO: 661008
uuuccaguuacaaagagaa

SEQ ID NO: 661010 - RNA, 19 nt, Artificial Sequence
  Description of Artificial Sequence: Synthetic oligonucleotide
  Sense strand starting at position 3940 of SEQ ID NO: 585704
ccagguuuccacuauuauc

SEQ ID NO: 661011 - RNA, 19 nt, Artificial Sequence
  Description of Artificial Sequence: Synthetic oligonucleotide
  Antisense strand to SEQ ID NO: 661010
gauaauaguggaaaccugg

SEQ ID NO: 661012 - RNA, 19 nt, Artificial Sequence
  Description of Artificial Sequence: Synthetic oligonucleotide
  Sense strand starting at position 223 of SEQ ID NO: 585705
ucuuguuuauuauccagua

SEQ ID NO: 661013 - RNA, 19 nt, Artificial Sequence
  Description of Artificial Sequence: Synthetic oligonucleotide
  Antisense strand to SEQ ID NO: 661012
uacuggauaauaaacaaga

SEQ ID NO: 661014 - RNA, 19 nt, Artificial Sequence
  Description of Artificial Sequence: Synthetic oligonucleotide
  Sense strand starting at position 224 of SEQ ID NO: 585705
cuuguuuauuauccaguau

SEQ ID NO: 661015 - RNA, 19 nt, Artificial Sequence
  Description of Artificial Sequence: Synthetic oligonucleotide
  Antisense strand to SEQ ID NO: 661014
auacuggauaauaaacaag

SEQ ID NO: 661016 - RNA, 19 nt, Artificial Sequence
  Description of Artificial Sequence: Synthetic oligonucleotide
  Sense strand starting at position 349 of SEQ ID NO: 585705
cccaaagugccuugauaua

SEQ ID NO: 661017 - RNA, 19 nt, Artificial Sequence
  Description of Artificial Sequence: Synthetic oligonucleotide
  Antisense strand to SEQ ID NO: 661016
uauaucaaggcacuuuggg

SEQ ID NO: 661018 - RNA, 19 nt, Artificial Sequence
  Description of Artificial Sequence: Synthetic oligonucleotide
  Sense strand starting at position 470 of SEQ ID NO: 585705
accaaacccuguuuggauu

SEQ ID NO: 661019 - RNA, 19 nt, Artificial Sequence
  Description of Artificial Sequence: Synthetic oligonucleotide
  Antisense strand to SEQ ID NO: 661018
aauccaaacaggguuuggu

SEQ ID NO: 661020 - RNA, 19 nt, Artificial Sequence
  Description of Artificial Sequence: Synthetic oligonucleotide
  Sense strand starting at position 529 of SEQ ID NO: 585705
cccuguuugguuuauuaag

SEQ ID NO: 661021 - RNA, 19 nt, Artificial Sequence
  Description of Artificial Sequence: Synthetic oligonucleotide
  Antisense strand to SEQ ID NO: 661020
cuuaauaaaccaaacaggg

SEQ ID NO: 661022 - RNA, 19 nt, Artificial Sequence
  Description of Artificial Sequence: Synthetic oligonucleotide
  Sense strand starting at position 876 of SEQ ID NO: 585705
auccuucuucuggguuaua

SEQ ID NO: 661023 - RNA, 19 nt, Artificial Sequence
  Description of Artificial Sequence: Synthetic oligonucleotide
  Antisense strand to SEQ ID NO: 661022
uauaacccagaagaaggau

SEQ ID NO: 661024 - RNA, 19 nt, Artificial Sequence
  Description of Artificial Sequence: Synthetic oligonucleotide
  Sense strand starting at position 877 of SEQ ID NO: 585705
uccuucuucuggguuauau

SEQ ID NO: 661025 - RNA, 19 nt, Artificial Sequence
  Description of Artificial Sequence: Synthetic oligonucleotide
  Antisense strand to SEQ ID NO: 661024
auauaacccagaagaagga

SEQ ID NO: 661026 - RNA, 19 nt, Artificial Sequence
  Description of Artificial Sequence: Synthetic oligonucleotide
  Sense strand starting at position 879 of SEQ ID NO: 585705
cuucuucuggguuauauau

SEQ ID NO: 661027 - RNA, 19 nt, Artificial Sequence
  Description of Artificial Sequence: Synthetic oligonucleotide
  Antisense strand to SEQ ID NO: 661026
auauauaacccagaagaag

SEQ ID NO: 661028 - RNA, 19 nt, Artificial Sequence
  Description of Artificial Sequence: Synthetic oligonucleotide
  Sense strand starting at position 905 of SEQ ID NO: 585705
ccucauacuuaguugugau

SEQ ID NO: 661029 - RNA, 19 nt, Artificial Sequence
  Description of Artificial Sequence: Synthetic oligonucleotide
  Antisense strand to SEQ ID NO: 661028
aucacaacuaaguaugagg

SEQ ID NO: 661030 - RNA, 19 nt, Artificial Sequence
  Description of Artificial Sequence: Synthetic oligonucleotide
  Sense strand starting at position 952 of SEQ ID NO: 585705
ugauuucccuugggagaga

SEQ ID NO: 661031 - RNA, 19 nt, Artificial Sequence
  Description of Artificial Sequence: Synthetic oligonucleotide
  Antisense strand to SEQ ID NO: 661030
ucucucccaagggaaauca

SEQ ID NO: 661032 - RNA, 19 nt, Artificial Sequence
  Description of Artificial Sequence: Synthetic oligonucleotide
  Sense strand starting at position 953 of SEQ ID NO: 585705
gauuucccuugggagagaa

SEQ ID NO: 661033 - RNA, 19 nt, Artificial Sequence
  Description of Artificial Sequence: Synthetic oligonucleotide
  Antisense strand to SEQ ID NO: 661032
uucucucccaagggaaauc

SEQ ID NO: 661034 - RNA, 19 nt, Artificial Sequence
  Description of Artificial Sequence: Synthetic oligonucleotide
  Sense strand starting at position 1019 of SEQ ID NO: 585705
uccauuugaccuugugcua

SEQ ID NO: 661035 - RNA, 19 nt, Artificial Sequence
  Description of Artificial Sequence: Synthetic oligonucleotide
  Antisense strand to SEQ ID NO: 661034
uagcacaaggucaaaugga

SEQ ID NO: 661036 - RNA, 19 nt, Artificial Sequence
  Description of Artificial Sequence: Synthetic oligonucleotide
  Sense strand starting at position 1079 of SEQ ID NO: 585705
guacuuucgcaagaaccca

SEQ ID NO: 661037 - RNA, 19 nt, Artificial Sequence
  Description of Artificial Sequence: Synthetic oligonucleotide
  Antisense strand to SEQ ID NO: 661036
uggguucuugcgaaaguac

SEQ ID NO: 661038 - RNA, 19 nt, Artificial Sequence
  Description of Artificial Sequence: Synthetic oligonucleotide
  Sense strand starting at position 1181 of SEQ ID NO: 585705
uuucucauucuuuguauga

SEQ ID NO: 661039 - RNA, 19 nt, Artificial Sequence
  Description of Artificial Sequence: Synthetic oligonucleotide
  Antisense strand to SEQ ID NO: 661038
ucauacaaagaaugagaaa

SEQ ID NO: 661040 - RNA, 19 nt, Artificial Sequence
  Description of Artificial Sequence: Synthetic oligonucleotide
  Sense strand starting at position 1185 of SEQ ID NO: 585705
ucauucuuuguaugagaua

SEQ ID NO: 661041 - RNA, 19 nt, Artificial Sequence
  Description of Artificial Sequence: Synthetic oligonucleotide
  Antisense strand to SEQ ID NO: 661040
uaucucauacaaagaauga

SEQ ID NO: 661042 - RNA, 19 nt, Artificial Sequence
  Description of Artificial Sequence: Synthetic oligonucleotide
  Sense strand starting at position 1200 of SEQ ID NO: 585705
gauaguaaagcauggaaca

SEQ ID NO: 661043 - RNA, 19 nt, Artificial Sequence
  Description of Artificial Sequence: Synthetic oligonucleotide
  Antisense strand to SEQ ID NO: 661042
uguuccaugcuuuacuauc

SEQ ID NO: 661044 - RNA, 19 nt, Artificial Sequence
  Description of Artificial Sequence: Synthetic oligonucleotide
  Sense strand starting at position 1305 of SEQ ID NO: 585705
ucaaaucucccuugaugug

SEQ ID NO: 661045 - RNA, 19 nt, Artificial Sequence
  Description of Artificial Sequence: Synthetic oligonucleotide
  Antisense strand to SEQ ID NO: 661044
cacaucaagggagauuuga

SEQ ID NO: 661046 - RNA, 19 nt, Artificial Sequence
  Description of Artificial Sequence: Synthetic oligonucleotide
  Sense strand starting at position 1314 of SEQ ID NO: 585705
ccuugauguggcuauuaca

SEQ ID NO: 661047 - RNA, 19 nt, Artificial Sequence
  Description of Artificial Sequence: Synthetic oligonucleotide
  Antisense strand to SEQ ID NO: 661046
uguaauagccacaucaagg

SEQ ID NO: 661048 - RNA, 19 nt, Artificial Sequence
  Description of Artificial Sequence: Synthetic oligonucleotide
  Sense strand starting at position 1321 of SEQ ID NO: 585705
guggcuauuacacaggaau

SEQ ID NO: 661049 - RNA, 19 nt, Artificial Sequence
  Description of Artificial Sequence: Synthetic oligonucleotide
  Antisense strand to SEQ ID NO: 661048
auuccuguguaauagccac

SEQ ID NO: 661050 - RNA, 19 nt, Artificial Sequence
  Description of Artificial Sequence: Synthetic oligonucleotide
  Sense strand starting at position 1426 of SEQ ID NO: 585705
uaaaguugguaacuggaaa

SEQ ID NO: 661051 - RNA, 19 nt, Artificial Sequence
  Description of Artificial Sequence: Synthetic oligonucleotide
  Antisense strand to SEQ ID NO: 661050
uuuccaguuaccaacuuua

SEQ ID NO: 661052 - RNA, 19 nt, Artificial Sequence
  Description of Artificial Sequence: Synthetic oligonucleotide
  Sense strand starting at position 1566 of SEQ ID NO: 585705
ggauuaccauuaucuauug

SEQ ID NO: 661053 - RNA, 19 nt, Artificial Sequence
  Description of Artificial Sequence: Synthetic oligonucleotide
  Antisense strand to SEQ ID NO: 661052
caauagauaaugguaaucc

SEQ ID NO: 661054 - RNA, 19 nt, Artificial Sequence
  Description of Artificial Sequence: Synthetic oligonucleotide
  Sense strand starting at position 2063 of SEQ ID NO: 585705
agcucucugccagaugaca

SEQ ID NO: 661055 - RNA, 19 nt, Artificial Sequence
  Description of Artificial Sequence: Synthetic oligonucleotide
  Antisense strand to SEQ ID NO: 661054
ugucaucuggcagagagcu

SEQ ID NO: 661056 - RNA, 19 nt, Artificial Sequence
  Description of Artificial Sequence: Synthetic oligonucleotide
  Sense strand starting at position 2137 of SEQ ID NO: 585705
guccuuugucgugcuguga

SEQ ID NO: 661057 - RNA, 19 nt, Artificial Sequence
  Description of Artificial Sequence: Synthetic oligonucleotide
  Antisense strand to SEQ ID NO: 661056
ucacagcacgacaaaggac

SEQ ID NO: 661058 - RNA, 19 nt, Artificial Sequence
  Description of Artificial Sequence: Synthetic oligonucleotide
  Sense strand starting at position 2150 of SEQ ID NO: 585705
cugugagcuuauuugugga

SEQ ID NO: 661059 - RNA, 19 nt, Artificial Sequence
  Description of Artificial Sequence: Synthetic oligonucleotide
  Antisense strand to SEQ ID NO: 661058
uccacaaauaagcucacag

SEQ ID NO: 661060 - RNA, 19 nt, Artificial Sequence
  Description of Artificial Sequence: Synthetic oligonucleotide
  Sense strand starting at position 2203 of SEQ ID NO: 585705
uggccauuggcccauagaa

SEQ ID NO: 661061 - RNA, 19 nt, Artificial Sequence
  Description of Artificial Sequence: Synthetic oligonucleotide
  Antisense strand to SEQ ID NO: 661060
uucuaugggccaauggcca

SEQ ID NO: 661062 - RNA, 19 nt, Artificial Sequence
  Description of Artificial Sequence: Synthetic oligonucleotide
  Sense strand starting at position 2205 of SEQ ID NO: 585705
gccauuggcccauagaaug

SEQ ID NO: 661063 - RNA, 19 nt, Artificial Sequence
  Description of Artificial Sequence: Synthetic oligonucleotide
  Antisense strand to SEQ ID NO: 661062
cauucuaugggccaauggc

SEQ ID NO: 661064 - RNA, 19 nt, Artificial Sequence
  Description of Artificial Sequence: Synthetic oligonucleotide
  Sense strand starting at position 2496 of SEQ ID NO: 585705
uuccuauuauaugugacau

SEQ ID NO: 661065 - RNA, 19 nt, Artificial Sequence
  Description of Artificial Sequence: Synthetic oligonucleotide
  Antisense strand to SEQ ID NO: 661064
augucacauauaauaggaa

SEQ ID NO: 661066 - RNA, 19 nt, Artificial Sequence
  Description of Artificial Sequence: Synthetic oligonucleotide
  Sense strand starting at position 2569 of SEQ ID NO: 585705
ugagaugcauauuccuaau

SEQ ID NO: 661067 - RNA, 19 nt, Artificial Sequence
  Description of Artificial Sequence: Synthetic oligonucleotide
  Antisense strand to SEQ ID NO: 661066
auuaggaauaugcaucuca

SEQ ID NO: 661068 - RNA, 19 nt, Artificial Sequence
  Description of Artificial Sequence: Synthetic oligonucleotide
  Sense strand starting at position 2812 of SEQ ID NO: 585705
aaaugaaucugagagguaa

SEQ ID NO: 661069 - RNA, 19 nt, Artificial Sequence
  Description of Artificial Sequence: Synthetic oligonucleotide
  Antisense strand to SEQ ID NO: 661068
uuaccucucagauucauuu

SEQ ID NO: 661070 - RNA, 19 nt, Artificial Sequence
  Description of Artificial Sequence: Synthetic oligonucleotide
  Sense strand starting at position 2897 of SEQ ID NO: 585705
cugguuuauccuggaaaug

SEQ ID NO: 661071 - RNA, 19 nt, Artificial Sequence
  Description of Artificial Sequence: Synthetic oligonucleotide
  Antisense strand to SEQ ID NO: 661070
cauuuccaggauaaaccag

SEQ ID NO: 661072 - RNA, 19 nt, Artificial Sequence
  Description of Artificial Sequence: Synthetic oligonucleotide
  Sense strand starting at position 3153 of SEQ ID NO: 585705
cuacaaguauccuuugaag

SEQ ID NO: 661073 - RNA, 19 nt, Artificial Sequence
  Description of Artificial Sequence: Synthetic oligonucleotide
  Antisense strand to SEQ ID NO: 661072
cuucaaaggauacuuguag

SEQ ID NO: 661074 - RNA, 19 nt, Artificial Sequence
  Description of Artificial Sequence: Synthetic oligonucleotide
  Sense strand starting at position 3155 of SEQ ID NO: 585705
acaaguauccuuugaagua

SEQ ID NO: 661075 - RNA, 19 nt, Artificial Sequence
  Description of Artificial Sequence: Synthetic oligonucleotide
  Antisense strand to SEQ ID NO: 661074
uacuucaaaggauacuugu

SEQ ID NO: 661076 - RNA, 19 nt, Artificial Sequence
  Description of Artificial Sequence: Synthetic oligonucleotide
  Sense strand starting at position 3215 of SEQ ID NO: 585705
cagcguauuaaggacagua

SEQ ID NO: 661077 - RNA, 19 nt, Artificial Sequence
  Description of Artificial Sequence: Synthetic oligonucleotide
  Antisense strand to SEQ ID NO: 661076
uacuguccuuaauacgcug

SEQ ID NO: 661078 - RNA, 19 nt, Artificial Sequence
  Description of Artificial Sequence: Synthetic oligonucleotide
  Sense strand starting at position 3217 of SEQ ID NO: 585705
gcguauuaaggacaguacu

SEQ ID NO: 661079 - RNA, 19 nt, Artificial Sequence
  Description of Artificial Sequence: Synthetic oligonucleotide
  Antisense strand to SEQ ID NO: 661078
aguacuguccuuaauacgc

SEQ ID NO: 661080 - RNA, 19 nt, Artificial Sequence
  Description of Artificial Sequence: Synthetic oligonucleotide
  Sense strand starting at position 3488 of SEQ ID NO: 585705
gaagacugcccagguagaa

SEQ ID NO: 661081 - RNA, 19 nt, Artificial Sequence
  Description of Artificial Sequence: Synthetic oligonucleotide
  Antisense strand to SEQ ID NO: 661080
uucuaccugggcagucuuc

SEQ ID NO: 661082 - RNA, 19 nt, Artificial Sequence
  Description of Artificial Sequence: Synthetic oligonucleotide
  Sense strand starting at position 3522 of SEQ ID NO: 585705
ugaguuuacuggcuaacuc

SEQ ID NO: 661083 - RNA, 19 nt, Artificial Sequence
  Description of Artificial Sequence: Synthetic oligonucleotide
  Antisense strand to SEQ ID NO: 661082
gaguuagccaguaaacuca

SEQ ID NO: 661084 - RNA, 19 nt, Artificial Sequence
  Description of Artificial Sequence: Synthetic oligonucleotide
  Sense strand starting at position 3523 of SEQ ID NO: 585705
gaguuuacuggcuaacucu

SEQ ID NO: 661085 - RNA, 19 nt, Artificial Sequence
  Description of Artificial Sequence: Synthetic oligonucleotide
  Antisense strand to SEQ ID NO: 661084
agaguuagccaguaaacuc

SEQ ID NO: 661086 - RNA, 19 nt, Artificial Sequence
  Description of Artificial Sequence: Synthetic oligonucleotide
  Sense strand starting at position 3566 of SEQ ID NO: 585705
auuaauguauuggcacuua

SEQ ID NO: 661087 - RNA, 19 nt, Artificial Sequence
  Description of Artificial Sequence: Synthetic oligonucleotide
  Antisense strand to SEQ ID NO: 661086
uaagugccaauacauuaau

SEQ ID NO: 661088 - RNA, 19 nt, Artificial Sequence
  Description of Artificial Sequence: Synthetic oligonucleotide
  Sense strand starting at position 3692 of SEQ ID NO: 585705
cuuuacaaccaguaguaga

SEQ ID NO: 661089 - RNA, 19 nt, Artificial Sequence
  Description of Artificial Sequence: Synthetic oligonucleotide
  Antisense strand to SEQ ID NO: 661088
ucuacuacugguuguaaag

SEQ ID NO: 661090 - RNA, 19 nt, Artificial Sequence
  Description of Artificial Sequence: Synthetic oligonucleotide
  Sense strand starting at position 3756 of SEQ ID NO: 585705
cacgauaccuccucugaga

SEQ ID NO: 661091 - RNA, 19 nt, Artificial Sequence
  Description of Artificial Sequence: Synthetic oligonucleotide
  Antisense strand to SEQ ID NO: 661090
ucucagaggagguaucgug

SEQ ID NO: 661092 - RNA, 19 nt, Artificial Sequence
  Description of Artificial Sequence: Synthetic oligonucleotide
  Sense strand starting at position 461 of SEQ ID NO: 585706
uugccauuccuacagagaa

SEQ ID NO: 661093 - RNA, 19 nt, Artificial Sequence
  Description of Artificial Sequence: Synthetic oligonucleotide
  Antisense strand to SEQ ID NO: 661092
uucucuguaggaauggcaa

SEQ ID NO: 661094 - RNA, 19 nt, Artificial Sequence
  Description of Artificial Sequence: Synthetic oligonucleotide
  Sense strand starting at position 654 of SEQ ID NO: 585706
cccuuuaguccacagcuua

SEQ ID NO: 661095 - RNA, 19 nt, Artificial Sequence
  Description of Artificial Sequence: Synthetic oligonucleotide
  Antisense strand to SEQ ID NO: 661094
uaagcuguggacuaaaggg

SEQ ID NO: 661096 - RNA, 19 nt, Artificial Sequence
  Description of Artificial Sequence: Synthetic oligonucleotide
  Sense strand starting at position 688 of SEQ ID NO: 585706
caggcauuuccacgaaugu

SEQ ID NO: 661097 - RNA, 19 nt, Artificial Sequence
  Description of Artificial Sequence: Synthetic oligonucleotide
  Antisense strand to SEQ ID NO: 661096
acauucguggaaaugccug

SEQ ID NO: 661098 - RNA, 19 nt, Artificial Sequence
  Description of Artificial Sequence: Synthetic oligonucleotide
  Sense strand starting at position 697 of SEQ ID NO: 585706
ccacgaauguguucuauaa

SEQ ID NO: 661099 - RNA, 19 nt, Artificial Sequence
  Description of Artificial Sequence: Synthetic oligonucleotide
  Antisense strand to SEQ ID NO: 661098
uuauagaacacauucgugg

SEQ ID NO: 661100 - RNA, 19 nt, Artificial Sequence
  Description of Artificial Sequence: Synthetic oligonucleotide
  Sense strand starting at position 701 of SEQ ID NO: 585706
gaauguguucuauaaucag

SEQ ID NO: 661101 - RNA, 19 nt, Artificial Sequence
  Description of Artificial Sequence: Synthetic oligonucleotide
  Antisense strand to SEQ ID NO: 661100
cugauuauagaacacauuc

SEQ ID NO: 661102 - RNA, 19 nt, Artificial Sequence
  Description of Artificial Sequence: Synthetic oligonucleotide
  Sense strand starting at position 815 of SEQ ID NO: 585706
agauuaagcucugacauuu

SEQ ID NO: 661103 - RNA, 19 nt, Artificial Sequence
  Description of Artificial Sequence: Synthetic oligonucleotide
  Antisense strand to SEQ ID NO: 661102
aaaugucagagcuuaaucu

SEQ ID NO: 661104 - RNA, 19 nt, Artificial Sequence
  Description of Artificial Sequence: Synthetic oligonucleotide
  Sense strand starting at position 875 of SEQ ID NO: 585706
uuugauccaucagagaaga

SEQ ID NO: 661105 - RNA, 19 nt, Artificial Sequence
  Description of Artificial Sequence: Synthetic oligonucleotide
  Antisense strand to SEQ ID NO: 661104
ucuucucugauggaucaaa

SEQ ID NO: 661106 - RNA, 19 nt, Artificial Sequence
  Description of Artificial Sequence: Synthetic oligonucleotide
  Sense strand starting at position 1719 of SEQ ID NO: 585706
ucuuguucccacugacacu

SEQ ID NO: 661107 - RNA, 19 nt, Artificial Sequence
  Description of Artificial Sequence: Synthetic oligonucleotide
  Antisense strand to SEQ ID NO: 661106
agugucagugggaacaaga

SEQ ID NO: 661108 - RNA, 19 nt, Artificial Sequence
  Description of Artificial Sequence: Synthetic oligonucleotide
  Sense strand starting at position 1753 of SEQ ID NO: 585706
ggauuaagaugacaagguu

SEQ ID NO: 661109 - RNA, 19 nt, Artificial Sequence
  Description of Artificial Sequence: Synthetic oligonucleotide
  Antisense strand to SEQ ID NO: 661108
aaccuugucaucuuaaucc

SEQ ID NO: 661110 - RNA, 19 nt, Artificial Sequence
  Description of Artificial Sequence: Synthetic oligonucleotide
  Sense strand starting at position 1771 of SEQ ID NO: 585706
ugagcagaugccugucaga

SEQ ID NO: 661111 - RNA, 19 nt, Artificial Sequence
  Description of Artificial Sequence: Synthetic oligonucleotide
  Antisense strand to SEQ ID NO: 661110
ucugacaggcaucugcuca

SEQ ID NO: 661112 - RNA, 19 nt, Artificial Sequence
  Description of Artificial Sequence: Synthetic oligonucleotide
  Sense strand starting at position 2088 of SEQ ID NO: 585706
aggagaagguggcucguau

SEQ ID NO: 661113 - RNA, 19 nt, Artificial Sequence
  Description of Artificial Sequence: Synthetic oligonucleotide
  Antisense strand to SEQ ID NO: 661112
auacgagccaccuucuccu

SEQ ID NO: 661114 - RNA, 19 nt, Artificial Sequence
  Description of Artificial Sequence: Synthetic oligonucleotide
  Sense strand starting at position 2095 of SEQ ID NO: 585706
gguggcucguauuucugau

SEQ ID NO: 661115 - RNA, 19 nt, Artificial Sequence
  Description of Artificial Sequence: Synthetic oligonucleotide
  Antisense strand to SEQ ID NO: 661114
aucagaaauacgagccacc

SEQ ID NO: 661116 - RNA, 19 nt, Artificial Sequence
  Description of Artificial Sequence: Synthetic oligonucleotide
  Sense strand starting at position 2097 of SEQ ID NO: 585706
uggcucguauuucugauau

SEQ ID NO: 661117 - RNA, 19 nt, Artificial Sequence
  Description of Artificial Sequence: Synthetic oligonucleotide
  Antisense strand to SEQ ID NO: 661116
auaucagaaauacgagcca

SEQ ID NO: 661118 - RNA, 19 nt, Artificial Sequence
  Description of Artificial Sequence: Synthetic oligonucleotide
  Sense strand starting at position 2099 of SEQ ID NO: 585706
gcucguauuucugauauuu

SEQ ID NO: 661119 - RNA, 19 nt, Artificial Sequence
  Description of Artificial Sequence: Synthetic oligonucleotide
  Antisense strand to SEQ ID NO: 661118
aaauaucagaaauacgagc

SEQ ID NO: 661120 - RNA, 19 nt, Artificial Sequence
  Description of Artificial Sequence: Synthetic oligonucleotide
  Sense strand starting at position 2379 of SEQ ID NO: 585706
ucuaaucaucuagggauua

SEQ ID NO: 661121 - RNA, 19 nt, Artificial Sequence
  Description of Artificial Sequence: Synthetic oligonucleotide
  Antisense strand to SEQ ID NO: 661120
uaaucccuagaugauuaga

SEQ ID NO: 661122 - RNA, 19 nt, Artificial Sequence
  Description of Artificial Sequence: Synthetic oligonucleotide
  Sense strand starting at position 2505 of SEQ ID NO: 585706
uggugcuguguuuacuuaa

SEQ ID NO: 661123 - RNA, 19 nt, Artificial Sequence
  Description of Artificial Sequence: Synthetic oligonucleotide
  Antisense strand to SEQ ID NO: 661122
uuaaguaaacacagcacca

SEQ ID NO: 661124 - RNA, 19 nt, Artificial Sequence
  Description of Artificial Sequence: Synthetic oligonucleotide
  Sense strand starting at position 2508 of SEQ ID NO: 585706
ugcuguguuuacuuaaauu

SEQ ID NO: 661125 - RNA, 19 nt, Artificial Sequence
  Description of Artificial Sequence: Synthetic oligonucleotide
  Antisense strand to SEQ ID NO: 661124
aauuuaaguaaacacagca

SEQ ID NO: 661126 - RNA, 19 nt, Artificial Sequence
  Description of Artificial Sequence: Synthetic oligonucleotide
  Sense strand starting at position 2577 of SEQ ID NO: 585706
agccauggaucaucucauu

SEQ ID NO: 661127 - RNA, 19 nt, Artificial Sequence
  Description of Artificial Sequence: Synthetic oligonucleotide
  Antisense strand to SEQ ID NO: 661126
aaugagaugauccauggcu

SEQ ID NO: 661128 - RNA, 19 nt, Artificial Sequence
  Description of Artificial Sequence: Synthetic oligonucleotide
  Sense strand starting at position 2665 of SEQ ID NO: 585706
gaacauauuuacggucuca

SEQ ID NO: 661129 - RNA, 19 nt, Artificial Sequence
  Description of Artificial Sequence: Synthetic oligonucleotide
  Antisense strand to SEQ ID NO: 661128
ugagaccguaaauauguuc

SEQ ID NO: 661130 - RNA, 19 nt, Artificial Sequence
  Description of Artificial Sequence: Synthetic oligonucleotide
  Sense strand starting at position 2684 of SEQ ID NO: 585706
cucagaaucuguuugcuuu

SEQ ID NO: 661131 - RNA, 19 nt, Artificial Sequence
  Description of Artificial Sequence: Synthetic oligonucleotide
  Antisense strand to SEQ ID NO: 661130
aaagcaaacagauucugag

SEQ ID NO: 661132 - RNA, 19 nt, Artificial Sequence
  Description of Artificial Sequence: Synthetic oligonucleotide
  Sense strand starting at position 2936 of SEQ ID NO: 585706
gcccgaaguccaugauuua

SEQ ID NO: 661133 - RNA, 19 nt, Artificial Sequence
  Description of Artificial Sequence: Synthetic oligonucleotide
  Antisense strand to SEQ ID NO: 661132
uaaaucauggacuucgggc

SEQ ID NO: 661134 - RNA, 19 nt, Artificial Sequence
  Description of Artificial Sequence: Synthetic oligonucleotide
  Sense strand starting at position 2943 of SEQ ID NO: 585706
guccaugauuuauaaguag

SEQ ID NO: 661135 - RNA, 19 nt, Artificial Sequence
  Description of Artificial Sequence: Synthetic oligonucleotide
  Antisense strand to SEQ ID NO: 661134
cuacuuauaaaucauggac

SEQ ID NO: 661136 - RNA, 19 nt, Artificial Sequence
  Description of Artificial Sequence: Synthetic oligonucleotide
  Sense strand starting at position 2950 of SEQ ID NO: 585706
auuuauaaguagcagaguu

SEQ ID NO: 661137 - RNA, 19 nt, Artificial Sequence
  Description of Artificial Sequence: Synthetic oligonucleotide
  Antisense strand to SEQ ID NO: 661136
aacucugcuacuuauaaau

SEQ ID NO: 661138 - RNA, 19 nt, Artificial Sequence
  Description of Artificial Sequence: Synthetic oligonucleotide
  Sense strand starting at position 3030 of SEQ ID NO: 585706
guaguuaggaguuacugca

SEQ ID NO: 661139 - RNA, 19 nt, Artificial Sequence
  Description of Artificial Sequence: Synthetic oligonucleotide
  Antisense strand to SEQ ID NO: 661138
ugcaguaacuccuaacuac

SEQ ID NO: 661140 - RNA, 19 nt, Artificial Sequence
  Description of Artificial Sequence: Synthetic oligonucleotide
  Sense strand starting at position 3087 of SEQ ID NO: 585706
ugugaaaguacucgugacu

SEQ ID NO: 661141 - RNA, 19 nt, Artificial Sequence
  Description of Artificial Sequence: Synthetic oligonucleotide
  Antisense strand to SEQ ID NO: 661140
agucacgaguacuuucaca

SEQ ID NO: 661142 - RNA, 19 nt, Artificial Sequence
  Description of Artificial Sequence: Synthetic oligonucleotide
  Sense strand starting at position 3090 of SEQ ID NO: 585706
gaaaguacucgugacuugu

SEQ ID NO: 661143 - RNA, 19 nt, Artificial Sequence
  Description of Artificial Sequence: Synthetic oligonucleotide
  Antisense strand to SEQ ID NO: 661142
acaagucacgaguacuuuc

SEQ ID NO: 661144 - RNA, 19 nt, Artificial Sequence
  Description of Artificial Sequence: Synthetic oligonucleotide
  Sense strand starting at position 3094 of SEQ ID NO: 585706
guacucgugacuuguugga

SEQ ID NO: 661145 - RNA, 19 nt, Artificial Sequence
  Description of Artificial Sequence: Synthetic oligonucleotide
  Antisense strand to SEQ ID NO: 661144
uccaacaagucacgaguac

SEQ ID NO: 661146 - RNA, 19 nt, Artificial Sequence
  Description of Artificial Sequence: Synthetic oligonucleotide
  Sense strand starting at position 3197 of SEQ ID NO: 585706
gaagucuuauacuugcuga

SEQ ID NO: 661147 - RNA, 19 nt, Artificial Sequence
  Description of Artificial Sequence: Synthetic oligonucleotide
  Antisense strand to SEQ ID NO: 661146
ucagcaaguauaagacuuc

SEQ ID NO: 661148 - RNA, 19 nt, Artificial Sequence
  Description of Artificial Sequence: Synthetic oligonucleotide
  Sense strand starting at position 3200 of SEQ ID NO: 585706
gucuuauacuugcugaacu

SEQ ID NO: 661149 - RNA, 19 nt, Artificial Sequence
  Description of Artificial Sequence: Synthetic oligonucleotide
  Antisense strand to SEQ ID NO: 661148
aguucagcaaguauaagac

SEQ ID NO: 661150 - RNA, 19 nt, Artificial Sequence
  Description of Artificial Sequence: Synthetic oligonucleotide
  Sense strand starting at position 3221 of SEQ ID NO: 585706
aguugcuuccauuaugaua

SEQ ID NO: 661151 - RNA, 19 nt, Artificial Sequence
  Description of Artificial Sequence: Synthetic oligonucleotide
  Antisense strand to SEQ ID NO: 661150
uaucauaauggaagcaacu

SEQ ID NO: 661152 - RNA, 19 nt, Artificial Sequence
  Description of Artificial Sequence: Synthetic oligonucleotide
  Sense strand starting at position 3261 of SEQ ID NO: 585706
gauggcauggucuagagau

SEQ ID NO: 661153 - RNA, 19 nt, Artificial Sequence
  Description of Artificial Sequence: Synthetic oligonucleotide
  Antisense strand to SEQ ID NO: 661152
aucucuagaccaugccauc

SEQ ID NO: 661154 - RNA, 19 nt, Artificial Sequence
  Description of Artificial Sequence: Synthetic oligonucleotide
  Sense strand starting at position 3263 of SEQ ID NO: 585706
uggcauggucuagagauag

SEQ ID NO: 661155 - RNA, 19 nt, Artificial Sequence
  Description of Artificial Sequence: Synthetic oligonucleotide
  Antisense strand to SEQ ID NO: 661154
cuaucucuagaccaugcca

SEQ ID NO: 661156 - RNA, 19 nt, Artificial Sequence
  Description of Artificial Sequence: Synthetic oligonucleotide
  Sense strand starting at position 3365 of SEQ ID NO: 585706
gguugaaaucgcuaccaua

SEQ ID NO: 661157 - RNA, 19 nt, Artificial Sequence
  Description of Artificial Sequence: Synthetic oligonucleotide
  Antisense strand to SEQ ID NO: 661156
uaugguagcgauuucaacc

SEQ ID NO: 661158 - RNA, 19 nt, Artificial Sequence
  Description of Artificial Sequence: Synthetic oligonucleotide
  Sense strand starting at position 3386 of SEQ ID NO: 585706
auguucuuugacuagaauu

SEQ ID NO: 661159 - RNA, 19 nt, Artificial Sequence
  Description of Artificial Sequence: Synthetic oligonucleotide
  Antisense strand to SEQ ID NO: 661158
aauucuagucaaagaacau

SEQ ID NO: 661160 - RNA, 19 nt, Artificial Sequence
  Description of Artificial Sequence: Synthetic oligonucleotide
  Sense strand starting at position 3396 of SEQ ID NO: 585706
acuagaauuuaagaaugca

SEQ ID NO: 661161 - RNA, 19 nt, Artificial Sequence
  Description of Artificial Sequence: Synthetic oligonucleotide
  Antisense strand to SEQ ID NO: 661160
ugcauucuuaaauucuagu

SEQ ID NO: 661162 - RNA, 19 nt, Artificial Sequence
  Description of Artificial Sequence: Synthetic oligonucleotide
  Sense strand starting at position 3779 of SEQ ID NO: 585706
acugcaugugucuauuguu

SEQ ID NO: 661163 - RNA, 19 nt, Artificial Sequence
  Description of Artificial Sequence: Synthetic oligonucleotide
  Antisense strand to SEQ ID NO: 661162
aacaauagacacaugcagu

SEQ ID NO: 661164 - RNA, 19 nt, Artificial Sequence
  Description of Artificial Sequence: Synthetic oligonucleotide
  Sense strand starting at position 3854 of SEQ ID NO: 585706
ucuuguuuauuauccagua

SEQ ID NO: 661165 - RNA, 19 nt, Artificial Sequence
  Description of Artificial Sequence: Synthetic oligonucleotide
  Antisense strand to SEQ ID NO: 661164
uacuggauaauaaacaaga

SEQ ID NO: 661166 - RNA, 19 nt, Artificial Sequence
  Description of Artificial Sequence: Synthetic oligonucleotide
  Sense strand starting at position 3855 of SEQ ID NO: 585706
cuuguuuauuauccaguau

SEQ ID NO: 661167 - RNA, 19 nt, Artificial Sequence
  Description of Artificial Sequence: Synthetic oligonucleotide
  Antisense strand to SEQ ID NO: 661166
auacuggauaauaaacaag

SEQ ID NO: 661168 - RNA, 19 nt, Artificial Sequence
  Description of Artificial Sequence: Synthetic oligonucleotide
  Sense strand starting at position 3961 of SEQ ID NO: 585706
guauaauuaccgugaguuc

SEQ ID NO: 661169 - RNA, 19 nt, Artificial Sequence
  Description of Artificial Sequence: Synthetic oligonucleotide
  Antisense strand to SEQ ID NO: 661168
gaacucacgguaauuauac

SEQ ID NO: 661170 - RNA, 19 nt, Artificial Sequence
  Description of Artificial Sequence: Synthetic oligonucleotide
  Sense strand starting at position 3980 of SEQ ID NO: 585706
cccaaagugccuugauaua

SEQ ID NO: 661171 - RNA, 19 nt, Artificial Sequence
  Description of Artificial Sequence: Synthetic oligonucleotide
  Antisense strand to SEQ ID NO: 661170
uauaucaaggcacuuuggg

SEQ ID NO: 661172 - RNA, 19 nt, Artificial Sequence
  Description of Artificial Sequence: Synthetic oligonucleotide
  Sense strand starting at position 3 of SEQ ID NO: 585707
gucucucauguacauauau

SEQ ID NO: 661173 - RNA, 19 nt, Artificial Sequence
  Description of Artificial Sequence: Synthetic oligonucleotide
  Antisense strand to SEQ ID NO: 661172
auauauguacaugagagac

SEQ ID NO: 661174 - RNA, 19 nt, Artificial Sequence
  Description of Artificial Sequence: Synthetic oligonucleotide
  Sense strand starting at position 14 of SEQ ID NO: 585707
acauauaucugggaacaug

SEQ ID NO: 661175 - RNA, 19 nt, Artificial Sequence
  Description of Artificial Sequence: Synthetic oligonucleotide
  Antisense strand to SEQ ID NO: 661174
cauguucccagauauaugu

SEQ ID NO: 661176 - RNA, 19 nt, Artificial Sequence
  Description of Artificial Sequence: Synthetic oligonucleotide
  Sense strand starting at position 58 of SEQ ID NO: 585707
ucauaauggugggugucua

SEQ ID NO: 661177 - RNA, 19 nt, Artificial Sequence
  Description of Artificial Sequence: Synthetic oligonucleotide
  Antisense strand to SEQ ID NO: 661176
uagacacccaccauuauga

SEQ ID NO: 661178 - RNA, 19 nt, Artificial Sequence
  Description of Artificial Sequence: Synthetic oligonucleotide
  Sense strand starting at position 62 of SEQ ID NO: 585707
aauggugggugucuacuau

SEQ ID NO: 661179 - RNA, 19 nt, Artificial Sequence
  Description of Artificial Sequence: Synthetic oligonucleotide
  Antisense strand to SEQ ID NO: 661178
auaguagacacccaccauu

SEQ ID NO: 661180 - RNA, 19 nt, Artificial Sequence
  Description of Artificial Sequence: Synthetic oligonucleotide
  Sense strand starting at position 72 of SEQ ID NO: 585707
gucuacuauuaagaagaaa

SEQ ID NO: 661181 - RNA, 19 nt, Artificial Sequence
  Description of Artificial Sequence: Synthetic oligonucleotide
  Antisense strand to SEQ ID NO: 661180
uuucuucuuaauaguagac

SEQ ID NO: 661182 - RNA, 19 nt, Artificial Sequence
  Description of Artificial Sequence: Synthetic oligonucleotide
  Sense strand starting at position 779 of SEQ ID NO: 585707
uugccauuccuacagagaa

SEQ ID NO: 661183 - RNA, 19 nt, Artificial Sequence
  Description of Artificial Sequence: Synthetic oligonucleotide
  Antisense strand to SEQ ID NO: 661182
uucucuguaggaauggcaa

SEQ ID NO: 661184 - RNA, 19 nt, Artificial Sequence
  Description of Artificial Sequence: Synthetic oligonucleotide
  Sense strand starting at position 972 of SEQ ID NO: 585707
cccuuuaguccacagcuua

SEQ ID NO: 661185 - RNA, 19 nt, Artificial Sequence
  Description of Artificial Sequence: Synthetic oligonucleotide
  Antisense strand to SEQ ID NO: 661184
uaagcuguggacuaaaggg

SEQ ID NO: 661186 - RNA, 19 nt, Artificial Sequence
  Description of Artificial Sequence: Synthetic oligonucleotide
  Sense strand starting at position 1006 of SEQ ID NO: 585707
caggcauuuccacgaaugu

SEQ ID NO: 661187 - RNA, 19 nt, Artificial Sequence
  Description of Artificial Sequence: Synthetic oligonucleotide
  Antisense strand to SEQ ID NO: 661186
acauucguggaaaugccug

SEQ ID NO: 661188 - RNA, 19 nt, Artificial Sequence
  Description of Artificial Sequence: Synthetic oligonucleotide
  Sense strand starting at position 1015 of SEQ ID NO: 585707
ccacgaauguguucuauaa

SEQ ID NO: 661189 - RNA, 19 nt, Artificial Sequence
  Description of Artificial Sequence: Synthetic oligonucleotide
  Antisense strand to SEQ ID NO: 661188
uuauagaacacauucgugg

SEQ ID NO: 661190 - RNA, 19 nt, Artificial Sequence
  Description of Artificial Sequence: Synthetic oligonucleotide
  Sense strand starting at position 1019 of SEQ ID NO: 585707
gaauguguucuauaaucag

SEQ ID NO: 661191 - RNA, 19 nt, Artificial Sequence
  Description of Artificial Sequence: Synthetic oligonucleotide
  Antisense strand to SEQ ID NO: 661190
cugauuauagaacacauuc

SEQ ID NO: 661192 - RNA, 19 nt, Artificial Sequence
  Description of Artificial Sequence: Synthetic oligonucleotide
  Sense strand starting at position 1133 of SEQ ID NO: 585707
agauuaagcucugacauuu

SEQ ID NO: 661193 - RNA, 19 nt, Artificial Sequence
  Description of Artificial Sequence: Synthetic oligonucleotide
  Antisense strand to SEQ ID NO: 661192
aaaugucagagcuuaaucu

SEQ ID NO: 661194 - RNA, 19 nt, Artificial Sequence
  Description of Artificial Sequence: Synthetic oligonucleotide
  Sense strand starting at position 1193 of SEQ ID NO: 585707
uuugauccaucagagaaga

SEQ ID NO: 661195 - RNA, 19 nt, Artificial Sequence
  Description of Artificial Sequence: Synthetic oligonucleotide
  Antisense strand to SEQ ID NO: 661194
ucuucucugauggaucaaa

SEQ ID NO: 661196 - RNA, 19 nt, Artificial Sequence
  Description of Artificial Sequence: Synthetic oligonucleotide
  Sense strand starting at position 2037 of SEQ ID NO: 585707
ucuuguucccacugacacu

SEQ ID NO: 661197 - RNA, 19 nt, Artificial Sequence
  Description of Artificial Sequence: Synthetic oligonucleotide
  Antisense strand to SEQ ID NO: 661196
agugucagugggaacaaga

SEQ ID NO: 661198 - RNA, 19 nt, Artificial Sequence
  Description of Artificial Sequence: Synthetic oligonucleotide
  Sense strand starting at position 2071 of SEQ ID NO: 585707
ggauuaagaugacaagguu

SEQ ID NO: 661199 - RNA, 19 nt, Artificial Sequence
  Description of Artificial Sequence: Synthetic oligonucleotide
  Antisense strand to SEQ ID NO: 661198
aaccuugucaucuuaaucc

SEQ ID NO: 661200 - RNA, 19 nt, Artificial Sequence
  Description of Artificial Sequence: Synthetic oligonucleotide
  Sense strand starting at position 2089 of SEQ ID NO: 585707
ugagcagaugccugucaga

SEQ ID NO: 661201 - RNA, 19 nt, Artificial Sequence
  Description of Artificial Sequence: Synthetic oligonucleotide
  Antisense strand to SEQ ID NO: 661200
ucugacaggcaucugcuca

SEQ ID NO: 661202 - RNA, 19 nt, Artificial Sequence
  Description of Artificial Sequence: Synthetic oligonucleotide
  Sense strand starting at position 2406 of SEQ ID NO: 585707
aggagaagguggcucguau

SEQ ID NO: 661203 - RNA, 19 nt, Artificial Sequence
  Description of Artificial Sequence: Synthetic oligonucleotide
  Antisense strand to SEQ ID NO: 661202
auacgagccaccuucuccu

SEQ ID NO: 661204 - RNA, 19 nt, Artificial Sequence
  Description of Artificial Sequence: Synthetic oligonucleotide
  Sense strand starting at position 2413 of SEQ ID NO: 585707
gguggcucguauuucugau

SEQ ID NO: 661205 - RNA, 19 nt, Artificial Sequence
  Description of Artificial Sequence: Synthetic oligonucleotide
  Antisense strand to SEQ ID NO: 661204
aucagaaauacgagccacc

SEQ ID NO: 661206 - RNA, 19 nt, Artificial Sequence
  Description of Artificial Sequence: Synthetic oligonucleotide
  Sense strand starting at position 2415 of SEQ ID NO: 585707
uggcucguauuucugauau

SEQ ID NO: 661207 - RNA, 19 nt, Artificial Sequence
  Description of Artificial Sequence: Synthetic oligonucleotide
  Antisense strand to SEQ ID NO: 661206
auaucagaaauacgagcca

SEQ ID NO: 661208 - RNA, 19 nt, Artificial Sequence
  Description of Artificial Sequence: Synthetic oligonucleotide
  Sense strand starting at position 2417 of SEQ ID NO: 585707
gcucguauuucugauauuu

SEQ ID NO: 661209 - RNA, 19 nt, Artificial Sequence
  Description of Artificial Sequence: Synthetic oligonucleotide
  Antisense strand to SEQ ID NO: 661208
aaauaucagaaauacgagc

SEQ ID NO: 661210 - RNA, 19 nt, Artificial Sequence
  Description of Artificial Sequence: Synthetic oligonucleotide
  Sense strand starting at position 2697 of SEQ ID NO: 585707
ucuaaucaucuagggauua

SEQ ID NO: 661211 - RNA, 19 nt, Artificial Sequence
  Description of Artificial Sequence: Synthetic oligonucleotide
  Antisense strand to SEQ ID NO: 661210
uaaucccuagaugauuaga

SEQ ID NO: 661212 - RNA, 19 nt, Artificial Sequence
  Description of Artificial Sequence: Synthetic oligonucleotide
  Sense strand starting at position 2823 of SEQ ID NO: 585707
uggugcuguguuuacuuaa

SEQ ID NO: 661213 - RNA, 19 nt, Artificial Sequence
  Description of Artificial Sequence: Synthetic oligonucleotide
  Antisense strand to SEQ ID NO: 661212
uuaaguaaacacagcacca

SEQ ID NO: 661214 - RNA, 19 nt, Artificial Sequence
  Description of Artificial Sequence: Synthetic oligonucleotide
  Sense strand starting at position 2826 of SEQ ID NO: 585707
ugcuguguuuacuuaaauu

SEQ ID NO: 661215 - RNA, 19 nt, Artificial Sequence
  Description of Artificial Sequence: Synthetic oligonucleotide
  Antisense strand to SEQ ID NO: 661214
aauuuaaguaaacacagca

SEQ ID NO: 661216 - RNA, 19 nt, Artificial Sequence
  Description of Artificial Sequence: Synthetic oligonucleotide
  Sense strand starting at position 2895 of SEQ ID NO: 585707
agccauggaucaucucauu

SEQ ID NO: 661217 - RNA, 19 nt, Artificial Sequence
  Description of Artificial Sequence: Synthetic oligonucleotide
  Antisense strand to SEQ ID NO: 661216
aaugagaugauccauggcu

SEQ ID NO: 661218 - RNA, 19 nt, Artificial Sequence
  Description of Artificial Sequence: Synthetic oligonucleotide
  Sense strand starting at position 2983 of SEQ ID NO: 585707
gaacauauuuacggucuca

SEQ ID NO: 661219 - RNA, 19 nt, Artificial Sequence
  Description of Artificial Sequence: Synthetic oligonucleotide
  Antisense strand to SEQ ID NO: 661218
ugagaccguaaauauguuc

SEQ ID NO: 661220 - RNA, 19 nt, Artificial Sequence
  Description of Artificial Sequence: Synthetic oligonucleotide
  Sense strand starting at position 3002 of SEQ ID NO: 585707
cucagaaucuguuugcuuu

SEQ ID NO: 661221 - RNA, 19 nt, Artificial Sequence
  Description of Artificial Sequence: Synthetic oligonucleotide
  Antisense strand to SEQ ID NO: 661220
aaagcaaacagauucugag

SEQ ID NO: 661222 - RNA, 19 nt, Artificial Sequence
  Description of Artificial Sequence: Synthetic oligonucleotide
  Sense strand starting at position 3254 of SEQ ID NO: 585707
gcccgaaguccaugauuua

SEQ ID NO: 661223 - RNA, 19 nt, Artificial Sequence
  Description of Artificial Sequence: Synthetic oligonucleotide
  Antisense strand to SEQ ID NO: 661222
uaaaucauggacuucgggc

SEQ ID NO: 661224 - RNA, 19 nt, Artificial Sequence
  Description of Artificial Sequence: Synthetic oligonucleotide
  Sense strand starting at position 3261 of SEQ ID NO: 585707
guccaugauuuauaaguag

SEQ ID NO: 661225 - RNA, 19 nt, Artificial Sequence
  Description of Artificial Sequence: Synthetic oligonucleotide
  Antisense strand to SEQ ID NO: 661224
cuacuuauaaaucauggac

SEQ ID NO: 661226 - RNA, 19 nt, Artificial Sequence
  Description of Artificial Sequence: Synthetic oligonucleotide
  Sense strand starting at position 3268 of SEQ ID NO: 585707
auuuauaaguagcagaguu

SEQ ID NO: 661227 - RNA, 19 nt, Artificial Sequence
  Description of Artificial Sequence: Synthetic oligonucleotide
  Antisense strand to SEQ ID NO: 661226
aacucugcuacuuauaaau

SEQ ID NO: 661228 - RNA, 19 nt, Artificial Sequence
  Description of Artificial Sequence: Synthetic oligonucleotide
  Sense strand starting at position 3348 of SEQ ID NO: 585707
guaguuaggaguuacugca

SEQ ID NO: 661229 - RNA, 19 nt, Artificial Sequence
  Description of Artificial Sequence: Synthetic oligonucleotide
  Antisense strand to SEQ ID NO: 661228
ugcaguaacuccuaacuac

SEQ ID NO: 661230 - RNA, 19 nt, Artificial Sequence
  Description of Artificial Sequence: Synthetic oligonucleotide
  Sense strand starting at position 3405 of SEQ ID NO: 585707
ugugaaaguacucgugacu

SEQ ID NO: 661231 - RNA, 19 nt, Artificial Sequence
  Description of Artificial Sequence: Synthetic oligonucleotide
  Antisense strand to SEQ ID NO: 661230
agucacgaguacuuucaca

SEQ ID NO: 661232 - RNA, 19 nt, Artificial Sequence
  Description of Artificial Sequence: Synthetic oligonucleotide
  Sense strand starting at position 3408 of SEQ ID NO: 585707
gaaaguacucgugacuugu

SEQ ID NO: 661233 - RNA, 19 nt, Artificial Sequence
  Description of Artificial Sequence: Synthetic oligonucleotide
  Antisense strand to SEQ ID NO: 661232
acaagucacgaguacuuuc

SEQ ID NO: 661234 - RNA, 19 nt, Artificial Sequence
  Description of Artificial Sequence: Synthetic oligonucleotide
  Sense strand starting at position 3412 of SEQ ID NO: 585707
guacucgugacuuguugga

SEQ ID NO: 661235 - RNA, 19 nt, Artificial Sequence
  Description of Artificial Sequence: Synthetic oligonucleotide
  Antisense strand to SEQ ID NO: 661234
uccaacaagucacgaguac

SEQ ID NO: 661236 - RNA, 19 nt, Artificial Sequence
  Description of Artificial Sequence: Synthetic oligonucleotide
  Sense strand starting at position 3515 of SEQ ID NO: 585707
gaagucuuauacuugcuga

SEQ ID NO: 661237 - RNA, 19 nt, Artificial Sequence
  Description of Artificial Sequence: Synthetic oligonucleotide
  Antisense strand to SEQ ID NO: 661236
ucagcaaguauaagacuuc

SEQ ID NO: 661238 - RNA, 19 nt, Artificial Sequence
  Description of Artificial Sequence: Synthetic oligonucleotide
  Sense strand starting at position 3518 of SEQ ID NO: 585707
gucuuauacuugcugaacu

SEQ ID NO: 661239 - RNA, 19 nt, Artificial Sequence
  Description of Artificial Sequence: Synthetic oligonucleotide
  Antisense strand to SEQ ID NO: 661238
aguucagcaaguauaagac

SEQ ID NO: 661240 - RNA, 19 nt, Artificial Sequence
  Description of Artificial Sequence: Synthetic oligonucleotide
  Sense strand starting at position 3539 of SEQ ID NO: 585707
aguugcuuccauuaugaua

SEQ ID NO: 661241 - RNA, 19 nt, Artificial Sequence
  Description of Artificial Sequence: Synthetic oligonucleotide
  Antisense strand to SEQ ID NO: 661240
uaucauaauggaagcaacu

SEQ ID NO: 661242 - RNA, 19 nt, Artificial Sequence
  Description of Artificial Sequence: Synthetic oligonucleotide
  Sense strand starting at position 3579 of SEQ ID NO: 585707
gauggcauggucuagagau

SEQ ID NO: 661243 - RNA, 19 nt, Artificial Sequence
  Description of Artificial Sequence: Synthetic oligonucleotide
  Antisense strand to SEQ ID NO: 661242
aucucuagaccaugccauc

SEQ ID NO: 661244 - RNA, 19 nt, Artificial Sequence
  Description of Artificial Sequence: Synthetic oligonucleotide
  Sense strand starting at position 3581 of SEQ ID NO: 585707
uggcauggucuagagauag

SEQ ID NO: 661245 - RNA, 19 nt, Artificial Sequence
  Description of Artificial Sequence: Synthetic oligonucleotide
  Antisense strand to SEQ ID NO: 661244
cuaucucuagaccaugcca

SEQ ID NO: 661246 - RNA, 19 nt, Artificial Sequence
  Description of Artificial Sequence: Synthetic oligonucleotide
  Sense strand starting at position 3683 of SEQ ID NO: 585707
gguugaaaucgcuaccaua

SEQ ID NO: 661247 - RNA, 19 nt, Artificial Sequence
  Description of Artificial Sequence: Synthetic oligonucleotide
  Antisense strand to SEQ ID NO: 661246
uaugguagcgauuucaacc

SEQ ID NO: 661248 - RNA, 19 nt, Artificial Sequence
  Description of Artificial Sequence: Synthetic oligonucleotide
  Sense strand starting at position 3704 of SEQ ID NO: 585707
auguucuuugacuagaauu

SEQ ID NO: 661249 - RNA, 19 nt, Artificial Sequence
  Description of Artificial Sequence: Synthetic oligonucleotide
  Antisense strand to SEQ ID NO: 661248
aauucuagucaaagaacau

SEQ ID NO: 661250 - RNA, 19 nt, Artificial Sequence
  Description of Artificial Sequence: Synthetic oligonucleotide
  Sense strand starting at position 3714 of SEQ ID NO: 585707
acuagaauuuaagaaugca

SEQ ID NO: 661251 - RNA, 19 nt, Artificial Sequence
  Description of Artificial Sequence: Synthetic oligonucleotide
  Antisense strand to SEQ ID NO: 661250
ugcauucuuaaauucuagu

SEQ ID NO: 661252 - RNA, 19 nt, Artificial Sequence
  Description of Artificial Sequence: Synthetic oligonucleotide
  Sense strand starting at position 141 of SEQ ID NO: 585708
acauuaacuguguauguau

SEQ ID NO: 661253 - RNA, 19 nt, Artificial Sequence
  Description of Artificial Sequence: Synthetic oligonucleotide
  Antisense strand to SEQ ID NO: 661252
auacauacacaguuaaugu

SEQ ID NO: 661254 - RNA, 19 nt, Artificial Sequence
  Description of Artificial Sequence: Synthetic oligonucleotide
  Sense strand starting at position 441 of SEQ ID NO: 585708
agacaacacugauucugua

SEQ ID NO: 661255 - RNA, 19 nt, Artificial Sequence
  Description of Artificial Sequence: Synthetic oligonucleotide
  Antisense strand to SEQ ID NO: 661254
uacagaaucaguguugucu

SEQ ID NO: 661256 - RNA, 19 nt, Artificial Sequence
  Description of Artificial Sequence: Synthetic oligonucleotide
  Sense strand starting at position 593 of SEQ ID NO: 585708
guugguuaagcauaaugau

SEQ ID NO: 661257 - RNA, 19 nt, Artificial Sequence
  Description of Artificial Sequence: Synthetic oligonucleotide
  Antisense strand to SEQ ID NO: 661256
aucauuaugcuuaaccaac

SEQ ID NO: 661258 - RNA, 19 nt, Artificial Sequence
  Description of Artificial Sequence: Synthetic oligonucleotide
  Sense strand starting at position 667 of SEQ ID NO: 585708
auuggaauuaugggaggca

SEQ ID NO: 661259 - RNA, 19 nt, Artificial Sequence
  Description of Artificial Sequence: Synthetic oligonucleotide
  Antisense strand to SEQ ID NO: 661258
ugccucccauaauuccaau

SEQ ID NO: 661260 - RNA, 19 nt, Artificial Sequence
  Description of Artificial Sequence: Synthetic oligonucleotide
  Sense strand starting at position 732 of SEQ ID NO: 585708
accuuuauuccacggauaa

SEQ ID NO: 661261 - RNA, 19 nt, Artificial Sequence
  Description of Artificial Sequence: Synthetic oligonucleotide
  Antisense strand to SEQ ID NO: 661260
uuauccguggaauaaaggu

SEQ ID NO: 661262 - RNA, 19 nt, Artificial Sequence
  Description of Artificial Sequence: Synthetic oligonucleotide
  Sense strand starting at position 733 of SEQ ID NO: 585708
ccuuuauuccacggauaag

SEQ ID NO: 661263 - RNA, 19 nt, Artificial Sequence
  Description of Artificial Sequence: Synthetic oligonucleotide
  Antisense strand to SEQ ID NO: 661262
cuuauccguggaauaaagg

SEQ ID NO: 661264 - RNA, 19 nt, Artificial Sequence
  Description of Artificial Sequence: Synthetic oligonucleotide
  Sense strand starting at position 858 of SEQ ID NO: 585708
guagaugacucuucuugga

SEQ ID NO: 661265 - RNA, 19 nt, Artificial Sequence
  Description of Artificial Sequence: Synthetic oligonucleotide
  Antisense strand to SEQ ID NO: 661264
uccaagaagagucaucuac

SEQ ID NO: 661266 - RNA, 19 nt, Artificial Sequence
  Description of Artificial Sequence: Synthetic oligonucleotide
  Sense strand starting at position 860 of SEQ ID NO: 585708
agaugacucuucuuggaua

SEQ ID NO: 661267 - RNA, 19 nt, Artificial Sequence
  Description of Artificial Sequence: Synthetic oligonucleotide
  Antisense strand to SEQ ID NO: 661266
uauccaagaagagucaucu

SEQ ID NO: 661268 - RNA, 19 nt, Artificial Sequence
  Description of Artificial Sequence: Synthetic oligonucleotide
  Sense strand starting at position 862 of SEQ ID NO: 585708
augacucuucuuggauaau

SEQ ID NO: 661269 - RNA, 19 nt, Artificial Sequence
  Description of Artificial Sequence: Synthetic oligonucleotide
  Antisense strand to SEQ ID NO: 661268
auuauccaagaagagucau

SEQ ID NO: 661270 - RNA, 19 nt, Artificial Sequence
  Description of Artificial Sequence: Synthetic oligonucleotide
  Sense strand starting at position 868 of SEQ ID NO: 585708
cuucuuggauaaucuauga

SEQ ID NO: 661271 - RNA, 19 nt, Artificial Sequence
  Description of Artificial Sequence: Synthetic oligonucleotide
  Antisense strand to SEQ ID NO: 661270
ucauagauuauccaagaag

SEQ ID NO: 661272 - RNA, 19 nt, Artificial Sequence
  Description of Artificial Sequence: Synthetic oligonucleotide
  Sense strand starting at position 974 of SEQ ID NO: 585708
uggauaguacugcacagau

SEQ ID NO: 661273 - RNA, 19 nt, Artificial Sequence
  Description of Artificial Sequence: Synthetic oligonucleotide
  Antisense strand to SEQ ID NO: 661272
aucugugcaguacuaucca

SEQ ID NO: 661274 - RNA, 19 nt, Artificial Sequence
  Description of Artificial Sequence: Synthetic oligonucleotide
  Sense strand starting at position 976 of SEQ ID NO: 585708
gauaguacugcacagauua

SEQ ID NO: 661275 - RNA, 19 nt, Artificial Sequence
  Description of Artificial Sequence: Synthetic oligonucleotide
  Antisense strand to SEQ ID NO: 661274
uaaucugugcaguacuauc

SEQ ID NO: 661276 - RNA, 19 nt, Artificial Sequence
  Description of Artificial Sequence: Synthetic oligonucleotide
  Sense strand starting at position 1070 of SEQ ID NO: 585708
uggugacaacuguacacuu

SEQ ID NO: 661277 - RNA, 19 nt, Artificial Sequence
  Description of Artificial Sequence: Synthetic oligonucleotide
  Antisense strand to SEQ ID NO: 661276
aaguguacaguugucacca

SEQ ID NO: 661278 - RNA, 19 nt, Artificial Sequence
  Description of Artificial Sequence: Synthetic oligonucleotide
  Sense strand starting at position 1110 of SEQ ID NO: 585708
gugacaucagaguaucagu

SEQ ID NO: 661279 - RNA, 19 nt, Artificial Sequence
  Description of Artificial Sequence: Synthetic oligonucleotide
  Antisense strand to SEQ ID NO: 661278
acugauacucugaugucac

SEQ ID NO: 661280 - RNA, 19 nt, Artificial Sequence
  Description of Artificial Sequence: Synthetic oligonucleotide
  Sense strand starting at position 1115 of SEQ ID NO: 585708
aucagaguaucagugaaua

SEQ ID NO: 661281 - RNA, 19 nt, Artificial Sequence
  Description of Artificial Sequence: Synthetic oligonucleotide
  Antisense strand to SEQ ID NO: 661280
uauucacugauacucugau

SEQ ID NO: 661282 - RNA, 19 nt, Artificial Sequence
  Description of Artificial Sequence: Synthetic oligonucleotide
  Sense strand starting at position 1404 of SEQ ID NO: 585708
acugaauuguaccuagaag

SEQ ID NO: 661283 - RNA, 19 nt, Artificial Sequence
  Description of Artificial Sequence: Synthetic oligonucleotide
  Antisense strand to SEQ ID NO: 661282
cuucuagguacaauucagu

SEQ ID NO: 661284 - RNA, 19 nt, Artificial Sequence
  Description of Artificial Sequence: Synthetic oligonucleotide
  Sense strand starting at position 1416 of SEQ ID NO: 585708
cuagaagggcuauauugua

SEQ ID NO: 661285 - RNA, 19 nt, Artificial Sequence
  Description of Artificial Sequence: Synthetic oligonucleotide
  Antisense strand to SEQ ID NO: 661284
uacaauauagcccuucuag

SEQ ID NO: 661286 - RNA, 19 nt, Artificial Sequence
  Description of Artificial Sequence: Synthetic oligonucleotide
  Sense strand starting at position 1494 of SEQ ID NO: 585708
uuaugauaccguuaagauu

SEQ ID NO: 661287 - RNA, 19 nt, Artificial Sequence
  Description of Artificial Sequence: Synthetic oligonucleotide
  Antisense strand to SEQ ID NO: 661286
aaucuuaacgguaucauaa

SEQ ID NO: 661288 - RNA, 19 nt, Artificial Sequence
  Description of Artificial Sequence: Synthetic oligonucleotide
  Sense strand starting at position 1518 of SEQ ID NO: 585708
uuugguaguaaugaguuua

SEQ ID NO: 661289 - RNA, 19 nt, Artificial Sequence
  Description of Artificial Sequence: Synthetic oligonucleotide
  Antisense strand to SEQ ID NO: 661288
uaaacucauuacuaccaaa

SEQ ID NO: 661290 - RNA, 19 nt, Artificial Sequence
  Description of Artificial Sequence: Synthetic oligonucleotide
  Sense strand starting at position 1602 of SEQ ID NO: 585708
uggauauuacaaugcuaua

SEQ ID NO: 661291 - RNA, 19 nt, Artificial Sequence
  Description of Artificial Sequence: Synthetic oligonucleotide
  Antisense strand to SEQ ID NO: 661290
uauagcauuguaauaucca

SEQ ID NO: 661292 - RNA, 19 nt, Artificial Sequence
  Description of Artificial Sequence: Synthetic oligonucleotide
  Sense strand starting at position 2125 of SEQ ID NO: 585708
auuguaagaccaugaagug

SEQ ID NO: 661293 - RNA, 19 nt, Artificial Sequence
  Description of Artificial Sequence: Synthetic oligonucleotide
  Antisense strand to SEQ ID NO: 661292
cacuucauggucuuacaau

SEQ ID NO: 661294 - RNA, 19 nt, Artificial Sequence
  Description of Artificial Sequence: Synthetic oligonucleotide
  Sense strand starting at position 2126 of SEQ ID NO: 585708
uuguaagaccaugaagugu

SEQ ID NO: 661295 - RNA, 19 nt, Artificial Sequence
  Description of Artificial Sequence: Synthetic oligonucleotide
  Antisense strand to SEQ ID NO: 661294
acacuucauggucuuacaa

SEQ ID NO: 661296 - RNA, 19 nt, Artificial Sequence
  Description of Artificial Sequence: Synthetic oligonucleotide
  Sense strand starting at position 2141 of SEQ ID NO: 585708
guguaacaucacuaagcaa

SEQ ID NO: 661297 - RNA, 19 nt, Artificial Sequence
  Description of Artificial Sequence: Synthetic oligonucleotide
  Antisense strand to SEQ ID NO: 661296
uugcuuagugauguuacac

SEQ ID NO: 661298 - RNA, 19 nt, Artificial Sequence
  Description of Artificial Sequence: Synthetic oligonucleotide
  Sense strand starting at position 2352 of SEQ ID NO: 585708
gcuaauacgugauuuccag

SEQ ID NO: 661299 - RNA, 19 nt, Artificial Sequence
  Description of Artificial Sequence: Synthetic oligonucleotide
  Antisense strand to SEQ ID NO: 661298
cuggaaaucacguauuagc

SEQ ID NO: 661300 - RNA, 19 nt, Artificial Sequence
  Description of Artificial Sequence: Synthetic oligonucleotide
  Sense strand starting at position 2367 of SEQ ID NO: 585708
ccaggauaaguuuguuuaa

SEQ ID NO: 661301 - RNA, 19 nt, Artificial Sequence
  Description of Artificial Sequence: Synthetic oligonucleotide
  Antisense strand to SEQ ID NO: 661300
uuaaacaaacuuauccugg

SEQ ID NO: 661302 - RNA, 19 nt, Artificial Sequence
  Description of Artificial Sequence: Synthetic oligonucleotide
  Sense strand starting at position 2368 of SEQ ID NO: 585708
caggauaaguuuguuuaaa

SEQ ID NO: 661303 - RNA, 19 nt, Artificial Sequence
  Description of Artificial Sequence: Synthetic oligonucleotide
  Antisense strand to SEQ ID NO: 661302
uuuaaacaaacuuauccug

SEQ ID NO: 661304 - RNA, 19 nt, Artificial Sequence
  Description of Artificial Sequence: Synthetic oligonucleotide
  Sense strand starting at position 2843 of SEQ ID NO: 585708
guguguaagcucuuuaagc

SEQ ID NO: 661305 - RNA, 19 nt, Artificial Sequence
  Description of Artificial Sequence: Synthetic oligonucleotide
  Antisense strand to SEQ ID NO: 661304
gcuuaaagagcuuacacac

SEQ ID NO: 661306 - RNA, 19 nt, Artificial Sequence
  Description of Artificial Sequence: Synthetic oligonucleotide
  Sense strand starting at position 3050 of SEQ ID NO: 585708
gucagcaagagugaucauu

SEQ ID NO: 661307 - RNA, 19 nt, Artificial Sequence
  Description of Artificial Sequence: Synthetic oligonucleotide
  Antisense strand to SEQ ID NO: 661306
aaugaucacucuugcugac

SEQ ID NO: 661308 - RNA, 19 nt, Artificial Sequence
  Description of Artificial Sequence: Synthetic oligonucleotide
  Sense strand starting at position 3072 of SEQ ID NO: 585708
caugguuaaccaggauaau

SEQ ID NO: 661309 - RNA, 19 nt, Artificial Sequence
  Description of Artificial Sequence: Synthetic oligonucleotide
  Antisense strand to SEQ ID NO: 661308
auuauccugguuaaccaug

SEQ ID NO: 661310 - RNA, 19 nt, Artificial Sequence
  Description of Artificial Sequence: Synthetic oligonucleotide
  Sense strand starting at position 3187 of SEQ ID NO: 585708
auauaagugguagagcaau

SEQ ID NO: 661311 - RNA, 19 nt, Artificial Sequence
  Description of Artificial Sequence: Synthetic oligonucleotide
  Antisense strand to SEQ ID NO: 661310
auugcucuaccacuuauau

SEQ ID NO: 661312 - RNA, 19 nt, Artificial Sequence
  Description of Artificial Sequence: Synthetic oligonucleotide
  Sense strand starting at position 3193 of SEQ ID NO: 585708
gugguagagcaauacaagu

SEQ ID NO: 661313 - RNA, 19 nt, Artificial Sequence
  Description of Artificial Sequence: Synthetic oligonucleotide
  Antisense strand to SEQ ID NO: 661312
acuuguauugcucuaccac

SEQ ID NO: 661314 - RNA, 19 nt, Artificial Sequence
  Description of Artificial Sequence: Synthetic oligonucleotide
  Sense strand starting at position 3195 of SEQ ID NO: 585708
gguagagcaauacaaguua

SEQ ID NO: 661315 - RNA, 19 nt, Artificial Sequence
  Description of Artificial Sequence: Synthetic oligonucleotide
  Antisense strand to SEQ ID NO: 661314
uaacuuguauugcucuacc

SEQ ID NO: 661316 - RNA, 19 nt, Artificial Sequence
  Description of Artificial Sequence: Synthetic oligonucleotide
  Sense strand starting at position 3254 of SEQ ID NO: 585708
uuugacaggacugguauua

SEQ ID NO: 661317 - RNA, 19 nt, Artificial Sequence
  Description of Artificial Sequence: Synthetic oligonucleotide
  Antisense strand to SEQ ID NO: 661316
uaauaccaguccugucaaa

SEQ ID NO: 661318 - RNA, 19 nt, Artificial Sequence
  Description of Artificial Sequence: Synthetic oligonucleotide
  Sense strand starting at position 3289 of SEQ ID NO: 585708
ggaugaagucuauguaauu

SEQ ID NO: 661319 - RNA, 19 nt, Artificial Sequence
  Description of Artificial Sequence: Synthetic oligonucleotide
  Antisense strand to SEQ ID NO: 661318
aauuacauagacuucaucc

SEQ ID NO: 661320 - RNA, 19 nt, Artificial Sequence
  Description of Artificial Sequence: Synthetic oligonucleotide
  Sense strand starting at position 3290 of SEQ ID NO: 585708
gaugaagucuauguaauuc

SEQ ID NO: 661321 - RNA, 19 nt, Artificial Sequence
  Description of Artificial Sequence: Synthetic oligonucleotide
  Antisense strand to SEQ ID NO: 661320
gaauuacauagacuucauc

SEQ ID NO: 661322 - RNA, 19 nt, Artificial Sequence
  Description of Artificial Sequence: Synthetic oligonucleotide
  Sense strand starting at position 3322 of SEQ ID NO: 585708
acugguaccuugguaaaca

SEQ ID NO: 661323 - RNA, 19 nt, Artificial Sequence
  Description of Artificial Sequence: Synthetic oligonucleotide
  Antisense strand to SEQ ID NO: 661322
uguuuaccaagguaccagu

SEQ ID NO: 661324 - RNA, 19 nt, Artificial Sequence
  Description of Artificial Sequence: Synthetic oligonucleotide
  Sense strand starting at position 3351 of SEQ ID NO: 585708
cucucagaacuuggaguau

SEQ ID NO: 661325 - RNA, 19 nt, Artificial Sequence
  Description of Artificial Sequence: Synthetic oligonucleotide
  Antisense strand to SEQ ID NO: 661324
auacuccaaguucugagag

SEQ ID NO: 661326 - RNA, 19 nt, Artificial Sequence
  Description of Artificial Sequence: Synthetic oligonucleotide
  Sense strand starting at position 3436 of SEQ ID NO: 585708
guggaauauaaacaguguu

SEQ ID NO: 661327 - RNA, 19 nt, Artificial Sequence
  Description of Artificial Sequence: Synthetic oligonucleotide
  Antisense strand to SEQ ID NO: 661326
aacacuguuuauauuccac

SEQ ID NO: 661328 - RNA, 19 nt, Artificial Sequence
  Description of Artificial Sequence: Synthetic oligonucleotide
  Sense strand starting at position 3838 of SEQ ID NO: 585708
ugaagaagucagugacucu

SEQ ID NO: 661329 - RNA, 19 nt, Artificial Sequence
  Description of Artificial Sequence: Synthetic oligonucleotide
  Antisense strand to SEQ ID NO: 661328
agagucacugacuucuuca

SEQ ID NO: 661330 - RNA, 19 nt, Artificial Sequence
  Description of Artificial Sequence: Synthetic oligonucleotide
  Sense strand starting at position 3925 of SEQ ID NO: 585708
aggaaacacuucucauagu

SEQ ID NO: 661331 - RNA, 19 nt, Artificial Sequence
  Description of Artificial Sequence: Synthetic oligonucleotide
  Antisense strand to SEQ ID NO: 661330
acuaugagaaguguuuccu

SEQ ID NO: 661332 - RNA, 19 nt, Artificial Sequence
  Description of Artificial Sequence: Synthetic oligonucleotide
  Sense strand starting at position 91 of SEQ ID NO: 585709
gaaccaucggucugugaau

SEQ ID NO: 661333 - RNA, 19 nt, Artificial Sequence
  Description of Artificial Sequence: Synthetic oligonucleotide
  Antisense strand to SEQ ID NO: 661332
auucacagaccgaugguuc

SEQ ID NO: 661334 - RNA, 19 nt, Artificial Sequence
  Description of Artificial Sequence: Synthetic oligonucleotide
  Sense strand starting at position 163 of SEQ ID NO: 585709
gaagaaaucuucuucggca

SEQ ID NO: 661335 - RNA, 19 nt, Artificial Sequence
  Description of Artificial Sequence: Synthetic oligonucleotide
  Antisense strand to SEQ ID NO: 661334
ugccgaagaagauuucuuc

SEQ ID NO: 661336 - RNA, 19 nt, Artificial Sequence
  Description of Artificial Sequence: Synthetic oligonucleotide
  Sense strand starting at position 164 of SEQ ID NO: 585709
aagaaaucuucuucggcag

SEQ ID NO: 661337 - RNA, 19 nt, Artificial Sequence
  Description of Artificial Sequence: Synthetic oligonucleotide
  Antisense strand to SEQ ID NO: 661336
cugccgaagaagauuucuu

SEQ ID NO: 661338 - RNA, 19 nt, Artificial Sequence
  Description of Artificial Sequence: Synthetic oligonucleotide
  Sense strand starting at position 229 of SEQ ID NO: 585709
gcagaaugugcucuguguc

SEQ ID NO: 661339 - RNA, 19 nt, Artificial Sequence
  Description of Artificial Sequence: Synthetic oligonucleotide
  Antisense strand to SEQ ID NO: 661338
gacacagagcacauucugc

SEQ ID NO: 661340 - RNA, 19 nt, Artificial Sequence
  Description of Artificial Sequence: Synthetic oligonucleotide
  Sense strand starting at position 289 of SEQ ID NO: 585709
cagguaacuccagaugcaa

SEQ ID NO: 661341 - RNA, 19 nt, Artificial Sequence
  Description of Artificial Sequence: Synthetic oligonucleotide
  Antisense strand to SEQ ID NO: 661340
uugcaucuggaguuaccug

SEQ ID NO: 661342 - RNA, 19 nt, Artificial Sequence
  Description of Artificial Sequence: Synthetic oligonucleotide
  Sense strand starting at position 485 of SEQ ID NO: 585709
agcucuacucuauggguga

SEQ ID NO: 661343 - RNA, 19 nt, Artificial Sequence
  Description of Artificial Sequence: Synthetic oligonucleotide
  Antisense strand to SEQ ID NO: 661342
ucacccauagaguagagcu

SEQ ID NO: 661344 - RNA, 19 nt, Artificial Sequence
  Description of Artificial Sequence: Synthetic oligonucleotide
  Sense strand starting at position 490 of SEQ ID NO: 585709
uacucuaugggugaugcua

SEQ ID NO: 661345 - RNA, 19 nt, Artificial Sequence
  Description of Artificial Sequence: Synthetic oligonucleotide
  Antisense strand to SEQ ID NO: 661344
uagcaucacccauagagua

SEQ ID NO: 661346 - RNA, 19 nt, Artificial Sequence
  Description of Artificial Sequence: Synthetic oligonucleotide
  Sense strand starting at position 666 of SEQ ID NO: 585709
guugaugcgcucuaaagaa

SEQ ID NO: 661347 - RNA, 19 nt, Artificial Sequence
  Description of Artificial Sequence: Synthetic oligonucleotide
  Antisense strand to SEQ ID NO: 661346
uucuuuagagcgcaucaac

SEQ ID NO: 661348 - RNA, 19 nt, Artificial Sequence
  Description of Artificial Sequence: Synthetic oligonucleotide
  Sense strand starting at position 717 of SEQ ID NO: 585709
uggacuguuuccuccagga

SEQ ID NO: 661349 - RNA, 19 nt, Artificial Sequence
  Description of Artificial Sequence: Synthetic oligonucleotide
  Antisense strand to SEQ ID NO: 661348
uccuggaggaaacagucca

SEQ ID NO: 661350 - RNA, 19 nt, Artificial Sequence
  Description of Artificial Sequence: Synthetic oligonucleotide
  Sense strand starting at position 719 of SEQ ID NO: 585709
gacuguuuccuccaggaac

SEQ ID NO: 661351 - RNA, 19 nt, Artificial Sequence
  Description of Artificial Sequence: Synthetic oligonucleotide
  Antisense strand to SEQ ID NO: 661350
guuccuggaggaaacaguc

SEQ ID NO: 661352 - RNA, 19 nt, Artificial Sequence
  Description of Artificial Sequence: Synthetic oligonucleotide
  Sense strand starting at position 774 of SEQ ID NO: 585709
gaggaaccucuauguuauu

SEQ ID NO: 661353 - RNA, 19 nt, Artificial Sequence
  Description of Artificial Sequence: Synthetic oligonucleotide
  Antisense strand to SEQ ID NO: 661352
aauaacauagagguuccuc

SEQ ID NO: 661354 - RNA, 19 nt, Artificial Sequence
  Description of Artificial Sequence: Synthetic oligonucleotide
  Sense strand starting at position 846 of SEQ ID NO: 585709
uggcauuacauauggagaa

SEQ ID NO: 661355 - RNA, 19 nt, Artificial Sequence
  Description of Artificial Sequence: Synthetic oligonucleotide
  Antisense strand to SEQ ID NO: 661354
uucuccauauguaaugcca

SEQ ID NO: 661356 - RNA, 19 nt, Artificial Sequence
  Description of Artificial Sequence: Synthetic oligonucleotide
  Sense strand starting at position 881 of SEQ ID NO: 585709
acagguaugcuguguagaa

SEQ ID NO: 661357 - RNA, 19 nt, Artificial Sequence
  Description of Artificial Sequence: Synthetic oligonucleotide
  Antisense strand to SEQ ID NO: 661356
uucuacacagcauaccugu

SEQ ID NO: 661358 - RNA, 19 nt, Artificial Sequence
  Description of Artificial Sequence: Synthetic oligonucleotide
  Sense strand starting at position 882 of SEQ ID NO: 585709
cagguaugcuguguagaag

SEQ ID NO: 661359 - RNA, 19 nt, Artificial Sequence
  Description of Artificial Sequence: Synthetic oligonucleotide
  Antisense strand to SEQ ID NO: 661358
cuucuacacagcauaccug

SEQ ID NO: 661360 - RNA, 19 nt, Artificial Sequence
  Description of Artificial Sequence: Synthetic oligonucleotide
  Sense strand starting at position 885 of SEQ ID NO: 585709
guaugcuguguagaagacu

SEQ ID NO: 661361 - RNA, 19 nt, Artificial Sequence
  Description of Artificial Sequence: Synthetic oligonucleotide
  Antisense strand to SEQ ID NO: 661360
agucuucuacacagcauac

SEQ ID NO: 661362 - RNA, 19 nt, Artificial Sequence
  Description of Artificial Sequence: Synthetic oligonucleotide
  Sense strand starting at position 973 of SEQ ID NO: 585709
caaccuugaucugugagau

SEQ ID NO: 661363 - RNA, 19 nt, Artificial Sequence
  Description of Artificial Sequence: Synthetic oligonucleotide
  Antisense strand to SEQ ID NO: 661362
aucucacagaucaagguug

SEQ ID NO: 661364 - RNA, 19 nt, Artificial Sequence
  Description of Artificial Sequence: Synthetic oligonucleotide
  Sense strand starting at position 974 of SEQ ID NO: 585709
aaccuugaucugugagaug

SEQ ID NO: 661365 - RNA, 19 nt, Artificial Sequence
  Description of Artificial Sequence: Synthetic oligonucleotide
  Antisense strand to SEQ ID NO: 661364
caucucacagaucaagguu

SEQ ID NO: 661366 - RNA, 19 nt, Artificial Sequence
  Description of Artificial Sequence: Synthetic oligonucleotide
  Sense strand starting at position 983 of SEQ ID NO: 585709
cugugagaugaaugauuac

SEQ ID NO: 661367 - RNA, 19 nt, Artificial Sequence
  Description of Artificial Sequence: Synthetic oligonucleotide
  Antisense strand to SEQ ID NO: 661366
guaaucauucaucucacag

SEQ ID NO: 661368 - RNA, 19 nt, Artificial Sequence
  Description of Artificial Sequence: Synthetic oligonucleotide
  Sense strand starting at position 2174 of SEQ ID NO: 585709
ggagaguuugggugucagu

SEQ ID NO: 661369 - RNA, 19 nt, Artificial Sequence
  Description of Artificial Sequence: Synthetic oligonucleotide
  Antisense strand to SEQ ID NO: 661368
acugacacccaaacucucc

SEQ ID NO: 661370 - RNA, 19 nt, Artificial Sequence
  Description of Artificial Sequence: Synthetic oligonucleotide
  Sense strand starting at position 2528 of SEQ ID NO: 585709
caauguucugaacagcaga

SEQ ID NO: 661371 - RNA, 19 nt, Artificial Sequence
  Description of Artificial Sequence: Synthetic oligonucleotide
  Antisense strand to SEQ ID NO: 661370
ucugcuguucagaacauug

SEQ ID NO: 661372 - RNA, 19 nt, Artificial Sequence
  Description of Artificial Sequence: Synthetic oligonucleotide
  Sense strand starting at position 2591 of SEQ ID NO: 585709
gugucuuucuuauuuacua

SEQ ID NO: 661373 - RNA, 19 nt, Artificial Sequence
  Description of Artificial Sequence: Synthetic oligonucleotide
  Antisense strand to SEQ ID NO: 661372
uaguaaauaagaaagacac

SEQ ID NO: 661374 - RNA, 19 nt, Artificial Sequence
  Description of Artificial Sequence: Synthetic oligonucleotide
  Sense strand starting at position 2725 of SEQ ID NO: 585709
gguauauuguacucaucaa

SEQ ID NO: 661375 - RNA, 19 nt, Artificial Sequence
  Description of Artificial Sequence: Synthetic oligonucleotide
  Antisense strand to SEQ ID NO: 661374
uugaugaguacaauauacc

SEQ ID NO: 661376 - RNA, 19 nt, Artificial Sequence
  Description of Artificial Sequence: Synthetic oligonucleotide
  Sense strand starting at position 2773 of SEQ ID NO: 585709
aggacuguucugcagugua

SEQ ID NO: 661377 - RNA, 19 nt, Artificial Sequence
  Description of Artificial Sequence: Synthetic oligonucleotide
  Antisense strand to SEQ ID NO: 661376
uacacugcagaacaguccu

SEQ ID NO: 661378 - RNA, 19 nt, Artificial Sequence
  Description of Artificial Sequence: Synthetic oligonucleotide
  Sense strand starting at position 2875 of SEQ ID NO: 585709
ggugcuuacacaugaguua

SEQ ID NO: 661379 - RNA, 19 nt, Artificial Sequence
  Description of Artificial Sequence: Synthetic oligonucleotide
  Antisense strand to SEQ ID NO: 661378
uaacucauguguaagcacc

SEQ ID NO: 661380 - RNA, 19 nt, Artificial Sequence
  Description of Artificial Sequence: Synthetic oligonucleotide
  Sense strand starting at position 2876 of SEQ ID NO: 585709
gugcuuacacaugaguuau

SEQ ID NO: 661381 - RNA, 19 nt, Artificial Sequence
  Description of Artificial Sequence: Synthetic oligonucleotide
  Antisense strand to SEQ ID NO: 661380
auaacucauguguaagcac

SEQ ID NO: 661382 - RNA, 19 nt, Artificial Sequence
  Description of Artificial Sequence: Synthetic oligonucleotide
  Sense strand starting at position 2882 of SEQ ID NO: 585709
acacaugaguuaucuacuc

SEQ ID NO: 661383 - RNA, 19 nt, Artificial Sequence
  Description of Artificial Sequence: Synthetic oligonucleotide
  Antisense strand to SEQ ID NO: 661382
gaguagauaacucaugugu

SEQ ID NO: 661384 - RNA, 19 nt, Artificial Sequence
  Description of Artificial Sequence: Synthetic oligonucleotide
  Sense strand starting at position 2911 of SEQ ID NO: 585709
aaugauguucgcuaucauc

SEQ ID NO: 661385 - RNA, 19 nt, Artificial Sequence
  Description of Artificial Sequence: Synthetic oligonucleotide
  Antisense strand to SEQ ID NO: 661384
gaugauagcgaacaucauu

SEQ ID NO: 661386 - RNA, 19 nt, Artificial Sequence
  Description of Artificial Sequence: Synthetic oligonucleotide
  Sense strand starting at position 2950 of SEQ ID NO: 585709
cagaguaucucuguaggua

SEQ ID NO: 661387 - RNA, 19 nt, Artificial Sequence
  Description of Artificial Sequence: Synthetic oligonucleotide
  Antisense strand to SEQ ID NO: 661386
uaccuacagagauacucug

SEQ ID NO: 661388 - RNA, 19 nt, Artificial Sequence
  Description of Artificial Sequence: Synthetic oligonucleotide
  Sense strand starting at position 2951 of SEQ ID NO: 585709
agaguaucucuguagguac

SEQ ID NO: 661389 - RNA, 19 nt, Artificial Sequence
  Description of Artificial Sequence: Synthetic oligonucleotide
  Antisense strand to SEQ ID NO: 661388
guaccuacagagauacucu

SEQ ID NO: 661390 - RNA, 19 nt, Artificial Sequence
  Description of Artificial Sequence: Synthetic oligonucleotide
  Sense strand starting at position 3050 of SEQ ID NO: 585709
gcccaaugauaggcauuaa

SEQ ID NO: 661391 - RNA, 19 nt, Artificial Sequence
  Description of Artificial Sequence: Synthetic oligonucleotide
  Antisense strand to SEQ ID NO: 661390
uuaaugccuaucauugggc

SEQ ID NO: 661392 - RNA, 19 nt, Artificial Sequence
  Description of Artificial Sequence: Synthetic oligonucleotide
  Sense strand starting at position 3060 of SEQ ID NO: 585709
aggcauuaaggaugagcuu

SEQ ID NO: 661393 - RNA, 19 nt, Artificial Sequence
  Description of Artificial Sequence: Synthetic oligonucleotide
  Antisense strand to SEQ ID NO: 661392
aagcucauccuuaaugccu

SEQ ID NO: 661394 - RNA, 19 nt, Artificial Sequence
  Description of Artificial Sequence: Synthetic oligonucleotide
  Sense strand starting at position 3075 of SEQ ID NO: 585709
gcuucucuugcugauaaag

SEQ ID NO: 661395 - RNA, 19 nt, Artificial Sequence
  Description of Artificial Sequence: Synthetic oligonucleotide
  Antisense strand to SEQ ID NO: 661394
cuuuaucagcaagagaagc

SEQ ID NO: 661396 - RNA, 19 nt, Artificial Sequence
  Description of Artificial Sequence: Synthetic oligonucleotide
  Sense strand starting at position 3123 of SEQ ID NO: 585709
uagguaauguuaucagcuu

SEQ ID NO: 661397 - RNA, 19 nt, Artificial Sequence
  Description of Artificial Sequence: Synthetic oligonucleotide
  Antisense strand to SEQ ID NO: 661396
aagcugauaacauuaccua

SEQ ID NO: 661398 - RNA, 19 nt, Artificial Sequence
  Description of Artificial Sequence: Synthetic oligonucleotide
  Sense strand starting at position 3224 of SEQ ID NO: 585709
agucaagacuccuuagcaa

SEQ ID NO: 661399 - RNA, 19 nt, Artificial Sequence
  Description of Artificial Sequence: Synthetic oligonucleotide
  Antisense strand to SEQ ID NO: 661398
uugcuaaggagucuugacu

SEQ ID NO: 661400 - RNA, 19 nt, Artificial Sequence
  Description of Artificial Sequence: Synthetic oligonucleotide
  Sense strand starting at position 3231 of SEQ ID NO: 585709
acuccuuagcaaugaugau

SEQ ID NO: 661401 - RNA, 19 nt, Artificial Sequence
  Description of Artificial Sequence: Synthetic oligonucleotide
  Antisense strand to SEQ ID NO: 661400
aucaucauugcuaaggagu

SEQ ID NO: 661402 - RNA, 19 nt, Artificial Sequence
  Description of Artificial Sequence: Synthetic oligonucleotide
  Sense strand starting at position 3240 of SEQ ID NO: 585709
caaugaugaugagagaauu

SEQ ID NO: 661403 - RNA, 19 nt, Artificial Sequence
  Description of Artificial Sequence: Synthetic oligonucleotide
  Antisense strand to SEQ ID NO: 661402
aauucucucaucaucauug

SEQ ID NO: 661404 - RNA, 19 nt, Artificial Sequence
  Description of Artificial Sequence: Synthetic oligonucleotide
  Sense strand starting at position 3257 of SEQ ID NO: 585709
uugauauguuucucuccua

SEQ ID NO: 661405 - RNA, 19 nt, Artificial Sequence
  Description of Artificial Sequence: Synthetic oligonucleotide
  Antisense strand to SEQ ID NO: 661404
uaggagagaaacauaucaa

SEQ ID NO: 661406 - RNA, 19 nt, Artificial Sequence
  Description of Artificial Sequence: Synthetic oligonucleotide
  Sense strand starting at position 3258 of SEQ ID NO: 585709
ugauauguuucucuccuag

SEQ ID NO: 661407 - RNA, 19 nt, Artificial Sequence
  Description of Artificial Sequence: Synthetic oligonucleotide
  Antisense strand to SEQ ID NO: 661406
cuaggagagaaacauauca

SEQ ID NO: 661408 - RNA, 19 nt, Artificial Sequence
  Description of Artificial Sequence: Synthetic oligonucleotide
  Sense strand starting at position 3328 of SEQ ID NO: 585709
uguggaggguuguuacaua

SEQ ID NO: 661409 - RNA, 19 nt, Artificial Sequence
  Description of Artificial Sequence: Synthetic oligonucleotide
  Antisense strand to SEQ ID NO: 661408
uauguaacaacccuccaca

SEQ ID NO: 661410 - RNA, 19 nt, Artificial Sequence
  Description of Artificial Sequence: Synthetic oligonucleotide
  Sense strand starting at position 3490 of SEQ ID NO: 585709
ggguguucucauuguugaa

SEQ ID NO: 661411 - RNA, 19 nt, Artificial Sequence
  Description of Artificial Sequence: Synthetic oligonucleotide
  Antisense strand to SEQ ID NO: 661410
uucaacaaugagaacaccc

SEQ ID NO: 661412 - RNA, 19 nt, Artificial Sequence
  Description of Artificial Sequence: Synthetic oligonucleotide
  Sense strand starting at position 214 of SEQ ID NO: 585710
agggccaguuguuuacuaa

SEQ ID NO: 661413 - RNA, 19 nt, Artificial Sequence
  Description of Artificial Sequence: Synthetic oligonucleotide
  Antisense strand to SEQ ID NO: 661412
uuaguaaacaacuggcccu

SEQ ID NO: 661414 - RNA, 19 nt, Artificial Sequence
  Description of Artificial Sequence: Synthetic oligonucleotide
  Sense strand starting at position 215 of SEQ ID NO: 585710
gggccaguuguuuacuaag

SEQ ID NO: 661415 - RNA, 19 nt, Artificial Sequence
  Description of Artificial Sequence: Synthetic oligonucleotide
  Antisense strand to SEQ ID NO: 661414
cuuaguaaacaacuggccc

SEQ ID NO: 661416 - RNA, 19 nt, Artificial Sequence
  Description of Artificial Sequence: Synthetic oligonucleotide
  Sense strand starting at position 665 of SEQ ID NO: 585710
gugagagggcccuaacuuu

SEQ ID NO: 661417 - RNA, 19 nt, Artificial Sequence
  Description of Artificial Sequence: Synthetic oligonucleotide
  Antisense strand to SEQ ID NO: 661416
aaaguuagggcccucucac

SEQ ID NO: 661418 - RNA, 19 nt, Artificial Sequence
  Description of Artificial Sequence: Synthetic oligonucleotide
  Sense strand starting at position 887 of SEQ ID NO: 585710
gaaggcaucagugaguaga

SEQ ID NO: 661419 - RNA, 19 nt, Artificial Sequence
  Description of Artificial Sequence: Synthetic oligonucleotide
  Antisense strand to SEQ ID NO: 661418
ucuacucacugaugccuuc

SEQ ID NO: 661420 - RNA, 19 nt, Artificial Sequence
  Description of Artificial Sequence: Synthetic oligonucleotide
  Sense strand starting at position 889 of SEQ ID NO: 585710
aggcaucagugaguagaaa

SEQ ID NO: 661421 - RNA, 19 nt, Artificial Sequence
  Description of Artificial Sequence: Synthetic oligonucleotide
  Antisense strand to SEQ ID NO: 661420
uuucuacucacugaugccu

SEQ ID NO: 661422 - RNA, 19 nt, Artificial Sequence
  Description of Artificial Sequence: Synthetic oligonucleotide
  Sense strand starting at position 979 of SEQ ID NO: 585710
ugagaagacccauguuggu

SEQ ID NO: 661423 - RNA, 19 nt, Artificial Sequence
  Description of Artificial Sequence: Synthetic oligonucleotide
  Antisense strand to SEQ ID NO: 661422
accaacaugggucuucuca

SEQ ID NO: 661424 - RNA, 19 nt, Artificial Sequence
  Description of Artificial Sequence: Synthetic oligonucleotide
  Sense strand starting at position 985 of SEQ ID NO: 585710
gacccauguuggucucuau

SEQ ID NO: 661425 - RNA, 19 nt, Artificial Sequence
  Description of Artificial Sequence: Synthetic oligonucleotide
  Antisense strand to SEQ ID NO: 661424
auagagaccaacauggguc

SEQ ID NO: 661426 - RNA, 19 nt, Artificial Sequence
  Description of Artificial Sequence: Synthetic oligonucleotide
  Sense strand starting at position 989 of SEQ ID NO: 585710
cauguuggucucuauagga

SEQ ID NO: 661427 - RNA, 19 nt, Artificial Sequence
  Description of Artificial Sequence: Synthetic oligonucleotide
  Antisense strand to SEQ ID NO: 661426
uccuauagagaccaacaug

SEQ ID NO: 661428 - RNA, 19 nt, Artificial Sequence
  Description of Artificial Sequence: Synthetic oligonucleotide
  Sense strand starting at position 1032 of SEQ ID NO: 585710
gacugaugacuuggagcaa

SEQ ID NO: 661429 - RNA, 19 nt, Artificial Sequence
  Description of Artificial Sequence: Synthetic oligonucleotide
  Antisense strand to SEQ ID NO: 661428
uugcuccaagucaucaguc

SEQ ID NO: 661430 - RNA, 19 nt, Artificial Sequence
  Description of Artificial Sequence: Synthetic oligonucleotide
  Sense strand starting at position 1033 of SEQ ID NO: 585710
acugaugacuuggagcaaa

SEQ ID NO: 661431 - RNA, 19 nt, Artificial Sequence
  Description of Artificial Sequence: Synthetic oligonucleotide
  Antisense strand to SEQ ID NO: 661430
uuugcuccaagucaucagu

SEQ ID NO: 661432 - RNA, 19 nt, Artificial Sequence
  Description of Artificial Sequence: Synthetic oligonucleotide
  Sense strand starting at position 1064 of SEQ ID NO: 585710
agacuuuaguguccauuaa

SEQ ID NO: 661433 - RNA, 19 nt, Artificial Sequence
  Description of Artificial Sequence: Synthetic oligonucleotide
  Antisense strand to SEQ ID NO: 661432
uuaauggacacuaaagucu

SEQ ID NO: 661434 - RNA, 19 nt, Artificial Sequence
  Description of Artificial Sequence: Synthetic oligonucleotide
  Sense strand starting at position 1068 of SEQ ID NO: 585710
uuuaguguccauuaacuaa

SEQ ID NO: 661435 - RNA, 19 nt, Artificial Sequence
  Description of Artificial Sequence: Synthetic oligonucleotide
  Antisense strand to SEQ ID NO: 661434
uuaguuaauggacacuaaa

SEQ ID NO: 661436 - RNA, 19 nt, Artificial Sequence
  Description of Artificial Sequence: Synthetic oligonucleotide
  Sense strand starting at position 1107 of SEQ ID NO: 585710
gaggaucugagguggcuaa

SEQ ID NO: 661437 - RNA, 19 nt, Artificial Sequence
  Description of Artificial Sequence: Synthetic oligonucleotide
  Antisense strand to SEQ ID NO: 661436
uuagccaccucagauccuc

SEQ ID NO: 661438 - RNA, 19 nt, Artificial Sequence
  Description of Artificial Sequence: Synthetic oligonucleotide
  Sense strand starting at position 1120 of SEQ ID NO: 585710
ggcuaaguggccuaggagu

SEQ ID NO: 661439 - RNA, 19 nt, Artificial Sequence
  Description of Artificial Sequence: Synthetic oligonucleotide
  Antisense strand to SEQ ID NO: 661438
acuccuaggccacuuagcc

SEQ ID NO: 661440 - RNA, 19 nt, Artificial Sequence
  Description of Artificial Sequence: Synthetic oligonucleotide
  Sense strand starting at position 1126 of SEQ ID NO: 585710
guggccuaggagugaagau

SEQ ID NO: 661441 - RNA, 19 nt, Artificial Sequence
  Description of Artificial Sequence: Synthetic oligonucleotide
  Antisense strand to SEQ ID NO: 661440
aucuucacuccuaggccac

SEQ ID NO: 661442 - RNA, 19 nt, Artificial Sequence
  Description of Artificial Sequence: Synthetic oligonucleotide
  Sense strand starting at position 1135 of SEQ ID NO: 585710
gagugaagauggcacaaau

SEQ ID NO: 661443 - RNA, 19 nt, Artificial Sequence
  Description of Artificial Sequence: Synthetic oligonucleotide
  Antisense strand to SEQ ID NO: 661442
auuugugccaucuucacuc

SEQ ID NO: 661444 - RNA, 19 nt, Artificial Sequence
  Description of Artificial Sequence: Synthetic oligonucleotide
  Sense strand starting at position 1148 of SEQ ID NO: 585710
acaaaucugugguugggaa

SEQ ID NO: 661445 - RNA, 19 nt, Artificial Sequence
  Description of Artificial Sequence: Synthetic oligonucleotide
  Antisense strand to SEQ ID NO: 661444
uucccaaccacagauuugu

SEQ ID NO: 661446 - RNA, 19 nt, Artificial Sequence
  Description of Artificial Sequence: Synthetic oligonucleotide
  Sense strand starting at position 1149 of SEQ ID NO: 585710
caaaucugugguugggaaa

SEQ ID NO: 661447 - RNA, 19 nt, Artificial Sequence
  Description of Artificial Sequence: Synthetic oligonucleotide
  Antisense strand to SEQ ID NO: 661446
uuucccaaccacagauuug

SEQ ID NO: 661448 - RNA, 19 nt, Artificial Sequence
  Description of Artificial Sequence: Synthetic oligonucleotide
  Sense strand starting at position 1196 of SEQ ID NO: 585710
uggugcuaccuguauuaga

SEQ ID NO: 661449 - RNA, 19 nt, Artificial Sequence
  Description of Artificial Sequence: Synthetic oligonucleotide
  Antisense strand to SEQ ID NO: 661448
ucuaauacagguagcacca

SEQ ID NO: 661450 - RNA, 19 nt, Artificial Sequence
  Description of Artificial Sequence: Synthetic oligonucleotide
  Sense strand starting at position 1262 of SEQ ID NO: 585710
acuacugaaucagaauguu

SEQ ID NO: 661451 - RNA, 19 nt, Artificial Sequence
  Description of Artificial Sequence: Synthetic oligonucleotide
  Antisense strand to SEQ ID NO: 661450
aacauucugauucaguagu

SEQ ID NO: 661452 - RNA, 19 nt, Artificial Sequence
  Description of Artificial Sequence: Synthetic oligonucleotide
  Sense strand starting at position 1310 of SEQ ID NO: 585710
cucccaaagugagucuuau

SEQ ID NO: 661453 - RNA, 19 nt, Artificial Sequence
  Description of Artificial Sequence: Synthetic oligonucleotide
  Antisense strand to SEQ ID NO: 661452
auaagacucacuuugggag

SEQ ID NO: 661454 - RNA, 19 nt, Artificial Sequence
  Description of Artificial Sequence: Synthetic oligonucleotide
  Sense strand starting at position 1319 of SEQ ID NO: 585710
ugagucuuaugugcacuga

SEQ ID NO: 661455 - RNA, 19 nt, Artificial Sequence
  Description of Artificial Sequence: Synthetic oligonucleotide
  Antisense strand to SEQ ID NO: 661454
ucagugcacauaagacuca

SEQ ID NO: 661456 - RNA, 19 nt, Artificial Sequence
  Description of Artificial Sequence: Synthetic oligonucleotide
  Sense strand starting at position 1323 of SEQ ID NO: 585710
ucuuaugugcacugacuua

SEQ ID NO: 661457 - RNA, 19 nt, Artificial Sequence
  Description of Artificial Sequence: Synthetic oligonucleotide
  Antisense strand to SEQ ID NO: 661456
uaagucagugcacauaaga

SEQ ID NO: 661458 - RNA, 19 nt, Artificial Sequence
  Description of Artificial Sequence: Synthetic oligonucleotide
  Sense strand starting at position 1333 of SEQ ID NO: 585710
acugacuuaugacacugaa

SEQ ID NO: 661459 - RNA, 19 nt, Artificial Sequence
  Description of Artificial Sequence: Synthetic oligonucleotide
  Antisense strand to SEQ ID NO: 661458
uucagugucauaagucagu

SEQ ID NO: 661460 - RNA, 19 nt, Artificial Sequence
  Description of Artificial Sequence: Synthetic oligonucleotide
  Sense strand starting at position 1459 of SEQ ID NO: 585710
gcgaaagugcuuuggaaag

SEQ ID NO: 661461 - RNA, 19 nt, Artificial Sequence
  Description of Artificial Sequence: Synthetic oligonucleotide
  Antisense strand to SEQ ID NO: 661460
cuuuccaaagcacuuucgc

SEQ ID NO: 661462 - RNA, 19 nt, Artificial Sequence
  Description of Artificial Sequence: Synthetic oligonucleotide
  Sense strand starting at position 1461 of SEQ ID NO: 585710
gaaagugcuuuggaaagau

SEQ ID NO: 661463 - RNA, 19 nt, Artificial Sequence
  Description of Artificial Sequence: Synthetic oligonucleotide
  Antisense strand to SEQ ID NO: 661462
aucuuuccaaagcacuuuc

SEQ ID NO: 661464 - RNA, 19 nt, Artificial Sequence
  Description of Artificial Sequence: Synthetic oligonucleotide
  Sense strand starting at position 1471 of SEQ ID NO: 585710
uggaaagauuaaggugauu

SEQ ID NO: 661465 - RNA, 19 nt, Artificial Sequence
  Description of Artificial Sequence: Synthetic oligonucleotide
  Antisense strand to SEQ ID NO: 661464
aaucaccuuaaucuuucca

SEQ ID NO: 661466 - RNA, 19 nt, Artificial Sequence
  Description of Artificial Sequence: Synthetic oligonucleotide
  Sense strand starting at position 1541 of SEQ ID NO: 585710
gugugaugcggucugugga

SEQ ID NO: 661467 - RNA, 19 nt, Artificial Sequence
  Description of Artificial Sequence: Synthetic oligonucleotide
  Antisense strand to SEQ ID NO: 661466
uccacagaccgcaucacac

SEQ ID NO: 661468 - RNA, 19 nt, Artificial Sequence
  Description of Artificial Sequence: Synthetic oligonucleotide
  Sense strand starting at position 1542 of SEQ ID NO: 585710
ugugaugcggucuguggau

SEQ ID NO: 661469 - RNA, 19 nt, Artificial Sequence
  Description of Artificial Sequence: Synthetic oligonucleotide
  Antisense strand to SEQ ID NO: 661468
auccacagaccgcaucaca

SEQ ID NO: 661470 - RNA, 19 nt, Artificial Sequence
  Description of Artificial Sequence: Synthetic oligonucleotide
  Sense strand starting at position 1543 of SEQ ID NO: 585710
gugaugcggucuguggaua

SEQ ID NO: 661471 - RNA, 19 nt, Artificial Sequence
  Description of Artificial Sequence: Synthetic oligonucleotide
  Antisense strand to SEQ ID NO: 661470
uauccacagaccgcaucac

SEQ ID NO: 661472 - RNA, 19 nt, Artificial Sequence
  Description of Artificial Sequence: Synthetic oligonucleotide
  Sense strand starting at position 1544 of SEQ ID NO: 585710
ugaugcggucuguggauau

SEQ ID NO: 661473 - RNA, 19 nt, Artificial Sequence
  Description of Artificial Sequence: Synthetic oligonucleotide
  Antisense strand to SEQ ID NO: 661472
auauccacagaccgcauca

SEQ ID NO: 661474 - RNA, 19 nt, Artificial Sequence
  Description of Artificial Sequence: Synthetic oligonucleotide
  Sense strand starting at position 2056 of SEQ ID NO: 585710
ggagacgucacccaccauu

SEQ ID NO: 661475 - RNA, 19 nt, Artificial Sequence
  Description of Artificial Sequence: Synthetic oligonucleotide
  Antisense strand to SEQ ID NO: 661474
aauggugggugacgucucc

SEQ ID NO: 661476 - RNA, 19 nt, Artificial Sequence
  Description of Artificial Sequence: Synthetic oligonucleotide
  Sense strand starting at position 2160 of SEQ ID NO: 585710
ggaguucugcgccacuuag

SEQ ID NO: 661477 - RNA, 19 nt, Artificial Sequence
  Description of Artificial Sequence: Synthetic oligonucleotide
  Antisense strand to SEQ ID NO: 661476
cuaaguggcgcagaacucc

SEQ ID NO: 661478 - RNA, 19 nt, Artificial Sequence
  Description of Artificial Sequence: Synthetic oligonucleotide
  Sense strand starting at position 2452 of SEQ ID NO: 585710
ccuucuaguccugagaaca

SEQ ID NO: 661479 - RNA, 19 nt, Artificial Sequence
  Description of Artificial Sequence: Synthetic oligonucleotide
  Antisense strand to SEQ ID NO: 661478
uguucucaggacuagaagg

SEQ ID NO: 661480 - RNA, 19 nt, Artificial Sequence
  Description of Artificial Sequence: Synthetic oligonucleotide
  Sense strand starting at position 2479 of SEQ ID NO: 585710
ucccgaugugcccgggauu

SEQ ID NO: 661481 - RNA, 19 nt, Artificial Sequence
  Description of Artificial Sequence: Synthetic oligonucleotide
  Antisense strand to SEQ ID NO: 661480
aaucccgggcacaucggga

SEQ ID NO: 661482 - RNA, 19 nt, Artificial Sequence
  Description of Artificial Sequence: Synthetic oligonucleotide
  Sense strand starting at position 2823 of SEQ ID NO: 585710
gcagaagccucuucgagga

SEQ ID NO: 661483 - RNA, 19 nt, Artificial Sequence
  Description of Artificial Sequence: Synthetic oligonucleotide
  Antisense strand to SEQ ID NO: 661482
uccucgaagaggcuucugc

SEQ ID NO: 661484 - RNA, 19 nt, Artificial Sequence
  Description of Artificial Sequence: Synthetic oligonucleotide
  Sense strand starting at position 2833 of SEQ ID NO: 585710
cuucgaggacucuagagua

SEQ ID NO: 661485 - RNA, 19 nt, Artificial Sequence
  Description of Artificial Sequence: Synthetic oligonucleotide
  Antisense strand to SEQ ID NO: 661484
uacucuagaguccucgaag

SEQ ID NO: 661486 - RNA, 19 nt, Artificial Sequence
  Description of Artificial Sequence: Synthetic oligonucleotide
  Sense strand starting at position 3024 of SEQ ID NO: 585710
uggccugucccugggacaa

SEQ ID NO: 661487 - RNA, 19 nt, Artificial Sequence
  Description of Artificial Sequence: Synthetic oligonucleotide
  Antisense strand to SEQ ID NO: 661486
uugucccagggacaggcca

SEQ ID NO: 661488 - RNA, 19 nt, Artificial Sequence
  Description of Artificial Sequence: Synthetic oligonucleotide
  Sense strand starting at position 3602 of SEQ ID NO: 585710
gaacaauccuucgggaaag

SEQ ID NO: 661489 - RNA, 19 nt, Artificial Sequence
  Description of Artificial Sequence: Synthetic oligonucleotide
  Antisense strand to SEQ ID NO: 661488
cuuucccgaaggauuguuc

SEQ ID NO: 661490 - RNA, 19 nt, Artificial Sequence
  Description of Artificial Sequence: Synthetic oligonucleotide
  Sense strand starting at position 3882 of SEQ ID NO: 585710
gcagaaacauuuggacaga

SEQ ID NO: 661491 - RNA, 19 nt, Artificial Sequence
  Description of Artificial Sequence: Synthetic oligonucleotide
  Antisense strand to SEQ ID NO: 661490
ucuguccaaauguuucugc

SEQ ID NO: 661492 - RNA, 19 nt, Artificial Sequence
  Description of Artificial Sequence: Synthetic oligonucleotide
  Sense strand starting at position 16 of SEQ ID NO: 585711
guaacuuugccagauaauu

SEQ ID NO: 661493 - RNA, 19 nt, Artificial Sequence
  Description of Artificial Sequence: Synthetic oligonucleotide
  Antisense strand to SEQ ID NO: 661492
aauuaucuggcaaaguuac

SEQ ID NO: 661494 - RNA, 19 nt, Artificial Sequence
  Description of Artificial Sequence: Synthetic oligonucleotide
  Sense strand starting at position 53 of SEQ ID NO: 585711
ucuucugcacuguaggauu

SEQ ID NO: 661495 - RNA, 19 nt, Artificial Sequence
  Description of Artificial Sequence: Synthetic oligonucleotide
  Antisense strand to SEQ ID NO: 661494
aauccuacagugcagaaga

SEQ ID NO: 661496 - RNA, 19 nt, Artificial Sequence
  Description of Artificial Sequence: Synthetic oligonucleotide
  Sense strand starting at position 100 of SEQ ID NO: 585711
accagaugccacuaaugua

SEQ ID NO: 661497 - RNA, 19 nt, Artificial Sequence
  Description of Artificial Sequence: Synthetic oligonucleotide
  Antisense strand to SEQ ID NO: 661496
uacauuaguggcaucuggu

SEQ ID NO: 661498 - RNA, 19 nt, Artificial Sequence
  Description of Artificial Sequence: Synthetic oligonucleotide
  Sense strand starting at position 177 of SEQ ID NO: 585711
gguagaagucgggauggca

SEQ ID NO: 661499 - RNA, 19 nt, Artificial Sequence
  Description of Artificial Sequence: Synthetic oligonucleotide
  Antisense strand to SEQ ID NO: 661498
ugccaucccgacuucuacc

SEQ ID NO: 661500 - RNA, 19 nt, Artificial Sequence
  Description of Artificial Sequence: Synthetic oligonucleotide
  Sense strand starting at position 218 of SEQ ID NO: 585711
acugguguauccuuacaau

SEQ ID NO: 661501 - RNA, 19 nt, Artificial Sequence
  Description of Artificial Sequence: Synthetic oligonucleotide
  Antisense strand to SEQ ID NO: 661500
auuguaaggauacaccagu

SEQ ID NO: 661502 - RNA, 19 nt, Artificial Sequence
  Description of Artificial Sequence: Synthetic oligonucleotide
  Sense strand starting at position 412 of SEQ ID NO: 585711
guaucagcucacuaucacu

SEQ ID NO: 661503 - RNA, 19 nt, Artificial Sequence
  Description of Artificial Sequence: Synthetic oligonucleotide
  Antisense strand to SEQ ID NO: 661502
agugauagugagcugauac

SEQ ID NO: 661504 - RNA, 19 nt, Artificial Sequence
  Description of Artificial Sequence: Synthetic oligonucleotide
  Sense strand starting at position 422 of SEQ ID NO: 585711
acuaucacuugcucaagga

SEQ ID NO: 661505 - RNA, 19 nt, Artificial Sequence
  Description of Artificial Sequence: Synthetic oligonucleotide
  Antisense strand to SEQ ID NO: 661504
uccuugagcaagugauagu

SEQ ID NO: 661506 - RNA, 19 nt, Artificial Sequence
  Description of Artificial Sequence: Synthetic oligonucleotide
  Sense strand starting at position 423 of SEQ ID NO: 585711
cuaucacuugcucaaggaa

SEQ ID NO: 661507 - RNA, 19 nt, Artificial Sequence
  Description of Artificial Sequence: Synthetic oligonucleotide
  Antisense strand to SEQ ID NO: 661506
uuccuugagcaagugauag

SEQ ID NO: 661508 - RNA, 19 nt, Artificial Sequence
  Description of Artificial Sequence: Synthetic oligonucleotide
  Sense strand starting at position 549 of SEQ ID NO: 585711
ugugucauucaggauggua

SEQ ID NO: 661509 - RNA, 19 nt, Artificial Sequence
  Description of Artificial Sequence: Synthetic oligonucleotide
  Antisense strand to SEQ ID NO: 661508
uaccauccugaaugacaca

SEQ ID NO: 661510 - RNA, 19 nt, Artificial Sequence
  Description of Artificial Sequence: Synthetic oligonucleotide
  Sense strand starting at position 672 of SEQ ID NO: 585711
ugugaugaauccuuacugu

SEQ ID NO: 661511 - RNA, 19 nt, Artificial Sequence
  Description of Artificial Sequence: Synthetic oligonucleotide
  Antisense strand to SEQ ID NO: 661510
acaguaaggauucaucaca

SEQ ID NO: 661512 - RNA, 19 nt, Artificial Sequence
  Description of Artificial Sequence: Synthetic oligonucleotide
  Sense strand starting at position 1062 of SEQ ID NO: 585711
uuguaaaggucuccaugau

SEQ ID NO: 661513 - RNA, 19 nt, Artificial Sequence
  Description of Artificial Sequence: Synthetic oligonucleotide
  Antisense strand to SEQ ID NO: 661512
aucauggagaccuuuacaa

SEQ ID NO: 661514 - RNA, 19 nt, Artificial Sequence
  Description of Artificial Sequence: Synthetic oligonucleotide
  Sense strand starting at position 1063 of SEQ ID NO: 585711
uguaaaggucuccaugauc

SEQ ID NO: 661515 - RNA, 19 nt, Artificial Sequence
  Description of Artificial Sequence: Synthetic oligonucleotide
  Antisense strand to SEQ ID NO: 661514
gaucauggagaccuuuaca

SEQ ID NO: 661516 - RNA, 19 nt, Artificial Sequence
  Description of Artificial Sequence: Synthetic oligonucleotide
  Sense strand starting at position 1290 of SEQ ID NO: 585711
cgauuugcauagucuacau

SEQ ID NO: 661517 - RNA, 19 nt, Artificial Sequence
  Description of Artificial Sequence: Synthetic oligonucleotide
  Antisense strand to SEQ ID NO: 661516
auguagacuaugcaaaucg

SEQ ID NO: 661518 - RNA, 19 nt, Artificial Sequence
  Description of Artificial Sequence: Synthetic oligonucleotide
  Sense strand starting at position 1294 of SEQ ID NO: 585711
uugcauagucuacaucauu

SEQ ID NO: 661519 - RNA, 19 nt, Artificial Sequence
  Description of Artificial Sequence: Synthetic oligonucleotide
  Antisense strand to SEQ ID NO: 661518
aaugauguagacuaugcaa

SEQ ID NO: 661520 - RNA, 19 nt, Artificial Sequence
  Description of Artificial Sequence: Synthetic oligonucleotide
  Sense strand starting at position 1343 of SEQ ID NO: 585711
ucacguagaagguaaaguu

SEQ ID NO: 661521 - RNA, 19 nt, Artificial Sequence
  Description of Artificial Sequence: Synthetic oligonucleotide
  Antisense strand to SEQ ID NO: 661520
aacuuuaccuucuacguga

SEQ ID NO: 661522 - RNA, 19 nt, Artificial Sequence
  Description of Artificial Sequence: Synthetic oligonucleotide
  Sense strand starting at position 1353 of SEQ ID NO: 585711
gguaaaguuccaugacagc

SEQ ID NO: 661523 - RNA, 19 nt, Artificial Sequence
  Description of Artificial Sequence: Synthetic oligonucleotide
  Antisense strand to SEQ ID NO: 661522
gcugucauggaacuuuacc

SEQ ID NO: 661524 - RNA, 19 nt, Artificial Sequence
  Description of Artificial Sequence: Synthetic oligonucleotide
  Sense strand starting at position 1410 of SEQ ID NO: 585711
cagaacgugguacauauua

SEQ ID NO: 661525 - RNA, 19 nt, Artificial Sequence
  Description of Artificial Sequence: Synthetic oligonucleotide
  Antisense strand to SEQ ID NO: 661524
uaauauguaccacguucug

SEQ ID NO: 661526 - RNA, 19 nt, Artificial Sequence
  Description of Artificial Sequence: Synthetic oligonucleotide
  Sense strand starting at position 1441 of SEQ ID NO: 585711
guauuuguugaacgcuaaa

SEQ ID NO: 661527 - RNA, 19 nt, Artificial Sequence
  Description of Artificial Sequence: Synthetic oligonucleotide
  Antisense strand to SEQ ID NO: 661526
uuuagcguucaacaaauac

SEQ ID NO: 661528 - RNA, 19 nt, Artificial Sequence
  Description of Artificial Sequence: Synthetic oligonucleotide
  Sense strand starting at position 1541 of SEQ ID NO: 585711
cgcagacucccuugacaag

SEQ ID NO: 661529 - RNA, 19 nt, Artificial Sequence
  Description of Artificial Sequence: Synthetic oligonucleotide
  Antisense strand to SEQ ID NO: 661528
cuugucaagggagucugcg

SEQ ID NO: 661530 - RNA, 19 nt, Artificial Sequence
  Description of Artificial Sequence: Synthetic oligonucleotide
  Sense strand starting at position 1542 of SEQ ID NO: 585711
gcagacucccuugacaagu

SEQ ID NO: 661531 - RNA, 19 nt, Artificial Sequence
  Description of Artificial Sequence: Synthetic oligonucleotide
  Antisense strand to SEQ ID NO: 661530
acuugucaagggagucugc

SEQ ID NO: 661532 - RNA, 19 nt, Artificial Sequence
  Description of Artificial Sequence: Synthetic oligonucleotide
  Sense strand starting at position 1621 of SEQ ID NO: 585711
ggcaaaggguugucaagag

SEQ ID NO: 661533 - RNA, 19 nt, Artificial Sequence
  Description of Artificial Sequence: Synthetic oligonucleotide
  Antisense strand to SEQ ID NO: 661532
cucuugacaacccuuugcc

SEQ ID NO: 661534 - RNA, 19 nt, Artificial Sequence
  Description of Artificial Sequence: Synthetic oligonucleotide
  Sense strand starting at position 1635 of SEQ ID NO: 585711
aagagagacgcugagugau

SEQ ID NO: 661535 - RNA, 19 nt, Artificial Sequence
  Description of Artificial Sequence: Synthetic oligonucleotide
  Antisense strand to SEQ ID NO: 661534
aucacucagcgucucucuu

SEQ ID NO: 661536 - RNA, 19 nt, Artificial Sequence
  Description of Artificial Sequence: Synthetic oligonucleotide
  Sense strand starting at position 2434 of SEQ ID NO: 585711
gugagaguccuugguggag

SEQ ID NO: 661537 - RNA, 19 nt, Artificial Sequence
  Description of Artificial Sequence: Synthetic oligonucleotide
  Antisense strand to SEQ ID NO: 661536
cuccaccaaggacucucac

SEQ ID NO: 661538 - RNA, 19 nt, Artificial Sequence
  Description of Artificial Sequence: Synthetic oligonucleotide
  Sense strand starting at position 2627 of SEQ ID NO: 585711
agguaaaguuugucuuaca

SEQ ID NO: 661539 - RNA, 19 nt, Artificial Sequence
  Description of Artificial Sequence: Synthetic oligonucleotide
  Antisense strand to SEQ ID NO: 661538
uguaagacaaacuuuaccu

SEQ ID NO: 661540 - RNA, 19 nt, Artificial Sequence
  Description of Artificial Sequence: Synthetic oligonucleotide
  Sense strand starting at position 2628 of SEQ ID NO: 585711
gguaaaguuugucuuacaa

SEQ ID NO: 661541 - RNA, 19 nt, Artificial Sequence
  Description of Artificial Sequence: Synthetic oligonucleotide
  Antisense strand to SEQ ID NO: 661540
uuguaagacaaacuuuacc

SEQ ID NO: 661542 - RNA, 19 nt, Artificial Sequence
  Description of Artificial Sequence: Synthetic oligonucleotide
  Sense strand starting at position 2725 of SEQ ID NO: 585711
gcuuuagaaugucucugga

SEQ ID NO: 661543 - RNA, 19 nt, Artificial Sequence
  Description of Artificial Sequence: Synthetic oligonucleotide
  Antisense strand to SEQ ID NO: 661542
uccagagacauucuaaagc

SEQ ID NO: 661544 - RNA, 19 nt, Artificial Sequence
  Description of Artificial Sequence: Synthetic oligonucleotide
  Sense strand starting at position 2727 of SEQ ID NO: 585711
uuuagaaugucucuggaac

SEQ ID NO: 661545 - RNA, 19 nt, Artificial Sequence
  Description of Artificial Sequence: Synthetic oligonucleotide
  Antisense strand to SEQ ID NO: 661544
guuccagagacauucuaaa

SEQ ID NO: 661546 - RNA, 19 nt, Artificial Sequence
  Description of Artificial Sequence: Synthetic oligonucleotide
  Sense strand starting at position 2728 of SEQ ID NO: 585711
uuagaaugucucuggaaca

SEQ ID NO: 661547 - RNA, 19 nt, Artificial Sequence
  Description of Artificial Sequence: Synthetic oligonucleotide
  Antisense strand to SEQ ID NO: 661546
uguuccagagacauucuaa

SEQ ID NO: 661548 - RNA, 19 nt, Artificial Sequence
  Description of Artificial Sequence: Synthetic oligonucleotide
  Sense strand starting at position 3104 of SEQ ID NO: 585711
agugaugacauagguuuga

SEQ ID NO: 661549 - RNA, 19 nt, Artificial Sequence
  Description of Artificial Sequence: Synthetic oligonucleotide
  Antisense strand to SEQ ID NO: 661548
ucaaaccuaugucaucacu

SEQ ID NO: 661550 - RNA, 19 nt, Artificial Sequence
  Description of Artificial Sequence: Synthetic oligonucleotide
  Sense strand starting at position 3249 of SEQ ID NO: 585711
caauauuugcuguguagac

SEQ ID NO: 661551 - RNA, 19 nt, Artificial Sequence
  Description of Artificial Sequence: Synthetic oligonucleotide
  Antisense strand to SEQ ID NO: 661550
gucuacacagcaaauauug

SEQ ID NO: 661552 - RNA, 19 nt, Artificial Sequence
  Description of Artificial Sequence: Synthetic oligonucleotide
  Sense strand starting at position 3295 of SEQ ID NO: 585711
auuggaaagcccuaaguau

SEQ ID NO: 661553 - RNA, 19 nt, Artificial Sequence
  Description of Artificial Sequence: Synthetic oligonucleotide
  Antisense strand to SEQ ID NO: 661552
auacuuagggcuuuccaau

SEQ ID NO: 661554 - RNA, 19 nt, Artificial Sequence
  Description of Artificial Sequence: Synthetic oligonucleotide
  Sense strand starting at position 3359 of SEQ ID NO: 585711
ccuugaaacaguggugaag

SEQ ID NO: 661555 - RNA, 19 nt, Artificial Sequence
  Description of Artificial Sequence: Synthetic oligonucleotide
  Antisense strand to SEQ ID NO: 661554
cuucaccacuguuucaagg

SEQ ID NO: 661556 - RNA, 19 nt, Artificial Sequence
  Description of Artificial Sequence: Synthetic oligonucleotide
  Sense strand starting at position 3518 of SEQ ID NO: 585711
acugaagcuuaauucguaa

SEQ ID NO: 661557 - RNA, 19 nt, Artificial Sequence
  Description of Artificial Sequence: Synthetic oligonucleotide
  Antisense strand to SEQ ID NO: 661556
uuacgaauuaagcuucagu

SEQ ID NO: 661558 - RNA, 19 nt, Artificial Sequence
  Description of Artificial Sequence: Synthetic oligonucleotide
  Sense strand starting at position 3521 of SEQ ID NO: 585711
gaagcuuaauucguaagga

SEQ ID NO: 661559 - RNA, 19 nt, Artificial Sequence
  Description of Artificial Sequence: Synthetic oligonucleotide
  Antisense strand to SEQ ID NO: 661558
uccuuacgaauuaagcuuc

SEQ ID NO: 661560 - RNA, 19 nt, Artificial Sequence
  Description of Artificial Sequence: Synthetic oligonucleotide
  Sense strand starting at position 3537 of SEQ ID NO: 585711
ggaacauuaucugucugca

SEQ ID NO: 661561 - RNA, 19 nt, Artificial Sequence
  Description of Artificial Sequence: Synthetic oligonucleotide
  Antisense strand to SEQ ID NO: 661560
ugcagacagauaauguucc

SEQ ID NO: 661562 - RNA, 19 nt, Artificial Sequence
  Description of Artificial Sequence: Synthetic oligonucleotide
  Sense strand starting at position 3542 of SEQ ID NO: 585711
auuaucugucugcagggaa

SEQ ID NO: 661563 - RNA, 19 nt, Artificial Sequence
  Description of Artificial Sequence: Synthetic oligonucleotide
  Antisense strand to SEQ ID NO: 661562
uucccugcagacagauaau

SEQ ID NO: 661564 - RNA, 19 nt, Artificial Sequence
  Description of Artificial Sequence: Synthetic oligonucleotide
  Sense strand starting at position 3556 of SEQ ID NO: 585711
gggaaaugagccugaucug

SEQ ID NO: 661565 - RNA, 19 nt, Artificial Sequence
  Description of Artificial Sequence: Synthetic oligonucleotide
  Antisense strand to SEQ ID NO: 661564
cagaucaggcucauuuccc

SEQ ID NO: 661566 - RNA, 19 nt, Artificial Sequence
  Description of Artificial Sequence: Synthetic oligonucleotide
  Sense strand starting at position 3559 of SEQ ID NO: 585711
aaaugagccugaucugagu

SEQ ID NO: 661567 - RNA, 19 nt, Artificial Sequence
  Description of Artificial Sequence: Synthetic oligonucleotide
  Antisense strand to SEQ ID NO: 661566
acucagaucaggcucauuu

SEQ ID NO: 661568 - RNA, 19 nt, Artificial Sequence
  Description of Artificial Sequence: Synthetic oligonucleotide
  Sense strand starting at position 3565 of SEQ ID NO: 585711
gccugaucugaguagagca

SEQ ID NO: 661569 - RNA, 19 nt, Artificial Sequence
  Description of Artificial Sequence: Synthetic oligonucleotide
  Antisense strand to SEQ ID NO: 661568
ugcucuacucagaucaggc

SEQ ID NO: 661570 - RNA, 19 nt, Artificial Sequence
  Description of Artificial Sequence: Synthetic oligonucleotide
  Sense strand starting at position 3649 of SEQ ID NO: 585711
aaucaaugugaguggccau

SEQ ID NO: 661571 - RNA, 19 nt, Artificial Sequence
  Description of Artificial Sequence: Synthetic oligonucleotide
  Antisense strand to SEQ ID NO: 661570
auggccacucacauugauu

SEQ ID NO: 661572 - RNA, 19 nt, Artificial Sequence
  Description of Artificial Sequence: Synthetic oligonucleotide
  Sense strand starting at position 2 of SEQ ID NO: 585712
uagugugacuucuuggauu

SEQ ID NO: 661573 - RNA, 19 nt, Artificial Sequence
  Description of Artificial Sequence: Synthetic oligonucleotide
  Antisense strand to SEQ ID NO: 661572
aauccaagaagucacacua

SEQ ID NO: 661574 - RNA, 19 nt, Artificial Sequence
  Description of Artificial Sequence: Synthetic oligonucleotide
  Sense strand starting at position 8 of SEQ ID NO: 585712
gacuucuuggauugggauu

SEQ ID NO: 661575 - RNA, 19 nt, Artificial Sequence
  Description of Artificial Sequence: Synthetic oligonucleotide
  Antisense strand to SEQ ID NO: 661574
aaucccaauccaagaaguc

SEQ ID NO: 661576 - RNA, 19 nt, Artificial Sequence
  Description of Artificial Sequence: Synthetic oligonucleotide
  Sense strand starting at position 336 of SEQ ID NO: 585712
gugggacaaucugucucaa

SEQ ID NO: 661577 - RNA, 19 nt, Artificial Sequence
  Description of Artificial Sequence: Synthetic oligonucleotide
  Antisense strand to SEQ ID NO: 661576
uugagacagauugucccac

SEQ ID NO: 661578 - RNA, 19 nt, Artificial Sequence
  Description of Artificial Sequence: Synthetic oligonucleotide
  Sense strand starting at position 338 of SEQ ID NO: 585712
gggacaaucugucucaaug

SEQ ID NO: 661579 - RNA, 19 nt, Artificial Sequence
  Description of Artificial Sequence: Synthetic oligonucleotide
  Antisense strand to SEQ ID NO: 661578
cauugagacagauuguccc

SEQ ID NO: 661580 - RNA, 19 nt, Artificial Sequence
  Description of Artificial Sequence: Synthetic oligonucleotide
  Sense strand starting at position 379 of SEQ ID NO: 585712
gcaaauagaugcuuuccca

SEQ ID NO: 661581 - RNA, 19 nt, Artificial Sequence
  Description of Artificial Sequence: Synthetic oligonucleotide
  Antisense strand to SEQ ID NO: 661580
ugggaaagcaucuauuugc

SEQ ID NO: 661582 - RNA, 19 nt, Artificial Sequence
  Description of Artificial Sequence: Synthetic oligonucleotide
  Sense strand starting at position 428 of SEQ ID NO: 585712
ggacuaacuugcuccucau

SEQ ID NO: 661583 - RNA, 19 nt, Artificial Sequence
  Description of Artificial Sequence: Synthetic oligonucleotide
  Antisense strand to SEQ ID NO: 661582
augaggagcaaguuagucc

SEQ ID NO: 661584 - RNA, 19 nt, Artificial Sequence
  Description of Artificial Sequence: Synthetic oligonucleotide
  Sense strand starting at position 510 of SEQ ID NO: 585712
gggaaagauuaauaaguua

SEQ ID NO: 661585 - RNA, 19 nt, Artificial Sequence
  Description of Artificial Sequence: Synthetic oligonucleotide
  Antisense strand to SEQ ID NO: 661584
uaacuuauuaaucuuuccc

SEQ ID NO: 661586 - RNA, 19 nt, Artificial Sequence
  Description of Artificial Sequence: Synthetic oligonucleotide
  Sense strand starting at position 874 of SEQ ID NO: 585712
uuauguaccaccgagaaug

SEQ ID NO: 661587 - RNA, 19 nt, Artificial Sequence
  Description of Artificial Sequence: Synthetic oligonucleotide
  Antisense strand to SEQ ID NO: 661586
cauucucggugguacauaa

SEQ ID NO: 661588 - RNA, 19 nt, Artificial Sequence
  Description of Artificial Sequence: Synthetic oligonucleotide
  Sense strand starting at position 1025 of SEQ ID NO: 585712
uguguugaauagccugaaa

SEQ ID NO: 661589 - RNA, 19 nt, Artificial Sequence
  Description of Artificial Sequence: Synthetic oligonucleotide
  Antisense strand to SEQ ID NO: 661588
uuucaggcuauucaacaca

SEQ ID NO: 661590 - RNA, 19 nt, Artificial Sequence
  Description of Artificial Sequence: Synthetic oligonucleotide
  Sense strand starting at position 1073 of SEQ ID NO: 585712
ccuaauagcuuguugaaca

SEQ ID NO: 661591 - RNA, 19 nt, Artificial Sequence
  Description of Artificial Sequence: Synthetic oligonucleotide
  Antisense strand to SEQ ID NO: 661590
uguucaacaagcuauuagg

SEQ ID NO: 661592 - RNA, 19 nt, Artificial Sequence
  Description of Artificial Sequence: Synthetic oligonucleotide
  Sense strand starting at position 1110 of SEQ ID NO: 585712
aguaguacuugcucaauac

SEQ ID NO: 661593 - RNA, 19 nt, Artificial Sequence
  Description of Artificial Sequence: Synthetic oligonucleotide
  Antisense strand to SEQ ID NO: 661592
guauugagcaaguacuacu

SEQ ID NO: 661594 - RNA, 19 nt, Artificial Sequence
  Description of Artificial Sequence: Synthetic oligonucleotide
  Sense strand starting at position 1111 of SEQ ID NO: 585712
guaguacuugcucaauacu

SEQ ID NO: 661595 - RNA, 19 nt, Artificial Sequence
  Description of Artificial Sequence: Synthetic oligonucleotide
  Antisense strand to SEQ ID NO: 661594
aguauugagcaaguacuac

SEQ ID NO: 661596 - RNA, 19 nt, Artificial Sequence
  Description of Artificial Sequence: Synthetic oligonucleotide
  Sense strand starting at position 1147 of SEQ ID NO: 585712
accuguguacaccauauaa

SEQ ID NO: 661597 - RNA, 19 nt, Artificial Sequence
  Description of Artificial Sequence: Synthetic oligonucleotide
  Antisense strand to SEQ ID NO: 661596
uuauaugguguacacaggu

SEQ ID NO: 661598 - RNA, 19 nt, Artificial Sequence
  Description of Artificial Sequence: Synthetic oligonucleotide
  Sense strand starting at position 1225 of SEQ ID NO: 585712
ugaggccuuuaccugauaa

SEQ ID NO: 661599 - RNA, 19 nt, Artificial Sequence
  Description of Artificial Sequence: Synthetic oligonucleotide
  Antisense strand to SEQ ID NO: 661598
uuaucagguaaaggccuca

SEQ ID NO: 661600 - RNA, 19 nt, Artificial Sequence
  Description of Artificial Sequence: Synthetic oligonucleotide
  Sense strand starting at position 1332 of SEQ ID NO: 585712
cuaacaagauuagucgaaa

SEQ ID NO: 661601 - RNA, 19 nt, Artificial Sequence
  Description of Artificial Sequence: Synthetic oligonucleotide
  Antisense strand to SEQ ID NO: 661600
uuucgacuaaucuuguuag

SEQ ID NO: 661602 - RNA, 19 nt, Artificial Sequence
  Description of Artificial Sequence: Synthetic oligonucleotide
  Sense strand starting at position 1423 of SEQ ID NO: 585712
uuagcaguuccuuauuauc

SEQ ID NO: 661603 - RNA, 19 nt, Artificial Sequence
  Description of Artificial Sequence: Synthetic oligonucleotide
  Antisense strand to SEQ ID NO: 661602
gauaauaaggaacugcuaa

SEQ ID NO: 661604 - RNA, 19 nt, Artificial Sequence
  Description of Artificial Sequence: Synthetic oligonucleotide
  Sense strand starting at position 1489 of SEQ ID NO: 585712
augaucuagcuucguggaa

SEQ ID NO: 661605 - RNA, 19 nt, Artificial Sequence
  Description of Artificial Sequence: Synthetic oligonucleotide
  Antisense strand to SEQ ID NO: 661604
uuccacgaagcuagaucau

SEQ ID NO: 661606 - RNA, 19 nt, Artificial Sequence
  Description of Artificial Sequence: Synthetic oligonucleotide
  Sense strand starting at position 1493 of SEQ ID NO: 585712
ucuagcuucguggaauaaa

SEQ ID NO: 661607 - RNA, 19 nt, Artificial Sequence
  Description of Artificial Sequence: Synthetic oligonucleotide
  Antisense strand to SEQ ID NO: 661606
uuuauuccacgaagcuaga

SEQ ID NO: 661608 - RNA, 19 nt, Artificial Sequence
  Description of Artificial Sequence: Synthetic oligonucleotide
  Sense strand starting at position 1496 of SEQ ID NO: 585712
agcuucguggaauaaauau

SEQ ID NO: 661609 - RNA, 19 nt, Artificial Sequence
  Description of Artificial Sequence: Synthetic oligonucleotide
  Antisense strand to SEQ ID NO: 661608
auauuuauuccacgaagcu

SEQ ID NO: 661610 - RNA, 19 nt, Artificial Sequence
  Description of Artificial Sequence: Synthetic oligonucleotide
  Sense strand starting at position 1597 of SEQ ID NO: 585712
guguuucuucugcuuacuu

SEQ ID NO: 661611 - RNA, 19 nt, Artificial Sequence
  Description of Artificial Sequence: Synthetic oligonucleotide
  Antisense strand to SEQ ID NO: 661610
aaguaagcagaagaaacac

SEQ ID NO: 661612 - RNA, 19 nt, Artificial Sequence
  Description of Artificial Sequence: Synthetic oligonucleotide
  Sense strand starting at position 1738 of SEQ ID NO: 585712
cccagacagucaccugauu

SEQ ID NO: 661613 - RNA, 19 nt, Artificial Sequence
  Description of Artificial Sequence: Synthetic oligonucleotide
  Antisense strand to SEQ ID NO: 661612
aaucaggugacugucuggg

SEQ ID NO: 661614 - RNA, 19 nt, Artificial Sequence
  Description of Artificial Sequence: Synthetic oligonucleotide
  Sense strand starting at position 1743 of SEQ ID NO: 585712
acagucaccugauuaaguu

SEQ ID NO: 661615 - RNA, 19 nt, Artificial Sequence
  Description of Artificial Sequence: Synthetic oligonucleotide
  Antisense strand to SEQ ID NO: 661614
aacuuaaucaggugacugu

SEQ ID NO: 661616 - RNA, 19 nt, Artificial Sequence
  Description of Artificial Sequence: Synthetic oligonucleotide
  Sense strand starting at position 2033 of SEQ ID NO: 585712
gguauacauuagccuauau

SEQ ID NO: 661617 - RNA, 19 nt, Artificial Sequence
  Description of Artificial Sequence: Synthetic oligonucleotide
  Antisense strand to SEQ ID NO: 661616
auauaggcuaauguauacc

SEQ ID NO: 661618 - RNA, 19 nt, Artificial Sequence
  Description of Artificial Sequence: Synthetic oligonucleotide
  Sense strand starting at position 2266 of SEQ ID NO: 585712
guuacugacaggugacaga

SEQ ID NO: 661619 - RNA, 19 nt, Artificial Sequence
  Description of Artificial Sequence: Synthetic oligonucleotide
  Antisense strand to SEQ ID NO: 661618
ucugucaccugucaguaac

SEQ ID NO: 661620 - RNA, 19 nt, Artificial Sequence
  Description of Artificial Sequence: Synthetic oligonucleotide
  Sense strand starting at position 2276 of SEQ ID NO: 585712
ggugacagaccgcauauau

SEQ ID NO: 661621 - RNA, 19 nt, Artificial Sequence
  Description of Artificial Sequence: Synthetic oligonucleotide
  Antisense strand to SEQ ID NO: 661620
auauaugcggucugucacc

SEQ ID NO: 661622 - RNA, 19 nt, Artificial Sequence
  Description of Artificial Sequence: Synthetic oligonucleotide
  Sense strand starting at position 2294 of SEQ ID NO: 585712
ugaggugauuccguaagac

SEQ ID NO: 661623 - RNA, 19 nt, Artificial Sequence
  Description of Artificial Sequence: Synthetic oligonucleotide
  Antisense strand to SEQ ID NO: 661622
gucuuacggaaucaccuca

SEQ ID NO: 661624 - RNA, 19 nt, Artificial Sequence
  Description of Artificial Sequence: Synthetic oligonucleotide
  Sense strand starting at position 2394 of SEQ ID NO: 585712
aguacagaaaccuguugua

SEQ ID NO: 661625 - RNA, 19 nt, Artificial Sequence
  Description of Artificial Sequence: Synthetic oligonucleotide
  Antisense strand to SEQ ID NO: 661624
uacaacagguuucuguacu

SEQ ID NO: 661626 - RNA, 19 nt, Artificial Sequence
  Description of Artificial Sequence: Synthetic oligonucleotide
  Sense strand starting at position 2456 of SEQ ID NO: 585712
acuaucuagguuuguauga

SEQ ID NO: 661627 - RNA, 19 nt, Artificial Sequence
  Description of Artificial Sequence: Synthetic oligonucleotide
  Antisense strand to SEQ ID NO: 661626
ucauacaaaccuagauagu

SEQ ID NO: 661628 - RNA, 19 nt, Artificial Sequence
  Description of Artificial Sequence: Synthetic oligonucleotide
  Sense strand starting at position 2469 of SEQ ID NO: 585712
guaugaguaugcucuauaa

SEQ ID NO: 661629 - RNA, 19 nt, Artificial Sequence
  Description of Artificial Sequence: Synthetic oligonucleotide
  Antisense strand to SEQ ID NO: 661628
uuauagagcauacucauac

SEQ ID NO: 661630 - RNA, 19 nt, Artificial Sequence
  Description of Artificial Sequence: Synthetic oligonucleotide
  Sense strand starting at position 2471 of SEQ ID NO: 585712
augaguaugcucuauaaug

SEQ ID NO: 661631 - RNA, 19 nt, Artificial Sequence
  Description of Artificial Sequence: Synthetic oligonucleotide
  Antisense strand to SEQ ID NO: 661630
cauuauagagcauacucau

SEQ ID NO: 661632 - RNA, 19 nt, Artificial Sequence
  Description of Artificial Sequence: Synthetic oligonucleotide
  Sense strand starting at position 2473 of SEQ ID NO: 585712
gaguaugcucuauaauguu

SEQ ID NO: 661633 - RNA, 19 nt, Artificial Sequence
  Description of Artificial Sequence: Synthetic oligonucleotide
  Antisense strand to SEQ ID NO: 661632
aacauuauagagcauacuc

SEQ ID NO: 661634 - RNA, 19 nt, Artificial Sequence
  Description of Artificial Sequence: Synthetic oligonucleotide
  Sense strand starting at position 3149 of SEQ ID NO: 585712
gccauuauagcugaguaaa

SEQ ID NO: 661635 - RNA, 19 nt, Artificial Sequence
  Description of Artificial Sequence: Synthetic oligonucleotide
  Antisense strand to SEQ ID NO: 661634
uuuacucagcuauaauggc

SEQ ID NO: 661636 - RNA, 19 nt, Artificial Sequence
  Description of Artificial Sequence: Synthetic oligonucleotide
  Sense strand starting at position 3152 of SEQ ID NO: 585712
auuauagcugaguaaauca

SEQ ID NO: 661637 - RNA, 19 nt, Artificial Sequence
  Description of Artificial Sequence: Synthetic oligonucleotide
  Antisense strand to SEQ ID NO: 661636
ugauuuacucagcuauaau

SEQ ID NO: 661638 - RNA, 19 nt, Artificial Sequence
  Description of Artificial Sequence: Synthetic oligonucleotide
  Sense strand starting at position 3345 of SEQ ID NO: 585712
agaacucaggccuguaaua

SEQ ID NO: 661639 - RNA, 19 nt, Artificial Sequence
  Description of Artificial Sequence: Synthetic oligonucleotide
  Antisense strand to SEQ ID NO: 661638
uauuacaggccugaguucu

SEQ ID NO: 661640 - RNA, 19 nt, Artificial Sequence
  Description of Artificial Sequence: Synthetic oligonucleotide
  Sense strand starting at position 3387 of SEQ ID NO: 585712
gggcacaacuaguuagacu

SEQ ID NO: 661641 - RNA, 19 nt, Artificial Sequence
  Description of Artificial Sequence: Synthetic oligonucleotide
  Antisense strand to SEQ ID NO: 661640
agucuaacuaguugugccc

SEQ ID NO: 661642 - RNA, 19 nt, Artificial Sequence
  Description of Artificial Sequence: Synthetic oligonucleotide
  Sense strand starting at position 3440 of SEQ ID NO: 585712
cguaguuauauguacaacu

SEQ ID NO: 661643 - RNA, 19 nt, Artificial Sequence
  Description of Artificial Sequence: Synthetic oligonucleotide
  Antisense strand to SEQ ID NO: 661642
aguuguacauauaacuacg

SEQ ID NO: 661644 - RNA, 19 nt, Artificial Sequence
  Description of Artificial Sequence: Synthetic oligonucleotide
  Sense strand starting at position 3506 of SEQ ID NO: 585712
uucuuaaaggcauaaugua

SEQ ID NO: 661645 - RNA, 19 nt, Artificial Sequence
  Description of Artificial Sequence: Synthetic oligonucleotide
  Antisense strand to SEQ ID NO: 661644
uacauuaugccuuuaagaa

SEQ ID NO: 661646 - RNA, 19 nt, Artificial Sequence
  Description of Artificial Sequence: Synthetic oligonucleotide
  Sense strand starting at position 3514 of SEQ ID NO: 585712
ggcauaauguaguucuaag

SEQ ID NO: 661647 - RNA, 19 nt, Artificial Sequence
  Description of Artificial Sequence: Synthetic oligonucleotide
  Antisense strand to SEQ ID NO: 661646
cuuagaacuacauuaugcc

SEQ ID NO: 661648 - RNA, 19 nt, Artificial Sequence
  Description of Artificial Sequence: Synthetic oligonucleotide
  Sense strand starting at position 3793 of SEQ ID NO: 585712
gcuauccugguugacuaaa

SEQ ID NO: 661649 - RNA, 19 nt, Artificial Sequence
  Description of Artificial Sequence: Synthetic oligonucleotide
  Antisense strand to SEQ ID NO: 661648
uuuagucaaccaggauagc

SEQ ID NO: 661650 - RNA, 19 nt, Artificial Sequence
  Description of Artificial Sequence: Synthetic oligonucleotide
  Sense strand starting at position 3952 of SEQ ID NO: 585712
acagaacucuaggcuauua

SEQ ID NO: 661651 - RNA, 19 nt, Artificial Sequence
  Description of Artificial Sequence: Synthetic oligonucleotide
  Antisense strand to SEQ ID NO: 661650
uaauagccuagaguucugu

SEQ ID NO: 661652 - RNA, 19 nt, Artificial Sequence
  Description of Artificial Sequence: Synthetic oligonucleotide
  Sense strand starting at position 53 of SEQ ID NO: 585713
ucauuugacuuugguaaac

SEQ ID NO: 661653 - RNA, 19 nt, Artificial Sequence
  Description of Artificial Sequence: Synthetic oligonucleotide
  Antisense strand to SEQ ID NO: 661652
guuuaccaaagucaaauga

SEQ ID NO: 661654 - RNA, 19 nt, Artificial Sequence
  Description of Artificial Sequence: Synthetic oligonucleotide
  Sense strand starting at position 55 of SEQ ID NO: 585713
auuugacuuugguaaacaa

SEQ ID NO: 661655 - RNA, 19 nt, Artificial Sequence
  Description of Artificial Sequence: Synthetic oligonucleotide
  Antisense strand to SEQ ID NO: 661654
uuguuuaccaaagucaaau

SEQ ID NO: 661656 - RNA, 19 nt, Artificial Sequence
  Description of Artificial Sequence: Synthetic oligonucleotide
  Sense strand starting at position 87 of SEQ ID NO: 585713
uuuaaauccuauccagugu

SEQ ID NO: 661657 - RNA, 19 nt, Artificial Sequence
  Description of Artificial Sequence: Synthetic oligonucleotide
  Antisense strand to SEQ ID NO: 661656
acacuggauaggauuuaaa

SEQ ID NO: 661658 - RNA, 19 nt, Artificial Sequence
  Description of Artificial Sequence: Synthetic oligonucleotide
  Sense strand starting at position 96 of SEQ ID NO: 585713
uauccaguguuguugccaa

SEQ ID NO: 661659 - RNA, 19 nt, Artificial Sequence
  Description of Artificial Sequence: Synthetic oligonucleotide
  Antisense strand to SEQ ID NO: 661658
uuggcaacaacacuggaua

SEQ ID NO: 661660 - RNA, 19 nt, Artificial Sequence
  Description of Artificial Sequence: Synthetic oligonucleotide
  Sense strand starting at position 185 of SEQ ID NO: 585713
ugcucucacggucauuuau

SEQ ID NO: 661661 - RNA, 19 nt, Artificial Sequence
  Description of Artificial Sequence: Synthetic oligonucleotide
  Antisense strand to SEQ ID NO: 661660
auaaaugaccgugagagca

SEQ ID NO: 661662 - RNA, 19 nt, Artificial Sequence
  Description of Artificial Sequence: Synthetic oligonucleotide
  Sense strand starting at position 191 of SEQ ID NO: 585713
cacggucauuuauagugua

SEQ ID NO: 661663 - RNA, 19 nt, Artificial Sequence
  Description of Artificial Sequence: Synthetic oligonucleotide
  Antisense strand to SEQ ID NO: 661662
uacacuauaaaugaccgug

SEQ ID NO: 661664 - RNA, 19 nt, Artificial Sequence
  Description of Artificial Sequence: Synthetic oligonucleotide
  Sense strand starting at position 194 of SEQ ID NO: 585713
ggucauuuauaguguauau

SEQ ID NO: 661665 - RNA, 19 nt, Artificial Sequence
  Description of Artificial Sequence: Synthetic oligonucleotide
  Antisense strand to SEQ ID NO: 661664
auauacacuauaaaugacc

SEQ ID NO: 661666 - RNA, 19 nt, Artificial Sequence
  Description of Artificial Sequence: Synthetic oligonucleotide
  Sense strand starting at position 234 of SEQ ID NO: 585713
augucaucccaucaugcau

SEQ ID NO: 661667 - RNA, 19 nt, Artificial Sequence
  Description of Artificial Sequence: Synthetic oligonucleotide
  Antisense strand to SEQ ID NO: 661666
augcaugaugggaugacau

SEQ ID NO: 661668 - RNA, 19 nt, Artificial Sequence
  Description of Artificial Sequence: Synthetic oligonucleotide
  Sense strand starting at position 263 of SEQ ID NO: 585713
ucagaugaugucugcauca

SEQ ID NO: 661669 - RNA, 19 nt, Artificial Sequence
  Description of Artificial Sequence: Synthetic oligonucleotide
  Antisense strand to SEQ ID NO: 661668
ugaugcagacaucaucuga

SEQ ID NO: 661670 - RNA, 19 nt, Artificial Sequence
  Description of Artificial Sequence: Synthetic oligonucleotide
  Sense strand starting at position 265 of SEQ ID NO: 585713
agaugaugucugcaucaug

SEQ ID NO: 661671 - RNA, 19 nt, Artificial Sequence
  Description of Artificial Sequence: Synthetic oligonucleotide
  Antisense strand to SEQ ID NO: 661670
caugaugcagacaucaucu

SEQ ID NO: 661672 - RNA, 19 nt, Artificial Sequence
  Description of Artificial Sequence: Synthetic oligonucleotide
  Sense strand starting at position 268 of SEQ ID NO: 585713
ugaugucugcaucaugaag

SEQ ID NO: 661673 - RNA, 19 nt, Artificial Sequence
  Description of Artificial Sequence: Synthetic oligonucleotide
  Antisense strand to SEQ ID NO: 661672
cuucaugaugcagacauca

SEQ ID NO: 661674 - RNA, 19 nt, Artificial Sequence
  Description of Artificial Sequence: Synthetic oligonucleotide
  Sense strand starting at position 288 of SEQ ID NO: 585713
cagggcuugucucugaacu

SEQ ID NO: 661675 - RNA, 19 nt, Artificial Sequence
  Description of Artificial Sequence: Synthetic oligonucleotide
  Antisense strand to SEQ ID NO: 661674
aguucagagacaagcccug

SEQ ID NO: 661676 - RNA, 19 nt, Artificial Sequence
  Description of Artificial Sequence: Synthetic oligonucleotide
  Sense strand starting at position 321 of SEQ ID NO: 585713
agcggacagguaugguaaa

SEQ ID NO: 661677 - RNA, 19 nt, Artificial Sequence
  Description of Artificial Sequence: Synthetic oligonucleotide
  Antisense strand to SEQ ID NO: 661676
uuuaccauaccuguccgcu

SEQ ID NO: 661678 - RNA, 19 nt, Artificial Sequence
  Description of Artificial Sequence: Synthetic oligonucleotide
  Sense strand starting at position 783 of SEQ ID NO: 585713
uugcaaauuugaugcuaac

SEQ ID NO: 661679 - RNA, 19 nt, Artificial Sequence
  Description of Artificial Sequence: Synthetic oligonucleotide
  Antisense strand to SEQ ID NO: 661678
guuagcaucaaauuugcaa

SEQ ID NO: 661680 - RNA, 19 nt, Artificial Sequence
  Description of Artificial Sequence: Synthetic oligonucleotide
  Sense strand starting at position 1139 of SEQ ID NO: 585713
ggucaugcuugggucugua

SEQ ID NO: 661681 - RNA, 19 nt, Artificial Sequence
  Description of Artificial Sequence: Synthetic oligonucleotide
  Antisense strand to SEQ ID NO: 661680
uacagacccaagcaugacc

SEQ ID NO: 661682 - RNA, 19 nt, Artificial Sequence
  Description of Artificial Sequence: Synthetic oligonucleotide
  Sense strand starting at position 1418 of SEQ ID NO: 585713
cucuacugguugcuuuaaa

SEQ ID NO: 661683 - RNA, 19 nt, Artificial Sequence
  Description of Artificial Sequence: Synthetic oligonucleotide
  Antisense strand to SEQ ID NO: 661682
uuuaaagcaaccaguagag

SEQ ID NO: 661684 - RNA, 19 nt, Artificial Sequence
  Description of Artificial Sequence: Synthetic oligonucleotide
  Sense strand starting at position 1446 of SEQ ID NO: 585713
cucagaaccucucaggaau

SEQ ID NO: 661685 - RNA, 19 nt, Artificial Sequence
  Description of Artificial Sequence: Synthetic oligonucleotide
  Antisense strand to SEQ ID NO: 661684
auuccugagagguucugag

SEQ ID NO: 661686 - RNA, 19 nt, Artificial Sequence
  Description of Artificial Sequence: Synthetic oligonucleotide
  Sense strand starting at position 1520 of SEQ ID NO: 585713
agugaauaggucugucuuc

SEQ ID NO: 661687 - RNA, 19 nt, Artificial Sequence
  Description of Artificial Sequence: Synthetic oligonucleotide
  Antisense strand to SEQ ID NO: 661686
gaagacagaccuauucacu

SEQ ID NO: 661688 - RNA, 19 nt, Artificial Sequence
  Description of Artificial Sequence: Synthetic oligonucleotide
  Sense strand starting at position 1668 of SEQ ID NO: 585713
aguccacaucagcgacaau

SEQ ID NO: 661689 - RNA, 19 nt, Artificial Sequence
  Description of Artificial Sequence: Synthetic oligonucleotide
  Antisense strand to SEQ ID NO: 661688
auugucgcugauguggacu

SEQ ID NO: 661690 - RNA, 19 nt, Artificial Sequence
  Description of Artificial Sequence: Synthetic oligonucleotide
  Sense strand starting at position 1984 of SEQ ID NO: 585713
ggacaugucugguugcauu

SEQ ID NO: 661691 - RNA, 19 nt, Artificial Sequence
  Description of Artificial Sequence: Synthetic oligonucleotide
  Antisense strand to SEQ ID NO: 661690
aaugcaaccagacaugucc

SEQ ID NO: 661692 - RNA, 19 nt, Artificial Sequence
  Description of Artificial Sequence: Synthetic oligonucleotide
  Sense strand starting at position 2051 of SEQ ID NO: 585713
agagcuguacccuguaaag

SEQ ID NO: 661693 - RNA, 19 nt, Artificial Sequence
  Description of Artificial Sequence: Synthetic oligonucleotide
  Antisense strand to SEQ ID NO: 661692
cuuuacaggguacagcucu

SEQ ID NO: 661694 - RNA, 19 nt, Artificial Sequence
  Description of Artificial Sequence: Synthetic oligonucleotide
  Sense strand starting at position 2053 of SEQ ID NO: 585713
agcuguacccuguaaagaa

SEQ ID NO: 661695 - RNA, 19 nt, Artificial Sequence
  Description of Artificial Sequence: Synthetic oligonucleotide
  Antisense strand to SEQ ID NO: 661694
uucuuuacaggguacagcu

SEQ ID NO: 661696 - RNA, 19 nt, Artificial Sequence
  Description of Artificial Sequence: Synthetic oligonucleotide
  Sense strand starting at position 2484 of SEQ ID NO: 585713
cuuggugugccuuggauuu

SEQ ID NO: 661697 - RNA, 19 nt, Artificial Sequence
  Description of Artificial Sequence: Synthetic oligonucleotide
  Antisense strand to SEQ ID NO: 661696
aaauccaaggcacaccaag

SEQ ID NO: 661698 - RNA, 19 nt, Artificial Sequence
  Description of Artificial Sequence: Synthetic oligonucleotide
  Sense strand starting at position 2495 of SEQ ID NO: 585713
uuggauuucugaggauaga

SEQ ID NO: 661699 - RNA, 19 nt, Artificial Sequence
  Description of Artificial Sequence: Synthetic oligonucleotide
  Antisense strand to SEQ ID NO: 661698
ucuauccucagaaauccaa

SEQ ID NO: 661700 - RNA, 19 nt, Artificial Sequence
  Description of Artificial Sequence: Synthetic oligonucleotide
  Sense strand starting at position 2506 of SEQ ID NO: 585713
aggauagacuuacagucau

SEQ ID NO: 661701 - RNA, 19 nt, Artificial Sequence
  Description of Artificial Sequence: Synthetic oligonucleotide
  Antisense strand to SEQ ID NO: 661700
augacuguaagucuauccu

SEQ ID NO: 661702 - RNA, 19 nt, Artificial Sequence
  Description of Artificial Sequence: Synthetic oligonucleotide
  Sense strand starting at position 2512 of SEQ ID NO: 585713
gacuuacagucaucugaug

SEQ ID NO: 661703 - RNA, 19 nt, Artificial Sequence
  Description of Artificial Sequence: Synthetic oligonucleotide
  Antisense strand to SEQ ID NO: 661702
caucagaugacuguaaguc

SEQ ID NO: 661704 - RNA, 19 nt, Artificial Sequence
  Description of Artificial Sequence: Synthetic oligonucleotide
  Sense strand starting at position 2649 of SEQ ID NO: 585713
acaaguauguuggacaaca

SEQ ID NO: 661705 - RNA, 19 nt, Artificial Sequence
  Description of Artificial Sequence: Synthetic oligonucleotide
  Antisense strand to SEQ ID NO: 661704
uguuguccaacauacuugu

SEQ ID NO: 661706 - RNA, 19 nt, Artificial Sequence
  Description of Artificial Sequence: Synthetic oligonucleotide
  Sense strand starting at position 2715 of SEQ ID NO: 585713
aaagaacucuagggacaga

SEQ ID NO: 661707 - RNA, 19 nt, Artificial Sequence
  Description of Artificial Sequence: Synthetic oligonucleotide
  Antisense strand to SEQ ID NO: 661706
ucugucccuagaguucuuu

SEQ ID NO: 661708 - RNA, 19 nt, Artificial Sequence
  Description of Artificial Sequence: Synthetic oligonucleotide
  Sense strand starting at position 2788 of SEQ ID NO: 585713
uccagaagucaagguuuaa

SEQ ID NO: 661709 - RNA, 19 nt, Artificial Sequence
  Description of Artificial Sequence: Synthetic oligonucleotide
  Antisense strand to SEQ ID NO: 661708
uuaaaccuugacuucugga

SEQ ID NO: 661710 - RNA, 19 nt, Artificial Sequence
  Description of Artificial Sequence: Synthetic oligonucleotide
  Sense strand starting at position 2869 of SEQ ID NO: 585713
ggcacugcucaaugugcaa

SEQ ID NO: 661711 - RNA, 19 nt, Artificial Sequence
  Description of Artificial Sequence: Synthetic oligonucleotide
  Antisense strand to SEQ ID NO: 661710
uugcacauugagcagugcc

SEQ ID NO: 661712 - RNA, 19 nt, Artificial Sequence
  Description of Artificial Sequence: Synthetic oligonucleotide
  Sense strand starting at position 2881 of SEQ ID NO: 585713
ugugcaacccuuugaugaa

SEQ ID NO: 661713 - RNA, 19 nt, Artificial Sequence
  Description of Artificial Sequence: Synthetic oligonucleotide
  Antisense strand to SEQ ID NO: 661712
uucaucaaaggguugcaca

SEQ ID NO: 661714 - RNA, 19 nt, Artificial Sequence
  Description of Artificial Sequence: Synthetic oligonucleotide
  Sense strand starting at position 2937 of SEQ ID NO: 585713
acauauuugucuuggacug

SEQ ID NO: 661715 - RNA, 19 nt, Artificial Sequence
  Description of Artificial Sequence: Synthetic oligonucleotide
  Antisense strand to SEQ ID NO: 661714
caguccaagacaaauaugu

SEQ ID NO: 661716 - RNA, 19 nt, Artificial Sequence
  Description of Artificial Sequence: Synthetic oligonucleotide
  Sense strand starting at position 3049 of SEQ ID NO: 585713
ucgccuaaacuaugaacuu

SEQ ID NO: 661717 - RNA, 19 nt, Artificial Sequence
  Description of Artificial Sequence: Synthetic oligonucleotide
  Antisense strand to SEQ ID NO: 661716
aaguucauaguuuaggcga

SEQ ID NO: 661718 - RNA, 19 nt, Artificial Sequence
  Description of Artificial Sequence: Synthetic oligonucleotide
  Sense strand starting at position 3091 of SEQ ID NO: 585713
ugaugccauccugagguua

SEQ ID NO: 661719 - RNA, 19 nt, Artificial Sequence
  Description of Artificial Sequence: Synthetic oligonucleotide
  Antisense strand to SEQ ID NO: 661718
uaaccucaggauggcauca

SEQ ID NO: 661720 - RNA, 19 nt, Artificial Sequence
  Description of Artificial Sequence: Synthetic oligonucleotide
  Sense strand starting at position 3103 of SEQ ID NO: 585713
gagguuauaggcuaaagca

SEQ ID NO: 661721 - RNA, 19 nt, Artificial Sequence
  Description of Artificial Sequence: Synthetic oligonucleotide
  Antisense strand to SEQ ID NO: 661720
ugcuuuagccuauaaccuc

SEQ ID NO: 661722 - RNA, 19 nt, Artificial Sequence
  Description of Artificial Sequence: Synthetic oligonucleotide
  Sense strand starting at position 3366 of SEQ ID NO: 585713
ugcaaacucuaagaagaaa

SEQ ID NO: 661723 - RNA, 19 nt, Artificial Sequence
  Description of Artificial Sequence: Synthetic oligonucleotide
  Antisense strand to SEQ ID NO: 661722
uuucuucuuagaguuugca

SEQ ID NO: 661724 - RNA, 19 nt, Artificial Sequence
  Description of Artificial Sequence: Synthetic oligonucleotide
  Sense strand starting at position 3416 of SEQ ID NO: 585713
ccaucagggcugugaagua

SEQ ID NO: 661725 - RNA, 19 nt, Artificial Sequence
  Description of Artificial Sequence: Synthetic oligonucleotide
  Antisense strand to SEQ ID NO: 661724
uacuucacagcccugaugg

SEQ ID NO: 661726 - RNA, 19 nt, Artificial Sequence
  Description of Artificial Sequence: Synthetic oligonucleotide
  Sense strand starting at position 3428 of SEQ ID NO: 585713
ugaaguauacagugucaga

SEQ ID NO: 661727 - RNA, 19 nt, Artificial Sequence
  Description of Artificial Sequence: Synthetic oligonucleotide
  Antisense strand to SEQ ID NO: 661726
ucugacacuguauacuuca

SEQ ID NO: 661728 - RNA, 19 nt, Artificial Sequence
  Description of Artificial Sequence: Synthetic oligonucleotide
  Sense strand starting at position 3644 of SEQ ID NO: 585713
acaucacuggugggaguau

SEQ ID NO: 661729 - RNA, 19 nt, Artificial Sequence
  Description of Artificial Sequence: Synthetic oligonucleotide
  Antisense strand to SEQ ID NO: 661728
auacucccaccagugaugu

SEQ ID NO: 661730 - RNA, 19 nt, Artificial Sequence
  Description of Artificial Sequence: Synthetic oligonucleotide
  Sense strand starting at position 3751 of SEQ ID NO: 585713
acuggugugugcaugugaa

SEQ ID NO: 661731 - RNA, 19 nt, Artificial Sequence
  Description of Artificial Sequence: Synthetic oligonucleotide
  Antisense strand to SEQ ID NO: 661730
uucacaugcacacaccagu

SEQ ID NO: 661732 - RNA, 19 nt, Artificial Sequence
  Description of Artificial Sequence: Synthetic oligonucleotide
  Sense strand starting at position 46 of SEQ ID NO: 585714
guacaagagugugcaagau

SEQ ID NO: 661733 - RNA, 19 nt, Artificial Sequence
  Description of Artificial Sequence: Synthetic oligonucleotide
  Antisense strand to SEQ ID NO: 661732
aucuugcacacucuuguac

SEQ ID NO: 661734 - RNA, 19 nt, Artificial Sequence
  Description of Artificial Sequence: Synthetic oligonucleotide
  Sense strand starting at position 107 of SEQ ID NO: 585714
accuaaacuccuuggaguu

SEQ ID NO: 661735 - RNA, 19 nt, Artificial Sequence
  Description of Artificial Sequence: Synthetic oligonucleotide
  Antisense strand to SEQ ID NO: 661734
aacuccaaggaguuuaggu

SEQ ID NO: 661736 - RNA, 19 nt, Artificial Sequence
  Description of Artificial Sequence: Synthetic oligonucleotide
  Sense strand starting at position 422 of SEQ ID NO: 585714
ugacuucuauguguuauuu

SEQ ID NO: 661737 - RNA, 19 nt, Artificial Sequence
  Description of Artificial Sequence: Synthetic oligonucleotide
  Antisense strand to SEQ ID NO: 661736
aaauaacacauagaaguca

SEQ ID NO: 661738 - RNA, 19 nt, Artificial Sequence
  Description of Artificial Sequence: Synthetic oligonucleotide
  Sense strand starting at position 562 of SEQ ID NO: 585714
gcugacuuccugugacuag

SEQ ID NO: 661739 - RNA, 19 nt, Artificial Sequence
  Description of Artificial Sequence: Synthetic oligonucleotide
  Antisense strand to SEQ ID NO: 661738
cuagucacaggaagucagc

SEQ ID NO: 661740 - RNA, 19 nt, Artificial Sequence
  Description of Artificial Sequence: Synthetic oligonucleotide
  Sense strand starting at position 565 of SEQ ID NO: 585714
gacuuccugugacuaggaa

SEQ ID NO: 661741 - RNA, 19 nt, Artificial Sequence
  Description of Artificial Sequence: Synthetic oligonucleotide
  Antisense strand to SEQ ID NO: 661740
uuccuagucacaggaaguc

SEQ ID NO: 661742 - RNA, 19 nt, Artificial Sequence
  Description of Artificial Sequence: Synthetic oligonucleotide
  Sense strand starting at position 588 of SEQ ID NO: 585714
aaacuagcuccgcaaguua

SEQ ID NO: 661743 - RNA, 19 nt, Artificial Sequence
  Description of Artificial Sequence: Synthetic oligonucleotide
  Antisense strand to SEQ ID NO: 661742
uaacuugcggagcuaguuu

SEQ ID NO: 661744 - RNA, 19 nt, Artificial Sequence
  Description of Artificial Sequence: Synthetic oligonucleotide
  Sense strand starting at position 674 of SEQ ID NO: 585714
uuuccuacucggcaaacuu

SEQ ID NO: 661745 - RNA, 19 nt, Artificial Sequence
  Description of Artificial Sequence: Synthetic oligonucleotide
  Antisense strand to SEQ ID NO: 661744
aaguuugccgaguaggaaa

SEQ ID NO: 661746 - RNA, 19 nt, Artificial Sequence
  Description of Artificial Sequence: Synthetic oligonucleotide
  Sense strand starting at position 690 of SEQ ID NO: 585714
cuuguaagacuguaacugu

SEQ ID NO: 661747 - RNA, 19 nt, Artificial Sequence
  Description of Artificial Sequence: Synthetic oligonucleotide
  Antisense strand to SEQ ID NO: 661746
acaguuacagucuuacaag

SEQ ID NO: 661748 - RNA, 19 nt, Artificial Sequence
  Description of Artificial Sequence: Synthetic oligonucleotide
  Sense strand starting at position 693 of SEQ ID NO: 585714
guaagacuguaacuguuaa

SEQ ID NO: 661749 - RNA, 19 nt, Artificial Sequence
  Description of Artificial Sequence: Synthetic oligonucleotide
  Antisense strand to SEQ ID NO: 661748
uuaacaguuacagucuuac

SEQ ID NO: 661750 - RNA, 19 nt, Artificial Sequence
  Description of Artificial Sequence: Synthetic oligonucleotide
  Sense strand starting at position 781 of SEQ ID NO: 585714
auucgaacccuuuaggauu

SEQ ID NO: 661751 - RNA, 19 nt, Artificial Sequence
  Description of Artificial Sequence: Synthetic oligonucleotide
  Antisense strand to SEQ ID NO: 661750
aauccuaaaggguucgaau

SEQ ID NO: 661752 - RNA, 19 nt, Artificial Sequence
  Description of Artificial Sequence: Synthetic oligonucleotide
  Sense strand starting at position 784 of SEQ ID NO: 585714
cgaacccuuuaggauuuaa

SEQ ID NO: 661753 - RNA, 19 nt, Artificial Sequence
  Description of Artificial Sequence: Synthetic oligonucleotide
  Antisense strand to SEQ ID NO: 661752
uuaaauccuaaaggguucg

SEQ ID NO: 661754 - RNA, 19 nt, Artificial Sequence
  Description of Artificial Sequence: Synthetic oligonucleotide
  Sense strand starting at position 968 of SEQ ID NO: 585714
auaaguaaccuugaagcca

SEQ ID NO: 661755 - RNA, 19 nt, Artificial Sequence
  Description of Artificial Sequence: Synthetic oligonucleotide
  Antisense strand to SEQ ID NO: 661754
uggcuucaagguuacuuau

SEQ ID NO: 661756 - RNA, 19 nt, Artificial Sequence
  Description of Artificial Sequence: Synthetic oligonucleotide
  Sense strand starting at position 2153 of SEQ ID NO: 585714
cagccaauuuccgugugaa

SEQ ID NO: 661757 - RNA, 19 nt, Artificial Sequence
  Description of Artificial Sequence: Synthetic oligonucleotide
  Antisense strand to SEQ ID NO: 661756
uucacacggaaauuggcug

SEQ ID NO: 661758 - RNA, 19 nt, Artificial Sequence
  Description of Artificial Sequence: Synthetic oligonucleotide
  Sense strand starting at position 2154 of SEQ ID NO: 585714
agccaauuuccgugugaag

SEQ ID NO: 661759 - RNA, 19 nt, Artificial Sequence
  Description of Artificial Sequence: Synthetic oligonucleotide
  Antisense strand to SEQ ID NO: 661758
cuucacacggaaauuggcu

SEQ ID NO: 661760 - RNA, 19 nt, Artificial Sequence
  Description of Artificial Sequence: Synthetic oligonucleotide
  Sense strand starting at position 2185 of SEQ ID NO: 585714
gauggaauuaagcgagucu

SEQ ID NO: 661761 - RNA, 19 nt, Artificial Sequence
  Description of Artificial Sequence: Synthetic oligonucleotide
  Antisense strand to SEQ ID NO: 661760
agacucgcuuaauuccauc

SEQ ID NO: 661762 - RNA, 19 nt, Artificial Sequence
  Description of Artificial Sequence: Synthetic oligonucleotide
  Sense strand starting at position 2186 of SEQ ID NO: 585714
auggaauuaagcgagucua

SEQ ID NO: 661763 - RNA, 19 nt, Artificial Sequence
  Description of Artificial Sequence: Synthetic oligonucleotide
  Antisense strand to SEQ ID NO: 661762
uagacucgcuuaauuccau

SEQ ID NO: 661764 - RNA, 19 nt, Artificial Sequence
  Description of Artificial Sequence: Synthetic oligonucleotide
  Sense strand starting at position 2229 of SEQ ID NO: 585714
aggccaagugacugguuaa

SEQ ID NO: 661765 - RNA, 19 nt, Artificial Sequence
  Description of Artificial Sequence: Synthetic oligonucleotide
  Antisense strand to SEQ ID NO: 661764
uuaaccagucacuuggccu

SEQ ID NO: 661766 - RNA, 19 nt, Artificial Sequence
  Description of Artificial Sequence: Synthetic oligonucleotide
  Sense strand starting at position 2230 of SEQ ID NO: 585714
ggccaagugacugguuaau

SEQ ID NO: 661767 - RNA, 19 nt, Artificial Sequence
  Description of Artificial Sequence: Synthetic oligonucleotide
  Antisense strand to SEQ ID NO: 661766
auuaaccagucacuuggcc

SEQ ID NO: 661768 - RNA, 19 nt, Artificial Sequence
  Description of Artificial Sequence: Synthetic oligonucleotide
  Sense strand starting at position 2232 of SEQ ID NO: 585714
ccaagugacugguuaauug

SEQ ID NO: 661769 - RNA, 19 nt, Artificial Sequence
  Description of Artificial Sequence: Synthetic oligonucleotide
  Antisense strand to SEQ ID NO: 661768
caauuaaccagucacuugg

SEQ ID NO: 661770 - RNA, 19 nt, Artificial Sequence
  Description of Artificial Sequence: Synthetic oligonucleotide
  Sense strand starting at position 2239 of SEQ ID NO: 585714
acugguuaauugcuugauu

SEQ ID NO: 661771 - RNA, 19 nt, Artificial Sequence
  Description of Artificial Sequence: Synthetic oligonucleotide
  Antisense strand to SEQ ID NO: 661770
aaucaagcaauuaaccagu

SEQ ID NO: 661772 - RNA, 19 nt, Artificial Sequence
  Description of Artificial Sequence: Synthetic oligonucleotide
  Sense strand starting at position 2271 of SEQ ID NO: 585714
ggacuuggccuguggcaaa

SEQ ID NO: 661773 - RNA, 19 nt, Artificial Sequence
  Description of Artificial Sequence: Synthetic oligonucleotide
  Antisense strand to SEQ ID NO: 661772
uuugccacaggccaagucc

SEQ ID NO: 661774 - RNA, 19 nt, Artificial Sequence
  Description of Artificial Sequence: Synthetic oligonucleotide
  Sense strand starting at position 2405 of SEQ ID NO: 585714
cuccuuaagagaggaaugu

SEQ ID NO: 661775 - RNA, 19 nt, Artificial Sequence
  Description of Artificial Sequence: Synthetic oligonucleotide
  Antisense strand to SEQ ID NO: 661774
acauuccucucuuaaggag

SEQ ID NO: 661776 - RNA, 19 nt, Artificial Sequence
  Description of Artificial Sequence: Synthetic oligonucleotide
  Sense strand starting at position 2528 of SEQ ID NO: 585714
cgcuguucuggcuaagaga

SEQ ID NO: 661777 - RNA, 19 nt, Artificial Sequence
  Description of Artificial Sequence: Synthetic oligonucleotide
  Antisense strand to SEQ ID NO: 661776
ucucuuagccagaacagcg

SEQ ID NO: 661778 - RNA, 19 nt, Artificial Sequence
  Description of Artificial Sequence: Synthetic oligonucleotide
  Sense strand starting at position 2559 of SEQ ID NO: 585714
agucaugugauuugggcau

SEQ ID NO: 661779 - RNA, 19 nt, Artificial Sequence
  Description of Artificial Sequence: Synthetic oligonucleotide
  Antisense strand to SEQ ID NO: 661778
augcccaaaucacaugacu

SEQ ID NO: 661780 - RNA, 19 nt, Artificial Sequence
  Description of Artificial Sequence: Synthetic oligonucleotide
  Sense strand starting at position 2573 of SEQ ID NO: 585714
ggcauagagcucuaaauua

SEQ ID NO: 661781 - RNA, 19 nt, Artificial Sequence
  Description of Artificial Sequence: Synthetic oligonucleotide
  Antisense strand to SEQ ID NO: 661780
uaauuuagagcucuaugcc

SEQ ID NO: 661782 - RNA, 19 nt, Artificial Sequence
  Description of Artificial Sequence: Synthetic oligonucleotide
  Sense strand starting at position 2670 of SEQ ID NO: 585714
cucugucacuacuugguau

SEQ ID NO: 661783 - RNA, 19 nt, Artificial Sequence
  Description of Artificial Sequence: Synthetic oligonucleotide
  Antisense strand to SEQ ID NO: 661782
auaccaaguagugacagag

SEQ ID NO: 661784 - RNA, 19 nt, Artificial Sequence
  Description of Artificial Sequence: Synthetic oligonucleotide
  Sense strand starting at position 2689 of SEQ ID NO: 585714
uuugucacucaaugguaau

SEQ ID NO: 661785 - RNA, 19 nt, Artificial Sequence
  Description of Artificial Sequence: Synthetic oligonucleotide
  Antisense strand to SEQ ID NO: 661784
auuaccauugagugacaaa

SEQ ID NO: 661786 - RNA, 19 nt, Artificial Sequence
  Description of Artificial Sequence: Synthetic oligonucleotide
  Sense strand starting at position 2727 of SEQ ID NO: 585714
ggcaguguuguggaaugau

SEQ ID NO: 661787 - RNA, 19 nt, Artificial Sequence
  Description of Artificial Sequence: Synthetic oligonucleotide
  Antisense strand to SEQ ID NO: 661786
aucauuccacaacacugcc

SEQ ID NO: 661788 - RNA, 19 nt, Artificial Sequence
  Description of Artificial Sequence: Synthetic oligonucleotide
  Sense strand starting at position 2730 of SEQ ID NO: 585714
aguguuguggaaugauaau

SEQ ID NO: 661789 - RNA, 19 nt, Artificial Sequence
  Description of Artificial Sequence: Synthetic oligonucleotide
  Antisense strand to SEQ ID NO: 661788
auuaucauuccacaacacu

SEQ ID NO: 661790 - RNA, 19 nt, Artificial Sequence
  Description of Artificial Sequence: Synthetic oligonucleotide
  Sense strand starting at position 2800 of SEQ ID NO: 585714
cuguuucucugauuugagu

SEQ ID NO: 661791 - RNA, 19 nt, Artificial Sequence
  Description of Artificial Sequence: Synthetic oligonucleotide
  Antisense strand to SEQ ID NO: 661790
acucaaaucagagaaacag

SEQ ID NO: 661792 - RNA, 19 nt, Artificial Sequence
  Description of Artificial Sequence: Synthetic oligonucleotide
  Sense strand starting at position 2854 of SEQ ID NO: 585714
aguguuaugcaucgaggaa

SEQ ID NO: 661793 - RNA, 19 nt, Artificial Sequence
  Description of Artificial Sequence: Synthetic oligonucleotide
  Antisense strand to SEQ ID NO: 661792
uuccucgaugcauaacacu

SEQ ID NO: 661794 - RNA, 19 nt, Artificial Sequence
  Description of Artificial Sequence: Synthetic oligonucleotide
  Sense strand starting at position 2855 of SEQ ID NO: 585714
guguuaugcaucgaggaaa

SEQ ID NO: 661795 - RNA, 19 nt, Artificial Sequence
  Description of Artificial Sequence: Synthetic oligonucleotide
  Antisense strand to SEQ ID NO: 661794
uuuccucgaugcauaacac

SEQ ID NO: 661796 - RNA, 19 nt, Artificial Sequence
  Description of Artificial Sequence: Synthetic oligonucleotide
  Sense strand starting at position 2960 of SEQ ID NO: 585714
gauuguaaacuauaguugu

SEQ ID NO: 661797 - RNA, 19 nt, Artificial Sequence
  Description of Artificial Sequence: Synthetic oligonucleotide
  Antisense strand to SEQ ID NO: 661796
acaacuauaguuuacaauc

SEQ ID NO: 661798 - RNA, 19 nt, Artificial Sequence
  Description of Artificial Sequence: Synthetic oligonucleotide
  Sense strand starting at position 2992 of SEQ ID NO: 585714
ucagcuacugcauaggaaa

SEQ ID NO: 661799 - RNA, 19 nt, Artificial Sequence
  Description of Artificial Sequence: Synthetic oligonucleotide
  Antisense strand to SEQ ID NO: 661798
uuuccuaugcaguagcuga

SEQ ID NO: 661800 - RNA, 19 nt, Artificial Sequence
  Description of Artificial Sequence: Synthetic oligonucleotide
  Sense strand starting at position 3067 of SEQ ID NO: 585714
ugagauuuggguugcuucu

SEQ ID NO: 661801 - RNA, 19 nt, Artificial Sequence
  Description of Artificial Sequence: Synthetic oligonucleotide
  Antisense strand to SEQ ID NO: 661800
agaagcaacccaaaucuca

SEQ ID NO: 661802 - RNA, 19 nt, Artificial Sequence
  Description of Artificial Sequence: Synthetic oligonucleotide
  Sense strand starting at position 3137 of SEQ ID NO: 585714
aguuauuguuaggcuaaau

SEQ ID NO: 661803 - RNA, 19 nt, Artificial Sequence
  Description of Artificial Sequence: Synthetic oligonucleotide
  Antisense strand to SEQ ID NO: 661802
auuuagccuaacaauaacu

SEQ ID NO: 661804 - RNA, 19 nt, Artificial Sequence
  Description of Artificial Sequence: Synthetic oligonucleotide
  Sense strand starting at position 3302 of SEQ ID NO: 585714
cuaguuaaaucauugugga

SEQ ID NO: 661805 - RNA, 19 nt, Artificial Sequence
  Description of Artificial Sequence: Synthetic oligonucleotide
  Antisense strand to SEQ ID NO: 661804
uccacaaugauuuaacuag

SEQ ID NO: 661806 - RNA, 19 nt, Artificial Sequence
  Description of Artificial Sequence: Synthetic oligonucleotide
  Sense strand starting at position 3463 of SEQ ID NO: 585714
ugcagcacuauuugcgaua

SEQ ID NO: 661807 - RNA, 19 nt, Artificial Sequence
  Description of Artificial Sequence: Synthetic oligonucleotide
  Antisense strand to SEQ ID NO: 661806
uaucgcaaauagugcugca

SEQ ID NO: 661808 - RNA, 19 nt, Artificial Sequence
  Description of Artificial Sequence: Synthetic oligonucleotide
  Sense strand starting at position 3965 of SEQ ID NO: 585714
cugugcuuuccagauaagg

SEQ ID NO: 661809 - RNA, 19 nt, Artificial Sequence
  Description of Artificial Sequence: Synthetic oligonucleotide
  Antisense strand to SEQ ID NO: 661808
ccuuaucuggaaagcacag

SEQ ID NO: 661810 - RNA, 19 nt, Artificial Sequence
  Description of Artificial Sequence: Synthetic oligonucleotide
  Sense strand starting at position 3967 of SEQ ID NO: 585714
gugcuuuccagauaaggac

SEQ ID NO: 661811 - RNA, 19 nt, Artificial Sequence
  Description of Artificial Sequence: Synthetic oligonucleotide
  Antisense strand to SEQ ID NO: 661810
guccuuaucuggaaagcac

SEQ ID NO: 661812 - RNA, 19 nt, Artificial Sequence
  Description of Artificial Sequence: Synthetic oligonucleotide
  Sense strand starting at position 820 of SEQ ID NO: 585715
cagcgugcugguuaagagu

SEQ ID NO: 661813 - RNA, 19 nt, Artificial Sequence
  Description of Artificial Sequence: Synthetic oligonucleotide
  Antisense strand to SEQ ID NO: 661812
acucuuaaccagcacgcug

SEQ ID NO: 661814 - RNA, 19 nt, Artificial Sequence
  Description of Artificial Sequence: Synthetic oligonucleotide
  Sense strand starting at position 1073 of SEQ ID NO: 585715
uuugcauuucuccauuguu

SEQ ID NO: 661815 - RNA, 19 nt, Artificial Sequence
  Description of Artificial Sequence: Synthetic oligonucleotide
  Antisense strand to SEQ ID NO: 661814
aacaauggagaaaugcaaa

SEQ ID NO: 661816 - RNA, 19 nt, Artificial Sequence
  Description of Artificial Sequence: Synthetic oligonucleotide
  Sense strand starting at position 1143 of SEQ ID NO: 585715
cgaacucaguucuuaucau

SEQ ID NO: 661817 - RNA, 19 nt, Artificial Sequence
  Description of Artificial Sequence: Synthetic oligonucleotide
  Antisense strand to SEQ ID NO: 661816
augauaagaacugaguucg

SEQ ID NO: 661818 - RNA, 19 nt, Artificial Sequence
  Description of Artificial Sequence: Synthetic oligonucleotide
  Sense strand starting at position 1174 of SEQ ID NO: 585715
guccuaguugcugacaaua

SEQ ID NO: 661819 - RNA, 19 nt, Artificial Sequence
  Description of Artificial Sequence: Synthetic oligonucleotide
  Antisense strand to SEQ ID NO: 661818
uauugucagcaacuaggac

SEQ ID NO: 661820 - RNA, 19 nt, Artificial Sequence
  Description of Artificial Sequence: Synthetic oligonucleotide
  Sense strand starting at position 1243 of SEQ ID NO: 585715
uugcauugggagugacaga

SEQ ID NO: 661821 - RNA, 19 nt, Artificial Sequence
  Description of Artificial Sequence: Synthetic oligonucleotide
  Antisense strand to SEQ ID NO: 661820
ucugucacucccaaugcaa

SEQ ID NO: 661822 - RNA, 19 nt, Artificial Sequence
  Description of Artificial Sequence: Synthetic oligonucleotide
  Sense strand starting at position 1339 of SEQ ID NO: 585715
gucuuccuuccagaaugga

SEQ ID NO: 661823 - RNA, 19 nt, Artificial Sequence
  Description of Artificial Sequence: Synthetic oligonucleotide
  Antisense strand to SEQ ID NO: 661822
uccauucuggaaggaagac

SEQ ID NO: 661824 - RNA, 19 nt, Artificial Sequence
  Description of Artificial Sequence: Synthetic oligonucleotide
  Sense strand starting at position 1353 of SEQ ID NO: 585715
auggaagcucccugaggau

SEQ ID NO: 661825 - RNA, 19 nt, Artificial Sequence
  Description of Artificial Sequence: Synthetic oligonucleotide
  Antisense strand to SEQ ID NO: 661824
auccucagggagcuuccau

SEQ ID NO: 661826 - RNA, 19 nt, Artificial Sequence
  Description of Artificial Sequence: Synthetic oligonucleotide
  Sense strand starting at position 1426 of SEQ ID NO: 585715
uaggcauucgaucgaauuu

SEQ ID NO: 661827 - RNA, 19 nt, Artificial Sequence
  Description of Artificial Sequence: Synthetic oligonucleotide
  Antisense strand to SEQ ID NO: 661826
aaauucgaucgaaugccua

SEQ ID NO: 661828 - RNA, 19 nt, Artificial Sequence
  Description of Artificial Sequence: Synthetic oligonucleotide
  Sense strand starting at position 1523 of SEQ ID NO: 585715
aucgauuacagcuaggcua

SEQ ID NO: 661829 - RNA, 19 nt, Artificial Sequence
  Description of Artificial Sequence: Synthetic oligonucleotide
  Antisense strand to SEQ ID NO: 661828
uagccuagcuguaaucgau

SEQ ID NO: 661830 - RNA, 19 nt, Artificial Sequence
  Description of Artificial Sequence: Synthetic oligonucleotide
  Sense strand starting at position 1609 of SEQ ID NO: 585715
uuuaucgauuucuacaguu

SEQ ID NO: 661831 - RNA, 19 nt, Artificial Sequence
  Description of Artificial Sequence: Synthetic oligonucleotide
  Antisense strand to SEQ ID NO: 661830
aacuguagaaaucgauaaa

SEQ ID NO: 661832 - RNA, 19 nt, Artificial Sequence
  Description of Artificial Sequence: Synthetic oligonucleotide
  Sense strand starting at position 1683 of SEQ ID NO: 585715
agcuaagcugaccaaagau

SEQ ID NO: 661833 - RNA, 19 nt, Artificial Sequence
  Description of Artificial Sequence: Synthetic oligonucleotide
  Antisense strand to SEQ ID NO: 661832
aucuuuggucagcuuagcu

SEQ ID NO: 661834 - RNA, 19 nt, Artificial Sequence
  Description of Artificial Sequence: Synthetic oligonucleotide
  Sense strand starting at position 1693 of SEQ ID NO: 585715
accaaagaucacgguaaga

SEQ ID NO: 661835 - RNA, 19 nt, Artificial Sequence
  Description of Artificial Sequence: Synthetic oligonucleotide
  Antisense strand to SEQ ID NO: 661834
ucuuaccgugaucuuuggu

SEQ ID NO: 661836 - RNA, 19 nt, Artificial Sequence
  Description of Artificial Sequence: Synthetic oligonucleotide
  Sense strand starting at position 1998 of SEQ ID NO: 585715
ucccacuuagcgggagaaa

SEQ ID NO: 661837 - RNA, 19 nt, Artificial Sequence
  Description of Artificial Sequence: Synthetic oligonucleotide
  Antisense strand to SEQ ID NO: 661836
uuucucccgcuaaguggga

SEQ ID NO: 661838 - RNA, 19 nt, Artificial Sequence
  Description of Artificial Sequence: Synthetic oligonucleotide
  Sense strand starting at position 2616 of SEQ ID NO: 585715
gcucguaaggaucaggaca

SEQ ID NO: 661839 - RNA, 19 nt, Artificial Sequence
  Description of Artificial Sequence: Synthetic oligonucleotide
  Antisense strand to SEQ ID NO: 661838
uguccugauccuuacgagc

SEQ ID NO: 661840 - RNA, 19 nt, Artificial Sequence
  Description of Artificial Sequence: Synthetic oligonucleotide
  Sense strand starting at position 2731 of SEQ ID NO: 585715
ggaucucagcgcuauuaag

SEQ ID NO: 661841 - RNA, 19 nt, Artificial Sequence
  Description of Artificial Sequence: Synthetic oligonucleotide
  Antisense strand to SEQ ID NO: 661840
cuuaauagcgcugagaucc

SEQ ID NO: 661842 - RNA, 19 nt, Artificial Sequence
  Description of Artificial Sequence: Synthetic oligonucleotide
  Sense strand starting at position 2741 of SEQ ID NO: 585715
gcuauuaagaaacggguuu

SEQ ID NO: 661843 - RNA, 19 nt, Artificial Sequence
  Description of Artificial Sequence: Synthetic oligonucleotide
  Antisense strand to SEQ ID NO: 661842
aaacccguuucuuaauagc

SEQ ID NO: 661844 - RNA, 19 nt, Artificial Sequence
  Description of Artificial Sequence: Synthetic oligonucleotide
  Sense strand starting at position 2760 of SEQ ID NO: 585715
cucccuguuguugaucaaa

SEQ ID NO: 661845 - RNA, 19 nt, Artificial Sequence
  Description of Artificial Sequence: Synthetic oligonucleotide
  Antisense strand to SEQ ID NO: 661844
uuugaucaacaacagggag

SEQ ID NO: 661846 - RNA, 19 nt, Artificial Sequence
  Description of Artificial Sequence: Synthetic oligonucleotide
  Sense strand starting at position 2762 of SEQ ID NO: 585715
cccuguuguugaucaaauc

SEQ ID NO: 661847 - RNA, 19 nt, Artificial Sequence
  Description of Artificial Sequence: Synthetic oligonucleotide
  Antisense strand to SEQ ID NO: 661846
gauuugaucaacaacaggg

SEQ ID NO: 661848 - RNA, 19 nt, Artificial Sequence
  Description of Artificial Sequence: Synthetic oligonucleotide
  Sense strand starting at position 2828 of SEQ ID NO: 585715
cgcuacugauucuugggua

SEQ ID NO: 661849 - RNA, 19 nt, Artificial Sequence
  Description of Artificial Sequence: Synthetic oligonucleotide
  Antisense strand to SEQ ID NO: 661848
uacccaagaaucaguagcg

SEQ ID NO: 661850 - RNA, 19 nt, Artificial Sequence
  Description of Artificial Sequence: Synthetic oligonucleotide
  Sense strand starting at position 2832 of SEQ ID NO: 585715
acugauucuuggguaaagu

SEQ ID NO: 661851 - RNA, 19 nt, Artificial Sequence
  Description of Artificial Sequence: Synthetic oligonucleotide
  Antisense strand to SEQ ID NO: 661850
acuuuacccaagaaucagu

SEQ ID NO: 661852 - RNA, 19 nt, Artificial Sequence
  Description of Artificial Sequence: Synthetic oligonucleotide
  Sense strand starting at position 2833 of SEQ ID NO: 585715
cugauucuuggguaaaguu

SEQ ID NO: 661853 - RNA, 19 nt, Artificial Sequence
  Description of Artificial Sequence: Synthetic oligonucleotide
  Antisense strand to SEQ ID NO: 661852
aacuuuacccaagaaucag

SEQ ID NO: 661854 - RNA, 19 nt, Artificial Sequence
  Description of Artificial Sequence: Synthetic oligonucleotide
  Sense strand starting at position 2881 of SEQ ID NO: 585715
gcauaaaucgaauggccaa

SEQ ID NO: 661855 - RNA, 19 nt, Artificial Sequence
  Description of Artificial Sequence: Synthetic oligonucleotide
  Antisense strand to SEQ ID NO: 661854
uuggccauucgauuuaugc

SEQ ID NO: 661856 - RNA, 19 nt, Artificial Sequence
  Description of Artificial Sequence: Synthetic oligonucleotide
  Sense strand starting at position 2944 of SEQ ID NO: 585715
cgagaacacuuugaagaaa

SEQ ID NO: 661857 - RNA, 19 nt, Artificial Sequence
  Description of Artificial Sequence: Synthetic oligonucleotide
  Antisense strand to SEQ ID NO: 661856
uuucuucaaaguguucucg

SEQ ID NO: 661858 - RNA, 19 nt, Artificial Sequence
  Description of Artificial Sequence: Synthetic oligonucleotide
  Sense strand starting at position 2980 of SEQ ID NO: 585715
guagguugaggccaacaaa

SEQ ID NO: 661859 - RNA, 19 nt, Artificial Sequence
  Description of Artificial Sequence: Synthetic oligonucleotide
  Antisense strand to SEQ ID NO: 661858
uuuguuggccucaaccuac

SEQ ID NO: 661860 - RNA, 19 nt, Artificial Sequence
  Description of Artificial Sequence: Synthetic oligonucleotide
  Sense strand starting at position 3038 of SEQ ID NO: 585715
aggucaugcaaguauagag

SEQ ID NO: 661861 - RNA, 19 nt, Artificial Sequence
  Description of Artificial Sequence: Synthetic oligonucleotide
  Antisense strand to SEQ ID NO: 661860
cucuauacuugcaugaccu

SEQ ID NO: 661862 - RNA, 19 nt, Artificial Sequence
  Description of Artificial Sequence: Synthetic oligonucleotide
  Sense strand starting at position 3111 of SEQ ID NO: 585715
cagagacuuuguuccagag

SEQ ID NO: 661863 - RNA, 19 nt, Artificial Sequence
  Description of Artificial Sequence: Synthetic oligonucleotide
  Antisense strand to SEQ ID NO: 661862
cucuggaacaaagucucug

SEQ ID NO: 661864 - RNA, 19 nt, Artificial Sequence
  Description of Artificial Sequence: Synthetic oligonucleotide
  Sense strand starting at position 3203 of SEQ ID NO: 585715
auaccuacugccugggaaa

SEQ ID NO: 661865 - RNA, 19 nt, Artificial Sequence
  Description of Artificial Sequence: Synthetic oligonucleotide
  Antisense strand to SEQ ID NO: 661864
uuucccaggcaguagguau

SEQ ID NO: 661866 - RNA, 19 nt, Artificial Sequence
  Description of Artificial Sequence: Synthetic oligonucleotide
  Sense strand starting at position 3300 of SEQ ID NO: 585715
auuaaauucugaucaacgu

SEQ ID NO: 661867 - RNA, 19 nt, Artificial Sequence
  Description of Artificial Sequence: Synthetic oligonucleotide
  Antisense strand to SEQ ID NO: 661866
acguugaucagaauuuaau

SEQ ID NO: 661868 - RNA, 19 nt, Artificial Sequence
  Description of Artificial Sequence: Synthetic oligonucleotide
  Sense strand starting at position 3301 of SEQ ID NO: 585715
uuaaauucugaucaacgua

SEQ ID NO: 661869 - RNA, 19 nt, Artificial Sequence
  Description of Artificial Sequence: Synthetic oligonucleotide
  Antisense strand to SEQ ID NO: 661868
uacguugaucagaauuuaa

SEQ ID NO: 661870 - RNA, 19 nt, Artificial Sequence
  Description of Artificial Sequence: Synthetic oligonucleotide
  Sense strand starting at position 3304 of SEQ ID NO: 585715
aauucugaucaacguaguu

SEQ ID NO: 661871 - RNA, 19 nt, Artificial Sequence
  Description of Artificial Sequence: Synthetic oligonucleotide
  Antisense strand to SEQ ID NO: 661870
aacuacguugaucagaauu

SEQ ID NO: 661872 - RNA, 19 nt, Artificial Sequence
  Description of Artificial Sequence: Synthetic oligonucleotide
  Sense strand starting at position 3309 of SEQ ID NO: 585715
ugaucaacguaguuauuau

SEQ ID NO: 661873 - RNA, 19 nt, Artificial Sequence
  Description of Artificial Sequence: Synthetic oligonucleotide
  Antisense strand to SEQ ID NO: 661872
auaauaacuacguugauca

SEQ ID NO: 661874 - RNA, 19 nt, Artificial Sequence
  Description of Artificial Sequence: Synthetic oligonucleotide
  Sense strand starting at position 3318 of SEQ ID NO: 585715
uaguuauuaugcgcauuaa

SEQ ID NO: 661875 - RNA, 19 nt, Artificial Sequence
  Description of Artificial Sequence: Synthetic oligonucleotide
  Antisense strand to SEQ ID NO: 661874
uuaaugcgcauaauaacua

SEQ ID NO: 661876 - RNA, 19 nt, Artificial Sequence
  Description of Artificial Sequence: Synthetic oligonucleotide
  Sense strand starting at position 3319 of SEQ ID NO: 585715
aguuauuaugcgcauuaaa

SEQ ID NO: 661877 - RNA, 19 nt, Artificial Sequence
  Description of Artificial Sequence: Synthetic oligonucleotide
  Antisense strand to SEQ ID NO: 661876
uuuaaugcgcauaauaacu

SEQ ID NO: 661878 - RNA, 19 nt, Artificial Sequence
  Description of Artificial Sequence: Synthetic oligonucleotide
  Sense strand starting at position 3475 of SEQ ID NO: 585715
aauugucuccugugaucug

SEQ ID NO: 661879 - RNA, 19 nt, Artificial Sequence
  Description of Artificial Sequence: Synthetic oligonucleotide
  Antisense strand to SEQ ID NO: 661878
cagaucacaggagacaauu

SEQ ID NO: 661880 - RNA, 19 nt, Artificial Sequence
  Description of Artificial Sequence: Synthetic oligonucleotide
  Sense strand starting at position 3480 of SEQ ID NO: 585715
ucuccugugaucuggagau

SEQ ID NO: 661881 - RNA, 19 nt, Artificial Sequence
  Description of Artificial Sequence: Synthetic oligonucleotide
  Antisense strand to SEQ ID NO: 661880
aucuccagaucacaggaga

SEQ ID NO: 661882 - RNA, 19 nt, Artificial Sequence
  Description of Artificial Sequence: Synthetic oligonucleotide
  Sense strand starting at position 3517 of SEQ ID NO: 585715
agcucugugcucuauauuu

SEQ ID NO: 661883 - RNA, 19 nt, Artificial Sequence
  Description of Artificial Sequence: Synthetic oligonucleotide
  Antisense strand to SEQ ID NO: 661882
aaauauagagcacagagcu

SEQ ID NO: 661884 - RNA, 19 nt, Artificial Sequence
  Description of Artificial Sequence: Synthetic oligonucleotide
  Sense strand starting at position 3588 of SEQ ID NO: 585715
uguauuuccuuagaaugau

SEQ ID NO: 661885 - RNA, 19 nt, Artificial Sequence
  Description of Artificial Sequence: Synthetic oligonucleotide
  Antisense strand to SEQ ID NO: 661884
aucauucuaaggaaauaca

SEQ ID NO: 661886 - RNA, 19 nt, Artificial Sequence
  Description of Artificial Sequence: Synthetic oligonucleotide
  Sense strand starting at position 3799 of SEQ ID NO: 585715
gaaggaguccauugugcag

SEQ ID NO: 661887 - RNA, 19 nt, Artificial Sequence
  Description of Artificial Sequence: Synthetic oligonucleotide
  Antisense strand to SEQ ID NO: 661886
cugcacaauggacuccuuc

SEQ ID NO: 661888 - RNA, 19 nt, Artificial Sequence
  Description of Artificial Sequence: Synthetic oligonucleotide
  Sense strand starting at position 3802 of SEQ ID NO: 585715
ggaguccauugugcagaua

SEQ ID NO: 661889 - RNA, 19 nt, Artificial Sequence
  Description of Artificial Sequence: Synthetic oligonucleotide
  Antisense strand to SEQ ID NO: 661888
uaucugcacaauggacucc

SEQ ID NO: 661890 - RNA, 19 nt, Artificial Sequence
  Description of Artificial Sequence: Synthetic oligonucleotide
  Sense strand starting at position 3805 of SEQ ID NO: 585715
guccauugugcagauagag

SEQ ID NO: 661891 - RNA, 19 nt, Artificial Sequence
  Description of Artificial Sequence: Synthetic oligonucleotide
  Antisense strand to SEQ ID NO: 661890
cucuaucugcacaauggac

SEQ ID NO: 661892 - RNA, 19 nt, Artificial Sequence
  Description of Artificial Sequence: Synthetic oligonucleotide
  Sense strand starting at position 13 of SEQ ID NO: 585716
gccaauaaauaaggacaua

SEQ ID NO: 661893 - RNA, 19 nt, Artificial Sequence
  Description of Artificial Sequence: Synthetic oligonucleotide
  Antisense strand to SEQ ID NO: 661892
uauguccuuauuuauuggc

SEQ ID NO: 661894 - RNA, 19 nt, Artificial Sequence
  Description of Artificial Sequence: Synthetic oligonucleotide
  Sense strand starting at position 436 of SEQ ID NO: 585716
ccuacuauguaaguaagaa

SEQ ID NO: 661895 - RNA, 19 nt, Artificial Sequence
  Description of Artificial Sequence: Synthetic oligonucleotide
  Antisense strand to SEQ ID NO: 661894
uucuuacuuacauaguagg

SEQ ID NO: 661896 - RNA, 19 nt, Artificial Sequence
  Description of Artificial Sequence: Synthetic oligonucleotide
  Sense strand starting at position 509 of SEQ ID NO: 585716
auugguaucuuccacagaa

SEQ ID NO: 661897 - RNA, 19 nt, Artificial Sequence
  Description of Artificial Sequence: Synthetic oligonucleotide
  Antisense strand to SEQ ID NO: 661896
uucuguggaagauaccaau

SEQ ID NO: 661898 - RNA, 19 nt, Artificial Sequence
  Description of Artificial Sequence: Synthetic oligonucleotide
  Sense strand starting at position 511 of SEQ ID NO: 585716
ugguaucuuccacagaauu

SEQ ID NO: 661899 - RNA, 19 nt, Artificial Sequence
  Description of Artificial Sequence: Synthetic oligonucleotide
  Antisense strand to SEQ ID NO: 661898
aauucuguggaagauacca

SEQ ID NO: 661900 - RNA, 19 nt, Artificial Sequence
  Description of Artificial Sequence: Synthetic oligonucleotide
  Sense strand starting at position 525 of SEQ ID NO: 585716
gaauuaaaguuggaguucu

SEQ ID NO: 661901 - RNA, 19 nt, Artificial Sequence
  Description of Artificial Sequence: Synthetic oligonucleotide
  Antisense strand to SEQ ID NO: 661900
agaacuccaacuuuaauuc

SEQ ID NO: 661902 - RNA, 19 nt, Artificial Sequence
  Description of Artificial Sequence: Synthetic oligonucleotide
  Sense strand starting at position 533 of SEQ ID NO: 585716
guuggaguucuuugcagca

SEQ ID NO: 661903 - RNA, 19 nt, Artificial Sequence
  Description of Artificial Sequence: Synthetic oligonucleotide
  Antisense strand to SEQ ID NO: 661902
ugcugcaaagaacuccaac

SEQ ID NO: 661904 - RNA, 19 nt, Artificial Sequence
  Description of Artificial Sequence: Synthetic oligonucleotide
  Sense strand starting at position 913 of SEQ ID NO: 585716
cgcagugaaagcugaaauu

SEQ ID NO: 661905 - RNA, 19 nt, Artificial Sequence
  Description of Artificial Sequence: Synthetic oligonucleotide
  Antisense strand to SEQ ID NO: 661904
aauuucagcuuucacugcg

SEQ ID NO: 661906 - RNA, 19 nt, Artificial Sequence
  Description of Artificial Sequence: Synthetic oligonucleotide
  Sense strand starting at position 950 of SEQ ID NO: 585716
uucuucgaccucugagaga

SEQ ID NO: 661907 - RNA, 19 nt, Artificial Sequence
  Description of Artificial Sequence: Synthetic oligonucleotide
  Antisense strand to SEQ ID NO: 661906
ucucucagaggucgaagaa

SEQ ID NO: 661908 - RNA, 19 nt, Artificial Sequence
  Description of Artificial Sequence: Synthetic oligonucleotide
  Sense strand starting at position 1031 of SEQ ID NO: 585716
ggagcagucugugggauga

SEQ ID NO: 661909 - RNA, 19 nt, Artificial Sequence
  Description of Artificial Sequence: Synthetic oligonucleotide
  Antisense strand to SEQ ID NO: 661908
ucaucccacagacugcucc

SEQ ID NO: 661910 - RNA, 19 nt, Artificial Sequence
  Description of Artificial Sequence: Synthetic oligonucleotide
  Sense strand starting at position 1033 of SEQ ID NO: 585716
agcagucugugggaugagu

SEQ ID NO: 661911 - RNA, 19 nt, Artificial Sequence
  Description of Artificial Sequence: Synthetic oligonucleotide
  Antisense strand to SEQ ID NO: 661910
acucaucccacagacugcu

SEQ ID NO: 661912 - RNA, 19 nt, Artificial Sequence
  Description of Artificial Sequence: Synthetic oligonucleotide
  Sense strand starting at position 1035 of SEQ ID NO: 585716
cagucugugggaugaguuu

SEQ ID NO: 661913 - RNA, 19 nt, Artificial Sequence
  Description of Artificial Sequence: Synthetic oligonucleotide
  Antisense strand to SEQ ID NO: 661912
aaacucaucccacagacug

SEQ ID NO: 661914 - RNA, 19 nt, Artificial Sequence
  Description of Artificial Sequence: Synthetic oligonucleotide
  Sense strand starting at position 1148 of SEQ ID NO: 585716
cccacuucuucccaggagu

SEQ ID NO: 661915 - RNA, 19 nt, Artificial Sequence
  Description of Artificial Sequence: Synthetic oligonucleotide
  Antisense strand to SEQ ID NO: 661914
acuccugggaagaaguggg

SEQ ID NO: 661916 - RNA, 19 nt, Artificial Sequence
  Description of Artificial Sequence: Synthetic oligonucleotide
  Sense strand starting at position 1265 of SEQ ID NO: 585716
gucacuucugagugugcua

SEQ ID NO: 661917 - RNA, 19 nt, Artificial Sequence
  Description of Artificial Sequence: Synthetic oligonucleotide
  Antisense strand to SEQ ID NO: 661916
uagcacacucagaagugac

SEQ ID NO: 661918 - RNA, 19 nt, Artificial Sequence
  Description of Artificial Sequence: Synthetic oligonucleotide
  Sense strand starting at position 1483 of SEQ ID NO: 585716
cacuuuaccucgcaaggua

SEQ ID NO: 661919 - RNA, 19 nt, Artificial Sequence
  Description of Artificial Sequence: Synthetic oligonucleotide
  Antisense strand to SEQ ID NO: 661918
uaccuugcgagguaaagug

SEQ ID NO: 661920 - RNA, 19 nt, Artificial Sequence
  Description of Artificial Sequence: Synthetic oligonucleotide
  Sense strand starting at position 1659 of SEQ ID NO: 585716
gaggaagacuuccgggaga

SEQ ID NO: 661921 - RNA, 19 nt, Artificial Sequence
  Description of Artificial Sequence: Synthetic oligonucleotide
  Antisense strand to SEQ ID NO: 661920
ucucccggaagucuuccuc

SEQ ID NO: 661922 - RNA, 19 nt, Artificial Sequence
  Description of Artificial Sequence: Synthetic oligonucleotide
  Sense strand starting at position 2504 of SEQ ID NO: 585716
gagggacggcuccagaauu

SEQ ID NO: 661923 - RNA, 19 nt, Artificial Sequence
  Description of Artificial Sequence: Synthetic oligonucleotide
  Antisense strand to SEQ ID NO: 661922
aauucuggagccgucccuc

SEQ ID NO: 661924 - RNA, 19 nt, Artificial Sequence
  Description of Artificial Sequence: Synthetic oligonucleotide
  Sense strand starting at position 2539 of SEQ ID NO: 585716
gggucacucuccuggaaac

SEQ ID NO: 661925 - RNA, 19 nt, Artificial Sequence
  Description of Artificial Sequence: Synthetic oligonucleotide
  Antisense strand to SEQ ID NO: 661924
guuuccaggagagugaccc

SEQ ID NO: 661926 - RNA, 19 nt, Artificial Sequence
  Description of Artificial Sequence: Synthetic oligonucleotide
  Sense strand starting at position 2719 of SEQ ID NO: 585716
gaagucaucuugugaggga

SEQ ID NO: 661927 - RNA, 19 nt, Artificial Sequence
  Description of Artificial Sequence: Synthetic oligonucleotide
  Antisense strand to SEQ ID NO: 661926
ucccucacaagaugacuuc

SEQ ID NO: 661928 - RNA, 19 nt, Artificial Sequence
  Description of Artificial Sequence: Synthetic oligonucleotide
  Sense strand starting at position 2720 of SEQ ID NO: 585716
aagucaucuugugagggau

SEQ ID NO: 661929 - RNA, 19 nt, Artificial Sequence
  Description of Artificial Sequence: Synthetic oligonucleotide
  Antisense strand to SEQ ID NO: 661928
aucccucacaagaugacuu

SEQ ID NO: 661930 - RNA, 19 nt, Artificial Sequence
  Description of Artificial Sequence: Synthetic oligonucleotide
  Sense strand starting at position 2917 of SEQ ID NO: 585716
ccggcauugucucugcaga

SEQ ID NO: 661931 - RNA, 19 nt, Artificial Sequence
  Description of Artificial Sequence: Synthetic oligonucleotide
  Antisense strand to SEQ ID NO: 661930
ucugcagagacaaugccgg

SEQ ID NO: 661932 - RNA, 19 nt, Artificial Sequence
  Description of Artificial Sequence: Synthetic oligonucleotide
  Sense strand starting at position 2918 of SEQ ID NO: 585716
cggcauugucucugcagau

SEQ ID NO: 661933 - RNA, 19 nt, Artificial Sequence
  Description of Artificial Sequence: Synthetic oligonucleotide
  Antisense strand to SEQ ID NO: 661932
aucugcagagacaaugccg

SEQ ID NO: 661934 - RNA, 19 nt, Artificial Sequence
  Description of Artificial Sequence: Synthetic oligonucleotide
  Sense strand starting at position 2919 of SEQ ID NO: 585716
ggcauugucucugcagaug

SEQ ID NO: 661935 - RNA, 19 nt, Artificial Sequence
  Description of Artificial Sequence: Synthetic oligonucleotide
  Antisense strand to SEQ ID NO: 661934
caucugcagagacaaugcc

SEQ ID NO: 661936 - RNA, 19 nt, Artificial Sequence
  Description of Artificial Sequence: Synthetic oligonucleotide
  Sense strand starting at position 2930 of SEQ ID NO: 585716
ugcagauguuucuccucuu

SEQ ID NO: 661937 - RNA, 19 nt, Artificial Sequence
  Description of Artificial Sequence: Synthetic oligonucleotide
  Antisense strand to SEQ ID NO: 661936
aagaggagaaacaucugca

SEQ ID NO: 661938 - RNA, 19 nt, Artificial Sequence
  Description of Artificial Sequence: Synthetic oligonucleotide
  Sense strand starting at position 2931 of SEQ ID NO: 585716
gcagauguuucuccucuuu

SEQ ID NO: 661939 - RNA, 19 nt, Artificial Sequence
  Description of Artificial Sequence: Synthetic oligonucleotide
  Antisense strand to SEQ ID NO: 661938
aaagaggagaaacaucugc

SEQ ID NO: 661940 - RNA, 19 nt, Artificial Sequence
  Description of Artificial Sequence: Synthetic oligonucleotide
  Sense strand starting at position 2977 of SEQ ID NO: 585716
aguuaaggcuauuccuauu

SEQ ID NO: 661941 - RNA, 19 nt, Artificial Sequence
  Description of Artificial Sequence: Synthetic oligonucleotide
  Antisense strand to SEQ ID NO: 661940
aauaggaauagccuuaacu

SEQ ID NO: 661942 - RNA, 19 nt, Artificial Sequence
  Description of Artificial Sequence: Synthetic oligonucleotide
  Sense strand starting at position 2991 of SEQ ID NO: 585716
cuauuuacacgucgaguaa

SEQ ID NO: 661943 - RNA, 19 nt, Artificial Sequence
  Description of Artificial Sequence: Synthetic oligonucleotide
  Antisense strand to SEQ ID NO: 661942
uuacucgacguguaaauag

SEQ ID NO: 661944 - RNA, 19 nt, Artificial Sequence
  Description of Artificial Sequence: Synthetic oligonucleotide
  Sense strand starting at position 3037 of SEQ ID NO: 585716
acugguaacugucuaaaua

SEQ ID NO: 661945 - RNA, 19 nt, Artificial Sequence
  Description of Artificial Sequence: Synthetic oligonucleotide
  Antisense strand to SEQ ID NO: 661944
uauuuagacaguuaccagu

SEQ ID NO: 661946 - RNA, 19 nt, Artificial Sequence
  Description of Artificial Sequence: Synthetic oligonucleotide
  Sense strand starting at position 3038 of SEQ ID NO: 585716
cugguaacugucuaaauag

SEQ ID NO: 661947 - RNA, 19 nt, Artificial Sequence
  Description of Artificial Sequence: Synthetic oligonucleotide
  Antisense strand to SEQ ID NO: 661946
cuauuuagacaguuaccag

SEQ ID NO: 661948 - RNA, 19 nt, Artificial Sequence
  Description of Artificial Sequence: Synthetic oligonucleotide
  Sense strand starting at position 3168 of SEQ ID NO: 585716
aggcaaggcccaugucuau

SEQ ID NO: 661949 - RNA, 19 nt, Artificial Sequence
  Description of Artificial Sequence: Synthetic oligonucleotide
  Antisense strand to SEQ ID NO: 661948
auagacaugggccuugccu

SEQ ID NO: 661950 - RNA, 19 nt, Artificial Sequence
  Description of Artificial Sequence: Synthetic oligonucleotide
  Sense strand starting at position 3230 of SEQ ID NO: 585716
gacagucggugcucaauaa

SEQ ID NO: 661951 - RNA, 19 nt, Artificial Sequence
  Description of Artificial Sequence: Synthetic oligonucleotide
  Antisense strand to SEQ ID NO: 661950
uuauugagcaccgacuguc

SEQ ID NO: 661952 - RNA, 19 nt, Artificial Sequence
  Description of Artificial Sequence: Synthetic oligonucleotide
  Sense strand starting at position 3314 of SEQ ID NO: 585716
ccuacaggucaugguguua

SEQ ID NO: 661953 - RNA, 19 nt, Artificial Sequence
  Description of Artificial Sequence: Synthetic oligonucleotide
  Antisense strand to SEQ ID NO: 661952
uaacaccaugaccuguagg

SEQ ID NO: 661954 - RNA, 19 nt, Artificial Sequence
  Description of Artificial Sequence: Synthetic oligonucleotide
  Sense strand starting at position 3327 of SEQ ID NO: 585716
guguuauucucguucuccu

SEQ ID NO: 661955 - RNA, 19 nt, Artificial Sequence
  Description of Artificial Sequence: Synthetic oligonucleotide
  Antisense strand to SEQ ID NO: 661954
aggagaacgagaauaacac

SEQ ID NO: 661956 - RNA, 19 nt, Artificial Sequence
  Description of Artificial Sequence: Synthetic oligonucleotide
  Sense strand starting at position 3354 of SEQ ID NO: 585716
acgacuuauuuguuucuuu

SEQ ID NO: 661957 - RNA, 19 nt, Artificial Sequence
  Description of Artificial Sequence: Synthetic oligonucleotide
  Antisense strand to SEQ ID NO: 661956
aaagaaacaaauaagucgu

SEQ ID NO: 661958 - RNA, 19 nt, Artificial Sequence
  Description of Artificial Sequence: Synthetic oligonucleotide
  Sense strand starting at position 3502 of SEQ ID NO: 585716
aucacaguccgguguguuu

SEQ ID NO: 661959 - RNA, 19 nt, Artificial Sequence
  Description of Artificial Sequence: Synthetic oligonucleotide
  Antisense strand to SEQ ID NO: 661958
aaacacaccggacugugau

SEQ ID NO: 661960 - RNA, 19 nt, Artificial Sequence
  Description of Artificial Sequence: Synthetic oligonucleotide
  Sense strand starting at position 3504 of SEQ ID NO: 585716
cacaguccgguguguuuaa

SEQ ID NO: 661961 - RNA, 19 nt, Artificial Sequence
  Description of Artificial Sequence: Synthetic oligonucleotide
  Antisense strand to SEQ ID NO: 661960
uuaaacacaccggacugug

SEQ ID NO: 661962 - RNA, 19 nt, Artificial Sequence
  Description of Artificial Sequence: Synthetic oligonucleotide
  Sense strand starting at position 3505 of SEQ ID NO: 585716
acaguccgguguguuuaaa

SEQ ID NO: 661963 - RNA, 19 nt, Artificial Sequence
  Description of Artificial Sequence: Synthetic oligonucleotide
  Antisense strand to SEQ ID NO: 661962
uuuaaacacaccggacugu

SEQ ID NO: 661964 - RNA, 19 nt, Artificial Sequence
  Description of Artificial Sequence: Synthetic oligonucleotide
  Sense strand starting at position 3545 of SEQ ID NO: 585716
uguugugaccacugccaaa

SEQ ID NO: 661965 - RNA, 19 nt, Artificial Sequence
  Description of Artificial Sequence: Synthetic oligonucleotide
  Antisense strand to SEQ ID NO: 661964
uuuggcaguggucacaaca

SEQ ID NO: 661966 - RNA, 19 nt, Artificial Sequence
  Description of Artificial Sequence: Synthetic oligonucleotide
  Sense strand starting at position 3548 of SEQ ID NO: 585716
ugugaccacugccaaauau

SEQ ID NO: 661967 - RNA, 19 nt, Artificial Sequence
  Description of Artificial Sequence: Synthetic oligonucleotide
  Antisense strand to SEQ ID NO: 661966
auauuuggcaguggucaca

SEQ ID NO: 661968 - RNA, 19 nt, Artificial Sequence
  Description of Artificial Sequence: Synthetic oligonucleotide
  Sense strand starting at position 3593 of SEQ ID NO: 585716
ugguguuaugaggaccauu

SEQ ID NO: 661969 - RNA, 19 nt, Artificial Sequence
  Description of Artificial Sequence: Synthetic oligonucleotide
  Antisense strand to SEQ ID NO: 661968
aaugguccucauaacacca

SEQ ID NO: 661970 - RNA, 19 nt, Artificial Sequence
  Description of Artificial Sequence: Synthetic oligonucleotide
  Sense strand starting at position 3980 of SEQ ID NO: 585716
ugaauaacaucggucucua

SEQ ID NO: 661971 - RNA, 19 nt, Artificial Sequence
  Description of Artificial Sequence: Synthetic oligonucleotide
  Antisense strand to SEQ ID NO: 661970
uagagaccgauguuauuca

SEQ ID NO: 661972 - RNA, 19 nt, Artificial Sequence
  Description of Artificial Sequence: Synthetic oligonucleotide
  Sense strand starting at position 115 of SEQ ID NO: 585717
ccugaaugccuuuaaauug

SEQ ID NO: 661973 - RNA, 19 nt, Artificial Sequence
  Description of Artificial Sequence: Synthetic oligonucleotide
  Antisense strand to SEQ ID NO: 661972
caauuuaaaggcauucagg

SEQ ID NO: 661974 - RNA, 19 nt, Artificial Sequence
  Description of Artificial Sequence: Synthetic oligonucleotide
  Sense strand starting at position 176 of SEQ ID NO: 585717
cugagaauguucuuuggga

SEQ ID NO: 661975 - RNA, 19 nt, Artificial Sequence
  Description of Artificial Sequence: Synthetic oligonucleotide
  Antisense strand to SEQ ID NO: 661974
ucccaaagaacauucucag

SEQ ID NO: 661976 - RNA, 19 nt, Artificial Sequence
  Description of Artificial Sequence: Synthetic oligonucleotide
  Sense strand starting at position 177 of SEQ ID NO: 585717
ugagaauguucuuugggac

SEQ ID NO: 661977 - RNA, 19 nt, Artificial Sequence
  Description of Artificial Sequence: Synthetic oligonucleotide
  Antisense strand to SEQ ID NO: 661976
gucccaaagaacauucuca

SEQ ID NO: 661978 - RNA, 19 nt, Artificial Sequence
  Description of Artificial Sequence: Synthetic oligonucleotide
  Sense strand starting at position 178 of SEQ ID NO: 585717
gagaauguucuuugggacu

SEQ ID NO: 661979 - RNA, 19 nt, Artificial Sequence
  Description of Artificial Sequence: Synthetic oligonucleotide
  Antisense strand to SEQ ID NO: 661978
agucccaaagaacauucuc

SEQ ID NO: 661980 - RNA, 19 nt, Artificial Sequence
  Description of Artificial Sequence: Synthetic oligonucleotide
  Sense strand starting at position 212 of SEQ ID NO: 585717
uggcauagaugacuguaaa

SEQ ID NO: 661981 - RNA, 19 nt, Artificial Sequence
  Description of Artificial Sequence: Synthetic oligonucleotide
  Antisense strand to SEQ ID NO: 661980
uuuacagucaucuaugcca

SEQ ID NO: 661982 - RNA, 19 nt, Artificial Sequence
  Description of Artificial Sequence: Synthetic oligonucleotide
  Sense strand starting at position 213 of SEQ ID NO: 585717
ggcauagaugacuguaaau

SEQ ID NO: 661983 - RNA, 19 nt, Artificial Sequence
  Description of Artificial Sequence: Synthetic oligonucleotide
  Antisense strand to SEQ ID NO: 661982
auuuacagucaucuaugcc

SEQ ID NO: 661984 - RNA, 19 nt, Artificial Sequence
  Description of Artificial Sequence: Synthetic oligonucleotide
  Sense strand starting at position 290 of SEQ ID NO: 585717
cacaguaguguaggagaaa

SEQ ID NO: 661985 - RNA, 19 nt, Artificial Sequence
  Description of Artificial Sequence: Synthetic oligonucleotide
  Antisense strand to SEQ ID NO: 661984
uuucuccuacacuacugug

SEQ ID NO: 661986 - RNA, 19 nt, Artificial Sequence
  Description of Artificial Sequence: Synthetic oligonucleotide
  Sense strand starting at position 293 of SEQ ID NO: 585717
aguaguguaggagaaaguu

SEQ ID NO: 661987 - RNA, 19 nt, Artificial Sequence
  Description of Artificial Sequence: Synthetic oligonucleotide
  Antisense strand to SEQ ID NO: 661986
aacuuucuccuacacuacu

SEQ ID NO: 661988 - RNA, 19 nt, Artificial Sequence
  Description of Artificial Sequence: Synthetic oligonucleotide
  Sense strand starting at position 302 of SEQ ID NO: 585717
ggagaaaguuaucuagggu

SEQ ID NO: 661989 - RNA, 19 nt, Artificial Sequence
  Description of Artificial Sequence: Synthetic oligonucleotide
  Antisense strand to SEQ ID NO: 661988
acccuagauaacuuucucc

SEQ ID NO: 661990 - RNA, 19 nt, Artificial Sequence
  Description of Artificial Sequence: Synthetic oligonucleotide
  Sense strand starting at position 305 of SEQ ID NO: 585717
gaaaguuaucuagggugau

SEQ ID NO: 661991 - RNA, 19 nt, Artificial Sequence
  Description of Artificial Sequence: Synthetic oligonucleotide
  Antisense strand to SEQ ID NO: 661990
aucacccuagauaacuuuc

SEQ ID NO: 661992 - RNA, 19 nt, Artificial Sequence
  Description of Artificial Sequence: Synthetic oligonucleotide
  Sense strand starting at position 309 of SEQ ID NO: 585717
guuaucuagggugauuguu

SEQ ID NO: 661993 - RNA, 19 nt, Artificial Sequence
  Description of Artificial Sequence: Synthetic oligonucleotide
  Antisense strand to SEQ ID NO: 661992
aacaaucacccuagauaac

SEQ ID NO: 661994 - RNA, 19 nt, Artificial Sequence
  Description of Artificial Sequence: Synthetic oligonucleotide
  Sense strand starting at position 510 of SEQ ID NO: 585717
uaaguuuaugcccacgaca

SEQ ID NO: 661995 - RNA, 19 nt, Artificial Sequence
  Description of Artificial Sequence: Synthetic oligonucleotide
  Antisense strand to SEQ ID NO: 661994
ugucgugggcauaaacuua

SEQ ID NO: 661996 - RNA, 19 nt, Artificial Sequence
  Description of Artificial Sequence: Synthetic oligonucleotide
  Sense strand starting at position 710 of SEQ ID NO: 585717
ccagguugugaaggaaaga

SEQ ID NO: 661997 - RNA, 19 nt, Artificial Sequence
  Description of Artificial Sequence: Synthetic oligonucleotide
  Antisense strand to SEQ ID NO: 661996
ucuuuccuucacaaccugg

SEQ ID NO: 661998 - RNA, 19 nt, Artificial Sequence
  Description of Artificial Sequence: Synthetic oligonucleotide
  Sense strand starting at position 807 of SEQ ID NO: 585717
gcagacagauacucuaauu

SEQ ID NO: 661999 - RNA, 19 nt, Artificial Sequence
  Description of Artificial Sequence: Synthetic oligonucleotide
  Antisense strand to SEQ ID NO: 661998
aauuagaguaucugucugc

SEQ ID NO: 662000 - RNA, 19 nt, Artificial Sequence
  Description of Artificial Sequence: Synthetic oligonucleotide
  Sense strand starting at position 1067 of SEQ ID NO: 585717
ugauaagauacauguggca

SEQ ID NO: 662001 - RNA, 19 nt, Artificial Sequence
  Description of Artificial Sequence: Synthetic oligonucleotide
  Antisense strand to SEQ ID NO: 662000
ugccacauguaucuuauca

SEQ ID NO: 662002 - RNA, 19 nt, Artificial Sequence
  Description of Artificial Sequence: Synthetic oligonucleotide
  Sense strand starting at position 1069 of SEQ ID NO: 585717
auaagauacauguggcaga

SEQ ID NO: 662003 - RNA, 19 nt, Artificial Sequence
  Description of Artificial Sequence: Synthetic oligonucleotide
  Antisense strand to SEQ ID NO: 662002
ucugccacauguaucuuau

SEQ ID NO: 662004 - RNA, 19 nt, Artificial Sequence
  Description of Artificial Sequence: Synthetic oligonucleotide
  Sense strand starting at position 1099 of SEQ ID NO: 585717
aacugacagucuguuauga

SEQ ID NO: 662005 - RNA, 19 nt, Artificial Sequence
  Description of Artificial Sequence: Synthetic oligonucleotide
  Antisense strand to SEQ ID NO: 662004
ucauaacagacugucaguu

SEQ ID NO: 662006 - RNA, 19 nt, Artificial Sequence
  Description of Artificial Sequence: Synthetic oligonucleotide
  Sense strand starting at position 1149 of SEQ ID NO: 585717
ggaauuaauuucugggaaa

SEQ ID NO: 662007 - RNA, 19 nt, Artificial Sequence
  Description of Artificial Sequence: Synthetic oligonucleotide
  Antisense strand to SEQ ID NO: 662006
uuucccagaaauuaauucc

SEQ ID NO: 662008 - RNA, 19 nt, Artificial Sequence
  Description of Artificial Sequence: Synthetic oligonucleotide
  Sense strand starting at position 1152 of SEQ ID NO: 585717
auuaauuucugggaaaucu

SEQ ID NO: 662009 - RNA, 19 nt, Artificial Sequence
  Description of Artificial Sequence: Synthetic oligonucleotide
  Antisense strand to SEQ ID NO: 662008
agauuucccagaaauuaau

SEQ ID NO: 662010 - RNA, 19 nt, Artificial Sequence
  Description of Artificial Sequence: Synthetic oligonucleotide
  Sense strand starting at position 1163 of SEQ ID NO: 585717
ggaaaucuuuaugugaaua

SEQ ID NO: 662011 - RNA, 19 nt, Artificial Sequence
  Description of Artificial Sequence: Synthetic oligonucleotide
  Antisense strand to SEQ ID NO: 662010
uauucacauaaagauuucc

SEQ ID NO: 662012 - RNA, 19 nt, Artificial Sequence
  Description of Artificial Sequence: Synthetic oligonucleotide
  Sense strand starting at position 1168 of SEQ ID NO: 585717
ucuuuaugugaauagugua

SEQ ID NO: 662013 - RNA, 19 nt, Artificial Sequence
  Description of Artificial Sequence: Synthetic oligonucleotide
  Antisense strand to SEQ ID NO: 662012
uacacuauucacauaaaga

SEQ ID NO: 662014 - RNA, 19 nt, Artificial Sequence
  Description of Artificial Sequence: Synthetic oligonucleotide
  Sense strand starting at position 1181 of SEQ ID NO: 585717
aguguauaugcaugaggag

SEQ ID NO: 662015 - RNA, 19 nt, Artificial Sequence
  Description of Artificial Sequence: Synthetic oligonucleotide
  Antisense strand to SEQ ID NO: 662014
cuccucaugcauauacacu

SEQ ID NO: 662016 - RNA, 19 nt, Artificial Sequence
  Description of Artificial Sequence: Synthetic oligonucleotide
  Sense strand starting at position 1207 of SEQ ID NO: 585717
acagcaggauccuugaaac

SEQ ID NO: 662017 - RNA, 19 nt, Artificial Sequence
  Description of Artificial Sequence: Synthetic oligonucleotide
  Antisense strand to SEQ ID NO: 662016
guuucaaggauccugcugu

SEQ ID NO: 662018 - RNA, 19 nt, Artificial Sequence
  Description of Artificial Sequence: Synthetic oligonucleotide
  Sense strand starting at position 1290 of SEQ ID NO: 585717
aaacgacaaucaguucgau

SEQ ID NO: 662019 - RNA, 19 nt, Artificial Sequence
  Description of Artificial Sequence: Synthetic oligonucleotide
  Antisense strand to SEQ ID NO: 662018
aucgaacugauugucguuu

SEQ ID NO: 662020 - RNA, 19 nt, Artificial Sequence
  Description of Artificial Sequence: Synthetic oligonucleotide
  Sense strand starting at position 1393 of SEQ ID NO: 585717
ugcauaauccgagauuaug

SEQ ID NO: 662021 - RNA, 19 nt, Artificial Sequence
  Description of Artificial Sequence: Synthetic oligonucleotide
  Antisense strand to SEQ ID NO: 662020
cauaaucucggauuaugca

SEQ ID NO: 662022 - RNA, 19 nt, Artificial Sequence
  Description of Artificial Sequence: Synthetic oligonucleotide
  Sense strand starting at position 1438 of SEQ ID NO: 585717
uagggagaggucuggucua

SEQ ID NO: 662023 - RNA, 19 nt, Artificial Sequence
  Description of Artificial Sequence: Synthetic oligonucleotide
  Antisense strand to SEQ ID NO: 662022
uagaccagaccucucccua

SEQ ID NO: 662024 - RNA, 19 nt, Artificial Sequence
  Description of Artificial Sequence: Synthetic oligonucleotide
  Sense strand starting at position 1588 of SEQ ID NO: 585717
ugguuugagcacuagagac

SEQ ID NO: 662025 - RNA, 19 nt, Artificial Sequence
  Description of Artificial Sequence: Synthetic oligonucleotide
  Antisense strand to SEQ ID NO: 662024
gucucuagugcucaaacca

SEQ ID NO: 662026 - RNA, 19 nt, Artificial Sequence
  Description of Artificial Sequence: Synthetic oligonucleotide
  Sense strand starting at position 2482 of SEQ ID NO: 585717
uuagaauaccugugaauca

SEQ ID NO: 662027 - RNA, 19 nt, Artificial Sequence
  Description of Artificial Sequence: Synthetic oligonucleotide
  Antisense strand to SEQ ID NO: 662026
ugauucacagguauucuaa

SEQ ID NO: 662028 - RNA, 19 nt, Artificial Sequence
  Description of Artificial Sequence: Synthetic oligonucleotide
  Sense strand starting at position 2492 of SEQ ID NO: 585717
ugugaaucaaaucgggaau

SEQ ID NO: 662029 - RNA, 19 nt, Artificial Sequence
  Description of Artificial Sequence: Synthetic oligonucleotide
  Antisense strand to SEQ ID NO: 662028
auucccgauuugauucaca

SEQ ID NO: 662030 - RNA, 19 nt, Artificial Sequence
  Description of Artificial Sequence: Synthetic oligonucleotide
  Sense strand starting at position 2493 of SEQ ID NO: 585717
gugaaucaaaucgggaaua

SEQ ID NO: 662031 - RNA, 19 nt, Artificial Sequence
  Description of Artificial Sequence: Synthetic oligonucleotide
  Antisense strand to SEQ ID NO: 662030
uauucccgauuugauucac

SEQ ID NO: 662032 - RNA, 19 nt, Artificial Sequence
  Description of Artificial Sequence: Synthetic oligonucleotide
  Sense strand starting at position 2506 of SEQ ID NO: 585717
ggaauaaucuuaguuuacc

SEQ ID NO: 662033 - RNA, 19 nt, Artificial Sequence
  Description of Artificial Sequence: Synthetic oligonucleotide
  Antisense strand to SEQ ID NO: 662032
gguaaacuaagauuauucc

SEQ ID NO: 662034 - RNA, 19 nt, Artificial Sequence
  Description of Artificial Sequence: Synthetic oligonucleotide
  Sense strand starting at position 2631 of SEQ ID NO: 585717
gaagcugugagguauuaug

SEQ ID NO: 662035 - RNA, 19 nt, Artificial Sequence
  Description of Artificial Sequence: Synthetic oligonucleotide
  Antisense strand to SEQ ID NO: 662034
cauaauaccucacagcuuc

SEQ ID NO: 662036 - RNA, 19 nt, Artificial Sequence
  Description of Artificial Sequence: Synthetic oligonucleotide
  Sense strand starting at position 2783 of SEQ ID NO: 585717
gucgcucugacacaagaau

SEQ ID NO: 662037 - RNA, 19 nt, Artificial Sequence
  Description of Artificial Sequence: Synthetic oligonucleotide
  Antisense strand to SEQ ID NO: 662036
auucuugugucagagcgac

SEQ ID NO: 662038 - RNA, 19 nt, Artificial Sequence
  Description of Artificial Sequence: Synthetic oligonucleotide
  Sense strand starting at position 2994 of SEQ ID NO: 585717
ugaauaacacaguguaucu

SEQ ID NO: 662039 - RNA, 19 nt, Artificial Sequence
  Description of Artificial Sequence: Synthetic oligonucleotide
  Antisense strand to SEQ ID NO: 662038
agauacacuguguuauuca

SEQ ID NO: 662040 - RNA, 19 nt, Artificial Sequence
  Description of Artificial Sequence: Synthetic oligonucleotide
  Sense strand starting at position 3719 of SEQ ID NO: 585717
ccucuaagagguuaguuua

SEQ ID NO: 662041 - RNA, 19 nt, Artificial Sequence
  Description of Artificial Sequence: Synthetic oligonucleotide
  Antisense strand to SEQ ID NO: 662040
uaaacuaaccucuuagagg

SEQ ID NO: 662042 - RNA, 19 nt, Artificial Sequence
  Description of Artificial Sequence: Synthetic oligonucleotide
  Sense strand starting at position 3722 of SEQ ID NO: 585717
cuaagagguuaguuuauuc

SEQ ID NO: 662043 - RNA, 19 nt, Artificial Sequence
  Description of Artificial Sequence: Synthetic oligonucleotide
  Antisense strand to SEQ ID NO: 662042
gaauaaacuaaccucuuag

SEQ ID NO: 662044 - RNA, 19 nt, Artificial Sequence
  Description of Artificial Sequence: Synthetic oligonucleotide
  Sense strand starting at position 3857 of SEQ ID NO: 585717
ugccaauaugaaugagaac

SEQ ID NO: 662045 - RNA, 19 nt, Artificial Sequence
  Description of Artificial Sequence: Synthetic oligonucleotide
  Antisense strand to SEQ ID NO: 662044
guucucauucauauuggca

SEQ ID NO: 662046 - RNA, 19 nt, Artificial Sequence
  Description of Artificial Sequence: Synthetic oligonucleotide
  Sense strand starting at position 3872 of SEQ ID NO: 585717
gaacauaagcacgaauagu

SEQ ID NO: 662047 - RNA, 19 nt, Artificial Sequence
  Description of Artificial Sequence: Synthetic oligonucleotide
  Antisense strand to SEQ ID NO: 662046
acuauucgugcuuauguuc

SEQ ID NO: 662048 - RNA, 19 nt, Artificial Sequence
  Description of Artificial Sequence: Synthetic oligonucleotide
  Sense strand starting at position 3880 of SEQ ID NO: 585717
gcacgaauagugcugccua

SEQ ID NO: 662049 - RNA, 19 nt, Artificial Sequence
  Description of Artificial Sequence: Synthetic oligonucleotide
  Antisense strand to SEQ ID NO: 662048
uaggcagcacuauucgugc

SEQ ID NO: 662050 - RNA, 19 nt, Artificial Sequence
  Description of Artificial Sequence: Synthetic oligonucleotide
  Sense strand starting at position 3922 of SEQ ID NO: 585717
ugaguaacaucaccacuga

SEQ ID NO: 662051 - RNA, 19 nt, Artificial Sequence
  Description of Artificial Sequence: Synthetic oligonucleotide
  Antisense strand to SEQ ID NO: 662050
ucaguggugauguuacuca

SEQ ID NO: 662052 - RNA, 19 nt, Artificial Sequence
  Description of Artificial Sequence: Synthetic oligonucleotide
  Sense strand starting at position 89 of SEQ ID NO: 585718
ccagucugcccacaugaua

SEQ ID NO: 662053 - RNA, 19 nt, Artificial Sequence
  Description of Artificial Sequence: Synthetic oligonucleotide
  Antisense strand to SEQ ID NO: 662052
uaucaugugggcagacugg

SEQ ID NO: 662054 - RNA, 19 nt, Artificial Sequence
  Description of Artificial Sequence: Synthetic oligonucleotide
  Sense strand starting at position 109 of SEQ ID NO: 585718
acuggcucauuugagacau

SEQ ID NO: 662055 - RNA, 19 nt, Artificial Sequence
  Description of Artificial Sequence: Synthetic oligonucleotide
  Antisense strand to SEQ ID NO: 662054
augucucaaaugagccagu

SEQ ID NO: 662056 - RNA, 19 nt, Artificial Sequence
  Description of Artificial Sequence: Synthetic oligonucleotide
  Sense strand starting at position 111 of SEQ ID NO: 585718
uggcucauuugagacauaa

SEQ ID NO: 662057 - RNA, 19 nt, Artificial Sequence
  Description of Artificial Sequence: Synthetic oligonucleotide
  Antisense strand to SEQ ID NO: 662056
uuaugucucaaaugagcca

SEQ ID NO: 662058 - RNA, 19 nt, Artificial Sequence
  Description of Artificial Sequence: Synthetic oligonucleotide
  Sense strand starting at position 438 of SEQ ID NO: 585718
uguccuaagucuuccaaau

SEQ ID NO: 662059 - RNA, 19 nt, Artificial Sequence
  Description of Artificial Sequence: Synthetic oligonucleotide
  Antisense strand to SEQ ID NO: 662058
auuuggaagacuuaggaca

SEQ ID NO: 662060 - RNA, 19 nt, Artificial Sequence
  Description of Artificial Sequence: Synthetic oligonucleotide
  Sense strand starting at position 668 of SEQ ID NO: 585718
agaaauaagugcucacuaa

SEQ ID NO: 662061 - RNA, 19 nt, Artificial Sequence
  Description of Artificial Sequence: Synthetic oligonucleotide
  Antisense strand to SEQ ID NO: 662060
uuagugagcacuuauuucu

SEQ ID NO: 662062 - RNA, 19 nt, Artificial Sequence
  Description of Artificial Sequence: Synthetic oligonucleotide
  Sense strand starting at position 741 of SEQ ID NO: 585718
agauucuaguugccaggau

SEQ ID NO: 662063 - RNA, 19 nt, Artificial Sequence
  Description of Artificial Sequence: Synthetic oligonucleotide
  Antisense strand to SEQ ID NO: 662062
auccuggcaacuagaaucu

SEQ ID NO: 662064 - RNA, 19 nt, Artificial Sequence
  Description of Artificial Sequence: Synthetic oligonucleotide
  Sense strand starting at position 771 of SEQ ID NO: 585718
cuuacaguccuguagguuu

SEQ ID NO: 662065 - RNA, 19 nt, Artificial Sequence
  Description of Artificial Sequence: Synthetic oligonucleotide
  Antisense strand to SEQ ID NO: 662064
aaaccuacaggacuguaag

SEQ ID NO: 662066 - RNA, 19 nt, Artificial Sequence
  Description of Artificial Sequence: Synthetic oligonucleotide
  Sense strand starting at position 2202 of SEQ ID NO: 585718
cuuugcuauccugaggaag

SEQ ID NO: 662067 - RNA, 19 nt, Artificial Sequence
  Description of Artificial Sequence: Synthetic oligonucleotide
  Antisense strand to SEQ ID NO: 662066
cuuccucaggauagcaaag

SEQ ID NO: 662068 - RNA, 19 nt, Artificial Sequence
  Description of Artificial Sequence: Synthetic oligonucleotide
  Sense strand starting at position 2237 of SEQ ID NO: 585718
ugaguuucggcuuaaagau

SEQ ID NO: 662069 - RNA, 19 nt, Artificial Sequence
  Description of Artificial Sequence: Synthetic oligonucleotide
  Antisense strand to SEQ ID NO: 662068
aucuuuaagccgaaacuca

SEQ ID NO: 662070 - RNA, 19 nt, Artificial Sequence
  Description of Artificial Sequence: Synthetic oligonucleotide
  Sense strand starting at position 2246 of SEQ ID NO: 585718
gcuuaaagaucccuuagca

SEQ ID NO: 662071 - RNA, 19 nt, Artificial Sequence
  Description of Artificial Sequence: Synthetic oligonucleotide
  Antisense strand to SEQ ID NO: 662070
ugcuaagggaucuuuaagc

SEQ ID NO: 662072 - RNA, 19 nt, Artificial Sequence
  Description of Artificial Sequence: Synthetic oligonucleotide
  Sense strand starting at position 2322 of SEQ ID NO: 585718
gagaguacuguaggacuuu

SEQ ID NO: 662073 - RNA, 19 nt, Artificial Sequence
  Description of Artificial Sequence: Synthetic oligonucleotide
  Antisense strand to SEQ ID NO: 662072
aaaguccuacaguacucuc

SEQ ID NO: 662074 - RNA, 19 nt, Artificial Sequence
  Description of Artificial Sequence: Synthetic oligonucleotide
  Sense strand starting at position 2435 of SEQ ID NO: 585718
acagaauagugccugagaa

SEQ ID NO: 662075 - RNA, 19 nt, Artificial Sequence
  Description of Artificial Sequence: Synthetic oligonucleotide
  Antisense strand to SEQ ID NO: 662074
uucucaggcacuauucugu

SEQ ID NO: 662076 - RNA, 19 nt, Artificial Sequence
  Description of Artificial Sequence: Synthetic oligonucleotide
  Sense strand starting at position 2436 of SEQ ID NO: 585718
cagaauagugccugagaaa

SEQ ID NO: 662077 - RNA, 19 nt, Artificial Sequence
  Description of Artificial Sequence: Synthetic oligonucleotide
  Antisense strand to SEQ ID NO: 662076
uuucucaggcacuauucug

SEQ ID NO: 662078 - RNA, 19 nt, Artificial Sequence
  Description of Artificial Sequence: Synthetic oligonucleotide
  Sense strand starting at position 2456 of SEQ ID NO: 585718
ugaagaaauuaaucugcau

SEQ ID NO: 662079 - RNA, 19 nt, Artificial Sequence
  Description of Artificial Sequence: Synthetic oligonucleotide
  Antisense strand to SEQ ID NO: 662078
augcagauuaauuucuuca

SEQ ID NO: 662080 - RNA, 19 nt, Artificial Sequence
  Description of Artificial Sequence: Synthetic oligonucleotide
  Sense strand starting at position 2459 of SEQ ID NO: 585718
agaaauuaaucugcaugau

SEQ ID NO: 662081 - RNA, 19 nt, Artificial Sequence
  Description of Artificial Sequence: Synthetic oligonucleotide
  Antisense strand to SEQ ID NO: 662080
aucaugcagauuaauuucu

SEQ ID NO: 662082 - RNA, 19 nt, Artificial Sequence
  Description of Artificial Sequence: Synthetic oligonucleotide
  Sense strand starting at position 2525 of SEQ ID NO: 585718
acaucagaacucuagcagu

SEQ ID NO: 662083 - RNA, 19 nt, Artificial Sequence
  Description of Artificial Sequence: Synthetic oligonucleotide
  Antisense strand to SEQ ID NO: 662082
acugcuagaguucugaugu

SEQ ID NO: 662084 - RNA, 19 nt, Artificial Sequence
  Description of Artificial Sequence: Synthetic oligonucleotide
  Sense strand starting at position 2592 of SEQ ID NO: 585718
uuuccuaauuuguaggaaa

SEQ ID NO: 662085 - RNA, 19 nt, Artificial Sequence
  Description of Artificial Sequence: Synthetic oligonucleotide
  Antisense strand to SEQ ID NO: 662084
uuuccuacaaauuaggaaa

SEQ ID NO: 662086 - RNA, 19 nt, Artificial Sequence
  Description of Artificial Sequence: Synthetic oligonucleotide
  Sense strand starting at position 2640 of SEQ ID NO: 585718
ucuuuagaagaguauguau

SEQ ID NO: 662087 - RNA, 19 nt, Artificial Sequence
  Description of Artificial Sequence: Synthetic oligonucleotide
  Antisense strand to SEQ ID NO: 662086
auacauacucuucuaaaga

SEQ ID NO: 662088 - RNA, 19 nt, Artificial Sequence
  Description of Artificial Sequence: Synthetic oligonucleotide
  Sense strand starting at position 2682 of SEQ ID NO: 585718
ucucauuugcauuaguguu

SEQ ID NO: 662089 - RNA, 19 nt, Artificial Sequence
  Description of Artificial Sequence: Synthetic oligonucleotide
  Antisense strand to SEQ ID NO: 662088
aacacuaaugcaaaugaga

SEQ ID NO: 662090 - RNA, 19 nt, Artificial Sequence
  Description of Artificial Sequence: Synthetic oligonucleotide
  Sense strand starting at position 2687 of SEQ ID NO: 585718
uuugcauuaguguugcauu

SEQ ID NO: 662091 - RNA, 19 nt, Artificial Sequence
  Description of Artificial Sequence: Synthetic oligonucleotide
  Antisense strand to SEQ ID NO: 662090
aaugcaacacuaaugcaaa

SEQ ID NO: 662092 - RNA, 19 nt, Artificial Sequence
  Description of Artificial Sequence: Synthetic oligonucleotide
  Sense strand starting at position 2725 of SEQ ID NO: 585718
uugauucaggauuggaagu

SEQ ID NO: 662093 - RNA, 19 nt, Artificial Sequence
  Description of Artificial Sequence: Synthetic oligonucleotide
  Antisense strand to SEQ ID NO: 662092
acuuccaauccugaaucaa

SEQ ID NO: 662094 - RNA, 19 nt, Artificial Sequence
  Description of Artificial Sequence: Synthetic oligonucleotide
  Sense strand starting at position 2749 of SEQ ID NO: 585718
guguccuuauagguauaga

SEQ ID NO: 662095 - RNA, 19 nt, Artificial Sequence
  Description of Artificial Sequence: Synthetic oligonucleotide
  Antisense strand to SEQ ID NO: 662094
ucuauaccuauaaggacac

SEQ ID NO: 662096 - RNA, 19 nt, Artificial Sequence
  Description of Artificial Sequence: Synthetic oligonucleotide
  Sense strand starting at position 2760 of SEQ ID NO: 585718
gguauagaaauguauaugu

SEQ ID NO: 662097 - RNA, 19 nt, Artificial Sequence
  Description of Artificial Sequence: Synthetic oligonucleotide
  Antisense strand to SEQ ID NO: 662096
acauauacauuucuauacc

SEQ ID NO: 662098 - RNA, 19 nt, Artificial Sequence
  Description of Artificial Sequence: Synthetic oligonucleotide
  Sense strand starting at position 2909 of SEQ ID NO: 585718
uguagaaauauugaagugu

SEQ ID NO: 662099 - RNA, 19 nt, Artificial Sequence
  Description of Artificial Sequence: Synthetic oligonucleotide
  Antisense strand to SEQ ID NO: 662098
acacuucaauauuucuaca

SEQ ID NO: 662100 - RNA, 19 nt, Artificial Sequence
  Description of Artificial Sequence: Synthetic oligonucleotide
  Sense strand starting at position 2924 of SEQ ID NO: 585718
guguauauccuuuaacuuu

SEQ ID NO: 662101 - RNA, 19 nt, Artificial Sequence
  Description of Artificial Sequence: Synthetic oligonucleotide
  Antisense strand to SEQ ID NO: 662100
aaaguuaaaggauauacac

SEQ ID NO: 662102 - RNA, 19 nt, Artificial Sequence
  Description of Artificial Sequence: Synthetic oligonucleotide
  Sense strand starting at position 3031 of SEQ ID NO: 585718
uuugauauguacucgaaga

SEQ ID NO: 662103 - RNA, 19 nt, Artificial Sequence
  Description of Artificial Sequence: Synthetic oligonucleotide
  Antisense strand to SEQ ID NO: 662102
ucuucgaguacauaucaaa

SEQ ID NO: 662104 - RNA, 19 nt, Artificial Sequence
  Description of Artificial Sequence: Synthetic oligonucleotide
  Sense strand starting at position 3032 of SEQ ID NO: 585718
uugauauguacucgaagau

SEQ ID NO: 662105 - RNA, 19 nt, Artificial Sequence
  Description of Artificial Sequence: Synthetic oligonucleotide
  Antisense strand to SEQ ID NO: 662104
aucuucgaguacauaucaa

SEQ ID NO: 662106 - RNA, 19 nt, Artificial Sequence
  Description of Artificial Sequence: Synthetic oligonucleotide
  Sense strand starting at position 3033 of SEQ ID NO: 585718
ugauauguacucgaagauu

SEQ ID NO: 662107 - RNA, 19 nt, Artificial Sequence
  Description of Artificial Sequence: Synthetic oligonucleotide
  Antisense strand to SEQ ID NO: 662106
aaucuucgaguacauauca

SEQ ID NO: 662108 - RNA, 19 nt, Artificial Sequence
  Description of Artificial Sequence: Synthetic oligonucleotide
  Sense strand starting at position 3046 of SEQ ID NO: 585718
aagauuccagcuugaagag

SEQ ID NO: 662109 - RNA, 19 nt, Artificial Sequence
  Description of Artificial Sequence: Synthetic oligonucleotide
  Antisense strand to SEQ ID NO: 662108
cucuucaagcuggaaucuu

SEQ ID NO: 662110 - RNA, 19 nt, Artificial Sequence
  Description of Artificial Sequence: Synthetic oligonucleotide
  Sense strand starting at position 3089 of SEQ ID NO: 585718
gugccagguguugcucuaa

SEQ ID NO: 662111 - RNA, 19 nt, Artificial Sequence
  Description of Artificial Sequence: Synthetic oligonucleotide
  Antisense strand to SEQ ID NO: 662110
uuagagcaacaccuggcac

SEQ ID NO: 662112 - RNA, 19 nt, Artificial Sequence
  Description of Artificial Sequence: Synthetic oligonucleotide
  Sense strand starting at position 3422 of SEQ ID NO: 585718
aucaucucuuguuuggauu

SEQ ID NO: 662113 - RNA, 19 nt, Artificial Sequence
  Description of Artificial Sequence: Synthetic oligonucleotide
  Antisense strand to SEQ ID NO: 662112
aauccaaacaagagaugau

SEQ ID NO: 662114 - RNA, 19 nt, Artificial Sequence
  Description of Artificial Sequence: Synthetic oligonucleotide
  Sense strand starting at position 3423 of SEQ ID NO: 585718
ucaucucuuguuuggauua

SEQ ID NO: 662115 - RNA, 19 nt, Artificial Sequence
  Description of Artificial Sequence: Synthetic oligonucleotide
  Antisense strand to SEQ ID NO: 662114
uaauccaaacaagagauga

SEQ ID NO: 662116 - RNA, 19 nt, Artificial Sequence
  Description of Artificial Sequence: Synthetic oligonucleotide
  Sense strand starting at position 3556 of SEQ ID NO: 585718
guggcuucccaacacaagu

SEQ ID NO: 662117 - RNA, 19 nt, Artificial Sequence
  Description of Artificial Sequence: Synthetic oligonucleotide
  Antisense strand to SEQ ID NO: 662116
acuuguguugggaagccac

SEQ ID NO: 662118 - RNA, 19 nt, Artificial Sequence
  Description of Artificial Sequence: Synthetic oligonucleotide
  Sense strand starting at position 3586 of SEQ ID NO: 585718
uccuaacgauggcuuuaaa

SEQ ID NO: 662119 - RNA, 19 nt, Artificial Sequence
  Description of Artificial Sequence: Synthetic oligonucleotide
  Antisense strand to SEQ ID NO: 662118
uuuaaagccaucguuagga

SEQ ID NO: 662120 - RNA, 19 nt, Artificial Sequence
  Description of Artificial Sequence: Synthetic oligonucleotide
  Sense strand starting at position 3648 of SEQ ID NO: 585718
agcuuuguauucccagaaa

SEQ ID NO: 662121 - RNA, 19 nt, Artificial Sequence
  Description of Artificial Sequence: Synthetic oligonucleotide
  Antisense strand to SEQ ID NO: 662120
uuucugggaauacaaagcu

SEQ ID NO: 662122 - RNA, 19 nt, Artificial Sequence
  Description of Artificial Sequence: Synthetic oligonucleotide
  Sense strand starting at position 3651 of SEQ ID NO: 585718
uuuguauucccagaaagcu

SEQ ID NO: 662123 - RNA, 19 nt, Artificial Sequence
  Description of Artificial Sequence: Synthetic oligonucleotide
  Antisense strand to SEQ ID NO: 662122
agcuuucugggaauacaaa

SEQ ID NO: 662124 - RNA, 19 nt, Artificial Sequence
  Description of Artificial Sequence: Synthetic oligonucleotide
  Sense strand starting at position 3660 of SEQ ID NO: 585718
ccagaaagcucuccacaag

SEQ ID NO: 662125 - RNA, 19 nt, Artificial Sequence
  Description of Artificial Sequence: Synthetic oligonucleotide
  Antisense strand to SEQ ID NO: 662124
cuuguggagagcuuucugg

SEQ ID NO: 662126 - RNA, 19 nt, Artificial Sequence
  Description of Artificial Sequence: Synthetic oligonucleotide
  Sense strand starting at position 3747 of SEQ ID NO: 585718
uccauaugugcucagaugu

SEQ ID NO: 662127 - RNA, 19 nt, Artificial Sequence
  Description of Artificial Sequence: Synthetic oligonucleotide
  Antisense strand to SEQ ID NO: 662126
acaucugagcacauaugga

SEQ ID NO: 662128 - RNA, 19 nt, Artificial Sequence
  Description of Artificial Sequence: Synthetic oligonucleotide
  Sense strand starting at position 3861 of SEQ ID NO: 585718
cuuaucacaguguaaugga

SEQ ID NO: 662129 - RNA, 19 nt, Artificial Sequence
  Description of Artificial Sequence: Synthetic oligonucleotide
  Antisense strand to SEQ ID NO: 662128
uccauuacacugugauaag

SEQ ID NO: 662130 - RNA, 19 nt, Artificial Sequence
  Description of Artificial Sequence: Synthetic oligonucleotide
  Sense strand starting at position 3982 of SEQ ID NO: 585718
ggaauagugccugacacac

SEQ ID NO: 662131 - RNA, 19 nt, Artificial Sequence
  Description of Artificial Sequence: Synthetic oligonucleotide
  Antisense strand to SEQ ID NO: 662130
gugugucaggcacuauucc

SEQ ID NO: 662132 - RNA, 19 nt, Artificial Sequence
  Description of Artificial Sequence: Synthetic oligonucleotide
  Sense strand starting at position 189 of SEQ ID NO: 585719
ccagucugcccacaugaua

SEQ ID NO: 662133 - RNA, 19 nt, Artificial Sequence
  Description of Artificial Sequence: Synthetic oligonucleotide
  Antisense strand to SEQ ID NO: 662132
uaucaugugggcagacugg

SEQ ID NO: 662134 - RNA, 19 nt, Artificial Sequence
  Description of Artificial Sequence: Synthetic oligonucleotide
  Sense strand starting at position 209 of SEQ ID NO: 585719
acuggcucauuugagacau

SEQ ID NO: 662135 - RNA, 19 nt, Artificial Sequence
  Description of Artificial Sequence: Synthetic oligonucleotide
  Antisense strand to SEQ ID NO: 662134
augucucaaaugagccagu

SEQ ID NO: 662136 - RNA, 19 nt, Artificial Sequence
  Description of Artificial Sequence: Synthetic oligonucleotide
  Sense strand starting at position 211 of SEQ ID NO: 585719
uggcucauuugagacauaa

SEQ ID NO: 662137 - RNA, 19 nt, Artificial Sequence
  Description of Artificial Sequence: Synthetic oligonucleotide
  Antisense strand to SEQ ID NO: 662136
uuaugucucaaaugagcca

SEQ ID NO: 662138 - RNA, 19 nt, Artificial Sequence
  Description of Artificial Sequence: Synthetic oligonucleotide
  Sense strand starting at position 538 of SEQ ID NO: 585719
uguccuaagucuuccaaau

SEQ ID NO: 662139 - RNA, 19 nt, Artificial Sequence
  Description of Artificial Sequence: Synthetic oligonucleotide
  Antisense strand to SEQ ID NO: 662138
auuuggaagacuuaggaca

SEQ ID NO: 662140 - RNA, 19 nt, Artificial Sequence
  Description of Artificial Sequence: Synthetic oligonucleotide
  Sense strand starting at position 768 of SEQ ID NO: 585719
agaaauaagugcucacuaa

SEQ ID NO: 662141 - RNA, 19 nt, Artificial Sequence
  Description of Artificial Sequence: Synthetic oligonucleotide
  Antisense strand to SEQ ID NO: 662140
uuagugagcacuuauuucu

SEQ ID NO: 662142 - RNA, 19 nt, Artificial Sequence
  Description of Artificial Sequence: Synthetic oligonucleotide
  Sense strand starting at position 841 of SEQ ID NO: 585719
agauucuaguugccaggau

SEQ ID NO: 662143 - RNA, 19 nt, Artificial Sequence
  Description of Artificial Sequence: Synthetic oligonucleotide
  Antisense strand to SEQ ID NO: 662142
auccuggcaacuagaaucu

SEQ ID NO: 662144 - RNA, 19 nt, Artificial Sequence
  Description of Artificial Sequence: Synthetic oligonucleotide
  Sense strand starting at position 871 of SEQ ID NO: 585719
cuuacaguccuguagguuu

SEQ ID NO: 662145 - RNA, 19 nt, Artificial Sequence
  Description of Artificial Sequence: Synthetic oligonucleotide
  Antisense strand to SEQ ID NO: 662144
aaaccuacaggacuguaag

SEQ ID NO: 662146 - RNA, 19 nt, Artificial Sequence
  Description of Artificial Sequence: Synthetic oligonucleotide
  Sense strand starting at position 2302 of SEQ ID NO: 585719
cuuugcuauccugaggaag

SEQ ID NO: 662147 - RNA, 19 nt, Artificial Sequence
  Description of Artificial Sequence: Synthetic oligonucleotide
  Antisense strand to SEQ ID NO: 662146
cuuccucaggauagcaaag

SEQ ID NO: 662148 - RNA, 19 nt, Artificial Sequence
  Description of Artificial Sequence: Synthetic oligonucleotide
  Sense strand starting at position 2337 of SEQ ID NO: 585719
ugaguuucggcuuaaagau

SEQ ID NO: 662149 - RNA, 19 nt, Artificial Sequence
  Description of Artificial Sequence: Synthetic oligonucleotide
  Antisense strand to SEQ ID NO: 662148
aucuuuaagccgaaacuca

SEQ ID NO: 662150 - RNA, 19 nt, Artificial Sequence
  Description of Artificial Sequence: Synthetic oligonucleotide
  Sense strand starting at position 2346 of SEQ ID NO: 585719
gcuuaaagaucccuuagca

SEQ ID NO: 662151 - RNA, 19 nt, Artificial Sequence
  Description of Artificial Sequence: Synthetic oligonucleotide
  Antisense strand to SEQ ID NO: 662150
ugcuaagggaucuuuaagc

SEQ ID NO: 662152 - RNA, 19 nt, Artificial Sequence
  Description of Artificial Sequence: Synthetic oligonucleotide
  Sense strand starting at position 2422 of SEQ ID NO: 585719
gagaguacuguaggacuuu

SEQ ID NO: 662153 - RNA, 19 nt, Artificial Sequence
  Description of Artificial Sequence: Synthetic oligonucleotide
  Antisense strand to SEQ ID NO: 662152
aaaguccuacaguacucuc

SEQ ID NO: 662154 - RNA, 19 nt, Artificial Sequence
  Description of Artificial Sequence: Synthetic oligonucleotide
  Sense strand starting at position 2535 of SEQ ID NO: 585719
acagaauagugccugagaa

SEQ ID NO: 662155 - RNA, 19 nt, Artificial Sequence
  Description of Artificial Sequence: Synthetic oligonucleotide
  Antisense strand to SEQ ID NO: 662154
uucucaggcacuauucugu

SEQ ID NO: 662156 - RNA, 19 nt, Artificial Sequence
  Description of Artificial Sequence: Synthetic oligonucleotide
  Sense strand starting at position 2536 of SEQ ID NO: 585719
cagaauagugccugagaaa

SEQ ID NO: 662157 - RNA, 19 nt, Artificial Sequence
  Description of Artificial Sequence: Synthetic oligonucleotide
  Antisense strand to SEQ ID NO: 662156
uuucucaggcacuauucug

SEQ ID NO: 662158 - RNA, 19 nt, Artificial Sequence
  Description of Artificial Sequence: Synthetic oligonucleotide
  Sense strand starting at position 2556 of SEQ ID NO: 585719
ugaagaaauuaaucugcau

SEQ ID NO: 662159 - RNA, 19 nt, Artificial Sequence
  Description of Artificial Sequence: Synthetic oligonucleotide
  Antisense strand to SEQ ID NO: 662158
augcagauuaauuucuuca

SEQ ID NO: 662160 - RNA, 19 nt, Artificial Sequence
  Description of Artificial Sequence: Synthetic oligonucleotide
  Sense strand starting at position 2559 of SEQ ID NO: 585719
agaaauuaaucugcaugau

SEQ ID NO: 662161 - RNA, 19 nt, Artificial Sequence
  Description of Artificial Sequence: Synthetic oligonucleotide
  Antisense strand to SEQ ID NO: 662160
aucaugcagauuaauuucu

SEQ ID NO: 662162 - RNA, 19 nt, Artificial Sequence
  Description of Artificial Sequence: Synthetic oligonucleotide
  Sense strand starting at position 2625 of SEQ ID NO: 585719
acaucagaacucuagcagu

SEQ ID NO: 662163 - RNA, 19 nt, Artificial Sequence
  Description of Artificial Sequence: Synthetic oligonucleotide
  Antisense strand to SEQ ID NO: 662162
acugcuagaguucugaugu

SEQ ID NO: 662164 - RNA, 19 nt, Artificial Sequence
  Description of Artificial Sequence: Synthetic oligonucleotide
  Sense strand starting at position 2692 of SEQ ID NO: 585719
uuuccuaauuuguaggaaa

SEQ ID NO: 662165 - RNA, 19 nt, Artificial Sequence
  Description of Artificial Sequence: Synthetic oligonucleotide
  Antisense strand to SEQ ID NO: 662164
uuuccuacaaauuaggaaa

SEQ ID NO: 662166 - RNA, 19 nt, Artificial Sequence
  Description of Artificial Sequence: Synthetic oligonucleotide
  Sense strand starting at position 2740 of SEQ ID NO: 585719
ucuuuagaagaguauguau

SEQ ID NO: 662167 - RNA, 19 nt, Artificial Sequence
  Description of Artificial Sequence: Synthetic oligonucleotide
  Antisense strand to SEQ ID NO: 662166
auacauacucuucuaaaga

SEQ ID NO: 662168 - RNA, 19 nt, Artificial Sequence
  Description of Artificial Sequence: Synthetic oligonucleotide
  Sense strand starting at position 2775 of SEQ ID NO: 585719
agcgucuucucauuugcau

SEQ ID NO: 662169 - RNA, 19 nt, Artificial Sequence
  Description of Artificial Sequence: Synthetic oligonucleotide
  Antisense strand to SEQ ID NO: 662168
augcaaaugagaagacgcu

SEQ ID NO: 662170 - RNA, 19 nt, Artificial Sequence
  Description of Artificial Sequence: Synthetic oligonucleotide
  Sense strand starting at position 2782 of SEQ ID NO: 585719
ucucauuugcauuaguguu

SEQ ID NO: 662171 - RNA, 19 nt, Artificial Sequence
  Description of Artificial Sequence: Synthetic oligonucleotide
  Antisense strand to SEQ ID NO: 662170
aacacuaaugcaaaugaga

SEQ ID NO: 662172 - RNA, 19 nt, Artificial Sequence
  Description of Artificial Sequence: Synthetic oligonucleotide
  Sense strand starting at position 2787 of SEQ ID NO: 585719
uuugcauuaguguugcauu

SEQ ID NO: 662173 - RNA, 19 nt, Artificial Sequence
  Description of Artificial Sequence: Synthetic oligonucleotide
  Antisense strand to SEQ ID NO: 662172
aaugcaacacuaaugcaaa

SEQ ID NO: 662174 - RNA, 19 nt, Artificial Sequence
  Description of Artificial Sequence: Synthetic oligonucleotide
  Sense strand starting at position 2825 of SEQ ID NO: 585719
uugauucaggauuggaagu

SEQ ID NO: 662175 - RNA, 19 nt, Artificial Sequence
  Description of Artificial Sequence: Synthetic oligonucleotide
  Antisense strand to SEQ ID NO: 662174
acuuccaauccugaaucaa

SEQ ID NO: 662176 - RNA, 19 nt, Artificial Sequence
  Description of Artificial Sequence: Synthetic oligonucleotide
  Sense strand starting at position 2849 of SEQ ID NO: 585719
guguccuuauagguauaga

SEQ ID NO: 662177 - RNA, 19 nt, Artificial Sequence
  Description of Artificial Sequence: Synthetic oligonucleotide
  Antisense strand to SEQ ID NO: 662176
ucuauaccuauaaggacac

SEQ ID NO: 662178 - RNA, 19 nt, Artificial Sequence
  Description of Artificial Sequence: Synthetic oligonucleotide
  Sense strand starting at position 2860 of SEQ ID NO: 585719
gguauagaaauguauaugu

SEQ ID NO: 662179 - RNA, 19 nt, Artificial Sequence
  Description of Artificial Sequence: Synthetic oligonucleotide
  Antisense strand to SEQ ID NO: 662178
acauauacauuucuauacc

SEQ ID NO: 662180 - RNA, 19 nt, Artificial Sequence
  Description of Artificial Sequence: Synthetic oligonucleotide
  Sense strand starting at position 3009 of SEQ ID NO: 585719
uguagaaauauugaagugu

SEQ ID NO: 662181 - RNA, 19 nt, Artificial Sequence
  Description of Artificial Sequence: Synthetic oligonucleotide
  Antisense strand to SEQ ID NO: 662180
acacuucaauauuucuaca

SEQ ID NO: 662182 - RNA, 19 nt, Artificial Sequence
  Description of Artificial Sequence: Synthetic oligonucleotide
  Sense strand starting at position 3024 of SEQ ID NO: 585719
guguauauccuuuaacuuu

SEQ ID NO: 662183 - RNA, 19 nt, Artificial Sequence
  Description of Artificial Sequence: Synthetic oligonucleotide
  Antisense strand to SEQ ID NO: 662182
aaaguuaaaggauauacac

SEQ ID NO: 662184 - RNA, 19 nt, Artificial Sequence
  Description of Artificial Sequence: Synthetic oligonucleotide
  Sense strand starting at position 3131 of SEQ ID NO: 585719
uuugauauguacucgaaga

SEQ ID NO: 662185 - RNA, 19 nt, Artificial Sequence
  Description of Artificial Sequence: Synthetic oligonucleotide
  Antisense strand to SEQ ID NO: 662184
ucuucgaguacauaucaaa

SEQ ID NO: 662186 - RNA, 19 nt, Artificial Sequence
  Description of Artificial Sequence: Synthetic oligonucleotide
  Sense strand starting at position 3132 of SEQ ID NO: 585719
uugauauguacucgaagau

SEQ ID NO: 662187 - RNA, 19 nt, Artificial Sequence
  Description of Artificial Sequence: Synthetic oligonucleotide
  Antisense strand to SEQ ID NO: 662186
aucuucgaguacauaucaa

SEQ ID NO: 662188 - RNA, 19 nt, Artificial Sequence
  Description of Artificial Sequence: Synthetic oligonucleotide
  Sense strand starting at position 3133 of SEQ ID NO: 585719
ugauauguacucgaagauu

SEQ ID NO: 662189 - RNA, 19 nt, Artificial Sequence
  Description of Artificial Sequence: Synthetic oligonucleotide
  Antisense strand to SEQ ID NO: 662188
aaucuucgaguacauauca

SEQ ID NO: 662190 - RNA, 19 nt, Artificial Sequence
  Description of Artificial Sequence: Synthetic oligonucleotide
  Sense strand starting at position 3146 of SEQ ID NO: 585719
aagauuccagcuugaagag

SEQ ID NO: 662191 - RNA, 19 nt, Artificial Sequence
  Description of Artificial Sequence: Synthetic oligonucleotide
  Antisense strand to SEQ ID NO: 662190
cucuucaagcuggaaucuu

SEQ ID NO: 662192 - RNA, 19 nt, Artificial Sequence
  Description of Artificial Sequence: Synthetic oligonucleotide
  Sense strand starting at position 3189 of SEQ ID NO: 585719
gugccagguguugcucuaa

SEQ ID NO: 662193 - RNA, 19 nt, Artificial Sequence
  Description of Artificial Sequence: Synthetic oligonucleotide
  Antisense strand to SEQ ID NO: 662192
uuagagcaacaccuggcac

SEQ ID NO: 662194 - RNA, 19 nt, Artificial Sequence
  Description of Artificial Sequence: Synthetic oligonucleotide
  Sense strand starting at position 3522 of SEQ ID NO: 585719
aucaucucuuguuuggauu

SEQ ID NO: 662195 - RNA, 19 nt, Artificial Sequence
  Description of Artificial Sequence: Synthetic oligonucleotide
  Antisense strand to SEQ ID NO: 662194
aauccaaacaagagaugau

SEQ ID NO: 662196 - RNA, 19 nt, Artificial Sequence
  Description of Artificial Sequence: Synthetic oligonucleotide
  Sense strand starting at position 3523 of SEQ ID NO: 585719
ucaucucuuguuuggauua

SEQ ID NO: 662197 - RNA, 19 nt, Artificial Sequence
  Description of Artificial Sequence: Synthetic oligonucleotide
  Antisense strand to SEQ ID NO: 662196
uaauccaaacaagagauga

SEQ ID NO: 662198 - RNA, 19 nt, Artificial Sequence
  Description of Artificial Sequence: Synthetic oligonucleotide
  Sense strand starting at position 3656 of SEQ ID NO: 585719
guggcuucccaacacaagu

SEQ ID NO: 662199 - RNA, 19 nt, Artificial Sequence
  Description of Artificial Sequence: Synthetic oligonucleotide
  Antisense strand to SEQ ID NO: 662198
acuuguguugggaagccac

SEQ ID NO: 662200 - RNA, 19 nt, Artificial Sequence
  Description of Artificial Sequence: Synthetic oligonucleotide
  Sense strand starting at position 3686 of SEQ ID NO: 585719
uccuaacgauggcuuuaaa

SEQ ID NO: 662201 - RNA, 19 nt, Artificial Sequence
  Description of Artificial Sequence: Synthetic oligonucleotide
  Antisense strand to SEQ ID NO: 662200
uuuaaagccaucguuagga

SEQ ID NO: 662202 - RNA, 19 nt, Artificial Sequence
  Description of Artificial Sequence: Synthetic oligonucleotide
  Sense strand starting at position 3748 of SEQ ID NO: 585719
agcuuuguauucccagaaa

SEQ ID NO: 662203 - RNA, 19 nt, Artificial Sequence
  Description of Artificial Sequence: Synthetic oligonucleotide
  Antisense strand to SEQ ID NO: 662202
uuucugggaauacaaagcu

SEQ ID NO: 662204 - RNA, 19 nt, Artificial Sequence
  Description of Artificial Sequence: Synthetic oligonucleotide
  Sense strand starting at position 3751 of SEQ ID NO: 585719
uuuguauucccagaaagcu

SEQ ID NO: 662205 - RNA, 19 nt, Artificial Sequence
  Description of Artificial Sequence: Synthetic oligonucleotide
  Antisense strand to SEQ ID NO: 662204
agcuuucugggaauacaaa

SEQ ID NO: 662206 - RNA, 19 nt, Artificial Sequence
  Description of Artificial Sequence: Synthetic oligonucleotide
  Sense strand starting at position 3760 of SEQ ID NO: 585719
ccagaaagcucuccacaag

SEQ ID NO: 662207 - RNA, 19 nt, Artificial Sequence
  Description of Artificial Sequence: Synthetic oligonucleotide
  Antisense strand to SEQ ID NO: 662206
cuuguggagagcuuucugg

SEQ ID NO: 662208 - RNA, 19 nt, Artificial Sequence
  Description of Artificial Sequence: Synthetic oligonucleotide
  Sense strand starting at position 3847 of SEQ ID NO: 585719
uccauaugugcucagaugu

SEQ ID NO: 662209 - RNA, 19 nt, Artificial Sequence
  Description of Artificial Sequence: Synthetic oligonucleotide
  Antisense strand to SEQ ID NO: 662208
acaucugagcacauaugga

SEQ ID NO: 662210 - RNA, 19 nt, Artificial Sequence
  Description of Artificial Sequence: Synthetic oligonucleotide
  Sense strand starting at position 3961 of SEQ ID NO: 585719
cuuaucacaguguaaugga

SEQ ID NO: 662211 - RNA, 19 nt, Artificial Sequence
  Description of Artificial Sequence: Synthetic oligonucleotide
  Antisense strand to SEQ ID NO: 662210
uccauuacacugugauaag

SEQ ID NO: 662212 - RNA, 19 nt, Artificial Sequence
  Description of Artificial Sequence: Synthetic oligonucleotide
  Sense strand starting at position 33 of SEQ ID NO: 585720
ccagucugcccacaugaua

SEQ ID NO: 662213 - RNA, 19 nt, Artificial Sequence
  Description of Artificial Sequence: Synthetic oligonucleotide
  Antisense strand to SEQ ID NO: 662212
uaucaugugggcagacugg

SEQ ID NO: 662214 - RNA, 19 nt, Artificial Sequence
  Description of Artificial Sequence: Synthetic oligonucleotide
  Sense strand starting at position 55 of SEQ ID NO: 585720
uggcucauuugagacauaa

SEQ ID NO: 662215 - RNA, 19 nt, Artificial Sequence
  Description of Artificial Sequence: Synthetic oligonucleotide
  Antisense strand to SEQ ID NO: 662214
uuaugucucaaaugagcca

SEQ ID NO: 662216 - RNA, 19 nt, Artificial Sequence
  Description of Artificial Sequence: Synthetic oligonucleotide
  Sense strand starting at position 612 of SEQ ID NO: 585720
agaaauaagugcucacuaa

SEQ ID NO: 662217 - RNA, 19 nt, Artificial Sequence
  Description of Artificial Sequence: Synthetic oligonucleotide
  Antisense strand to SEQ ID NO: 662216
uuagugagcacuuauuucu

SEQ ID NO: 662218 - RNA, 19 nt, Artificial Sequence
  Description of Artificial Sequence: Synthetic oligonucleotide
  Sense strand starting at position 685 of SEQ ID NO: 585720
agauucuaguugccaggau

SEQ ID NO: 662219 - RNA, 19 nt, Artificial Sequence
  Description of Artificial Sequence: Synthetic oligonucleotide
  Antisense strand to SEQ ID NO: 662218
auccuggcaacuagaaucu

SEQ ID NO: 662220 - RNA, 19 nt, Artificial Sequence
  Description of Artificial Sequence: Synthetic oligonucleotide
  Sense strand starting at position 2146 of SEQ ID NO: 585720
cuuugcuauccugaggaag

SEQ ID NO: 662221 - RNA, 19 nt, Artificial Sequence
  Description of Artificial Sequence: Synthetic oligonucleotide
  Antisense strand to SEQ ID NO: 662220
cuuccucaggauagcaaag

SEQ ID NO: 662222 - RNA, 19 nt, Artificial Sequence
  Description of Artificial Sequence: Synthetic oligonucleotide
  Sense strand starting at position 2181 of SEQ ID NO: 585720
ugaguuucggcuuaaagau

SEQ ID NO: 662223 - RNA, 19 nt, Artificial Sequence
  Description of Artificial Sequence: Synthetic oligonucleotide
  Antisense strand to SEQ ID NO: 662222
aucuuuaagccgaaacuca

SEQ ID NO: 662224 - RNA, 19 nt, Artificial Sequence
  Description of Artificial Sequence: Synthetic oligonucleotide
  Sense strand starting at position 2190 of SEQ ID NO: 585720
gcuuaaagaucccuuagca

SEQ ID NO: 662225 - RNA, 19 nt, Artificial Sequence
  Description of Artificial Sequence: Synthetic oligonucleotide
  Antisense strand to SEQ ID NO: 662224
ugcuaagggaucuuuaagc

SEQ ID NO: 662226 - RNA, 19 nt, Artificial Sequence
  Description of Artificial Sequence: Synthetic oligonucleotide
  Sense strand starting at position 2266 of SEQ ID NO: 585720
gagaguacuguaggacuuu

SEQ ID NO: 662227 - RNA, 19 nt, Artificial Sequence
  Description of Artificial Sequence: Synthetic oligonucleotide
  Antisense strand to SEQ ID NO: 662226
aaaguccuacaguacucuc

SEQ ID NO: 662228 - RNA, 19 nt, Artificial Sequence
  Description of Artificial Sequence: Synthetic oligonucleotide
  Sense strand starting at position 2379 of SEQ ID NO: 585720
acagaauagugccugagaa

SEQ ID NO: 662229 - RNA, 19 nt, Artificial Sequence
  Description of Artificial Sequence: Synthetic oligonucleotide
  Antisense strand to SEQ ID NO: 662228
uucucaggcacuauucugu

SEQ ID NO: 662230 - RNA, 19 nt, Artificial Sequence
  Description of Artificial Sequence: Synthetic oligonucleotide
  Sense strand starting at position 2380 of SEQ ID NO: 585720
cagaauagugccugagaaa

SEQ ID NO: 662231 - RNA, 19 nt, Artificial Sequence
  Description of Artificial Sequence: Synthetic oligonucleotide
  Antisense strand to SEQ ID NO: 662230
uuucucaggcacuauucug

SEQ ID NO: 662232 - RNA, 19 nt, Artificial Sequence
  Description of Artificial Sequence: Synthetic oligonucleotide
  Sense strand starting at position 2400 of SEQ ID NO: 585720
ugaagaaauuaaucugcau

SEQ ID NO: 662233 - RNA, 19 nt, Artificial Sequence
  Description of Artificial Sequence: Synthetic oligonucleotide
  Antisense strand to SEQ ID NO: 662232
augcagauuaauuucuuca

SEQ ID NO: 662234 - RNA, 19 nt, Artificial Sequence
  Description of Artificial Sequence: Synthetic oligonucleotide
  Sense strand starting at position 2403 of SEQ ID NO: 585720
agaaauuaaucugcaugau

SEQ ID NO: 662235 - RNA, 19 nt, Artificial Sequence
  Description of Artificial Sequence: Synthetic oligonucleotide
  Antisense strand to SEQ ID NO: 662234
aucaugcagauuaauuucu

SEQ ID NO: 662236 - RNA, 19 nt, Artificial Sequence
  Description of Artificial Sequence: Synthetic oligonucleotide
  Sense strand starting at position 2469 of SEQ ID NO: 585720
acaucagaacucuagcagu

SEQ ID NO: 662237 - RNA, 19 nt, Artificial Sequence
  Description of Artificial Sequence: Synthetic oligonucleotide
  Antisense strand to SEQ ID NO: 662236
acugcuagaguucugaugu

SEQ ID NO: 662238 - RNA, 19 nt, Artificial Sequence
  Description of Artificial Sequence: Synthetic oligonucleotide
  Sense strand starting at position 2536 of SEQ ID NO: 585720
uuuccuaauuuguaggaaa

SEQ ID NO: 662239 - RNA, 19 nt, Artificial Sequence
  Description of Artificial Sequence: Synthetic oligonucleotide
  Antisense strand to SEQ ID NO: 662238
uuuccuacaaauuaggaaa

SEQ ID NO: 662240 - RNA, 19 nt, Artificial Sequence
  Description of Artificial Sequence: Synthetic oligonucleotide
  Sense strand starting at position 2584 of SEQ ID NO: 585720
ucuuuagaagaguauguau

SEQ ID NO: 662241 - RNA, 19 nt, Artificial Sequence
  Description of Artificial Sequence: Synthetic oligonucleotide
  Antisense strand to SEQ ID NO: 662240
auacauacucuucuaaaga

SEQ ID NO: 662242 - RNA, 19 nt, Artificial Sequence
  Description of Artificial Sequence: Synthetic oligonucleotide
  Sense strand starting at position 2626 of SEQ ID NO: 585720
ucucauuugcauuaguguu

SEQ ID NO: 662243 - RNA, 19 nt, Artificial Sequence
  Description of Artificial Sequence: Synthetic oligonucleotide
  Antisense strand to SEQ ID NO: 662242
aacacuaaugcaaaugaga

SEQ ID NO: 662244 - RNA, 19 nt, Artificial Sequence
  Description of Artificial Sequence: Synthetic oligonucleotide
  Sense strand starting at position 2631 of SEQ ID NO: 585720
uuugcauuaguguugcauu

SEQ ID NO: 662245 - RNA, 19 nt, Artificial Sequence
  Description of Artificial Sequence: Synthetic oligonucleotide
  Antisense strand to SEQ ID NO: 662244
aaugcaacacuaaugcaaa

SEQ ID NO: 662246 - RNA, 19 nt, Artificial Sequence
  Description of Artificial Sequence: Synthetic oligonucleotide
  Sense strand starting at position 2669 of SEQ ID NO: 585720
uugauucaggauuggaagu

SEQ ID NO: 662247 - RNA, 19 nt, Artificial Sequence
  Description of Artificial Sequence: Synthetic oligonucleotide
  Antisense strand to SEQ ID NO: 662246
acuuccaauccugaaucaa

SEQ ID NO: 662248 - RNA, 19 nt, Artificial Sequence
  Description of Artificial Sequence: Synthetic oligonucleotide
  Sense strand starting at position 2693 of SEQ ID NO: 585720
guguccuuauagguauaga

SEQ ID NO: 662249 - RNA, 19 nt, Artificial Sequence
  Description of Artificial Sequence: Synthetic oligonucleotide
  Antisense strand to SEQ ID NO: 662248
ucuauaccuauaaggacac

SEQ ID NO: 662250 - RNA, 19 nt, Artificial Sequence
  Description of Artificial Sequence: Synthetic oligonucleotide
  Sense strand starting at position 2704 of SEQ ID NO: 585720
gguauagaaauguauaugu

SEQ ID NO: 662251 - RNA, 19 nt, Artificial Sequence
  Description of Artificial Sequence: Synthetic oligonucleotide
  Antisense strand to SEQ ID NO: 662250
acauauacauuucuauacc

SEQ ID NO: 662252 - RNA, 19 nt, Artificial Sequence
  Description of Artificial Sequence: Synthetic oligonucleotide
  Sense strand starting at position 2853 of SEQ ID NO: 585720
uguagaaauauugaagugu

SEQ ID NO: 662253 - RNA, 19 nt, Artificial Sequence
  Description of Artificial Sequence: Synthetic oligonucleotide
  Antisense strand to SEQ ID NO: 662252
acacuucaauauuucuaca

SEQ ID NO: 662254 - RNA, 19 nt, Artificial Sequence
  Description of Artificial Sequence: Synthetic oligonucleotide
  Sense strand starting at position 2868 of SEQ ID NO: 585720
guguauauccuuuaacuuu

SEQ ID NO: 662255 - RNA, 19 nt, Artificial Sequence
  Description of Artificial Sequence: Synthetic oligonucleotide
  Antisense strand to SEQ ID NO: 662254
aaaguuaaaggauauacac

SEQ ID NO: 662256 - RNA, 19 nt, Artificial Sequence
  Description of Artificial Sequence: Synthetic oligonucleotide
  Sense strand starting at position 2975 of SEQ ID NO: 585720
uuugauauguacucgaaga

SEQ ID NO: 662257 - RNA, 19 nt, Artificial Sequence
  Description of Artificial Sequence: Synthetic oligonucleotide
  Antisense strand to SEQ ID NO: 662256
ucuucgaguacauaucaaa

SEQ ID NO: 662258 - RNA, 19 nt, Artificial Sequence
  Description of Artificial Sequence: Synthetic oligonucleotide
  Sense strand starting at position 2976 of SEQ ID NO: 585720
uugauauguacucgaagau

SEQ ID NO: 662259 - RNA, 19 nt, Artificial Sequence
  Description of Artificial Sequence: Synthetic oligonucleotide
  Antisense strand to SEQ ID NO: 662258
aucuucgaguacauaucaa

SEQ ID NO: 662260 - RNA, 19 nt, Artificial Sequence
  Description of Artificial Sequence: Synthetic oligonucleotide
  Sense strand starting at position 2977 of SEQ ID NO: 585720
ugauauguacucgaagauu

SEQ ID NO: 662261 - RNA, 19 nt, Artificial Sequence
  Description of Artificial Sequence: Synthetic oligonucleotide
  Antisense strand to SEQ ID NO: 662260
aaucuucgaguacauauca

SEQ ID NO: 662262 - RNA, 19 nt, Artificial Sequence
  Description of Artificial Sequence: Synthetic oligonucleotide
  Sense strand starting at position 2990 of SEQ ID NO: 585720
aagauuccagcuugaagag

SEQ ID NO: 662263 - RNA, 19 nt, Artificial Sequence
  Description of Artificial Sequence: Synthetic oligonucleotide
  Antisense strand to SEQ ID NO: 662262
cucuucaagcuggaaucuu

SEQ ID NO: 662264 - RNA, 19 nt, Artificial Sequence
  Description of Artificial Sequence: Synthetic oligonucleotide
  Sense strand starting at position 3033 of SEQ ID NO: 585720
gugccagguguugcucuaa

SEQ ID NO: 662265 - RNA, 19 nt, Artificial Sequence
  Description of Artificial Sequence: Synthetic oligonucleotide
  Antisense strand to SEQ ID NO: 662264
uuagagcaacaccuggcac

SEQ ID NO: 662266 - RNA, 19 nt, Artificial Sequence
  Description of Artificial Sequence: Synthetic oligonucleotide
  Sense strand starting at position 3366 of SEQ ID NO: 585720
aucaucucuuguuuggauu

SEQ ID NO: 662267 - RNA, 19 nt, Artificial Sequence
  Description of Artificial Sequence: Synthetic oligonucleotide
  Antisense strand to SEQ ID NO: 662266
aauccaaacaagagaugau

SEQ ID NO: 662268 - RNA, 19 nt, Artificial Sequence
  Description of Artificial Sequence: Synthetic oligonucleotide
  Sense strand starting at position 3367 of SEQ ID NO: 585720
ucaucucuuguuuggauua

SEQ ID NO: 662269 - RNA, 19 nt, Artificial Sequence
  Description of Artificial Sequence: Synthetic oligonucleotide
  Antisense strand to SEQ ID NO: 662268
uaauccaaacaagagauga

SEQ ID NO: 662270 - RNA, 19 nt, Artificial Sequence
  Description of Artificial Sequence: Synthetic oligonucleotide
  Sense strand starting at position 3500 of SEQ ID NO: 585720
guggcuucccaacacaagu

SEQ ID NO: 662271 - RNA, 19 nt, Artificial Sequence
  Description of Artificial Sequence: Synthetic oligonucleotide
  Antisense strand to SEQ ID NO: 662270
acuuguguugggaagccac

SEQ ID NO: 662272 - RNA, 19 nt, Artificial Sequence
  Description of Artificial Sequence: Synthetic oligonucleotide
  Sense strand starting at position 3530 of SEQ ID NO: 585720
uccuaacgauggcuuuaaa

SEQ ID NO: 662273 - RNA, 19 nt, Artificial Sequence
  Description of Artificial Sequence: Synthetic oligonucleotide
  Antisense strand to SEQ ID NO: 662272
uuuaaagccaucguuagga

SEQ ID NO: 662274 - RNA, 19 nt, Artificial Sequence
  Description of Artificial Sequence: Synthetic oligonucleotide
  Sense strand starting at position 3592 of SEQ ID NO: 585720
agcuuuguauucccagaaa

SEQ ID NO: 662275 - RNA, 19 nt, Artificial Sequence
  Description of Artificial Sequence: Synthetic oligonucleotide
  Antisense strand to SEQ ID NO: 662274
uuucugggaauacaaagcu

SEQ ID NO: 662276 - RNA, 19 nt, Artificial Sequence
  Description of Artificial Sequence: Synthetic oligonucleotide
  Sense strand starting at position 3595 of SEQ ID NO: 585720
uuuguauucccagaaagcu

SEQ ID NO: 662277 - RNA, 19 nt, Artificial Sequence
  Description of Artificial Sequence: Synthetic oligonucleotide
  Antisense strand to SEQ ID NO: 662276
agcuuucugggaauacaaa

SEQ ID NO: 662278 - RNA, 19 nt, Artificial Sequence
  Description of Artificial Sequence: Synthetic oligonucleotide
  Sense strand starting at position 3604 of SEQ ID NO: 585720
ccagaaagcucuccacaag

SEQ ID NO: 662279 - RNA, 19 nt, Artificial Sequence
  Description of Artificial Sequence: Synthetic oligonucleotide
  Antisense strand to SEQ ID NO: 662278
cuuguggagagcuuucugg

SEQ ID NO: 662280 - RNA, 19 nt, Artificial Sequence
  Description of Artificial Sequence: Synthetic oligonucleotide
  Sense strand starting at position 3691 of SEQ ID NO: 585720
uccauaugugcucagaugu

SEQ ID NO: 662281 - RNA, 19 nt, Artificial Sequence
  Description of Artificial Sequence: Synthetic oligonucleotide
  Antisense strand to SEQ ID NO: 662280
acaucugagcacauaugga

SEQ ID NO: 662282 - RNA, 19 nt, Artificial Sequence
  Description of Artificial Sequence: Synthetic oligonucleotide
  Sense strand starting at position 3805 of SEQ ID NO: 585720
cuuaucacaguguaaugga

SEQ ID NO: 662283 - RNA, 19 nt, Artificial Sequence
  Description of Artificial Sequence: Synthetic oligonucleotide
  Antisense strand to SEQ ID NO: 662282
uccauuacacugugauaag

SEQ ID NO: 662284 - RNA, 19 nt, Artificial Sequence
  Description of Artificial Sequence: Synthetic oligonucleotide
  Sense strand starting at position 3926 of SEQ ID NO: 585720
ggaauagugccugacacac

SEQ ID NO: 662285 - RNA, 19 nt, Artificial Sequence
  Description of Artificial Sequence: Synthetic oligonucleotide
  Antisense strand to SEQ ID NO: 662284
gugugucaggcacuauucc

SEQ ID NO: 662286 - RNA, 19 nt, Artificial Sequence
  Description of Artificial Sequence: Synthetic oligonucleotide
  Sense strand starting at position 3946 of SEQ ID NO: 585720
uaaagagguucucuguaaa

SEQ ID NO: 662287 - RNA, 19 nt, Artificial Sequence
  Description of Artificial Sequence: Synthetic oligonucleotide
  Antisense strand to SEQ ID NO: 662286
uuuacagagaaccucuuua

SEQ ID NO: 662288 - RNA, 19 nt, Artificial Sequence
  Description of Artificial Sequence: Synthetic oligonucleotide
  Sense strand starting at position 3949 of SEQ ID NO: 585720
agagguucucuguaaauau

SEQ ID NO: 662289 - RNA, 19 nt, Artificial Sequence
  Description of Artificial Sequence: Synthetic oligonucleotide
  Antisense strand to SEQ ID NO: 662288
auauuuacagagaaccucu

SEQ ID NO: 662290 - RNA, 19 nt, Artificial Sequence
  Description of Artificial Sequence: Synthetic oligonucleotide
  Sense strand starting at position 3968 of SEQ ID NO: 585720
guguuacaugaaugaguaa

SEQ ID NO: 662291 - RNA, 19 nt, Artificial Sequence
  Description of Artificial Sequence: Synthetic oligonucleotide
  Antisense strand to SEQ ID NO: 662290
uuacucauucauguaacac

SEQ ID NO: 662292 - RNA, 19 nt, Artificial Sequence
  Description of Artificial Sequence: Synthetic oligonucleotide
  Sense strand starting at position 35 of SEQ ID NO: 585721
gaauaaagcuguucuguug

SEQ ID NO: 662293 - RNA, 19 nt, Artificial Sequence
  Description of Artificial Sequence: Synthetic oligonucleotide
  Antisense strand to SEQ ID NO: 662292
caacagaacagcuuuauuc

SEQ ID NO: 662294 - RNA, 19 nt, Artificial Sequence
  Description of Artificial Sequence: Synthetic oligonucleotide
  Sense strand starting at position 147 of SEQ ID NO: 585721
auauaaugugccuaggcuu

SEQ ID NO: 662295 - RNA, 19 nt, Artificial Sequence
  Description of Artificial Sequence: Synthetic oligonucleotide
  Antisense strand to SEQ ID NO: 662294
aagccuaggcacauuauau

SEQ ID NO: 662296 - RNA, 19 nt, Artificial Sequence
  Description of Artificial Sequence: Synthetic oligonucleotide
  Sense strand starting at position 270 of SEQ ID NO: 585721
accgucaugaaagaguauu

SEQ ID NO: 662297 - RNA, 19 nt, Artificial Sequence
  Description of Artificial Sequence: Synthetic oligonucleotide
  Antisense strand to SEQ ID NO: 662296
aauacucuuucaugacggu

SEQ ID NO: 662298 - RNA, 19 nt, Artificial Sequence
  Description of Artificial Sequence: Synthetic oligonucleotide
  Sense strand starting at position 280 of SEQ ID NO: 585721
aagaguauuuagcagagca

SEQ ID NO: 662299 - RNA, 19 nt, Artificial Sequence
  Description of Artificial Sequence: Synthetic oligonucleotide
  Antisense strand to SEQ ID NO: 662298
ugcucugcuaaauacucuu

SEQ ID NO: 662300 - RNA, 19 nt, Artificial Sequence
  Description of Artificial Sequence: Synthetic oligonucleotide
  Sense strand starting at position 290 of SEQ ID NO: 585721
agcagagcaucugugaauc

SEQ ID NO: 662301 - RNA, 19 nt, Artificial Sequence
  Description of Artificial Sequence: Synthetic oligonucleotide
  Antisense strand to SEQ ID NO: 662300
gauucacagaugcucugcu

SEQ ID NO: 662302 - RNA, 19 nt, Artificial Sequence
  Description of Artificial Sequence: Synthetic oligonucleotide
  Sense strand starting at position 302 of SEQ ID NO: 585721
gugaaucuuccacagguaa

SEQ ID NO: 662303 - RNA, 19 nt, Artificial Sequence
  Description of Artificial Sequence: Synthetic oligonucleotide
  Antisense strand to SEQ ID NO: 662302
uuaccuguggaagauucac

SEQ ID NO: 662304 - RNA, 19 nt, Artificial Sequence
  Description of Artificial Sequence: Synthetic oligonucleotide
  Sense strand starting at position 414 of SEQ ID NO: 585721
aguggcauuacuugaaguu

SEQ ID NO: 662305 - RNA, 19 nt, Artificial Sequence
  Description of Artificial Sequence: Synthetic oligonucleotide
  Antisense strand to SEQ ID NO: 662304
aacuucaaguaaugccacu

SEQ ID NO: 662306 - RNA, 19 nt, Artificial Sequence
  Description of Artificial Sequence: Synthetic oligonucleotide
  Sense strand starting at position 415 of SEQ ID NO: 585721
guggcauuacuugaaguug

SEQ ID NO: 662307 - RNA, 19 nt, Artificial Sequence
  Description of Artificial Sequence: Synthetic oligonucleotide
  Antisense strand to SEQ ID NO: 662306
caacuucaaguaaugccac

SEQ ID NO: 662308 - RNA, 19 nt, Artificial Sequence
  Description of Artificial Sequence: Synthetic oligonucleotide
  Sense strand starting at position 460 of SEQ ID NO: 585721
ccuaguaaucagcaggcua

SEQ ID NO: 662309 - RNA, 19 nt, Artificial Sequence
  Description of Artificial Sequence: Synthetic oligonucleotide
  Antisense strand to SEQ ID NO: 662308
uagccugcugauuacuagg

SEQ ID NO: 662310 - RNA, 19 nt, Artificial Sequence
  Description of Artificial Sequence: Synthetic oligonucleotide
  Sense strand starting at position 642 of SEQ ID NO: 585721
ucuugcauuccauauaguu

SEQ ID NO: 662311 - RNA, 19 nt, Artificial Sequence
  Description of Artificial Sequence: Synthetic oligonucleotide
  Antisense strand to SEQ ID NO: 662310
aacuauauggaaugcaaga

SEQ ID NO: 662312 - RNA, 19 nt, Artificial Sequence
  Description of Artificial Sequence: Synthetic oligonucleotide
  Sense strand starting at position 810 of SEQ ID NO: 585721
uucugaauugaucaacugu

SEQ ID NO: 662313 - RNA, 19 nt, Artificial Sequence
  Description of Artificial Sequence: Synthetic oligonucleotide
  Antisense strand to SEQ ID NO: 662312
acaguugaucaauucagaa

SEQ ID NO: 662314 - RNA, 19 nt, Artificial Sequence
  Description of Artificial Sequence: Synthetic oligonucleotide
  Sense strand starting at position 869 of SEQ ID NO: 585721
guaagaugaugucuaagua

SEQ ID NO: 662315 - RNA, 19 nt, Artificial Sequence
  Description of Artificial Sequence: Synthetic oligonucleotide
  Antisense strand to SEQ ID NO: 662314
uacuuagacaucaucuuac

SEQ ID NO: 662316 - RNA, 19 nt, Artificial Sequence
  Description of Artificial Sequence: Synthetic oligonucleotide
  Sense strand starting at position 873 of SEQ ID NO: 585721
gaugaugucuaaguaccaa

SEQ ID NO: 662317 - RNA, 19 nt, Artificial Sequence
  Description of Artificial Sequence: Synthetic oligonucleotide
  Antisense strand to SEQ ID NO: 662316
uugguacuuagacaucauc

SEQ ID NO: 662318 - RNA, 19 nt, Artificial Sequence
  Description of Artificial Sequence: Synthetic oligonucleotide
  Sense strand starting at position 923 of SEQ ID NO: 585721
cugugcuucgcgucugcaa

SEQ ID NO: 662319 - RNA, 19 nt, Artificial Sequence
  Description of Artificial Sequence: Synthetic oligonucleotide
  Antisense strand to SEQ ID NO: 662318
uugcagacgcgaagcacag

SEQ ID NO: 662320 - RNA, 19 nt, Artificial Sequence
  Description of Artificial Sequence: Synthetic oligonucleotide
  Sense strand starting at position 1097 of SEQ ID NO: 585721
uggauugccucccuacaca

SEQ ID NO: 662321 - RNA, 19 nt, Artificial Sequence
  Description of Artificial Sequence: Synthetic oligonucleotide
  Antisense strand to SEQ ID NO: 662320
uguguagggaggcaaucca

SEQ ID NO: 662322 - RNA, 19 nt, Artificial Sequence
  Description of Artificial Sequence: Synthetic oligonucleotide
  Sense strand starting at position 2048 of SEQ ID NO: 585721
cggguauucggagaggaca

SEQ ID NO: 662323 - RNA, 19 nt, Artificial Sequence
  Description of Artificial Sequence: Synthetic oligonucleotide
  Antisense strand to SEQ ID NO: 662322
uguccucuccgaauacccg

SEQ ID NO: 662324 - RNA, 19 nt, Artificial Sequence
  Description of Artificial Sequence: Synthetic oligonucleotide
  Sense strand starting at position 2184 of SEQ ID NO: 585721
gugguauucgcauccuagu

SEQ ID NO: 662325 - RNA, 19 nt, Artificial Sequence
  Description of Artificial Sequence: Synthetic oligonucleotide
  Antisense strand to SEQ ID NO: 662324
acuaggaugcgaauaccac

SEQ ID NO: 662326 - RNA, 19 nt, Artificial Sequence
  Description of Artificial Sequence: Synthetic oligonucleotide
  Sense strand starting at position 2528 of SEQ ID NO: 585721
cguguaucugucuuguuga

SEQ ID NO: 662327 - RNA, 19 nt, Artificial Sequence
  Description of Artificial Sequence: Synthetic oligonucleotide
  Antisense strand to SEQ ID NO: 662326
ucaacaagacagauacacg

SEQ ID NO: 662328 - RNA, 19 nt, Artificial Sequence
  Description of Artificial Sequence: Synthetic oligonucleotide
  Sense strand starting at position 2574 of SEQ ID NO: 585721
gggcuuuaucucugaugua

SEQ ID NO: 662329 - RNA, 19 nt, Artificial Sequence
  Description of Artificial Sequence: Synthetic oligonucleotide
  Antisense strand to SEQ ID NO: 662328
uacaucagagauaaagccc

SEQ ID NO: 662330 - RNA, 19 nt, Artificial Sequence
  Description of Artificial Sequence: Synthetic oligonucleotide
  Sense strand starting at position 2703 of SEQ ID NO: 585721
uaccaugagcccugaguga

SEQ ID NO: 662331 - RNA, 19 nt, Artificial Sequence
  Description of Artificial Sequence: Synthetic oligonucleotide
  Antisense strand to SEQ ID NO: 662330
ucacucagggcucauggua

SEQ ID NO: 662332 - RNA, 19 nt, Artificial Sequence
  Description of Artificial Sequence: Synthetic oligonucleotide
  Sense strand starting at position 2714 of SEQ ID NO: 585721
cugagugacucugugccaa

SEQ ID NO: 662333 - RNA, 19 nt, Artificial Sequence
  Description of Artificial Sequence: Synthetic oligonucleotide
  Antisense strand to SEQ ID NO: 662332
uuggcacagagucacucag

SEQ ID NO: 662334 - RNA, 19 nt, Artificial Sequence
  Description of Artificial Sequence: Synthetic oligonucleotide
  Sense strand starting at position 2801 of SEQ ID NO: 585721
ugaggaaauucuuagagag

SEQ ID NO: 662335 - RNA, 19 nt, Artificial Sequence
  Description of Artificial Sequence: Synthetic oligonucleotide
  Antisense strand to SEQ ID NO: 662334
cucucuaagaauuuccuca

SEQ ID NO: 662336 - RNA, 19 nt, Artificial Sequence
  Description of Artificial Sequence: Synthetic oligonucleotide
  Sense strand starting at position 2833 of SEQ ID NO: 585721
ccagcagacccuuggucau

SEQ ID NO: 662337 - RNA, 19 nt, Artificial Sequence
  Description of Artificial Sequence: Synthetic oligonucleotide
  Antisense strand to SEQ ID NO: 662336
augaccaagggucugcugg

SEQ ID NO: 662338 - RNA, 19 nt, Artificial Sequence
  Description of Artificial Sequence: Synthetic oligonucleotide
  Sense strand starting at position 2845 of SEQ ID NO: 585721
uggucaugcuuccucuaaa

SEQ ID NO: 662339 - RNA, 19 nt, Artificial Sequence
  Description of Artificial Sequence: Synthetic oligonucleotide
  Antisense strand to SEQ ID NO: 662338
uuuagaggaagcaugacca

SEQ ID NO: 662340 - RNA, 19 nt, Artificial Sequence
  Description of Artificial Sequence: Synthetic oligonucleotide
  Sense strand starting at position 2846 of SEQ ID NO: 585721
ggucaugcuuccucuaaag

SEQ ID NO: 662341 - RNA, 19 nt, Artificial Sequence
  Description of Artificial Sequence: Synthetic oligonucleotide
  Antisense strand to SEQ ID NO: 662340
cuuuagaggaagcaugacc

SEQ ID NO: 662342 - RNA, 19 nt, Artificial Sequence
  Description of Artificial Sequence: Synthetic oligonucleotide
  Sense strand starting at position 2848 of SEQ ID NO: 585721
ucaugcuuccucuaaagga

SEQ ID NO: 662343 - RNA, 19 nt, Artificial Sequence
  Description of Artificial Sequence: Synthetic oligonucleotide
  Antisense strand to SEQ ID NO: 662342
uccuuuagaggaagcauga

SEQ ID NO: 662344 - RNA, 19 nt, Artificial Sequence
  Description of Artificial Sequence: Synthetic oligonucleotide
  Sense strand starting at position 3063 of SEQ ID NO: 585721
uggguuuacuacuugagaa

SEQ ID NO: 662345 - RNA, 19 nt, Artificial Sequence
  Description of Artificial Sequence: Synthetic oligonucleotide
  Antisense strand to SEQ ID NO: 662344
uucucaaguaguaaaccca

SEQ ID NO: 662346 - RNA, 19 nt, Artificial Sequence
  Description of Artificial Sequence: Synthetic oligonucleotide
  Sense strand starting at position 3064 of SEQ ID NO: 585721
ggguuuacuacuugagaag

SEQ ID NO: 662347 - RNA, 19 nt, Artificial Sequence
  Description of Artificial Sequence: Synthetic oligonucleotide
  Antisense strand to SEQ ID NO: 662346
cuucucaaguaguaaaccc

SEQ ID NO: 662348 - RNA, 19 nt, Artificial Sequence
  Description of Artificial Sequence: Synthetic oligonucleotide
  Sense strand starting at position 3100 of SEQ ID NO: 585721
guuauugccauuugaaggu

SEQ ID NO: 662349 - RNA, 19 nt, Artificial Sequence
  Description of Artificial Sequence: Synthetic oligonucleotide
  Antisense strand to SEQ ID NO: 662348
accuucaaauggcaauaac

SEQ ID NO: 662350 - RNA, 19 nt, Artificial Sequence
  Description of Artificial Sequence: Synthetic oligonucleotide
  Sense strand starting at position 3173 of SEQ ID NO: 585721
acaguuuguuccucggaga

SEQ ID NO: 662351 - RNA, 19 nt, Artificial Sequence
  Description of Artificial Sequence: Synthetic oligonucleotide
  Antisense strand to SEQ ID NO: 662350
ucuccgaggaacaaacugu

SEQ ID NO: 662352 - RNA, 19 nt, Artificial Sequence
  Description of Artificial Sequence: Synthetic oligonucleotide
  Sense strand starting at position 3174 of SEQ ID NO: 585721
caguuuguuccucggagag

SEQ ID NO: 662353 - RNA, 19 nt, Artificial Sequence
  Description of Artificial Sequence: Synthetic oligonucleotide
  Antisense strand to SEQ ID NO: 662352
cucuccgaggaacaaacug

SEQ ID NO: 662354 - RNA, 19 nt, Artificial Sequence
  Description of Artificial Sequence: Synthetic oligonucleotide
  Sense strand starting at position 3212 of SEQ ID NO: 585721
ugggaauauucugaaugaa

SEQ ID NO: 662355 - RNA, 19 nt, Artificial Sequence
  Description of Artificial Sequence: Synthetic oligonucleotide
  Antisense strand to SEQ ID NO: 662354
uucauucagaauauuccca

SEQ ID NO: 662356 - RNA, 19 nt, Artificial Sequence
  Description of Artificial Sequence: Synthetic oligonucleotide
  Sense strand starting at position 3396 of SEQ ID NO: 585721
aaggauaugcauugcagaa

SEQ ID NO: 662357 - RNA, 19 nt, Artificial Sequence
  Description of Artificial Sequence: Synthetic oligonucleotide
  Antisense strand to SEQ ID NO: 662356
uucugcaaugcauauccuu

SEQ ID NO: 662358 - RNA, 19 nt, Artificial Sequence
  Description of Artificial Sequence: Synthetic oligonucleotide
  Sense strand starting at position 3468 of SEQ ID NO: 585721
gguuaaauaauguggcacu

SEQ ID NO: 662359 - RNA, 19 nt, Artificial Sequence
  Description of Artificial Sequence: Synthetic oligonucleotide
  Antisense strand to SEQ ID NO: 662358
agugccacauuauuuaacc

SEQ ID NO: 662360 - RNA, 19 nt, Artificial Sequence
  Description of Artificial Sequence: Synthetic oligonucleotide
  Sense strand starting at position 3587 of SEQ ID NO: 585721
augugugggugaucccauu

SEQ ID NO: 662361 - RNA, 19 nt, Artificial Sequence
  Description of Artificial Sequence: Synthetic oligonucleotide
  Antisense strand to SEQ ID NO: 662360
aaugggaucacccacacau

SEQ ID NO: 662362 - RNA, 19 nt, Artificial Sequence
  Description of Artificial Sequence: Synthetic oligonucleotide
  Sense strand starting at position 3619 of SEQ ID NO: 585721
cuggauauauaggaacaga

SEQ ID NO: 662363 - RNA, 19 nt, Artificial Sequence
  Description of Artificial Sequence: Synthetic oligonucleotide
  Antisense strand to SEQ ID NO: 662362
ucuguuccuauauauccag

SEQ ID NO: 662364 - RNA, 19 nt, Artificial Sequence
  Description of Artificial Sequence: Synthetic oligonucleotide
  Sense strand starting at position 3719 of SEQ ID NO: 585721
aagggacaguuaccucuua

SEQ ID NO: 662365 - RNA, 19 nt, Artificial Sequence
  Description of Artificial Sequence: Synthetic oligonucleotide
  Antisense strand to SEQ ID NO: 662364
uaagagguaacugucccuu

SEQ ID NO: 662366 - RNA, 19 nt, Artificial Sequence
  Description of Artificial Sequence: Synthetic oligonucleotide
  Sense strand starting at position 3741 of SEQ ID NO: 585721
uguacaauuuaguacacau

SEQ ID NO: 662367 - RNA, 19 nt, Artificial Sequence
  Description of Artificial Sequence: Synthetic oligonucleotide
  Antisense strand to SEQ ID NO: 662366
auguguacuaaauuguaca

SEQ ID NO: 662368 - RNA, 19 nt, Artificial Sequence
  Description of Artificial Sequence: Synthetic oligonucleotide
  Sense strand starting at position 3858 of SEQ ID NO: 585721
gcacauuacugccugauca

SEQ ID NO: 662369 - RNA, 19 nt, Artificial Sequence
  Description of Artificial Sequence: Synthetic oligonucleotide
  Antisense strand to SEQ ID NO: 662368
ugaucaggcaguaaugugc

SEQ ID NO: 662370 - RNA, 19 nt, Artificial Sequence
  Description of Artificial Sequence: Synthetic oligonucleotide
  Sense strand starting at position 3900 of SEQ ID NO: 585721
ggaccauugacuuggccau

SEQ ID NO: 662371 - RNA, 19 nt, Artificial Sequence
  Description of Artificial Sequence: Synthetic oligonucleotide
  Antisense strand to SEQ ID NO: 662370
auggccaagucaauggucc

SEQ ID NO: 662372 - RNA, 19 nt, Artificial Sequence
  Description of Artificial Sequence: Synthetic oligonucleotide
  Sense strand starting at position 70 of SEQ ID NO: 585722
ugcaauacaugauuguuga

SEQ ID NO: 662373 - RNA, 19 nt, Artificial Sequence
  Description of Artificial Sequence: Synthetic oligonucleotide
  Antisense strand to SEQ ID NO: 662372
ucaacaaucauguauugca

SEQ ID NO: 662374 - RNA, 19 nt, Artificial Sequence
  Description of Artificial Sequence: Synthetic oligonucleotide
  Sense strand starting at position 71 of SEQ ID NO: 585722
gcaauacaugauuguugau

SEQ ID NO: 662375 - RNA, 19 nt, Artificial Sequence
  Description of Artificial Sequence: Synthetic oligonucleotide
  Antisense strand to SEQ ID NO: 662374
aucaacaaucauguauugc

SEQ ID NO: 662376 - RNA, 19 nt, Artificial Sequence
  Description of Artificial Sequence: Synthetic oligonucleotide
  Sense strand starting at position 263 of SEQ ID NO: 585722
auaaauguuuaggcuagaa

SEQ ID NO: 662377 - RNA, 19 nt, Artificial Sequence
  Description of Artificial Sequence: Synthetic oligonucleotide
  Antisense strand to SEQ ID NO: 662376
uucuagccuaaacauuuau

SEQ ID NO: 662378 - RNA, 19 nt, Artificial Sequence
  Description of Artificial Sequence: Synthetic oligonucleotide
  Sense strand starting at position 265 of SEQ ID NO: 585722
aaauguuuaggcuagaacu

SEQ ID NO: 662379 - RNA, 19 nt, Artificial Sequence
  Description of Artificial Sequence: Synthetic oligonucleotide
  Antisense strand to SEQ ID NO: 662378
aguucuagccuaaacauuu

SEQ ID NO: 662380 - RNA, 19 nt, Artificial Sequence
  Description of Artificial Sequence: Synthetic oligonucleotide
  Sense strand starting at position 267 of SEQ ID NO: 585722
auguuuaggcuagaacuca

SEQ ID NO: 662381 - RNA, 19 nt, Artificial Sequence
  Description of Artificial Sequence: Synthetic oligonucleotide
  Antisense strand to SEQ ID NO: 662380
ugaguucuagccuaaacau

SEQ ID NO: 662382 - RNA, 19 nt, Artificial Sequence
  Description of Artificial Sequence: Synthetic oligonucleotide
  Sense strand starting at position 315 of SEQ ID NO: 585722
ggaccaaguccuugaacuu

SEQ ID NO: 662383 - RNA, 19 nt, Artificial Sequence
  Description of Artificial Sequence: Synthetic oligonucleotide
  Antisense strand to SEQ ID NO: 662382
aaguucaaggacuuggucc

SEQ ID NO: 662384 - RNA, 19 nt, Artificial Sequence
  Description of Artificial Sequence: Synthetic oligonucleotide
  Sense strand starting at position 322 of SEQ ID NO: 585722
guccuugaacuugaauacu

SEQ ID NO: 662385 - RNA, 19 nt, Artificial Sequence
  Description of Artificial Sequence: Synthetic oligonucleotide
  Antisense strand to SEQ ID NO: 662384
aguauucaaguucaaggac

SEQ ID NO: 662386 - RNA, 19 nt, Artificial Sequence
  Description of Artificial Sequence: Synthetic oligonucleotide
  Sense strand starting at position 361 of SEQ ID NO: 585722
gaauaaagcuguucuguug

SEQ ID NO: 662387 - RNA, 19 nt, Artificial Sequence
  Description of Artificial Sequence: Synthetic oligonucleotide
  Antisense strand to SEQ ID NO: 662386
caacagaacagcuuuauuc

SEQ ID NO: 662388 - RNA, 19 nt, Artificial Sequence
  Description of Artificial Sequence: Synthetic oligonucleotide
  Sense strand starting at position 473 of SEQ ID NO: 585722
auauaaugugccuaggcuu

SEQ ID NO: 662389 - RNA, 19 nt, Artificial Sequence
  Description of Artificial Sequence: Synthetic oligonucleotide
  Antisense strand to SEQ ID NO: 662388
aagccuaggcacauuauau

SEQ ID NO: 662390 - RNA, 19 nt, Artificial Sequence
  Description of Artificial Sequence: Synthetic oligonucleotide
  Sense strand starting at position 596 of SEQ ID NO: 585722
accgucaugaaagaguauu

SEQ ID NO: 662391 - RNA, 19 nt, Artificial Sequence
  Description of Artificial Sequence: Synthetic oligonucleotide
  Antisense strand to SEQ ID NO: 662390
aauacucuuucaugacggu

SEQ ID NO: 662392 - RNA, 19 nt, Artificial Sequence
  Description of Artificial Sequence: Synthetic oligonucleotide
  Sense strand starting at position 606 of SEQ ID NO: 585722
aagaguauuuagcagagca

SEQ ID NO: 662393 - RNA, 19 nt, Artificial Sequence
  Description of Artificial Sequence: Synthetic oligonucleotide
  Antisense strand to SEQ ID NO: 662392
ugcucugcuaaauacucuu

SEQ ID NO: 662394 - RNA, 19 nt, Artificial Sequence
  Description of Artificial Sequence: Synthetic oligonucleotide
  Sense strand starting at position 616 of SEQ ID NO: 585722
agcagagcaucugugaauc

SEQ ID NO: 662395 - RNA, 19 nt, Artificial Sequence
  Description of Artificial Sequence: Synthetic oligonucleotide
  Antisense strand to SEQ ID NO: 662394
gauucacagaugcucugcu

SEQ ID NO: 662396 - RNA, 19 nt, Artificial Sequence
  Description of Artificial Sequence: Synthetic oligonucleotide
  Sense strand starting at position 628 of SEQ ID NO: 585722
gugaaucuuccacagguaa

SEQ ID NO: 662397 - RNA, 19 nt, Artificial Sequence
  Description of Artificial Sequence: Synthetic oligonucleotide
  Antisense strand to SEQ ID NO: 662396
uuaccuguggaagauucac

SEQ ID NO: 662398 - RNA, 19 nt, Artificial Sequence
  Description of Artificial Sequence: Synthetic oligonucleotide
  Sense strand starting at position 740 of SEQ ID NO: 585722
aguggcauuacuugaaguu

SEQ ID NO: 662399 - RNA, 19 nt, Artificial Sequence
  Description of Artificial Sequence: Synthetic oligonucleotide
  Antisense strand to SEQ ID NO: 662398
aacuucaaguaaugccacu

SEQ ID NO: 662400 - RNA, 19 nt, Artificial Sequence
  Description of Artificial Sequence: Synthetic oligonucleotide
  Sense strand starting at position 741 of SEQ ID NO: 585722
guggcauuacuugaaguug

SEQ ID NO: 662401 - RNA, 19 nt, Artificial Sequence
  Description of Artificial Sequence: Synthetic oligonucleotide
  Antisense strand to SEQ ID NO: 662400
caacuucaaguaaugccac

SEQ ID NO: 662402 - RNA, 19 nt, Artificial Sequence
  Description of Artificial Sequence: Synthetic oligonucleotide
  Sense strand starting at position 786 of SEQ ID NO: 585722
ccuaguaaucagcaggcua

SEQ ID NO: 662403 - RNA, 19 nt, Artificial Sequence
  Description of Artificial Sequence: Synthetic oligonucleotide
  Antisense strand to SEQ ID NO: 662402
uagccugcugauuacuagg

SEQ ID NO: 662404 - RNA, 19 nt, Artificial Sequence
  Description of Artificial Sequence: Synthetic oligonucleotide
  Sense strand starting at position 968 of SEQ ID NO: 585722
ucuugcauuccauauaguu

SEQ ID NO: 662405 - RNA, 19 nt, Artificial Sequence
  Description of Artificial Sequence: Synthetic oligonucleotide
  Antisense strand to SEQ ID NO: 662404
aacuauauggaaugcaaga

SEQ ID NO: 662406 - RNA, 19 nt, Artificial Sequence
  Description of Artificial Sequence: Synthetic oligonucleotide
  Sense strand starting at position 1136 of SEQ ID NO: 585722
uucugaauugaucaacugu

SEQ ID NO: 662407 - RNA, 19 nt, Artificial Sequence
  Description of Artificial Sequence: Synthetic oligonucleotide
  Antisense strand to SEQ ID NO: 662406
acaguugaucaauucagaa

SEQ ID NO: 662408 - RNA, 19 nt, Artificial Sequence
  Description of Artificial Sequence: Synthetic oligonucleotide
  Sense strand starting at position 1195 of SEQ ID NO: 585722
guaagaugaugucuaagua

SEQ ID NO: 662409 - RNA, 19 nt, Artificial Sequence
  Description of Artificial Sequence: Synthetic oligonucleotide
  Antisense strand to SEQ ID NO: 662408
uacuuagacaucaucuuac

SEQ ID NO: 662410 - RNA, 19 nt, Artificial Sequence
  Description of Artificial Sequence: Synthetic oligonucleotide
  Sense strand starting at position 1199 of SEQ ID NO: 585722
gaugaugucuaaguaccaa

SEQ ID NO: 662411 - RNA, 19 nt, Artificial Sequence
  Description of Artificial Sequence: Synthetic oligonucleotide
  Antisense strand to SEQ ID NO: 662410
uugguacuuagacaucauc

SEQ ID NO: 662412 - RNA, 19 nt, Artificial Sequence
  Description of Artificial Sequence: Synthetic oligonucleotide
  Sense strand starting at position 1423 of SEQ ID NO: 585722
uggauugccucccuacaca

SEQ ID NO: 662413 - RNA, 19 nt, Artificial Sequence
  Description of Artificial Sequence: Synthetic oligonucleotide
  Antisense strand to SEQ ID NO: 662412
uguguagggaggcaaucca

SEQ ID NO: 662414 - RNA, 19 nt, Artificial Sequence
  Description of Artificial Sequence: Synthetic oligonucleotide
  Sense strand starting at position 2374 of SEQ ID NO: 585722
cggguauucggagaggaca

SEQ ID NO: 662415 - RNA, 19 nt, Artificial Sequence
  Description of Artificial Sequence: Synthetic oligonucleotide
  Antisense strand to SEQ ID NO: 662414
uguccucuccgaauacccg

SEQ ID NO: 662416 - RNA, 19 nt, Artificial Sequence
  Description of Artificial Sequence: Synthetic oligonucleotide
  Sense strand starting at position 2510 of SEQ ID NO: 585722
gugguauucgcauccuagu

SEQ ID NO: 662417 - RNA, 19 nt, Artificial Sequence
  Description of Artificial Sequence: Synthetic oligonucleotide
  Antisense strand to SEQ ID NO: 662416
acuaggaugcgaauaccac

SEQ ID NO: 662418 - RNA, 19 nt, Artificial Sequence
  Description of Artificial Sequence: Synthetic oligonucleotide
  Sense strand starting at position 2854 of SEQ ID NO: 585722
cguguaucugucuuguuga

SEQ ID NO: 662419 - RNA, 19 nt, Artificial Sequence
  Description of Artificial Sequence: Synthetic oligonucleotide
  Antisense strand to SEQ ID NO: 662418
ucaacaagacagauacacg

SEQ ID NO: 662420 - RNA, 19 nt, Artificial Sequence
  Description of Artificial Sequence: Synthetic oligonucleotide
  Sense strand starting at position 2900 of SEQ ID NO: 585722
gggcuuuaucucugaugua

SEQ ID NO: 662421 - RNA, 19 nt, Artificial Sequence
  Description of Artificial Sequence: Synthetic oligonucleotide
  Antisense strand to SEQ ID NO: 662420
uacaucagagauaaagccc

SEQ ID NO: 662422 - RNA, 19 nt, Artificial Sequence
  Description of Artificial Sequence: Synthetic oligonucleotide
  Sense strand starting at position 3029 of SEQ ID NO: 585722
uaccaugagcccugaguga

SEQ ID NO: 662423 - RNA, 19 nt, Artificial Sequence
  Description of Artificial Sequence: Synthetic oligonucleotide
  Antisense strand to SEQ ID NO: 662422
ucacucagggcucauggua

SEQ ID NO: 662424 - RNA, 19 nt, Artificial Sequence
  Description of Artificial Sequence: Synthetic oligonucleotide
  Sense strand starting at position 3127 of SEQ ID NO: 585722
ugaggaaauucuuagagag

SEQ ID NO: 662425 - RNA, 19 nt, Artificial Sequence
  Description of Artificial Sequence: Synthetic oligonucleotide
  Antisense strand to SEQ ID NO: 662424
cucucuaagaauuuccuca

SEQ ID NO: 662426 - RNA, 19 nt, Artificial Sequence
  Description of Artificial Sequence: Synthetic oligonucleotide
  Sense strand starting at position 3159 of SEQ ID NO: 585722
ccagcagacccuuggucau

SEQ ID NO: 662427 - RNA, 19 nt, Artificial Sequence
  Description of Artificial Sequence: Synthetic oligonucleotide
  Antisense strand to SEQ ID NO: 662426
augaccaagggucugcugg

SEQ ID NO: 662428 - RNA, 19 nt, Artificial Sequence
  Description of Artificial Sequence: Synthetic oligonucleotide
  Sense strand starting at position 3171 of SEQ ID NO: 585722
uggucaugcuuccucuaaa

SEQ ID NO: 662429 - RNA, 19 nt, Artificial Sequence
  Description of Artificial Sequence: Synthetic oligonucleotide
  Antisense strand to SEQ ID NO: 662428
uuuagaggaagcaugacca

SEQ ID NO: 662430 - RNA, 19 nt, Artificial Sequence
  Description of Artificial Sequence: Synthetic oligonucleotide
  Sense strand starting at position 3172 of SEQ ID NO: 585722
ggucaugcuuccucuaaag

SEQ ID NO: 662431 - RNA, 19 nt, Artificial Sequence
  Description of Artificial Sequence: Synthetic oligonucleotide
  Antisense strand to SEQ ID NO: 662430
cuuuagaggaagcaugacc

SEQ ID NO: 662432 - RNA, 19 nt, Artificial Sequence
  Description of Artificial Sequence: Synthetic oligonucleotide
  Sense strand starting at position 3174 of SEQ ID NO: 585722
ucaugcuuccucuaaagga

SEQ ID NO: 662433 - RNA, 19 nt, Artificial Sequence
  Description of Artificial Sequence: Synthetic oligonucleotide
  Antisense strand to SEQ ID NO: 662432
uccuuuagaggaagcauga

SEQ ID NO: 662434 - RNA, 19 nt, Artificial Sequence
  Description of Artificial Sequence: Synthetic oligonucleotide
  Sense strand starting at position 3389 of SEQ ID NO: 585722
uggguuuacuacuugagaa

SEQ ID NO: 662435 - RNA, 19 nt, Artificial Sequence
  Description of Artificial Sequence: Synthetic oligonucleotide
  Antisense strand to SEQ ID NO: 662434
uucucaaguaguaaaccca

SEQ ID NO: 662436 - RNA, 19 nt, Artificial Sequence
  Description of Artificial Sequence: Synthetic oligonucleotide
  Sense strand starting at position 3390 of SEQ ID NO: 585722
ggguuuacuacuugagaag

SEQ ID NO: 662437 - RNA, 19 nt, Artificial Sequence
  Description of Artificial Sequence: Synthetic oligonucleotide
  Antisense strand to SEQ ID NO: 662436
cuucucaaguaguaaaccc

SEQ ID NO: 662438 - RNA, 19 nt, Artificial Sequence
  Description of Artificial Sequence: Synthetic oligonucleotide
  Sense strand starting at position 3426 of SEQ ID NO: 585722
guuauugccauuugaaggu

SEQ ID NO: 662439 - RNA, 19 nt, Artificial Sequence
  Description of Artificial Sequence: Synthetic oligonucleotide
  Antisense strand to SEQ ID NO: 662438
accuucaaauggcaauaac

SEQ ID NO: 662440 - RNA, 19 nt, Artificial Sequence
  Description of Artificial Sequence: Synthetic oligonucleotide
  Sense strand starting at position 3499 of SEQ ID NO: 585722
acaguuuguuccucggaga

SEQ ID NO: 662441 - RNA, 19 nt, Artificial Sequence
  Description of Artificial Sequence: Synthetic oligonucleotide
  Antisense strand to SEQ ID NO: 662440
ucuccgaggaacaaacugu

SEQ ID NO: 662442 - RNA, 19 nt, Artificial Sequence
  Description of Artificial Sequence: Synthetic oligonucleotide
  Sense strand starting at position 3538 of SEQ ID NO: 585722
ugggaauauucugaaugaa

SEQ ID NO: 662443 - RNA, 19 nt, Artificial Sequence
  Description of Artificial Sequence: Synthetic oligonucleotide
  Antisense strand to SEQ ID NO: 662442
uucauucagaauauuccca

SEQ ID NO: 662444 - RNA, 19 nt, Artificial Sequence
  Description of Artificial Sequence: Synthetic oligonucleotide
  Sense strand starting at position 3722 of SEQ ID NO: 585722
aaggauaugcauugcagaa

SEQ ID NO: 662445 - RNA, 19 nt, Artificial Sequence
  Description of Artificial Sequence: Synthetic oligonucleotide
  Antisense strand to SEQ ID NO: 662444
uucugcaaugcauauccuu

SEQ ID NO: 662446 - RNA, 19 nt, Artificial Sequence
  Description of Artificial Sequence: Synthetic oligonucleotide
  Sense strand starting at position 3794 of SEQ ID NO: 585722
gguuaaauaauguggcacu

SEQ ID NO: 662447 - RNA, 19 nt, Artificial Sequence
  Description of Artificial Sequence: Synthetic oligonucleotide
  Antisense strand to SEQ ID NO: 662446
agugccacauuauuuaacc

SEQ ID NO: 662448 - RNA, 19 nt, Artificial Sequence
  Description of Artificial Sequence: Synthetic oligonucleotide
  Sense strand starting at position 3913 of SEQ ID NO: 585722
augugugggugaucccauu

SEQ ID NO: 662449 - RNA, 19 nt, Artificial Sequence
  Description of Artificial Sequence: Synthetic oligonucleotide
  Antisense strand to SEQ ID NO: 662448
aaugggaucacccacacau

SEQ ID NO: 662450 - RNA, 19 nt, Artificial Sequence
  Description of Artificial Sequence: Synthetic oligonucleotide
  Sense strand starting at position 3945 of SEQ ID NO: 585722
cuggauauauaggaacaga

SEQ ID NO: 662451 - RNA, 19 nt, Artificial Sequence
  Description of Artificial Sequence: Synthetic oligonucleotide
  Antisense strand to SEQ ID NO: 662450
ucuguuccuauauauccag

SEQ ID NO: 662452 - RNA, 19 nt, Artificial Sequence
  Description of Artificial Sequence: Synthetic oligonucleotide
  Sense strand starting at position 3 of SEQ ID NO: 585723
cuugaaguugcuggcaaau

SEQ ID NO: 662453 - RNA, 19 nt, Artificial Sequence
  Description of Artificial Sequence: Synthetic oligonucleotide
  Antisense strand to SEQ ID NO: 662452
auuugccagcaacuucaag

SEQ ID NO: 662454 - RNA, 19 nt, Artificial Sequence
  Description of Artificial Sequence: Synthetic oligonucleotide
  Sense strand starting at position 39 of SEQ ID NO: 585723
ccuaguaaucagcaggcua

SEQ ID NO: 662455 - RNA, 19 nt, Artificial Sequence
  Description of Artificial Sequence: Synthetic oligonucleotide
  Antisense strand to SEQ ID NO: 662454
uagccugcugauuacuagg

SEQ ID NO: 662456 - RNA, 19 nt, Artificial Sequence
  Description of Artificial Sequence: Synthetic oligonucleotide
  Sense strand starting at position 125 of SEQ ID NO: 585723
guagcuguaauaugcagaa

SEQ ID NO: 662457 - RNA, 19 nt, Artificial Sequence
  Description of Artificial Sequence: Synthetic oligonucleotide
  Antisense strand to SEQ ID NO: 662456
uucugcauauuacagcuac

SEQ ID NO: 662458 - RNA, 19 nt, Artificial Sequence
  Description of Artificial Sequence: Synthetic oligonucleotide
  Sense strand starting at position 221 of SEQ ID NO: 585723
ucuugcauuccauauaguu

SEQ ID NO: 662459 - RNA, 19 nt, Artificial Sequence
  Description of Artificial Sequence: Synthetic oligonucleotide
  Antisense strand to SEQ ID NO: 662458
aacuauauggaaugcaaga

SEQ ID NO: 662460 - RNA, 19 nt, Artificial Sequence
  Description of Artificial Sequence: Synthetic oligonucleotide
  Sense strand starting at position 389 of SEQ ID NO: 585723
uucugaauugaucaacugu

SEQ ID NO: 662461 - RNA, 19 nt, Artificial Sequence
  Description of Artificial Sequence: Synthetic oligonucleotide
  Antisense strand to SEQ ID NO: 662460
acaguugaucaauucagaa

SEQ ID NO: 662462 - RNA, 19 nt, Artificial Sequence
  Description of Artificial Sequence: Synthetic oligonucleotide
  Sense strand starting at position 448 of SEQ ID NO: 585723
guaagaugaugucuaagua

SEQ ID NO: 662463 - RNA, 19 nt, Artificial Sequence
  Description of Artificial Sequence: Synthetic oligonucleotide
  Antisense strand to SEQ ID NO: 662462
uacuuagacaucaucuuac

SEQ ID NO: 662464 - RNA, 19 nt, Artificial Sequence
  Description of Artificial Sequence: Synthetic oligonucleotide
  Sense strand starting at position 452 of SEQ ID NO: 585723
gaugaugucuaaguaccaa

SEQ ID NO: 662465 - RNA, 19 nt, Artificial Sequence
  Description of Artificial Sequence: Synthetic oligonucleotide
  Antisense strand to SEQ ID NO: 662464
uugguacuuagacaucauc

SEQ ID NO: 662466 - RNA, 19 nt, Artificial Sequence
  Description of Artificial Sequence: Synthetic oligonucleotide
  Sense strand starting at position 502 of SEQ ID NO: 585723
cugugcuucgcgucugcaa

SEQ ID NO: 662467 - RNA, 19 nt, Artificial Sequence
  Description of Artificial Sequence: Synthetic oligonucleotide
  Antisense strand to SEQ ID NO: 662466
uugcagacgcgaagcacag

SEQ ID NO: 662468 - RNA, 19 nt, Artificial Sequence
  Description of Artificial Sequence: Synthetic oligonucleotide
  Sense strand starting at position 676 of SEQ ID NO: 585723
uggauugccucccuacaca

SEQ ID NO: 662469 - RNA, 19 nt, Artificial Sequence
  Description of Artificial Sequence: Synthetic oligonucleotide
  Antisense strand to SEQ ID NO: 662468
uguguagggaggcaaucca

SEQ ID NO: 662470 - RNA, 19 nt, Artificial Sequence
  Description of Artificial Sequence: Synthetic oligonucleotide
  Sense strand starting at position 1627 of SEQ ID NO: 585723
cggguauucggagaggaca

SEQ ID NO: 662471 - RNA, 19 nt, Artificial Sequence
  Description of Artificial Sequence: Synthetic oligonucleotide
  Antisense strand to SEQ ID NO: 662470
uguccucuccgaauacccg

SEQ ID NO: 662472 - RNA, 19 nt, Artificial Sequence
  Description of Artificial Sequence: Synthetic oligonucleotide
  Sense strand starting at position 1763 of SEQ ID NO: 585723
gugguauucgcauccuagu

SEQ ID NO: 662473 - RNA, 19 nt, Artificial Sequence
  Description of Artificial Sequence: Synthetic oligonucleotide
  Antisense strand to SEQ ID NO: 662472
acuaggaugcgaauaccac

SEQ ID NO: 662474 - RNA, 19 nt, Artificial Sequence
  Description of Artificial Sequence: Synthetic oligonucleotide
  Sense strand starting at position 2107 of SEQ ID NO: 585723
cguguaucugucuuguuga

SEQ ID NO: 662475 - RNA, 19 nt, Artificial Sequence
  Description of Artificial Sequence: Synthetic oligonucleotide
  Antisense strand to SEQ ID NO: 662474
ucaacaagacagauacacg

SEQ ID NO: 662476 - RNA, 19 nt, Artificial Sequence
  Description of Artificial Sequence: Synthetic oligonucleotide
  Sense strand starting at position 2153 of SEQ ID NO: 585723
gggcuuuaucucugaugua

SEQ ID NO: 662477 - RNA, 19 nt, Artificial Sequence
  Description of Artificial Sequence: Synthetic oligonucleotide
  Antisense strand to SEQ ID NO: 662476
uacaucagagauaaagccc

SEQ ID NO: 662478 - RNA, 19 nt, Artificial Sequence
  Description of Artificial Sequence: Synthetic oligonucleotide
  Sense strand starting at position 2282 of SEQ ID NO: 585723
uaccaugagcccugaguga

SEQ ID NO: 662479 - RNA, 19 nt, Artificial Sequence
  Description of Artificial Sequence: Synthetic oligonucleotide
  Antisense strand to SEQ ID NO: 662478
ucacucagggcucauggua

SEQ ID NO: 662480 - RNA, 19 nt, Artificial Sequence
  Description of Artificial Sequence: Synthetic oligonucleotide
  Sense strand starting at position 2293 of SEQ ID NO: 585723
cugagugacucugugccaa

SEQ ID NO: 662481 - RNA, 19 nt, Artificial Sequence
  Description of Artificial Sequence: Synthetic oligonucleotide
  Antisense strand to SEQ ID NO: 662480
uuggcacagagucacucag

SEQ ID NO: 662482 - RNA, 19 nt, Artificial Sequence
  Description of Artificial Sequence: Synthetic oligonucleotide
  Sense strand starting at position 2380 of SEQ ID NO: 585723
ugaggaaauucuuagagag

SEQ ID NO: 662483 - RNA, 19 nt, Artificial Sequence
  Description of Artificial Sequence: Synthetic oligonucleotide
  Antisense strand to SEQ ID NO: 662482
cucucuaagaauuuccuca

SEQ ID NO: 662484 - RNA, 19 nt, Artificial Sequence
  Description of Artificial Sequence: Synthetic oligonucleotide
  Sense strand starting at position 2412 of SEQ ID NO: 585723
ccagcagacccuuggucau

SEQ ID NO: 662485 - RNA, 19 nt, Artificial Sequence
  Description of Artificial Sequence: Synthetic oligonucleotide
  Antisense strand to SEQ ID NO: 662484
augaccaagggucugcugg

SEQ ID NO: 662486 - RNA, 19 nt, Artificial Sequence
  Description of Artificial Sequence: Synthetic oligonucleotide
  Sense strand starting at position 2424 of SEQ ID NO: 585723
uggucaugcuuccucuaaa

SEQ ID NO: 662487 - RNA, 19 nt, Artificial Sequence
  Description of Artificial Sequence: Synthetic oligonucleotide
  Antisense strand to SEQ ID NO: 662486
uuuagaggaagcaugacca

SEQ ID NO: 662488 - RNA, 19 nt, Artificial Sequence
  Description of Artificial Sequence: Synthetic oligonucleotide
  Sense strand starting at position 2425 of SEQ ID NO: 585723
ggucaugcuuccucuaaag

SEQ ID NO: 662489 - RNA, 19 nt, Artificial Sequence
  Description of Artificial Sequence: Synthetic oligonucleotide
  Antisense strand to SEQ ID NO: 662488
cuuuagaggaagcaugacc

SEQ ID NO: 662490 - RNA, 19 nt, Artificial Sequence
  Description of Artificial Sequence: Synthetic oligonucleotide
  Sense strand starting at position 2427 of SEQ ID NO: 585723
ucaugcuuccucuaaagga

SEQ ID NO: 662491 - RNA, 19 nt, Artificial Sequence
  Description of Artificial Sequence: Synthetic oligonucleotide
  Antisense strand to SEQ ID NO: 662490
uccuuuagaggaagcauga

SEQ ID NO: 662492 - RNA, 19 nt, Artificial Sequence
  Description of Artificial Sequence: Synthetic oligonucleotide
  Sense strand starting at position 2642 of SEQ ID NO: 585723
uggguuuacuacuugagaa

SEQ ID NO: 662493 - RNA, 19 nt, Artificial Sequence
  Description of Artificial Sequence: Synthetic oligonucleotide
  Antisense strand to SEQ ID NO: 662492
uucucaaguaguaaaccca

SEQ ID NO: 662494 - RNA, 19 nt, Artificial Sequence
  Description of Artificial Sequence: Synthetic oligonucleotide
  Sense strand starting at position 2643 of SEQ ID NO: 585723
ggguuuacuacuugagaag

SEQ ID NO: 662495 - RNA, 19 nt, Artificial Sequence
  Description of Artificial Sequence: Synthetic oligonucleotide
  Antisense strand to SEQ ID NO: 662494
cuucucaaguaguaaaccc

SEQ ID NO: 662496 - RNA, 19 nt, Artificial Sequence
  Description of Artificial Sequence: Synthetic oligonucleotide
  Sense strand starting at position 2679 of SEQ ID NO: 585723
guuauugccauuugaaggu

SEQ ID NO: 662497 - RNA, 19 nt, Artificial Sequence
  Description of Artificial Sequence: Synthetic oligonucleotide
  Antisense strand to SEQ ID NO: 662496
accuucaaauggcaauaac

SEQ ID NO: 662498 - RNA, 19 nt, Artificial Sequence
  Description of Artificial Sequence: Synthetic oligonucleotide
  Sense strand starting at position 2752 of SEQ ID NO: 585723
acaguuuguuccucggaga

SEQ ID NO: 662499 - RNA, 19 nt, Artificial Sequence
  Description of Artificial Sequence: Synthetic oligonucleotide
  Antisense strand to SEQ ID NO: 662498
ucuccgaggaacaaacugu

SEQ ID NO: 662500 - RNA, 19 nt, Artificial Sequence
  Description of Artificial Sequence: Synthetic oligonucleotide
  Sense strand starting at position 2753 of SEQ ID NO: 585723
caguuuguuccucggagag

SEQ ID NO: 662501 - RNA, 19 nt, Artificial Sequence
  Description of Artificial Sequence: Synthetic oligonucleotide
  Antisense strand to SEQ ID NO: 662500
cucuccgaggaacaaacug

SEQ ID NO: 662502 - RNA, 19 nt, Artificial Sequence
  Description of Artificial Sequence: Synthetic oligonucleotide
  Sense strand starting at position 2773 of SEQ ID NO: 585723
cuggccacuuucuuguaau

SEQ ID NO: 662503 - RNA, 19 nt, Artificial Sequence
  Description of Artificial Sequence: Synthetic oligonucleotide
  Antisense strand to SEQ ID NO: 662502
auuacaagaaaguggccag

SEQ ID NO: 662504 - RNA, 19 nt, Artificial Sequence
  Description of Artificial Sequence: Synthetic oligonucleotide
  Sense strand starting at position 2791 of SEQ ID NO: 585723
ugggaauauucugaaugaa

SEQ ID NO: 662505 - RNA, 19 nt, Artificial Sequence
  Description of Artificial Sequence: Synthetic oligonucleotide
  Antisense strand to SEQ ID NO: 662504
uucauucagaauauuccca

SEQ ID NO: 662506 - RNA, 19 nt, Artificial Sequence
  Description of Artificial Sequence: Synthetic oligonucleotide
  Sense strand starting at position 2975 of SEQ ID NO: 585723
aaggauaugcauugcagaa

SEQ ID NO: 662507 - RNA, 19 nt, Artificial Sequence
  Description of Artificial Sequence: Synthetic oligonucleotide
  Antisense strand to SEQ ID NO: 662506
uucugcaaugcauauccuu

SEQ ID NO: 662508 - RNA, 19 nt, Artificial Sequence
  Description of Artificial Sequence: Synthetic oligonucleotide
  Sense strand starting at position 3047 of SEQ ID NO: 585723
gguuaaauaauguggcacu

SEQ ID NO: 662509 - RNA, 19 nt, Artificial Sequence
  Description of Artificial Sequence: Synthetic oligonucleotide
  Antisense strand to SEQ ID NO: 662508
agugccacauuauuuaacc

SEQ ID NO: 662510 - RNA, 19 nt, Artificial Sequence
  Description of Artificial Sequence: Synthetic oligonucleotide
  Sense strand starting at position 3166 of SEQ ID NO: 585723
augugugggugaucccauu

SEQ ID NO: 662511 - RNA, 19 nt, Artificial Sequence
  Description of Artificial Sequence: Synthetic oligonucleotide
  Antisense strand to SEQ ID NO: 662510
aaugggaucacccacacau

SEQ ID NO: 662512 - RNA, 19 nt, Artificial Sequence
  Description of Artificial Sequence: Synthetic oligonucleotide
  Sense strand starting at position 3198 of SEQ ID NO: 585723
cuggauauauaggaacaga

SEQ ID NO: 662513 - RNA, 19 nt, Artificial Sequence
  Description of Artificial Sequence: Synthetic oligonucleotide
  Antisense strand to SEQ ID NO: 662512
ucuguuccuauauauccag

SEQ ID NO: 662514 - RNA, 19 nt, Artificial Sequence
  Description of Artificial Sequence: Synthetic oligonucleotide
  Sense strand starting at position 3298 of SEQ ID NO: 585723
aagggacaguuaccucuua

SEQ ID NO: 662515 - RNA, 19 nt, Artificial Sequence
  Description of Artificial Sequence: Synthetic oligonucleotide
  Antisense strand to SEQ ID NO: 662514
uaagagguaacugucccuu

SEQ ID NO: 662516 - RNA, 19 nt, Artificial Sequence
  Description of Artificial Sequence: Synthetic oligonucleotide
  Sense strand starting at position 3320 of SEQ ID NO: 585723
uguacaauuuaguacacau

SEQ ID NO: 662517 - RNA, 19 nt, Artificial Sequence
  Description of Artificial Sequence: Synthetic oligonucleotide
  Antisense strand to SEQ ID NO: 662516
auguguacuaaauuguaca

SEQ ID NO: 662518 - RNA, 19 nt, Artificial Sequence
  Description of Artificial Sequence: Synthetic oligonucleotide
  Sense strand starting at position 3437 of SEQ ID NO: 585723
gcacauuacugccugauca

SEQ ID NO: 662519 - RNA, 19 nt, Artificial Sequence
  Description of Artificial Sequence: Synthetic oligonucleotide
  Antisense strand to SEQ ID NO: 662518
ugaucaggcaguaaugugc

SEQ ID NO: 662520 - RNA, 19 nt, Artificial Sequence
  Description of Artificial Sequence: Synthetic oligonucleotide
  Sense strand starting at position 3479 of SEQ ID NO: 585723
ggaccauugacuuggccau

SEQ ID NO: 662521 - RNA, 19 nt, Artificial Sequence
  Description of Artificial Sequence: Synthetic oligonucleotide
  Antisense strand to SEQ ID NO: 662520
auggccaagucaauggucc

SEQ ID NO: 662522 - RNA, 19 nt, Artificial Sequence
  Description of Artificial Sequence: Synthetic oligonucleotide
  Sense strand starting at position 3583 of SEQ ID NO: 585723
gugagacauucuuccagac

SEQ ID NO: 662523 - RNA, 19 nt, Artificial Sequence
  Description of Artificial Sequence: Synthetic oligonucleotide
  Antisense strand to SEQ ID NO: 662522
gucuggaagaaugucucac

SEQ ID NO: 662524 - RNA, 19 nt, Artificial Sequence
  Description of Artificial Sequence: Synthetic oligonucleotide
  Sense strand starting at position 3618 of SEQ ID NO: 585723
gagguuuagcuuuaucuua

SEQ ID NO: 662525 - RNA, 19 nt, Artificial Sequence
  Description of Artificial Sequence: Synthetic oligonucleotide
  Antisense strand to SEQ ID NO: 662524
uaagauaaagcuaaaccuc

SEQ ID NO: 662526 - RNA, 19 nt, Artificial Sequence
  Description of Artificial Sequence: Synthetic oligonucleotide
  Sense strand starting at position 3620 of SEQ ID NO: 585723
gguuuagcuuuaucuuaag

SEQ ID NO: 662527 - RNA, 19 nt, Artificial Sequence
  Description of Artificial Sequence: Synthetic oligonucleotide
  Antisense strand to SEQ ID NO: 662526
cuuaagauaaagcuaaacc

SEQ ID NO: 662528 - RNA, 19 nt, Artificial Sequence
  Description of Artificial Sequence: Synthetic oligonucleotide
  Sense strand starting at position 3909 of SEQ ID NO: 585723
aguaacugcuagccacaua

SEQ ID NO: 662529 - RNA, 19 nt, Artificial Sequence
  Description of Artificial Sequence: Synthetic oligonucleotide
  Antisense strand to SEQ ID NO: 662528
uauguggcuagcaguuacu

SEQ ID NO: 662530 - RNA, 19 nt, Artificial Sequence
  Description of Artificial Sequence: Synthetic oligonucleotide
  Sense strand starting at position 3944 of SEQ ID NO: 585723
uugguauguucaguaagug

SEQ ID NO: 662531 - RNA, 19 nt, Artificial Sequence
  Description of Artificial Sequence: Synthetic oligonucleotide
  Antisense strand to SEQ ID NO: 662530
cacuuacugaacauaccaa

SEQ ID NO: 662532 - RNA, 19 nt, Artificial Sequence
  Description of Artificial Sequence: Synthetic oligonucleotide
  Sense strand starting at position 103 of SEQ ID NO: 585724
cuaagacauuguccagaca

SEQ ID NO: 662533 - RNA, 19 nt, Artificial Sequence
  Description of Artificial Sequence: Synthetic oligonucleotide
  Antisense strand to SEQ ID NO: 662532
ugucuggacaaugucuuag

SEQ ID NO: 662534 - RNA, 19 nt, Artificial Sequence
  Description of Artificial Sequence: Synthetic oligonucleotide
  Sense strand starting at position 106 of SEQ ID NO: 585724
agacauuguccagacaguc

SEQ ID NO: 662535 - RNA, 19 nt, Artificial Sequence
  Description of Artificial Sequence: Synthetic oligonucleotide
  Antisense strand to SEQ ID NO: 662534
gacugucuggacaaugucu

SEQ ID NO: 662536 - RNA, 19 nt, Artificial Sequence
  Description of Artificial Sequence: Synthetic oligonucleotide
  Sense strand starting at position 188 of SEQ ID NO: 585724
gaaaguauauaagcaguga

SEQ ID NO: 662537 - RNA, 19 nt, Artificial Sequence
  Description of Artificial Sequence: Synthetic oligonucleotide
  Antisense strand to SEQ ID NO: 662536
ucacugcuuauauacuuuc

SEQ ID NO: 662538 - RNA, 19 nt, Artificial Sequence
  Description of Artificial Sequence: Synthetic oligonucleotide
  Sense strand starting at position 270 of SEQ ID NO: 585724
ugaauaggccuaggacaau

SEQ ID NO: 662539 - RNA, 19 nt, Artificial Sequence
  Description of Artificial Sequence: Synthetic oligonucleotide
  Antisense strand to SEQ ID NO: 662538
auuguccuaggccuauuca

SEQ ID NO: 662540 - RNA, 19 nt, Artificial Sequence
  Description of Artificial Sequence: Synthetic oligonucleotide
  Sense strand starting at position 689 of SEQ ID NO: 585724
ucauguauuaugggucuga

SEQ ID NO: 662541 - RNA, 19 nt, Artificial Sequence
  Description of Artificial Sequence: Synthetic oligonucleotide
  Antisense strand to SEQ ID NO: 662540
ucagacccauaauacauga

SEQ ID NO: 662542 - RNA, 19 nt, Artificial Sequence
  Description of Artificial Sequence: Synthetic oligonucleotide
  Sense strand starting at position 690 of SEQ ID NO: 585724
cauguauuaugggucugaa

SEQ ID NO: 662543 - RNA, 19 nt, Artificial Sequence
  Description of Artificial Sequence: Synthetic oligonucleotide
  Antisense strand to SEQ ID NO: 662542
uucagacccauaauacaug

SEQ ID NO: 662544 - RNA, 19 nt, Artificial Sequence
  Description of Artificial Sequence: Synthetic oligonucleotide
  Sense strand starting at position 693 of SEQ ID NO: 585724
guauuaugggucugaaaua

SEQ ID NO: 662545 - RNA, 19 nt, Artificial Sequence
  Description of Artificial Sequence: Synthetic oligonucleotide
  Antisense strand to SEQ ID NO: 662544
uauuucagacccauaauac

SEQ ID NO: 662546 - RNA, 19 nt, Artificial Sequence
  Description of Artificial Sequence: Synthetic oligonucleotide
  Sense strand starting at position 830 of SEQ ID NO: 585724
uugugcuugcaauccugua

SEQ ID NO: 662547 - RNA, 19 nt, Artificial Sequence
  Description of Artificial Sequence: Synthetic oligonucleotide
  Antisense strand to SEQ ID NO: 662546
uacaggauugcaagcacaa

SEQ ID NO: 662548 - RNA, 19 nt, Artificial Sequence
  Description of Artificial Sequence: Synthetic oligonucleotide
  Sense strand starting at position 835 of SEQ ID NO: 585724
cuugcaauccuguauaaga

SEQ ID NO: 662549 - RNA, 19 nt, Artificial Sequence
  Description of Artificial Sequence: Synthetic oligonucleotide
  Antisense strand to SEQ ID NO: 662548
ucuuauacaggauugcaag

SEQ ID NO: 662550 - RNA, 19 nt, Artificial Sequence
  Description of Artificial Sequence: Synthetic oligonucleotide
  Sense strand starting at position 837 of SEQ ID NO: 585724
ugcaauccuguauaagaaa

SEQ ID NO: 662551 - RNA, 19 nt, Artificial Sequence
  Description of Artificial Sequence: Synthetic oligonucleotide
  Antisense strand to SEQ ID NO: 662550
uuucuuauacaggauugca

SEQ ID NO: 662552 - RNA, 19 nt, Artificial Sequence
  Description of Artificial Sequence: Synthetic oligonucleotide
  Sense strand starting at position 940 of SEQ ID NO: 585724
uaaguaaaccagugagguc

SEQ ID NO: 662553 - RNA, 19 nt, Artificial Sequence
  Description of Artificial Sequence: Synthetic oligonucleotide
  Antisense strand to SEQ ID NO: 662552
gaccucacugguuuacuua

SEQ ID NO: 662554 - RNA, 19 nt, Artificial Sequence
  Description of Artificial Sequence: Synthetic oligonucleotide
  Sense strand starting at position 998 of SEQ ID NO: 585724
cagagauccucaguaagug

SEQ ID NO: 662555 - RNA, 19 nt, Artificial Sequence
  Description of Artificial Sequence: Synthetic oligonucleotide
  Antisense strand to SEQ ID NO: 662554
cacuuacugaggaucucug

SEQ ID NO: 662556 - RNA, 19 nt, Artificial Sequence
  Description of Artificial Sequence: Synthetic oligonucleotide
  Sense strand starting at position 999 of SEQ ID NO: 585724
agagauccucaguaagugu

SEQ ID NO: 662557 - RNA, 19 nt, Artificial Sequence
  Description of Artificial Sequence: Synthetic oligonucleotide
  Antisense strand to SEQ ID NO: 662556
acacuuacugaggaucucu

SEQ ID NO: 662558 - RNA, 19 nt, Artificial Sequence
  Description of Artificial Sequence: Synthetic oligonucleotide
  Sense strand starting at position 1068 of SEQ ID NO: 585724
ccucgccagugauuuggaa

SEQ ID NO: 662559 - RNA, 19 nt, Artificial Sequence
  Description of Artificial Sequence: Synthetic oligonucleotide
  Antisense strand to SEQ ID NO: 662558
uuccaaaucacuggcgagg

SEQ ID NO: 662560 - RNA, 19 nt, Artificial Sequence
  Description of Artificial Sequence: Synthetic oligonucleotide
  Sense strand starting at position 1070 of SEQ ID NO: 585724
ucgccagugauuuggaaug

SEQ ID NO: 662561 - RNA, 19 nt, Artificial Sequence
  Description of Artificial Sequence: Synthetic oligonucleotide
  Antisense strand to SEQ ID NO: 662560
cauuccaaaucacuggcga

SEQ ID NO: 662562 - RNA, 19 nt, Artificial Sequence
  Description of Artificial Sequence: Synthetic oligonucleotide
  Sense strand starting at position 2660 of SEQ ID NO: 585724
ugaucuaagagcugagaug

SEQ ID NO: 662563 - RNA, 19 nt, Artificial Sequence
  Description of Artificial Sequence: Synthetic oligonucleotide
  Antisense strand to SEQ ID NO: 662562
caucucagcucuuagauca

SEQ ID NO: 662564 - RNA, 19 nt, Artificial Sequence
  Description of Artificial Sequence: Synthetic oligonucleotide
  Sense strand starting at position 2796 of SEQ ID NO: 585724
aguaaacgcuggcuauuua

SEQ ID NO: 662565 - RNA, 19 nt, Artificial Sequence
  Description of Artificial Sequence: Synthetic oligonucleotide
  Antisense strand to SEQ ID NO: 662564
uaaauagccagcguuuacu

SEQ ID NO: 662566 - RNA, 19 nt, Artificial Sequence
  Description of Artificial Sequence: Synthetic oligonucleotide
  Sense strand starting at position 2815 of SEQ ID NO: 585724
ggaugucgaguucagagaa

SEQ ID NO: 662567 - RNA, 19 nt, Artificial Sequence
  Description of Artificial Sequence: Synthetic oligonucleotide
  Antisense strand to SEQ ID NO: 662566
uucucugaacucgacaucc

SEQ ID NO: 662568 - RNA, 19 nt, Artificial Sequence
  Description of Artificial Sequence: Synthetic oligonucleotide
  Sense strand starting at position 3111 of SEQ ID NO: 585724
uggaucauuaguggaaauc

SEQ ID NO: 662569 - RNA, 19 nt, Artificial Sequence
  Description of Artificial Sequence: Synthetic oligonucleotide
  Antisense strand to SEQ ID NO: 662568
gauuuccacuaaugaucca

SEQ ID NO: 662570 - RNA, 19 nt, Artificial Sequence
  Description of Artificial Sequence: Synthetic oligonucleotide
  Sense strand starting at position 3120 of SEQ ID NO: 585724
aguggaaaucaugggcagu

SEQ ID NO: 662571 - RNA, 19 nt, Artificial Sequence
  Description of Artificial Sequence: Synthetic oligonucleotide
  Antisense strand to SEQ ID NO: 662570
acugcccaugauuuccacu

SEQ ID NO: 662572 - RNA, 19 nt, Artificial Sequence
  Description of Artificial Sequence: Synthetic oligonucleotide
  Sense strand starting at position 3121 of SEQ ID NO: 585724
guggaaaucaugggcaguu

SEQ ID NO: 662573 - RNA, 19 nt, Artificial Sequence
  Description of Artificial Sequence: Synthetic oligonucleotide
  Antisense strand to SEQ ID NO: 662572
aacugcccaugauuuccac

SEQ ID NO: 662574 - RNA, 19 nt, Artificial Sequence
  Description of Artificial Sequence: Synthetic oligonucleotide
  Sense strand starting at position 3122 of SEQ ID NO: 585724
uggaaaucaugggcaguuu

SEQ ID NO: 662575 - RNA, 19 nt, Artificial Sequence
  Description of Artificial Sequence: Synthetic oligonucleotide
  Antisense strand to SEQ ID NO: 662574
aaacugcccaugauuucca

SEQ ID NO: 662576 - RNA, 19 nt, Artificial Sequence
  Description of Artificial Sequence: Synthetic oligonucleotide
  Sense strand starting at position 3186 of SEQ ID NO: 585724
aauuauaugugagccagga

SEQ ID NO: 662577 - RNA, 19 nt, Artificial Sequence
  Description of Artificial Sequence: Synthetic oligonucleotide
  Antisense strand to SEQ ID NO: 662576
uccuggcucacauauaauu

SEQ ID NO: 662578 - RNA, 19 nt, Artificial Sequence
  Description of Artificial Sequence: Synthetic oligonucleotide
  Sense strand starting at position 3188 of SEQ ID NO: 585724
uuauaugugagccaggacu

SEQ ID NO: 662579 - RNA, 19 nt, Artificial Sequence
  Description of Artificial Sequence: Synthetic oligonucleotide
  Antisense strand to SEQ ID NO: 662578
aguccuggcucacauauaa

SEQ ID NO: 662580 - RNA, 19 nt, Artificial Sequence
  Description of Artificial Sequence: Synthetic oligonucleotide
  Sense strand starting at position 3190 of SEQ ID NO: 585724
auaugugagccaggacuua

SEQ ID NO: 662581 - RNA, 19 nt, Artificial Sequence
  Description of Artificial Sequence: Synthetic oligonucleotide
  Antisense strand to SEQ ID NO: 662580
uaaguccuggcucacauau

SEQ ID NO: 662582 - RNA, 19 nt, Artificial Sequence
  Description of Artificial Sequence: Synthetic oligonucleotide
  Sense strand starting at position 3202 of SEQ ID NO: 585724
ggacuuaauuauguguuga

SEQ ID NO: 662583 - RNA, 19 nt, Artificial Sequence
  Description of Artificial Sequence: Synthetic oligonucleotide
  Antisense strand to SEQ ID NO: 662582
ucaacacauaauuaagucc

SEQ ID NO: 662584 - RNA, 19 nt, Artificial Sequence
  Description of Artificial Sequence: Synthetic oligonucleotide
  Sense strand starting at position 3204 of SEQ ID NO: 585724
acuuaauuauguguugauc

SEQ ID NO: 662585 - RNA, 19 nt, Artificial Sequence
  Description of Artificial Sequence: Synthetic oligonucleotide
  Antisense strand to SEQ ID NO: 662584
gaucaacacauaauuaagu

SEQ ID NO: 662586 - RNA, 19 nt, Artificial Sequence
  Description of Artificial Sequence: Synthetic oligonucleotide
  Sense strand starting at position 3372 of SEQ ID NO: 585724
aacuguaaaguguguagaa

SEQ ID NO: 662587 - RNA, 19 nt, Artificial Sequence
  Description of Artificial Sequence: Synthetic oligonucleotide
  Antisense strand to SEQ ID NO: 662586
uucuacacacuuuacaguu

SEQ ID NO: 662588 - RNA, 19 nt, Artificial Sequence
  Description of Artificial Sequence: Synthetic oligonucleotide
  Sense strand starting at position 3374 of SEQ ID NO: 585724
cuguaaaguguguagaauu

SEQ ID NO: 662589 - RNA, 19 nt, Artificial Sequence
  Description of Artificial Sequence: Synthetic oligonucleotide
  Antisense strand to SEQ ID NO: 662588
aauucuacacacuuuacag

SEQ ID NO: 662590 - RNA, 19 nt, Artificial Sequence
  Description of Artificial Sequence: Synthetic oligonucleotide
  Sense strand starting at position 3467 of SEQ ID NO: 585724
ugacuagcgaugcaaacua

SEQ ID NO: 662591 - RNA, 19 nt, Artificial Sequence
  Description of Artificial Sequence: Synthetic oligonucleotide
  Antisense strand to SEQ ID NO: 662590
uaguuugcaucgcuaguca

SEQ ID NO: 662592 - RNA, 19 nt, Artificial Sequence
  Description of Artificial Sequence: Synthetic oligonucleotide
  Sense strand starting at position 3483 of SEQ ID NO: 585724
cuaagaaagcaguguaaug

SEQ ID NO: 662593 - RNA, 19 nt, Artificial Sequence
  Description of Artificial Sequence: Synthetic oligonucleotide
  Antisense strand to SEQ ID NO: 662592
cauuacacugcuuucuuag

SEQ ID NO: 662594 - RNA, 19 nt, Artificial Sequence
  Description of Artificial Sequence: Synthetic oligonucleotide
  Sense strand starting at position 3555 of SEQ ID NO: 585724
guaugaauuggaugucuaa

SEQ ID NO: 662595 - RNA, 19 nt, Artificial Sequence
  Description of Artificial Sequence: Synthetic oligonucleotide
  Antisense strand to SEQ ID NO: 662594
uuagacauccaauucauac

SEQ ID NO: 662596 - RNA, 19 nt, Artificial Sequence
  Description of Artificial Sequence: Synthetic oligonucleotide
  Sense strand starting at position 3558 of SEQ ID NO: 585724
ugaauuggaugucuaaaug

SEQ ID NO: 662597 - RNA, 19 nt, Artificial Sequence
  Description of Artificial Sequence: Synthetic oligonucleotide
  Antisense strand to SEQ ID NO: 662596
cauuuagacauccaauuca

SEQ ID NO: 662598 - RNA, 19 nt, Artificial Sequence
  Description of Artificial Sequence: Synthetic oligonucleotide
  Sense strand starting at position 3588 of SEQ ID NO: 585724
aucggucugacccaagaau

SEQ ID NO: 662599 - RNA, 19 nt, Artificial Sequence
  Description of Artificial Sequence: Synthetic oligonucleotide
  Antisense strand to SEQ ID NO: 662598
auucuugggucagaccgau

SEQ ID NO: 662600 - RNA, 19 nt, Artificial Sequence
  Description of Artificial Sequence: Synthetic oligonucleotide
  Sense strand starting at position 3627 of SEQ ID NO: 585724
auuaaaugcuauucgagga

SEQ ID NO: 662601 - RNA, 19 nt, Artificial Sequence
  Description of Artificial Sequence: Synthetic oligonucleotide
  Antisense strand to SEQ ID NO: 662600
uccucgaauagcauuuaau

SEQ ID NO: 662602 - RNA, 19 nt, Artificial Sequence
  Description of Artificial Sequence: Synthetic oligonucleotide
  Sense strand starting at position 3628 of SEQ ID NO: 585724
uuaaaugcuauucgaggau

SEQ ID NO: 662603 - RNA, 19 nt, Artificial Sequence
  Description of Artificial Sequence: Synthetic oligonucleotide
  Antisense strand to SEQ ID NO: 662602
auccucgaauagcauuuaa

SEQ ID NO: 662604 - RNA, 19 nt, Artificial Sequence
  Description of Artificial Sequence: Synthetic oligonucleotide
  Sense strand starting at position 3632 of SEQ ID NO: 585724
augcuauucgaggauucuu

SEQ ID NO: 662605 - RNA, 19 nt, Artificial Sequence
  Description of Artificial Sequence: Synthetic oligonucleotide
  Antisense strand to SEQ ID NO: 662604
aagaauccucgaauagcau

SEQ ID NO: 662606 - RNA, 19 nt, Artificial Sequence
  Description of Artificial Sequence: Synthetic oligonucleotide
  Sense strand starting at position 3702 of SEQ ID NO: 585724
augauacuuuaagugcuua

SEQ ID NO: 662607 - RNA, 19 nt, Artificial Sequence
  Description of Artificial Sequence: Synthetic oligonucleotide
  Antisense strand to SEQ ID NO: 662606
uaagcacuuaaaguaucau

SEQ ID NO: 662608 - RNA, 19 nt, Artificial Sequence
  Description of Artificial Sequence: Synthetic oligonucleotide
  Sense strand starting at position 3970 of SEQ ID NO: 585724
cugagaacuuguucuucca

SEQ ID NO: 662609 - RNA, 19 nt, Artificial Sequence
  Description of Artificial Sequence: Synthetic oligonucleotide
  Antisense strand to SEQ ID NO: 662608
uggaagaacaaguucucag

SEQ ID NO: 662610 - RNA, 19 nt, Artificial Sequence
  Description of Artificial Sequence: Synthetic oligonucleotide
  Sense strand starting at position 3972 of SEQ ID NO: 585724
gagaacuuguucuuccagu

SEQ ID NO: 662611 - RNA, 19 nt, Artificial Sequence
  Description of Artificial Sequence: Synthetic oligonucleotide
  Antisense strand to SEQ ID NO: 662610
acuggaagaacaaguucuc

SEQ ID NO: 662612 - RNA, 19 nt, Artificial Sequence
  Description of Artificial Sequence: Synthetic oligonucleotide
  Sense strand starting at position 90 of SEQ ID NO: 585725
cccaauaauguuggaguau

SEQ ID NO: 662613 - RNA, 19 nt, Artificial Sequence
  Description of Artificial Sequence: Synthetic oligonucleotide
  Antisense strand to SEQ ID NO: 662612
auacuccaacauuauuggg

SEQ ID NO: 662614 - RNA, 19 nt, Artificial Sequence
  Description of Artificial Sequence: Synthetic oligonucleotide
  Sense strand starting at position 101 of SEQ ID NO: 585725
uggaguauauauucucaua

SEQ ID NO: 662615 - RNA, 19 nt, Artificial Sequence
  Description of Artificial Sequence: Synthetic oligonucleotide
  Antisense strand to SEQ ID NO: 662614
uaugagaauauauacucca

SEQ ID NO: 662616 - RNA, 19 nt, Artificial Sequence
  Description of Artificial Sequence: Synthetic oligonucleotide
  Sense strand starting at position 156 of SEQ ID NO: 585725
acaaacagugugugaacau

SEQ ID NO: 662617 - RNA, 19 nt, Artificial Sequence
  Description of Artificial Sequence: Synthetic oligonucleotide
  Antisense strand to SEQ ID NO: 662616
auguucacacacuguuugu

SEQ ID NO: 662618 - RNA, 19 nt, Artificial Sequence
  Description of Artificial Sequence: Synthetic oligonucleotide
  Sense strand starting at position 241 of SEQ ID NO: 585725
gugagacacuaucugguuu

SEQ ID NO: 662619 - RNA, 19 nt, Artificial Sequence
  Description of Artificial Sequence: Synthetic oligonucleotide
  Antisense strand to SEQ ID NO: 662618
aaaccagauagugucucac

SEQ ID NO: 662620 - RNA, 19 nt, Artificial Sequence
  Description of Artificial Sequence: Synthetic oligonucleotide
  Sense strand starting at position 274 of SEQ ID NO: 585725
auccuauuaguauggauca

SEQ ID NO: 662621 - RNA, 19 nt, Artificial Sequence
  Description of Artificial Sequence: Synthetic oligonucleotide
  Antisense strand to SEQ ID NO: 662620
ugauccauacuaauaggau

SEQ ID NO: 662622 - RNA, 19 nt, Artificial Sequence
  Description of Artificial Sequence: Synthetic oligonucleotide
  Sense strand starting at position 286 of SEQ ID NO: 585725
uggaucaugugaccuaaga

SEQ ID NO: 662623 - RNA, 19 nt, Artificial Sequence
  Description of Artificial Sequence: Synthetic oligonucleotide
  Antisense strand to SEQ ID NO: 662622
ucuuaggucacaugaucca

SEQ ID NO: 662624 - RNA, 19 nt, Artificial Sequence
  Description of Artificial Sequence: Synthetic oligonucleotide
  Sense strand starting at position 294 of SEQ ID NO: 585725
gugaccuaagaaugaguau

SEQ ID NO: 662625 - RNA, 19 nt, Artificial Sequence
  Description of Artificial Sequence: Synthetic oligonucleotide
  Antisense strand to SEQ ID NO: 662624
auacucauucuuaggucac

SEQ ID NO: 662626 - RNA, 19 nt, Artificial Sequence
  Description of Artificial Sequence: Synthetic oligonucleotide
  Sense strand starting at position 300 of SEQ ID NO: 585725
uaagaaugaguaugagcuu

SEQ ID NO: 662627 - RNA, 19 nt, Artificial Sequence
  Description of Artificial Sequence: Synthetic oligonucleotide
  Antisense strand to SEQ ID NO: 662626
aagcucauacucauucuua

SEQ ID NO: 662628 - RNA, 19 nt, Artificial Sequence
  Description of Artificial Sequence: Synthetic oligonucleotide
  Sense strand starting at position 388 of SEQ ID NO: 585725
uuugcuuacugauuuguau

SEQ ID NO: 662629 - RNA, 19 nt, Artificial Sequence
  Description of Artificial Sequence: Synthetic oligonucleotide
  Antisense strand to SEQ ID NO: 662628
auacaaaucaguaagcaaa

SEQ ID NO: 662630 - RNA, 19 nt, Artificial Sequence
  Description of Artificial Sequence: Synthetic oligonucleotide
  Sense strand starting at position 486 of SEQ ID NO: 585725
uuugucucaguuuauagua

SEQ ID NO: 662631 - RNA, 19 nt, Artificial Sequence
  Description of Artificial Sequence: Synthetic oligonucleotide
  Antisense strand to SEQ ID NO: 662630
uacuauaaacugagacaaa

SEQ ID NO: 662632 - RNA, 19 nt, Artificial Sequence
  Description of Artificial Sequence: Synthetic oligonucleotide
  Sense strand starting at position 520 of SEQ ID NO: 585725
aggaauucuuugcuuagag

SEQ ID NO: 662633 - RNA, 19 nt, Artificial Sequence
  Description of Artificial Sequence: Synthetic oligonucleotide
  Antisense strand to SEQ ID NO: 662632
cucuaagcaaagaauuccu

SEQ ID NO: 662634 - RNA, 19 nt, Artificial Sequence
  Description of Artificial Sequence: Synthetic oligonucleotide
  Sense strand starting at position 521 of SEQ ID NO: 585725
ggaauucuuugcuuagagg

SEQ ID NO: 662635 - RNA, 19 nt, Artificial Sequence
  Description of Artificial Sequence: Synthetic oligonucleotide
  Antisense strand to SEQ ID NO: 662634
ccucuaagcaaagaauucc

SEQ ID NO: 662636 - RNA, 19 nt, Artificial Sequence
  Description of Artificial Sequence: Synthetic oligonucleotide
  Sense strand starting at position 527 of SEQ ID NO: 585725
cuuugcuuagagggaauaa

SEQ ID NO: 662637 - RNA, 19 nt, Artificial Sequence
  Description of Artificial Sequence: Synthetic oligonucleotide
  Antisense strand to SEQ ID NO: 662636
uuauucccucuaagcaaag

SEQ ID NO: 662638 - RNA, 19 nt, Artificial Sequence
  Description of Artificial Sequence: Synthetic oligonucleotide
  Sense strand starting at position 537 of SEQ ID NO: 585725
agggaauaaagcugaguca

SEQ ID NO: 662639 - RNA, 19 nt, Artificial Sequence
  Description of Artificial Sequence: Synthetic oligonucleotide
  Antisense strand to SEQ ID NO: 662638
ugacucagcuuuauucccu

SEQ ID NO: 662640 - RNA, 19 nt, Artificial Sequence
  Description of Artificial Sequence: Synthetic oligonucleotide
  Sense strand starting at position 633 of SEQ ID NO: 585725
guucuacuaguacacuuaa

SEQ ID NO: 662641 - RNA, 19 nt, Artificial Sequence
  Description of Artificial Sequence: Synthetic oligonucleotide
  Antisense strand to SEQ ID NO: 662640
uuaaguguacuaguagaac

SEQ ID NO: 662642 - RNA, 19 nt, Artificial Sequence
  Description of Artificial Sequence: Synthetic oligonucleotide
  Sense strand starting at position 659 of SEQ ID NO: 585725
uuacacaucuaggucuuua

SEQ ID NO: 662643 - RNA, 19 nt, Artificial Sequence
  Description of Artificial Sequence: Synthetic oligonucleotide
  Antisense strand to SEQ ID NO: 662642
uaaagaccuagauguguaa

SEQ ID NO: 662644 - RNA, 19 nt, Artificial Sequence
  Description of Artificial Sequence: Synthetic oligonucleotide
  Sense strand starting at position 898 of SEQ ID NO: 585725
aggugauucccacaccuca

SEQ ID NO: 662645 - RNA, 19 nt, Artificial Sequence
  Description of Artificial Sequence: Synthetic oligonucleotide
  Antisense strand to SEQ ID NO: 662644
ugaggugugggaaucaccu

SEQ ID NO: 662646 - RNA, 19 nt, Artificial Sequence
  Description of Artificial Sequence: Synthetic oligonucleotide
  Sense strand starting at position 1188 of SEQ ID NO: 585725
uccaguaauuuguuuguac

SEQ ID NO: 662647 - RNA, 19 nt, Artificial Sequence
  Description of Artificial Sequence: Synthetic oligonucleotide
  Antisense strand to SEQ ID NO: 662646
guacaaacaaauuacugga

SEQ ID NO: 662648 - RNA, 19 nt, Artificial Sequence
  Description of Artificial Sequence: Synthetic oligonucleotide
  Sense strand starting at position 1223 of SEQ ID NO: 585725
ugauuuaacuuauugcugu

SEQ ID NO: 662649 - RNA, 19 nt, Artificial Sequence
  Description of Artificial Sequence: Synthetic oligonucleotide
  Antisense strand to SEQ ID NO: 662648
acagcaauaaguuaaauca

SEQ ID NO: 662650 - RNA, 19 nt, Artificial Sequence
  Description of Artificial Sequence: Synthetic oligonucleotide
  Sense strand starting at position 1279 of SEQ ID NO: 585725
accaaaggugaaugguauu

SEQ ID NO: 662651 - RNA, 19 nt, Artificial Sequence
  Description of Artificial Sequence: Synthetic oligonucleotide
  Antisense strand to SEQ ID NO: 662650
aauaccauucaccuuuggu

SEQ ID NO: 662652 - RNA, 19 nt, Artificial Sequence
  Description of Artificial Sequence: Synthetic oligonucleotide
  Sense strand starting at position 1597 of SEQ ID NO: 585725
agagucuuauaguuauuac

SEQ ID NO: 662653 - RNA, 19 nt, Artificial Sequence
  Description of Artificial Sequence: Synthetic oligonucleotide
  Antisense strand to SEQ ID NO: 662652
guaauaacuauaagacucu

SEQ ID NO: 662654 - RNA, 19 nt, Artificial Sequence
  Description of Artificial Sequence: Synthetic oligonucleotide
  Sense strand starting at position 1606 of SEQ ID NO: 585725
uaguuauuacagggcaaag

SEQ ID NO: 662655 - RNA, 19 nt, Artificial Sequence
  Description of Artificial Sequence: Synthetic oligonucleotide
  Antisense strand to SEQ ID NO: 662654
cuuugcccuguaauaacua

SEQ ID NO: 662656 - RNA, 19 nt, Artificial Sequence
  Description of Artificial Sequence: Synthetic oligonucleotide
  Sense strand starting at position 2060 of SEQ ID NO: 585725
ccagaaucugauugucucu

SEQ ID NO: 662657 - RNA, 19 nt, Artificial Sequence
  Description of Artificial Sequence: Synthetic oligonucleotide
  Antisense strand to SEQ ID NO: 662656
agagacaaucagauucugg

SEQ ID NO: 662658 - RNA, 19 nt, Artificial Sequence
  Description of Artificial Sequence: Synthetic oligonucleotide
  Sense strand starting at position 2066 of SEQ ID NO: 585725
ucugauugucucuacauca

SEQ ID NO: 662659 - RNA, 19 nt, Artificial Sequence
  Description of Artificial Sequence: Synthetic oligonucleotide
  Antisense strand to SEQ ID NO: 662658
ugauguagagacaaucaga

SEQ ID NO: 662660 - RNA, 19 nt, Artificial Sequence
  Description of Artificial Sequence: Synthetic oligonucleotide
  Sense strand starting at position 2154 of SEQ ID NO: 585725
auguuaugggcccacucau

SEQ ID NO: 662661 - RNA, 19 nt, Artificial Sequence
  Description of Artificial Sequence: Synthetic oligonucleotide
  Antisense strand to SEQ ID NO: 662660
augagugggcccauaacau

SEQ ID NO: 662662 - RNA, 19 nt, Artificial Sequence
  Description of Artificial Sequence: Synthetic oligonucleotide
  Sense strand starting at position 2612 of SEQ ID NO: 585725
agaaaccaguguuugcaua

SEQ ID NO: 662663 - RNA, 19 nt, Artificial Sequence
  Description of Artificial Sequence: Synthetic oligonucleotide
  Antisense strand to SEQ ID NO: 662662
uaugcaaacacugguuucu

SEQ ID NO: 662664 - RNA, 19 nt, Artificial Sequence
  Description of Artificial Sequence: Synthetic oligonucleotide
  Sense strand starting at position 2622 of SEQ ID NO: 585725
guuugcauaucaucuagaa

SEQ ID NO: 662665 - RNA, 19 nt, Artificial Sequence
  Description of Artificial Sequence: Synthetic oligonucleotide
  Antisense strand to SEQ ID NO: 662664
uucuagaugauaugcaaac

SEQ ID NO: 662666 - RNA, 19 nt, Artificial Sequence
  Description of Artificial Sequence: Synthetic oligonucleotide
  Sense strand starting at position 2866 of SEQ ID NO: 585725
ccauacgugagguaccaau

SEQ ID NO: 662667 - RNA, 19 nt, Artificial Sequence
  Description of Artificial Sequence: Synthetic oligonucleotide
  Antisense strand to SEQ ID NO: 662666
auugguaccucacguaugg

SEQ ID NO: 662668 - RNA, 19 nt, Artificial Sequence
  Description of Artificial Sequence: Synthetic oligonucleotide
  Sense strand starting at position 2915 of SEQ ID NO: 585725
guaucuggaaagugagaua

SEQ ID NO: 662669 - RNA, 19 nt, Artificial Sequence
  Description of Artificial Sequence: Synthetic oligonucleotide
  Antisense strand to SEQ ID NO: 662668
uaucucacuuuccagauac

SEQ ID NO: 662670 - RNA, 19 nt, Artificial Sequence
  Description of Artificial Sequence: Synthetic oligonucleotide
  Sense strand starting at position 3076 of SEQ ID NO: 585725
ugaauuuacuuugaaguga

SEQ ID NO: 662671 - RNA, 19 nt, Artificial Sequence
  Description of Artificial Sequence: Synthetic oligonucleotide
  Antisense strand to SEQ ID NO: 662670
ucacuucaaaguaaauuca

SEQ ID NO: 662672 - RNA, 19 nt, Artificial Sequence
  Description of Artificial Sequence: Synthetic oligonucleotide
  Sense strand starting at position 3081 of SEQ ID NO: 585725
uuacuuugaagugaguuga

SEQ ID NO: 662673 - RNA, 19 nt, Artificial Sequence
  Description of Artificial Sequence: Synthetic oligonucleotide
  Antisense strand to SEQ ID NO: 662672
ucaacucacuucaaaguaa

SEQ ID NO: 662674 - RNA, 19 nt, Artificial Sequence
  Description of Artificial Sequence: Synthetic oligonucleotide
  Sense strand starting at position 3085 of SEQ ID NO: 585725
uuugaagugaguugauucu

SEQ ID NO: 662675 - RNA, 19 nt, Artificial Sequence
  Description of Artificial Sequence: Synthetic oligonucleotide
  Antisense strand to SEQ ID NO: 662674
agaaucaacucacuucaaa

SEQ ID NO: 662676 - RNA, 19 nt, Artificial Sequence
  Description of Artificial Sequence: Synthetic oligonucleotide
  Sense strand starting at position 3091 of SEQ ID NO: 585725
gugaguugauucuugacag

SEQ ID NO: 662677 - RNA, 19 nt, Artificial Sequence
  Description of Artificial Sequence: Synthetic oligonucleotide
  Antisense strand to SEQ ID NO: 662676
cugucaagaaucaacucac

SEQ ID NO: 662678 - RNA, 19 nt, Artificial Sequence
  Description of Artificial Sequence: Synthetic oligonucleotide
  Sense strand starting at position 3115 of SEQ ID NO: 585725
ugaauaugagugugaaagg

SEQ ID NO: 662679 - RNA, 19 nt, Artificial Sequence
  Description of Artificial Sequence: Synthetic oligonucleotide
  Antisense strand to SEQ ID NO: 662678
ccuuucacacucauauuca

SEQ ID NO: 662680 - RNA, 19 nt, Artificial Sequence
  Description of Artificial Sequence: Synthetic oligonucleotide
  Sense strand starting at position 3625 of SEQ ID NO: 585725
ggccaagaucuuuacucua

SEQ ID NO: 662681 - RNA, 19 nt, Artificial Sequence
  Description of Artificial Sequence: Synthetic oligonucleotide
  Antisense strand to SEQ ID NO: 662680
uagaguaaagaucuuggcc

SEQ ID NO: 662682 - RNA, 19 nt, Artificial Sequence
  Description of Artificial Sequence: Synthetic oligonucleotide
  Sense strand starting at position 3630 of SEQ ID NO: 585725
agaucuuuacucuauguua

SEQ ID NO: 662683 - RNA, 19 nt, Artificial Sequence
  Description of Artificial Sequence: Synthetic oligonucleotide
  Antisense strand to SEQ ID NO: 662682
uaacauagaguaaagaucu

SEQ ID NO: 662684 - RNA, 19 nt, Artificial Sequence
  Description of Artificial Sequence: Synthetic oligonucleotide
  Sense strand starting at position 3821 of SEQ ID NO: 585725
gugaauggcugaucaagga

SEQ ID NO: 662685 - RNA, 19 nt, Artificial Sequence
  Description of Artificial Sequence: Synthetic oligonucleotide
  Antisense strand to SEQ ID NO: 662684
uccuugaucagccauucac

SEQ ID NO: 662686 - RNA, 19 nt, Artificial Sequence
  Description of Artificial Sequence: Synthetic oligonucleotide
  Sense strand starting at position 3870 of SEQ ID NO: 585725
cuaccuauggccugaaagu

SEQ ID NO: 662687 - RNA, 19 nt, Artificial Sequence
  Description of Artificial Sequence: Synthetic oligonucleotide
  Antisense strand to SEQ ID NO: 662686
acuuucaggccauagguag

SEQ ID NO: 662688 - RNA, 19 nt, Artificial Sequence
  Description of Artificial Sequence: Synthetic oligonucleotide
  Sense strand starting at position 3907 of SEQ ID NO: 585725
accaauguuuggucacaua

SEQ ID NO: 662689 - RNA, 19 nt, Artificial Sequence
  Description of Artificial Sequence: Synthetic oligonucleotide
  Antisense strand to SEQ ID NO: 662688
uaugugaccaaacauuggu

SEQ ID NO: 662690 - RNA, 19 nt, Artificial Sequence
  Description of Artificial Sequence: Synthetic oligonucleotide
  Sense strand starting at position 3918 of SEQ ID NO: 585725
gucacauacugauugaugu

SEQ ID NO: 662691 - RNA, 19 nt, Artificial Sequence
  Description of Artificial Sequence: Synthetic oligonucleotide
  Antisense strand to SEQ ID NO: 662690
acaucaaucaguaugugac

SEQ ID NO: 662692 - RNA, 19 nt, Artificial Sequence
  Description of Artificial Sequence: Synthetic oligonucleotide
  Sense strand starting at position 92 of SEQ ID NO: 585726
gagcccucgggcuaagagu

SEQ ID NO: 662693 - RNA, 19 nt, Artificial Sequence
  Description of Artificial Sequence: Synthetic oligonucleotide
  Antisense strand to SEQ ID NO: 662692
acucuuagcccgagggcuc

SEQ ID NO: 662694 - RNA, 19 nt, Artificial Sequence
  Description of Artificial Sequence: Synthetic oligonucleotide
  Sense strand starting at position 99 of SEQ ID NO: 585726
cgggcuaagaguugguaua

SEQ ID NO: 662695 - RNA, 19 nt, Artificial Sequence
  Description of Artificial Sequence: Synthetic oligonucleotide
  Antisense strand to SEQ ID NO: 662694
uauaccaacucuuagcccg

SEQ ID NO: 662696 - RNA, 19 nt, Artificial Sequence
  Description of Artificial Sequence: Synthetic oligonucleotide
  Sense strand starting at position 100 of SEQ ID NO: 585726
gggcuaagaguugguauau

SEQ ID NO: 662697 - RNA, 19 nt, Artificial Sequence
  Description of Artificial Sequence: Synthetic oligonucleotide
  Antisense strand to SEQ ID NO: 662696
auauaccaacucuuagccc

SEQ ID NO: 662698 - RNA, 19 nt, Artificial Sequence
  Description of Artificial Sequence: Synthetic oligonucleotide
  Sense strand starting at position 101 of SEQ ID NO: 585726
ggcuaagaguugguauaua

SEQ ID NO: 662699 - RNA, 19 nt, Artificial Sequence
  Description of Artificial Sequence: Synthetic oligonucleotide
  Antisense strand to SEQ ID NO: 662698
uauauaccaacucuuagcc

SEQ ID NO: 662700 - RNA, 19 nt, Artificial Sequence
  Description of Artificial Sequence: Synthetic oligonucleotide
  Sense strand starting at position 215 of SEQ ID NO: 585726
ggcagcuagacuugaaugu

SEQ ID NO: 662701 - RNA, 19 nt, Artificial Sequence
  Description of Artificial Sequence: Synthetic oligonucleotide
  Antisense strand to SEQ ID NO: 662700
acauucaagucuagcugcc

SEQ ID NO: 662702 - RNA, 19 nt, Artificial Sequence
  Description of Artificial Sequence: Synthetic oligonucleotide
  Sense strand starting at position 222 of SEQ ID NO: 585726
agacuugaaugugucccaa

SEQ ID NO: 662703 - RNA, 19 nt, Artificial Sequence
  Description of Artificial Sequence: Synthetic oligonucleotide
  Antisense strand to SEQ ID NO: 662702
uugggacacauucaagucu

SEQ ID NO: 662704 - RNA, 19 nt, Artificial Sequence
  Description of Artificial Sequence: Synthetic oligonucleotide
  Sense strand starting at position 393 of SEQ ID NO: 585726
uugcauaauugugccaauu

SEQ ID NO: 662705 - RNA, 19 nt, Artificial Sequence
  Description of Artificial Sequence: Synthetic oligonucleotide
  Antisense strand to SEQ ID NO: 662704
aauuggcacaauuaugcaa

SEQ ID NO: 662706 - RNA, 19 nt, Artificial Sequence
  Description of Artificial Sequence: Synthetic oligonucleotide
  Sense strand starting at position 422 of SEQ ID NO: 585726
uaauuaggucuaugaagac

SEQ ID NO: 662707 - RNA, 19 nt, Artificial Sequence
  Description of Artificial Sequence: Synthetic oligonucleotide
  Antisense strand to SEQ ID NO: 662706
gucuucauagaccuaauua

SEQ ID NO: 662708 - RNA, 19 nt, Artificial Sequence
  Description of Artificial Sequence: Synthetic oligonucleotide
  Sense strand starting at position 530 of SEQ ID NO: 585726
agggaaugggcugguuagu

SEQ ID NO: 662709 - RNA, 19 nt, Artificial Sequence
  Description of Artificial Sequence: Synthetic oligonucleotide
  Antisense strand to SEQ ID NO: 662708
acuaaccagcccauucccu

SEQ ID NO: 662710 - RNA, 19 nt, Artificial Sequence
  Description of Artificial Sequence: Synthetic oligonucleotide
  Sense strand starting at position 582 of SEQ ID NO: 585726
ggguagaugggugguaaga

SEQ ID NO: 662711 - RNA, 19 nt, Artificial Sequence
  Description of Artificial Sequence: Synthetic oligonucleotide
  Antisense strand to SEQ ID NO: 662710
ucuuaccacccaucuaccc

SEQ ID NO: 662712 - RNA, 19 nt, Artificial Sequence
  Description of Artificial Sequence: Synthetic oligonucleotide
  Sense strand starting at position 591 of SEQ ID NO: 585726
ggugguaagacugggaugu

SEQ ID NO: 662713 - RNA, 19 nt, Artificial Sequence
  Description of Artificial Sequence: Synthetic oligonucleotide
  Antisense strand to SEQ ID NO: 662712
acaucccagucuuaccacc

SEQ ID NO: 662714 - RNA, 19 nt, Artificial Sequence
  Description of Artificial Sequence: Synthetic oligonucleotide
  Sense strand starting at position 1908 of SEQ ID NO: 585726
gucucagucucgucaaauc

SEQ ID NO: 662715 - RNA, 19 nt, Artificial Sequence
  Description of Artificial Sequence: Synthetic oligonucleotide
  Antisense strand to SEQ ID NO: 662714
gauuugacgagacugagac

SEQ ID NO: 662716 - RNA, 19 nt, Artificial Sequence
  Description of Artificial Sequence: Synthetic oligonucleotide
  Sense strand starting at position 2249 of SEQ ID NO: 585726
cgagucauuccagguggcu

SEQ ID NO: 662717 - RNA, 19 nt, Artificial Sequence
  Description of Artificial Sequence: Synthetic oligonucleotide
  Antisense strand to SEQ ID NO: 662716
agccaccuggaaugacucg

SEQ ID NO: 662718 - RNA, 19 nt, Artificial Sequence
  Description of Artificial Sequence: Synthetic oligonucleotide
  Sense strand starting at position 2302 of SEQ ID NO: 585726
cacagauccugguuugugu

SEQ ID NO: 662719 - RNA, 19 nt, Artificial Sequence
  Description of Artificial Sequence: Synthetic oligonucleotide
  Antisense strand to SEQ ID NO: 662718
acacaaaccaggaucugug

SEQ ID NO: 662720 - RNA, 19 nt, Artificial Sequence
  Description of Artificial Sequence: Synthetic oligonucleotide
  Sense strand starting at position 2313 of SEQ ID NO: 585726
guuuguguggcuuuggcaa

SEQ ID NO: 662721 - RNA, 19 nt, Artificial Sequence
  Description of Artificial Sequence: Synthetic oligonucleotide
  Antisense strand to SEQ ID NO: 662720
uugccaaagccacacaaac

SEQ ID NO: 662722 - RNA, 19 nt, Artificial Sequence
  Description of Artificial Sequence: Synthetic oligonucleotide
  Sense strand starting at position 2329 of SEQ ID NO: 585726
caagccucugaguguugau

SEQ ID NO: 662723 - RNA, 19 nt, Artificial Sequence
  Description of Artificial Sequence: Synthetic oligonucleotide
  Antisense strand to SEQ ID NO: 662722
aucaacacucagaggcuug

SEQ ID NO: 662724 - RNA, 19 nt, Artificial Sequence
  Description of Artificial Sequence: Synthetic oligonucleotide
  Sense strand starting at position 2338 of SEQ ID NO: 585726
gaguguugaugugugguuu

SEQ ID NO: 662725 - RNA, 19 nt, Artificial Sequence
  Description of Artificial Sequence: Synthetic oligonucleotide
  Antisense strand to SEQ ID NO: 662724
aaaccacacaucaacacuc

SEQ ID NO: 662726 - RNA, 19 nt, Artificial Sequence
  Description of Artificial Sequence: Synthetic oligonucleotide
  Sense strand starting at position 2526 of SEQ ID NO: 585726
ccuuacuuucuucguaagu

SEQ ID NO: 662727 - RNA, 19 nt, Artificial Sequence
  Description of Artificial Sequence: Synthetic oligonucleotide
  Antisense strand to SEQ ID NO: 662726
acuuacgaagaaaguaagg

SEQ ID NO: 662728 - RNA, 19 nt, Artificial Sequence
  Description of Artificial Sequence: Synthetic oligonucleotide
  Sense strand starting at position 2619 of SEQ ID NO: 585726
uuggaauguacccgguauu

SEQ ID NO: 662729 - RNA, 19 nt, Artificial Sequence
  Description of Artificial Sequence: Synthetic oligonucleotide
  Antisense strand to SEQ ID NO: 662728
aauaccggguacauuccaa

SEQ ID NO: 662730 - RNA, 19 nt, Artificial Sequence
  Description of Artificial Sequence: Synthetic oligonucleotide
  Sense strand starting at position 2620 of SEQ ID NO: 585726
uggaauguacccgguauua

SEQ ID NO: 662731 - RNA, 19 nt, Artificial Sequence
  Description of Artificial Sequence: Synthetic oligonucleotide
  Antisense strand to SEQ ID NO: 662730
uaauaccggguacauucca

SEQ ID NO: 662732 - RNA, 19 nt, Artificial Sequence
  Description of Artificial Sequence: Synthetic oligonucleotide
  Sense strand starting at position 2622 of SEQ ID NO: 585726
gaauguacccgguauuauc

SEQ ID NO: 662733 - RNA, 19 nt, Artificial Sequence
  Description of Artificial Sequence: Synthetic oligonucleotide
  Antisense strand to SEQ ID NO: 662732
gauaauaccggguacauuc

SEQ ID NO: 662734 - RNA, 19 nt, Artificial Sequence
  Description of Artificial Sequence: Synthetic oligonucleotide
  Sense strand starting at position 2732 of SEQ ID NO: 585726
ggucuucugacuuguguuc

SEQ ID NO: 662735 - RNA, 19 nt, Artificial Sequence
  Description of Artificial Sequence: Synthetic oligonucleotide
  Antisense strand to SEQ ID NO: 662734
gaacacaagucagaagacc

SEQ ID NO: 662736 - RNA, 19 nt, Artificial Sequence
  Description of Artificial Sequence: Synthetic oligonucleotide
  Sense strand starting at position 2756 of SEQ ID NO: 585726
gugagucaacccugccuuu

SEQ ID NO: 662737 - RNA, 19 nt, Artificial Sequence
  Description of Artificial Sequence: Synthetic oligonucleotide
  Antisense strand to SEQ ID NO: 662736
aaaggcaggguugacucac

SEQ ID NO: 662738 - RNA, 19 nt, Artificial Sequence
  Description of Artificial Sequence: Synthetic oligonucleotide
  Sense strand starting at position 2976 of SEQ ID NO: 585726
guuugugcauaaguaaaca

SEQ ID NO: 662739 - RNA, 19 nt, Artificial Sequence
  Description of Artificial Sequence: Synthetic oligonucleotide
  Antisense strand to SEQ ID NO: 662738
uguuuacuuaugcacaaac

SEQ ID NO: 662740 - RNA, 19 nt, Artificial Sequence
  Description of Artificial Sequence: Synthetic oligonucleotide
  Sense strand starting at position 2987 of SEQ ID NO: 585726
aguaaacauccagaugucu

SEQ ID NO: 662741 - RNA, 19 nt, Artificial Sequence
  Description of Artificial Sequence: Synthetic oligonucleotide
  Antisense strand to SEQ ID NO: 662740
agacaucuggauguuuacu

SEQ ID NO: 662742 - RNA, 19 nt, Artificial Sequence
  Description of Artificial Sequence: Synthetic oligonucleotide
  Sense strand starting at position 3132 of SEQ ID NO: 585726
guguaugaauagccucaua

SEQ ID NO: 662743 - RNA, 19 nt, Artificial Sequence
  Description of Artificial Sequence: Synthetic oligonucleotide
  Antisense strand to SEQ ID NO: 662742
uaugaggcuauucauacac

SEQ ID NO: 662744 - RNA, 19 nt, Artificial Sequence
  Description of Artificial Sequence: Synthetic oligonucleotide
  Sense strand starting at position 3180 of SEQ ID NO: 585726
aguauuauuuaggaacaga

SEQ ID NO: 662745 - RNA, 19 nt, Artificial Sequence
  Description of Artificial Sequence: Synthetic oligonucleotide
  Antisense strand to SEQ ID NO: 662744
ucuguuccuaaauaauacu

SEQ ID NO: 662746 - RNA, 19 nt, Artificial Sequence
  Description of Artificial Sequence: Synthetic oligonucleotide
  Sense strand starting at position 3279 of SEQ ID NO: 585726
gcaguaagucuuuauggag

SEQ ID NO: 662747 - RNA, 19 nt, Artificial Sequence
  Description of Artificial Sequence: Synthetic oligonucleotide
  Antisense strand to SEQ ID NO: 662746
cuccauaaagacuuacugc

SEQ ID NO: 662748 - RNA, 19 nt, Artificial Sequence
  Description of Artificial Sequence: Synthetic oligonucleotide
  Sense strand starting at position 3439 of SEQ ID NO: 585726
ccggcucagugcucauaaa

SEQ ID NO: 662749 - RNA, 19 nt, Artificial Sequence
  Description of Artificial Sequence: Synthetic oligonucleotide
  Antisense strand to SEQ ID NO: 662748
uuuaugagcacugagccgg

SEQ ID NO: 662750 - RNA, 19 nt, Artificial Sequence
  Description of Artificial Sequence: Synthetic oligonucleotide
  Sense strand starting at position 3480 of SEQ ID NO: 585726
gacuacaguugugacugaa

SEQ ID NO: 662751 - RNA, 19 nt, Artificial Sequence
  Description of Artificial Sequence: Synthetic oligonucleotide
  Antisense strand to SEQ ID NO: 662750
uucagucacaacuguaguc

SEQ ID NO: 662752 - RNA, 19 nt, Artificial Sequence
  Description of Artificial Sequence: Synthetic oligonucleotide
  Sense strand starting at position 3483 of SEQ ID NO: 585726
uacaguugugacugaaauc

SEQ ID NO: 662753 - RNA, 19 nt, Artificial Sequence
  Description of Artificial Sequence: Synthetic oligonucleotide
  Antisense strand to SEQ ID NO: 662752
gauuucagucacaacugua

SEQ ID NO: 662754 - RNA, 19 nt, Artificial Sequence
  Description of Artificial Sequence: Synthetic oligonucleotide
  Sense strand starting at position 3517 of SEQ ID NO: 585726
gcacuucuaugcucugaua

SEQ ID NO: 662755 - RNA, 19 nt, Artificial Sequence
  Description of Artificial Sequence: Synthetic oligonucleotide
  Antisense strand to SEQ ID NO: 662754
uaucagagcauagaagugc

SEQ ID NO: 662756 - RNA, 19 nt, Artificial Sequence
  Description of Artificial Sequence: Synthetic oligonucleotide
  Sense strand starting at position 3526 of SEQ ID NO: 585726
ugcucugauagguagcaua

SEQ ID NO: 662757 - RNA, 19 nt, Artificial Sequence
  Description of Artificial Sequence: Synthetic oligonucleotide
  Antisense strand to SEQ ID NO: 662756
uaugcuaccuaucagagca

SEQ ID NO: 662758 - RNA, 19 nt, Artificial Sequence
  Description of Artificial Sequence: Synthetic oligonucleotide
  Sense strand starting at position 3559 of SEQ ID NO: 585726
ugagaagugaucggccuga

SEQ ID NO: 662759 - RNA, 19 nt, Artificial Sequence
  Description of Artificial Sequence: Synthetic oligonucleotide
  Antisense strand to SEQ ID NO: 662758
ucaggccgaucacuucuca

SEQ ID NO: 662760 - RNA, 19 nt, Artificial Sequence
  Description of Artificial Sequence: Synthetic oligonucleotide
  Sense strand starting at position 3563 of SEQ ID NO: 585726
aagugaucggccugacauu

SEQ ID NO: 662761 - RNA, 19 nt, Artificial Sequence
  Description of Artificial Sequence: Synthetic oligonucleotide
  Antisense strand to SEQ ID NO: 662760
aaugucaggccgaucacuu

SEQ ID NO: 662762 - RNA, 19 nt, Artificial Sequence
  Description of Artificial Sequence: Synthetic oligonucleotide
  Sense strand starting at position 3655 of SEQ ID NO: 585726
gggaauggauucucuagca

SEQ ID NO: 662763 - RNA, 19 nt, Artificial Sequence
  Description of Artificial Sequence: Synthetic oligonucleotide
  Antisense strand to SEQ ID NO: 662762
ugcuagagaauccauuccc

SEQ ID NO: 662764 - RNA, 19 nt, Artificial Sequence
  Description of Artificial Sequence: Synthetic oligonucleotide
  Sense strand starting at position 3866 of SEQ ID NO: 585726
cucugagucuguuugcacu

SEQ ID NO: 662765 - RNA, 19 nt, Artificial Sequence
  Description of Artificial Sequence: Synthetic oligonucleotide
  Antisense strand to SEQ ID NO: 662764
agugcaaacagacucagag

SEQ ID NO: 662766 - RNA, 19 nt, Artificial Sequence
  Description of Artificial Sequence: Synthetic oligonucleotide
  Sense strand starting at position 3899 of SEQ ID NO: 585726
ccuuccaguuugucauauu

SEQ ID NO: 662767 - RNA, 19 nt, Artificial Sequence
  Description of Artificial Sequence: Synthetic oligonucleotide
  Antisense strand to SEQ ID NO: 662766
aauaugacaaacuggaagg

SEQ ID NO: 662768 - RNA, 19 nt, Artificial Sequence
  Description of Artificial Sequence: Synthetic oligonucleotide
  Sense strand starting at position 3900 of SEQ ID NO: 585726
cuuccaguuugucauauuu

SEQ ID NO: 662769 - RNA, 19 nt, Artificial Sequence
  Description of Artificial Sequence: Synthetic oligonucleotide
  Antisense strand to SEQ ID NO: 662768
aaauaugacaaacuggaag

SEQ ID NO: 662770 - RNA, 19 nt, Artificial Sequence
  Description of Artificial Sequence: Synthetic oligonucleotide
  Sense strand starting at position 3953 of SEQ ID NO: 585726
agucucauguuaucucuuu

SEQ ID NO: 662771 - RNA, 19 nt, Artificial Sequence
  Description of Artificial Sequence: Synthetic oligonucleotide
  Antisense strand to SEQ ID NO: 662770
aaagagauaacaugagacu

SEQ ID NO: 662772 - RNA, 19 nt, Artificial Sequence
  Description of Artificial Sequence: Synthetic oligonucleotide
  Sense strand starting at position 94 of SEQ ID NO: 585727
gagcccucgggcuaagagu

SEQ ID NO: 662773 - RNA, 19 nt, Artificial Sequence
  Description of Artificial Sequence: Synthetic oligonucleotide
  Antisense strand to SEQ ID NO: 662772
acucuuagcccgagggcuc

SEQ ID NO: 662774 - RNA, 19 nt, Artificial Sequence
  Description of Artificial Sequence: Synthetic oligonucleotide
  Sense strand starting at position 101 of SEQ ID NO: 585727
cgggcuaagaguugguaua

SEQ ID NO: 662775 - RNA, 19 nt, Artificial Sequence
  Description of Artificial Sequence: Synthetic oligonucleotide
  Antisense strand to SEQ ID NO: 662774
uauaccaacucuuagcccg

SEQ ID NO: 662776 - RNA, 19 nt, Artificial Sequence
  Description of Artificial Sequence: Synthetic oligonucleotide
  Sense strand starting at position 102 of SEQ ID NO: 585727
gggcuaagaguugguauau

SEQ ID NO: 662777 - RNA, 19 nt, Artificial Sequence
  Description of Artificial Sequence: Synthetic oligonucleotide
  Antisense strand to SEQ ID NO: 662776
auauaccaacucuuagccc

SEQ ID NO: 662778 - RNA, 19 nt, Artificial Sequence
  Description of Artificial Sequence: Synthetic oligonucleotide
  Sense strand starting at position 103 of SEQ ID NO: 585727
ggcuaagaguugguauaua

SEQ ID NO: 662779 - RNA, 19 nt, Artificial Sequence
  Description of Artificial Sequence: Synthetic oligonucleotide
  Antisense strand to SEQ ID NO: 662778
uauauaccaacucuuagcc

SEQ ID NO: 662780 - RNA, 19 nt, Artificial Sequence
  Description of Artificial Sequence: Synthetic oligonucleotide
  Sense strand starting at position 217 of SEQ ID NO: 585727
ggcagcuagacuugaaugu

SEQ ID NO: 662781 - RNA, 19 nt, Artificial Sequence
  Description of Artificial Sequence: Synthetic oligonucleotide
  Antisense strand to SEQ ID NO: 662780
acauucaagucuagcugcc

SEQ ID NO: 662782 - RNA, 19 nt, Artificial Sequence
  Description of Artificial Sequence: Synthetic oligonucleotide
  Sense strand starting at position 224 of SEQ ID NO: 585727
agacuugaaugugucccaa

SEQ ID NO: 662783 - RNA, 19 nt, Artificial Sequence
  Description of Artificial Sequence: Synthetic oligonucleotide
  Antisense strand to SEQ ID NO: 662782
uugggacacauucaagucu

SEQ ID NO: 662784 - RNA, 19 nt, Artificial Sequence
  Description of Artificial Sequence: Synthetic oligonucleotide
  Sense strand starting at position 395 of SEQ ID NO: 585727
uugcauaauugugccaauu

SEQ ID NO: 662785 - RNA, 19 nt, Artificial Sequence
  Description of Artificial Sequence: Synthetic oligonucleotide
  Antisense strand to SEQ ID NO: 662784
aauuggcacaauuaugcaa

SEQ ID NO: 662786 - RNA, 19 nt, Artificial Sequence
  Description of Artificial Sequence: Synthetic oligonucleotide
  Sense strand starting at position 424 of SEQ ID NO: 585727
uaauuaggucuaugaagac

SEQ ID NO: 662787 - RNA, 19 nt, Artificial Sequence
  Description of Artificial Sequence: Synthetic oligonucleotide
  Antisense strand to SEQ ID NO: 662786
gucuucauagaccuaauua

SEQ ID NO: 662788 - RNA, 19 nt, Artificial Sequence
  Description of Artificial Sequence: Synthetic oligonucleotide
  Sense strand starting at position 532 of SEQ ID NO: 585727
agggaaugggcugguuagu

SEQ ID NO: 662789 - RNA, 19 nt, Artificial Sequence
  Description of Artificial Sequence: Synthetic oligonucleotide
  Antisense strand to SEQ ID NO: 662788
acuaaccagcccauucccu

SEQ ID NO: 662790 - RNA, 19 nt, Artificial Sequence
  Description of Artificial Sequence: Synthetic oligonucleotide
  Sense strand starting at position 584 of SEQ ID NO: 585727
ggguagaugggugguaaga

SEQ ID NO: 662791 - RNA, 19 nt, Artificial Sequence
  Description of Artificial Sequence: Synthetic oligonucleotide
  Antisense strand to SEQ ID NO: 662790
ucuuaccacccaucuaccc

SEQ ID NO: 662792 - RNA, 19 nt, Artificial Sequence
  Description of Artificial Sequence: Synthetic oligonucleotide
  Sense strand starting at position 593 of SEQ ID NO: 585727
ggugguaagacugggaugu

SEQ ID NO: 662793 - RNA, 19 nt, Artificial Sequence
  Description of Artificial Sequence: Synthetic oligonucleotide
  Antisense strand to SEQ ID NO: 662792
acaucccagucuuaccacc

SEQ ID NO: 662794 - RNA, 19 nt, Artificial Sequence
  Description of Artificial Sequence: Synthetic oligonucleotide
  Sense strand starting at position 1910 of SEQ ID NO: 585727
gucucagucucgucaaauc

SEQ ID NO: 662795 - RNA, 19 nt, Artificial Sequence
  Description of Artificial Sequence: Synthetic oligonucleotide
  Antisense strand to SEQ ID NO: 662794
gauuugacgagacugagac

SEQ ID NO: 662796 - RNA, 19 nt, Artificial Sequence
  Description of Artificial Sequence: Synthetic oligonucleotide
  Sense strand starting at position 2251 of SEQ ID NO: 585727
cgagucauuccagguggcu

SEQ ID NO: 662797 - RNA, 19 nt, Artificial Sequence
  Description of Artificial Sequence: Synthetic oligonucleotide
  Antisense strand to SEQ ID NO: 662796
agccaccuggaaugacucg

SEQ ID NO: 662798 - RNA, 19 nt, Artificial Sequence
  Description of Artificial Sequence: Synthetic oligonucleotide
  Sense strand starting at position 2304 of SEQ ID NO: 585727
cacagauccugguuugugu

SEQ ID NO: 662799 - RNA, 19 nt, Artificial Sequence
  Description of Artificial Sequence: Synthetic oligonucleotide
  Antisense strand to SEQ ID NO: 662798
acacaaaccaggaucugug

SEQ ID NO: 662800 - RNA, 19 nt, Artificial Sequence
  Description of Artificial Sequence: Synthetic oligonucleotide
  Sense strand starting at position 2315 of SEQ ID NO: 585727
guuuguguggcuuuggcaa

SEQ ID NO: 662801 - RNA, 19 nt, Artificial Sequence
  Description of Artificial Sequence: Synthetic oligonucleotide
  Antisense strand to SEQ ID NO: 662800
uugccaaagccacacaaac

SEQ ID NO: 662802 - RNA, 19 nt, Artificial Sequence
  Description of Artificial Sequence: Synthetic oligonucleotide
  Sense strand starting at position 2331 of SEQ ID NO: 585727
caagccucugaguguugau

SEQ ID NO: 662803 - RNA, 19 nt, Artificial Sequence
  Description of Artificial Sequence: Synthetic oligonucleotide
  Antisense strand to SEQ ID NO: 662802
aucaacacucagaggcuug

SEQ ID NO: 662804 - RNA, 19 nt, Artificial Sequence
  Description of Artificial Sequence: Synthetic oligonucleotide
  Sense strand starting at position 2340 of SEQ ID NO: 585727
gaguguugaugugugguuu

SEQ ID NO: 662805 - RNA, 19 nt, Artificial Sequence
  Description of Artificial Sequence: Synthetic oligonucleotide
  Antisense strand to SEQ ID NO: 662804
aaaccacacaucaacacuc

SEQ ID NO: 662806 - RNA, 19 nt, Artificial Sequence
  Description of Artificial Sequence: Synthetic oligonucleotide
  Sense strand starting at position 2528 of SEQ ID NO: 585727
ccuuacuuucuucguaagu

SEQ ID NO: 662807 - RNA, 19 nt, Artificial Sequence
  Description of Artificial Sequence: Synthetic oligonucleotide
  Antisense strand to SEQ ID NO: 662806
acuuacgaagaaaguaagg

SEQ ID NO: 662808 - RNA, 19 nt, Artificial Sequence
  Description of Artificial Sequence: Synthetic oligonucleotide
  Sense strand starting at position 2621 of SEQ ID NO: 585727
uuggaauguacccgguauu

SEQ ID NO: 662809 - RNA, 19 nt, Artificial Sequence
  Description of Artificial Sequence: Synthetic oligonucleotide
  Antisense strand to SEQ ID NO: 662808
aauaccggguacauuccaa

SEQ ID NO: 662810 - RNA, 19 nt, Artificial Sequence
  Description of Artificial Sequence: Synthetic oligonucleotide
  Sense strand starting at position 2622 of SEQ ID NO: 585727
uggaauguacccgguauua

SEQ ID NO: 662811 - RNA, 19 nt, Artificial Sequence
  Description of Artificial Sequence: Synthetic oligonucleotide
  Antisense strand to SEQ ID NO: 662810
uaauaccggguacauucca

SEQ ID NO: 662812 - RNA, 19 nt, Artificial Sequence
  Description of Artificial Sequence: Synthetic oligonucleotide
  Sense strand starting at position 2624 of SEQ ID NO: 585727
gaauguacccgguauuauc

SEQ ID NO: 662813 - RNA, 19 nt, Artificial Sequence
  Description of Artificial Sequence: Synthetic oligonucleotide
  Antisense strand to SEQ ID NO: 662812
gauaauaccggguacauuc

SEQ ID NO: 662814 - RNA, 19 nt, Artificial Sequence
  Description of Artificial Sequence: Synthetic oligonucleotide
  Sense strand starting at position 2734 of SEQ ID NO: 585727
ggucuucugacuuguguuc

SEQ ID NO: 662815 - RNA, 19 nt, Artificial Sequence
  Description of Artificial Sequence: Synthetic oligonucleotide
  Antisense strand to SEQ ID NO: 662814
gaacacaagucagaagacc

SEQ ID NO: 662816 - RNA, 19 nt, Artificial Sequence
  Description of Artificial Sequence: Synthetic oligonucleotide
  Sense strand starting at position 2758 of SEQ ID NO: 585727
gugagucaacccugccuuu

SEQ ID NO: 662817 - RNA, 19 nt, Artificial Sequence
  Description of Artificial Sequence: Synthetic oligonucleotide
  Antisense strand to SEQ ID NO: 662816
aaaggcaggguugacucac

SEQ ID NO: 662818 - RNA, 19 nt, Artificial Sequence
  Description of Artificial Sequence: Synthetic oligonucleotide
  Sense strand starting at position 2978 of SEQ ID NO: 585727
guuugugcauaaguaaaca

SEQ ID NO: 662819 - RNA, 19 nt, Artificial Sequence
  Description of Artificial Sequence: Synthetic oligonucleotide
  Antisense strand to SEQ ID NO: 662818
uguuuacuuaugcacaaac

SEQ ID NO: 662820 - RNA, 19 nt, Artificial Sequence
  Description of Artificial Sequence: Synthetic oligonucleotide
  Sense strand starting at position 2989 of SEQ ID NO: 585727
aguaaacauccagaugucu

SEQ ID NO: 662821 - RNA, 19 nt, Artificial Sequence
  Description of Artificial Sequence: Synthetic oligonucleotide
  Antisense strand to SEQ ID NO: 662820
agacaucuggauguuuacu

SEQ ID NO: 662822 - RNA, 19 nt, Artificial Sequence
  Description of Artificial Sequence: Synthetic oligonucleotide
  Sense strand starting at position 3134 of SEQ ID NO: 585727
guguaugaauagccucaua

SEQ ID NO: 662823 - RNA, 19 nt, Artificial Sequence
  Description of Artificial Sequence: Synthetic oligonucleotide
  Antisense strand to SEQ ID NO: 662822
uaugaggcuauucauacac

SEQ ID NO: 662824 - RNA, 19 nt, Artificial Sequence
  Description of Artificial Sequence: Synthetic oligonucleotide
  Sense strand starting at position 3182 of SEQ ID NO: 585727
aguauuauuuaggaacaga

SEQ ID NO: 662825 - RNA, 19 nt, Artificial Sequence
  Description of Artificial Sequence: Synthetic oligonucleotide
  Antisense strand to SEQ ID NO: 662824
ucuguuccuaaauaauacu

SEQ ID NO: 662826 - RNA, 19 nt, Artificial Sequence
  Description of Artificial Sequence: Synthetic oligonucleotide
  Sense strand starting at position 3281 of SEQ ID NO: 585727
gcaguaagucuuuauggag

SEQ ID NO: 662827 - RNA, 19 nt, Artificial Sequence
  Description of Artificial Sequence: Synthetic oligonucleotide
  Antisense strand to SEQ ID NO: 662826
cuccauaaagacuuacugc

SEQ ID NO: 662828 - RNA, 19 nt, Artificial Sequence
  Description of Artificial Sequence: Synthetic oligonucleotide
  Sense strand starting at position 3441 of SEQ ID NO: 585727
ccggcucagugcucauaaa

SEQ ID NO: 662829 - RNA, 19 nt, Artificial Sequence
  Description of Artificial Sequence: Synthetic oligonucleotide
  Antisense strand to SEQ ID NO: 662828
uuuaugagcacugagccgg

SEQ ID NO: 662830 - RNA, 19 nt, Artificial Sequence
  Description of Artificial Sequence: Synthetic oligonucleotide
  Sense strand starting at position 3482 of SEQ ID NO: 585727
gacuacaguugugacugaa

SEQ ID NO: 662831 - RNA, 19 nt, Artificial Sequence
  Description of Artificial Sequence: Synthetic oligonucleotide
  Antisense strand to SEQ ID NO: 662830
uucagucacaacuguaguc

SEQ ID NO: 662832 - RNA, 19 nt, Artificial Sequence
  Description of Artificial Sequence: Synthetic oligonucleotide
  Sense strand starting at position 3485 of SEQ ID NO: 585727
uacaguugugacugaaauc

SEQ ID NO: 662833 - RNA, 19 nt, Artificial Sequence
  Description of Artificial Sequence: Synthetic oligonucleotide
  Antisense strand to SEQ ID NO: 662832
gauuucagucacaacugua

SEQ ID NO: 662834 - RNA, 19 nt, Artificial Sequence
  Description of Artificial Sequence: Synthetic oligonucleotide
  Sense strand starting at position 3519 of SEQ ID NO: 585727
gcacuucuaugcucugaua

SEQ ID NO: 662835 - RNA, 19 nt, Artificial Sequence
  Description of Artificial Sequence: Synthetic oligonucleotide
  Antisense strand to SEQ ID NO: 662834
uaucagagcauagaagugc

SEQ ID NO: 662836 - RNA, 19 nt, Artificial Sequence
  Description of Artificial Sequence: Synthetic oligonucleotide
  Sense strand starting at position 3528 of SEQ ID NO: 585727
ugcucugauagguagcaua

SEQ ID NO: 662837 - RNA, 19 nt, Artificial Sequence
  Description of Artificial Sequence: Synthetic oligonucleotide
  Antisense strand to SEQ ID NO: 662836
uaugcuaccuaucagagca

SEQ ID NO: 662838 - RNA, 19 nt, Artificial Sequence
  Description of Artificial Sequence: Synthetic oligonucleotide
  Sense strand starting at position 3561 of SEQ ID NO: 585727
ugagaagugaucggccuga

SEQ ID NO: 662839 - RNA, 19 nt, Artificial Sequence
  Description of Artificial Sequence: Synthetic oligonucleotide
  Antisense strand to SEQ ID NO: 662838
ucaggccgaucacuucuca

SEQ ID NO: 662840 - RNA, 19 nt, Artificial Sequence
  Description of Artificial Sequence: Synthetic oligonucleotide
  Sense strand starting at position 3565 of SEQ ID NO: 585727
aagugaucggccugacauu

SEQ ID NO: 662841 - RNA, 19 nt, Artificial Sequence
  Description of Artificial Sequence: Synthetic oligonucleotide
  Antisense strand to SEQ ID NO: 662840
aaugucaggccgaucacuu

SEQ ID NO: 662842 - RNA, 19 nt, Artificial Sequence
  Description of Artificial Sequence: Synthetic oligonucleotide
  Sense strand starting at position 3657 of SEQ ID NO: 585727
gggaauggauucucuagca

SEQ ID NO: 662843 - RNA, 19 nt, Artificial Sequence
  Description of Artificial Sequence: Synthetic oligonucleotide
  Antisense strand to SEQ ID NO: 662842
ugcuagagaauccauuccc

SEQ ID NO: 662844 - RNA, 19 nt, Artificial Sequence
  Description of Artificial Sequence: Synthetic oligonucleotide
  Sense strand starting at position 3868 of SEQ ID NO: 585727
cucugagucuguuugcacu

SEQ ID NO: 662845 - RNA, 19 nt, Artificial Sequence
  Description of Artificial Sequence: Synthetic oligonucleotide
  Antisense strand to SEQ ID NO: 662844
agugcaaacagacucagag

SEQ ID NO: 662846 - RNA, 19 nt, Artificial Sequence
  Description of Artificial Sequence: Synthetic oligonucleotide
  Sense strand starting at position 3901 of SEQ ID NO: 585727
ccuuccaguuugucauauu

SEQ ID NO: 662847 - RNA, 19 nt, Artificial Sequence
  Description of Artificial Sequence: Synthetic oligonucleotide
  Antisense strand to SEQ ID NO: 662846
aauaugacaaacuggaagg

SEQ ID NO: 662848 - RNA, 19 nt, Artificial Sequence
  Description of Artificial Sequence: Synthetic oligonucleotide
  Sense strand starting at position 3902 of SEQ ID NO: 585727
cuuccaguuugucauauuu

SEQ ID NO: 662849 - RNA, 19 nt, Artificial Sequence
  Description of Artificial Sequence: Synthetic oligonucleotide
  Antisense strand to SEQ ID NO: 662848
aaauaugacaaacuggaag

SEQ ID NO: 662850 - RNA, 19 nt, Artificial Sequence
  Description of Artificial Sequence: Synthetic oligonucleotide
  Sense strand starting at position 3955 of SEQ ID NO: 585727
agucucauguuaucucuuu

SEQ ID NO: 662851 - RNA, 19 nt, Artificial Sequence
  Description of Artificial Sequence: Synthetic oligonucleotide
  Antisense strand to SEQ ID NO: 662850
aaagagauaacaugagacu

SEQ ID NO: 662852 - RNA, 19 nt, Artificial Sequence
  Description of Artificial Sequence: Synthetic oligonucleotide
  Sense strand starting at position 750 of SEQ ID NO: 585728
ggugguuuccaguauacaa

SEQ ID NO: 662853 - RNA, 19 nt, Artificial Sequence
  Description of Artificial Sequence: Synthetic oligonucleotide
  Antisense strand to SEQ ID NO: 662852
uuguauacuggaaaccacc

SEQ ID NO: 662854 - RNA, 19 nt, Artificial Sequence
  Description of Artificial Sequence: Synthetic oligonucleotide
  Sense strand starting at position 752 of SEQ ID NO: 585728
ugguuuccaguauacaaga

SEQ ID NO: 662855 - RNA, 19 nt, Artificial Sequence
  Description of Artificial Sequence: Synthetic oligonucleotide
  Antisense strand to SEQ ID NO: 662854
ucuuguauacuggaaacca

SEQ ID NO: 662856 - RNA, 19 nt, Artificial Sequence
  Description of Artificial Sequence: Synthetic oligonucleotide
  Sense strand starting at position 816 of SEQ ID NO: 585728
ugaguacgcaccugaugaa

SEQ ID NO: 662857 - RNA, 19 nt, Artificial Sequence
  Description of Artificial Sequence: Synthetic oligonucleotide
  Antisense strand to SEQ ID NO: 662856
uucaucaggugcguacuca

SEQ ID NO: 662858 - RNA, 19 nt, Artificial Sequence
  Description of Artificial Sequence: Synthetic oligonucleotide
  Sense strand starting at position 903 of SEQ ID NO: 585728
gacccuagacuucgcagaa

SEQ ID NO: 662859 - RNA, 19 nt, Artificial Sequence
  Description of Artificial Sequence: Synthetic oligonucleotide
  Antisense strand to SEQ ID NO: 662858
uucugcgaagucuaggguc

SEQ ID NO: 662860 - RNA, 19 nt, Artificial Sequence
  Description of Artificial Sequence: Synthetic oligonucleotide
  Sense strand starting at position 904 of SEQ ID NO: 585728
acccuagacuucgcagaau

SEQ ID NO: 662861 - RNA, 19 nt, Artificial Sequence
  Description of Artificial Sequence: Synthetic oligonucleotide
  Antisense strand to SEQ ID NO: 662860
auucugcgaagucuagggu

SEQ ID NO: 662862 - RNA, 19 nt, Artificial Sequence
  Description of Artificial Sequence: Synthetic oligonucleotide
  Sense strand starting at position 1331 of SEQ ID NO: 585728
aucucaucugaaugugauc

SEQ ID NO: 662863 - RNA, 19 nt, Artificial Sequence
  Description of Artificial Sequence: Synthetic oligonucleotide
  Antisense strand to SEQ ID NO: 662862
gaucacauucagaugagau

SEQ ID NO: 662864 - RNA, 19 nt, Artificial Sequence
  Description of Artificial Sequence: Synthetic oligonucleotide
  Sense strand starting at position 1336 of SEQ ID NO: 585728
aucugaaugugauccauau

SEQ ID NO: 662865 - RNA, 19 nt, Artificial Sequence
  Description of Artificial Sequence: Synthetic oligonucleotide
  Antisense strand to SEQ ID NO: 662864
auauggaucacauucagau

SEQ ID NO: 662866 - RNA, 19 nt, Artificial Sequence
  Description of Artificial Sequence: Synthetic oligonucleotide
  Sense strand starting at position 1555 of SEQ ID NO: 585728
acagaucucgaccguuaua

SEQ ID NO: 662867 - RNA, 19 nt, Artificial Sequence
  Description of Artificial Sequence: Synthetic oligonucleotide
  Antisense strand to SEQ ID NO: 662866
uauaacggucgagaucugu

SEQ ID NO: 662868 - RNA, 19 nt, Artificial Sequence
  Description of Artificial Sequence: Synthetic oligonucleotide
  Sense strand starting at position 1639 of SEQ ID NO: 585728
cuccgauuaucuguaugac

SEQ ID NO: 662869 - RNA, 19 nt, Artificial Sequence
  Description of Artificial Sequence: Synthetic oligonucleotide
  Antisense strand to SEQ ID NO: 662868
gucauacagauaaucggag

SEQ ID NO: 662870 - RNA, 19 nt, Artificial Sequence
  Description of Artificial Sequence: Synthetic oligonucleotide
  Sense strand starting at position 1640 of SEQ ID NO: 585728
uccgauuaucuguaugacu

SEQ ID NO: 662871 - RNA, 19 nt, Artificial Sequence
  Description of Artificial Sequence: Synthetic oligonucleotide
  Antisense strand to SEQ ID NO: 662870
agucauacagauaaucgga

SEQ ID NO: 662872 - RNA, 19 nt, Artificial Sequence
  Description of Artificial Sequence: Synthetic oligonucleotide
  Sense strand starting at position 1648 of SEQ ID NO: 585728
ucuguaugacuguaugauu

SEQ ID NO: 662873 - RNA, 19 nt, Artificial Sequence
  Description of Artificial Sequence: Synthetic oligonucleotide
  Antisense strand to SEQ ID NO: 662872
aaucauacagucauacaga

SEQ ID NO: 662874 - RNA, 19 nt, Artificial Sequence
  Description of Artificial Sequence: Synthetic oligonucleotide
  Sense strand starting at position 1723 of SEQ ID NO: 585728
cucgauucucaccaguaca

SEQ ID NO: 662875 - RNA, 19 nt, Artificial Sequence
  Description of Artificial Sequence: Synthetic oligonucleotide
  Antisense strand to SEQ ID NO: 662874
uguacuggugagaaucgag

SEQ ID NO: 662876 - RNA, 19 nt, Artificial Sequence
  Description of Artificial Sequence: Synthetic oligonucleotide
  Sense strand starting at position 2107 of SEQ ID NO: 585728
gcugauacggucuaaguca

SEQ ID NO: 662877 - RNA, 19 nt, Artificial Sequence
  Description of Artificial Sequence: Synthetic oligonucleotide
  Antisense strand to SEQ ID NO: 662876
ugacuuagaccguaucagc

SEQ ID NO: 662878 - RNA, 19 nt, Artificial Sequence
  Description of Artificial Sequence: Synthetic oligonucleotide
  Sense strand starting at position 2133 of SEQ ID NO: 585728
augccaagggauugguaau

SEQ ID NO: 662879 - RNA, 19 nt, Artificial Sequence
  Description of Artificial Sequence: Synthetic oligonucleotide
  Antisense strand to SEQ ID NO: 662878
auuaccaaucccuuggcau

SEQ ID NO: 662880 - RNA, 19 nt, Artificial Sequence
  Description of Artificial Sequence: Synthetic oligonucleotide
  Sense strand starting at position 2134 of SEQ ID NO: 585728
ugccaagggauugguaaua

SEQ ID NO: 662881 - RNA, 19 nt, Artificial Sequence
  Description of Artificial Sequence: Synthetic oligonucleotide
  Antisense strand to SEQ ID NO: 662880
uauuaccaaucccuuggca

SEQ ID NO: 662882 - RNA, 19 nt, Artificial Sequence
  Description of Artificial Sequence: Synthetic oligonucleotide
  Sense strand starting at position 2200 of SEQ ID NO: 585728
guaguugucagucauaacc

SEQ ID NO: 662883 - RNA, 19 nt, Artificial Sequence
  Description of Artificial Sequence: Synthetic oligonucleotide
  Antisense strand to SEQ ID NO: 662882
gguuaugacugacaacuac

SEQ ID NO: 662884 - RNA, 19 nt, Artificial Sequence
  Description of Artificial Sequence: Synthetic oligonucleotide
  Sense strand starting at position 2227 of SEQ ID NO: 585728
aagcaauuugcucgggacu

SEQ ID NO: 662885 - RNA, 19 nt, Artificial Sequence
  Description of Artificial Sequence: Synthetic oligonucleotide
  Antisense strand to SEQ ID NO: 662884
agucccgagcaaauugcuu

SEQ ID NO: 662886 - RNA, 19 nt, Artificial Sequence
  Description of Artificial Sequence: Synthetic oligonucleotide
  Sense strand starting at position 2228 of SEQ ID NO: 585728
agcaauuugcucgggacua

SEQ ID NO: 662887 - RNA, 19 nt, Artificial Sequence
  Description of Artificial Sequence: Synthetic oligonucleotide
  Antisense strand to SEQ ID NO: 662886
uagucccgagcaaauugcu

SEQ ID NO: 662888 - RNA, 19 nt, Artificial Sequence
  Description of Artificial Sequence: Synthetic oligonucleotide
  Sense strand starting at position 2296 of SEQ ID NO: 585728
uuuagagaauguccggauu

SEQ ID NO: 662889 - RNA, 19 nt, Artificial Sequence
  Description of Artificial Sequence: Synthetic oligonucleotide
  Antisense strand to SEQ ID NO: 662888
aauccggacauucucuaaa

SEQ ID NO: 662890 - RNA, 19 nt, Artificial Sequence
  Description of Artificial Sequence: Synthetic oligonucleotide
  Sense strand starting at position 2299 of SEQ ID NO: 585728
agagaauguccggauugcu

SEQ ID NO: 662891 - RNA, 19 nt, Artificial Sequence
  Description of Artificial Sequence: Synthetic oligonucleotide
  Antisense strand to SEQ ID NO: 662890
agcaauccggacauucucu

SEQ ID NO: 662892 - RNA, 19 nt, Artificial Sequence
  Description of Artificial Sequence: Synthetic oligonucleotide
  Sense strand starting at position 2330 of SEQ ID NO: 585728
agcguauggcuccaaauca

SEQ ID NO: 662893 - RNA, 19 nt, Artificial Sequence
  Description of Artificial Sequence: Synthetic oligonucleotide
  Antisense strand to SEQ ID NO: 662892
ugauuuggagccauacgcu

SEQ ID NO: 662894 - RNA, 19 nt, Artificial Sequence
  Description of Artificial Sequence: Synthetic oligonucleotide
  Sense strand starting at position 2424 of SEQ ID NO: 585728
gggccaauccugugagggu

SEQ ID NO: 662895 - RNA, 19 nt, Artificial Sequence
  Description of Artificial Sequence: Synthetic oligonucleotide
  Antisense strand to SEQ ID NO: 662894
acccucacaggauuggccc

SEQ ID NO: 662896 - RNA, 19 nt, Artificial Sequence
  Description of Artificial Sequence: Synthetic oligonucleotide
  Sense strand starting at position 2428 of SEQ ID NO: 585728
caauccugugaggguuuaa

SEQ ID NO: 662897 - RNA, 19 nt, Artificial Sequence
  Description of Artificial Sequence: Synthetic oligonucleotide
  Antisense strand to SEQ ID NO: 662896
uuaaacccucacaggauug

SEQ ID NO: 662898 - RNA, 19 nt, Artificial Sequence
  Description of Artificial Sequence: Synthetic oligonucleotide
  Sense strand starting at position 2485 of SEQ ID NO: 585728
cauggugacugcucuacaa

SEQ ID NO: 662899 - RNA, 19 nt, Artificial Sequence
  Description of Artificial Sequence: Synthetic oligonucleotide
  Antisense strand to SEQ ID NO: 662898
uuguagagcagucaccaug

SEQ ID NO: 662900 - RNA, 19 nt, Artificial Sequence
  Description of Artificial Sequence: Synthetic oligonucleotide
  Sense strand starting at position 2487 of SEQ ID NO: 585728
uggugacugcucuacaauu

SEQ ID NO: 662901 - RNA, 19 nt, Artificial Sequence
  Description of Artificial Sequence: Synthetic oligonucleotide
  Antisense strand to SEQ ID NO: 662900
aauuguagagcagucacca

SEQ ID NO: 662902 - RNA, 19 nt, Artificial Sequence
  Description of Artificial Sequence: Synthetic oligonucleotide
  Sense strand starting at position 2945 of SEQ ID NO: 585728
aggaaagcucugggcucaa

SEQ ID NO: 662903 - RNA, 19 nt, Artificial Sequence
  Description of Artificial Sequence: Synthetic oligonucleotide
  Antisense strand to SEQ ID NO: 662902
uugagcccagagcuuuccu

SEQ ID NO: 662904 - RNA, 19 nt, Artificial Sequence
  Description of Artificial Sequence: Synthetic oligonucleotide
  Sense strand starting at position 3142 of SEQ ID NO: 585728
agcagaauuagguaacagu

SEQ ID NO: 662905 - RNA, 19 nt, Artificial Sequence
  Description of Artificial Sequence: Synthetic oligonucleotide
  Antisense strand to SEQ ID NO: 662904
acuguuaccuaauucugcu

SEQ ID NO: 662906 - RNA, 19 nt, Artificial Sequence
  Description of Artificial Sequence: Synthetic oligonucleotide
  Sense strand starting at position 3243 of SEQ ID NO: 585728
gaucccaugugacucaaga

SEQ ID NO: 662907 - RNA, 19 nt, Artificial Sequence
  Description of Artificial Sequence: Synthetic oligonucleotide
  Antisense strand to SEQ ID NO: 662906
ucuugagucacaugggauc

SEQ ID NO: 662908 - RNA, 19 nt, Artificial Sequence
  Description of Artificial Sequence: Synthetic oligonucleotide
  Sense strand starting at position 3264 of SEQ ID NO: 585728
aaggaaagaugagaaguua

SEQ ID NO: 662909 - RNA, 19 nt, Artificial Sequence
  Description of Artificial Sequence: Synthetic oligonucleotide
  Antisense strand to SEQ ID NO: 662908
uaacuucucaucuuuccuu

SEQ ID NO: 662910 - RNA, 19 nt, Artificial Sequence
  Description of Artificial Sequence: Synthetic oligonucleotide
  Sense strand starting at position 3342 of SEQ ID NO: 585728
ggaagauauugagagggaa

SEQ ID NO: 662911 - RNA, 19 nt, Artificial Sequence
  Description of Artificial Sequence: Synthetic oligonucleotide
  Antisense strand to SEQ ID NO: 662910
uucccucucaauaucuucc

SEQ ID NO: 662912 - RNA, 19 nt, Artificial Sequence
  Description of Artificial Sequence: Synthetic oligonucleotide
  Sense strand starting at position 3476 of SEQ ID NO: 585728
acgcgcauuccagaggaau

SEQ ID NO: 662913 - RNA, 19 nt, Artificial Sequence
  Description of Artificial Sequence: Synthetic oligonucleotide
  Antisense strand to SEQ ID NO: 662912
auuccucuggaaugcgcgu

SEQ ID NO: 662914 - RNA, 19 nt, Artificial Sequence
  Description of Artificial Sequence: Synthetic oligonucleotide
  Sense strand starting at position 3617 of SEQ ID NO: 585728
ggagacugauacgaaggaa

SEQ ID NO: 662915 - RNA, 19 nt, Artificial Sequence
  Description of Artificial Sequence: Synthetic oligonucleotide
  Antisense strand to SEQ ID NO: 662914
uuccuucguaucagucucc

SEQ ID NO: 662916 - RNA, 19 nt, Artificial Sequence
  Description of Artificial Sequence: Synthetic oligonucleotide
  Sense strand starting at position 3747 of SEQ ID NO: 585728
gcuggacugcugggagaua

SEQ ID NO: 662917 - RNA, 19 nt, Artificial Sequence
  Description of Artificial Sequence: Synthetic oligonucleotide
  Antisense strand to SEQ ID NO: 662916
uaucucccagcaguccagc

SEQ ID NO: 662918 - RNA, 19 nt, Artificial Sequence
  Description of Artificial Sequence: Synthetic oligonucleotide
  Sense strand starting at position 3855 of SEQ ID NO: 585728
ugaacuuaaugcuugucau

SEQ ID NO: 662919 - RNA, 19 nt, Artificial Sequence
  Description of Artificial Sequence: Synthetic oligonucleotide
  Antisense strand to SEQ ID NO: 662918
augacaagcauuaaguuca

SEQ ID NO: 662920 - RNA, 19 nt, Artificial Sequence
  Description of Artificial Sequence: Synthetic oligonucleotide
  Sense strand starting at position 3858 of SEQ ID NO: 585728
acuuaaugcuugucauaug

SEQ ID NO: 662921 - RNA, 19 nt, Artificial Sequence
  Description of Artificial Sequence: Synthetic oligonucleotide
  Antisense strand to SEQ ID NO: 662920
cauaugacaagcauuaagu

SEQ ID NO: 662922 - RNA, 19 nt, Artificial Sequence
  Description of Artificial Sequence: Synthetic oligonucleotide
  Sense strand starting at position 3868 of SEQ ID NO: 585728
ugucauaugguagguagau

SEQ ID NO: 662923 - RNA, 19 nt, Artificial Sequence
  Description of Artificial Sequence: Synthetic oligonucleotide
  Antisense strand to SEQ ID NO: 662922
aucuaccuaccauaugaca

SEQ ID NO: 662924 - RNA, 19 nt, Artificial Sequence
  Description of Artificial Sequence: Synthetic oligonucleotide
  Sense strand starting at position 3877 of SEQ ID NO: 585728
guagguagaugcuugauaa

SEQ ID NO: 662925 - RNA, 19 nt, Artificial Sequence
  Description of Artificial Sequence: Synthetic oligonucleotide
  Antisense strand to SEQ ID NO: 662924
uuaucaagcaucuaccuac

SEQ ID NO: 662926 - RNA, 19 nt, Artificial Sequence
  Description of Artificial Sequence: Synthetic oligonucleotide
  Sense strand starting at position 3878 of SEQ ID NO: 585728
uagguagaugcuugauaaa

SEQ ID NO: 662927 - RNA, 19 nt, Artificial Sequence
  Description of Artificial Sequence: Synthetic oligonucleotide
  Antisense strand to SEQ ID NO: 662926
uuuaucaagcaucuaccua

SEQ ID NO: 662928 - RNA, 19 nt, Artificial Sequence
  Description of Artificial Sequence: Synthetic oligonucleotide
  Sense strand starting at position 3905 of SEQ ID NO: 585728
auugaauggguacgggaaa

SEQ ID NO: 662929 - RNA, 19 nt, Artificial Sequence
  Description of Artificial Sequence: Synthetic oligonucleotide
  Antisense strand to SEQ ID NO: 662928
uuucccguacccauucaau

SEQ ID NO: 662930 - RNA, 19 nt, Artificial Sequence
  Description of Artificial Sequence: Synthetic oligonucleotide
  Sense strand starting at position 3957 of SEQ ID NO: 585728
agcagauaaccggaguuga

SEQ ID NO: 662931 - RNA, 19 nt, Artificial Sequence
  Description of Artificial Sequence: Synthetic oligonucleotide
  Antisense strand to SEQ ID NO: 662930
ucaacuccgguuaucugcu

SEQ ID NO: 662932 - RNA, 19 nt, Artificial Sequence
  Description of Artificial Sequence: Synthetic oligonucleotide
  Sense strand starting at position 16 of SEQ ID NO: 585729
uguguaugcagggaucaga

SEQ ID NO: 662933 - RNA, 19 nt, Artificial Sequence
  Description of Artificial Sequence: Synthetic oligonucleotide
  Antisense strand to SEQ ID NO: 662932
ucugaucccugcauacaca

SEQ ID NO: 662934 - RNA, 19 nt, Artificial Sequence
  Description of Artificial Sequence: Synthetic oligonucleotide
  Sense strand starting at position 27 of SEQ ID NO: 585729
ggaucagauuaaguaaugu

SEQ ID NO: 662935 - RNA, 19 nt, Artificial Sequence
  Description of Artificial Sequence: Synthetic oligonucleotide
  Antisense strand to SEQ ID NO: 662934
acauuacuuaaucugaucc

SEQ ID NO: 662936 - RNA, 19 nt, Artificial Sequence
  Description of Artificial Sequence: Synthetic oligonucleotide
  Sense strand starting at position 177 of SEQ ID NO: 585729
agggaaagaucagugcuca

SEQ ID NO: 662937 - RNA, 19 nt, Artificial Sequence
  Description of Artificial Sequence: Synthetic oligonucleotide
  Antisense strand to SEQ ID NO: 662936
ugagcacugaucuuucccu

SEQ ID NO: 662938 - RNA, 19 nt, Artificial Sequence
  Description of Artificial Sequence: Synthetic oligonucleotide
  Sense strand starting at position 178 of SEQ ID NO: 585729
gggaaagaucagugcucaa

SEQ ID NO: 662939 - RNA, 19 nt, Artificial Sequence
  Description of Artificial Sequence: Synthetic oligonucleotide
  Antisense strand to SEQ ID NO: 662938
uugagcacugaucuuuccc

SEQ ID NO: 662940 - RNA, 19 nt, Artificial Sequence
  Description of Artificial Sequence: Synthetic oligonucleotide
  Sense strand starting at position 182 of SEQ ID NO: 585729
aagaucagugcucaagcua

SEQ ID NO: 662941 - RNA, 19 nt, Artificial Sequence
  Description of Artificial Sequence: Synthetic oligonucleotide
  Antisense strand to SEQ ID NO: 662940
uagcuugagcacugaucuu

SEQ ID NO: 662942 - RNA, 19 nt, Artificial Sequence
  Description of Artificial Sequence: Synthetic oligonucleotide
  Sense strand starting at position 229 of SEQ ID NO: 585729
aggcacuaauaccuggaua

SEQ ID NO: 662943 - RNA, 19 nt, Artificial Sequence
  Description of Artificial Sequence: Synthetic oligonucleotide
  Antisense strand to SEQ ID NO: 662942
uauccagguauuagugccu

SEQ ID NO: 662944 - RNA, 19 nt, Artificial Sequence
  Description of Artificial Sequence: Synthetic oligonucleotide
  Sense strand starting at position 230 of SEQ ID NO: 585729
ggcacuaauaccuggauag

SEQ ID NO: 662945 - RNA, 19 nt, Artificial Sequence
  Description of Artificial Sequence: Synthetic oligonucleotide
  Antisense strand to SEQ ID NO: 662944
cuauccagguauuagugcc

SEQ ID NO: 662946 - RNA, 19 nt, Artificial Sequence
  Description of Artificial Sequence: Synthetic oligonucleotide
  Sense strand starting at position 231 of SEQ ID NO: 585729
gcacuaauaccuggauaga

SEQ ID NO: 662947 - RNA, 19 nt, Artificial Sequence
  Description of Artificial Sequence: Synthetic oligonucleotide
  Antisense strand to SEQ ID NO: 662946
ucuauccagguauuagugc

SEQ ID NO: 662948 - RNA, 19 nt, Artificial Sequence
  Description of Artificial Sequence: Synthetic oligonucleotide
  Sense strand starting at position 277 of SEQ ID NO: 585729
cuugguguuccucaaacca

SEQ ID NO: 662949 - RNA, 19 nt, Artificial Sequence
  Description of Artificial Sequence: Synthetic oligonucleotide
  Antisense strand to SEQ ID NO: 662948
ugguuugaggaacaccaag

SEQ ID NO: 662950 - RNA, 19 nt, Artificial Sequence
  Description of Artificial Sequence: Synthetic oligonucleotide
  Sense strand starting at position 334 of SEQ ID NO: 585729
gcaauuaaauuugugccua

SEQ ID NO: 662951 - RNA, 19 nt, Artificial Sequence
  Description of Artificial Sequence: Synthetic oligonucleotide
  Antisense strand to SEQ ID NO: 662950
uaggcacaaauuuaauugc

SEQ ID NO: 662952 - RNA, 19 nt, Artificial Sequence
  Description of Artificial Sequence: Synthetic oligonucleotide
  Sense strand starting at position 379 of SEQ ID NO: 585729
gaacuacugcucugggaag

SEQ ID NO: 662953 - RNA, 19 nt, Artificial Sequence
  Description of Artificial Sequence: Synthetic oligonucleotide
  Antisense strand to SEQ ID NO: 662952
cuucccagagcaguaguuc

SEQ ID NO: 662954 - RNA, 19 nt, Artificial Sequence
  Description of Artificial Sequence: Synthetic oligonucleotide
  Sense strand starting at position 381 of SEQ ID NO: 585729
acuacugcucugggaagga

SEQ ID NO: 662955 - RNA, 19 nt, Artificial Sequence
  Description of Artificial Sequence: Synthetic oligonucleotide
  Antisense strand to SEQ ID NO: 662954
uccuucccagagcaguagu

SEQ ID NO: 662956 - RNA, 19 nt, Artificial Sequence
  Description of Artificial Sequence: Synthetic oligonucleotide
  Sense strand starting at position 437 of SEQ ID NO: 585729
ccauauggauguucuuuau

SEQ ID NO: 662957 - RNA, 19 nt, Artificial Sequence
  Description of Artificial Sequence: Synthetic oligonucleotide
  Antisense strand to SEQ ID NO: 662956
auaaagaacauccauaugg

SEQ ID NO: 662958 - RNA, 19 nt, Artificial Sequence
  Description of Artificial Sequence: Synthetic oligonucleotide
  Sense strand starting at position 441 of SEQ ID NO: 585729
auggauguucuuuauacga

SEQ ID NO: 662959 - RNA, 19 nt, Artificial Sequence
  Description of Artificial Sequence: Synthetic oligonucleotide
  Antisense strand to SEQ ID NO: 662958
ucguauaaagaacauccau

SEQ ID NO: 662960 - RNA, 19 nt, Artificial Sequence
  Description of Artificial Sequence: Synthetic oligonucleotide
  Sense strand starting at position 503 of SEQ ID NO: 585729
aaacucuucgagcgcagaa

SEQ ID NO: 662961 - RNA, 19 nt, Artificial Sequence
  Description of Artificial Sequence: Synthetic oligonucleotide
  Antisense strand to SEQ ID NO: 662960
uucugcgcucgaagaguuu

SEQ ID NO: 662962 - RNA, 19 nt, Artificial Sequence
  Description of Artificial Sequence: Synthetic oligonucleotide
  Sense strand starting at position 505 of SEQ ID NO: 585729
acucuucgagcgcagaaau

SEQ ID NO: 662963 - RNA, 19 nt, Artificial Sequence
  Description of Artificial Sequence: Synthetic oligonucleotide
  Antisense strand to SEQ ID NO: 662962
auuucugcgcucgaagagu

SEQ ID NO: 662964 - RNA, 19 nt, Artificial Sequence
  Description of Artificial Sequence: Synthetic oligonucleotide
  Sense strand starting at position 591 of SEQ ID NO: 585729
ggcaguacggcuuauagga

SEQ ID NO: 662965 - RNA, 19 nt, Artificial Sequence
  Description of Artificial Sequence: Synthetic oligonucleotide
  Antisense strand to SEQ ID NO: 662964
uccuauaagccguacugcc

SEQ ID NO: 662966 - RNA, 19 nt, Artificial Sequence
  Description of Artificial Sequence: Synthetic oligonucleotide
  Sense strand starting at position 719 of SEQ ID NO: 585729
cccaaaugguucccaguca

SEQ ID NO: 662967 - RNA, 19 nt, Artificial Sequence
  Description of Artificial Sequence: Synthetic oligonucleotide
  Antisense strand to SEQ ID NO: 662966
ugacugggaaccauuuggg

SEQ ID NO: 662968 - RNA, 19 nt, Artificial Sequence
  Description of Artificial Sequence: Synthetic oligonucleotide
  Sense strand starting at position 1020 of SEQ ID NO: 585729
gcccauguuccucagaguu

SEQ ID NO: 662969 - RNA, 19 nt, Artificial Sequence
  Description of Artificial Sequence: Synthetic oligonucleotide
  Antisense strand to SEQ ID NO: 662968
aacucugaggaacaugggc

SEQ ID NO: 662970 - RNA, 19 nt, Artificial Sequence
  Description of Artificial Sequence: Synthetic oligonucleotide
  Sense strand starting at position 1047 of SEQ ID NO: 585729
ggaagacauuucuacguga

SEQ ID NO: 662971 - RNA, 19 nt, Artificial Sequence
  Description of Artificial Sequence: Synthetic oligonucleotide
  Antisense strand to SEQ ID NO: 662970
ucacguagaaaugucuucc

SEQ ID NO: 662972 - RNA, 19 nt, Artificial Sequence
  Description of Artificial Sequence: Synthetic oligonucleotide
  Sense strand starting at position 1062 of SEQ ID NO: 585729
gugaaaguuugauugcuuu

SEQ ID NO: 662973 - RNA, 19 nt, Artificial Sequence
  Description of Artificial Sequence: Synthetic oligonucleotide
  Antisense strand to SEQ ID NO: 662972
aaagcaaucaaacuuucac

SEQ ID NO: 662974 - RNA, 19 nt, Artificial Sequence
  Description of Artificial Sequence: Synthetic oligonucleotide
  Sense strand starting at position 1065 of SEQ ID NO: 585729
aaaguuugauugcuuuaag

SEQ ID NO: 662975 - RNA, 19 nt, Artificial Sequence
  Description of Artificial Sequence: Synthetic oligonucleotide
  Antisense strand to SEQ ID NO: 662974
cuuaaagcaaucaaacuuu

SEQ ID NO: 662976 - RNA, 19 nt, Artificial Sequence
  Description of Artificial Sequence: Synthetic oligonucleotide
  Sense strand starting at position 1068 of SEQ ID NO: 585729
guuugauugcuuuaaggga

SEQ ID NO: 662977 - RNA, 19 nt, Artificial Sequence
  Description of Artificial Sequence: Synthetic oligonucleotide
  Antisense strand to SEQ ID NO: 662976
ucccuuaaagcaaucaaac

SEQ ID NO: 662978 - RNA, 19 nt, Artificial Sequence
  Description of Artificial Sequence: Synthetic oligonucleotide
  Sense strand starting at position 1206 of SEQ ID NO: 585729
gggcucugugcgcccuaaa

SEQ ID NO: 662979 - RNA, 19 nt, Artificial Sequence
  Description of Artificial Sequence: Synthetic oligonucleotide
  Antisense strand to SEQ ID NO: 662978
uuuagggcgcacagagccc

SEQ ID NO: 662980 - RNA, 19 nt, Artificial Sequence
  Description of Artificial Sequence: Synthetic oligonucleotide
  Sense strand starting at position 2067 of SEQ ID NO: 585729
gcgcgauucgagaggucuc

SEQ ID NO: 662981 - RNA, 19 nt, Artificial Sequence
  Description of Artificial Sequence: Synthetic oligonucleotide
  Antisense strand to SEQ ID NO: 662980
gagaccucucgaaucgcgc

SEQ ID NO: 662982 - RNA, 19 nt, Artificial Sequence
  Description of Artificial Sequence: Synthetic oligonucleotide
  Sense strand starting at position 2078 of SEQ ID NO: 585729
gaggucuccucgccucaca

SEQ ID NO: 662983 - RNA, 19 nt, Artificial Sequence
  Description of Artificial Sequence: Synthetic oligonucleotide
  Antisense strand to SEQ ID NO: 662982
ugugaggcgaggagaccuc

SEQ ID NO: 662984 - RNA, 19 nt, Artificial Sequence
  Description of Artificial Sequence: Synthetic oligonucleotide
  Sense strand starting at position 2231 of SEQ ID NO: 585729
ggauuuaagucugccuagu

SEQ ID NO: 662985 - RNA, 19 nt, Artificial Sequence
  Description of Artificial Sequence: Synthetic oligonucleotide
  Antisense strand to SEQ ID NO: 662984
acuaggcagacuuaaaucc

SEQ ID NO: 662986 - RNA, 19 nt, Artificial Sequence
  Description of Artificial Sequence: Synthetic oligonucleotide
  Sense strand starting at position 2241 of SEQ ID NO: 585729
cugccuagucuguugcuaa

SEQ ID NO: 662987 - RNA, 19 nt, Artificial Sequence
  Description of Artificial Sequence: Synthetic oligonucleotide
  Antisense strand to SEQ ID NO: 662986
uuagcaacagacuaggcag

SEQ ID NO: 662988 - RNA, 19 nt, Artificial Sequence
  Description of Artificial Sequence: Synthetic oligonucleotide
  Sense strand starting at position 2244 of SEQ ID NO: 585729
ccuagucuguugcuaaaua

SEQ ID NO: 662989 - RNA, 19 nt, Artificial Sequence
  Description of Artificial Sequence: Synthetic oligonucleotide
  Antisense strand to SEQ ID NO: 662988
uauuuagcaacagacuagg

SEQ ID NO: 662990 - RNA, 19 nt, Artificial Sequence
  Description of Artificial Sequence: Synthetic oligonucleotide
  Sense strand starting at position 2252 of SEQ ID NO: 585729
guugcuaaauagucucuau

SEQ ID NO: 662991 - RNA, 19 nt, Artificial Sequence
  Description of Artificial Sequence: Synthetic oligonucleotide
  Antisense strand to SEQ ID NO: 662990
auagagacuauuuagcaac

SEQ ID NO: 662992 - RNA, 19 nt, Artificial Sequence
  Description of Artificial Sequence: Synthetic oligonucleotide
  Sense strand starting at position 2281 of SEQ ID NO: 585729
cuacuuauauuaccgaagu

SEQ ID NO: 662993 - RNA, 19 nt, Artificial Sequence
  Description of Artificial Sequence: Synthetic oligonucleotide
  Antisense strand to SEQ ID NO: 662992
acuucgguaauauaaguag

SEQ ID NO: 662994 - RNA, 19 nt, Artificial Sequence
  Description of Artificial Sequence: Synthetic oligonucleotide
  Sense strand starting at position 2368 of SEQ ID NO: 585729
gcggguauugaaugcagau

SEQ ID NO: 662995 - RNA, 19 nt, Artificial Sequence
  Description of Artificial Sequence: Synthetic oligonucleotide
  Antisense strand to SEQ ID NO: 662994
aucugcauucaauacccgc

SEQ ID NO: 662996 - RNA, 19 nt, Artificial Sequence
  Description of Artificial Sequence: Synthetic oligonucleotide
  Sense strand starting at position 2411 of SEQ ID NO: 585729
cgguaauagaaauguucua

SEQ ID NO: 662997 - RNA, 19 nt, Artificial Sequence
  Description of Artificial Sequence: Synthetic oligonucleotide
  Antisense strand to SEQ ID NO: 662996
uagaacauuucuauuaccg

SEQ ID NO: 662998 - RNA, 19 nt, Artificial Sequence
  Description of Artificial Sequence: Synthetic oligonucleotide
  Sense strand starting at position 2433 of SEQ ID NO: 585729
guggauuguggugacaauu

SEQ ID NO: 662999 - RNA, 19 nt, Artificial Sequence
  Description of Artificial Sequence: Synthetic oligonucleotide
  Antisense strand to SEQ ID NO: 662998
aauugucaccacaauccac

SEQ ID NO: 663000 - RNA, 19 nt, Artificial Sequence
  Description of Artificial Sequence: Synthetic oligonucleotide
  Sense strand starting at position 2439 of SEQ ID NO: 585729
uguggugacaauuguacaa

SEQ ID NO: 663001 - RNA, 19 nt, Artificial Sequence
  Description of Artificial Sequence: Synthetic oligonucleotide
  Antisense strand to SEQ ID NO: 663000
uuguacaauugucaccaca

SEQ ID NO: 663002 - RNA, 19 nt, Artificial Sequence
  Description of Artificial Sequence: Synthetic oligonucleotide
  Sense strand starting at position 2443 of SEQ ID NO: 585729
gugacaauuguacaacugu

SEQ ID NO: 663003 - RNA, 19 nt, Artificial Sequence
  Description of Artificial Sequence: Synthetic oligonucleotide
  Antisense strand to SEQ ID NO: 663002
acaguuguacaauugucac

SEQ ID NO: 663004 - RNA, 19 nt, Artificial Sequence
  Description of Artificial Sequence: Synthetic oligonucleotide
  Sense strand starting at position 2449 of SEQ ID NO: 585729
auuguacaacuguauaagu

SEQ ID NO: 663005 - RNA, 19 nt, Artificial Sequence
  Description of Artificial Sequence: Synthetic oligonucleotide
  Antisense strand to SEQ ID NO: 663004
acuuauacaguuguacaau

SEQ ID NO: 663006 - RNA, 19 nt, Artificial Sequence
  Description of Artificial Sequence: Synthetic oligonucleotide
  Sense strand starting at position 2451 of SEQ ID NO: 585729
uguacaacuguauaaguuu

SEQ ID NO: 663007 - RNA, 19 nt, Artificial Sequence
  Description of Artificial Sequence: Synthetic oligonucleotide
  Antisense strand to SEQ ID NO: 663006
aaacuuauacaguuguaca

SEQ ID NO: 663008 - RNA, 19 nt, Artificial Sequence
  Description of Artificial Sequence: Synthetic oligonucleotide
  Sense strand starting at position 2830 of SEQ ID NO: 585729
guaaacuuccaguggguga

SEQ ID NO: 663009 - RNA, 19 nt, Artificial Sequence
  Description of Artificial Sequence: Synthetic oligonucleotide
  Antisense strand to SEQ ID NO: 663008
ucacccacuggaaguuuac

SEQ ID NO: 663010 - RNA, 19 nt, Artificial Sequence
  Description of Artificial Sequence: Synthetic oligonucleotide
  Sense strand starting at position 2832 of SEQ ID NO: 585729
aaacuuccagugggugaau

SEQ ID NO: 663011 - RNA, 19 nt, Artificial Sequence
  Description of Artificial Sequence: Synthetic oligonucleotide
  Antisense strand to SEQ ID NO: 663010
auucacccacuggaaguuu

SEQ ID NO: 663012 - RNA, 19 nt, Artificial Sequence
  Description of Artificial Sequence: Synthetic oligonucleotide
  Sense strand starting at position 52 of SEQ ID NO: 585730
uguauaauacauugauggu

SEQ ID NO: 663013 - RNA, 19 nt, Artificial Sequence
  Description of Artificial Sequence: Synthetic oligonucleotide
  Antisense strand to SEQ ID NO: 663012
accaucaauguauuauaca

SEQ ID NO: 663014 - RNA, 19 nt, Artificial Sequence
  Description of Artificial Sequence: Synthetic oligonucleotide
  Sense strand starting at position 59 of SEQ ID NO: 585730
uacauugauggugggacua

SEQ ID NO: 663015 - RNA, 19 nt, Artificial Sequence
  Description of Artificial Sequence: Synthetic oligonucleotide
  Antisense strand to SEQ ID NO: 663014
uagucccaccaucaaugua

SEQ ID NO: 663016 - RNA, 19 nt, Artificial Sequence
  Description of Artificial Sequence: Synthetic oligonucleotide
  Sense strand starting at position 366 of SEQ ID NO: 585730
augcauaaucuggaugagu

SEQ ID NO: 663017 - RNA, 19 nt, Artificial Sequence
  Description of Artificial Sequence: Synthetic oligonucleotide
  Antisense strand to SEQ ID NO: 663016
acucauccagauuaugcau

SEQ ID NO: 663018 - RNA, 19 nt, Artificial Sequence
  Description of Artificial Sequence: Synthetic oligonucleotide
  Sense strand starting at position 368 of SEQ ID NO: 585730
gcauaaucuggaugaguau

SEQ ID NO: 663019 - RNA, 19 nt, Artificial Sequence
  Description of Artificial Sequence: Synthetic oligonucleotide
  Antisense strand to SEQ ID NO: 663018
auacucauccagauuaugc

SEQ ID NO: 663020 - RNA, 19 nt, Artificial Sequence
  Description of Artificial Sequence: Synthetic oligonucleotide
  Sense strand starting at position 371 of SEQ ID NO: 585730
uaaucuggaugaguaucaa

SEQ ID NO: 663021 - RNA, 19 nt, Artificial Sequence
  Description of Artificial Sequence: Synthetic oligonucleotide
  Antisense strand to SEQ ID NO: 663020
uugauacucauccagauua

SEQ ID NO: 663022 - RNA, 19 nt, Artificial Sequence
  Description of Artificial Sequence: Synthetic oligonucleotide
  Sense strand starting at position 390 of SEQ ID NO: 585730
auuaauuaugcugagugaa

SEQ ID NO: 663023 - RNA, 19 nt, Artificial Sequence
  Description of Artificial Sequence: Synthetic oligonucleotide
  Antisense strand to SEQ ID NO: 663022
uucacucagcauaauuaau

SEQ ID NO: 663024 - RNA, 19 nt, Artificial Sequence
  Description of Artificial Sequence: Synthetic oligonucleotide
  Sense strand starting at position 579 of SEQ ID NO: 585730
caugguuguuuccuaggaa

SEQ ID NO: 663025 - RNA, 19 nt, Artificial Sequence
  Description of Artificial Sequence: Synthetic oligonucleotide
  Antisense strand to SEQ ID NO: 663024
uuccuaggaaacaaccaug

SEQ ID NO: 663026 - RNA, 19 nt, Artificial Sequence
  Description of Artificial Sequence: Synthetic oligonucleotide
  Sense strand starting at position 582 of SEQ ID NO: 585730
gguuguuuccuaggaaaga

SEQ ID NO: 663027 - RNA, 19 nt, Artificial Sequence
  Description of Artificial Sequence: Synthetic oligonucleotide
  Antisense strand to SEQ ID NO: 663026
ucuuuccuaggaaacaacc

SEQ ID NO: 663028 - RNA, 19 nt, Artificial Sequence
  Description of Artificial Sequence: Synthetic oligonucleotide
  Sense strand starting at position 635 of SEQ ID NO: 585730
aacuguacgcuuuaaagcu

SEQ ID NO: 663029 - RNA, 19 nt, Artificial Sequence
  Description of Artificial Sequence: Synthetic oligonucleotide
  Antisense strand to SEQ ID NO: 663028
agcuuuaaagcguacaguu

SEQ ID NO: 663030 - RNA, 19 nt, Artificial Sequence
  Description of Artificial Sequence: Synthetic oligonucleotide
  Sense strand starting at position 1092 of SEQ ID NO: 585730
gagagacuaugucucaaau

SEQ ID NO: 663031 - RNA, 19 nt, Artificial Sequence
  Description of Artificial Sequence: Synthetic oligonucleotide
  Antisense strand to SEQ ID NO: 663030
auuugagacauagucucuc

SEQ ID NO: 663032 - RNA, 19 nt, Artificial Sequence
  Description of Artificial Sequence: Synthetic oligonucleotide
  Sense strand starting at position 1581 of SEQ ID NO: 585730
cguaauccgacggagcaua

SEQ ID NO: 663033 - RNA, 19 nt, Artificial Sequence
  Description of Artificial Sequence: Synthetic oligonucleotide
  Antisense strand to SEQ ID NO: 663032
uaugcuccgucggauuacg

SEQ ID NO: 663034 - RNA, 19 nt, Artificial Sequence
  Description of Artificial Sequence: Synthetic oligonucleotide
  Sense strand starting at position 1877 of SEQ ID NO: 585730
cccgaaucgcagccguaau

SEQ ID NO: 663035 - RNA, 19 nt, Artificial Sequence
  Description of Artificial Sequence: Synthetic oligonucleotide
  Antisense strand to SEQ ID NO: 663034
auuacggcugcgauucggg

SEQ ID NO: 663036 - RNA, 19 nt, Artificial Sequence
  Description of Artificial Sequence: Synthetic oligonucleotide
  Sense strand starting at position 2220 of SEQ ID NO: 585730
caggacgaagcguguauuu

SEQ ID NO: 663037 - RNA, 19 nt, Artificial Sequence
  Description of Artificial Sequence: Synthetic oligonucleotide
  Antisense strand to SEQ ID NO: 663036
aaauacacgcuucguccug

SEQ ID NO: 663038 - RNA, 19 nt, Artificial Sequence
  Description of Artificial Sequence: Synthetic oligonucleotide
  Sense strand starting at position 2287 of SEQ ID NO: 585730
gcgccuuuccaugcguaga

SEQ ID NO: 663039 - RNA, 19 nt, Artificial Sequence
  Description of Artificial Sequence: Synthetic oligonucleotide
  Antisense strand to SEQ ID NO: 663038
ucuacgcauggaaaggcgc

SEQ ID NO: 663040 - RNA, 19 nt, Artificial Sequence
  Description of Artificial Sequence: Synthetic oligonucleotide
  Sense strand starting at position 2300 of SEQ ID NO: 585730
cguagauugcccgccacuu

SEQ ID NO: 663041 - RNA, 19 nt, Artificial Sequence
  Description of Artificial Sequence: Synthetic oligonucleotide
  Antisense strand to SEQ ID NO: 663040
aaguggcgggcaaucuacg

SEQ ID NO: 663042 - RNA, 19 nt, Artificial Sequence
  Description of Artificial Sequence: Synthetic oligonucleotide
  Sense strand starting at position 2353 of SEQ ID NO: 585730
ccuucugagcguuaccaca

SEQ ID NO: 663043 - RNA, 19 nt, Artificial Sequence
  Description of Artificial Sequence: Synthetic oligonucleotide
  Antisense strand to SEQ ID NO: 663042
ugugguaacgcucagaagg

SEQ ID NO: 663044 - RNA, 19 nt, Artificial Sequence
  Description of Artificial Sequence: Synthetic oligonucleotide
  Sense strand starting at position 2400 of SEQ ID NO: 585730
agguuugauuugcaauuag

SEQ ID NO: 663045 - RNA, 19 nt, Artificial Sequence
  Description of Artificial Sequence: Synthetic oligonucleotide
  Antisense strand to SEQ ID NO: 663044
cuaauugcaaaucaaaccu

SEQ ID NO: 663046 - RNA, 19 nt, Artificial Sequence
  Description of Artificial Sequence: Synthetic oligonucleotide
  Sense strand starting at position 2408 of SEQ ID NO: 585730
uuugcaauuagggaaaguu

SEQ ID NO: 663047 - RNA, 19 nt, Artificial Sequence
  Description of Artificial Sequence: Synthetic oligonucleotide
  Antisense strand to SEQ ID NO: 663046
aacuuucccuaauugcaaa

SEQ ID NO: 663048 - RNA, 19 nt, Artificial Sequence
  Description of Artificial Sequence: Synthetic oligonucleotide
  Sense strand starting at position 2444 of SEQ ID NO: 585730
uuaggagaauucuaaggac

SEQ ID NO: 663049 - RNA, 19 nt, Artificial Sequence
  Description of Artificial Sequence: Synthetic oligonucleotide
  Antisense strand to SEQ ID NO: 663048
guccuuagaauucuccuaa

SEQ ID NO: 663050 - RNA, 19 nt, Artificial Sequence
  Description of Artificial Sequence: Synthetic oligonucleotide
  Sense strand starting at position 2504 of SEQ ID NO: 585730
gaguacuuacgaggaucua

SEQ ID NO: 663051 - RNA, 19 nt, Artificial Sequence
  Description of Artificial Sequence: Synthetic oligonucleotide
  Antisense strand to SEQ ID NO: 663050
uagauccucguaaguacuc

SEQ ID NO: 663052 - RNA, 19 nt, Artificial Sequence
  Description of Artificial Sequence: Synthetic oligonucleotide
  Sense strand starting at position 2505 of SEQ ID NO: 585730
aguacuuacgaggaucuau

SEQ ID NO: 663053 - RNA, 19 nt, Artificial Sequence
  Description of Artificial Sequence: Synthetic oligonucleotide
  Antisense strand to SEQ ID NO: 663052
auagauccucguaaguacu

SEQ ID NO: 663054 - RNA, 19 nt, Artificial Sequence
  Description of Artificial Sequence: Synthetic oligonucleotide
  Sense strand starting at position 2601 of SEQ ID NO: 585730
ggaguuugagaggguccau

SEQ ID NO: 663055 - RNA, 19 nt, Artificial Sequence
  Description of Artificial Sequence: Synthetic oligonucleotide
  Antisense strand to SEQ ID NO: 663054
auggacccucucaaacucc

SEQ ID NO: 663056 - RNA, 19 nt, Artificial Sequence
  Description of Artificial Sequence: Synthetic oligonucleotide
  Sense strand starting at position 2610 of SEQ ID NO: 585730
gaggguccaugucuccaaa

SEQ ID NO: 663057 - RNA, 19 nt, Artificial Sequence
  Description of Artificial Sequence: Synthetic oligonucleotide
  Antisense strand to SEQ ID NO: 663056
uuuggagacauggacccuc

SEQ ID NO: 663058 - RNA, 19 nt, Artificial Sequence
  Description of Artificial Sequence: Synthetic oligonucleotide
  Sense strand starting at position 2801 of SEQ ID NO: 585730
uuuccuuuguuaccagauu

SEQ ID NO: 663059 - RNA, 19 nt, Artificial Sequence
  Description of Artificial Sequence: Synthetic oligonucleotide
  Antisense strand to SEQ ID NO: 663058
aaucugguaacaaaggaaa

SEQ ID NO: 663060 - RNA, 19 nt, Artificial Sequence
  Description of Artificial Sequence: Synthetic oligonucleotide
  Sense strand starting at position 2861 of SEQ ID NO: 585730
aauguaguuuggcuuuaaa

SEQ ID NO: 663061 - RNA, 19 nt, Artificial Sequence
  Description of Artificial Sequence: Synthetic oligonucleotide
  Antisense strand to SEQ ID NO: 663060
uuuaaagccaaacuacauu

SEQ ID NO: 663062 - RNA, 19 nt, Artificial Sequence
  Description of Artificial Sequence: Synthetic oligonucleotide
  Sense strand starting at position 2864 of SEQ ID NO: 585730
guaguuuggcuuuaaacac

SEQ ID NO: 663063 - RNA, 19 nt, Artificial Sequence
  Description of Artificial Sequence: Synthetic oligonucleotide
  Antisense strand to SEQ ID NO: 663062
guguuuaaagccaaacuac

SEQ ID NO: 663064 - RNA, 19 nt, Artificial Sequence
  Description of Artificial Sequence: Synthetic oligonucleotide
  Sense strand starting at position 3077 of SEQ ID NO: 585730
guugcaucugcucagaacu

SEQ ID NO: 663065 - RNA, 19 nt, Artificial Sequence
  Description of Artificial Sequence: Synthetic oligonucleotide
  Antisense strand to SEQ ID NO: 663064
aguucugagcagaugcaac

SEQ ID NO: 663066 - RNA, 19 nt, Artificial Sequence
  Description of Artificial Sequence: Synthetic oligonucleotide
  Sense strand starting at position 3093 of SEQ ID NO: 585730
acuguuagugaagguguaa

SEQ ID NO: 663067 - RNA, 19 nt, Artificial Sequence
  Description of Artificial Sequence: Synthetic oligonucleotide
  Antisense strand to SEQ ID NO: 663066
uuacaccuucacuaacagu

SEQ ID NO: 663068 - RNA, 19 nt, Artificial Sequence
  Description of Artificial Sequence: Synthetic oligonucleotide
  Sense strand starting at position 3168 of SEQ ID NO: 585730
cccaaauaaucuccgauga

SEQ ID NO: 663069 - RNA, 19 nt, Artificial Sequence
  Description of Artificial Sequence: Synthetic oligonucleotide
  Antisense strand to SEQ ID NO: 663068
ucaucggagauuauuuggg

SEQ ID NO: 663070 - RNA, 19 nt, Artificial Sequence
  Description of Artificial Sequence: Synthetic oligonucleotide
  Sense strand starting at position 3169 of SEQ ID NO: 585730
ccaaauaaucuccgaugaa

SEQ ID NO: 663071 - RNA, 19 nt, Artificial Sequence
  Description of Artificial Sequence: Synthetic oligonucleotide
  Antisense strand to SEQ ID NO: 663070
uucaucggagauuauuugg

SEQ ID NO: 663072 - RNA, 19 nt, Artificial Sequence
  Description of Artificial Sequence: Synthetic oligonucleotide
  Sense strand starting at position 3200 of SEQ ID NO: 585730
cugauagaguguguaccau

SEQ ID NO: 663073 - RNA, 19 nt, Artificial Sequence
  Description of Artificial Sequence: Synthetic oligonucleotide
  Antisense strand to SEQ ID NO: 663072
augguacacacucuaucag

SEQ ID NO: 663074 - RNA, 19 nt, Artificial Sequence
  Description of Artificial Sequence: Synthetic oligonucleotide
  Sense strand starting at position 3408 of SEQ ID NO: 585730
uguuauuggcuguaaggca

SEQ ID NO: 663075 - RNA, 19 nt, Artificial Sequence
  Description of Artificial Sequence: Synthetic oligonucleotide
  Antisense strand to SEQ ID NO: 663074
ugccuuacagccaauaaca

SEQ ID NO: 663076 - RNA, 19 nt, Artificial Sequence
  Description of Artificial Sequence: Synthetic oligonucleotide
  Sense strand starting at position 3426 of SEQ ID NO: 585730
agcaaugugcacuggauuu

SEQ ID NO: 663077 - RNA, 19 nt, Artificial Sequence
  Description of Artificial Sequence: Synthetic oligonucleotide
  Antisense strand to SEQ ID NO: 663076
aaauccagugcacauugcu

SEQ ID NO: 663078 - RNA, 19 nt, Artificial Sequence
  Description of Artificial Sequence: Synthetic oligonucleotide
  Sense strand starting at position 3582 of SEQ ID NO: 585730
ucaggaaugccuugccuga

SEQ ID NO: 663079 - RNA, 19 nt, Artificial Sequence
  Description of Artificial Sequence: Synthetic oligonucleotide
  Antisense strand to SEQ ID NO: 663078
ucaggcaaggcauuccuga

SEQ ID NO: 663080 - RNA, 19 nt, Artificial Sequence
  Description of Artificial Sequence: Synthetic oligonucleotide
  Sense strand starting at position 3634 of SEQ ID NO: 585730
aguuucuacuacucuguga

SEQ ID NO: 663081 - RNA, 19 nt, Artificial Sequence
  Description of Artificial Sequence: Synthetic oligonucleotide
  Antisense strand to SEQ ID NO: 663080
ucacagaguaguagaaacu

SEQ ID NO: 663082 - RNA, 19 nt, Artificial Sequence
  Description of Artificial Sequence: Synthetic oligonucleotide
  Sense strand starting at position 3636 of SEQ ID NO: 585730
uuucuacuacucugugaga

SEQ ID NO: 663083 - RNA, 19 nt, Artificial Sequence
  Description of Artificial Sequence: Synthetic oligonucleotide
  Antisense strand to SEQ ID NO: 663082
ucucacagaguaguagaaa

SEQ ID NO: 663084 - RNA, 19 nt, Artificial Sequence
  Description of Artificial Sequence: Synthetic oligonucleotide
  Sense strand starting at position 3637 of SEQ ID NO: 585730
uucuacuacucugugagaa

SEQ ID NO: 663085 - RNA, 19 nt, Artificial Sequence
  Description of Artificial Sequence: Synthetic oligonucleotide
  Antisense strand to SEQ ID NO: 663084
uucucacagaguaguagaa

SEQ ID NO: 663086 - RNA, 19 nt, Artificial Sequence
  Description of Artificial Sequence: Synthetic oligonucleotide
  Sense strand starting at position 3638 of SEQ ID NO: 585730
ucuacuacucugugagaag

SEQ ID NO: 663087 - RNA, 19 nt, Artificial Sequence
  Description of Artificial Sequence: Synthetic oligonucleotide
  Antisense strand to SEQ ID NO: 663086
cuucucacagaguaguaga

SEQ ID NO: 663088 - RNA, 19 nt, Artificial Sequence
  Description of Artificial Sequence: Synthetic oligonucleotide
  Sense strand starting at position 3805 of SEQ ID NO: 585730
uaaggaagaguguguacau

SEQ ID NO: 663089 - RNA, 19 nt, Artificial Sequence
  Description of Artificial Sequence: Synthetic oligonucleotide
  Antisense strand to SEQ ID NO: 663088
auguacacacucuuccuua

SEQ ID NO: 663090 - RNA, 19 nt, Artificial Sequence
  Description of Artificial Sequence: Synthetic oligonucleotide
  Sense strand starting at position 3936 of SEQ ID NO: 585730
ucacuuugauauguagaua

SEQ ID NO: 663091 - RNA, 19 nt, Artificial Sequence
  Description of Artificial Sequence: Synthetic oligonucleotide
  Antisense strand to SEQ ID NO: 663090
uaucuacauaucaaaguga

SEQ ID NO: 663092 - RNA, 19 nt, Artificial Sequence
  Description of Artificial Sequence: Synthetic oligonucleotide
  Sense strand starting at position 283 of SEQ ID NO: 585731
guuucaguagcagggaaau

SEQ ID NO: 663093 - RNA, 19 nt, Artificial Sequence
  Description of Artificial Sequence: Synthetic oligonucleotide
  Antisense strand to SEQ ID NO: 663092
auuucccugcuacugaaac

SEQ ID NO: 663094 - RNA, 19 nt, Artificial Sequence
  Description of Artificial Sequence: Synthetic oligonucleotide
  Sense strand starting at position 429 of SEQ ID NO: 585731
cauagcuggguguaaauua

SEQ ID NO: 663095 - RNA, 19 nt, Artificial Sequence
  Description of Artificial Sequence: Synthetic oligonucleotide
  Antisense strand to SEQ ID NO: 663094
uaauuuacacccagcuaug

SEQ ID NO: 663096 - RNA, 19 nt, Artificial Sequence
  Description of Artificial Sequence: Synthetic oligonucleotide
  Sense strand starting at position 683 of SEQ ID NO: 585731
uuaaguuuggguuacaaau

SEQ ID NO: 663097 - RNA, 19 nt, Artificial Sequence
  Description of Artificial Sequence: Synthetic oligonucleotide
  Antisense strand to SEQ ID NO: 663096
auuuguaacccaaacuuaa

SEQ ID NO: 663098 - RNA, 19 nt, Artificial Sequence
  Description of Artificial Sequence: Synthetic oligonucleotide
  Sense strand starting at position 737 of SEQ ID NO: 585731
caaugaagucuucggcaaa

SEQ ID NO: 663099 - RNA, 19 nt, Artificial Sequence
  Description of Artificial Sequence: Synthetic oligonucleotide
  Antisense strand to SEQ ID NO: 663098
uuugccgaagacuucauug

SEQ ID NO: 663100 - RNA, 19 nt, Artificial Sequence
  Description of Artificial Sequence: Synthetic oligonucleotide
  Sense strand starting at position 740 of SEQ ID NO: 585731
ugaagucuucggcaaagau

SEQ ID NO: 663101 - RNA, 19 nt, Artificial Sequence
  Description of Artificial Sequence: Synthetic oligonucleotide
  Antisense strand to SEQ ID NO: 663100
aucuuugccgaagacuuca

SEQ ID NO: 663102 - RNA, 19 nt, Artificial Sequence
  Description of Artificial Sequence: Synthetic oligonucleotide
  Sense strand starting at position 788 of SEQ ID NO: 585731
ugcuacuaaccaugguaaa

SEQ ID NO: 663103 - RNA, 19 nt, Artificial Sequence
  Description of Artificial Sequence: Synthetic oligonucleotide
  Antisense strand to SEQ ID NO: 663102
uuuaccaugguuaguagca

SEQ ID NO: 663104 - RNA, 19 nt, Artificial Sequence
  Description of Artificial Sequence: Synthetic oligonucleotide
  Sense strand starting at position 789 of SEQ ID NO: 585731
gcuacuaaccaugguaaac

SEQ ID NO: 663105 - RNA, 19 nt, Artificial Sequence
  Description of Artificial Sequence: Synthetic oligonucleotide
  Antisense strand to SEQ ID NO: 663104
guuuaccaugguuaguagc

SEQ ID NO: 663106 - RNA, 19 nt, Artificial Sequence
  Description of Artificial Sequence: Synthetic oligonucleotide
  Sense strand starting at position 800 of SEQ ID NO: 585731
ugguaaaccuaaguagugu

SEQ ID NO: 663107 - RNA, 19 nt, Artificial Sequence
  Description of Artificial Sequence: Synthetic oligonucleotide
  Antisense strand to SEQ ID NO: 663106
acacuacuuagguuuacca

SEQ ID NO: 663108 - RNA, 19 nt, Artificial Sequence
  Description of Artificial Sequence: Synthetic oligonucleotide
  Sense strand starting at position 801 of SEQ ID NO: 585731
gguaaaccuaaguaguguu

SEQ ID NO: 663109 - RNA, 19 nt, Artificial Sequence
  Description of Artificial Sequence: Synthetic oligonucleotide
  Antisense strand to SEQ ID NO: 663108
aacacuacuuagguuuacc

SEQ ID NO: 663110 - RNA, 19 nt, Artificial Sequence
  Description of Artificial Sequence: Synthetic oligonucleotide
  Sense strand starting at position 950 of SEQ ID NO: 585731
uggcuauagauagggucau

SEQ ID NO: 663111 - RNA, 19 nt, Artificial Sequence
  Description of Artificial Sequence: Synthetic oligonucleotide
  Antisense strand to SEQ ID NO: 663110
augacccuaucuauagcca

SEQ ID NO: 663112 - RNA, 19 nt, Artificial Sequence
  Description of Artificial Sequence: Synthetic oligonucleotide
  Sense strand starting at position 1018 of SEQ ID NO: 585731
uuucucugucuauagagua

SEQ ID NO: 663113 - RNA, 19 nt, Artificial Sequence
  Description of Artificial Sequence: Synthetic oligonucleotide
  Antisense strand to SEQ ID NO: 663112
uacucuauagacagagaaa

SEQ ID NO: 663114 - RNA, 19 nt, Artificial Sequence
  Description of Artificial Sequence: Synthetic oligonucleotide
  Sense strand starting at position 1026 of SEQ ID NO: 585731
ucuauagaguacuugguuu

SEQ ID NO: 663115 - RNA, 19 nt, Artificial Sequence
  Description of Artificial Sequence: Synthetic oligonucleotide
  Antisense strand to SEQ ID NO: 663114
aaaccaaguacucuauaga

SEQ ID NO: 663116 - RNA, 19 nt, Artificial Sequence
  Description of Artificial Sequence: Synthetic oligonucleotide
  Sense strand starting at position 1099 of SEQ ID NO: 585731
augguacaauaguuagaga

SEQ ID NO: 663117 - RNA, 19 nt, Artificial Sequence
  Description of Artificial Sequence: Synthetic oligonucleotide
  Antisense strand to SEQ ID NO: 663116
ucucuaacuauuguaccau

SEQ ID NO: 663118 - RNA, 19 nt, Artificial Sequence
  Description of Artificial Sequence: Synthetic oligonucleotide
  Sense strand starting at position 1293 of SEQ ID NO: 585731
cuggaauuagcaggcauua

SEQ ID NO: 663119 - RNA, 19 nt, Artificial Sequence
  Description of Artificial Sequence: Synthetic oligonucleotide
  Antisense strand to SEQ ID NO: 663118
uaaugccugcuaauuccag

SEQ ID NO: 663120 - RNA, 19 nt, Artificial Sequence
  Description of Artificial Sequence: Synthetic oligonucleotide
  Sense strand starting at position 1295 of SEQ ID NO: 585731
ggaauuagcaggcauuauc

SEQ ID NO: 663121 - RNA, 19 nt, Artificial Sequence
  Description of Artificial Sequence: Synthetic oligonucleotide
  Antisense strand to SEQ ID NO: 663120
gauaaugccugcuaauucc

SEQ ID NO: 663122 - RNA, 19 nt, Artificial Sequence
  Description of Artificial Sequence: Synthetic oligonucleotide
  Sense strand starting at position 1666 of SEQ ID NO: 585731
uugugagacuuaccagauu

SEQ ID NO: 663123 - RNA, 19 nt, Artificial Sequence
  Description of Artificial Sequence: Synthetic oligonucleotide
  Antisense strand to SEQ ID NO: 663122
aaucugguaagucucacaa

SEQ ID NO: 663124 - RNA, 19 nt, Artificial Sequence
  Description of Artificial Sequence: Synthetic oligonucleotide
  Sense strand starting at position 1675 of SEQ ID NO: 585731
uuaccagauuaguuacaca

SEQ ID NO: 663125 - RNA, 19 nt, Artificial Sequence
  Description of Artificial Sequence: Synthetic oligonucleotide
  Antisense strand to SEQ ID NO: 663124
uguguaacuaaucugguaa

SEQ ID NO: 663126 - RNA, 19 nt, Artificial Sequence
  Description of Artificial Sequence: Synthetic oligonucleotide
  Sense strand starting at position 1683 of SEQ ID NO: 585731
uuaguuacacacgacuuua

SEQ ID NO: 663127 - RNA, 19 nt, Artificial Sequence
  Description of Artificial Sequence: Synthetic oligonucleotide
  Antisense strand to SEQ ID NO: 663126
uaaagucguguguaacuaa

SEQ ID NO: 663128 - RNA, 19 nt, Artificial Sequence
  Description of Artificial Sequence: Synthetic oligonucleotide
  Sense strand starting at position 1763 of SEQ ID NO: 585731
auugacaagcuucggaaua

SEQ ID NO: 663129 - RNA, 19 nt, Artificial Sequence
  Description of Artificial Sequence: Synthetic oligonucleotide
  Antisense strand to SEQ ID NO: 663128
uauuccgaagcuugucaau

SEQ ID NO: 663130 - RNA, 19 nt, Artificial Sequence
  Description of Artificial Sequence: Synthetic oligonucleotide
  Sense strand starting at position 1924 of SEQ ID NO: 585731
gcuauauuaggauauacuu

SEQ ID NO: 663131 - RNA, 19 nt, Artificial Sequence
  Description of Artificial Sequence: Synthetic oligonucleotide
  Antisense strand to SEQ ID NO: 663130
aaguauauccuaauauagc

SEQ ID NO: 663132 - RNA, 19 nt, Artificial Sequence
  Description of Artificial Sequence: Synthetic oligonucleotide
  Sense strand starting at position 1978 of SEQ ID NO: 585731
accuuugaaugcuugaaag

SEQ ID NO: 663133 - RNA, 19 nt, Artificial Sequence
  Description of Artificial Sequence: Synthetic oligonucleotide
  Antisense strand to SEQ ID NO: 663132
cuuucaagcauucaaaggu

SEQ ID NO: 663134 - RNA, 19 nt, Artificial Sequence
  Description of Artificial Sequence: Synthetic oligonucleotide
  Sense strand starting at position 1980 of SEQ ID NO: 585731
cuuugaaugcuugaaagcu

SEQ ID NO: 663135 - RNA, 19 nt, Artificial Sequence
  Description of Artificial Sequence: Synthetic oligonucleotide
  Antisense strand to SEQ ID NO: 663134
agcuuucaagcauucaaag

SEQ ID NO: 663136 - RNA, 19 nt, Artificial Sequence
  Description of Artificial Sequence: Synthetic oligonucleotide
  Sense strand starting at position 2000 of SEQ ID NO: 585731
guaacaguuccauaagagc

SEQ ID NO: 663137 - RNA, 19 nt, Artificial Sequence
  Description of Artificial Sequence: Synthetic oligonucleotide
  Antisense strand to SEQ ID NO: 663136
gcucuuauggaacuguuac

SEQ ID NO: 663138 - RNA, 19 nt, Artificial Sequence
  Description of Artificial Sequence: Synthetic oligonucleotide
  Sense strand starting at position 2062 of SEQ ID NO: 585731
gacuaaagguuaguucuua

SEQ ID NO: 663139 - RNA, 19 nt, Artificial Sequence
  Description of Artificial Sequence: Synthetic oligonucleotide
  Antisense strand to SEQ ID NO: 663138
uaagaacuaaccuuuaguc

SEQ ID NO: 663140 - RNA, 19 nt, Artificial Sequence
  Description of Artificial Sequence: Synthetic oligonucleotide
  Sense strand starting at position 2066 of SEQ ID NO: 585731
aaagguuaguucuuagaag

SEQ ID NO: 663141 - RNA, 19 nt, Artificial Sequence
  Description of Artificial Sequence: Synthetic oligonucleotide
  Antisense strand to SEQ ID NO: 663140
cuucuaagaacuaaccuuu

SEQ ID NO: 663142 - RNA, 19 nt, Artificial Sequence
  Description of Artificial Sequence: Synthetic oligonucleotide
  Sense strand starting at position 2137 of SEQ ID NO: 585731
acacaugcagucugaaacu

SEQ ID NO: 663143 - RNA, 19 nt, Artificial Sequence
  Description of Artificial Sequence: Synthetic oligonucleotide
  Antisense strand to SEQ ID NO: 663142
aguuucagacugcaugugu

SEQ ID NO: 663144 - RNA, 19 nt, Artificial Sequence
  Description of Artificial Sequence: Synthetic oligonucleotide
  Sense strand starting at position 2414 of SEQ ID NO: 585731
caaggaaguugguuagagu

SEQ ID NO: 663145 - RNA, 19 nt, Artificial Sequence
  Description of Artificial Sequence: Synthetic oligonucleotide
  Antisense strand to SEQ ID NO: 663144
acucuaaccaacuuccuug

SEQ ID NO: 663146 - RNA, 19 nt, Artificial Sequence
  Description of Artificial Sequence: Synthetic oligonucleotide
  Sense strand starting at position 2423 of SEQ ID NO: 585731
ugguuagaguacucucaga

SEQ ID NO: 663147 - RNA, 19 nt, Artificial Sequence
  Description of Artificial Sequence: Synthetic oligonucleotide
  Antisense strand to SEQ ID NO: 663146
ucugagaguacucuaacca

SEQ ID NO: 663148 - RNA, 19 nt, Artificial Sequence
  Description of Artificial Sequence: Synthetic oligonucleotide
  Sense strand starting at position 2478 of SEQ ID NO: 585731
ggucuaucgagacagcuga

SEQ ID NO: 663149 - RNA, 19 nt, Artificial Sequence
  Description of Artificial Sequence: Synthetic oligonucleotide
  Antisense strand to SEQ ID NO: 663148
ucagcugucucgauagacc

SEQ ID NO: 663150 - RNA, 19 nt, Artificial Sequence
  Description of Artificial Sequence: Synthetic oligonucleotide
  Sense strand starting at position 2527 of SEQ ID NO: 585731
aagugucugcuuugagaag

SEQ ID NO: 663151 - RNA, 19 nt, Artificial Sequence
  Description of Artificial Sequence: Synthetic oligonucleotide
  Antisense strand to SEQ ID NO: 663150
cuucucaaagcagacacuu

SEQ ID NO: 663152 - RNA, 19 nt, Artificial Sequence
  Description of Artificial Sequence: Synthetic oligonucleotide
  Sense strand starting at position 2533 of SEQ ID NO: 585731
cugcuuugagaaggaaaca

SEQ ID NO: 663153 - RNA, 19 nt, Artificial Sequence
  Description of Artificial Sequence: Synthetic oligonucleotide
  Antisense strand to SEQ ID NO: 663152
uguuuccuucucaaagcag

SEQ ID NO: 663154 - RNA, 19 nt, Artificial Sequence
  Description of Artificial Sequence: Synthetic oligonucleotide
  Sense strand starting at position 2545 of SEQ ID NO: 585731
ggaaacauuguacaagcuu

SEQ ID NO: 663155 - RNA, 19 nt, Artificial Sequence
  Description of Artificial Sequence: Synthetic oligonucleotide
  Antisense strand to SEQ ID NO: 663154
aagcuuguacaauguuucc

SEQ ID NO: 663156 - RNA, 19 nt, Artificial Sequence
  Description of Artificial Sequence: Synthetic oligonucleotide
  Sense strand starting at position 2956 of SEQ ID NO: 585731
uaagguucucccuaugagu

SEQ ID NO: 663157 - RNA, 19 nt, Artificial Sequence
  Description of Artificial Sequence: Synthetic oligonucleotide
  Antisense strand to SEQ ID NO: 663156
acucauagggagaaccuua

SEQ ID NO: 663158 - RNA, 19 nt, Artificial Sequence
  Description of Artificial Sequence: Synthetic oligonucleotide
  Sense strand starting at position 2958 of SEQ ID NO: 585731
agguucucccuaugaguaa

SEQ ID NO: 663159 - RNA, 19 nt, Artificial Sequence
  Description of Artificial Sequence: Synthetic oligonucleotide
  Antisense strand to SEQ ID NO: 663158
uuacucauagggagaaccu

SEQ ID NO: 663160 - RNA, 19 nt, Artificial Sequence
  Description of Artificial Sequence: Synthetic oligonucleotide
  Sense strand starting at position 2973 of SEQ ID NO: 585731
guaacacaugcaugagguu

SEQ ID NO: 663161 - RNA, 19 nt, Artificial Sequence
  Description of Artificial Sequence: Synthetic oligonucleotide
  Antisense strand to SEQ ID NO: 663160
aaccucaugcauguguuac

SEQ ID NO: 663162 - RNA, 19 nt, Artificial Sequence
  Description of Artificial Sequence: Synthetic oligonucleotide
  Sense strand starting at position 3102 of SEQ ID NO: 585731
agacaugccaugugaaaug

SEQ ID NO: 663163 - RNA, 19 nt, Artificial Sequence
  Description of Artificial Sequence: Synthetic oligonucleotide
  Antisense strand to SEQ ID NO: 663162
cauuucacauggcaugucu

SEQ ID NO: 663164 - RNA, 19 nt, Artificial Sequence
  Description of Artificial Sequence: Synthetic oligonucleotide
  Sense strand starting at position 3182 of SEQ ID NO: 585731
auccaaguauguucuaagu

SEQ ID NO: 663165 - RNA, 19 nt, Artificial Sequence
  Description of Artificial Sequence: Synthetic oligonucleotide
  Antisense strand to SEQ ID NO: 663164
acuuagaacauacuuggau

SEQ ID NO: 663166 - RNA, 19 nt, Artificial Sequence
  Description of Artificial Sequence: Synthetic oligonucleotide
  Sense strand starting at position 3496 of SEQ ID NO: 585731
guuggacgugacugaauau

SEQ ID NO: 663167 - RNA, 19 nt, Artificial Sequence
  Description of Artificial Sequence: Synthetic oligonucleotide
  Antisense strand to SEQ ID NO: 663166
auauucagucacguccaac

SEQ ID NO: 663168 - RNA, 19 nt, Artificial Sequence
  Description of Artificial Sequence: Synthetic oligonucleotide
  Sense strand starting at position 3505 of SEQ ID NO: 585731
gacugaauauggcugaaua

SEQ ID NO: 663169 - RNA, 19 nt, Artificial Sequence
  Description of Artificial Sequence: Synthetic oligonucleotide
  Antisense strand to SEQ ID NO: 663168
uauucagccauauucaguc

SEQ ID NO: 663170 - RNA, 19 nt, Artificial Sequence
  Description of Artificial Sequence: Synthetic oligonucleotide
  Sense strand starting at position 3507 of SEQ ID NO: 585731
cugaauauggcugaauagu

SEQ ID NO: 663171 - RNA, 19 nt, Artificial Sequence
  Description of Artificial Sequence: Synthetic oligonucleotide
  Antisense strand to SEQ ID NO: 663170
acuauucagccauauucag

SEQ ID NO: 663172 - RNA, 19 nt, Artificial Sequence
  Description of Artificial Sequence: Synthetic oligonucleotide
  Sense strand starting at position 318 of SEQ ID NO: 585732
cagguaaugugcccaagau

SEQ ID NO: 663173 - RNA, 19 nt, Artificial Sequence
  Description of Artificial Sequence: Synthetic oligonucleotide
  Antisense strand to SEQ ID NO: 663172
aucuugggcacauuaccug

SEQ ID NO: 663174 - RNA, 19 nt, Artificial Sequence
  Description of Artificial Sequence: Synthetic oligonucleotide
  Sense strand starting at position 319 of SEQ ID NO: 585732
agguaaugugcccaagauc

SEQ ID NO: 663175 - RNA, 19 nt, Artificial Sequence
  Description of Artificial Sequence: Synthetic oligonucleotide
  Antisense strand to SEQ ID NO: 663174
gaucuugggcacauuaccu

SEQ ID NO: 663176 - RNA, 19 nt, Artificial Sequence
  Description of Artificial Sequence: Synthetic oligonucleotide
  Sense strand starting at position 389 of SEQ ID NO: 585732
gcccacagccuguaauaaa

SEQ ID NO: 663177 - RNA, 19 nt, Artificial Sequence
  Description of Artificial Sequence: Synthetic oligonucleotide
  Antisense strand to SEQ ID NO: 663176
uuuauuacaggcugugggc

SEQ ID NO: 663178 - RNA, 19 nt, Artificial Sequence
  Description of Artificial Sequence: Synthetic oligonucleotide
  Sense strand starting at position 954 of SEQ ID NO: 585732
uuaaguuucccauguagau

SEQ ID NO: 663179 - RNA, 19 nt, Artificial Sequence
  Description of Artificial Sequence: Synthetic oligonucleotide
  Antisense strand to SEQ ID NO: 663178
aucuacaugggaaacuuaa

SEQ ID NO: 663180 - RNA, 19 nt, Artificial Sequence
  Description of Artificial Sequence: Synthetic oligonucleotide
  Sense strand starting at position 1122 of SEQ ID NO: 585732
ccaauuaacgugugaacua

SEQ ID NO: 663181 - RNA, 19 nt, Artificial Sequence
  Description of Artificial Sequence: Synthetic oligonucleotide
  Antisense strand to SEQ ID NO: 663180
uaguucacacguuaauugg

SEQ ID NO: 663182 - RNA, 19 nt, Artificial Sequence
  Description of Artificial Sequence: Synthetic oligonucleotide
  Sense strand starting at position 1151 of SEQ ID NO: 585732
cuaguaaacuacucuuugu

SEQ ID NO: 663183 - RNA, 19 nt, Artificial Sequence
  Description of Artificial Sequence: Synthetic oligonucleotide
  Antisense strand to SEQ ID NO: 663182
acaaagaguaguuuacuag

SEQ ID NO: 663184 - RNA, 19 nt, Artificial Sequence
  Description of Artificial Sequence: Synthetic oligonucleotide
  Sense strand starting at position 1234 of SEQ ID NO: 585732
gauacauguuaacuuaggu

SEQ ID NO: 663185 - RNA, 19 nt, Artificial Sequence
  Description of Artificial Sequence: Synthetic oligonucleotide
  Antisense strand to SEQ ID NO: 663184
accuaaguuaacauguauc

SEQ ID NO: 663186 - RNA, 19 nt, Artificial Sequence
  Description of Artificial Sequence: Synthetic oligonucleotide
  Sense strand starting at position 1286 of SEQ ID NO: 585732
ggcuguuuagcccaaauau

SEQ ID NO: 663187 - RNA, 19 nt, Artificial Sequence
  Description of Artificial Sequence: Synthetic oligonucleotide
  Antisense strand to SEQ ID NO: 663186
auauuugggcuaaacagcc

SEQ ID NO: 663188 - RNA, 19 nt, Artificial Sequence
  Description of Artificial Sequence: Synthetic oligonucleotide
  Sense strand starting at position 1337 of SEQ ID NO: 585732
ggauaacucagaggagugu

SEQ ID NO: 663189 - RNA, 19 nt, Artificial Sequence
  Description of Artificial Sequence: Synthetic oligonucleotide
  Antisense strand to SEQ ID NO: 663188
acacuccucugaguuaucc

SEQ ID NO: 663190 - RNA, 19 nt, Artificial Sequence
  Description of Artificial Sequence: Synthetic oligonucleotide
  Sense strand starting at position 1439 of SEQ ID NO: 585732
cucacagcucuaugaagua

SEQ ID NO: 663191 - RNA, 19 nt, Artificial Sequence
  Description of Artificial Sequence: Synthetic oligonucleotide
  Antisense strand to SEQ ID NO: 663190
uacuucauagagcugugag

SEQ ID NO: 663192 - RNA, 19 nt, Artificial Sequence
  Description of Artificial Sequence: Synthetic oligonucleotide
  Sense strand starting at position 1446 of SEQ ID NO: 585732
cucuaugaaguaugacuau

SEQ ID NO: 663193 - RNA, 19 nt, Artificial Sequence
  Description of Artificial Sequence: Synthetic oligonucleotide
  Antisense strand to SEQ ID NO: 663192
auagucauacuucauagag

SEQ ID NO: 663194 - RNA, 19 nt, Artificial Sequence
  Description of Artificial Sequence: Synthetic oligonucleotide
  Sense strand starting at position 1452 of SEQ ID NO: 585732
gaaguaugacuauggugag

SEQ ID NO: 663195 - RNA, 19 nt, Artificial Sequence
  Description of Artificial Sequence: Synthetic oligonucleotide
  Antisense strand to SEQ ID NO: 663194
cucaccauagucauacuuc

SEQ ID NO: 663196 - RNA, 19 nt, Artificial Sequence
  Description of Artificial Sequence: Synthetic oligonucleotide
  Sense strand starting at position 1482 of SEQ ID NO: 585732
agaauaagcuaagauuuag

SEQ ID NO: 663197 - RNA, 19 nt, Artificial Sequence
  Description of Artificial Sequence: Synthetic oligonucleotide
  Antisense strand to SEQ ID NO: 663196
cuaaaucuuagcuuauucu

SEQ ID NO: 663198 - RNA, 19 nt, Artificial Sequence
  Description of Artificial Sequence: Synthetic oligonucleotide
  Sense strand starting at position 1488 of SEQ ID NO: 585732
agcuaagauuuagagauau

SEQ ID NO: 663199 - RNA, 19 nt, Artificial Sequence
  Description of Artificial Sequence: Synthetic oligonucleotide
  Antisense strand to SEQ ID NO: 663198
auaucucuaaaucuuagcu

SEQ ID NO: 663200 - RNA, 19 nt, Artificial Sequence
  Description of Artificial Sequence: Synthetic oligonucleotide
  Sense strand starting at position 1499 of SEQ ID NO: 585732
agagauauuuaaugaccca

SEQ ID NO: 663201 - RNA, 19 nt, Artificial Sequence
  Description of Artificial Sequence: Synthetic oligonucleotide
  Antisense strand to SEQ ID NO: 663200
ugggucauuaaauaucucu

SEQ ID NO: 663202 - RNA, 19 nt, Artificial Sequence
  Description of Artificial Sequence: Synthetic oligonucleotide
  Sense strand starting at position 1543 of SEQ ID NO: 585732
gccagacugucacucagau

SEQ ID NO: 663203 - RNA, 19 nt, Artificial Sequence
  Description of Artificial Sequence: Synthetic oligonucleotide
  Antisense strand to SEQ ID NO: 663202
aucugagugacagucuggc

SEQ ID NO: 663204 - RNA, 19 nt, Artificial Sequence
  Description of Artificial Sequence: Synthetic oligonucleotide
  Sense strand starting at position 1552 of SEQ ID NO: 585732
ucacucagaucugucggau

SEQ ID NO: 663205 - RNA, 19 nt, Artificial Sequence
  Description of Artificial Sequence: Synthetic oligonucleotide
  Antisense strand to SEQ ID NO: 663204
auccgacagaucugaguga

SEQ ID NO: 663206 - RNA, 19 nt, Artificial Sequence
  Description of Artificial Sequence: Synthetic oligonucleotide
  Sense strand starting at position 2052 of SEQ ID NO: 585732
cggccaucuugauuggaau

SEQ ID NO: 663207 - RNA, 19 nt, Artificial Sequence
  Description of Artificial Sequence: Synthetic oligonucleotide
  Antisense strand to SEQ ID NO: 663206
auuccaaucaagauggccg

SEQ ID NO: 663208 - RNA, 19 nt, Artificial Sequence
  Description of Artificial Sequence: Synthetic oligonucleotide
  Sense strand starting at position 2053 of SEQ ID NO: 585732
ggccaucuugauuggaauc

SEQ ID NO: 663209 - RNA, 19 nt, Artificial Sequence
  Description of Artificial Sequence: Synthetic oligonucleotide
  Antisense strand to SEQ ID NO: 663208
gauuccaaucaagauggcc

SEQ ID NO: 663210 - RNA, 19 nt, Artificial Sequence
  Description of Artificial Sequence: Synthetic oligonucleotide
  Sense strand starting at position 2073 of SEQ ID NO: 585732
cgcccuguugucuugguua

SEQ ID NO: 663211 - RNA, 19 nt, Artificial Sequence
  Description of Artificial Sequence: Synthetic oligonucleotide
  Antisense strand to SEQ ID NO: 663210
uaaccaagacaacagggcg

SEQ ID NO: 663212 - RNA, 19 nt, Artificial Sequence
  Description of Artificial Sequence: Synthetic oligonucleotide
  Sense strand starting at position 2106 of SEQ ID NO: 585732
ggcucuuuccuggaguuac

SEQ ID NO: 663213 - RNA, 19 nt, Artificial Sequence
  Description of Artificial Sequence: Synthetic oligonucleotide
  Antisense strand to SEQ ID NO: 663212
guaacuccaggaaagagcc

SEQ ID NO: 663214 - RNA, 19 nt, Artificial Sequence
  Description of Artificial Sequence: Synthetic oligonucleotide
  Sense strand starting at position 2120 of SEQ ID NO: 585732
guuacaggugcgagguaau

SEQ ID NO: 663215 - RNA, 19 nt, Artificial Sequence
  Description of Artificial Sequence: Synthetic oligonucleotide
  Antisense strand to SEQ ID NO: 663214
auuaccucgcaccuguaac

SEQ ID NO: 663216 - RNA, 19 nt, Artificial Sequence
  Description of Artificial Sequence: Synthetic oligonucleotide
  Sense strand starting at position 2123 of SEQ ID NO: 585732
acaggugcgagguaauacu

SEQ ID NO: 663217 - RNA, 19 nt, Artificial Sequence
  Description of Artificial Sequence: Synthetic oligonucleotide
  Antisense strand to SEQ ID NO: 663216
aguauuaccucgcaccugu

SEQ ID NO: 663218 - RNA, 19 nt, Artificial Sequence
  Description of Artificial Sequence: Synthetic oligonucleotide
  Sense strand starting at position 2209 of SEQ ID NO: 585732
ggcggauuaccugauaaca

SEQ ID NO: 663219 - RNA, 19 nt, Artificial Sequence
  Description of Artificial Sequence: Synthetic oligonucleotide
  Antisense strand to SEQ ID NO: 663218
uguuaucagguaauccgcc

SEQ ID NO: 663220 - RNA, 19 nt, Artificial Sequence
  Description of Artificial Sequence: Synthetic oligonucleotide
  Sense strand starting at position 2510 of SEQ ID NO: 585732
ggagucagguauucagaaa

SEQ ID NO: 663221 - RNA, 19 nt, Artificial Sequence
  Description of Artificial Sequence: Synthetic oligonucleotide
  Antisense strand to SEQ ID NO: 663220
uuucugaauaccugacucc

SEQ ID NO: 663222 - RNA, 19 nt, Artificial Sequence
  Description of Artificial Sequence: Synthetic oligonucleotide
  Sense strand starting at position 2544 of SEQ ID NO: 585732
caaggaaucccaggaugcu

SEQ ID NO: 663223 - RNA, 19 nt, Artificial Sequence
  Description of Artificial Sequence: Synthetic oligonucleotide
  Antisense strand to SEQ ID NO: 663222
agcauccugggauuccuug

SEQ ID NO: 663224 - RNA, 19 nt, Artificial Sequence
  Description of Artificial Sequence: Synthetic oligonucleotide
  Sense strand starting at position 2556 of SEQ ID NO: 585732
ggaugcuagaaagguugau

SEQ ID NO: 663225 - RNA, 19 nt, Artificial Sequence
  Description of Artificial Sequence: Synthetic oligonucleotide
  Antisense strand to SEQ ID NO: 663224
aucaaccuuucuagcaucc

SEQ ID NO: 663226 - RNA, 19 nt, Artificial Sequence
  Description of Artificial Sequence: Synthetic oligonucleotide
  Sense strand starting at position 2581 of SEQ ID NO: 585732
cacgguagguacucacaua

SEQ ID NO: 663227 - RNA, 19 nt, Artificial Sequence
  Description of Artificial Sequence: Synthetic oligonucleotide
  Antisense strand to SEQ ID NO: 663226
uaugugaguaccuaccgug

SEQ ID NO: 663228 - RNA, 19 nt, Artificial Sequence
  Description of Artificial Sequence: Synthetic oligonucleotide
  Sense strand starting at position 2582 of SEQ ID NO: 585732
acgguagguacucacauaa

SEQ ID NO: 663229 - RNA, 19 nt, Artificial Sequence
  Description of Artificial Sequence: Synthetic oligonucleotide
  Antisense strand to SEQ ID NO: 663228
uuaugugaguaccuaccgu

SEQ ID NO: 663230 - RNA, 19 nt, Artificial Sequence
  Description of Artificial Sequence: Synthetic oligonucleotide
  Sense strand starting at position 2661 of SEQ ID NO: 585732
auuuaugacuaccacaguu

SEQ ID NO: 663231 - RNA, 19 nt, Artificial Sequence
  Description of Artificial Sequence: Synthetic oligonucleotide
  Antisense strand to SEQ ID NO: 663230
aacugugguagucauaaau

SEQ ID NO: 663232 - RNA, 19 nt, Artificial Sequence
  Description of Artificial Sequence: Synthetic oligonucleotide
  Sense strand starting at position 2671 of SEQ ID NO: 585732
accacaguugccuaguaca

SEQ ID NO: 663233 - RNA, 19 nt, Artificial Sequence
  Description of Artificial Sequence: Synthetic oligonucleotide
  Antisense strand to SEQ ID NO: 663232
uguacuaggcaacuguggu

SEQ ID NO: 663234 - RNA, 19 nt, Artificial Sequence
  Description of Artificial Sequence: Synthetic oligonucleotide
  Sense strand starting at position 2776 of SEQ ID NO: 585732
cccuuuacaguguacaauu

SEQ ID NO: 663235 - RNA, 19 nt, Artificial Sequence
  Description of Artificial Sequence: Synthetic oligonucleotide
  Antisense strand to SEQ ID NO: 663234
aauuguacacuguaaaggg

SEQ ID NO: 663236 - RNA, 19 nt, Artificial Sequence
  Description of Artificial Sequence: Synthetic oligonucleotide
  Sense strand starting at position 3061 of SEQ ID NO: 585732
guggaucaguacuuccauu

SEQ ID NO: 663237 - RNA, 19 nt, Artificial Sequence
  Description of Artificial Sequence: Synthetic oligonucleotide
  Antisense strand to SEQ ID NO: 663236
aauggaaguacugauccac

SEQ ID NO: 663238 - RNA, 19 nt, Artificial Sequence
  Description of Artificial Sequence: Synthetic oligonucleotide
  Sense strand starting at position 3485 of SEQ ID NO: 585732
gauuaugcugcuuuguguu

SEQ ID NO: 663239 - RNA, 19 nt, Artificial Sequence
  Description of Artificial Sequence: Synthetic oligonucleotide
  Antisense strand to SEQ ID NO: 663238
aacacaaagcagcauaauc

SEQ ID NO: 663240 - RNA, 19 nt, Artificial Sequence
  Description of Artificial Sequence: Synthetic oligonucleotide
  Sense strand starting at position 3683 of SEQ ID NO: 585732
agcugcuuugaauauuagu

SEQ ID NO: 663241 - RNA, 19 nt, Artificial Sequence
  Description of Artificial Sequence: Synthetic oligonucleotide
  Antisense strand to SEQ ID NO: 663240
acuaauauucaaagcagcu

SEQ ID NO: 663242 - RNA, 19 nt, Artificial Sequence
  Description of Artificial Sequence: Synthetic oligonucleotide
  Sense strand starting at position 3688 of SEQ ID NO: 585732
cuuugaauauuaguguaca

SEQ ID NO: 663243 - RNA, 19 nt, Artificial Sequence
  Description of Artificial Sequence: Synthetic oligonucleotide
  Antisense strand to SEQ ID NO: 663242
uguacacuaauauucaaag

SEQ ID NO: 663244 - RNA, 19 nt, Artificial Sequence
  Description of Artificial Sequence: Synthetic oligonucleotide
  Sense strand starting at position 3755 of SEQ ID NO: 585732
gggucauaugcugacucuu

SEQ ID NO: 663245 - RNA, 19 nt, Artificial Sequence
  Description of Artificial Sequence: Synthetic oligonucleotide
  Antisense strand to SEQ ID NO: 663244
aagagucagcauaugaccc

SEQ ID NO: 663246 - RNA, 19 nt, Artificial Sequence
  Description of Artificial Sequence: Synthetic oligonucleotide
  Sense strand starting at position 3833 of SEQ ID NO: 585732
ucccaugagcaauguaaga

SEQ ID NO: 663247 - RNA, 19 nt, Artificial Sequence
  Description of Artificial Sequence: Synthetic oligonucleotide
  Antisense strand to SEQ ID NO: 663246
ucuuacauugcucauggga

SEQ ID NO: 663248 - RNA, 19 nt, Artificial Sequence
  Description of Artificial Sequence: Synthetic oligonucleotide
  Sense strand starting at position 3857 of SEQ ID NO: 585732
ugguauuaguuuccuauuu

SEQ ID NO: 663249 - RNA, 19 nt, Artificial Sequence
  Description of Artificial Sequence: Synthetic oligonucleotide
  Antisense strand to SEQ ID NO: 663248
aaauaggaaacuaauacca

SEQ ID NO: 663250 - RNA, 19 nt, Artificial Sequence
  Description of Artificial Sequence: Synthetic oligonucleotide
  Sense strand starting at position 3858 of SEQ ID NO: 585732
gguauuaguuuccuauuuc

SEQ ID NO: 663251 - RNA, 19 nt, Artificial Sequence
  Description of Artificial Sequence: Synthetic oligonucleotide
  Antisense strand to SEQ ID NO: 663250
gaaauaggaaacuaauacc

SEQ ID NO: 663252 - RNA, 19 nt, Artificial Sequence
  Description of Artificial Sequence: Synthetic oligonucleotide
  Sense strand starting at position 210 of SEQ ID NO: 585733
aucauacuucuuggcugau

SEQ ID NO: 663253 - RNA, 19 nt, Artificial Sequence
  Description of Artificial Sequence: Synthetic oligonucleotide
  Antisense strand to SEQ ID NO: 663252
aucagccaagaaguaugau

SEQ ID NO: 663254 - RNA, 19 nt, Artificial Sequence
  Description of Artificial Sequence: Synthetic oligonucleotide
  Sense strand starting at position 211 of SEQ ID NO: 585733
ucauacuucuuggcugaua

SEQ ID NO: 663255 - RNA, 19 nt, Artificial Sequence
  Description of Artificial Sequence: Synthetic oligonucleotide
  Antisense strand to SEQ ID NO: 663254
uaucagccaagaaguauga

SEQ ID NO: 663256 - RNA, 19 nt, Artificial Sequence
  Description of Artificial Sequence: Synthetic oligonucleotide
  Sense strand starting at position 213 of SEQ ID NO: 585733
auacuucuuggcugauaga

SEQ ID NO: 663257 - RNA, 19 nt, Artificial Sequence
  Description of Artificial Sequence: Synthetic oligonucleotide
  Antisense strand to SEQ ID NO: 663256
ucuaucagccaagaaguau

SEQ ID NO: 663258 - RNA, 19 nt, Artificial Sequence
  Description of Artificial Sequence: Synthetic oligonucleotide
  Sense strand starting at position 233 of SEQ ID NO: 585733
agaggaagccauuggcauu

SEQ ID NO: 663259 - RNA, 19 nt, Artificial Sequence
  Description of Artificial Sequence: Synthetic oligonucleotide
  Antisense strand to SEQ ID NO: 663258
aaugccaauggcuuccucu

SEQ ID NO: 663260 - RNA, 19 nt, Artificial Sequence
  Description of Artificial Sequence: Synthetic oligonucleotide
  Sense strand starting at position 253 of SEQ ID NO: 585733
cuuagaaccuggucaccaa

SEQ ID NO: 663261 - RNA, 19 nt, Artificial Sequence
  Description of Artificial Sequence: Synthetic oligonucleotide
  Antisense strand to SEQ ID NO: 663260
uuggugaccagguucuaag

SEQ ID NO: 663262 - RNA, 19 nt, Artificial Sequence
  Description of Artificial Sequence: Synthetic oligonucleotide
  Sense strand starting at position 315 of SEQ ID NO: 585733
ucauguaagugaccuccaa

SEQ ID NO: 663263 - RNA, 19 nt, Artificial Sequence
  Description of Artificial Sequence: Synthetic oligonucleotide
  Antisense strand to SEQ ID NO: 663262
uuggaggucacuuacauga

SEQ ID NO: 663264 - RNA, 19 nt, Artificial Sequence
  Description of Artificial Sequence: Synthetic oligonucleotide
  Sense strand starting at position 375 of SEQ ID NO: 585733
cccaaacgguuuccagaaa

SEQ ID NO: 663265 - RNA, 19 nt, Artificial Sequence
  Description of Artificial Sequence: Synthetic oligonucleotide
  Antisense strand to SEQ ID NO: 663264
uuucuggaaaccguuuggg

SEQ ID NO: 663266 - RNA, 19 nt, Artificial Sequence
  Description of Artificial Sequence: Synthetic oligonucleotide
  Sense strand starting at position 388 of SEQ ID NO: 585733
cagaaaguccucuggaccu

SEQ ID NO: 663267 - RNA, 19 nt, Artificial Sequence
  Description of Artificial Sequence: Synthetic oligonucleotide
  Antisense strand to SEQ ID NO: 663266
agguccagaggacuuucug

SEQ ID NO: 663268 - RNA, 19 nt, Artificial Sequence
  Description of Artificial Sequence: Synthetic oligonucleotide
  Sense strand starting at position 445 of SEQ ID NO: 585733
acccaugauccauggcaua

SEQ ID NO: 663269 - RNA, 19 nt, Artificial Sequence
  Description of Artificial Sequence: Synthetic oligonucleotide
  Antisense strand to SEQ ID NO: 663268
uaugccauggaucaugggu

SEQ ID NO: 663270 - RNA, 19 nt, Artificial Sequence
  Description of Artificial Sequence: Synthetic oligonucleotide
  Sense strand starting at position 457 of SEQ ID NO: 585733
uggcauaaccgcuguacaa

SEQ ID NO: 663271 - RNA, 19 nt, Artificial Sequence
  Description of Artificial Sequence: Synthetic oligonucleotide
  Antisense strand to SEQ ID NO: 663270
uuguacagcgguuaugcca

SEQ ID NO: 663272 - RNA, 19 nt, Artificial Sequence
  Description of Artificial Sequence: Synthetic oligonucleotide
  Sense strand starting at position 477 of SEQ ID NO: 585733
ggaugcucuggucaagacu

SEQ ID NO: 663273 - RNA, 19 nt, Artificial Sequence
  Description of Artificial Sequence: Synthetic oligonucleotide
  Antisense strand to SEQ ID NO: 663272
agucuugaccagagcaucc

SEQ ID NO: 663274 - RNA, 19 nt, Artificial Sequence
  Description of Artificial Sequence: Synthetic oligonucleotide
  Sense strand starting at position 503 of SEQ ID NO: 585733
cucgaauucugccuauuuc

SEQ ID NO: 663275 - RNA, 19 nt, Artificial Sequence
  Description of Artificial Sequence: Synthetic oligonucleotide
  Antisense strand to SEQ ID NO: 663274
gaaauaggcagaauucgag

SEQ ID NO: 663276 - RNA, 19 nt, Artificial Sequence
  Description of Artificial Sequence: Synthetic oligonucleotide
  Sense strand starting at position 539 of SEQ ID NO: 585733
acacgugacaacugggaau

SEQ ID NO: 663277 - RNA, 19 nt, Artificial Sequence
  Description of Artificial Sequence: Synthetic oligonucleotide
  Antisense strand to SEQ ID NO: 663276
auucccaguugucacgugu

SEQ ID NO: 663278 - RNA, 19 nt, Artificial Sequence
  Description of Artificial Sequence: Synthetic oligonucleotide
  Sense strand starting at position 552 of SEQ ID NO: 585733
gggaaugucugcuuccuac

SEQ ID NO: 663279 - RNA, 19 nt, Artificial Sequence
  Description of Artificial Sequence: Synthetic oligonucleotide
  Antisense strand to SEQ ID NO: 663278
guaggaagcagacauuccc

SEQ ID NO: 663280 - RNA, 19 nt, Artificial Sequence
  Description of Artificial Sequence: Synthetic oligonucleotide
  Sense strand starting at position 582 of SEQ ID NO: 585733
gucuaaugccacugccuaa

SEQ ID NO: 663281 - RNA, 19 nt, Artificial Sequence
  Description of Artificial Sequence: Synthetic oligonucleotide
  Antisense strand to SEQ ID NO: 663280
uuaggcaguggcauuagac

SEQ ID NO: 663282 - RNA, 19 nt, Artificial Sequence
  Description of Artificial Sequence: Synthetic oligonucleotide
  Sense strand starting at position 610 of SEQ ID NO: 585733
cguaaagauuuccaaauca

SEQ ID NO: 663283 - RNA, 19 nt, Artificial Sequence
  Description of Artificial Sequence: Synthetic oligonucleotide
  Antisense strand to SEQ ID NO: 663282
ugauuuggaaaucuuuacg

SEQ ID NO: 663284 - RNA, 19 nt, Artificial Sequence
  Description of Artificial Sequence: Synthetic oligonucleotide
  Sense strand starting at position 682 of SEQ ID NO: 585733
cuggaauccucauagcaau

SEQ ID NO: 663285 - RNA, 19 nt, Artificial Sequence
  Description of Artificial Sequence: Synthetic oligonucleotide
  Antisense strand to SEQ ID NO: 663284
auugcuaugaggauuccag

SEQ ID NO: 663286 - RNA, 19 nt, Artificial Sequence
  Description of Artificial Sequence: Synthetic oligonucleotide
  Sense strand starting at position 1782 of SEQ ID NO: 585733
gagggaggcucucagugau

SEQ ID NO: 663287 - RNA, 19 nt, Artificial Sequence
  Description of Artificial Sequence: Synthetic oligonucleotide
  Antisense strand to SEQ ID NO: 663286
aucacugagagccucccuc

SEQ ID NO: 663288 - RNA, 19 nt, Artificial Sequence
  Description of Artificial Sequence: Synthetic oligonucleotide
  Sense strand starting at position 1786 of SEQ ID NO: 585733
gaggcucucagugaucgga

SEQ ID NO: 663289 - RNA, 19 nt, Artificial Sequence
  Description of Artificial Sequence: Synthetic oligonucleotide
  Antisense strand to SEQ ID NO: 663288
uccgaucacugagagccuc

SEQ ID NO: 663290 - RNA, 19 nt, Artificial Sequence
  Description of Artificial Sequence: Synthetic oligonucleotide
  Sense strand starting at position 1830 of SEQ ID NO: 585733
ccgacccgccuugagaaau

SEQ ID NO: 663291 - RNA, 19 nt, Artificial Sequence
  Description of Artificial Sequence: Synthetic oligonucleotide
  Antisense strand to SEQ ID NO: 663290
auuucucaaggcgggucgg

SEQ ID NO: 663292 - RNA, 19 nt, Artificial Sequence
  Description of Artificial Sequence: Synthetic oligonucleotide
  Sense strand starting at position 2010 of SEQ ID NO: 585733
uugcgcaugcgcucaaaua

SEQ ID NO: 663293 - RNA, 19 nt, Artificial Sequence
  Description of Artificial Sequence: Synthetic oligonucleotide
  Antisense strand to SEQ ID NO: 663292
uauuugagcgcaugcgcaa

SEQ ID NO: 663294 - RNA, 19 nt, Artificial Sequence
  Description of Artificial Sequence: Synthetic oligonucleotide
  Sense strand starting at position 2033 of SEQ ID NO: 585733
cccugaucucgcgauaaug

SEQ ID NO: 663295 - RNA, 19 nt, Artificial Sequence
  Description of Artificial Sequence: Synthetic oligonucleotide
  Antisense strand to SEQ ID NO: 663294
cauuaucgcgagaucaggg

SEQ ID NO: 663296 - RNA, 19 nt, Artificial Sequence
  Description of Artificial Sequence: Synthetic oligonucleotide
  Sense strand starting at position 2035 of SEQ ID NO: 585733
cugaucucgcgauaaugcu

SEQ ID NO: 663297 - RNA, 19 nt, Artificial Sequence
  Description of Artificial Sequence: Synthetic oligonucleotide
  Antisense strand to SEQ ID NO: 663296
agcauuaucgcgagaucag

SEQ ID NO: 663298 - RNA, 19 nt, Artificial Sequence
  Description of Artificial Sequence: Synthetic oligonucleotide
  Sense strand starting at position 2043 of SEQ ID NO: 585733
gcgauaaugcuuugcuccu

SEQ ID NO: 663299 - RNA, 19 nt, Artificial Sequence
  Description of Artificial Sequence: Synthetic oligonucleotide
  Antisense strand to SEQ ID NO: 663298
aggagcaaagcauuaucgc

SEQ ID NO: 663300 - RNA, 19 nt, Artificial Sequence
  Description of Artificial Sequence: Synthetic oligonucleotide
  Sense strand starting at position 2153 of SEQ ID NO: 585733
cgcgguaacccacagaguu

SEQ ID NO: 663301 - RNA, 19 nt, Artificial Sequence
  Description of Artificial Sequence: Synthetic oligonucleotide
  Antisense strand to SEQ ID NO: 663300
aacucuguggguuaccgcg

SEQ ID NO: 663302 - RNA, 19 nt, Artificial Sequence
  Description of Artificial Sequence: Synthetic oligonucleotide
  Sense strand starting at position 2262 of SEQ ID NO: 585733
gcucgagcuucgguaguca

SEQ ID NO: 663303 - RNA, 19 nt, Artificial Sequence
  Description of Artificial Sequence: Synthetic oligonucleotide
  Antisense strand to SEQ ID NO: 663302
ugacuaccgaagcucgagc

SEQ ID NO: 663304 - RNA, 19 nt, Artificial Sequence
  Description of Artificial Sequence: Synthetic oligonucleotide
  Sense strand starting at position 2289 of SEQ ID NO: 585733
gguacagcccagugauguu

SEQ ID NO: 663305 - RNA, 19 nt, Artificial Sequence
  Description of Artificial Sequence: Synthetic oligonucleotide
  Antisense strand to SEQ ID NO: 663304
aacaucacugggcuguacc

SEQ ID NO: 663306 - RNA, 19 nt, Artificial Sequence
  Description of Artificial Sequence: Synthetic oligonucleotide
  Sense strand starting at position 2448 of SEQ ID NO: 585733
gggaaguguccggaaaguu

SEQ ID NO: 663307 - RNA, 19 nt, Artificial Sequence
  Description of Artificial Sequence: Synthetic oligonucleotide
  Antisense strand to SEQ ID NO: 663306
aacuuuccggacacuuccc

SEQ ID NO: 663308 - RNA, 19 nt, Artificial Sequence
  Description of Artificial Sequence: Synthetic oligonucleotide
  Sense strand starting at position 2504 of SEQ ID NO: 585733
cugggaaaguccuuaagug

SEQ ID NO: 663309 - RNA, 19 nt, Artificial Sequence
  Description of Artificial Sequence: Synthetic oligonucleotide
  Antisense strand to SEQ ID NO: 663308
cacuuaaggacuuucccag

SEQ ID NO: 663310 - RNA, 19 nt, Artificial Sequence
  Description of Artificial Sequence: Synthetic oligonucleotide
  Sense strand starting at position 2508 of SEQ ID NO: 585733
gaaaguccuuaagugaacu

SEQ ID NO: 663311 - RNA, 19 nt, Artificial Sequence
  Description of Artificial Sequence: Synthetic oligonucleotide
  Antisense strand to SEQ ID NO: 663310
aguucacuuaaggacuuuc

SEQ ID NO: 663312 - RNA, 19 nt, Artificial Sequence
  Description of Artificial Sequence: Synthetic oligonucleotide
  Sense strand starting at position 2563 of SEQ ID NO: 585733
aagugugacugcuaugaau

SEQ ID NO: 663313 - RNA, 19 nt, Artificial Sequence
  Description of Artificial Sequence: Synthetic oligonucleotide
  Antisense strand to SEQ ID NO: 663312
auucauagcagucacacuu

SEQ ID NO: 663314 - RNA, 19 nt, Artificial Sequence
  Description of Artificial Sequence: Synthetic oligonucleotide
  Sense strand starting at position 2565 of SEQ ID NO: 585733
gugugacugcuaugaauaa

SEQ ID NO: 663315 - RNA, 19 nt, Artificial Sequence
  Description of Artificial Sequence: Synthetic oligonucleotide
  Antisense strand to SEQ ID NO: 663314
uuauucauagcagucacac

SEQ ID NO: 663316 - RNA, 19 nt, Artificial Sequence
  Description of Artificial Sequence: Synthetic oligonucleotide
  Sense strand starting at position 2721 of SEQ ID NO: 585733
ucagaucucuccucggauu

SEQ ID NO: 663317 - RNA, 19 nt, Artificial Sequence
  Description of Artificial Sequence: Synthetic oligonucleotide
  Antisense strand to SEQ ID NO: 663316
aauccgaggagagaucuga

SEQ ID NO: 663318 - RNA, 19 nt, Artificial Sequence
  Description of Artificial Sequence: Synthetic oligonucleotide
  Sense strand starting at position 2871 of SEQ ID NO: 585733
gcccucagagggugaauaa

SEQ ID NO: 663319 - RNA, 19 nt, Artificial Sequence
  Description of Artificial Sequence: Synthetic oligonucleotide
  Antisense strand to SEQ ID NO: 663318
uuauucacccucugagggc

SEQ ID NO: 663320 - RNA, 19 nt, Artificial Sequence
  Description of Artificial Sequence: Synthetic oligonucleotide
  Sense strand starting at position 2922 of SEQ ID NO: 585733
agauguuccuugucauuga

SEQ ID NO: 663321 - RNA, 19 nt, Artificial Sequence
  Description of Artificial Sequence: Synthetic oligonucleotide
  Antisense strand to SEQ ID NO: 663320
ucaaugacaaggaacaucu

SEQ ID NO: 663322 - RNA, 19 nt, Artificial Sequence
  Description of Artificial Sequence: Synthetic oligonucleotide
  Sense strand starting at position 2925 of SEQ ID NO: 585733
uguuccuugucauugagca

SEQ ID NO: 663323 - RNA, 19 nt, Artificial Sequence
  Description of Artificial Sequence: Synthetic oligonucleotide
  Antisense strand to SEQ ID NO: 663322
ugcucaaugacaaggaaca

SEQ ID NO: 663324 - RNA, 19 nt, Artificial Sequence
  Description of Artificial Sequence: Synthetic oligonucleotide
  Sense strand starting at position 2926 of SEQ ID NO: 585733
guuccuugucauugagcag

SEQ ID NO: 663325 - RNA, 19 nt, Artificial Sequence
  Description of Artificial Sequence: Synthetic oligonucleotide
  Antisense strand to SEQ ID NO: 663324
cugcucaaugacaaggaac

SEQ ID NO: 663326 - RNA, 19 nt, Artificial Sequence
  Description of Artificial Sequence: Synthetic oligonucleotide
  Sense strand starting at position 2930 of SEQ ID NO: 585733
cuugucauugagcagggaa

SEQ ID NO: 663327 - RNA, 19 nt, Artificial Sequence
  Description of Artificial Sequence: Synthetic oligonucleotide
  Antisense strand to SEQ ID NO: 663326
uucccugcucaaugacaag

SEQ ID NO: 663328 - RNA, 19 nt, Artificial Sequence
  Description of Artificial Sequence: Synthetic oligonucleotide
  Sense strand starting at position 2932 of SEQ ID NO: 585733
ugucauugagcagggaagu

SEQ ID NO: 663329 - RNA, 19 nt, Artificial Sequence
  Description of Artificial Sequence: Synthetic oligonucleotide
  Antisense strand to SEQ ID NO: 663328
acuucccugcucaaugaca

SEQ ID NO: 663330 - RNA, 19 nt, Artificial Sequence
  Description of Artificial Sequence: Synthetic oligonucleotide
  Sense strand starting at position 2996 of SEQ ID NO: 585733
agguacugcuucuaauaag

SEQ ID NO: 663331 - RNA, 19 nt, Artificial Sequence
  Description of Artificial Sequence: Synthetic oligonucleotide
  Antisense strand to SEQ ID NO: 663330
cuuauuagaagcaguaccu

SEQ ID NO: 663332 - RNA, 19 nt, Artificial Sequence
  Description of Artificial Sequence: Synthetic oligonucleotide
  Sense strand starting at position 406 of SEQ ID NO: 585734
gcggaaggaguauagauua

SEQ ID NO: 663333 - RNA, 19 nt, Artificial Sequence
  Description of Artificial Sequence: Synthetic oligonucleotide
  Antisense strand to SEQ ID NO: 663332
uaaucuauacuccuuccgc

SEQ ID NO: 663334 - RNA, 19 nt, Artificial Sequence
  Description of Artificial Sequence: Synthetic oligonucleotide
  Sense strand starting at position 413 of SEQ ID NO: 585734
gaguauagauuauaugcaa

SEQ ID NO: 663335 - RNA, 19 nt, Artificial Sequence
  Description of Artificial Sequence: Synthetic oligonucleotide
  Antisense strand to SEQ ID NO: 663334
uugcauauaaucuauacuc

SEQ ID NO: 663336 - RNA, 19 nt, Artificial Sequence
  Description of Artificial Sequence: Synthetic oligonucleotide
  Sense strand starting at position 778 of SEQ ID NO: 585734
ucagcagucugagauuuag

SEQ ID NO: 663337 - RNA, 19 nt, Artificial Sequence
  Description of Artificial Sequence: Synthetic oligonucleotide
  Antisense strand to SEQ ID NO: 663336
cuaaaucucagacugcuga

SEQ ID NO: 663338 - RNA, 19 nt, Artificial Sequence
  Description of Artificial Sequence: Synthetic oligonucleotide
  Sense strand starting at position 784 of SEQ ID NO: 585734
gucugagauuuaggcaucu

SEQ ID NO: 663339 - RNA, 19 nt, Artificial Sequence
  Description of Artificial Sequence: Synthetic oligonucleotide
  Antisense strand to SEQ ID NO: 663338
agaugccuaaaucucagac

SEQ ID NO: 663340 - RNA, 19 nt, Artificial Sequence
  Description of Artificial Sequence: Synthetic oligonucleotide
  Sense strand starting at position 846 of SEQ ID NO: 585734
cuauaccuggucugucaaa

SEQ ID NO: 663341 - RNA, 19 nt, Artificial Sequence
  Description of Artificial Sequence: Synthetic oligonucleotide
  Antisense strand to SEQ ID NO: 663340
uuugacagaccagguauag

SEQ ID NO: 663342 - RNA, 19 nt, Artificial Sequence
  Description of Artificial Sequence: Synthetic oligonucleotide
  Sense strand starting at position 874 of SEQ ID NO: 585734
ggagcucgucaauaccaaa

SEQ ID NO: 663343 - RNA, 19 nt, Artificial Sequence
  Description of Artificial Sequence: Synthetic oligonucleotide
  Antisense strand to SEQ ID NO: 663342
uuugguauugacgagcucc

SEQ ID NO: 663344 - RNA, 19 nt, Artificial Sequence
  Description of Artificial Sequence: Synthetic oligonucleotide
  Sense strand starting at position 899 of SEQ ID NO: 585734
ccaacacaugcgggauaaa

SEQ ID NO: 663345 - RNA, 19 nt, Artificial Sequence
  Description of Artificial Sequence: Synthetic oligonucleotide
  Antisense strand to SEQ ID NO: 663344
uuuaucccgcauguguugg

SEQ ID NO: 663346 - RNA, 19 nt, Artificial Sequence
  Description of Artificial Sequence: Synthetic oligonucleotide
  Sense strand starting at position 1468 of SEQ ID NO: 585734
cugggcuuuagggaacauu

SEQ ID NO: 663347 - RNA, 19 nt, Artificial Sequence
  Description of Artificial Sequence: Synthetic oligonucleotide
  Antisense strand to SEQ ID NO: 663346
aauguucccuaaagcccag

SEQ ID NO: 663348 - RNA, 19 nt, Artificial Sequence
  Description of Artificial Sequence: Synthetic oligonucleotide
  Sense strand starting at position 1607 of SEQ ID NO: 585734
agccucuggguucguauaa

SEQ ID NO: 663349 - RNA, 19 nt, Artificial Sequence
  Description of Artificial Sequence: Synthetic oligonucleotide
  Antisense strand to SEQ ID NO: 663348
uuauacgaacccagaggcu

SEQ ID NO: 663350 - RNA, 19 nt, Artificial Sequence
  Description of Artificial Sequence: Synthetic oligonucleotide
  Sense strand starting at position 1614 of SEQ ID NO: 585734
ggguucguauaaguuaaca

SEQ ID NO: 663351 - RNA, 19 nt, Artificial Sequence
  Description of Artificial Sequence: Synthetic oligonucleotide
  Antisense strand to SEQ ID NO: 663350
uguuaacuuauacgaaccc

SEQ ID NO: 663352 - RNA, 19 nt, Artificial Sequence
  Description of Artificial Sequence: Synthetic oligonucleotide
  Sense strand starting at position 1701 of SEQ ID NO: 585734
ggccuaucugcagaguuaa

SEQ ID NO: 663353 - RNA, 19 nt, Artificial Sequence
  Description of Artificial Sequence: Synthetic oligonucleotide
  Antisense strand to SEQ ID NO: 663352
uuaacucugcagauaggcc

SEQ ID NO: 663354 - RNA, 19 nt, Artificial Sequence
  Description of Artificial Sequence: Synthetic oligonucleotide
  Sense strand starting at position 2058 of SEQ ID NO: 585734
cucuguuuacuugaccaua

SEQ ID NO: 663355 - RNA, 19 nt, Artificial Sequence
  Description of Artificial Sequence: Synthetic oligonucleotide
  Antisense strand to SEQ ID NO: 663354
uauggucaaguaaacagag

SEQ ID NO: 663356 - RNA, 19 nt, Artificial Sequence
  Description of Artificial Sequence: Synthetic oligonucleotide
  Sense strand starting at position 2193 of SEQ ID NO: 585734
uuuagagccuguguuauuu

SEQ ID NO: 663357 - RNA, 19 nt, Artificial Sequence
  Description of Artificial Sequence: Synthetic oligonucleotide
  Antisense strand to SEQ ID NO: 663356
aaauaacacaggcucuaaa

SEQ ID NO: 663358 - RNA, 19 nt, Artificial Sequence
  Description of Artificial Sequence: Synthetic oligonucleotide
  Sense strand starting at position 2367 of SEQ ID NO: 585734
aggcaaacuccgcgaaaca

SEQ ID NO: 663359 - RNA, 19 nt, Artificial Sequence
  Description of Artificial Sequence: Synthetic oligonucleotide
  Antisense strand to SEQ ID NO: 663358
uguuucgcggaguuugccu

SEQ ID NO: 663360 - RNA, 19 nt, Artificial Sequence
  Description of Artificial Sequence: Synthetic oligonucleotide
  Sense strand starting at position 2368 of SEQ ID NO: 585734
ggcaaacuccgcgaaacau

SEQ ID NO: 663361 - RNA, 19 nt, Artificial Sequence
  Description of Artificial Sequence: Synthetic oligonucleotide
  Antisense strand to SEQ ID NO: 663360
auguuucgcggaguuugcc

SEQ ID NO: 663362 - RNA, 19 nt, Artificial Sequence
  Description of Artificial Sequence: Synthetic oligonucleotide
  Sense strand starting at position 2431 of SEQ ID NO: 585734
cguguagguggaaguguuu

SEQ ID NO: 663363 - RNA, 19 nt, Artificial Sequence
  Description of Artificial Sequence: Synthetic oligonucleotide
  Antisense strand to SEQ ID NO: 663362
aaacacuuccaccuacacg

SEQ ID NO: 663364 - RNA, 19 nt, Artificial Sequence
  Description of Artificial Sequence: Synthetic oligonucleotide
  Sense strand starting at position 2437 of SEQ ID NO: 585734
gguggaaguguuuguugag

SEQ ID NO: 663365 - RNA, 19 nt, Artificial Sequence
  Description of Artificial Sequence: Synthetic oligonucleotide
  Antisense strand to SEQ ID NO: 663364
cucaacaaacacuuccacc

SEQ ID NO: 663366 - RNA, 19 nt, Artificial Sequence
  Description of Artificial Sequence: Synthetic oligonucleotide
  Sense strand starting at position 2444 of SEQ ID NO: 585734
guguuuguugaggacuuag

SEQ ID NO: 663367 - RNA, 19 nt, Artificial Sequence
  Description of Artificial Sequence: Synthetic oligonucleotide
  Antisense strand to SEQ ID NO: 663366
cuaaguccucaacaaacac

SEQ ID NO: 663368 - RNA, 19 nt, Artificial Sequence
  Description of Artificial Sequence: Synthetic oligonucleotide
  Sense strand starting at position 2453 of SEQ ID NO: 585734
gaggacuuagagugguaaa

SEQ ID NO: 663369 - RNA, 19 nt, Artificial Sequence
  Description of Artificial Sequence: Synthetic oligonucleotide
  Antisense strand to SEQ ID NO: 663368
uuuaccacucuaaguccuc

SEQ ID NO: 663370 - RNA, 19 nt, Artificial Sequence
  Description of Artificial Sequence: Synthetic oligonucleotide
  Sense strand starting at position 2454 of SEQ ID NO: 585734
aggacuuagagugguaaag

SEQ ID NO: 663371 - RNA, 19 nt, Artificial Sequence
  Description of Artificial Sequence: Synthetic oligonucleotide
  Antisense strand to SEQ ID NO: 663370
cuuuaccacucuaaguccu

SEQ ID NO: 663372 - RNA, 19 nt, Artificial Sequence
  Description of Artificial Sequence: Synthetic oligonucleotide
  Sense strand starting at position 2479 of SEQ ID NO: 585734
gcugcaauuccgucugcuu

SEQ ID NO: 663373 - RNA, 19 nt, Artificial Sequence
  Description of Artificial Sequence: Synthetic oligonucleotide
  Antisense strand to SEQ ID NO: 663372
aagcagacggaauugcagc

SEQ ID NO: 663374 - RNA, 19 nt, Artificial Sequence
  Description of Artificial Sequence: Synthetic oligonucleotide
  Sense strand starting at position 2503 of SEQ ID NO: 585734
cgucgaugcguccuugaac

SEQ ID NO: 663375 - RNA, 19 nt, Artificial Sequence
  Description of Artificial Sequence: Synthetic oligonucleotide
  Antisense strand to SEQ ID NO: 663374
guucaaggacgcaucgacg

SEQ ID NO: 663376 - RNA, 19 nt, Artificial Sequence
  Description of Artificial Sequence: Synthetic oligonucleotide
  Sense strand starting at position 2504 of SEQ ID NO: 585734
gucgaugcguccuugaaca

SEQ ID NO: 663377 - RNA, 19 nt, Artificial Sequence
  Description of Artificial Sequence: Synthetic oligonucleotide
  Antisense strand to SEQ ID NO: 663376
uguucaaggacgcaucgac

SEQ ID NO: 663378 - RNA, 19 nt, Artificial Sequence
  Description of Artificial Sequence: Synthetic oligonucleotide
  Sense strand starting at position 2511 of SEQ ID NO: 585734
cguccuugaacacguuauu

SEQ ID NO: 663379 - RNA, 19 nt, Artificial Sequence
  Description of Artificial Sequence: Synthetic oligonucleotide
  Antisense strand to SEQ ID NO: 663378
aauaacguguucaaggacg

SEQ ID NO: 663380 - RNA, 19 nt, Artificial Sequence
  Description of Artificial Sequence: Synthetic oligonucleotide
  Sense strand starting at position 2565 of SEQ ID NO: 585734
auggguguacaguaauaau

SEQ ID NO: 663381 - RNA, 19 nt, Artificial Sequence
  Description of Artificial Sequence: Synthetic oligonucleotide
  Antisense strand to SEQ ID NO: 663380
auuauuacuguacacccau

SEQ ID NO: 663382 - RNA, 19 nt, Artificial Sequence
  Description of Artificial Sequence: Synthetic oligonucleotide
  Sense strand starting at position 2596 of SEQ ID NO: 585734
uggcguuacgaggauuaca

SEQ ID NO: 663383 - RNA, 19 nt, Artificial Sequence
  Description of Artificial Sequence: Synthetic oligonucleotide
  Antisense strand to SEQ ID NO: 663382
uguaauccucguaacgcca

SEQ ID NO: 663384 - RNA, 19 nt, Artificial Sequence
  Description of Artificial Sequence: Synthetic oligonucleotide
  Sense strand starting at position 2622 of SEQ ID NO: 585734
agauaaagcguuuagcagu

SEQ ID NO: 663385 - RNA, 19 nt, Artificial Sequence
  Description of Artificial Sequence: Synthetic oligonucleotide
  Antisense strand to SEQ ID NO: 663384
acugcuaaacgcuuuaucu

SEQ ID NO: 663386 - RNA, 19 nt, Artificial Sequence
  Description of Artificial Sequence: Synthetic oligonucleotide
  Sense strand starting at position 2637 of SEQ ID NO: 585734
cagugucugucagcacuau

SEQ ID NO: 663387 - RNA, 19 nt, Artificial Sequence
  Description of Artificial Sequence: Synthetic oligonucleotide
  Antisense strand to SEQ ID NO: 663386
auagugcugacagacacug

SEQ ID NO: 663388 - RNA, 19 nt, Artificial Sequence
  Description of Artificial Sequence: Synthetic oligonucleotide
  Sense strand starting at position 2641 of SEQ ID NO: 585734
gucugucagcacuauguuu

SEQ ID NO: 663389 - RNA, 19 nt, Artificial Sequence
  Description of Artificial Sequence: Synthetic oligonucleotide
  Antisense strand to SEQ ID NO: 663388
aaacauagugcugacagac

SEQ ID NO: 663390 - RNA, 19 nt, Artificial Sequence
  Description of Artificial Sequence: Synthetic oligonucleotide
  Sense strand starting at position 2648 of SEQ ID NO: 585734
agcacuauguuuguuacua

SEQ ID NO: 663391 - RNA, 19 nt, Artificial Sequence
  Description of Artificial Sequence: Synthetic oligonucleotide
  Antisense strand to SEQ ID NO: 663390
uaguaacaaacauagugcu

SEQ ID NO: 663392 - RNA, 19 nt, Artificial Sequence
  Description of Artificial Sequence: Synthetic oligonucleotide
  Sense strand starting at position 2649 of SEQ ID NO: 585734
gcacuauguuuguuacuau

SEQ ID NO: 663393 - RNA, 19 nt, Artificial Sequence
  Description of Artificial Sequence: Synthetic oligonucleotide
  Antisense strand to SEQ ID NO: 663392
auaguaacaaacauagugc

SEQ ID NO: 663394 - RNA, 19 nt, Artificial Sequence
  Description of Artificial Sequence: Synthetic oligonucleotide
  Sense strand starting at position 2652 of SEQ ID NO: 585734
cuauguuuguuacuauuac

SEQ ID NO: 663395 - RNA, 19 nt, Artificial Sequence
  Description of Artificial Sequence: Synthetic oligonucleotide
  Antisense strand to SEQ ID NO: 663394
guaauaguaacaaacauag

SEQ ID NO: 663396 - RNA, 19 nt, Artificial Sequence
  Description of Artificial Sequence: Synthetic oligonucleotide
  Sense strand starting at position 2664 of SEQ ID NO: 585734
cuauuacugcuggaccgaa

SEQ ID NO: 663397 - RNA, 19 nt, Artificial Sequence
  Description of Artificial Sequence: Synthetic oligonucleotide
  Antisense strand to SEQ ID NO: 663396
uucgguccagcaguaauag

SEQ ID NO: 663398 - RNA, 19 nt, Artificial Sequence
  Description of Artificial Sequence: Synthetic oligonucleotide
  Sense strand starting at position 2972 of SEQ ID NO: 585734
gcucucaucgcccggaauu

SEQ ID NO: 663399 - RNA, 19 nt, Artificial Sequence
  Description of Artificial Sequence: Synthetic oligonucleotide
  Antisense strand to SEQ ID NO: 663398
aauuccgggcgaugagagc

SEQ ID NO: 663400 - RNA, 19 nt, Artificial Sequence
  Description of Artificial Sequence: Synthetic oligonucleotide
  Sense strand starting at position 2973 of SEQ ID NO: 585734
cucucaucgcccggaauuu

SEQ ID NO: 663401 - RNA, 19 nt, Artificial Sequence
  Description of Artificial Sequence: Synthetic oligonucleotide
  Antisense strand to SEQ ID NO: 663400
aaauuccgggcgaugagag

SEQ ID NO: 663402 - RNA, 19 nt, Artificial Sequence
  Description of Artificial Sequence: Synthetic oligonucleotide
  Sense strand starting at position 3331 of SEQ ID NO: 585734
gucuuaucaucucuggaaa

SEQ ID NO: 663403 - RNA, 19 nt, Artificial Sequence
  Description of Artificial Sequence: Synthetic oligonucleotide
  Antisense strand to SEQ ID NO: 663402
uuuccagagaugauaagac

SEQ ID NO: 663404 - RNA, 19 nt, Artificial Sequence
  Description of Artificial Sequence: Synthetic oligonucleotide
  Sense strand starting at position 3802 of SEQ ID NO: 585734
ggucuaugggcugacuagu

SEQ ID NO: 663405 - RNA, 19 nt, Artificial Sequence
  Description of Artificial Sequence: Synthetic oligonucleotide
  Antisense strand to SEQ ID NO: 663404
acuagucagcccauagacc

SEQ ID NO: 663406 - RNA, 19 nt, Artificial Sequence
  Description of Artificial Sequence: Synthetic oligonucleotide
  Sense strand starting at position 3828 of SEQ ID NO: 585734
uagaguagugucugauuuc

SEQ ID NO: 663407 - RNA, 19 nt, Artificial Sequence
  Description of Artificial Sequence: Synthetic oligonucleotide
  Antisense strand to SEQ ID NO: 663406
gaaaucagacacuacucua

SEQ ID NO: 663408 - RNA, 19 nt, Artificial Sequence
  Description of Artificial Sequence: Synthetic oligonucleotide
  Sense strand starting at position 3840 of SEQ ID NO: 585734
ugauuucccucaggacauu

SEQ ID NO: 663409 - RNA, 19 nt, Artificial Sequence
  Description of Artificial Sequence: Synthetic oligonucleotide
  Antisense strand to SEQ ID NO: 663408
aauguccugagggaaauca

SEQ ID NO: 663410 - RNA, 19 nt, Artificial Sequence
  Description of Artificial Sequence: Synthetic oligonucleotide
  Sense strand starting at position 3961 of SEQ ID NO: 585734
uggcacuauugauacugau

SEQ ID NO: 663411 - RNA, 19 nt, Artificial Sequence
  Description of Artificial Sequence: Synthetic oligonucleotide
  Antisense strand to SEQ ID NO: 663410
aucaguaucaauagugcca

SEQ ID NO: 663412 - RNA, 19 nt, Artificial Sequence
  Description of Artificial Sequence: Synthetic oligonucleotide
  Sense strand starting at position 52 of SEQ ID NO: 585735
agcaauuauggcugcccaa

SEQ ID NO: 663413 - RNA, 19 nt, Artificial Sequence
  Description of Artificial Sequence: Synthetic oligonucleotide
  Antisense strand to SEQ ID NO: 663412
uugggcagccauaauugcu

SEQ ID NO: 663414 - RNA, 19 nt, Artificial Sequence
  Description of Artificial Sequence: Synthetic oligonucleotide
  Sense strand starting at position 93 of SEQ ID NO: 585735
ucaggacauugauagggaa

SEQ ID NO: 663415 - RNA, 19 nt, Artificial Sequence
  Description of Artificial Sequence: Synthetic oligonucleotide
  Antisense strand to SEQ ID NO: 663414
uucccuaucaauguccuga

SEQ ID NO: 663416 - RNA, 19 nt, Artificial Sequence
  Description of Artificial Sequence: Synthetic oligonucleotide
  Sense strand starting at position 150 of SEQ ID NO: 585735
ggccaaguggucuauggaa

SEQ ID NO: 663417 - RNA, 19 nt, Artificial Sequence
  Description of Artificial Sequence: Synthetic oligonucleotide
  Antisense strand to SEQ ID NO: 663416
uuccauagaccacuuggcc

SEQ ID NO: 663418 - RNA, 19 nt, Artificial Sequence
  Description of Artificial Sequence: Synthetic oligonucleotide
  Sense strand starting at position 152 of SEQ ID NO: 585735
ccaaguggucuauggaaau

SEQ ID NO: 663419 - RNA, 19 nt, Artificial Sequence
  Description of Artificial Sequence: Synthetic oligonucleotide
  Antisense strand to SEQ ID NO: 663418
auuuccauagaccacuugg

SEQ ID NO: 663420 - RNA, 19 nt, Artificial Sequence
  Description of Artificial Sequence: Synthetic oligonucleotide
  Sense strand starting at position 261 of SEQ ID NO: 585735
agaacagaaucauggaaug

SEQ ID NO: 663421 - RNA, 19 nt, Artificial Sequence
  Description of Artificial Sequence: Synthetic oligonucleotide
  Antisense strand to SEQ ID NO: 663420
cauuccaugauucuguucu

SEQ ID NO: 663422 - RNA, 19 nt, Artificial Sequence
  Description of Artificial Sequence: Synthetic oligonucleotide
  Sense strand starting at position 407 of SEQ ID NO: 585735
ugguuuggaaucugaguaa

SEQ ID NO: 663423 - RNA, 19 nt, Artificial Sequence
  Description of Artificial Sequence: Synthetic oligonucleotide
  Antisense strand to SEQ ID NO: 663422
uuacucagauuccaaacca

SEQ ID NO: 663424 - RNA, 19 nt, Artificial Sequence
  Description of Artificial Sequence: Synthetic oligonucleotide
  Sense strand starting at position 410 of SEQ ID NO: 585735
uuuggaaucugaguaaaug

SEQ ID NO: 663425 - RNA, 19 nt, Artificial Sequence
  Description of Artificial Sequence: Synthetic oligonucleotide
  Antisense strand to SEQ ID NO: 663424
cauuuacucagauuccaaa

SEQ ID NO: 663426 - RNA, 19 nt, Artificial Sequence
  Description of Artificial Sequence: Synthetic oligonucleotide
  Sense strand starting at position 418 of SEQ ID NO: 585735
cugaguaaaugagcagaau

SEQ ID NO: 663427 - RNA, 19 nt, Artificial Sequence
  Description of Artificial Sequence: Synthetic oligonucleotide
  Antisense strand to SEQ ID NO: 663426
auucugcucauuuacucag

SEQ ID NO: 663428 - RNA, 19 nt, Artificial Sequence
  Description of Artificial Sequence: Synthetic oligonucleotide
  Sense strand starting at position 819 of SEQ ID NO: 585735
ugcacauuugaugguguca

SEQ ID NO: 663429 - RNA, 19 nt, Artificial Sequence
  Description of Artificial Sequence: Synthetic oligonucleotide
  Antisense strand to SEQ ID NO: 663428
ugacaccaucaaaugugca

SEQ ID NO: 663430 - RNA, 19 nt, Artificial Sequence
  Description of Artificial Sequence: Synthetic oligonucleotide
  Sense strand starting at position 843 of SEQ ID NO: 585735
cggcauaagcuccaucgau

SEQ ID NO: 663431 - RNA, 19 nt, Artificial Sequence
  Description of Artificial Sequence: Synthetic oligonucleotide
  Antisense strand to SEQ ID NO: 663430
aucgauggagcuuaugccg

SEQ ID NO: 663432 - RNA, 19 nt, Artificial Sequence
  Description of Artificial Sequence: Synthetic oligonucleotide
  Sense strand starting at position 867 of SEQ ID NO: 585735
ggaacucuuuaagauaaag

SEQ ID NO: 663433 - RNA, 19 nt, Artificial Sequence
  Description of Artificial Sequence: Synthetic oligonucleotide
  Antisense strand to SEQ ID NO: 663432
cuuuaucuuaaagaguucc

SEQ ID NO: 663434 - RNA, 19 nt, Artificial Sequence
  Description of Artificial Sequence: Synthetic oligonucleotide
  Sense strand starting at position 1022 of SEQ ID NO: 585735
ugcacacaugccuagaauu

SEQ ID NO: 663435 - RNA, 19 nt, Artificial Sequence
  Description of Artificial Sequence: Synthetic oligonucleotide
  Antisense strand to SEQ ID NO: 663434
aauucuaggcaugugugca

SEQ ID NO: 663436 - RNA, 19 nt, Artificial Sequence
  Description of Artificial Sequence: Synthetic oligonucleotide
  Sense strand starting at position 1077 of SEQ ID NO: 585735
ccaccacuggcaugaguaa

SEQ ID NO: 663437 - RNA, 19 nt, Artificial Sequence
  Description of Artificial Sequence: Synthetic oligonucleotide
  Antisense strand to SEQ ID NO: 663436
uuacucaugccaguggugg

SEQ ID NO: 663438 - RNA, 19 nt, Artificial Sequence
  Description of Artificial Sequence: Synthetic oligonucleotide
  Sense strand starting at position 1086 of SEQ ID NO: 585735
gcaugaguaagugagcauu

SEQ ID NO: 663439 - RNA, 19 nt, Artificial Sequence
  Description of Artificial Sequence: Synthetic oligonucleotide
  Antisense strand to SEQ ID NO: 663438
aaugcucacuuacucaugc

SEQ ID NO: 663440 - RNA, 19 nt, Artificial Sequence
  Description of Artificial Sequence: Synthetic oligonucleotide
  Sense strand starting at position 1089 of SEQ ID NO: 585735
ugaguaagugagcauucua

SEQ ID NO: 663441 - RNA, 19 nt, Artificial Sequence
  Description of Artificial Sequence: Synthetic oligonucleotide
  Antisense strand to SEQ ID NO: 663440
uagaaugcucacuuacuca

SEQ ID NO: 663442 - RNA, 19 nt, Artificial Sequence
  Description of Artificial Sequence: Synthetic oligonucleotide
  Sense strand starting at position 1152 of SEQ ID NO: 585735
gucccaucagaccguaauu

SEQ ID NO: 663443 - RNA, 19 nt, Artificial Sequence
  Description of Artificial Sequence: Synthetic oligonucleotide
  Antisense strand to SEQ ID NO: 663442
aauuacggucugaugggac

SEQ ID NO: 663444 - RNA, 19 nt, Artificial Sequence
  Description of Artificial Sequence: Synthetic oligonucleotide
  Sense strand starting at position 1248 of SEQ ID NO: 585735
ugggaaucguccuccacaa

SEQ ID NO: 663445 - RNA, 19 nt, Artificial Sequence
  Description of Artificial Sequence: Synthetic oligonucleotide
  Antisense strand to SEQ ID NO: 663444
uuguggaggacgauuccca

SEQ ID NO: 663446 - RNA, 19 nt, Artificial Sequence
  Description of Artificial Sequence: Synthetic oligonucleotide
  Sense strand starting at position 1250 of SEQ ID NO: 585735
ggaaucguccuccacaaag

SEQ ID NO: 663447 - RNA, 19 nt, Artificial Sequence
  Description of Artificial Sequence: Synthetic oligonucleotide
  Antisense strand to SEQ ID NO: 663446
cuuuguggaggacgauucc

SEQ ID NO: 663448 - RNA, 19 nt, Artificial Sequence
  Description of Artificial Sequence: Synthetic oligonucleotide
  Sense strand starting at position 1388 of SEQ ID NO: 585735
gcguuaggaacuuaaucca

SEQ ID NO: 663449 - RNA, 19 nt, Artificial Sequence
  Description of Artificial Sequence: Synthetic oligonucleotide
  Antisense strand to SEQ ID NO: 663448
uggauuaaguuccuaacgc

SEQ ID NO: 663450 - RNA, 19 nt, Artificial Sequence
  Description of Artificial Sequence: Synthetic oligonucleotide
  Sense strand starting at position 2075 of SEQ ID NO: 585735
cucacaaacucaucgguuu

SEQ ID NO: 663451 - RNA, 19 nt, Artificial Sequence
  Description of Artificial Sequence: Synthetic oligonucleotide
  Antisense strand to SEQ ID NO: 663450
aaaccgaugaguuugugag

SEQ ID NO: 663452 - RNA, 19 nt, Artificial Sequence
  Description of Artificial Sequence: Synthetic oligonucleotide
  Sense strand starting at position 2078 of SEQ ID NO: 585735
acaaacucaucgguuucua

SEQ ID NO: 663453 - RNA, 19 nt, Artificial Sequence
  Description of Artificial Sequence: Synthetic oligonucleotide
  Antisense strand to SEQ ID NO: 663452
uagaaaccgaugaguuugu

SEQ ID NO: 663454 - RNA, 19 nt, Artificial Sequence
  Description of Artificial Sequence: Synthetic oligonucleotide
  Sense strand starting at position 2082 of SEQ ID NO: 585735
acucaucgguuucuaaaca

SEQ ID NO: 663455 - RNA, 19 nt, Artificial Sequence
  Description of Artificial Sequence: Synthetic oligonucleotide
  Antisense strand to SEQ ID NO: 663454
uguuuagaaaccgaugagu

SEQ ID NO: 663456 - RNA, 19 nt, Artificial Sequence
  Description of Artificial Sequence: Synthetic oligonucleotide
  Sense strand starting at position 2122 of SEQ ID NO: 585735
agggucccuuuaugaauuu

SEQ ID NO: 663457 - RNA, 19 nt, Artificial Sequence
  Description of Artificial Sequence: Synthetic oligonucleotide
  Antisense strand to SEQ ID NO: 663456
aaauucauaaagggacccu

SEQ ID NO: 663458 - RNA, 19 nt, Artificial Sequence
  Description of Artificial Sequence: Synthetic oligonucleotide
  Sense strand starting at position 2208 of SEQ ID NO: 585735
ggaucuuaaaucggccauu

SEQ ID NO: 663459 - RNA, 19 nt, Artificial Sequence
  Description of Artificial Sequence: Synthetic oligonucleotide
  Antisense strand to SEQ ID NO: 663458
aauggccgauuuaagaucc

SEQ ID NO: 663460 - RNA, 19 nt, Artificial Sequence
  Description of Artificial Sequence: Synthetic oligonucleotide
  Sense strand starting at position 2233 of SEQ ID NO: 585735
acagaaggcuggucucuuu

SEQ ID NO: 663461 - RNA, 19 nt, Artificial Sequence
  Description of Artificial Sequence: Synthetic oligonucleotide
  Antisense strand to SEQ ID NO: 663460
aaagagaccagccuucugu

SEQ ID NO: 663462 - RNA, 19 nt, Artificial Sequence
  Description of Artificial Sequence: Synthetic oligonucleotide
  Sense strand starting at position 2267 of SEQ ID NO: 585735
ggagaugguuaugugcaau

SEQ ID NO: 663463 - RNA, 19 nt, Artificial Sequence
  Description of Artificial Sequence: Synthetic oligonucleotide
  Antisense strand to SEQ ID NO: 663462
auugcacauaaccaucucc

SEQ ID NO: 663464 - RNA, 19 nt, Artificial Sequence
  Description of Artificial Sequence: Synthetic oligonucleotide
  Sense strand starting at position 2327 of SEQ ID NO: 585735
gaggcagaugccuguaaga

SEQ ID NO: 663465 - RNA, 19 nt, Artificial Sequence
  Description of Artificial Sequence: Synthetic oligonucleotide
  Antisense strand to SEQ ID NO: 663464
ucuuacaggcaucugccuc

SEQ ID NO: 663466 - RNA, 19 nt, Artificial Sequence
  Description of Artificial Sequence: Synthetic oligonucleotide
  Sense strand starting at position 2329 of SEQ ID NO: 585735
ggcagaugccuguaagauc

SEQ ID NO: 663467 - RNA, 19 nt, Artificial Sequence
  Description of Artificial Sequence: Synthetic oligonucleotide
  Antisense strand to SEQ ID NO: 663466
gaucuuacaggcaucugcc

SEQ ID NO: 663468 - RNA, 19 nt, Artificial Sequence
  Description of Artificial Sequence: Synthetic oligonucleotide
  Sense strand starting at position 2546 of SEQ ID NO: 585735
cucacuuucugagugaaug

SEQ ID NO: 663469 - RNA, 19 nt, Artificial Sequence
  Description of Artificial Sequence: Synthetic oligonucleotide
  Antisense strand to SEQ ID NO: 663468
cauucacucagaaagugag

SEQ ID NO: 663470 - RNA, 19 nt, Artificial Sequence
  Description of Artificial Sequence: Synthetic oligonucleotide
  Sense strand starting at position 2554 of SEQ ID NO: 585735
cugagugaaugguuucuaa

SEQ ID NO: 663471 - RNA, 19 nt, Artificial Sequence
  Description of Artificial Sequence: Synthetic oligonucleotide
  Antisense strand to SEQ ID NO: 663470
uuagaaaccauucacucag

SEQ ID NO: 663472 - RNA, 19 nt, Artificial Sequence
  Description of Artificial Sequence: Synthetic oligonucleotide
  Sense strand starting at position 2557 of SEQ ID NO: 585735
agugaaugguuucuaacuc

SEQ ID NO: 663473 - RNA, 19 nt, Artificial Sequence
  Description of Artificial Sequence: Synthetic oligonucleotide
  Antisense strand to SEQ ID NO: 663472
gaguuagaaaccauucacu

SEQ ID NO: 663474 - RNA, 19 nt, Artificial Sequence
  Description of Artificial Sequence: Synthetic oligonucleotide
  Sense strand starting at position 2703 of SEQ ID NO: 585735
ucugguguccugugacuca

SEQ ID NO: 663475 - RNA, 19 nt, Artificial Sequence
  Description of Artificial Sequence: Synthetic oligonucleotide
  Antisense strand to SEQ ID NO: 663474
ugagucacaggacaccaga

SEQ ID NO: 663476 - RNA, 19 nt, Artificial Sequence
  Description of Artificial Sequence: Synthetic oligonucleotide
  Sense strand starting at position 2717 of SEQ ID NO: 585735
acucauagugacuaucagu

SEQ ID NO: 663477 - RNA, 19 nt, Artificial Sequence
  Description of Artificial Sequence: Synthetic oligonucleotide
  Antisense strand to SEQ ID NO: 663476
acugauagucacuaugagu

SEQ ID NO: 663478 - RNA, 19 nt, Artificial Sequence
  Description of Artificial Sequence: Synthetic oligonucleotide
  Sense strand starting at position 2726 of SEQ ID NO: 585735
gacuaucaguuacugaagu

SEQ ID NO: 663479 - RNA, 19 nt, Artificial Sequence
  Description of Artificial Sequence: Synthetic oligonucleotide
  Antisense strand to SEQ ID NO: 663478
acuucaguaacugauaguc

SEQ ID NO: 663480 - RNA, 19 nt, Artificial Sequence
  Description of Artificial Sequence: Synthetic oligonucleotide
  Sense strand starting at position 2901 of SEQ ID NO: 585735
gcugaaaccuccucuggaa

SEQ ID NO: 663481 - RNA, 19 nt, Artificial Sequence
  Description of Artificial Sequence: Synthetic oligonucleotide
  Antisense strand to SEQ ID NO: 663480
uuccagaggagguuucagc

SEQ ID NO: 663482 - RNA, 19 nt, Artificial Sequence
  Description of Artificial Sequence: Synthetic oligonucleotide
  Sense strand starting at position 2937 of SEQ ID NO: 585735
uucggacucaaaugagagu

SEQ ID NO: 663483 - RNA, 19 nt, Artificial Sequence
  Description of Artificial Sequence: Synthetic oligonucleotide
  Antisense strand to SEQ ID NO: 663482
acucucauuugaguccgaa

SEQ ID NO: 663484 - RNA, 19 nt, Artificial Sequence
  Description of Artificial Sequence: Synthetic oligonucleotide
  Sense strand starting at position 2948 of SEQ ID NO: 585735
augagagugguguguuuaa

SEQ ID NO: 663485 - RNA, 19 nt, Artificial Sequence
  Description of Artificial Sequence: Synthetic oligonucleotide
  Antisense strand to SEQ ID NO: 663484
uuaaacacaccacucucau

SEQ ID NO: 663486 - RNA, 19 nt, Artificial Sequence
  Description of Artificial Sequence: Synthetic oligonucleotide
  Sense strand starting at position 3123 of SEQ ID NO: 585735
auggcuauaguccauagua

SEQ ID NO: 663487 - RNA, 19 nt, Artificial Sequence
  Description of Artificial Sequence: Synthetic oligonucleotide
  Antisense strand to SEQ ID NO: 663486
uacuauggacuauagccau

SEQ ID NO: 663488 - RNA, 19 nt, Artificial Sequence
  Description of Artificial Sequence: Synthetic oligonucleotide
  Sense strand starting at position 3125 of SEQ ID NO: 585735
ggcuauaguccauaguaau

SEQ ID NO: 663489 - RNA, 19 nt, Artificial Sequence
  Description of Artificial Sequence: Synthetic oligonucleotide
  Antisense strand to SEQ ID NO: 663488
auuacuauggacuauagcc

SEQ ID NO: 663490 - RNA, 19 nt, Artificial Sequence
  Description of Artificial Sequence: Synthetic oligonucleotide
  Sense strand starting at position 3321 of SEQ ID NO: 585735
caggaacaugcaugucuaa

SEQ ID NO: 663491 - RNA, 19 nt, Artificial Sequence
  Description of Artificial Sequence: Synthetic oligonucleotide
  Antisense strand to SEQ ID NO: 663490
uuagacaugcauguuccug

SEQ ID NO: 663492 - RNA, 19 nt, Artificial Sequence
  Description of Artificial Sequence: Synthetic oligonucleotide
  Sense strand starting at position 104 of SEQ ID NO: 585736
aguaauaggguccaguguu

SEQ ID NO: 663493 - RNA, 19 nt, Artificial Sequence
  Description of Artificial Sequence: Synthetic oligonucleotide
  Antisense strand to SEQ ID NO: 663492
aacacuggacccuauuacu

SEQ ID NO: 663494 - RNA, 19 nt, Artificial Sequence
  Description of Artificial Sequence: Synthetic oligonucleotide
  Sense strand starting at position 138 of SEQ ID NO: 585736
caguucuuccgauaguauc

SEQ ID NO: 663495 - RNA, 19 nt, Artificial Sequence
  Description of Artificial Sequence: Synthetic oligonucleotide
  Antisense strand to SEQ ID NO: 663494
gauacuaucggaagaacug

SEQ ID NO: 663496 - RNA, 19 nt, Artificial Sequence
  Description of Artificial Sequence: Synthetic oligonucleotide
  Sense strand starting at position 180 of SEQ ID NO: 585736
aaccuauuggaauguguaa

SEQ ID NO: 663497 - RNA, 19 nt, Artificial Sequence
  Description of Artificial Sequence: Synthetic oligonucleotide
  Antisense strand to SEQ ID NO: 663496
uuacacauuccaauagguu

SEQ ID NO: 663498 - RNA, 19 nt, Artificial Sequence
  Description of Artificial Sequence: Synthetic oligonucleotide
  Sense strand starting at position 209 of SEQ ID NO: 585736
gucuuacuuccaugaagau

SEQ ID NO: 663499 - RNA, 19 nt, Artificial Sequence
  Description of Artificial Sequence: Synthetic oligonucleotide
  Antisense strand to SEQ ID NO: 663498
aucuucauggaaguaagac

SEQ ID NO: 663500 - RNA, 19 nt, Artificial Sequence
  Description of Artificial Sequence: Synthetic oligonucleotide
  Sense strand starting at position 266 of SEQ ID NO: 585736
aguuguuauuucuccacga

SEQ ID NO: 663501 - RNA, 19 nt, Artificial Sequence
  Description of Artificial Sequence: Synthetic oligonucleotide
  Antisense strand to SEQ ID NO: 663500
ucguggagaaauaacaacu

SEQ ID NO: 663502 - RNA, 19 nt, Artificial Sequence
  Description of Artificial Sequence: Synthetic oligonucleotide
  Sense strand starting at position 267 of SEQ ID NO: 585736
guuguuauuucuccacgag

SEQ ID NO: 663503 - RNA, 19 nt, Artificial Sequence
  Description of Artificial Sequence: Synthetic oligonucleotide
  Antisense strand to SEQ ID NO: 663502
cucguggagaaauaacaac

SEQ ID NO: 663504 - RNA, 19 nt, Artificial Sequence
  Description of Artificial Sequence: Synthetic oligonucleotide
  Sense strand starting at position 270 of SEQ ID NO: 585736
guuauuucuccacgaguuu

SEQ ID NO: 663505 - RNA, 19 nt, Artificial Sequence
  Description of Artificial Sequence: Synthetic oligonucleotide
  Antisense strand to SEQ ID NO: 663504
aaacucguggagaaauaac

SEQ ID NO: 663506 - RNA, 19 nt, Artificial Sequence
  Description of Artificial Sequence: Synthetic oligonucleotide
  Sense strand starting at position 546 of SEQ ID NO: 585736
auuuguuuacccugguguu

SEQ ID NO: 663507 - RNA, 19 nt, Artificial Sequence
  Description of Artificial Sequence: Synthetic oligonucleotide
  Antisense strand to SEQ ID NO: 663506
aacaccaggguaaacaaau

SEQ ID NO: 663508 - RNA, 19 nt, Artificial Sequence
  Description of Artificial Sequence: Synthetic oligonucleotide
  Sense strand starting at position 558 of SEQ ID NO: 585736
ugguguuauccuggaauga

SEQ ID NO: 663509 - RNA, 19 nt, Artificial Sequence
  Description of Artificial Sequence: Synthetic oligonucleotide
  Antisense strand to SEQ ID NO: 663508
ucauuccaggauaacacca

SEQ ID NO: 663510 - RNA, 19 nt, Artificial Sequence
  Description of Artificial Sequence: Synthetic oligonucleotide
  Sense strand starting at position 559 of SEQ ID NO: 585736
gguguuauccuggaaugaa

SEQ ID NO: 663511 - RNA, 19 nt, Artificial Sequence
  Description of Artificial Sequence: Synthetic oligonucleotide
  Antisense strand to SEQ ID NO: 663510
uucauuccaggauaacacc

SEQ ID NO: 663512 - RNA, 19 nt, Artificial Sequence
  Description of Artificial Sequence: Synthetic oligonucleotide
  Sense strand starting at position 562 of SEQ ID NO: 585736
guuauccuggaaugaaaca

SEQ ID NO: 663513 - RNA, 19 nt, Artificial Sequence
  Description of Artificial Sequence: Synthetic oligonucleotide
  Antisense strand to SEQ ID NO: 663512
uguuucauuccaggauaac

SEQ ID NO: 663514 - RNA, 19 nt, Artificial Sequence
  Description of Artificial Sequence: Synthetic oligonucleotide
  Sense strand starting at position 601 of SEQ ID NO: 585736
ggaauuaauuuauggacau

SEQ ID NO: 663515 - RNA, 19 nt, Artificial Sequence
  Description of Artificial Sequence: Synthetic oligonucleotide
  Antisense strand to SEQ ID NO: 663514
auguccauaaauuaauucc

SEQ ID NO: 663516 - RNA, 19 nt, Artificial Sequence
  Description of Artificial Sequence: Synthetic oligonucleotide
  Sense strand starting at position 627 of SEQ ID NO: 585736
cuaagaaucuaugugcaag

SEQ ID NO: 663517 - RNA, 19 nt, Artificial Sequence
  Description of Artificial Sequence: Synthetic oligonucleotide
  Antisense strand to SEQ ID NO: 663516
cuugcacauagauucuuag

SEQ ID NO: 663518 - RNA, 19 nt, Artificial Sequence
  Description of Artificial Sequence: Synthetic oligonucleotide
  Sense strand starting at position 630 of SEQ ID NO: 585736
agaaucuaugugcaagcaa

SEQ ID NO: 663519 - RNA, 19 nt, Artificial Sequence
  Description of Artificial Sequence: Synthetic oligonucleotide
  Antisense strand to SEQ ID NO: 663518
uugcuugcacauagauucu

SEQ ID NO: 663520 - RNA, 19 nt, Artificial Sequence
  Description of Artificial Sequence: Synthetic oligonucleotide
  Sense strand starting at position 859 of SEQ ID NO: 585736
ugaaacacugcucagucaa

SEQ ID NO: 663521 - RNA, 19 nt, Artificial Sequence
  Description of Artificial Sequence: Synthetic oligonucleotide
  Antisense strand to SEQ ID NO: 663520
uugacugagcaguguuuca

SEQ ID NO: 663522 - RNA, 19 nt, Artificial Sequence
  Description of Artificial Sequence: Synthetic oligonucleotide
  Sense strand starting at position 870 of SEQ ID NO: 585736
ucagucaaaccugaguuau

SEQ ID NO: 663523 - RNA, 19 nt, Artificial Sequence
  Description of Artificial Sequence: Synthetic oligonucleotide
  Antisense strand to SEQ ID NO: 663522
auaacucagguuugacuga

SEQ ID NO: 663524 - RNA, 19 nt, Artificial Sequence
  Description of Artificial Sequence: Synthetic oligonucleotide
  Sense strand starting at position 872 of SEQ ID NO: 585736
agucaaaccugaguuauua

SEQ ID NO: 663525 - RNA, 19 nt, Artificial Sequence
  Description of Artificial Sequence: Synthetic oligonucleotide
  Antisense strand to SEQ ID NO: 663524
uaauaacucagguuugacu

SEQ ID NO: 663526 - RNA, 19 nt, Artificial Sequence
  Description of Artificial Sequence: Synthetic oligonucleotide
  Sense strand starting at position 880 of SEQ ID NO: 585736
cugaguuauuaagcugauc

SEQ ID NO: 663527 - RNA, 19 nt, Artificial Sequence
  Description of Artificial Sequence: Synthetic oligonucleotide
  Antisense strand to SEQ ID NO: 663526
gaucagcuuaauaacucag

SEQ ID NO: 663528 - RNA, 19 nt, Artificial Sequence
  Description of Artificial Sequence: Synthetic oligonucleotide
  Sense strand starting at position 883 of SEQ ID NO: 585736
aguuauuaagcugauccau

SEQ ID NO: 663529 - RNA, 19 nt, Artificial Sequence
  Description of Artificial Sequence: Synthetic oligonucleotide
  Antisense strand to SEQ ID NO: 663528
auggaucagcuuaauaacu

SEQ ID NO: 663530 - RNA, 19 nt, Artificial Sequence
  Description of Artificial Sequence: Synthetic oligonucleotide
  Sense strand starting at position 932 of SEQ ID NO: 585736
uaagguuaguuucuugaag

SEQ ID NO: 663531 - RNA, 19 nt, Artificial Sequence
  Description of Artificial Sequence: Synthetic oligonucleotide
  Antisense strand to SEQ ID NO: 663530
cuucaagaaacuaaccuua

SEQ ID NO: 663532 - RNA, 19 nt, Artificial Sequence
  Description of Artificial Sequence: Synthetic oligonucleotide
  Sense strand starting at position 1809 of SEQ ID NO: 585736
ggacucacccuguaguuau

SEQ ID NO: 663533 - RNA, 19 nt, Artificial Sequence
  Description of Artificial Sequence: Synthetic oligonucleotide
  Antisense strand to SEQ ID NO: 663532
auaacuacagggugagucc

SEQ ID NO: 663534 - RNA, 19 nt, Artificial Sequence
  Description of Artificial Sequence: Synthetic oligonucleotide
  Sense strand starting at position 1826 of SEQ ID NO: 585736
auaguagugcgucugcaca

SEQ ID NO: 663535 - RNA, 19 nt, Artificial Sequence
  Description of Artificial Sequence: Synthetic oligonucleotide
  Antisense strand to SEQ ID NO: 663534
ugugcagacgcacuacuau

SEQ ID NO: 663536 - RNA, 19 nt, Artificial Sequence
  Description of Artificial Sequence: Synthetic oligonucleotide
  Sense strand starting at position 2377 of SEQ ID NO: 585736
uuuaguauauggucaagaa

SEQ ID NO: 663537 - RNA, 19 nt, Artificial Sequence
  Description of Artificial Sequence: Synthetic oligonucleotide
  Antisense strand to SEQ ID NO: 663536
uucuugaccauauacuaaa

SEQ ID NO: 663538 - RNA, 19 nt, Artificial Sequence
  Description of Artificial Sequence: Synthetic oligonucleotide
  Sense strand starting at position 2381 of SEQ ID NO: 585736
guauauggucaagaaaugu

SEQ ID NO: 663539 - RNA, 19 nt, Artificial Sequence
  Description of Artificial Sequence: Synthetic oligonucleotide
  Antisense strand to SEQ ID NO: 663538
acauuucuugaccauauac

SEQ ID NO: 663540 - RNA, 19 nt, Artificial Sequence
  Description of Artificial Sequence: Synthetic oligonucleotide
  Sense strand starting at position 2501 of SEQ ID NO: 585736
gggaccucuuggccauuau

SEQ ID NO: 663541 - RNA, 19 nt, Artificial Sequence
  Description of Artificial Sequence: Synthetic oligonucleotide
  Antisense strand to SEQ ID NO: 663540
auaauggccaagagguccc

SEQ ID NO: 663542 - RNA, 19 nt, Artificial Sequence
  Description of Artificial Sequence: Synthetic oligonucleotide
  Sense strand starting at position 2502 of SEQ ID NO: 585736
ggaccucuuggccauuauu

SEQ ID NO: 663543 - RNA, 19 nt, Artificial Sequence
  Description of Artificial Sequence: Synthetic oligonucleotide
  Antisense strand to SEQ ID NO: 663542
aauaauggccaagaggucc

SEQ ID NO: 663544 - RNA, 19 nt, Artificial Sequence
  Description of Artificial Sequence: Synthetic oligonucleotide
  Sense strand starting at position 2575 of SEQ ID NO: 585736
aagguugugcgggaaggua

SEQ ID NO: 663545 - RNA, 19 nt, Artificial Sequence
  Description of Artificial Sequence: Synthetic oligonucleotide
  Antisense strand to SEQ ID NO: 663544
uaccuucccgcacaaccuu

SEQ ID NO: 663546 - RNA, 19 nt, Artificial Sequence
  Description of Artificial Sequence: Synthetic oligonucleotide
  Sense strand starting at position 2615 of SEQ ID NO: 585736
auaggacuccuuugaaacu

SEQ ID NO: 663547 - RNA, 19 nt, Artificial Sequence
  Description of Artificial Sequence: Synthetic oligonucleotide
  Antisense strand to SEQ ID NO: 663546
aguuucaaaggaguccuau

SEQ ID NO: 663548 - RNA, 19 nt, Artificial Sequence
  Description of Artificial Sequence: Synthetic oligonucleotide
  Sense strand starting at position 2703 of SEQ ID NO: 585736
agugauaauucuccuaagu

SEQ ID NO: 663549 - RNA, 19 nt, Artificial Sequence
  Description of Artificial Sequence: Synthetic oligonucleotide
  Antisense strand to SEQ ID NO: 663548
acuuaggagaauuaucacu

SEQ ID NO: 663550 - RNA, 19 nt, Artificial Sequence
  Description of Artificial Sequence: Synthetic oligonucleotide
  Sense strand starting at position 2884 of SEQ ID NO: 585736
agcagaauauuggugauac

SEQ ID NO: 663551 - RNA, 19 nt, Artificial Sequence
  Description of Artificial Sequence: Synthetic oligonucleotide
  Antisense strand to SEQ ID NO: 663550
guaucaccaauauucugcu

SEQ ID NO: 663552 - RNA, 19 nt, Artificial Sequence
  Description of Artificial Sequence: Synthetic oligonucleotide
  Sense strand starting at position 2895 of SEQ ID NO: 585736
ggugauacaucuuccugga

SEQ ID NO: 663553 - RNA, 19 nt, Artificial Sequence
  Description of Artificial Sequence: Synthetic oligonucleotide
  Antisense strand to SEQ ID NO: 663552
uccaggaagauguaucacc

SEQ ID NO: 663554 - RNA, 19 nt, Artificial Sequence
  Description of Artificial Sequence: Synthetic oligonucleotide
  Sense strand starting at position 2897 of SEQ ID NO: 585736
ugauacaucuuccuggaac

SEQ ID NO: 663555 - RNA, 19 nt, Artificial Sequence
  Description of Artificial Sequence: Synthetic oligonucleotide
  Antisense strand to SEQ ID NO: 663554
guuccaggaagauguauca

SEQ ID NO: 663556 - RNA, 19 nt, Artificial Sequence
  Description of Artificial Sequence: Synthetic oligonucleotide
  Sense strand starting at position 2946 of SEQ ID NO: 585736
ggaauuaaguaguuuacaa

SEQ ID NO: 663557 - RNA, 19 nt, Artificial Sequence
  Description of Artificial Sequence: Synthetic oligonucleotide
  Antisense strand to SEQ ID NO: 663556
uuguaaacuacuuaauucc

SEQ ID NO: 663558 - RNA, 19 nt, Artificial Sequence
  Description of Artificial Sequence: Synthetic oligonucleotide
  Sense strand starting at position 2953 of SEQ ID NO: 585736
aguaguuuacaagguaaau

SEQ ID NO: 663559 - RNA, 19 nt, Artificial Sequence
  Description of Artificial Sequence: Synthetic oligonucleotide
  Antisense strand to SEQ ID NO: 663558
auuuaccuuguaaacuacu

SEQ ID NO: 663560 - RNA, 19 nt, Artificial Sequence
  Description of Artificial Sequence: Synthetic oligonucleotide
  Sense strand starting at position 3656 of SEQ ID NO: 585736
uguaaucuaugacugaaau

SEQ ID NO: 663561 - RNA, 19 nt, Artificial Sequence
  Description of Artificial Sequence: Synthetic oligonucleotide
  Antisense strand to SEQ ID NO: 663560
auuucagucauagauuaca

SEQ ID NO: 663562 - RNA, 19 nt, Artificial Sequence
  Description of Artificial Sequence: Synthetic oligonucleotide
  Sense strand starting at position 3657 of SEQ ID NO: 585736
guaaucuaugacugaaaug

SEQ ID NO: 663563 - RNA, 19 nt, Artificial Sequence
  Description of Artificial Sequence: Synthetic oligonucleotide
  Antisense strand to SEQ ID NO: 663562
cauuucagucauagauuac

SEQ ID NO: 663564 - RNA, 19 nt, Artificial Sequence
  Description of Artificial Sequence: Synthetic oligonucleotide
  Sense strand starting at position 3704 of SEQ ID NO: 585736
augagaaccuguuucccau

SEQ ID NO: 663565 - RNA, 19 nt, Artificial Sequence
  Description of Artificial Sequence: Synthetic oligonucleotide
  Antisense strand to SEQ ID NO: 663564
augggaaacagguucucau

SEQ ID NO: 663566 - RNA, 19 nt, Artificial Sequence
  Description of Artificial Sequence: Synthetic oligonucleotide
  Sense strand starting at position 3888 of SEQ ID NO: 585736
auguaauugucaccagaca

SEQ ID NO: 663567 - RNA, 19 nt, Artificial Sequence
  Description of Artificial Sequence: Synthetic oligonucleotide
  Antisense strand to SEQ ID NO: 663566
ugucuggugacaauuacau

SEQ ID NO: 663568 - RNA, 19 nt, Artificial Sequence
  Description of Artificial Sequence: Synthetic oligonucleotide
  Sense strand starting at position 3889 of SEQ ID NO: 585736
uguaauugucaccagacag

SEQ ID NO: 663569 - RNA, 19 nt, Artificial Sequence
  Description of Artificial Sequence: Synthetic oligonucleotide
  Antisense strand to SEQ ID NO: 663568
cugucuggugacaauuaca

SEQ ID NO: 663570 - RNA, 19 nt, Artificial Sequence
  Description of Artificial Sequence: Synthetic oligonucleotide
  Sense strand starting at position 3939 of SEQ ID NO: 585736
cugaaacaucacggaugua

SEQ ID NO: 663571 - RNA, 19 nt, Artificial Sequence
  Description of Artificial Sequence: Synthetic oligonucleotide
  Antisense strand to SEQ ID NO: 663570
uacauccgugauguuucag

SEQ ID NO: 663572 - RNA, 19 nt, Artificial Sequence
  Description of Artificial Sequence: Synthetic oligonucleotide
  Sense strand starting at position 40 of SEQ ID NO: 585737
gcaacugugagcuagcaau

SEQ ID NO: 663573 - RNA, 19 nt, Artificial Sequence
  Description of Artificial Sequence: Synthetic oligonucleotide
  Antisense strand to SEQ ID NO: 663572
auugcuagcucacaguugc

SEQ ID NO: 663574 - RNA, 19 nt, Artificial Sequence
  Description of Artificial Sequence: Synthetic oligonucleotide
  Sense strand starting at position 61 of SEQ ID NO: 585737
ucccaagaaucagaagaua

SEQ ID NO: 663575 - RNA, 19 nt, Artificial Sequence
  Description of Artificial Sequence: Synthetic oligonucleotide
  Antisense strand to SEQ ID NO: 663574
uaucuucugauucuuggga

SEQ ID NO: 663576 - RNA, 19 nt, Artificial Sequence
  Description of Artificial Sequence: Synthetic oligonucleotide
  Sense strand starting at position 194 of SEQ ID NO: 585737
uguuucuuucgagguggua

SEQ ID NO: 663577 - RNA, 19 nt, Artificial Sequence
  Description of Artificial Sequence: Synthetic oligonucleotide
  Antisense strand to SEQ ID NO: 663576
uaccaccucgaaagaaaca

SEQ ID NO: 663578 - RNA, 19 nt, Artificial Sequence
  Description of Artificial Sequence: Synthetic oligonucleotide
  Sense strand starting at position 196 of SEQ ID NO: 585737
uuucuuucgaggugguaaa

SEQ ID NO: 663579 - RNA, 19 nt, Artificial Sequence
  Description of Artificial Sequence: Synthetic oligonucleotide
  Antisense strand to SEQ ID NO: 663578
uuuaccaccucgaaagaaa

SEQ ID NO: 663580 - RNA, 19 nt, Artificial Sequence
  Description of Artificial Sequence: Synthetic oligonucleotide
  Sense strand starting at position 197 of SEQ ID NO: 585737
uucuuucgaggugguaaau

SEQ ID NO: 663581 - RNA, 19 nt, Artificial Sequence
  Description of Artificial Sequence: Synthetic oligonucleotide
  Antisense strand to SEQ ID NO: 663580
auuuaccaccucgaaagaa

SEQ ID NO: 663582 - RNA, 19 nt, Artificial Sequence
  Description of Artificial Sequence: Synthetic oligonucleotide
  Sense strand starting at position 224 of SEQ ID NO: 585737
uuuggacuucucgggaaua

SEQ ID NO: 663583 - RNA, 19 nt, Artificial Sequence
  Description of Artificial Sequence: Synthetic oligonucleotide
  Antisense strand to SEQ ID NO: 663582
uauucccgagaaguccaaa

SEQ ID NO: 663584 - RNA, 19 nt, Artificial Sequence
  Description of Artificial Sequence: Synthetic oligonucleotide
  Sense strand starting at position 226 of SEQ ID NO: 585737
uggacuucucgggaauagu

SEQ ID NO: 663585 - RNA, 19 nt, Artificial Sequence
  Description of Artificial Sequence: Synthetic oligonucleotide
  Antisense strand to SEQ ID NO: 663584
acuauucccgagaagucca

SEQ ID NO: 663586 - RNA, 19 nt, Artificial Sequence
  Description of Artificial Sequence: Synthetic oligonucleotide
  Sense strand starting at position 287 of SEQ ID NO: 585737
cauguaucuggauguuugu

SEQ ID NO: 663587 - RNA, 19 nt, Artificial Sequence
  Description of Artificial Sequence: Synthetic oligonucleotide
  Antisense strand to SEQ ID NO: 663586
acaaacauccagauacaug

SEQ ID NO: 663588 - RNA, 19 nt, Artificial Sequence
  Description of Artificial Sequence: Synthetic oligonucleotide
  Sense strand starting at position 290 of SEQ ID NO: 585737
guaucuggauguuuguaca

SEQ ID NO: 663589 - RNA, 19 nt, Artificial Sequence
  Description of Artificial Sequence: Synthetic oligonucleotide
  Antisense strand to SEQ ID NO: 663588
uguacaaacauccagauac

SEQ ID NO: 663590 - RNA, 19 nt, Artificial Sequence
  Description of Artificial Sequence: Synthetic oligonucleotide
  Sense strand starting at position 327 of SEQ ID NO: 585737
gacagacuaucugugcuua

SEQ ID NO: 663591 - RNA, 19 nt, Artificial Sequence
  Description of Artificial Sequence: Synthetic oligonucleotide
  Antisense strand to SEQ ID NO: 663590
uaagcacagauagucuguc

SEQ ID NO: 663592 - RNA, 19 nt, Artificial Sequence
  Description of Artificial Sequence: Synthetic oligonucleotide
  Sense strand starting at position 328 of SEQ ID NO: 585737
acagacuaucugugcuuaa

SEQ ID NO: 663593 - RNA, 19 nt, Artificial Sequence
  Description of Artificial Sequence: Synthetic oligonucleotide
  Antisense strand to SEQ ID NO: 663592
uuaagcacagauagucugu

SEQ ID NO: 663594 - RNA, 19 nt, Artificial Sequence
  Description of Artificial Sequence: Synthetic oligonucleotide
  Sense strand starting at position 329 of SEQ ID NO: 585737
cagacuaucugugcuuaag

SEQ ID NO: 663595 - RNA, 19 nt, Artificial Sequence
  Description of Artificial Sequence: Synthetic oligonucleotide
  Antisense strand to SEQ ID NO: 663594
cuuaagcacagauagucug

SEQ ID NO: 663596 - RNA, 19 nt, Artificial Sequence
  Description of Artificial Sequence: Synthetic oligonucleotide
  Sense strand starting at position 363 of SEQ ID NO: 585737
gccugaagaacugagucua

SEQ ID NO: 663597 - RNA, 19 nt, Artificial Sequence
  Description of Artificial Sequence: Synthetic oligonucleotide
  Antisense strand to SEQ ID NO: 663596
uagacucaguucuucaggc

SEQ ID NO: 663598 - RNA, 19 nt, Artificial Sequence
  Description of Artificial Sequence: Synthetic oligonucleotide
  Sense strand starting at position 407 of SEQ ID NO: 585737
ggacaaagguucuagcacu

SEQ ID NO: 663599 - RNA, 19 nt, Artificial Sequence
  Description of Artificial Sequence: Synthetic oligonucleotide
  Antisense strand to SEQ ID NO: 663598
agugcuagaaccuuugucc

SEQ ID NO: 663600 - RNA, 19 nt, Artificial Sequence
  Description of Artificial Sequence: Synthetic oligonucleotide
  Sense strand starting at position 415 of SEQ ID NO: 585737
guucuagcacuugaccaaa

SEQ ID NO: 663601 - RNA, 19 nt, Artificial Sequence
  Description of Artificial Sequence: Synthetic oligonucleotide
  Antisense strand to SEQ ID NO: 663600
uuuggucaagugcuagaac

SEQ ID NO: 663602 - RNA, 19 nt, Artificial Sequence
  Description of Artificial Sequence: Synthetic oligonucleotide
  Sense strand starting at position 443 of SEQ ID NO: 585737
gccagagcccucuaaagcu

SEQ ID NO: 663603 - RNA, 19 nt, Artificial Sequence
  Description of Artificial Sequence: Synthetic oligonucleotide
  Antisense strand to SEQ ID NO: 663602
agcuuuagagggcucuggc

SEQ ID NO: 663604 - RNA, 19 nt, Artificial Sequence
  Description of Artificial Sequence: Synthetic oligonucleotide
  Sense strand starting at position 518 of SEQ ID NO: 585737
ugaagggauuuguguggga

SEQ ID NO: 663605 - RNA, 19 nt, Artificial Sequence
  Description of Artificial Sequence: Synthetic oligonucleotide
  Antisense strand to SEQ ID NO: 663604
ucccacacaaaucccuuca

SEQ ID NO: 663606 - RNA, 19 nt, Artificial Sequence
  Description of Artificial Sequence: Synthetic oligonucleotide
  Sense strand starting at position 523 of SEQ ID NO: 585737
ggauuugugugggaaccau

SEQ ID NO: 663607 - RNA, 19 nt, Artificial Sequence
  Description of Artificial Sequence: Synthetic oligonucleotide
  Antisense strand to SEQ ID NO: 663606
augguucccacacaaaucc

SEQ ID NO: 663608 - RNA, 19 nt, Artificial Sequence
  Description of Artificial Sequence: Synthetic oligonucleotide
  Sense strand starting at position 734 of SEQ ID NO: 585737
cuguuaaggcguuaaguag

SEQ ID NO: 663609 - RNA, 19 nt, Artificial Sequence
  Description of Artificial Sequence: Synthetic oligonucleotide
  Antisense strand to SEQ ID NO: 663608
cuacuuaacgccuuaacag

SEQ ID NO: 663610 - RNA, 19 nt, Artificial Sequence
  Description of Artificial Sequence: Synthetic oligonucleotide
  Sense strand starting at position 746 of SEQ ID NO: 585737
uaaguagaagcuuggauca

SEQ ID NO: 663611 - RNA, 19 nt, Artificial Sequence
  Description of Artificial Sequence: Synthetic oligonucleotide
  Antisense strand to SEQ ID NO: 663610
ugauccaagcuucuacuua

SEQ ID NO: 663612 - RNA, 19 nt, Artificial Sequence
  Description of Artificial Sequence: Synthetic oligonucleotide
  Sense strand starting at position 756 of SEQ ID NO: 585737
cuuggaucauccuaggcaa

SEQ ID NO: 663613 - RNA, 19 nt, Artificial Sequence
  Description of Artificial Sequence: Synthetic oligonucleotide
  Antisense strand to SEQ ID NO: 663612
uugccuaggaugauccaag

SEQ ID NO: 663614 - RNA, 19 nt, Artificial Sequence
  Description of Artificial Sequence: Synthetic oligonucleotide
  Sense strand starting at position 1087 of SEQ ID NO: 585737
gcaucaacaucugcaagaa

SEQ ID NO: 663615 - RNA, 19 nt, Artificial Sequence
  Description of Artificial Sequence: Synthetic oligonucleotide
  Antisense strand to SEQ ID NO: 663614
uucuugcagauguugaugc

SEQ ID NO: 663616 - RNA, 19 nt, Artificial Sequence
  Description of Artificial Sequence: Synthetic oligonucleotide
  Sense strand starting at position 1103 of SEQ ID NO: 585737
gaaggagacgauugucaag

SEQ ID NO: 663617 - RNA, 19 nt, Artificial Sequence
  Description of Artificial Sequence: Synthetic oligonucleotide
  Antisense strand to SEQ ID NO: 663616
cuugacaaucgucuccuuc

SEQ ID NO: 663618 - RNA, 19 nt, Artificial Sequence
  Description of Artificial Sequence: Synthetic oligonucleotide
  Sense strand starting at position 1109 of SEQ ID NO: 585737
gacgauugucaagagcacu

SEQ ID NO: 663619 - RNA, 19 nt, Artificial Sequence
  Description of Artificial Sequence: Synthetic oligonucleotide
  Antisense strand to SEQ ID NO: 663618
agugcucuugacaaucguc

SEQ ID NO: 663620 - RNA, 19 nt, Artificial Sequence
  Description of Artificial Sequence: Synthetic oligonucleotide
  Sense strand starting at position 1121 of SEQ ID NO: 585737
gagcacuucugaguaacga

SEQ ID NO: 663621 - RNA, 19 nt, Artificial Sequence
  Description of Artificial Sequence: Synthetic oligonucleotide
  Antisense strand to SEQ ID NO: 663620
ucguuacucagaagugcuc

SEQ ID NO: 663622 - RNA, 19 nt, Artificial Sequence
  Description of Artificial Sequence: Synthetic oligonucleotide
  Sense strand starting at position 1321 of SEQ ID NO: 585737
ugcacauucgcgccaaacu

SEQ ID NO: 663623 - RNA, 19 nt, Artificial Sequence
  Description of Artificial Sequence: Synthetic oligonucleotide
  Antisense strand to SEQ ID NO: 663622
aguuuggcgcgaaugugca

SEQ ID NO: 663624 - RNA, 19 nt, Artificial Sequence
  Description of Artificial Sequence: Synthetic oligonucleotide
  Sense strand starting at position 1322 of SEQ ID NO: 585737
gcacauucgcgccaaacuu

SEQ ID NO: 663625 - RNA, 19 nt, Artificial Sequence
  Description of Artificial Sequence: Synthetic oligonucleotide
  Antisense strand to SEQ ID NO: 663624
aaguuuggcgcgaaugugc

SEQ ID NO: 663626 - RNA, 19 nt, Artificial Sequence
  Description of Artificial Sequence: Synthetic oligonucleotide
  Sense strand starting at position 1330 of SEQ ID NO: 585737
gcgccaaacuuccuuaagu

SEQ ID NO: 663627 - RNA, 19 nt, Artificial Sequence
  Description of Artificial Sequence: Synthetic oligonucleotide
  Antisense strand to SEQ ID NO: 663626
acuuaaggaaguuuggcgc

SEQ ID NO: 663628 - RNA, 19 nt, Artificial Sequence
  Description of Artificial Sequence: Synthetic oligonucleotide
  Sense strand starting at position 1331 of SEQ ID NO: 585737
cgccaaacuuccuuaaguu

SEQ ID NO: 663629 - RNA, 19 nt, Artificial Sequence
  Description of Artificial Sequence: Synthetic oligonucleotide
  Antisense strand to SEQ ID NO: 663628
aacuuaaggaaguuuggcg

SEQ ID NO: 663630 - RNA, 19 nt, Artificial Sequence
  Description of Artificial Sequence: Synthetic oligonucleotide
  Sense strand starting at position 1381 of SEQ ID NO: 585737
aggagcaaacccuguauua

SEQ ID NO: 663631 - RNA, 19 nt, Artificial Sequence
  Description of Artificial Sequence: Synthetic oligonucleotide
  Antisense strand to SEQ ID NO: 663630
uaauacaggguuugcuccu

SEQ ID NO: 663632 - RNA, 19 nt, Artificial Sequence
  Description of Artificial Sequence: Synthetic oligonucleotide
  Sense strand starting at position 1390 of SEQ ID NO: 585737
cccuguauuaucgggagca

SEQ ID NO: 663633 - RNA, 19 nt, Artificial Sequence
  Description of Artificial Sequence: Synthetic oligonucleotide
  Antisense strand to SEQ ID NO: 663632
ugcucccgauaauacaggg

SEQ ID NO: 663634 - RNA, 19 nt, Artificial Sequence
  Description of Artificial Sequence: Synthetic oligonucleotide
  Sense strand starting at position 1392 of SEQ ID NO: 585737
cuguauuaucgggagcagu

SEQ ID NO: 663635 - RNA, 19 nt, Artificial Sequence
  Description of Artificial Sequence: Synthetic oligonucleotide
  Antisense strand to SEQ ID NO: 663634
acugcucccgauaauacag

SEQ ID NO: 663636 - RNA, 19 nt, Artificial Sequence
  Description of Artificial Sequence: Synthetic oligonucleotide
  Sense strand starting at position 1448 of SEQ ID NO: 585737
gcggcuguaccauaaggua

SEQ ID NO: 663637 - RNA, 19 nt, Artificial Sequence
  Description of Artificial Sequence: Synthetic oligonucleotide
  Antisense strand to SEQ ID NO: 663636
uaccuuaugguacagccgc

SEQ ID NO: 663638 - RNA, 19 nt, Artificial Sequence
  Description of Artificial Sequence: Synthetic oligonucleotide
  Sense strand starting at position 1614 of SEQ ID NO: 585737
ggaguccuguucccaagaa

SEQ ID NO: 663639 - RNA, 19 nt, Artificial Sequence
  Description of Artificial Sequence: Synthetic oligonucleotide
  Antisense strand to SEQ ID NO: 663638
uucuugggaacaggacucc

SEQ ID NO: 663640 - RNA, 19 nt, Artificial Sequence
  Description of Artificial Sequence: Synthetic oligonucleotide
  Sense strand starting at position 1615 of SEQ ID NO: 585737
gaguccuguucccaagaaa

SEQ ID NO: 663641 - RNA, 19 nt, Artificial Sequence
  Description of Artificial Sequence: Synthetic oligonucleotide
  Antisense strand to SEQ ID NO: 663640
uuucuugggaacaggacuc

SEQ ID NO: 663642 - RNA, 19 nt, Artificial Sequence
  Description of Artificial Sequence: Synthetic oligonucleotide
  Sense strand starting at position 2120 of SEQ ID NO: 585737
cugagcuugcgugcucuau

SEQ ID NO: 663643 - RNA, 19 nt, Artificial Sequence
  Description of Artificial Sequence: Synthetic oligonucleotide
  Antisense strand to SEQ ID NO: 663642
auagagcacgcaagcucag

SEQ ID NO: 663644 - RNA, 19 nt, Artificial Sequence
  Description of Artificial Sequence: Synthetic oligonucleotide
  Sense strand starting at position 2220 of SEQ ID NO: 585737
auauaugcucuuggagcaa

SEQ ID NO: 663645 - RNA, 19 nt, Artificial Sequence
  Description of Artificial Sequence: Synthetic oligonucleotide
  Antisense strand to SEQ ID NO: 663644
uugcuccaagagcauauau

SEQ ID NO: 663646 - RNA, 19 nt, Artificial Sequence
  Description of Artificial Sequence: Synthetic oligonucleotide
  Sense strand starting at position 2311 of SEQ ID NO: 585737
agcuauuaacauuguggua

SEQ ID NO: 663647 - RNA, 19 nt, Artificial Sequence
  Description of Artificial Sequence: Synthetic oligonucleotide
  Antisense strand to SEQ ID NO: 663646
uaccacaauguuaauagcu

SEQ ID NO: 663648 - RNA, 19 nt, Artificial Sequence
  Description of Artificial Sequence: Synthetic oligonucleotide
  Sense strand starting at position 2479 of SEQ ID NO: 585737
agccuagccaauggugaaa

SEQ ID NO: 663649 - RNA, 19 nt, Artificial Sequence
  Description of Artificial Sequence: Synthetic oligonucleotide
  Antisense strand to SEQ ID NO: 663648
uuucaccauuggcuaggcu

SEQ ID NO: 663650 - RNA, 19 nt, Artificial Sequence
  Description of Artificial Sequence: Synthetic oligonucleotide
  Sense strand starting at position 3790 of SEQ ID NO: 585737
uucgcuugaaccuggaaga

SEQ ID NO: 663651 - RNA, 19 nt, Artificial Sequence
  Description of Artificial Sequence: Synthetic oligonucleotide
  Antisense strand to SEQ ID NO: 663650
ucuuccagguucaagcgaa

SEQ ID NO: 663652 - RNA, 19 nt, Artificial Sequence
  Description of Artificial Sequence: Synthetic oligonucleotide
  Sense strand starting at position 124 of SEQ ID NO: 585738
gcaacugugagcuagcaau

SEQ ID NO: 663653 - RNA, 19 nt, Artificial Sequence
  Description of Artificial Sequence: Synthetic oligonucleotide
  Antisense strand to SEQ ID NO: 663652
auugcuagcucacaguugc

SEQ ID NO: 663654 - RNA, 19 nt, Artificial Sequence
  Description of Artificial Sequence: Synthetic oligonucleotide
  Sense strand starting at position 145 of SEQ ID NO: 585738
ucccaagaaucagaagaua

SEQ ID NO: 663655 - RNA, 19 nt, Artificial Sequence
  Description of Artificial Sequence: Synthetic oligonucleotide
  Antisense strand to SEQ ID NO: 663654
uaucuucugauucuuggga

SEQ ID NO: 663656 - RNA, 19 nt, Artificial Sequence
  Description of Artificial Sequence: Synthetic oligonucleotide
  Sense strand starting at position 278 of SEQ ID NO: 585738
uguuucuuucgagguggua

SEQ ID NO: 663657 - RNA, 19 nt, Artificial Sequence
  Description of Artificial Sequence: Synthetic oligonucleotide
  Antisense strand to SEQ ID NO: 663656
uaccaccucgaaagaaaca

SEQ ID NO: 663658 - RNA, 19 nt, Artificial Sequence
  Description of Artificial Sequence: Synthetic oligonucleotide
  Sense strand starting at position 280 of SEQ ID NO: 585738
uuucuuucgaggugguaaa

SEQ ID NO: 663659 - RNA, 19 nt, Artificial Sequence
  Description of Artificial Sequence: Synthetic oligonucleotide
  Antisense strand to SEQ ID NO: 663658
uuuaccaccucgaaagaaa

SEQ ID NO: 663660 - RNA, 19 nt, Artificial Sequence
  Description of Artificial Sequence: Synthetic oligonucleotide
  Sense strand starting at position 281 of SEQ ID NO: 585738
uucuuucgaggugguaaau

SEQ ID NO: 663661 - RNA, 19 nt, Artificial Sequence
  Description of Artificial Sequence: Synthetic oligonucleotide
  Antisense strand to SEQ ID NO: 663660
auuuaccaccucgaaagaa

SEQ ID NO: 663662 - RNA, 19 nt, Artificial Sequence
  Description of Artificial Sequence: Synthetic oligonucleotide
  Sense strand starting at position 308 of SEQ ID NO: 585738
uuuggacuucucgggaaua

SEQ ID NO: 663663 - RNA, 19 nt, Artificial Sequence
  Description of Artificial Sequence: Synthetic oligonucleotide
  Antisense strand to SEQ ID NO: 663662
uauucccgagaaguccaaa

SEQ ID NO: 663664 - RNA, 19 nt, Artificial Sequence
  Description of Artificial Sequence: Synthetic oligonucleotide
  Sense strand starting at position 310 of SEQ ID NO: 585738
uggacuucucgggaauagu

SEQ ID NO: 663665 - RNA, 19 nt, Artificial Sequence
  Description of Artificial Sequence: Synthetic oligonucleotide
  Antisense strand to SEQ ID NO: 663664
acuauucccgagaagucca

SEQ ID NO: 663666 - RNA, 19 nt, Artificial Sequence
  Description of Artificial Sequence: Synthetic oligonucleotide
  Sense strand starting at position 371 of SEQ ID NO: 585738
cauguaucuggauguuugu

SEQ ID NO: 663667 - RNA, 19 nt, Artificial Sequence
  Description of Artificial Sequence: Synthetic oligonucleotide
  Antisense strand to SEQ ID NO: 663666
acaaacauccagauacaug

SEQ ID NO: 663668 - RNA, 19 nt, Artificial Sequence
  Description of Artificial Sequence: Synthetic oligonucleotide
  Sense strand starting at position 374 of SEQ ID NO: 585738
guaucuggauguuuguaca

SEQ ID NO: 663669 - RNA, 19 nt, Artificial Sequence
  Description of Artificial Sequence: Synthetic oligonucleotide
  Antisense strand to SEQ ID NO: 663668
uguacaaacauccagauac

SEQ ID NO: 663670 - RNA, 19 nt, Artificial Sequence
  Description of Artificial Sequence: Synthetic oligonucleotide
  Sense strand starting at position 411 of SEQ ID NO: 585738
gacagacuaucugugcuua

SEQ ID NO: 663671 - RNA, 19 nt, Artificial Sequence
  Description of Artificial Sequence: Synthetic oligonucleotide
  Antisense strand to SEQ ID NO: 663670
uaagcacagauagucuguc

SEQ ID NO: 663672 - RNA, 19 nt, Artificial Sequence
  Description of Artificial Sequence: Synthetic oligonucleotide
  Sense strand starting at position 412 of SEQ ID NO: 585738
acagacuaucugugcuuaa

SEQ ID NO: 663673 - RNA, 19 nt, Artificial Sequence
  Description of Artificial Sequence: Synthetic oligonucleotide
  Antisense strand to SEQ ID NO: 663672
uuaagcacagauagucugu

SEQ ID NO: 663674 - RNA, 19 nt, Artificial Sequence
  Description of Artificial Sequence: Synthetic oligonucleotide
  Sense strand starting at position 413 of SEQ ID NO: 585738
cagacuaucugugcuuaag

SEQ ID NO: 663675 - RNA, 19 nt, Artificial Sequence
  Description of Artificial Sequence: Synthetic oligonucleotide
  Antisense strand to SEQ ID NO: 663674
cuuaagcacagauagucug

SEQ ID NO: 663676 - RNA, 19 nt, Artificial Sequence
  Description of Artificial Sequence: Synthetic oligonucleotide
  Sense strand starting at position 447 of SEQ ID NO: 585738
gccugaagaacugagucua

SEQ ID NO: 663677 - RNA, 19 nt, Artificial Sequence
  Description of Artificial Sequence: Synthetic oligonucleotide
  Antisense strand to SEQ ID NO: 663676
uagacucaguucuucaggc

SEQ ID NO: 663678 - RNA, 19 nt, Artificial Sequence
  Description of Artificial Sequence: Synthetic oligonucleotide
  Sense strand starting at position 491 of SEQ ID NO: 585738
ggacaaagguucuagcacu

SEQ ID NO: 663679 - RNA, 19 nt, Artificial Sequence
  Description of Artificial Sequence: Synthetic oligonucleotide
  Antisense strand to SEQ ID NO: 663678
agugcuagaaccuuugucc

SEQ ID NO: 663680 - RNA, 19 nt, Artificial Sequence
  Description of Artificial Sequence: Synthetic oligonucleotide
  Sense strand starting at position 499 of SEQ ID NO: 585738
guucuagcacuugaccaaa

SEQ ID NO: 663681 - RNA, 19 nt, Artificial Sequence
  Description of Artificial Sequence: Synthetic oligonucleotide
  Antisense strand to SEQ ID NO: 663680
uuuggucaagugcuagaac

SEQ ID NO: 663682 - RNA, 19 nt, Artificial Sequence
  Description of Artificial Sequence: Synthetic oligonucleotide
  Sense strand starting at position 527 of SEQ ID NO: 585738
gccagagcccucuaaagcu

SEQ ID NO: 663683 - RNA, 19 nt, Artificial Sequence
  Description of Artificial Sequence: Synthetic oligonucleotide
  Antisense strand to SEQ ID NO: 663682
agcuuuagagggcucuggc

SEQ ID NO: 663684 - RNA, 19 nt, Artificial Sequence
  Description of Artificial Sequence: Synthetic oligonucleotide
  Sense strand starting at position 602 of SEQ ID NO: 585738
ugaagggauuuguguggga

SEQ ID NO: 663685 - RNA, 19 nt, Artificial Sequence
  Description of Artificial Sequence: Synthetic oligonucleotide
  Antisense strand to SEQ ID NO: 663684
ucccacacaaaucccuuca

SEQ ID NO: 663686 - RNA, 19 nt, Artificial Sequence
  Description of Artificial Sequence: Synthetic oligonucleotide
  Sense strand starting at position 607 of SEQ ID NO: 585738
ggauuugugugggaaccau

SEQ ID NO: 663687 - RNA, 19 nt, Artificial Sequence
  Description of Artificial Sequence: Synthetic oligonucleotide
  Antisense strand to SEQ ID NO: 663686
augguucccacacaaaucc

SEQ ID NO: 663688 - RNA, 19 nt, Artificial Sequence
  Description of Artificial Sequence: Synthetic oligonucleotide
  Sense strand starting at position 818 of SEQ ID NO: 585738
cuguuaaggcguuaaguag

SEQ ID NO: 663689 - RNA, 19 nt, Artificial Sequence
  Description of Artificial Sequence: Synthetic oligonucleotide
  Antisense strand to SEQ ID NO: 663688
cuacuuaacgccuuaacag

SEQ ID NO: 663690 - RNA, 19 nt, Artificial Sequence
  Description of Artificial Sequence: Synthetic oligonucleotide
  Sense strand starting at position 830 of SEQ ID NO: 585738
uaaguagaagcuuggauca

SEQ ID NO: 663691 - RNA, 19 nt, Artificial Sequence
  Description of Artificial Sequence: Synthetic oligonucleotide
  Antisense strand to SEQ ID NO: 663690
ugauccaagcuucuacuua

SEQ ID NO: 663692 - RNA, 19 nt, Artificial Sequence
  Description of Artificial Sequence: Synthetic oligonucleotide
  Sense strand starting at position 840 of SEQ ID NO: 585738
cuuggaucauccuaggcaa

SEQ ID NO: 663693 - RNA, 19 nt, Artificial Sequence
  Description of Artificial Sequence: Synthetic oligonucleotide
  Antisense strand to SEQ ID NO: 663692
uugccuaggaugauccaag

SEQ ID NO: 663694 - RNA, 19 nt, Artificial Sequence
  Description of Artificial Sequence: Synthetic oligonucleotide
  Sense strand starting at position 1171 of SEQ ID NO: 585738
gcaucaacaucugcaagaa

SEQ ID NO: 663695 - RNA, 19 nt, Artificial Sequence
  Description of Artificial Sequence: Synthetic oligonucleotide
  Antisense strand to SEQ ID NO: 663694
uucuugcagauguugaugc

SEQ ID NO: 663696 - RNA, 19 nt, Artificial Sequence
  Description of Artificial Sequence: Synthetic oligonucleotide
  Sense strand starting at position 1187 of SEQ ID NO: 585738
gaaggagacgauugucaag

SEQ ID NO: 663697 - RNA, 19 nt, Artificial Sequence
  Description of Artificial Sequence: Synthetic oligonucleotide
  Antisense strand to SEQ ID NO: 663696
cuugacaaucgucuccuuc

SEQ ID NO: 663698 - RNA, 19 nt, Artificial Sequence
  Description of Artificial Sequence: Synthetic oligonucleotide
  Sense strand starting at position 1193 of SEQ ID NO: 585738
gacgauugucaagagcacu

SEQ ID NO: 663699 - RNA, 19 nt, Artificial Sequence
  Description of Artificial Sequence: Synthetic oligonucleotide
  Antisense strand to SEQ ID NO: 663698
agugcucuugacaaucguc

SEQ ID NO: 663700 - RNA, 19 nt, Artificial Sequence
  Description of Artificial Sequence: Synthetic oligonucleotide
  Sense strand starting at position 1205 of SEQ ID NO: 585738
gagcacuucugaguaacga

SEQ ID NO: 663701 - RNA, 19 nt, Artificial Sequence
  Description of Artificial Sequence: Synthetic oligonucleotide
  Antisense strand to SEQ ID NO: 663700
ucguuacucagaagugcuc

SEQ ID NO: 663702 - RNA, 19 nt, Artificial Sequence
  Description of Artificial Sequence: Synthetic oligonucleotide
  Sense strand starting at position 1405 of SEQ ID NO: 585738
ugcacauucgcgccaaacu

SEQ ID NO: 663703 - RNA, 19 nt, Artificial Sequence
  Description of Artificial Sequence: Synthetic oligonucleotide
  Antisense strand to SEQ ID NO: 663702
aguuuggcgcgaaugugca

SEQ ID NO: 663704 - RNA, 19 nt, Artificial Sequence
  Description of Artificial Sequence: Synthetic oligonucleotide
  Sense strand starting at position 1406 of SEQ ID NO: 585738
gcacauucgcgccaaacuu

SEQ ID NO: 663705 - RNA, 19 nt, Artificial Sequence
  Description of Artificial Sequence: Synthetic oligonucleotide
  Antisense strand to SEQ ID NO: 663704
aaguuuggcgcgaaugugc

SEQ ID NO: 663706 - RNA, 19 nt, Artificial Sequence
  Description of Artificial Sequence: Synthetic oligonucleotide
  Sense strand starting at position 1414 of SEQ ID NO: 585738
gcgccaaacuuccuuaagu

SEQ ID NO: 663707 - RNA, 19 nt, Artificial Sequence
  Description of Artificial Sequence: Synthetic oligonucleotide
  Antisense strand to SEQ ID NO: 663706
acuuaaggaaguuuggcgc

SEQ ID NO: 663708 - RNA, 19 nt, Artificial Sequence
  Description of Artificial Sequence: Synthetic oligonucleotide
  Sense strand starting at position 1415 of SEQ ID NO: 585738
cgccaaacuuccuuaaguu

SEQ ID NO: 663709 - RNA, 19 nt, Artificial Sequence
  Description of Artificial Sequence: Synthetic oligonucleotide
  Antisense strand to SEQ ID NO: 663708
aacuuaaggaaguuuggcg

SEQ ID NO: 663710 - RNA, 19 nt, Artificial Sequence
  Description of Artificial Sequence: Synthetic oligonucleotide
  Sense strand starting at position 1465 of SEQ ID NO: 585738
aggagcaaacccuguauua

SEQ ID NO: 663711 - RNA, 19 nt, Artificial Sequence
  Description of Artificial Sequence: Synthetic oligonucleotide
  Antisense strand to SEQ ID NO: 663710
uaauacaggguuugcuccu

SEQ ID NO: 663712 - RNA, 19 nt, Artificial Sequence
  Description of Artificial Sequence: Synthetic oligonucleotide
  Sense strand starting at position 1474 of SEQ ID NO: 585738
cccuguauuaucgggagca

SEQ ID NO: 663713 - RNA, 19 nt, Artificial Sequence
  Description of Artificial Sequence: Synthetic oligonucleotide
  Antisense strand to SEQ ID NO: 663712
ugcucccgauaauacaggg

SEQ ID NO: 663714 - RNA, 19 nt, Artificial Sequence
  Description of Artificial Sequence: Synthetic oligonucleotide
  Sense strand starting at position 1476 of SEQ ID NO: 585738
cuguauuaucgggagcagu

SEQ ID NO: 663715 - RNA, 19 nt, Artificial Sequence
  Description of Artificial Sequence: Synthetic oligonucleotide
  Antisense strand to SEQ ID NO: 663714
acugcucccgauaauacag

SEQ ID NO: 663716 - RNA, 19 nt, Artificial Sequence
  Description of Artificial Sequence: Synthetic oligonucleotide
  Sense strand starting at position 1532 of SEQ ID NO: 585738
gcggcuguaccauaaggua

SEQ ID NO: 663717 - RNA, 19 nt, Artificial Sequence
  Description of Artificial Sequence: Synthetic oligonucleotide
  Antisense strand to SEQ ID NO: 663716
uaccuuaugguacagccgc

SEQ ID NO: 663718 - RNA, 19 nt, Artificial Sequence
  Description of Artificial Sequence: Synthetic oligonucleotide
  Sense strand starting at position 1698 of SEQ ID NO: 585738
ggaguccuguucccaagaa

SEQ ID NO: 663719 - RNA, 19 nt, Artificial Sequence
  Description of Artificial Sequence: Synthetic oligonucleotide
  Antisense strand to SEQ ID NO: 663718
uucuugggaacaggacucc

SEQ ID NO: 663720 - RNA, 19 nt, Artificial Sequence
  Description of Artificial Sequence: Synthetic oligonucleotide
  Sense strand starting at position 1699 of SEQ ID NO: 585738
gaguccuguucccaagaaa

SEQ ID NO: 663721 - RNA, 19 nt, Artificial Sequence
  Description of Artificial Sequence: Synthetic oligonucleotide
  Antisense strand to SEQ ID NO: 663720
uuucuugggaacaggacuc

SEQ ID NO: 663722 - RNA, 19 nt, Artificial Sequence
  Description of Artificial Sequence: Synthetic oligonucleotide
  Sense strand starting at position 2204 of SEQ ID NO: 585738
cugagcuugcgugcucuau

SEQ ID NO: 663723 - RNA, 19 nt, Artificial Sequence
  Description of Artificial Sequence: Synthetic oligonucleotide
  Antisense strand to SEQ ID NO: 663722
auagagcacgcaagcucag

SEQ ID NO: 663724 - RNA, 19 nt, Artificial Sequence
  Description of Artificial Sequence: Synthetic oligonucleotide
  Sense strand starting at position 2304 of SEQ ID NO: 585738
auauaugcucuuggagcaa

SEQ ID NO: 663725 - RNA, 19 nt, Artificial Sequence
  Description of Artificial Sequence: Synthetic oligonucleotide
  Antisense strand to SEQ ID NO: 663724
uugcuccaagagcauauau

SEQ ID NO: 663726 - RNA, 19 nt, Artificial Sequence
  Description of Artificial Sequence: Synthetic oligonucleotide
  Sense strand starting at position 2395 of SEQ ID NO: 585738
agcuauuaacauuguggua

SEQ ID NO: 663727 - RNA, 19 nt, Artificial Sequence
  Description of Artificial Sequence: Synthetic oligonucleotide
  Antisense strand to SEQ ID NO: 663726
uaccacaauguuaauagcu

SEQ ID NO: 663728 - RNA, 19 nt, Artificial Sequence
  Description of Artificial Sequence: Synthetic oligonucleotide
  Sense strand starting at position 2563 of SEQ ID NO: 585738
agccuagccaauggugaaa

SEQ ID NO: 663729 - RNA, 19 nt, Artificial Sequence
  Description of Artificial Sequence: Synthetic oligonucleotide
  Antisense strand to SEQ ID NO: 663728
uuucaccauuggcuaggcu

SEQ ID NO: 663730 - RNA, 19 nt, Artificial Sequence
  Description of Artificial Sequence: Synthetic oligonucleotide
  Sense strand starting at position 3874 of SEQ ID NO: 585738
uucgcuugaaccuggaaga

SEQ ID NO: 663731 - RNA, 19 nt, Artificial Sequence
  Description of Artificial Sequence: Synthetic oligonucleotide
  Antisense strand to SEQ ID NO: 663730
ucuuccagguucaagcgaa

SEQ ID NO: 663732 - RNA, 19 nt, Artificial Sequence
  Description of Artificial Sequence: Synthetic oligonucleotide
  Sense strand starting at position 40 of SEQ ID NO: 585739
gcaacugugagcuagcaau

SEQ ID NO: 663733 - RNA, 19 nt, Artificial Sequence
  Description of Artificial Sequence: Synthetic oligonucleotide
  Antisense strand to SEQ ID NO: 663732
auugcuagcucacaguugc

SEQ ID NO: 663734 - RNA, 19 nt, Artificial Sequence
  Description of Artificial Sequence: Synthetic oligonucleotide
  Sense strand starting at position 61 of SEQ ID NO: 585739
ucccaagaaucagaagaua

SEQ ID NO: 663735 - RNA, 19 nt, Artificial Sequence
  Description of Artificial Sequence: Synthetic oligonucleotide
  Antisense strand to SEQ ID NO: 663734
uaucuucugauucuuggga

SEQ ID NO: 663736 - RNA, 19 nt, Artificial Sequence
  Description of Artificial Sequence: Synthetic oligonucleotide
  Sense strand starting at position 194 of SEQ ID NO: 585739
uguuucuuucgagguggua

SEQ ID NO: 663737 - RNA, 19 nt, Artificial Sequence
  Description of Artificial Sequence: Synthetic oligonucleotide
  Antisense strand to SEQ ID NO: 663736
uaccaccucgaaagaaaca

SEQ ID NO: 663738 - RNA, 19 nt, Artificial Sequence
  Description of Artificial Sequence: Synthetic oligonucleotide
  Sense strand starting at position 196 of SEQ ID NO: 585739
uuucuuucgaggugguaaa

SEQ ID NO: 663739 - RNA, 19 nt, Artificial Sequence
  Description of Artificial Sequence: Synthetic oligonucleotide
  Antisense strand to SEQ ID NO: 663738
uuuaccaccucgaaagaaa

SEQ ID NO: 663740 - RNA, 19 nt, Artificial Sequence
  Description of Artificial Sequence: Synthetic oligonucleotide
  Sense strand starting at position 197 of SEQ ID NO: 585739
uucuuucgaggugguaaau

SEQ ID NO: 663741 - RNA, 19 nt, Artificial Sequence
  Description of Artificial Sequence: Synthetic oligonucleotide
  Antisense strand to SEQ ID NO: 663740
auuuaccaccucgaaagaa

SEQ ID NO: 663742 - RNA, 19 nt, Artificial Sequence
  Description of Artificial Sequence: Synthetic oligonucleotide
  Sense strand starting at position 224 of SEQ ID NO: 585739
uuuggacuucucgggaaua

SEQ ID NO: 663743 - RNA, 19 nt, Artificial Sequence
  Description of Artificial Sequence: Synthetic oligonucleotide
  Antisense strand to SEQ ID NO: 663742
uauucccgagaaguccaaa

SEQ ID NO: 663744 - RNA, 19 nt, Artificial Sequence
  Description of Artificial Sequence: Synthetic oligonucleotide
  Sense strand starting at position 226 of SEQ ID NO: 585739
uggacuucucgggaauagu

SEQ ID NO: 663745 - RNA, 19 nt, Artificial Sequence
  Description of Artificial Sequence: Synthetic oligonucleotide
  Antisense strand to SEQ ID NO: 663744
acuauucccgagaagucca

SEQ ID NO: 663746 - RNA, 19 nt, Artificial Sequence
  Description of Artificial Sequence: Synthetic oligonucleotide
  Sense strand starting at position 287 of SEQ ID NO: 585739
cauguaucuggauguuugu

SEQ ID NO: 663747 - RNA, 19 nt, Artificial Sequence
  Description of Artificial Sequence: Synthetic oligonucleotide
  Antisense strand to SEQ ID NO: 663746
acaaacauccagauacaug

SEQ ID NO: 663748 - RNA, 19 nt, Artificial Sequence
  Description of Artificial Sequence: Synthetic oligonucleotide
  Sense strand starting at position 290 of SEQ ID NO: 585739
guaucuggauguuuguaca

SEQ ID NO: 663749 - RNA, 19 nt, Artificial Sequence
  Description of Artificial Sequence: Synthetic oligonucleotide
  Antisense strand to SEQ ID NO: 663748
uguacaaacauccagauac

SEQ ID NO: 663750 - RNA, 19 nt, Artificial Sequence
  Description of Artificial Sequence: Synthetic oligonucleotide
  Sense strand starting at position 327 of SEQ ID NO: 585739
gacagacuaucugugcuua

SEQ ID NO: 663751 - RNA, 19 nt, Artificial Sequence
  Description of Artificial Sequence: Synthetic oligonucleotide
  Antisense strand to SEQ ID NO: 663750
uaagcacagauagucuguc

SEQ ID NO: 663752 - RNA, 19 nt, Artificial Sequence
  Description of Artificial Sequence: Synthetic oligonucleotide
  Sense strand starting at position 328 of SEQ ID NO: 585739
acagacuaucugugcuuaa

SEQ ID NO: 663753 - RNA, 19 nt, Artificial Sequence
  Description of Artificial Sequence: Synthetic oligonucleotide
  Antisense strand to SEQ ID NO: 663752
uuaagcacagauagucugu

SEQ ID NO: 663754 - RNA, 19 nt, Artificial Sequence
  Description of Artificial Sequence: Synthetic oligonucleotide
  Sense strand starting at position 329 of SEQ ID NO: 585739
cagacuaucugugcuuaag

SEQ ID NO: 663755 - RNA, 19 nt, Artificial Sequence
  Description of Artificial Sequence: Synthetic oligonucleotide
  Antisense strand to SEQ ID NO: 663754
cuuaagcacagauagucug

SEQ ID NO: 663756 - RNA, 19 nt, Artificial Sequence
  Description of Artificial Sequence: Synthetic oligonucleotide
  Sense strand starting at position 363 of SEQ ID NO: 585739
gccugaagaacugagucua

SEQ ID NO: 663757 - RNA, 19 nt, Artificial Sequence
  Description of Artificial Sequence: Synthetic oligonucleotide
  Antisense strand to SEQ ID NO: 663756
uagacucaguucuucaggc

SEQ ID NO: 663758 - RNA, 19 nt, Artificial Sequence
  Description of Artificial Sequence: Synthetic oligonucleotide
  Sense strand starting at position 407 of SEQ ID NO: 585739
ggacaaagguucuagcacu

SEQ ID NO: 663759 - RNA, 19 nt, Artificial Sequence
  Description of Artificial Sequence: Synthetic oligonucleotide
  Antisense strand to SEQ ID NO: 663758
agugcuagaaccuuugucc

SEQ ID NO: 663760 - RNA, 19 nt, Artificial Sequence
  Description of Artificial Sequence: Synthetic oligonucleotide
  Sense strand starting at position 415 of SEQ ID NO: 585739
guucuagcacuugaccaaa

SEQ ID NO: 663761 - RNA, 19 nt, Artificial Sequence
  Description of Artificial Sequence: Synthetic oligonucleotide
  Antisense strand to SEQ ID NO: 663760
uuuggucaagugcuagaac

SEQ ID NO: 663762 - RNA, 19 nt, Artificial Sequence
  Description of Artificial Sequence: Synthetic oligonucleotide
  Sense strand starting at position 443 of SEQ ID NO: 585739
gccagagcccucuaaagcu

SEQ ID NO: 663763 - RNA, 19 nt, Artificial Sequence
  Description of Artificial Sequence: Synthetic oligonucleotide
  Antisense strand to SEQ ID NO: 663762
agcuuuagagggcucuggc

SEQ ID NO: 663764 - RNA, 19 nt, Artificial Sequence
  Description of Artificial Sequence: Synthetic oligonucleotide
  Sense strand starting at position 518 of SEQ ID NO: 585739
ugaagggauuuguguggga

SEQ ID NO: 663765 - RNA, 19 nt, Artificial Sequence
  Description of Artificial Sequence: Synthetic oligonucleotide
  Antisense strand to SEQ ID NO: 663764
ucccacacaaaucccuuca

SEQ ID NO: 663766 - RNA, 19 nt, Artificial Sequence
  Description of Artificial Sequence: Synthetic oligonucleotide
  Sense strand starting at position 523 of SEQ ID NO: 585739
ggauuugugugggaaccau

SEQ ID NO: 663767 - RNA, 19 nt, Artificial Sequence
  Description of Artificial Sequence: Synthetic oligonucleotide
  Antisense strand to SEQ ID NO: 663766
augguucccacacaaaucc

SEQ ID NO: 663768 - RNA, 19 nt, Artificial Sequence
  Description of Artificial Sequence: Synthetic oligonucleotide
  Sense strand starting at position 734 of SEQ ID NO: 585739
cuguuaaggcguuaaguag

SEQ ID NO: 663769 - RNA, 19 nt, Artificial Sequence
  Description of Artificial Sequence: Synthetic oligonucleotide
  Antisense strand to SEQ ID NO: 663768
cuacuuaacgccuuaacag

SEQ ID NO: 663770 - RNA, 19 nt, Artificial Sequence
  Description of Artificial Sequence: Synthetic oligonucleotide
  Sense strand starting at position 746 of SEQ ID NO: 585739
uaaguagaagcuuggauca

SEQ ID NO: 663771 - RNA, 19 nt, Artificial Sequence
  Description of Artificial Sequence: Synthetic oligonucleotide
  Antisense strand to SEQ ID NO: 663770
ugauccaagcuucuacuua

SEQ ID NO: 663772 - RNA, 19 nt, Artificial Sequence
  Description of Artificial Sequence: Synthetic oligonucleotide
  Sense strand starting at position 756 of SEQ ID NO: 585739
cuuggaucauccuaggcaa

SEQ ID NO: 663773 - RNA, 19 nt, Artificial Sequence
  Description of Artificial Sequence: Synthetic oligonucleotide
  Antisense strand to SEQ ID NO: 663772
uugccuaggaugauccaag

SEQ ID NO: 663774 - RNA, 19 nt, Artificial Sequence
  Description of Artificial Sequence: Synthetic oligonucleotide
  Sense strand starting at position 1087 of SEQ ID NO: 585739
gcaucaacaucugcaagaa

SEQ ID NO: 663775 - RNA, 19 nt, Artificial Sequence
  Description of Artificial Sequence: Synthetic oligonucleotide
  Antisense strand to SEQ ID NO: 663774
uucuugcagauguugaugc

SEQ ID NO: 663776 - RNA, 19 nt, Artificial Sequence
  Description of Artificial Sequence: Synthetic oligonucleotide
  Sense strand starting at position 1103 of SEQ ID NO: 585739
gaaggagacgauugucaag

SEQ ID NO: 663777 - RNA, 19 nt, Artificial Sequence
  Description of Artificial Sequence: Synthetic oligonucleotide
  Antisense strand to SEQ ID NO: 663776
cuugacaaucgucuccuuc

SEQ ID NO: 663778 - RNA, 19 nt, Artificial Sequence
  Description of Artificial Sequence: Synthetic oligonucleotide
  Sense strand starting at position 1109 of SEQ ID NO: 585739
gacgauugucaagagcacu

SEQ ID NO: 663779 - RNA, 19 nt, Artificial Sequence
  Description of Artificial Sequence: Synthetic oligonucleotide
  Antisense strand to SEQ ID NO: 663778
agugcucuugacaaucguc

SEQ ID NO: 663780 - RNA, 19 nt, Artificial Sequence
  Description of Artificial Sequence: Synthetic oligonucleotide
  Sense strand starting at position 1121 of SEQ ID NO: 585739
gagcacuucugaguaacga

SEQ ID NO: 663781 - RNA, 19 nt, Artificial Sequence
  Description of Artificial Sequence: Synthetic oligonucleotide
  Antisense strand to SEQ ID NO: 663780
ucguuacucagaagugcuc

SEQ ID NO: 663782 - RNA, 19 nt, Artificial Sequence
  Description of Artificial Sequence: Synthetic oligonucleotide
  Sense strand starting at position 1321 of SEQ ID NO: 585739
ugcacauucgcgccaaacu

SEQ ID NO: 663783 - RNA, 19 nt, Artificial Sequence
  Description of Artificial Sequence: Synthetic oligonucleotide
  Antisense strand to SEQ ID NO: 663782
aguuuggcgcgaaugugca

SEQ ID NO: 663784 - RNA, 19 nt, Artificial Sequence
  Description of Artificial Sequence: Synthetic oligonucleotide
  Sense strand starting at position 1322 of SEQ ID NO: 585739
gcacauucgcgccaaacuu

SEQ ID NO: 663785 - RNA, 19 nt, Artificial Sequence
  Description of Artificial Sequence: Synthetic oligonucleotide
  Antisense strand to SEQ ID NO: 663784
aaguuuggcgcgaaugugc

SEQ ID NO: 663786 - RNA, 19 nt, Artificial Sequence
  Description of Artificial Sequence: Synthetic oligonucleotide
  Sense strand starting at position 1330 of SEQ ID NO: 585739
gcgccaaacuuccuuaagu

SEQ ID NO: 663787 - RNA, 19 nt, Artificial Sequence
  Description of Artificial Sequence: Synthetic oligonucleotide
  Antisense strand to SEQ ID NO: 663786
acuuaaggaaguuuggcgc

SEQ ID NO: 663788 - RNA, 19 nt, Artificial Sequence
  Description of Artificial Sequence: Synthetic oligonucleotide
  Sense strand starting at position 1331 of SEQ ID NO: 585739
cgccaaacuuccuuaaguu

SEQ ID NO: 663789 - RNA, 19 nt, Artificial Sequence
  Description of Artificial Sequence: Synthetic oligonucleotide
  Antisense strand to SEQ ID NO: 663788
aacuuaaggaaguuuggcg

SEQ ID NO: 663790 - RNA, 19 nt, Artificial Sequence
  Description of Artificial Sequence: Synthetic oligonucleotide
  Sense strand starting at position 1381 of SEQ ID NO: 585739
aggagcaaacccuguauua

SEQ ID NO: 663791 - RNA, 19 nt, Artificial Sequence
  Description of Artificial Sequence: Synthetic oligonucleotide
  Antisense strand to SEQ ID NO: 663790
uaauacaggguuugcuccu

SEQ ID NO: 663792 - RNA, 19 nt, Artificial Sequence
  Description of Artificial Sequence: Synthetic oligonucleotide
  Sense strand starting at position 1390 of SEQ ID NO: 585739
cccuguauuaucgggagca

SEQ ID NO: 663793 - RNA, 19 nt, Artificial Sequence
  Description of Artificial Sequence: Synthetic oligonucleotide
  Antisense strand to SEQ ID NO: 663792
ugcucccgauaauacaggg

SEQ ID NO: 663794 - RNA, 19 nt, Artificial Sequence
  Description of Artificial Sequence: Synthetic oligonucleotide
  Sense strand starting at position 1392 of SEQ ID NO: 585739
cuguauuaucgggagcagu

SEQ ID NO: 663795 - RNA, 19 nt, Artificial Sequence
  Description of Artificial Sequence: Synthetic oligonucleotide
  Antisense strand to SEQ ID NO: 663794
acugcucccgauaauacag

SEQ ID NO: 663796 - RNA, 19 nt, Artificial Sequence
  Description of Artificial Sequence: Synthetic oligonucleotide
  Sense strand starting at position 1448 of SEQ ID NO: 585739
gcggcuguaccauaaggua

SEQ ID NO: 663797 - RNA, 19 nt, Artificial Sequence
  Description of Artificial Sequence: Synthetic oligonucleotide
  Antisense strand to SEQ ID NO: 663796
uaccuuaugguacagccgc

SEQ ID NO: 663798 - RNA, 19 nt, Artificial Sequence
  Description of Artificial Sequence: Synthetic oligonucleotide
  Sense strand starting at position 1614 of SEQ ID NO: 585739
ggaguccuguucccaagaa

SEQ ID NO: 663799 - RNA, 19 nt, Artificial Sequence
  Description of Artificial Sequence: Synthetic oligonucleotide
  Antisense strand to SEQ ID NO: 663798
uucuugggaacaggacucc

SEQ ID NO: 663800 - RNA, 19 nt, Artificial Sequence
  Description of Artificial Sequence: Synthetic oligonucleotide
  Sense strand starting at position 1615 of SEQ ID NO: 585739
gaguccuguucccaagaaa

SEQ ID NO: 663801 - RNA, 19 nt, Artificial Sequence
  Description of Artificial Sequence: Synthetic oligonucleotide
  Antisense strand to SEQ ID NO: 663800
uuucuugggaacaggacuc

SEQ ID NO: 663802 - RNA, 19 nt, Artificial Sequence
  Description of Artificial Sequence: Synthetic oligonucleotide
  Sense strand starting at position 2120 of SEQ ID NO: 585739
cugagcuugcgugcucuau

SEQ ID NO: 663803 - RNA, 19 nt, Artificial Sequence
  Description of Artificial Sequence: Synthetic oligonucleotide
  Antisense strand to SEQ ID NO: 663802
auagagcacgcaagcucag

SEQ ID NO: 663804 - RNA, 19 nt, Artificial Sequence
  Description of Artificial Sequence: Synthetic oligonucleotide
  Sense strand starting at position 2220 of SEQ ID NO: 585739
auauaugcucuuggagcaa

SEQ ID NO: 663805 - RNA, 19 nt, Artificial Sequence
  Description of Artificial Sequence: Synthetic oligonucleotide
  Antisense strand to SEQ ID NO: 663804
uugcuccaagagcauauau

SEQ ID NO: 663806 - RNA, 19 nt, Artificial Sequence
  Description of Artificial Sequence: Synthetic oligonucleotide
  Sense strand starting at position 2311 of SEQ ID NO: 585739
agcuauuaacauuguggua

SEQ ID NO: 663807 - RNA, 19 nt, Artificial Sequence
  Description of Artificial Sequence: Synthetic oligonucleotide
  Antisense strand to SEQ ID NO: 663806
uaccacaauguuaauagcu

SEQ ID NO: 663808 - RNA, 19 nt, Artificial Sequence
  Description of Artificial Sequence: Synthetic oligonucleotide
  Sense strand starting at position 2479 of SEQ ID NO: 585739
agccuagccaauggugaaa

SEQ ID NO: 663809 - RNA, 19 nt, Artificial Sequence
  Description of Artificial Sequence: Synthetic oligonucleotide
  Antisense strand to SEQ ID NO: 663808
uuucaccauuggcuaggcu

SEQ ID NO: 663810 - RNA, 19 nt, Artificial Sequence
  Description of Artificial Sequence: Synthetic oligonucleotide
  Sense strand starting at position 3790 of SEQ ID NO: 585739
uucgcuugaaccuggaaga

SEQ ID NO: 663811 - RNA, 19 nt, Artificial Sequence
  Description of Artificial Sequence: Synthetic oligonucleotide
  Antisense strand to SEQ ID NO: 663810
ucuuccagguucaagcgaa

SEQ ID NO: 663812 - RNA, 19 nt, Artificial Sequence
  Description of Artificial Sequence: Synthetic oligonucleotide
  Sense strand starting at position 178 of SEQ ID NO: 585740
gaggguuaucuuugcacua

SEQ ID NO: 663813 - RNA, 19 nt, Artificial Sequence
  Description of Artificial Sequence: Synthetic oligonucleotide
  Antisense strand to SEQ ID NO: 663812
uagugcaaagauaacccuc

SEQ ID NO: 663814 - RNA, 19 nt, Artificial Sequence
  Description of Artificial Sequence: Synthetic oligonucleotide
  Sense strand starting at position 230 of SEQ ID NO: 585740
acacauaaaugcguacaaa

SEQ ID NO: 663815 - RNA, 19 nt, Artificial Sequence
  Description of Artificial Sequence: Synthetic oligonucleotide
  Antisense strand to SEQ ID NO: 663814
uuuguacgcauuuaugugu

SEQ ID NO: 663816 - RNA, 19 nt, Artificial Sequence
  Description of Artificial Sequence: Synthetic oligonucleotide
  Sense strand starting at position 249 of SEQ ID NO: 585740
auugcuugagucugaagaa

SEQ ID NO: 663817 - RNA, 19 nt, Artificial Sequence
  Description of Artificial Sequence: Synthetic oligonucleotide
  Antisense strand to SEQ ID NO: 663816
uucuucagacucaagcaau

SEQ ID NO: 663818 - RNA, 19 nt, Artificial Sequence
  Description of Artificial Sequence: Synthetic oligonucleotide
  Sense strand starting at position 338 of SEQ ID NO: 585740
acugaauugguguaaguca

SEQ ID NO: 663819 - RNA, 19 nt, Artificial Sequence
  Description of Artificial Sequence: Synthetic oligonucleotide
  Antisense strand to SEQ ID NO: 663818
ugacuuacaccaauucagu

SEQ ID NO: 663820 - RNA, 19 nt, Artificial Sequence
  Description of Artificial Sequence: Synthetic oligonucleotide
  Sense strand starting at position 386 of SEQ ID NO: 585740
auaauagcuuucuuguaag

SEQ ID NO: 663821 - RNA, 19 nt, Artificial Sequence
  Description of Artificial Sequence: Synthetic oligonucleotide
  Antisense strand to SEQ ID NO: 663820
cuuacaagaaagcuauuau

SEQ ID NO: 663822 - RNA, 19 nt, Artificial Sequence
  Description of Artificial Sequence: Synthetic oligonucleotide
  Sense strand starting at position 746 of SEQ ID NO: 585740
guggcauuaauggaacagu

SEQ ID NO: 663823 - RNA, 19 nt, Artificial Sequence
  Description of Artificial Sequence: Synthetic oligonucleotide
  Antisense strand to SEQ ID NO: 663822
acuguuccauuaaugccac

SEQ ID NO: 663824 - RNA, 19 nt, Artificial Sequence
  Description of Artificial Sequence: Synthetic oligonucleotide
  Sense strand starting at position 749 of SEQ ID NO: 585740
gcauuaauggaacaguuau

SEQ ID NO: 663825 - RNA, 19 nt, Artificial Sequence
  Description of Artificial Sequence: Synthetic oligonucleotide
  Antisense strand to SEQ ID NO: 663824
auaacuguuccauuaaugc

SEQ ID NO: 663826 - RNA, 19 nt, Artificial Sequence
  Description of Artificial Sequence: Synthetic oligonucleotide
  Sense strand starting at position 777 of SEQ ID NO: 585740
ugcaauaaugccgaaauag

SEQ ID NO: 663827 - RNA, 19 nt, Artificial Sequence
  Description of Artificial Sequence: Synthetic oligonucleotide
  Antisense strand to SEQ ID NO: 663826
cuauuucggcauuauugca

SEQ ID NO: 663828 - RNA, 19 nt, Artificial Sequence
  Description of Artificial Sequence: Synthetic oligonucleotide
  Sense strand starting at position 855 of SEQ ID NO: 585740
ucggauugaacuggcuaga

SEQ ID NO: 663829 - RNA, 19 nt, Artificial Sequence
  Description of Artificial Sequence: Synthetic oligonucleotide
  Antisense strand to SEQ ID NO: 663828
ucuagccaguucaauccga

SEQ ID NO: 663830 - RNA, 19 nt, Artificial Sequence
  Description of Artificial Sequence: Synthetic oligonucleotide
  Sense strand starting at position 882 of SEQ ID NO: 585740
aaacgaacuuguccuguaa

SEQ ID NO: 663831 - RNA, 19 nt, Artificial Sequence
  Description of Artificial Sequence: Synthetic oligonucleotide
  Antisense strand to SEQ ID NO: 663830
uuacaggacaaguucguuu

SEQ ID NO: 663832 - RNA, 19 nt, Artificial Sequence
  Description of Artificial Sequence: Synthetic oligonucleotide
  Sense strand starting at position 926 of SEQ ID NO: 585740
gcucaagaguagguugauu

SEQ ID NO: 663833 - RNA, 19 nt, Artificial Sequence
  Description of Artificial Sequence: Synthetic oligonucleotide
  Antisense strand to SEQ ID NO: 663832
aaucaaccuacucuugagc

SEQ ID NO: 663834 - RNA, 19 nt, Artificial Sequence
  Description of Artificial Sequence: Synthetic oligonucleotide
  Sense strand starting at position 1065 of SEQ ID NO: 585740
ucugaaaccugaguuugaa

SEQ ID NO: 663835 - RNA, 19 nt, Artificial Sequence
  Description of Artificial Sequence: Synthetic oligonucleotide
  Antisense strand to SEQ ID NO: 663834
uucaaacucagguuucaga

SEQ ID NO: 663836 - RNA, 19 nt, Artificial Sequence
  Description of Artificial Sequence: Synthetic oligonucleotide
  Sense strand starting at position 1068 of SEQ ID NO: 585740
gaaaccugaguuugaaauu

SEQ ID NO: 663837 - RNA, 19 nt, Artificial Sequence
  Description of Artificial Sequence: Synthetic oligonucleotide
  Antisense strand to SEQ ID NO: 663836
aauuucaaacucagguuuc

SEQ ID NO: 663838 - RNA, 19 nt, Artificial Sequence
  Description of Artificial Sequence: Synthetic oligonucleotide
  Sense strand starting at position 1108 of SEQ ID NO: 585740
ugcaaacuaccagauguaa

SEQ ID NO: 663839 - RNA, 19 nt, Artificial Sequence
  Description of Artificial Sequence: Synthetic oligonucleotide
  Antisense strand to SEQ ID NO: 663838
uuacaucugguaguuugca

SEQ ID NO: 663840 - RNA, 19 nt, Artificial Sequence
  Description of Artificial Sequence: Synthetic oligonucleotide
  Sense strand starting at position 1143 of SEQ ID NO: 585740
aucuaucugccagauaagu

SEQ ID NO: 663841 - RNA, 19 nt, Artificial Sequence
  Description of Artificial Sequence: Synthetic oligonucleotide
  Antisense strand to SEQ ID NO: 663840
acuuaucuggcagauagau

SEQ ID NO: 663842 - RNA, 19 nt, Artificial Sequence
  Description of Artificial Sequence: Synthetic oligonucleotide
  Sense strand starting at position 1182 of SEQ ID NO: 585740
aaccuacagguuugucaga

SEQ ID NO: 663843 - RNA, 19 nt, Artificial Sequence
  Description of Artificial Sequence: Synthetic oligonucleotide
  Antisense strand to SEQ ID NO: 663842
ucugacaaaccuguagguu

SEQ ID NO: 663844 - RNA, 19 nt, Artificial Sequence
  Description of Artificial Sequence: Synthetic oligonucleotide
  Sense strand starting at position 1184 of SEQ ID NO: 585740
ccuacagguuugucagacu

SEQ ID NO: 663845 - RNA, 19 nt, Artificial Sequence
  Description of Artificial Sequence: Synthetic oligonucleotide
  Antisense strand to SEQ ID NO: 663844
agucugacaaaccuguagg

SEQ ID NO: 663846 - RNA, 19 nt, Artificial Sequence
  Description of Artificial Sequence: Synthetic oligonucleotide
  Sense strand starting at position 1313 of SEQ ID NO: 585740
uuaagugggcuuuauagau

SEQ ID NO: 663847 - RNA, 19 nt, Artificial Sequence
  Description of Artificial Sequence: Synthetic oligonucleotide
  Antisense strand to SEQ ID NO: 663846
aucuauaaagcccacuuaa

SEQ ID NO: 663848 - RNA, 19 nt, Artificial Sequence
  Description of Artificial Sequence: Synthetic oligonucleotide
  Sense strand starting at position 1317 of SEQ ID NO: 585740
gugggcuuuauagaucuga

SEQ ID NO: 663849 - RNA, 19 nt, Artificial Sequence
  Description of Artificial Sequence: Synthetic oligonucleotide
  Antisense strand to SEQ ID NO: 663848
ucagaucuauaaagcccac

SEQ ID NO: 663850 - RNA, 19 nt, Artificial Sequence
  Description of Artificial Sequence: Synthetic oligonucleotide
  Sense strand starting at position 1458 of SEQ ID NO: 585740
caguauugagacugauaca

SEQ ID NO: 663851 - RNA, 19 nt, Artificial Sequence
  Description of Artificial Sequence: Synthetic oligonucleotide
  Antisense strand to SEQ ID NO: 663850
uguaucagucucaauacug

SEQ ID NO: 663852 - RNA, 19 nt, Artificial Sequence
  Description of Artificial Sequence: Synthetic oligonucleotide
  Sense strand starting at position 1596 of SEQ ID NO: 585740
augcuuaaacgcgacacau

SEQ ID NO: 663853 - RNA, 19 nt, Artificial Sequence
  Description of Artificial Sequence: Synthetic oligonucleotide
  Antisense strand to SEQ ID NO: 663852
augugucgcguuuaagcau

SEQ ID NO: 663854 - RNA, 19 nt, Artificial Sequence
  Description of Artificial Sequence: Synthetic oligonucleotide
  Sense strand starting at position 1598 of SEQ ID NO: 585740
gcuuaaacgcgacacauca

SEQ ID NO: 663855 - RNA, 19 nt, Artificial Sequence
  Description of Artificial Sequence: Synthetic oligonucleotide
  Antisense strand to SEQ ID NO: 663854
ugaugugucgcguuuaagc

SEQ ID NO: 663856 - RNA, 19 nt, Artificial Sequence
  Description of Artificial Sequence: Synthetic oligonucleotide
  Sense strand starting at position 1666 of SEQ ID NO: 585740
aagcuaaguguacaacaga

SEQ ID NO: 663857 - RNA, 19 nt, Artificial Sequence
  Description of Artificial Sequence: Synthetic oligonucleotide
  Antisense strand to SEQ ID NO: 663856
ucuguuguacacuuagcuu

SEQ ID NO: 663858 - RNA, 19 nt, Artificial Sequence
  Description of Artificial Sequence: Synthetic oligonucleotide
  Sense strand starting at position 1823 of SEQ ID NO: 585740
uugaaucuugaacgcacua

SEQ ID NO: 663859 - RNA, 19 nt, Artificial Sequence
  Description of Artificial Sequence: Synthetic oligonucleotide
  Antisense strand to SEQ ID NO: 663858
uagugcguucaagauucaa

SEQ ID NO: 663860 - RNA, 19 nt, Artificial Sequence
  Description of Artificial Sequence: Synthetic oligonucleotide
  Sense strand starting at position 1851 of SEQ ID NO: 585740
agcauugacuuguuaaaga

SEQ ID NO: 663861 - RNA, 19 nt, Artificial Sequence
  Description of Artificial Sequence: Synthetic oligonucleotide
  Antisense strand to SEQ ID NO: 663860
ucuuuaacaagucaaugcu

SEQ ID NO: 663862 - RNA, 19 nt, Artificial Sequence
  Description of Artificial Sequence: Synthetic oligonucleotide
  Sense strand starting at position 1870 of SEQ ID NO: 585740
accagauacucgucacgaa

SEQ ID NO: 663863 - RNA, 19 nt, Artificial Sequence
  Description of Artificial Sequence: Synthetic oligonucleotide
  Antisense strand to SEQ ID NO: 663862
uucgugacgaguaucuggu

SEQ ID NO: 663864 - RNA, 19 nt, Artificial Sequence
  Description of Artificial Sequence: Synthetic oligonucleotide
  Sense strand starting at position 1871 of SEQ ID NO: 585740
ccagauacucgucacgaau

SEQ ID NO: 663865 - RNA, 19 nt, Artificial Sequence
  Description of Artificial Sequence: Synthetic oligonucleotide
  Antisense strand to SEQ ID NO: 663864
auucgugacgaguaucugg

SEQ ID NO: 663866 - RNA, 19 nt, Artificial Sequence
  Description of Artificial Sequence: Synthetic oligonucleotide
  Sense strand starting at position 2012 of SEQ ID NO: 585740
cacgcaugccgguauuuaa

SEQ ID NO: 663867 - RNA, 19 nt, Artificial Sequence
  Description of Artificial Sequence: Synthetic oligonucleotide
  Antisense strand to SEQ ID NO: 663866
uuaaauaccggcaugcgug

SEQ ID NO: 663868 - RNA, 19 nt, Artificial Sequence
  Description of Artificial Sequence: Synthetic oligonucleotide
  Sense strand starting at position 2472 of SEQ ID NO: 585740
gggugugauccucaucuuu

SEQ ID NO: 663869 - RNA, 19 nt, Artificial Sequence
  Description of Artificial Sequence: Synthetic oligonucleotide
  Antisense strand to SEQ ID NO: 663868
aaagaugaggaucacaccc

SEQ ID NO: 663870 - RNA, 19 nt, Artificial Sequence
  Description of Artificial Sequence: Synthetic oligonucleotide
  Sense strand starting at position 3036 of SEQ ID NO: 585740
aauauccagucuuugagga

SEQ ID NO: 663871 - RNA, 19 nt, Artificial Sequence
  Description of Artificial Sequence: Synthetic oligonucleotide
  Antisense strand to SEQ ID NO: 663870
uccucaaagacuggauauu

SEQ ID NO: 663872 - RNA, 19 nt, Artificial Sequence
  Description of Artificial Sequence: Synthetic oligonucleotide
  Sense strand starting at position 3162 of SEQ ID NO: 585740
cugccuuuguguuuaauuu

SEQ ID NO: 663873 - RNA, 19 nt, Artificial Sequence
  Description of Artificial Sequence: Synthetic oligonucleotide
  Antisense strand to SEQ ID NO: 663872
aaauuaaacacaaaggcag

SEQ ID NO: 663874 - RNA, 19 nt, Artificial Sequence
  Description of Artificial Sequence: Synthetic oligonucleotide
  Sense strand starting at position 3200 of SEQ ID NO: 585740
cgccaaaccagugagcaau

SEQ ID NO: 663875 - RNA, 19 nt, Artificial Sequence
  Description of Artificial Sequence: Synthetic oligonucleotide
  Antisense strand to SEQ ID NO: 663874
auugcucacugguuuggcg

SEQ ID NO: 663876 - RNA, 19 nt, Artificial Sequence
  Description of Artificial Sequence: Synthetic oligonucleotide
  Sense strand starting at position 3265 of SEQ ID NO: 585740
uacuguuagacuggugagu

SEQ ID NO: 663877 - RNA, 19 nt, Artificial Sequence
  Description of Artificial Sequence: Synthetic oligonucleotide
  Antisense strand to SEQ ID NO: 663876
acucaccagucuaacagua

SEQ ID NO: 663878 - RNA, 19 nt, Artificial Sequence
  Description of Artificial Sequence: Synthetic oligonucleotide
  Sense strand starting at position 3337 of SEQ ID NO: 585740
agaacagagaccugcugua

SEQ ID NO: 663879 - RNA, 19 nt, Artificial Sequence
  Description of Artificial Sequence: Synthetic oligonucleotide
  Antisense strand to SEQ ID NO: 663878
uacagcaggucucuguucu

SEQ ID NO: 663880 - RNA, 19 nt, Artificial Sequence
  Description of Artificial Sequence: Synthetic oligonucleotide
  Sense strand starting at position 3342 of SEQ ID NO: 585740
agagaccugcuguaauguu

SEQ ID NO: 663881 - RNA, 19 nt, Artificial Sequence
  Description of Artificial Sequence: Synthetic oligonucleotide
  Antisense strand to SEQ ID NO: 663880
aacauuacagcaggucucu

SEQ ID NO: 663882 - RNA, 19 nt, Artificial Sequence
  Description of Artificial Sequence: Synthetic oligonucleotide
  Sense strand starting at position 3444 of SEQ ID NO: 585740
gcugcuucucugucaguaa

SEQ ID NO: 663883 - RNA, 19 nt, Artificial Sequence
  Description of Artificial Sequence: Synthetic oligonucleotide
  Antisense strand to SEQ ID NO: 663882
uuacugacagagaagcagc

SEQ ID NO: 663884 - RNA, 19 nt, Artificial Sequence
  Description of Artificial Sequence: Synthetic oligonucleotide
  Sense strand starting at position 3464 of SEQ ID NO: 585740
ucaugcaaauguuuauuga

SEQ ID NO: 663885 - RNA, 19 nt, Artificial Sequence
  Description of Artificial Sequence: Synthetic oligonucleotide
  Antisense strand to SEQ ID NO: 663884
ucaauaaacauuugcauga

SEQ ID NO: 663886 - RNA, 19 nt, Artificial Sequence
  Description of Artificial Sequence: Synthetic oligonucleotide
  Sense strand starting at position 3863 of SEQ ID NO: 585740
gcgcauuucucauuaucua

SEQ ID NO: 663887 - RNA, 19 nt, Artificial Sequence
  Description of Artificial Sequence: Synthetic oligonucleotide
  Antisense strand to SEQ ID NO: 663886
uagauaaugagaaaugcgc

SEQ ID NO: 663888 - RNA, 19 nt, Artificial Sequence
  Description of Artificial Sequence: Synthetic oligonucleotide
  Sense strand starting at position 3894 of SEQ ID NO: 585740
uugauaugcuaagcauauu

SEQ ID NO: 663889 - RNA, 19 nt, Artificial Sequence
  Description of Artificial Sequence: Synthetic oligonucleotide
  Antisense strand to SEQ ID NO: 663888
aauaugcuuagcauaucaa

SEQ ID NO: 663890 - RNA, 19 nt, Artificial Sequence
  Description of Artificial Sequence: Synthetic oligonucleotide
  Sense strand starting at position 3897 of SEQ ID NO: 585740
auaugcuaagcauauuaga

SEQ ID NO: 663891 - RNA, 19 nt, Artificial Sequence
  Description of Artificial Sequence: Synthetic oligonucleotide
  Antisense strand to SEQ ID NO: 663890
ucuaauaugcuuagcauau

SEQ ID NO: 663892 - RNA, 19 nt, Artificial Sequence
  Description of Artificial Sequence: Synthetic oligonucleotide
  Sense strand starting at position 33 of SEQ ID NO: 585741
ugagguugcagugagauaa

SEQ ID NO: 663893 - RNA, 19 nt, Artificial Sequence
  Description of Artificial Sequence: Synthetic oligonucleotide
  Antisense strand to SEQ ID NO: 663892
uuaucucacugcaaccuca

SEQ ID NO: 663894 - RNA, 19 nt, Artificial Sequence
  Description of Artificial Sequence: Synthetic oligonucleotide
  Sense strand starting at position 89 of SEQ ID NO: 585741
agacucugucucgggauaa

SEQ ID NO: 663895 - RNA, 19 nt, Artificial Sequence
  Description of Artificial Sequence: Synthetic oligonucleotide
  Antisense strand to SEQ ID NO: 663894
uuaucccgagacagagucu

SEQ ID NO: 663896 - RNA, 19 nt, Artificial Sequence
  Description of Artificial Sequence: Synthetic oligonucleotide
  Sense strand starting at position 93 of SEQ ID NO: 585741
ucugucucgggauaaauaa

SEQ ID NO: 663897 - RNA, 19 nt, Artificial Sequence
  Description of Artificial Sequence: Synthetic oligonucleotide
  Antisense strand to SEQ ID NO: 663896
uuauuuaucccgagacaga

SEQ ID NO: 663898 - RNA, 19 nt, Artificial Sequence
  Description of Artificial Sequence: Synthetic oligonucleotide
  Sense strand starting at position 373 of SEQ ID NO: 585741
uagauacauccaugaaggu

SEQ ID NO: 663899 - RNA, 19 nt, Artificial Sequence
  Description of Artificial Sequence: Synthetic oligonucleotide
  Antisense strand to SEQ ID NO: 663898
accuucauggauguaucua

SEQ ID NO: 663900 - RNA, 19 nt, Artificial Sequence
  Description of Artificial Sequence: Synthetic oligonucleotide
  Sense strand starting at position 382 of SEQ ID NO: 585741
ccaugaagguuauucucua

SEQ ID NO: 663901 - RNA, 19 nt, Artificial Sequence
  Description of Artificial Sequence: Synthetic oligonucleotide
  Antisense strand to SEQ ID NO: 663900
uagagaauaaccuucaugg

SEQ ID NO: 663902 - RNA, 19 nt, Artificial Sequence
  Description of Artificial Sequence: Synthetic oligonucleotide
  Sense strand starting at position 691 of SEQ ID NO: 585741
aaagaacguuauguaucua

SEQ ID NO: 663903 - RNA, 19 nt, Artificial Sequence
  Description of Artificial Sequence: Synthetic oligonucleotide
  Antisense strand to SEQ ID NO: 663902
uagauacauaacguucuuu

SEQ ID NO: 663904 - RNA, 19 nt, Artificial Sequence
  Description of Artificial Sequence: Synthetic oligonucleotide
  Sense strand starting at position 695 of SEQ ID NO: 585741
aacguuauguaucuagaaa

SEQ ID NO: 663905 - RNA, 19 nt, Artificial Sequence
  Description of Artificial Sequence: Synthetic oligonucleotide
  Antisense strand to SEQ ID NO: 663904
uuucuagauacauaacguu

SEQ ID NO: 663906 - RNA, 19 nt, Artificial Sequence
  Description of Artificial Sequence: Synthetic oligonucleotide
  Sense strand starting at position 696 of SEQ ID NO: 585741
acguuauguaucuagaaag

SEQ ID NO: 663907 - RNA, 19 nt, Artificial Sequence
  Description of Artificial Sequence: Synthetic oligonucleotide
  Antisense strand to SEQ ID NO: 663906
cuuucuagauacauaacgu

SEQ ID NO: 663908 - RNA, 19 nt, Artificial Sequence
  Description of Artificial Sequence: Synthetic oligonucleotide
  Sense strand starting at position 722 of SEQ ID NO: 585741
uucauuagguuuguggaga

SEQ ID NO: 663909 - RNA, 19 nt, Artificial Sequence
  Description of Artificial Sequence: Synthetic oligonucleotide
  Antisense strand to SEQ ID NO: 663908
ucuccacaaaccuaaugaa

SEQ ID NO: 663910 - RNA, 19 nt, Artificial Sequence
  Description of Artificial Sequence: Synthetic oligonucleotide
  Sense strand starting at position 752 of SEQ ID NO: 585741
gugaaauaauauucuugca

SEQ ID NO: 663911 - RNA, 19 nt, Artificial Sequence
  Description of Artificial Sequence: Synthetic oligonucleotide
  Antisense strand to SEQ ID NO: 663910
ugcaagaauauuauuucac

SEQ ID NO: 663912 - RNA, 19 nt, Artificial Sequence
  Description of Artificial Sequence: Synthetic oligonucleotide
  Sense strand starting at position 835 of SEQ ID NO: 585741
aggagugucaauuauggcu

SEQ ID NO: 663913 - RNA, 19 nt, Artificial Sequence
  Description of Artificial Sequence: Synthetic oligonucleotide
  Antisense strand to SEQ ID NO: 663912
agccauaauugacacuccu

SEQ ID NO: 663914 - RNA, 19 nt, Artificial Sequence
  Description of Artificial Sequence: Synthetic oligonucleotide
  Sense strand starting at position 842 of SEQ ID NO: 585741
ucaauuauggcucaucuga

SEQ ID NO: 663915 - RNA, 19 nt, Artificial Sequence
  Description of Artificial Sequence: Synthetic oligonucleotide
  Antisense strand to SEQ ID NO: 663914
ucagaugagccauaauuga

SEQ ID NO: 663916 - RNA, 19 nt, Artificial Sequence
  Description of Artificial Sequence: Synthetic oligonucleotide
  Sense strand starting at position 844 of SEQ ID NO: 585741
aauuauggcucaucugagu

SEQ ID NO: 663917 - RNA, 19 nt, Artificial Sequence
  Description of Artificial Sequence: Synthetic oligonucleotide
  Antisense strand to SEQ ID NO: 663916
acucagaugagccauaauu

SEQ ID NO: 663918 - RNA, 19 nt, Artificial Sequence
  Description of Artificial Sequence: Synthetic oligonucleotide
  Sense strand starting at position 849 of SEQ ID NO: 585741
uggcucaucugaguaaaug

SEQ ID NO: 663919 - RNA, 19 nt, Artificial Sequence
  Description of Artificial Sequence: Synthetic oligonucleotide
  Antisense strand to SEQ ID NO: 663918
cauuuacucagaugagcca

SEQ ID NO: 663920 - RNA, 19 nt, Artificial Sequence
  Description of Artificial Sequence: Synthetic oligonucleotide
  Sense strand starting at position 850 of SEQ ID NO: 585741
ggcucaucugaguaaaugu

SEQ ID NO: 663921 - RNA, 19 nt, Artificial Sequence
  Description of Artificial Sequence: Synthetic oligonucleotide
  Antisense strand to SEQ ID NO: 663920
acauuuacucagaugagcc

SEQ ID NO: 663922 - RNA, 19 nt, Artificial Sequence
  Description of Artificial Sequence: Synthetic oligonucleotide
  Sense strand starting at position 963 of SEQ ID NO: 585741
uccaauucucagggaauau

SEQ ID NO: 663923 - RNA, 19 nt, Artificial Sequence
  Description of Artificial Sequence: Synthetic oligonucleotide
  Antisense strand to SEQ ID NO: 663922
auauucccugagaauugga

SEQ ID NO: 663924 - RNA, 19 nt, Artificial Sequence
  Description of Artificial Sequence: Synthetic oligonucleotide
  Sense strand starting at position 978 of SEQ ID NO: 585741
auauaaauuucgcaggaag

SEQ ID NO: 663925 - RNA, 19 nt, Artificial Sequence
  Description of Artificial Sequence: Synthetic oligonucleotide
  Antisense strand to SEQ ID NO: 663924
cuuccugcgaaauuuauau

SEQ ID NO: 663926 - RNA, 19 nt, Artificial Sequence
  Description of Artificial Sequence: Synthetic oligonucleotide
  Sense strand starting at position 1194 of SEQ ID NO: 585741
gggucagucucucccuaaa

SEQ ID NO: 663927 - RNA, 19 nt, Artificial Sequence
  Description of Artificial Sequence: Synthetic oligonucleotide
  Antisense strand to SEQ ID NO: 663926
uuuagggagagacugaccc

SEQ ID NO: 663928 - RNA, 19 nt, Artificial Sequence
  Description of Artificial Sequence: Synthetic oligonucleotide
  Sense strand starting at position 1235 of SEQ ID NO: 585741
cagucaaggugaucuggau

SEQ ID NO: 663929 - RNA, 19 nt, Artificial Sequence
  Description of Artificial Sequence: Synthetic oligonucleotide
  Antisense strand to SEQ ID NO: 663928
auccagaucaccuugacug

SEQ ID NO: 663930 - RNA, 19 nt, Artificial Sequence
  Description of Artificial Sequence: Synthetic oligonucleotide
  Sense strand starting at position 1241 of SEQ ID NO: 585741
aggugaucuggaugagacu

SEQ ID NO: 663931 - RNA, 19 nt, Artificial Sequence
  Description of Artificial Sequence: Synthetic oligonucleotide
  Antisense strand to SEQ ID NO: 663930
agucucauccagaucaccu

SEQ ID NO: 663932 - RNA, 19 nt, Artificial Sequence
  Description of Artificial Sequence: Synthetic oligonucleotide
  Sense strand starting at position 1533 of SEQ ID NO: 585741
aaagguuaagccugucaca

SEQ ID NO: 663933 - RNA, 19 nt, Artificial Sequence
  Description of Artificial Sequence: Synthetic oligonucleotide
  Antisense strand to SEQ ID NO: 663932
ugugacaggcuuaaccuuu

SEQ ID NO: 663934 - RNA, 19 nt, Artificial Sequence
  Description of Artificial Sequence: Synthetic oligonucleotide
  Sense strand starting at position 1607 of SEQ ID NO: 585741
uccucaguccugcagagua

SEQ ID NO: 663935 - RNA, 19 nt, Artificial Sequence
  Description of Artificial Sequence: Synthetic oligonucleotide
  Antisense strand to SEQ ID NO: 663934
uacucugcaggacugagga

SEQ ID NO: 663936 - RNA, 19 nt, Artificial Sequence
  Description of Artificial Sequence: Synthetic oligonucleotide
  Sense strand starting at position 1787 of SEQ ID NO: 585741
gcucuccggaauuggaaau

SEQ ID NO: 663937 - RNA, 19 nt, Artificial Sequence
  Description of Artificial Sequence: Synthetic oligonucleotide
  Antisense strand to SEQ ID NO: 663936
auuuccaauuccggagagc

SEQ ID NO: 663938 - RNA, 19 nt, Artificial Sequence
  Description of Artificial Sequence: Synthetic oligonucleotide
  Sense strand starting at position 2012 of SEQ ID NO: 585741
acgcgauaucauuauauag

SEQ ID NO: 663939 - RNA, 19 nt, Artificial Sequence
  Description of Artificial Sequence: Synthetic oligonucleotide
  Antisense strand to SEQ ID NO: 663938
cuauauaaugauaucgcgu

SEQ ID NO: 663940 - RNA, 19 nt, Artificial Sequence
  Description of Artificial Sequence: Synthetic oligonucleotide
  Sense strand starting at position 2098 of SEQ ID NO: 585741
cuggauuuaugagaguaug

SEQ ID NO: 663941 - RNA, 19 nt, Artificial Sequence
  Description of Artificial Sequence: Synthetic oligonucleotide
  Antisense strand to SEQ ID NO: 663940
cauacucucauaaauccag

SEQ ID NO: 663942 - RNA, 19 nt, Artificial Sequence
  Description of Artificial Sequence: Synthetic oligonucleotide
  Sense strand starting at position 2108 of SEQ ID NO: 585741
gagaguauggcuuggguac

SEQ ID NO: 663943 - RNA, 19 nt, Artificial Sequence
  Description of Artificial Sequence: Synthetic oligonucleotide
  Antisense strand to SEQ ID NO: 663942
guacccaagccauacucuc

SEQ ID NO: 663944 - RNA, 19 nt, Artificial Sequence
  Description of Artificial Sequence: Synthetic oligonucleotide
  Sense strand starting at position 2238 of SEQ ID NO: 585741
gggugaagugguuagagcu

SEQ ID NO: 663945 - RNA, 19 nt, Artificial Sequence
  Description of Artificial Sequence: Synthetic oligonucleotide
  Antisense strand to SEQ ID NO: 663944
agcucuaaccacuucaccc

SEQ ID NO: 663946 - RNA, 19 nt, Artificial Sequence
  Description of Artificial Sequence: Synthetic oligonucleotide
  Sense strand starting at position 2288 of SEQ ID NO: 585741
cucaaauaucugggaacga

SEQ ID NO: 663947 - RNA, 19 nt, Artificial Sequence
  Description of Artificial Sequence: Synthetic oligonucleotide
  Antisense strand to SEQ ID NO: 663946
ucguucccagauauuugag

SEQ ID NO: 663948 - RNA, 19 nt, Artificial Sequence
  Description of Artificial Sequence: Synthetic oligonucleotide
  Sense strand starting at position 2303 of SEQ ID NO: 585741
acgauuucgcgcugaggaa

SEQ ID NO: 663949 - RNA, 19 nt, Artificial Sequence
  Description of Artificial Sequence: Synthetic oligonucleotide
  Antisense strand to SEQ ID NO: 663948
uuccucagcgcgaaaucgu

SEQ ID NO: 663950 - RNA, 19 nt, Artificial Sequence
  Description of Artificial Sequence: Synthetic oligonucleotide
  Sense strand starting at position 2718 of SEQ ID NO: 585741
agagucacgaaguaguaua

SEQ ID NO: 663951 - RNA, 19 nt, Artificial Sequence
  Description of Artificial Sequence: Synthetic oligonucleotide
  Antisense strand to SEQ ID NO: 663950
uauacuacuucgugacucu

SEQ ID NO: 663952 - RNA, 19 nt, Artificial Sequence
  Description of Artificial Sequence: Synthetic oligonucleotide
  Sense strand starting at position 2728 of SEQ ID NO: 585741
aguaguauaguguaaaggu

SEQ ID NO: 663953 - RNA, 19 nt, Artificial Sequence
  Description of Artificial Sequence: Synthetic oligonucleotide
  Antisense strand to SEQ ID NO: 663952
accuuuacacuauacuacu

SEQ ID NO: 663954 - RNA, 19 nt, Artificial Sequence
  Description of Artificial Sequence: Synthetic oligonucleotide
  Sense strand starting at position 2892 of SEQ ID NO: 585741
cgucguuaggauuagauga

SEQ ID NO: 663955 - RNA, 19 nt, Artificial Sequence
  Description of Artificial Sequence: Synthetic oligonucleotide
  Antisense strand to SEQ ID NO: 663954
ucaucuaauccuaacgacg

SEQ ID NO: 663956 - RNA, 19 nt, Artificial Sequence
  Description of Artificial Sequence: Synthetic oligonucleotide
  Sense strand starting at position 2905 of SEQ ID NO: 585741
agaugaauauguguaagau

SEQ ID NO: 663957 - RNA, 19 nt, Artificial Sequence
  Description of Artificial Sequence: Synthetic oligonucleotide
  Antisense strand to SEQ ID NO: 663956
aucuuacacauauucaucu

SEQ ID NO: 663958 - RNA, 19 nt, Artificial Sequence
  Description of Artificial Sequence: Synthetic oligonucleotide
  Sense strand starting at position 2938 of SEQ ID NO: 585741
agguaaacacuauguguuu

SEQ ID NO: 663959 - RNA, 19 nt, Artificial Sequence
  Description of Artificial Sequence: Synthetic oligonucleotide
  Antisense strand to SEQ ID NO: 663958
aaacacauaguguuuaccu

SEQ ID NO: 663960 - RNA, 19 nt, Artificial Sequence
  Description of Artificial Sequence: Synthetic oligonucleotide
  Sense strand starting at position 3039 of SEQ ID NO: 585741
gugcaaguucugcucuauc

SEQ ID NO: 663961 - RNA, 19 nt, Artificial Sequence
  Description of Artificial Sequence: Synthetic oligonucleotide
  Antisense strand to SEQ ID NO: 663960
gauagagcagaacuugcac

SEQ ID NO: 663962 - RNA, 19 nt, Artificial Sequence
  Description of Artificial Sequence: Synthetic oligonucleotide
  Sense strand starting at position 3589 of SEQ ID NO: 585741
gucucacuccuugucguau

SEQ ID NO: 663963 - RNA, 19 nt, Artificial Sequence
  Description of Artificial Sequence: Synthetic oligonucleotide
  Antisense strand to SEQ ID NO: 663962
auacgacaaggagugagac

SEQ ID NO: 663964 - RNA, 19 nt, Artificial Sequence
  Description of Artificial Sequence: Synthetic oligonucleotide
  Sense strand starting at position 3902 of SEQ ID NO: 585741
caguaccuguaaucugaga

SEQ ID NO: 663965 - RNA, 19 nt, Artificial Sequence
  Description of Artificial Sequence: Synthetic oligonucleotide
  Antisense strand to SEQ ID NO: 663964
ucucagauuacagguacug

SEQ ID NO: 663966 - RNA, 19 nt, Artificial Sequence
  Description of Artificial Sequence: Synthetic oligonucleotide
  Sense strand starting at position 3946 of SEQ ID NO: 585741
uagggauuggugugcagau

SEQ ID NO: 663967 - RNA, 19 nt, Artificial Sequence
  Description of Artificial Sequence: Synthetic oligonucleotide
  Antisense strand to SEQ ID NO: 663966
aucugcacaccaaucccua

SEQ ID NO: 663968 - RNA, 19 nt, Artificial Sequence
  Description of Artificial Sequence: Synthetic oligonucleotide
  Sense strand starting at position 3947 of SEQ ID NO: 585741
agggauuggugugcagaua

SEQ ID NO: 663969 - RNA, 19 nt, Artificial Sequence
  Description of Artificial Sequence: Synthetic oligonucleotide
  Antisense strand to SEQ ID NO: 663968
uaucugcacaccaaucccu

SEQ ID NO: 663970 - RNA, 19 nt, Artificial Sequence
  Description of Artificial Sequence: Synthetic oligonucleotide
  Sense strand starting at position 3948 of SEQ ID NO: 585741
gggauuggugugcagauac

SEQ ID NO: 663971 - RNA, 19 nt, Artificial Sequence
  Description of Artificial Sequence: Synthetic oligonucleotide
  Antisense strand to SEQ ID NO: 663970
guaucugcacaccaauccc

SEQ ID NO: 663972 - RNA, 19 nt, Artificial Sequence
  Description of Artificial Sequence: Synthetic oligonucleotide
  Sense strand starting at position 253 of SEQ ID NO: 585742
uggcuuuggucacuggaaa

SEQ ID NO: 663973 - RNA, 19 nt, Artificial Sequence
  Description of Artificial Sequence: Synthetic oligonucleotide
  Antisense strand to SEQ ID NO: 663972
uuuccagugaccaaagcca

SEQ ID NO: 663974 - RNA, 19 nt, Artificial Sequence
  Description of Artificial Sequence: Synthetic oligonucleotide
  Sense strand starting at position 254 of SEQ ID NO: 585742
ggcuuuggucacuggaaau

SEQ ID NO: 663975 - RNA, 19 nt, Artificial Sequence
  Description of Artificial Sequence: Synthetic oligonucleotide
  Antisense strand to SEQ ID NO: 663974
auuuccagugaccaaagcc

SEQ ID NO: 663976 - RNA, 19 nt, Artificial Sequence
  Description of Artificial Sequence: Synthetic oligonucleotide
  Sense strand starting at position 578 of SEQ ID NO: 585742
ggaucuuuccaaggcacca

SEQ ID NO: 663977 - RNA, 19 nt, Artificial Sequence
  Description of Artificial Sequence: Synthetic oligonucleotide
  Antisense strand to SEQ ID NO: 663976
uggugccuuggaaagaucc

SEQ ID NO: 663978 - RNA, 19 nt, Artificial Sequence
  Description of Artificial Sequence: Synthetic oligonucleotide
  Sense strand starting at position 775 of SEQ ID NO: 585742
aauacauaugucgagcauu

SEQ ID NO: 663979 - RNA, 19 nt, Artificial Sequence
  Description of Artificial Sequence: Synthetic oligonucleotide
  Antisense strand to SEQ ID NO: 663978
aaugcucgacauauguauu

SEQ ID NO: 663980 - RNA, 19 nt, Artificial Sequence
  Description of Artificial Sequence: Synthetic oligonucleotide
  Sense strand starting at position 778 of SEQ ID NO: 585742
acauaugucgagcauuauu

SEQ ID NO: 663981 - RNA, 19 nt, Artificial Sequence
  Description of Artificial Sequence: Synthetic oligonucleotide
  Antisense strand to SEQ ID NO: 663980
aauaaugcucgacauaugu

SEQ ID NO: 663982 - RNA, 19 nt, Artificial Sequence
  Description of Artificial Sequence: Synthetic oligonucleotide
  Sense strand starting at position 878 of SEQ ID NO: 585742
aagguauguuaugugacua

SEQ ID NO: 663983 - RNA, 19 nt, Artificial Sequence
  Description of Artificial Sequence: Synthetic oligonucleotide
  Antisense strand to SEQ ID NO: 663982
uagucacauaacauaccuu

SEQ ID NO: 663984 - RNA, 19 nt, Artificial Sequence
  Description of Artificial Sequence: Synthetic oligonucleotide
  Sense strand starting at position 883 of SEQ ID NO: 585742
auguuaugugacuaucuca

SEQ ID NO: 663985 - RNA, 19 nt, Artificial Sequence
  Description of Artificial Sequence: Synthetic oligonucleotide
  Antisense strand to SEQ ID NO: 663984
ugagauagucacauaacau

SEQ ID NO: 663986 - RNA, 19 nt, Artificial Sequence
  Description of Artificial Sequence: Synthetic oligonucleotide
  Sense strand starting at position 891 of SEQ ID NO: 585742
ugacuaucucaagacguac

SEQ ID NO: 663987 - RNA, 19 nt, Artificial Sequence
  Description of Artificial Sequence: Synthetic oligonucleotide
  Antisense strand to SEQ ID NO: 663986
guacgucuugagauaguca

SEQ ID NO: 663988 - RNA, 19 nt, Artificial Sequence
  Description of Artificial Sequence: Synthetic oligonucleotide
  Sense strand starting at position 999 of SEQ ID NO: 585742
aggagguuuggugagugau

SEQ ID NO: 663989 - RNA, 19 nt, Artificial Sequence
  Description of Artificial Sequence: Synthetic oligonucleotide
  Antisense strand to SEQ ID NO: 663988
aucacucaccaaaccuccu

SEQ ID NO: 663990 - RNA, 19 nt, Artificial Sequence
  Description of Artificial Sequence: Synthetic oligonucleotide
  Sense strand starting at position 1001 of SEQ ID NO: 585742
gagguuuggugagugauua

SEQ ID NO: 663991 - RNA, 19 nt, Artificial Sequence
  Description of Artificial Sequence: Synthetic oligonucleotide
  Antisense strand to SEQ ID NO: 663990
uaaucacucaccaaaccuc

SEQ ID NO: 663992 - RNA, 19 nt, Artificial Sequence
  Description of Artificial Sequence: Synthetic oligonucleotide
  Sense strand starting at position 1002 of SEQ ID NO: 585742
agguuuggugagugauuac

SEQ ID NO: 663993 - RNA, 19 nt, Artificial Sequence
  Description of Artificial Sequence: Synthetic oligonucleotide
  Antisense strand to SEQ ID NO: 663992
guaaucacucaccaaaccu

SEQ ID NO: 663994 - RNA, 19 nt, Artificial Sequence
  Description of Artificial Sequence: Synthetic oligonucleotide
  Sense strand starting at position 1005 of SEQ ID NO: 585742
uuuggugagugauuacaaa

SEQ ID NO: 663995 - RNA, 19 nt, Artificial Sequence
  Description of Artificial Sequence: Synthetic oligonucleotide
  Antisense strand to SEQ ID NO: 663994
uuuguaaucacucaccaaa

SEQ ID NO: 663996 - RNA, 19 nt, Artificial Sequence
  Description of Artificial Sequence: Synthetic oligonucleotide
  Sense strand starting at position 1019 of SEQ ID NO: 585742
acaaaugagccauguuuaa

SEQ ID NO: 663997 - RNA, 19 nt, Artificial Sequence
  Description of Artificial Sequence: Synthetic oligonucleotide
  Antisense strand to SEQ ID NO: 663996
uuaaacauggcucauuugu

SEQ ID NO: 663998 - RNA, 19 nt, Artificial Sequence
  Description of Artificial Sequence: Synthetic oligonucleotide
  Sense strand starting at position 1107 of SEQ ID NO: 585742
ggaacuuucucuucuagga

SEQ ID NO: 663999 - RNA, 19 nt, Artificial Sequence
  Description of Artificial Sequence: Synthetic oligonucleotide
  Antisense strand to SEQ ID NO: 663998
uccuagaagagaaaguucc

SEQ ID NO: 664000 - RNA, 19 nt, Artificial Sequence
  Description of Artificial Sequence: Synthetic oligonucleotide
  Sense strand starting at position 1164 of SEQ ID NO: 585742
ucagauuccguggagcaga

SEQ ID NO: 664001 - RNA, 19 nt, Artificial Sequence
  Description of Artificial Sequence: Synthetic oligonucleotide
  Antisense strand to SEQ ID NO: 664000
ucugcuccacggaaucuga

SEQ ID NO: 664002 - RNA, 19 nt, Artificial Sequence
  Description of Artificial Sequence: Synthetic oligonucleotide
  Sense strand starting at position 1355 of SEQ ID NO: 585742
uucguuuaagaucacauua

SEQ ID NO: 664003 - RNA, 19 nt, Artificial Sequence
  Description of Artificial Sequence: Synthetic oligonucleotide
  Antisense strand to SEQ ID NO: 664002
uaaugugaucuuaaacgaa

SEQ ID NO: 664004 - RNA, 19 nt, Artificial Sequence
  Description of Artificial Sequence: Synthetic oligonucleotide
  Sense strand starting at position 1484 of SEQ ID NO: 585742
caaacugaugcagauuagu

SEQ ID NO: 664005 - RNA, 19 nt, Artificial Sequence
  Description of Artificial Sequence: Synthetic oligonucleotide
  Antisense strand to SEQ ID NO: 664004
acuaaucugcaucaguuug

SEQ ID NO: 664006 - RNA, 19 nt, Artificial Sequence
  Description of Artificial Sequence: Synthetic oligonucleotide
  Sense strand starting at position 1490 of SEQ ID NO: 585742
gaugcagauuaguuuggaa

SEQ ID NO: 664007 - RNA, 19 nt, Artificial Sequence
  Description of Artificial Sequence: Synthetic oligonucleotide
  Antisense strand to SEQ ID NO: 664006
uuccaaacuaaucugcauc

SEQ ID NO: 664008 - RNA, 19 nt, Artificial Sequence
  Description of Artificial Sequence: Synthetic oligonucleotide
  Sense strand starting at position 1492 of SEQ ID NO: 585742
ugcagauuaguuuggaaac

SEQ ID NO: 664009 - RNA, 19 nt, Artificial Sequence
  Description of Artificial Sequence: Synthetic oligonucleotide
  Antisense strand to SEQ ID NO: 664008
guuuccaaacuaaucugca

SEQ ID NO: 664010 - RNA, 19 nt, Artificial Sequence
  Description of Artificial Sequence: Synthetic oligonucleotide
  Sense strand starting at position 1498 of SEQ ID NO: 585742
uuaguuuggaaacgggaau

SEQ ID NO: 664011 - RNA, 19 nt, Artificial Sequence
  Description of Artificial Sequence: Synthetic oligonucleotide
  Antisense strand to SEQ ID NO: 664010
auucccguuuccaaacuaa

SEQ ID NO: 664012 - RNA, 19 nt, Artificial Sequence
  Description of Artificial Sequence: Synthetic oligonucleotide
  Sense strand starting at position 1567 of SEQ ID NO: 585742
gcaacaauuuguuucuugu

SEQ ID NO: 664013 - RNA, 19 nt, Artificial Sequence
  Description of Artificial Sequence: Synthetic oligonucleotide
  Antisense strand to SEQ ID NO: 664012
acaagaaacaaauuguugc

SEQ ID NO: 664014 - RNA, 19 nt, Artificial Sequence
  Description of Artificial Sequence: Synthetic oligonucleotide
  Sense strand starting at position 1745 of SEQ ID NO: 585742
auaguaaaugagcaaugca

SEQ ID NO: 664015 - RNA, 19 nt, Artificial Sequence
  Description of Artificial Sequence: Synthetic oligonucleotide
  Antisense strand to SEQ ID NO: 664014
ugcauugcucauuuacuau

SEQ ID NO: 664016 - RNA, 19 nt, Artificial Sequence
  Description of Artificial Sequence: Synthetic oligonucleotide
  Sense strand starting at position 1748 of SEQ ID NO: 585742
guaaaugagcaaugcauug

SEQ ID NO: 664017 - RNA, 19 nt, Artificial Sequence
  Description of Artificial Sequence: Synthetic oligonucleotide
  Antisense strand to SEQ ID NO: 664016
caaugcauugcucauuuac

SEQ ID NO: 664018 - RNA, 19 nt, Artificial Sequence
  Description of Artificial Sequence: Synthetic oligonucleotide
  Sense strand starting at position 1773 of SEQ ID NO: 585742
gaguucggauucuugagga

SEQ ID NO: 664019 - RNA, 19 nt, Artificial Sequence
  Description of Artificial Sequence: Synthetic oligonucleotide
  Antisense strand to SEQ ID NO: 664018
uccucaagaauccgaacuc

SEQ ID NO: 664020 - RNA, 19 nt, Artificial Sequence
  Description of Artificial Sequence: Synthetic oligonucleotide
  Sense strand starting at position 1869 of SEQ ID NO: 585742
gcaacugugcgauuggcau

SEQ ID NO: 664021 - RNA, 19 nt, Artificial Sequence
  Description of Artificial Sequence: Synthetic oligonucleotide
  Antisense strand to SEQ ID NO: 664020
augccaaucgcacaguugc

SEQ ID NO: 664022 - RNA, 19 nt, Artificial Sequence
  Description of Artificial Sequence: Synthetic oligonucleotide
  Sense strand starting at position 2227 of SEQ ID NO: 585742
gcgacuuuggcagaguaaa

SEQ ID NO: 664023 - RNA, 19 nt, Artificial Sequence
  Description of Artificial Sequence: Synthetic oligonucleotide
  Antisense strand to SEQ ID NO: 664022
uuuacucugccaaagucgc

SEQ ID NO: 664024 - RNA, 19 nt, Artificial Sequence
  Description of Artificial Sequence: Synthetic oligonucleotide
  Sense strand starting at position 2335 of SEQ ID NO: 585742
cuuaauuggcucuaaacga

SEQ ID NO: 664025 - RNA, 19 nt, Artificial Sequence
  Description of Artificial Sequence: Synthetic oligonucleotide
  Antisense strand to SEQ ID NO: 664024
ucguuuagagccaauuaag

SEQ ID NO: 664026 - RNA, 19 nt, Artificial Sequence
  Description of Artificial Sequence: Synthetic oligonucleotide
  Sense strand starting at position 2343 of SEQ ID NO: 585742
gcucuaaacgagggugaaa

SEQ ID NO: 664027 - RNA, 19 nt, Artificial Sequence
  Description of Artificial Sequence: Synthetic oligonucleotide
  Antisense strand to SEQ ID NO: 664026
uuucacccucguuuagagc

SEQ ID NO: 664028 - RNA, 19 nt, Artificial Sequence
  Description of Artificial Sequence: Synthetic oligonucleotide
  Sense strand starting at position 2358 of SEQ ID NO: 585742
gaaaguugagucugaggau

SEQ ID NO: 664029 - RNA, 19 nt, Artificial Sequence
  Description of Artificial Sequence: Synthetic oligonucleotide
  Antisense strand to SEQ ID NO: 664028
auccucagacucaacuuuc

SEQ ID NO: 664030 - RNA, 19 nt, Artificial Sequence
  Description of Artificial Sequence: Synthetic oligonucleotide
  Sense strand starting at position 3136 of SEQ ID NO: 585742
cccuucuguccuggauaau

SEQ ID NO: 664031 - RNA, 19 nt, Artificial Sequence
  Description of Artificial Sequence: Synthetic oligonucleotide
  Antisense strand to SEQ ID NO: 664030
auuauccaggacagaaggg

SEQ ID NO: 664032 - RNA, 19 nt, Artificial Sequence
  Description of Artificial Sequence: Synthetic oligonucleotide
  Sense strand starting at position 3137 of SEQ ID NO: 585742
ccuucuguccuggauaaug

SEQ ID NO: 664033 - RNA, 19 nt, Artificial Sequence
  Description of Artificial Sequence: Synthetic oligonucleotide
  Antisense strand to SEQ ID NO: 664032
cauuauccaggacagaagg

SEQ ID NO: 664034 - RNA, 19 nt, Artificial Sequence
  Description of Artificial Sequence: Synthetic oligonucleotide
  Sense strand starting at position 3202 of SEQ ID NO: 585742
agugcuaauccugaagcau

SEQ ID NO: 664035 - RNA, 19 nt, Artificial Sequence
  Description of Artificial Sequence: Synthetic oligonucleotide
  Antisense strand to SEQ ID NO: 664034
augcuucaggauuagcacu

SEQ ID NO: 664036 - RNA, 19 nt, Artificial Sequence
  Description of Artificial Sequence: Synthetic oligonucleotide
  Sense strand starting at position 3243 of SEQ ID NO: 585742
ggguguuaaaguuaacaca

SEQ ID NO: 664037 - RNA, 19 nt, Artificial Sequence
  Description of Artificial Sequence: Synthetic oligonucleotide
  Antisense strand to SEQ ID NO: 664036
uguguuaacuuuaacaccc

SEQ ID NO: 664038 - RNA, 19 nt, Artificial Sequence
  Description of Artificial Sequence: Synthetic oligonucleotide
  Sense strand starting at position 3306 of SEQ ID NO: 585742
auuccuuuaucuuugagag

SEQ ID NO: 664039 - RNA, 19 nt, Artificial Sequence
  Description of Artificial Sequence: Synthetic oligonucleotide
  Antisense strand to SEQ ID NO: 664038
cucucaaagauaaaggaau

SEQ ID NO: 664040 - RNA, 19 nt, Artificial Sequence
  Description of Artificial Sequence: Synthetic oligonucleotide
  Sense strand starting at position 3307 of SEQ ID NO: 585742
uuccuuuaucuuugagaga

SEQ ID NO: 664041 - RNA, 19 nt, Artificial Sequence
  Description of Artificial Sequence: Synthetic oligonucleotide
  Antisense strand to SEQ ID NO: 664040
ucucucaaagauaaaggaa

SEQ ID NO: 664042 - RNA, 19 nt, Artificial Sequence
  Description of Artificial Sequence: Synthetic oligonucleotide
  Sense strand starting at position 3464 of SEQ ID NO: 585742
caaaguagaguccaaaguu

SEQ ID NO: 664043 - RNA, 19 nt, Artificial Sequence
  Description of Artificial Sequence: Synthetic oligonucleotide
  Antisense strand to SEQ ID NO: 664042
aacuuuggacucuacuuug

SEQ ID NO: 664044 - RNA, 19 nt, Artificial Sequence
  Description of Artificial Sequence: Synthetic oligonucleotide
  Sense strand starting at position 3512 of SEQ ID NO: 585742
uuaugacagucacuuuauc

SEQ ID NO: 664045 - RNA, 19 nt, Artificial Sequence
  Description of Artificial Sequence: Synthetic oligonucleotide
  Antisense strand to SEQ ID NO: 664044
gauaaagugacugucauaa

SEQ ID NO: 664046 - RNA, 19 nt, Artificial Sequence
  Description of Artificial Sequence: Synthetic oligonucleotide
  Sense strand starting at position 3612 of SEQ ID NO: 585742
auuggagauucugugauug

SEQ ID NO: 664047 - RNA, 19 nt, Artificial Sequence
  Description of Artificial Sequence: Synthetic oligonucleotide
  Antisense strand to SEQ ID NO: 664046
caaucacagaaucuccaau

SEQ ID NO: 664048 - RNA, 19 nt, Artificial Sequence
  Description of Artificial Sequence: Synthetic oligonucleotide
  Sense strand starting at position 3616 of SEQ ID NO: 585742
gagauucugugauugacag

SEQ ID NO: 664049 - RNA, 19 nt, Artificial Sequence
  Description of Artificial Sequence: Synthetic oligonucleotide
  Antisense strand to SEQ ID NO: 664048
cugucaaucacagaaucuc

SEQ ID NO: 664050 - RNA, 19 nt, Artificial Sequence
  Description of Artificial Sequence: Synthetic oligonucleotide
  Sense strand starting at position 3617 of SEQ ID NO: 585742
agauucugugauugacaga

SEQ ID NO: 664051 - RNA, 19 nt, Artificial Sequence
  Description of Artificial Sequence: Synthetic oligonucleotide
  Antisense strand to SEQ ID NO: 664050
ucugucaaucacagaaucu

SEQ ID NO: 664052 - RNA, 19 nt, Artificial Sequence
  Description of Artificial Sequence: Synthetic oligonucleotide
  Sense strand starting at position 58 of SEQ ID NO: 585743
gaagaaaccucguuuccua

SEQ ID NO: 664053 - RNA, 19 nt, Artificial Sequence
  Description of Artificial Sequence: Synthetic oligonucleotide
  Antisense strand to SEQ ID NO: 664052
uaggaaacgagguuucuuc

SEQ ID NO: 664054 - RNA, 19 nt, Artificial Sequence
  Description of Artificial Sequence: Synthetic oligonucleotide
  Sense strand starting at position 251 of SEQ ID NO: 585743
uaaacaaugccuggagugu

SEQ ID NO: 664055 - RNA, 19 nt, Artificial Sequence
  Description of Artificial Sequence: Synthetic oligonucleotide
  Antisense strand to SEQ ID NO: 664054
acacuccaggcauuguuua

SEQ ID NO: 664056 - RNA, 19 nt, Artificial Sequence
  Description of Artificial Sequence: Synthetic oligonucleotide
  Sense strand starting at position 328 of SEQ ID NO: 585743
cuaauaaacuuggcauuga

SEQ ID NO: 664057 - RNA, 19 nt, Artificial Sequence
  Description of Artificial Sequence: Synthetic oligonucleotide
  Antisense strand to SEQ ID NO: 664056
ucaaugccaaguuuauuag

SEQ ID NO: 664058 - RNA, 19 nt, Artificial Sequence
  Description of Artificial Sequence: Synthetic oligonucleotide
  Sense strand starting at position 332 of SEQ ID NO: 585743
uaaacuuggcauugagaug

SEQ ID NO: 664059 - RNA, 19 nt, Artificial Sequence
  Description of Artificial Sequence: Synthetic oligonucleotide
  Antisense strand to SEQ ID NO: 664058
caucucaaugccaaguuua

SEQ ID NO: 664060 - RNA, 19 nt, Artificial Sequence
  Description of Artificial Sequence: Synthetic oligonucleotide
  Sense strand starting at position 337 of SEQ ID NO: 585743
uuggcauugagaugaaaca

SEQ ID NO: 664061 - RNA, 19 nt, Artificial Sequence
  Description of Artificial Sequence: Synthetic oligonucleotide
  Antisense strand to SEQ ID NO: 664060
uguuucaucucaaugccaa

SEQ ID NO: 664062 - RNA, 19 nt, Artificial Sequence
  Description of Artificial Sequence: Synthetic oligonucleotide
  Sense strand starting at position 362 of SEQ ID NO: 585743
aaagacauguauccggaua

SEQ ID NO: 664063 - RNA, 19 nt, Artificial Sequence
  Description of Artificial Sequence: Synthetic oligonucleotide
  Antisense strand to SEQ ID NO: 664062
uauccggauacaugucuuu

SEQ ID NO: 664064 - RNA, 19 nt, Artificial Sequence
  Description of Artificial Sequence: Synthetic oligonucleotide
  Sense strand starting at position 383 of SEQ ID NO: 585743
gauaaauacuguucugagu

SEQ ID NO: 664065 - RNA, 19 nt, Artificial Sequence
  Description of Artificial Sequence: Synthetic oligonucleotide
  Antisense strand to SEQ ID NO: 664064
acucagaacaguauuuauc

SEQ ID NO: 664066 - RNA, 19 nt, Artificial Sequence
  Description of Artificial Sequence: Synthetic oligonucleotide
  Sense strand starting at position 513 of SEQ ID NO: 585743
ccaguacuggauuaacagu

SEQ ID NO: 664067 - RNA, 19 nt, Artificial Sequence
  Description of Artificial Sequence: Synthetic oligonucleotide
  Antisense strand to SEQ ID NO: 664066
acuguuaauccaguacugg

SEQ ID NO: 664068 - RNA, 19 nt, Artificial Sequence
  Description of Artificial Sequence: Synthetic oligonucleotide
  Sense strand starting at position 533 of SEQ ID NO: 585743
uuguuugaaagauguguuu

SEQ ID NO: 664069 - RNA, 19 nt, Artificial Sequence
  Description of Artificial Sequence: Synthetic oligonucleotide
  Antisense strand to SEQ ID NO: 664068
aaacacaucuuucaaacaa

SEQ ID NO: 664070 - RNA, 19 nt, Artificial Sequence
  Description of Artificial Sequence: Synthetic oligonucleotide
  Sense strand starting at position 670 of SEQ ID NO: 585743
gucucucaaugguuacaga

SEQ ID NO: 664071 - RNA, 19 nt, Artificial Sequence
  Description of Artificial Sequence: Synthetic oligonucleotide
  Antisense strand to SEQ ID NO: 664070
ucuguaaccauugagagac

SEQ ID NO: 664072 - RNA, 19 nt, Artificial Sequence
  Description of Artificial Sequence: Synthetic oligonucleotide
  Sense strand starting at position 739 of SEQ ID NO: 585743
ugaaacauuugagauuguu

SEQ ID NO: 664073 - RNA, 19 nt, Artificial Sequence
  Description of Artificial Sequence: Synthetic oligonucleotide
  Antisense strand to SEQ ID NO: 664072
aacaaucucaaauguuuca

SEQ ID NO: 664074 - RNA, 19 nt, Artificial Sequence
  Description of Artificial Sequence: Synthetic oligonucleotide
  Sense strand starting at position 752 of SEQ ID NO: 585743
auuguuccagcugaaacaa

SEQ ID NO: 664075 - RNA, 19 nt, Artificial Sequence
  Description of Artificial Sequence: Synthetic oligonucleotide
  Antisense strand to SEQ ID NO: 664074
uuguuucagcuggaacaau

SEQ ID NO: 664076 - RNA, 19 nt, Artificial Sequence
  Description of Artificial Sequence: Synthetic oligonucleotide
  Sense strand starting at position 814 of SEQ ID NO: 585743
gacagugucaggcgaaauc

SEQ ID NO: 664077 - RNA, 19 nt, Artificial Sequence
  Description of Artificial Sequence: Synthetic oligonucleotide
  Antisense strand to SEQ ID NO: 664076
gauuucgccugacacuguc

SEQ ID NO: 664078 - RNA, 19 nt, Artificial Sequence
  Description of Artificial Sequence: Synthetic oligonucleotide
  Sense strand starting at position 942 of SEQ ID NO: 585743
agaauaagauuugaugguu

SEQ ID NO: 664079 - RNA, 19 nt, Artificial Sequence
  Description of Artificial Sequence: Synthetic oligonucleotide
  Antisense strand to SEQ ID NO: 664078
aaccaucaaaucuuauucu

SEQ ID NO: 664080 - RNA, 19 nt, Artificial Sequence
  Description of Artificial Sequence: Synthetic oligonucleotide
  Sense strand starting at position 1043 of SEQ ID NO: 585743
uugggaguacucuggguuu

SEQ ID NO: 664081 - RNA, 19 nt, Artificial Sequence
  Description of Artificial Sequence: Synthetic oligonucleotide
  Antisense strand to SEQ ID NO: 664080
aaacccagaguacucccaa

SEQ ID NO: 664082 - RNA, 19 nt, Artificial Sequence
  Description of Artificial Sequence: Synthetic oligonucleotide
  Sense strand starting at position 1177 of SEQ ID NO: 585743
cugugaauucuacacugac

SEQ ID NO: 664083 - RNA, 19 nt, Artificial Sequence
  Description of Artificial Sequence: Synthetic oligonucleotide
  Antisense strand to SEQ ID NO: 664082
gucaguguagaauucacag

SEQ ID NO: 664084 - RNA, 19 nt, Artificial Sequence
  Description of Artificial Sequence: Synthetic oligonucleotide
  Sense strand starting at position 1203 of SEQ ID NO: 585743
gcacgaaugagcuacaaga

SEQ ID NO: 664085 - RNA, 19 nt, Artificial Sequence
  Description of Artificial Sequence: Synthetic oligonucleotide
  Antisense strand to SEQ ID NO: 664084
ucuuguagcucauucgugc

SEQ ID NO: 664086 - RNA, 19 nt, Artificial Sequence
  Description of Artificial Sequence: Synthetic oligonucleotide
  Sense strand starting at position 1556 of SEQ ID NO: 585743
ccagcuuuccaguaacuug

SEQ ID NO: 664087 - RNA, 19 nt, Artificial Sequence
  Description of Artificial Sequence: Synthetic oligonucleotide
  Antisense strand to SEQ ID NO: 664086
caaguuacuggaaagcugg

SEQ ID NO: 664088 - RNA, 19 nt, Artificial Sequence
  Description of Artificial Sequence: Synthetic oligonucleotide
  Sense strand starting at position 2225 of SEQ ID NO: 585743
ugccgauaccuccaaucau

SEQ ID NO: 664089 - RNA, 19 nt, Artificial Sequence
  Description of Artificial Sequence: Synthetic oligonucleotide
  Antisense strand to SEQ ID NO: 664088
augauuggagguaucggca

SEQ ID NO: 664090 - RNA, 19 nt, Artificial Sequence
  Description of Artificial Sequence: Synthetic oligonucleotide
  Sense strand starting at position 2561 of SEQ ID NO: 585743
acacuuugucaucauguuu

SEQ ID NO: 664091 - RNA, 19 nt, Artificial Sequence
  Description of Artificial Sequence: Synthetic oligonucleotide
  Antisense strand to SEQ ID NO: 664090
aaacaugaugacaaagugu

SEQ ID NO: 664092 - RNA, 19 nt, Artificial Sequence
  Description of Artificial Sequence: Synthetic oligonucleotide
  Sense strand starting at position 2598 of SEQ ID NO: 585743
uuuaauuguugaucagcaa

SEQ ID NO: 664093 - RNA, 19 nt, Artificial Sequence
  Description of Artificial Sequence: Synthetic oligonucleotide
  Antisense strand to SEQ ID NO: 664092
uugcugaucaacaauuaaa

SEQ ID NO: 664094 - RNA, 19 nt, Artificial Sequence
  Description of Artificial Sequence: Synthetic oligonucleotide
  Sense strand starting at position 2599 of SEQ ID NO: 585743
uuaauuguugaucagcaaa

SEQ ID NO: 664095 - RNA, 19 nt, Artificial Sequence
  Description of Artificial Sequence: Synthetic oligonucleotide
  Antisense strand to SEQ ID NO: 664094
uuugcugaucaacaauuaa

SEQ ID NO: 664096 - RNA, 19 nt, Artificial Sequence
  Description of Artificial Sequence: Synthetic oligonucleotide
  Sense strand starting at position 3068 of SEQ ID NO: 585743
gcacguguugaguuuguau

SEQ ID NO: 664097 - RNA, 19 nt, Artificial Sequence
  Description of Artificial Sequence: Synthetic oligonucleotide
  Antisense strand to SEQ ID NO: 664096
auacaaacucaacacgugc

SEQ ID NO: 664098 - RNA, 19 nt, Artificial Sequence
  Description of Artificial Sequence: Synthetic oligonucleotide
  Sense strand starting at position 3070 of SEQ ID NO: 585743
acguguugaguuuguauuu

SEQ ID NO: 664099 - RNA, 19 nt, Artificial Sequence
  Description of Artificial Sequence: Synthetic oligonucleotide
  Antisense strand to SEQ ID NO: 664098
aaauacaaacucaacacgu

SEQ ID NO: 664100 - RNA, 19 nt, Artificial Sequence
  Description of Artificial Sequence: Synthetic oligonucleotide
  Sense strand starting at position 3071 of SEQ ID NO: 585743
cguguugaguuuguauuua

SEQ ID NO: 664101 - RNA, 19 nt, Artificial Sequence
  Description of Artificial Sequence: Synthetic oligonucleotide
  Antisense strand to SEQ ID NO: 664100
uaaauacaaacucaacacg

SEQ ID NO: 664102 - RNA, 19 nt, Artificial Sequence
  Description of Artificial Sequence: Synthetic oligonucleotide
  Sense strand starting at position 3246 of SEQ ID NO: 585743
gcguuaauacuuguguagu

SEQ ID NO: 664103 - RNA, 19 nt, Artificial Sequence
  Description of Artificial Sequence: Synthetic oligonucleotide
  Antisense strand to SEQ ID NO: 664102
acuacacaaguauuaacgc

SEQ ID NO: 664104 - RNA, 19 nt, Artificial Sequence
  Description of Artificial Sequence: Synthetic oligonucleotide
  Sense strand starting at position 3249 of SEQ ID NO: 585743
uuaauacuuguguagucua

SEQ ID NO: 664105 - RNA, 19 nt, Artificial Sequence
  Description of Artificial Sequence: Synthetic oligonucleotide
  Antisense strand to SEQ ID NO: 664104
uagacuacacaaguauuaa

SEQ ID NO: 664106 - RNA, 19 nt, Artificial Sequence
  Description of Artificial Sequence: Synthetic oligonucleotide
  Sense strand starting at position 3252 of SEQ ID NO: 585743
auacuuguguagucuauuu

SEQ ID NO: 664107 - RNA, 19 nt, Artificial Sequence
  Description of Artificial Sequence: Synthetic oligonucleotide
  Antisense strand to SEQ ID NO: 664106
aaauagacuacacaaguau

SEQ ID NO: 664108 - RNA, 19 nt, Artificial Sequence
  Description of Artificial Sequence: Synthetic oligonucleotide
  Sense strand starting at position 3289 of SEQ ID NO: 585743
aggucagaauguccuuaaa

SEQ ID NO: 664109 - RNA, 19 nt, Artificial Sequence
  Description of Artificial Sequence: Synthetic oligonucleotide
  Antisense strand to SEQ ID NO: 664108
uuuaaggacauucugaccu

SEQ ID NO: 664110 - RNA, 19 nt, Artificial Sequence
  Description of Artificial Sequence: Synthetic oligonucleotide
  Sense strand starting at position 3291 of SEQ ID NO: 585743
gucagaauguccuuaaaua

SEQ ID NO: 664111 - RNA, 19 nt, Artificial Sequence
  Description of Artificial Sequence: Synthetic oligonucleotide
  Antisense strand to SEQ ID NO: 664110
uauuuaaggacauucugac

SEQ ID NO: 664112 - RNA, 19 nt, Artificial Sequence
  Description of Artificial Sequence: Synthetic oligonucleotide
  Sense strand starting at position 3403 of SEQ ID NO: 585743
aguggaagccgggaguuua

SEQ ID NO: 664113 - RNA, 19 nt, Artificial Sequence
  Description of Artificial Sequence: Synthetic oligonucleotide
  Antisense strand to SEQ ID NO: 664112
uaaacucccggcuuccacu

SEQ ID NO: 664114 - RNA, 19 nt, Artificial Sequence
  Description of Artificial Sequence: Synthetic oligonucleotide
  Sense strand starting at position 3414 of SEQ ID NO: 585743
ggaguuuagcaccacgacu

SEQ ID NO: 664115 - RNA, 19 nt, Artificial Sequence
  Description of Artificial Sequence: Synthetic oligonucleotide
  Antisense strand to SEQ ID NO: 664114
agucguggugcuaaacucc

SEQ ID NO: 664116 - RNA, 19 nt, Artificial Sequence
  Description of Artificial Sequence: Synthetic oligonucleotide
  Sense strand starting at position 3491 of SEQ ID NO: 585743
acucaucucuaagaggaaa

SEQ ID NO: 664117 - RNA, 19 nt, Artificial Sequence
  Description of Artificial Sequence: Synthetic oligonucleotide
  Antisense strand to SEQ ID NO: 664116
uuuccucuuagagaugagu

SEQ ID NO: 664118 - RNA, 19 nt, Artificial Sequence
  Description of Artificial Sequence: Synthetic oligonucleotide
  Sense strand starting at position 3512 of SEQ ID NO: 585743
acgagugaaaccugucuca

SEQ ID NO: 664119 - RNA, 19 nt, Artificial Sequence
  Description of Artificial Sequence: Synthetic oligonucleotide
  Antisense strand to SEQ ID NO: 664118
ugagacagguuucacucgu

SEQ ID NO: 664120 - RNA, 19 nt, Artificial Sequence
  Description of Artificial Sequence: Synthetic oligonucleotide
  Sense strand starting at position 3720 of SEQ ID NO: 585743
ccaguuaagugcccaugaa

SEQ ID NO: 664121 - RNA, 19 nt, Artificial Sequence
  Description of Artificial Sequence: Synthetic oligonucleotide
  Antisense strand to SEQ ID NO: 664120
uucaugggcacuuaacugg

SEQ ID NO: 664122 - RNA, 19 nt, Artificial Sequence
  Description of Artificial Sequence: Synthetic oligonucleotide
  Sense strand starting at position 3721 of SEQ ID NO: 585743
caguuaagugcccaugaaa

SEQ ID NO: 664123 - RNA, 19 nt, Artificial Sequence
  Description of Artificial Sequence: Synthetic oligonucleotide
  Antisense strand to SEQ ID NO: 664122
uuucaugggcacuuaacug

SEQ ID NO: 664124 - RNA, 19 nt, Artificial Sequence
  Description of Artificial Sequence: Synthetic oligonucleotide
  Sense strand starting at position 3780 of SEQ ID NO: 585743
aguaaucugugcucucaga

SEQ ID NO: 664125 - RNA, 19 nt, Artificial Sequence
  Description of Artificial Sequence: Synthetic oligonucleotide
  Antisense strand to SEQ ID NO: 664124
ucugagagcacagauuacu

SEQ ID NO: 664126 - RNA, 19 nt, Artificial Sequence
  Description of Artificial Sequence: Synthetic oligonucleotide
  Sense strand starting at position 3946 of SEQ ID NO: 585743
gaccaugcuucccucggaa

SEQ ID NO: 664127 - RNA, 19 nt, Artificial Sequence
  Description of Artificial Sequence: Synthetic oligonucleotide
  Antisense strand to SEQ ID NO: 664126
uuccgagggaagcaugguc

SEQ ID NO: 664128 - RNA, 19 nt, Artificial Sequence
  Description of Artificial Sequence: Synthetic oligonucleotide
  Sense strand starting at position 3972 of SEQ ID NO: 585743
caguaauacuggccggaga

SEQ ID NO: 664129 - RNA, 19 nt, Artificial Sequence
  Description of Artificial Sequence: Synthetic oligonucleotide
  Antisense strand to SEQ ID NO: 664128
ucuccggccaguauuacug

SEQ ID NO: 664130 - RNA, 19 nt, Artificial Sequence
  Description of Artificial Sequence: Synthetic oligonucleotide
  Sense strand starting at position 3974 of SEQ ID NO: 585743
guaauacuggccggagaca

SEQ ID NO: 664131 - RNA, 19 nt, Artificial Sequence
  Description of Artificial Sequence: Synthetic oligonucleotide
  Antisense strand to SEQ ID NO: 664130
ugucuccggccaguauuac

SEQ ID NO: 664132 - RNA, 19 nt, Artificial Sequence
  Description of Artificial Sequence: Synthetic oligonucleotide
  Sense strand starting at position 202 of SEQ ID NO: 585744
gcugaaagccuuuaucuac

SEQ ID NO: 664133 - RNA, 19 nt, Artificial Sequence
  Description of Artificial Sequence: Synthetic oligonucleotide
  Antisense strand to SEQ ID NO: 664132
guagauaaaggcuuucagc

SEQ ID NO: 664134 - RNA, 19 nt, Artificial Sequence
  Description of Artificial Sequence: Synthetic oligonucleotide
  Sense strand starting at position 299 of SEQ ID NO: 585744
aguuuaagcaaaugaggaa

SEQ ID NO: 664135 - RNA, 19 nt, Artificial Sequence
  Description of Artificial Sequence: Synthetic oligonucleotide
  Antisense strand to SEQ ID NO: 664134
uuccucauuugcuuaaacu

SEQ ID NO: 664136 - RNA, 19 nt, Artificial Sequence
  Description of Artificial Sequence: Synthetic oligonucleotide
  Sense strand starting at position 365 of SEQ ID NO: 585744
uugagaggcugcuuucuca

SEQ ID NO: 664137 - RNA, 19 nt, Artificial Sequence
  Description of Artificial Sequence: Synthetic oligonucleotide
  Antisense strand to SEQ ID NO: 664136
ugagaaagcagccucucaa

SEQ ID NO: 664138 - RNA, 19 nt, Artificial Sequence
  Description of Artificial Sequence: Synthetic oligonucleotide
  Sense strand starting at position 390 of SEQ ID NO: 585744
aggcgcaaggcauaguuaa

SEQ ID NO: 664139 - RNA, 19 nt, Artificial Sequence
  Description of Artificial Sequence: Synthetic oligonucleotide
  Antisense strand to SEQ ID NO: 664138
uuaacuaugccuugcgccu

SEQ ID NO: 664140 - RNA, 19 nt, Artificial Sequence
  Description of Artificial Sequence: Synthetic oligonucleotide
  Sense strand starting at position 397 of SEQ ID NO: 585744
aggcauaguuaacuuuauu

SEQ ID NO: 664141 - RNA, 19 nt, Artificial Sequence
  Description of Artificial Sequence: Synthetic oligonucleotide
  Antisense strand to SEQ ID NO: 664140
aauaaaguuaacuaugccu

SEQ ID NO: 664142 - RNA, 19 nt, Artificial Sequence
  Description of Artificial Sequence: Synthetic oligonucleotide
  Sense strand starting at position 441 of SEQ ID NO: 585744
gccugccagauguagaaua

SEQ ID NO: 664143 - RNA, 19 nt, Artificial Sequence
  Description of Artificial Sequence: Synthetic oligonucleotide
  Antisense strand to SEQ ID NO: 664142
uauucuacaucuggcaggc

SEQ ID NO: 664144 - RNA, 19 nt, Artificial Sequence
  Description of Artificial Sequence: Synthetic oligonucleotide
  Sense strand starting at position 443 of SEQ ID NO: 585744
cugccagauguagaauaau

SEQ ID NO: 664145 - RNA, 19 nt, Artificial Sequence
  Description of Artificial Sequence: Synthetic oligonucleotide
  Antisense strand to SEQ ID NO: 664144
auuauucuacaucuggcag

SEQ ID NO: 664146 - RNA, 19 nt, Artificial Sequence
  Description of Artificial Sequence: Synthetic oligonucleotide
  Sense strand starting at position 601 of SEQ ID NO: 585744
guuaguuccuucucuugga

SEQ ID NO: 664147 - RNA, 19 nt, Artificial Sequence
  Description of Artificial Sequence: Synthetic oligonucleotide
  Antisense strand to SEQ ID NO: 664146
uccaagagaaggaacuaac

SEQ ID NO: 664148 - RNA, 19 nt, Artificial Sequence
  Description of Artificial Sequence: Synthetic oligonucleotide
  Sense strand starting at position 708 of SEQ ID NO: 585744
cucgcuucugagggaaacu

SEQ ID NO: 664149 - RNA, 19 nt, Artificial Sequence
  Description of Artificial Sequence: Synthetic oligonucleotide
  Antisense strand to SEQ ID NO: 664148
aguuucccucagaagcgag

SEQ ID NO: 664150 - RNA, 19 nt, Artificial Sequence
  Description of Artificial Sequence: Synthetic oligonucleotide
  Sense strand starting at position 709 of SEQ ID NO: 585744
ucgcuucugagggaaacua

SEQ ID NO: 664151 - RNA, 19 nt, Artificial Sequence
  Description of Artificial Sequence: Synthetic oligonucleotide
  Antisense strand to SEQ ID NO: 664150
uaguuucccucagaagcga

SEQ ID NO: 664152 - RNA, 19 nt, Artificial Sequence
  Description of Artificial Sequence: Synthetic oligonucleotide
  Sense strand starting at position 733 of SEQ ID NO: 585744
aguuuaaccucucuggaau

SEQ ID NO: 664153 - RNA, 19 nt, Artificial Sequence
  Description of Artificial Sequence: Synthetic oligonucleotide
  Antisense strand to SEQ ID NO: 664152
auuccagagagguuaaacu

SEQ ID NO: 664154 - RNA, 19 nt, Artificial Sequence
  Description of Artificial Sequence: Synthetic oligonucleotide
  Sense strand starting at position 734 of SEQ ID NO: 585744
guuuaaccucucuggaaua

SEQ ID NO: 664155 - RNA, 19 nt, Artificial Sequence
  Description of Artificial Sequence: Synthetic oligonucleotide
  Antisense strand to SEQ ID NO: 664154
uauuccagagagguuaaac

SEQ ID NO: 664156 - RNA, 19 nt, Artificial Sequence
  Description of Artificial Sequence: Synthetic oligonucleotide
  Sense strand starting at position 910 of SEQ ID NO: 585744
ccauguccagguggugaua

SEQ ID NO: 664157 - RNA, 19 nt, Artificial Sequence
  Description of Artificial Sequence: Synthetic oligonucleotide
  Antisense strand to SEQ ID NO: 664156
uaucaccaccuggacaugg

SEQ ID NO: 664158 - RNA, 19 nt, Artificial Sequence
  Description of Artificial Sequence: Synthetic oligonucleotide
  Sense strand starting at position 921 of SEQ ID NO: 585744
uggugauaccgagagcaga

SEQ ID NO: 664159 - RNA, 19 nt, Artificial Sequence
  Description of Artificial Sequence: Synthetic oligonucleotide
  Antisense strand to SEQ ID NO: 664158
ucugcucucgguaucacca

SEQ ID NO: 664160 - RNA, 19 nt, Artificial Sequence
  Description of Artificial Sequence: Synthetic oligonucleotide
  Sense strand starting at position 936 of SEQ ID NO: 585744
cagauaagguguccugaca

SEQ ID NO: 664161 - RNA, 19 nt, Artificial Sequence
  Description of Artificial Sequence: Synthetic oligonucleotide
  Antisense strand to SEQ ID NO: 664160
ugucaggacaccuuaucug

SEQ ID NO: 664162 - RNA, 19 nt, Artificial Sequence
  Description of Artificial Sequence: Synthetic oligonucleotide
  Sense strand starting at position 965 of SEQ ID NO: 585744
cguggaucccgggaaaucu

SEQ ID NO: 664163 - RNA, 19 nt, Artificial Sequence
  Description of Artificial Sequence: Synthetic oligonucleotide
  Antisense strand to SEQ ID NO: 664162
agauuucccgggauccacg

SEQ ID NO: 664164 - RNA, 19 nt, Artificial Sequence
  Description of Artificial Sequence: Synthetic oligonucleotide
  Sense strand starting at position 1811 of SEQ ID NO: 585744
gagguuugucuagagcuca

SEQ ID NO: 664165 - RNA, 19 nt, Artificial Sequence
  Description of Artificial Sequence: Synthetic oligonucleotide
  Antisense strand to SEQ ID NO: 664164
ugagcucuagacaaaccuc

SEQ ID NO: 664166 - RNA, 19 nt, Artificial Sequence
  Description of Artificial Sequence: Synthetic oligonucleotide
  Sense strand starting at position 2372 of SEQ ID NO: 585744
ggcggaugccuccugcuua

SEQ ID NO: 664167 - RNA, 19 nt, Artificial Sequence
  Description of Artificial Sequence: Synthetic oligonucleotide
  Antisense strand to SEQ ID NO: 664166
uaagcaggaggcauccgcc

SEQ ID NO: 664168 - RNA, 19 nt, Artificial Sequence
  Description of Artificial Sequence: Synthetic oligonucleotide
  Sense strand starting at position 2578 of SEQ ID NO: 585744
agugcuucccaccaagaau

SEQ ID NO: 664169 - RNA, 19 nt, Artificial Sequence
  Description of Artificial Sequence: Synthetic oligonucleotide
  Antisense strand to SEQ ID NO: 664168
auucuuggugggaagcacu

SEQ ID NO: 664170 - RNA, 19 nt, Artificial Sequence
  Description of Artificial Sequence: Synthetic oligonucleotide
  Sense strand starting at position 2609 of SEQ ID NO: 585744
ggccuacccagacguaaau

SEQ ID NO: 664171 - RNA, 19 nt, Artificial Sequence
  Description of Artificial Sequence: Synthetic oligonucleotide
  Antisense strand to SEQ ID NO: 664170
auuuacgucuggguaggcc

SEQ ID NO: 664172 - RNA, 19 nt, Artificial Sequence
  Description of Artificial Sequence: Synthetic oligonucleotide
  Sense strand starting at position 2618 of SEQ ID NO: 585744
agacguaaauguuucugaa

SEQ ID NO: 664173 - RNA, 19 nt, Artificial Sequence
  Description of Artificial Sequence: Synthetic oligonucleotide
  Antisense strand to SEQ ID NO: 664172
uucagaaacauuuacgucu

SEQ ID NO: 664174 - RNA, 19 nt, Artificial Sequence
  Description of Artificial Sequence: Synthetic oligonucleotide
  Sense strand starting at position 2654 of SEQ ID NO: 585744
ggcugcuuagacuaaauaa

SEQ ID NO: 664175 - RNA, 19 nt, Artificial Sequence
  Description of Artificial Sequence: Synthetic oligonucleotide
  Antisense strand to SEQ ID NO: 664174
uuauuuagucuaagcagcc

SEQ ID NO: 664176 - RNA, 19 nt, Artificial Sequence
  Description of Artificial Sequence: Synthetic oligonucleotide
  Sense strand starting at position 2694 of SEQ ID NO: 585744
aaggucucaguguauaaca

SEQ ID NO: 664177 - RNA, 19 nt, Artificial Sequence
  Description of Artificial Sequence: Synthetic oligonucleotide
  Antisense strand to SEQ ID NO: 664176
uguuauacacugagaccuu

SEQ ID NO: 664178 - RNA, 19 nt, Artificial Sequence
  Description of Artificial Sequence: Synthetic oligonucleotide
  Sense strand starting at position 2696 of SEQ ID NO: 585744
ggucucaguguauaacaca

SEQ ID NO: 664179 - RNA, 19 nt, Artificial Sequence
  Description of Artificial Sequence: Synthetic oligonucleotide
  Antisense strand to SEQ ID NO: 664178
uguguuauacacugagacc

SEQ ID NO: 664180 - RNA, 19 nt, Artificial Sequence
  Description of Artificial Sequence: Synthetic oligonucleotide
  Sense strand starting at position 2947 of SEQ ID NO: 585744
aaauuacguggaugaacuu

SEQ ID NO: 664181 - RNA, 19 nt, Artificial Sequence
  Description of Artificial Sequence: Synthetic oligonucleotide
  Antisense strand to SEQ ID NO: 664180
aaguucauccacguaauuu

SEQ ID NO: 664182 - RNA, 19 nt, Artificial Sequence
  Description of Artificial Sequence: Synthetic oligonucleotide
  Sense strand starting at position 3103 of SEQ ID NO: 585744
ggugcuaaccuccauagga

SEQ ID NO: 664183 - RNA, 19 nt, Artificial Sequence
  Description of Artificial Sequence: Synthetic oligonucleotide
  Antisense strand to SEQ ID NO: 664182
uccuauggagguuagcacc

SEQ ID NO: 664184 - RNA, 19 nt, Artificial Sequence
  Description of Artificial Sequence: Synthetic oligonucleotide
  Sense strand starting at position 3294 of SEQ ID NO: 585744
gaagguggcugcuucuaau

SEQ ID NO: 664185 - RNA, 19 nt, Artificial Sequence
  Description of Artificial Sequence: Synthetic oligonucleotide
  Antisense strand to SEQ ID NO: 664184
auuagaagcagccaccuuc

SEQ ID NO: 664186 - RNA, 19 nt, Artificial Sequence
  Description of Artificial Sequence: Synthetic oligonucleotide
  Sense strand starting at position 3301 of SEQ ID NO: 585744
gcugcuucuaaugggaaag

SEQ ID NO: 664187 - RNA, 19 nt, Artificial Sequence
  Description of Artificial Sequence: Synthetic oligonucleotide
  Antisense strand to SEQ ID NO: 664186
cuuucccauuagaagcagc

SEQ ID NO: 664188 - RNA, 19 nt, Artificial Sequence
  Description of Artificial Sequence: Synthetic oligonucleotide
  Sense strand starting at position 3338 of SEQ ID NO: 585744
ggaggcaggcaguauaauu

SEQ ID NO: 664189 - RNA, 19 nt, Artificial Sequence
  Description of Artificial Sequence: Synthetic oligonucleotide
  Antisense strand to SEQ ID NO: 664188
aauuauacugccugccucc

SEQ ID NO: 664190 - RNA, 19 nt, Artificial Sequence
  Description of Artificial Sequence: Synthetic oligonucleotide
  Sense strand starting at position 3348 of SEQ ID NO: 585744
aguauaauuugguaugacu

SEQ ID NO: 664191 - RNA, 19 nt, Artificial Sequence
  Description of Artificial Sequence: Synthetic oligonucleotide
  Antisense strand to SEQ ID NO: 664190
agucauaccaaauuauacu

SEQ ID NO: 664192 - RNA, 19 nt, Artificial Sequence
  Description of Artificial Sequence: Synthetic oligonucleotide
  Sense strand starting at position 3351 of SEQ ID NO: 585744
auaauuugguaugacugua

SEQ ID NO: 664193 - RNA, 19 nt, Artificial Sequence
  Description of Artificial Sequence: Synthetic oligonucleotide
  Antisense strand to SEQ ID NO: 664192
uacagucauaccaaauuau

SEQ ID NO: 664194 - RNA, 19 nt, Artificial Sequence
  Description of Artificial Sequence: Synthetic oligonucleotide
  Sense strand starting at position 3356 of SEQ ID NO: 585744
uugguaugacuguaucagu

SEQ ID NO: 664195 - RNA, 19 nt, Artificial Sequence
  Description of Artificial Sequence: Synthetic oligonucleotide
  Antisense strand to SEQ ID NO: 664194
acugauacagucauaccaa

SEQ ID NO: 664196 - RNA, 19 nt, Artificial Sequence
  Description of Artificial Sequence: Synthetic oligonucleotide
  Sense strand starting at position 3377 of SEQ ID NO: 585744
agguucuucccaggaugaa

SEQ ID NO: 664197 - RNA, 19 nt, Artificial Sequence
  Description of Artificial Sequence: Synthetic oligonucleotide
  Antisense strand to SEQ ID NO: 664196
uucauccugggaagaaccu

SEQ ID NO: 664198 - RNA, 19 nt, Artificial Sequence
  Description of Artificial Sequence: Synthetic oligonucleotide
  Sense strand starting at position 3407 of SEQ ID NO: 585744
gugcaaagacuuuaacuga

SEQ ID NO: 664199 - RNA, 19 nt, Artificial Sequence
  Description of Artificial Sequence: Synthetic oligonucleotide
  Antisense strand to SEQ ID NO: 664198
ucaguuaaagucuuugcac

SEQ ID NO: 664200 - RNA, 19 nt, Artificial Sequence
  Description of Artificial Sequence: Synthetic oligonucleotide
  Sense strand starting at position 3473 of SEQ ID NO: 585744
ggaaucaaugcagguauua

SEQ ID NO: 664201 - RNA, 19 nt, Artificial Sequence
  Description of Artificial Sequence: Synthetic oligonucleotide
  Antisense strand to SEQ ID NO: 664200
uaauaccugcauugauucc

SEQ ID NO: 664202 - RNA, 19 nt, Artificial Sequence
  Description of Artificial Sequence: Synthetic oligonucleotide
  Sense strand starting at position 3482 of SEQ ID NO: 585744
gcagguauuagcgauagug

SEQ ID NO: 664203 - RNA, 19 nt, Artificial Sequence
  Description of Artificial Sequence: Synthetic oligonucleotide
  Antisense strand to SEQ ID NO: 664202
cacuaucgcuaauaccugc

SEQ ID NO: 664204 - RNA, 19 nt, Artificial Sequence
  Description of Artificial Sequence: Synthetic oligonucleotide
  Sense strand starting at position 3859 of SEQ ID NO: 585744
ucuaaacccgauugcuuau

SEQ ID NO: 664205 - RNA, 19 nt, Artificial Sequence
  Description of Artificial Sequence: Synthetic oligonucleotide
  Antisense strand to SEQ ID NO: 664204
auaagcaaucggguuuaga

SEQ ID NO: 664206 - RNA, 19 nt, Artificial Sequence
  Description of Artificial Sequence: Synthetic oligonucleotide
  Sense strand starting at position 3865 of SEQ ID NO: 585744
cccgauugcuuaucaauag

SEQ ID NO: 664207 - RNA, 19 nt, Artificial Sequence
  Description of Artificial Sequence: Synthetic oligonucleotide
  Antisense strand to SEQ ID NO: 664206
cuauugauaagcaaucggg

SEQ ID NO: 664208 - RNA, 19 nt, Artificial Sequence
  Description of Artificial Sequence: Synthetic oligonucleotide
  Sense strand starting at position 3899 of SEQ ID NO: 585744
aaggauuauuaggaagauu

SEQ ID NO: 664209 - RNA, 19 nt, Artificial Sequence
  Description of Artificial Sequence: Synthetic oligonucleotide
  Antisense strand to SEQ ID NO: 664208
aaucuuccuaauaauccuu

SEQ ID NO: 664210 - RNA, 19 nt, Artificial Sequence
  Description of Artificial Sequence: Synthetic oligonucleotide
  Sense strand starting at position 3955 of SEQ ID NO: 585744
cucauuuccuaggaguaau

SEQ ID NO: 664211 - RNA, 19 nt, Artificial Sequence
  Description of Artificial Sequence: Synthetic oligonucleotide
  Antisense strand to SEQ ID NO: 664210
auuacuccuaggaaaugag

SEQ ID NO: 664212 - RNA, 19 nt, Artificial Sequence
  Description of Artificial Sequence: Synthetic oligonucleotide
  Sense strand starting at position 87 of SEQ ID NO: 585745
ucugaagccguguagaauu

SEQ ID NO: 664213 - RNA, 19 nt, Artificial Sequence
  Description of Artificial Sequence: Synthetic oligonucleotide
  Antisense strand to SEQ ID NO: 664212
aauucuacacggcuucaga

SEQ ID NO: 664214 - RNA, 19 nt, Artificial Sequence
  Description of Artificial Sequence: Synthetic oligonucleotide
  Sense strand starting at position 97 of SEQ ID NO: 585745
uguagaauuucguaaugga

SEQ ID NO: 664215 - RNA, 19 nt, Artificial Sequence
  Description of Artificial Sequence: Synthetic oligonucleotide
  Antisense strand to SEQ ID NO: 664214
uccauuacgaaauucuaca

SEQ ID NO: 664216 - RNA, 19 nt, Artificial Sequence
  Description of Artificial Sequence: Synthetic oligonucleotide
  Sense strand starting at position 100 of SEQ ID NO: 585745
agaauuucguaauggaaug

SEQ ID NO: 664217 - RNA, 19 nt, Artificial Sequence
  Description of Artificial Sequence: Synthetic oligonucleotide
  Antisense strand to SEQ ID NO: 664216
cauuccauuacgaaauucu

SEQ ID NO: 664218 - RNA, 19 nt, Artificial Sequence
  Description of Artificial Sequence: Synthetic oligonucleotide
  Sense strand starting at position 105 of SEQ ID NO: 585745
uucguaauggaaugugaac

SEQ ID NO: 664219 - RNA, 19 nt, Artificial Sequence
  Description of Artificial Sequence: Synthetic oligonucleotide
  Antisense strand to SEQ ID NO: 664218
guucacauuccauuacgaa

SEQ ID NO: 664220 - RNA, 19 nt, Artificial Sequence
  Description of Artificial Sequence: Synthetic oligonucleotide
  Sense strand starting at position 180 of SEQ ID NO: 585745
ggcaaaucugcugagcaag

SEQ ID NO: 664221 - RNA, 19 nt, Artificial Sequence
  Description of Artificial Sequence: Synthetic oligonucleotide
  Antisense strand to SEQ ID NO: 664220
cuugcucagcagauuugcc

SEQ ID NO: 664222 - RNA, 19 nt, Artificial Sequence
  Description of Artificial Sequence: Synthetic oligonucleotide
  Sense strand starting at position 1202 of SEQ ID NO: 585745
ccgagaaggacucgaaagu

SEQ ID NO: 664223 - RNA, 19 nt, Artificial Sequence
  Description of Artificial Sequence: Synthetic oligonucleotide
  Antisense strand to SEQ ID NO: 664222
acuuucgaguccuucucgg

SEQ ID NO: 664224 - RNA, 19 nt, Artificial Sequence
  Description of Artificial Sequence: Synthetic oligonucleotide
  Sense strand starting at position 1212 of SEQ ID NO: 585745
cucgaaaguauguaggaga

SEQ ID NO: 664225 - RNA, 19 nt, Artificial Sequence
  Description of Artificial Sequence: Synthetic oligonucleotide
  Antisense strand to SEQ ID NO: 664224
ucuccuacauacuuucgag

SEQ ID NO: 664226 - RNA, 19 nt, Artificial Sequence
  Description of Artificial Sequence: Synthetic oligonucleotide
  Sense strand starting at position 2247 of SEQ ID NO: 585745
uugccaucccgggauggau

SEQ ID NO: 664227 - RNA, 19 nt, Artificial Sequence
  Description of Artificial Sequence: Synthetic oligonucleotide
  Antisense strand to SEQ ID NO: 664226
auccaucccgggauggcaa

SEQ ID NO: 664228 - RNA, 19 nt, Artificial Sequence
  Description of Artificial Sequence: Synthetic oligonucleotide
  Sense strand starting at position 2832 of SEQ ID NO: 585745
gugugcucgccgucuaaca

SEQ ID NO: 664229 - RNA, 19 nt, Artificial Sequence
  Description of Artificial Sequence: Synthetic oligonucleotide
  Antisense strand to SEQ ID NO: 664228
uguuagacggcgagcacac

SEQ ID NO: 664230 - RNA, 19 nt, Artificial Sequence
  Description of Artificial Sequence: Synthetic oligonucleotide
  Sense strand starting at position 2833 of SEQ ID NO: 585745
ugugcucgccgucuaacaa

SEQ ID NO: 664231 - RNA, 19 nt, Artificial Sequence
  Description of Artificial Sequence: Synthetic oligonucleotide
  Antisense strand to SEQ ID NO: 664230
uuguuagacggcgagcaca

SEQ ID NO: 664232 - RNA, 19 nt, Artificial Sequence
  Description of Artificial Sequence: Synthetic oligonucleotide
  Sense strand starting at position 3041 of SEQ ID NO: 585745
aguaucucuuucucucaga

SEQ ID NO: 664233 - RNA, 19 nt, Artificial Sequence
  Description of Artificial Sequence: Synthetic oligonucleotide
  Antisense strand to SEQ ID NO: 664232
ucugagagaaagagauacu

SEQ ID NO: 664234 - RNA, 19 nt, Artificial Sequence
  Description of Artificial Sequence: Synthetic oligonucleotide
  Sense strand starting at position 3194 of SEQ ID NO: 585745
cugugcuuccuccauaaag

SEQ ID NO: 664235 - RNA, 19 nt, Artificial Sequence
  Description of Artificial Sequence: Synthetic oligonucleotide
  Antisense strand to SEQ ID NO: 664234
cuuuauggaggaagcacag

SEQ ID NO: 664236 - RNA, 19 nt, Artificial Sequence
  Description of Artificial Sequence: Synthetic oligonucleotide
  Sense strand starting at position 3196 of SEQ ID NO: 585745
gugcuuccuccauaaagca

SEQ ID NO: 664237 - RNA, 19 nt, Artificial Sequence
  Description of Artificial Sequence: Synthetic oligonucleotide
  Antisense strand to SEQ ID NO: 664236
ugcuuuauggaggaagcac

SEQ ID NO: 664238 - RNA, 19 nt, Artificial Sequence
  Description of Artificial Sequence: Synthetic oligonucleotide
  Sense strand starting at position 3270 of SEQ ID NO: 585745
guucucagccuuuggaaac

SEQ ID NO: 664239 - RNA, 19 nt, Artificial Sequence
  Description of Artificial Sequence: Synthetic oligonucleotide
  Antisense strand to SEQ ID NO: 664238
guuuccaaaggcugagaac

SEQ ID NO: 664240 - RNA, 19 nt, Artificial Sequence
  Description of Artificial Sequence: Synthetic oligonucleotide
  Sense strand starting at position 3305 of SEQ ID NO: 585745
ggaugauugugguuguuga

SEQ ID NO: 664241 - RNA, 19 nt, Artificial Sequence
  Description of Artificial Sequence: Synthetic oligonucleotide
  Antisense strand to SEQ ID NO: 664240
ucaacaaccacaaucaucc

SEQ ID NO: 664242 - RNA, 19 nt, Artificial Sequence
  Description of Artificial Sequence: Synthetic oligonucleotide
  Sense strand starting at position 3306 of SEQ ID NO: 585745
gaugauugugguuguugaa

SEQ ID NO: 664243 - RNA, 19 nt, Artificial Sequence
  Description of Artificial Sequence: Synthetic oligonucleotide
  Antisense strand to SEQ ID NO: 664242
uucaacaaccacaaucauc

SEQ ID NO: 664244 - RNA, 19 nt, Artificial Sequence
  Description of Artificial Sequence: Synthetic oligonucleotide
  Sense strand starting at position 3353 of SEQ ID NO: 585745
cguaguucuaaagaagaau

SEQ ID NO: 664245 - RNA, 19 nt, Artificial Sequence
  Description of Artificial Sequence: Synthetic oligonucleotide
  Antisense strand to SEQ ID NO: 664244
auucuucuuuagaacuacg

SEQ ID NO: 664246 - RNA, 19 nt, Artificial Sequence
  Description of Artificial Sequence: Synthetic oligonucleotide
  Sense strand starting at position 3388 of SEQ ID NO: 585745
aguagaauuaagcguuuga

SEQ ID NO: 664247 - RNA, 19 nt, Artificial Sequence
  Description of Artificial Sequence: Synthetic oligonucleotide
  Antisense strand to SEQ ID NO: 664246
ucaaacgcuuaauucuacu

SEQ ID NO: 664248 - RNA, 19 nt, Artificial Sequence
  Description of Artificial Sequence: Synthetic oligonucleotide
  Sense strand starting at position 3392 of SEQ ID NO: 585745
gaauuaagcguuugagucu

SEQ ID NO: 664249 - RNA, 19 nt, Artificial Sequence
  Description of Artificial Sequence: Synthetic oligonucleotide
  Antisense strand to SEQ ID NO: 664248
agacucaaacgcuuaauuc

SEQ ID NO: 664250 - RNA, 19 nt, Artificial Sequence
  Description of Artificial Sequence: Synthetic oligonucleotide
  Sense strand starting at position 3401 of SEQ ID NO: 585745
guuugagucugguuaggca

SEQ ID NO: 664251 - RNA, 19 nt, Artificial Sequence
  Description of Artificial Sequence: Synthetic oligonucleotide
  Antisense strand to SEQ ID NO: 664250
ugccuaaccagacucaaac

SEQ ID NO: 664252 - RNA, 19 nt, Artificial Sequence
  Description of Artificial Sequence: Synthetic oligonucleotide
  Sense strand starting at position 3405 of SEQ ID NO: 585745
gagucugguuaggcaagau

SEQ ID NO: 664253 - RNA, 19 nt, Artificial Sequence
  Description of Artificial Sequence: Synthetic oligonucleotide
  Antisense strand to SEQ ID NO: 664252
aucuugccuaaccagacuc

SEQ ID NO: 664254 - RNA, 19 nt, Artificial Sequence
  Description of Artificial Sequence: Synthetic oligonucleotide
  Sense strand starting at position 3423 of SEQ ID NO: 585745
ugauguuaugcaggcagaa

SEQ ID NO: 664255 - RNA, 19 nt, Artificial Sequence
  Description of Artificial Sequence: Synthetic oligonucleotide
  Antisense strand to SEQ ID NO: 664254
uucugccugcauaacauca

SEQ ID NO: 664256 - RNA, 19 nt, Artificial Sequence
  Description of Artificial Sequence: Synthetic oligonucleotide
  Sense strand starting at position 3425 of SEQ ID NO: 585745
auguuaugcaggcagaaag

SEQ ID NO: 664257 - RNA, 19 nt, Artificial Sequence
  Description of Artificial Sequence: Synthetic oligonucleotide
  Antisense strand to SEQ ID NO: 664256
cuuucugccugcauaacau

SEQ ID NO: 664258 - RNA, 19 nt, Artificial Sequence
  Description of Artificial Sequence: Synthetic oligonucleotide
  Sense strand starting at position 3436 of SEQ ID NO: 585745
gcagaaagcuggcuacuuu

SEQ ID NO: 664259 - RNA, 19 nt, Artificial Sequence
  Description of Artificial Sequence: Synthetic oligonucleotide
  Antisense strand to SEQ ID NO: 664258
aaaguagccagcuuucugc

SEQ ID NO: 664260 - RNA, 19 nt, Artificial Sequence
  Description of Artificial Sequence: Synthetic oligonucleotide
  Sense strand starting at position 3443 of SEQ ID NO: 585745
gcuggcuacuuucuauuua

SEQ ID NO: 664261 - RNA, 19 nt, Artificial Sequence
  Description of Artificial Sequence: Synthetic oligonucleotide
  Antisense strand to SEQ ID NO: 664260
uaaauagaaaguagccagc

SEQ ID NO: 664262 - RNA, 19 nt, Artificial Sequence
  Description of Artificial Sequence: Synthetic oligonucleotide
  Sense strand starting at position 3595 of SEQ ID NO: 585745
agaagugucugucucggga

SEQ ID NO: 664263 - RNA, 19 nt, Artificial Sequence
  Description of Artificial Sequence: Synthetic oligonucleotide
  Antisense strand to SEQ ID NO: 664262
ucccgagacagacacuucu

SEQ ID NO: 664264 - RNA, 19 nt, Artificial Sequence
  Description of Artificial Sequence: Synthetic oligonucleotide
  Sense strand starting at position 3613 of SEQ ID NO: 585745
auggguccuggccagaaua

SEQ ID NO: 664265 - RNA, 19 nt, Artificial Sequence
  Description of Artificial Sequence: Synthetic oligonucleotide
  Antisense strand to SEQ ID NO: 664264
uauucuggccaggacccau

SEQ ID NO: 664266 - RNA, 19 nt, Artificial Sequence
  Description of Artificial Sequence: Synthetic oligonucleotide
  Sense strand starting at position 3615 of SEQ ID NO: 585745
ggguccuggccagaauaga

SEQ ID NO: 664267 - RNA, 19 nt, Artificial Sequence
  Description of Artificial Sequence: Synthetic oligonucleotide
  Antisense strand to SEQ ID NO: 664266
ucuauucuggccaggaccc

SEQ ID NO: 664268 - RNA, 19 nt, Artificial Sequence
  Description of Artificial Sequence: Synthetic oligonucleotide
  Sense strand starting at position 3662 of SEQ ID NO: 585745
gacccuuaggucugauaug

SEQ ID NO: 664269 - RNA, 19 nt, Artificial Sequence
  Description of Artificial Sequence: Synthetic oligonucleotide
  Antisense strand to SEQ ID NO: 664268
cauaucagaccuaaggguc

SEQ ID NO: 664270 - RNA, 19 nt, Artificial Sequence
  Description of Artificial Sequence: Synthetic oligonucleotide
  Sense strand starting at position 3667 of SEQ ID NO: 585745
uuaggucugauaugagaua

SEQ ID NO: 664271 - RNA, 19 nt, Artificial Sequence
  Description of Artificial Sequence: Synthetic oligonucleotide
  Antisense strand to SEQ ID NO: 664270
uaucucauaucagaccuaa

SEQ ID NO: 664272 - RNA, 19 nt, Artificial Sequence
  Description of Artificial Sequence: Synthetic oligonucleotide
  Sense strand starting at position 3668 of SEQ ID NO: 585745
uaggucugauaugagauaa

SEQ ID NO: 664273 - RNA, 19 nt, Artificial Sequence
  Description of Artificial Sequence: Synthetic oligonucleotide
  Antisense strand to SEQ ID NO: 664272
uuaucucauaucagaccua

SEQ ID NO: 664274 - RNA, 19 nt, Artificial Sequence
  Description of Artificial Sequence: Synthetic oligonucleotide
  Sense strand starting at position 3678 of SEQ ID NO: 585745
augagauaaguaggcuaaa

SEQ ID NO: 664275 - RNA, 19 nt, Artificial Sequence
  Description of Artificial Sequence: Synthetic oligonucleotide
  Antisense strand to SEQ ID NO: 664274
uuuagccuacuuaucucau

SEQ ID NO: 664276 - RNA, 19 nt, Artificial Sequence
  Description of Artificial Sequence: Synthetic oligonucleotide
  Sense strand starting at position 3771 of SEQ ID NO: 585745
cuguuauguuucccagggu

SEQ ID NO: 664277 - RNA, 19 nt, Artificial Sequence
  Description of Artificial Sequence: Synthetic oligonucleotide
  Antisense strand to SEQ ID NO: 664276
acccugggaaacauaacag

SEQ ID NO: 664278 - RNA, 19 nt, Artificial Sequence
  Description of Artificial Sequence: Synthetic oligonucleotide
  Sense strand starting at position 3774 of SEQ ID NO: 585745
uuauguuucccagggucua

SEQ ID NO: 664279 - RNA, 19 nt, Artificial Sequence
  Description of Artificial Sequence: Synthetic oligonucleotide
  Antisense strand to SEQ ID NO: 664278
uagacccugggaaacauaa

SEQ ID NO: 664280 - RNA, 19 nt, Artificial Sequence
  Description of Artificial Sequence: Synthetic oligonucleotide
  Sense strand starting at position 3785 of SEQ ID NO: 585745
agggucuacuguuuacuga

SEQ ID NO: 664281 - RNA, 19 nt, Artificial Sequence
  Description of Artificial Sequence: Synthetic oligonucleotide
  Antisense strand to SEQ ID NO: 664280
ucaguaaacaguagacccu

SEQ ID NO: 664282 - RNA, 19 nt, Artificial Sequence
  Description of Artificial Sequence: Synthetic oligonucleotide
  Sense strand starting at position 3786 of SEQ ID NO: 585745
gggucuacuguuuacugaa

SEQ ID NO: 664283 - RNA, 19 nt, Artificial Sequence
  Description of Artificial Sequence: Synthetic oligonucleotide
  Antisense strand to SEQ ID NO: 664282
uucaguaaacaguagaccc

SEQ ID NO: 664284 - RNA, 19 nt, Artificial Sequence
  Description of Artificial Sequence: Synthetic oligonucleotide
  Sense strand starting at position 3788 of SEQ ID NO: 585745
gucuacuguuuacugaaga

SEQ ID NO: 664285 - RNA, 19 nt, Artificial Sequence
  Description of Artificial Sequence: Synthetic oligonucleotide
  Antisense strand to SEQ ID NO: 664284
ucuucaguaaacaguagac

SEQ ID NO: 664286 - RNA, 19 nt, Artificial Sequence
  Description of Artificial Sequence: Synthetic oligonucleotide
  Sense strand starting at position 3964 of SEQ ID NO: 585745
uagaauaggugucuugugu

SEQ ID NO: 664287 - RNA, 19 nt, Artificial Sequence
  Description of Artificial Sequence: Synthetic oligonucleotide
  Antisense strand to SEQ ID NO: 664286
acacaagacaccuauucua

SEQ ID NO: 664288 - RNA, 19 nt, Artificial Sequence
  Description of Artificial Sequence: Synthetic oligonucleotide
  Sense strand starting at position 3972 of SEQ ID NO: 585745
gugucuuguguuucuaagu

SEQ ID NO: 664289 - RNA, 19 nt, Artificial Sequence
  Description of Artificial Sequence: Synthetic oligonucleotide
  Antisense strand to SEQ ID NO: 664288
acuuagaaacacaagacac

SEQ ID NO: 664290 - RNA, 19 nt, Artificial Sequence
  Description of Artificial Sequence: Synthetic oligonucleotide
  Sense strand starting at position 3979 of SEQ ID NO: 585745
guguuucuaaguuguaaug

SEQ ID NO: 664291 - RNA, 19 nt, Artificial Sequence
  Description of Artificial Sequence: Synthetic oligonucleotide
  Antisense strand to SEQ ID NO: 664290
cauuacaacuuagaaacac

SEQ ID NO: 664292 - RNA, 19 nt, Artificial Sequence
  Description of Artificial Sequence: Synthetic oligonucleotide
  Sense strand starting at position 946 of SEQ ID NO: 585746
ccgagaaggacucgaaagu

SEQ ID NO: 664293 - RNA, 19 nt, Artificial Sequence
  Description of Artificial Sequence: Synthetic oligonucleotide
  Antisense strand to SEQ ID NO: 664292
acuuucgaguccuucucgg

SEQ ID NO: 664294 - RNA, 19 nt, Artificial Sequence
  Description of Artificial Sequence: Synthetic oligonucleotide
  Sense strand starting at position 956 of SEQ ID NO: 585746
cucgaaaguauguaggaga

SEQ ID NO: 664295 - RNA, 19 nt, Artificial Sequence
  Description of Artificial Sequence: Synthetic oligonucleotide
  Antisense strand to SEQ ID NO: 664294
ucuccuacauacuuucgag

SEQ ID NO: 664296 - RNA, 19 nt, Artificial Sequence
  Description of Artificial Sequence: Synthetic oligonucleotide
  Sense strand starting at position 1148 of SEQ ID NO: 585746
ggcuaauauggaugcgcau

SEQ ID NO: 664297 - RNA, 19 nt, Artificial Sequence
  Description of Artificial Sequence: Synthetic oligonucleotide
  Antisense strand to SEQ ID NO: 664296
augcgcauccauauuagcc

SEQ ID NO: 664298 - RNA, 19 nt, Artificial Sequence
  Description of Artificial Sequence: Synthetic oligonucleotide
  Sense strand starting at position 1991 of SEQ ID NO: 585746
uugccaucccgggauggau

SEQ ID NO: 664299 - RNA, 19 nt, Artificial Sequence
  Description of Artificial Sequence: Synthetic oligonucleotide
  Antisense strand to SEQ ID NO: 664298
auccaucccgggauggcaa

SEQ ID NO: 664300 - RNA, 19 nt, Artificial Sequence
  Description of Artificial Sequence: Synthetic oligonucleotide
  Sense strand starting at position 2286 of SEQ ID NO: 585746
cggugaugccucggaauug

SEQ ID NO: 664301 - RNA, 19 nt, Artificial Sequence
  Description of Artificial Sequence: Synthetic oligonucleotide
  Antisense strand to SEQ ID NO: 664300
caauuccgaggcaucaccg

SEQ ID NO: 664302 - RNA, 19 nt, Artificial Sequence
  Description of Artificial Sequence: Synthetic oligonucleotide
  Sense strand starting at position 2576 of SEQ ID NO: 585746
gugugcucgccgucuaaca

SEQ ID NO: 664303 - RNA, 19 nt, Artificial Sequence
  Description of Artificial Sequence: Synthetic oligonucleotide
  Antisense strand to SEQ ID NO: 664302
uguuagacggcgagcacac

SEQ ID NO: 664304 - RNA, 19 nt, Artificial Sequence
  Description of Artificial Sequence: Synthetic oligonucleotide
  Sense strand starting at position 2577 of SEQ ID NO: 585746
ugugcucgccgucuaacaa

SEQ ID NO: 664305 - RNA, 19 nt, Artificial Sequence
  Description of Artificial Sequence: Synthetic oligonucleotide
  Antisense strand to SEQ ID NO: 664304
uuguuagacggcgagcaca

SEQ ID NO: 664306 - RNA, 19 nt, Artificial Sequence
  Description of Artificial Sequence: Synthetic oligonucleotide
  Sense strand starting at position 2785 of SEQ ID NO: 585746
aguaucucuuucucucaga

SEQ ID NO: 664307 - RNA, 19 nt, Artificial Sequence
  Description of Artificial Sequence: Synthetic oligonucleotide
  Antisense strand to SEQ ID NO: 664306
ucugagagaaagagauacu

SEQ ID NO: 664308 - RNA, 19 nt, Artificial Sequence
  Description of Artificial Sequence: Synthetic oligonucleotide
  Sense strand starting at position 2938 of SEQ ID NO: 585746
cugugcuuccuccauaaag

SEQ ID NO: 664309 - RNA, 19 nt, Artificial Sequence
  Description of Artificial Sequence: Synthetic oligonucleotide
  Antisense strand to SEQ ID NO: 664308
cuuuauggaggaagcacag

SEQ ID NO: 664310 - RNA, 19 nt, Artificial Sequence
  Description of Artificial Sequence: Synthetic oligonucleotide
  Sense strand starting at position 2940 of SEQ ID NO: 585746
gugcuuccuccauaaagca

SEQ ID NO: 664311 - RNA, 19 nt, Artificial Sequence
  Description of Artificial Sequence: Synthetic oligonucleotide
  Antisense strand to SEQ ID NO: 664310
ugcuuuauggaggaagcac

SEQ ID NO: 664312 - RNA, 19 nt, Artificial Sequence
  Description of Artificial Sequence: Synthetic oligonucleotide
  Sense strand starting at position 3014 of SEQ ID NO: 585746
guucucagccuuuggaaac

SEQ ID NO: 664313 - RNA, 19 nt, Artificial Sequence
  Description of Artificial Sequence: Synthetic oligonucleotide
  Antisense strand to SEQ ID NO: 664312
guuuccaaaggcugagaac

SEQ ID NO: 664314 - RNA, 19 nt, Artificial Sequence
  Description of Artificial Sequence: Synthetic oligonucleotide
  Sense strand starting at position 3049 of SEQ ID NO: 585746
ggaugauugugguuguuga

SEQ ID NO: 664315 - RNA, 19 nt, Artificial Sequence
  Description of Artificial Sequence: Synthetic oligonucleotide
  Antisense strand to SEQ ID NO: 664314
ucaacaaccacaaucaucc

SEQ ID NO: 664316 - RNA, 19 nt, Artificial Sequence
  Description of Artificial Sequence: Synthetic oligonucleotide
  Sense strand starting at position 3050 of SEQ ID NO: 585746
gaugauugugguuguugaa

SEQ ID NO: 664317 - RNA, 19 nt, Artificial Sequence
  Description of Artificial Sequence: Synthetic oligonucleotide
  Antisense strand to SEQ ID NO: 664316
uucaacaaccacaaucauc

SEQ ID NO: 664318 - RNA, 19 nt, Artificial Sequence
  Description of Artificial Sequence: Synthetic oligonucleotide
  Sense strand starting at position 3097 of SEQ ID NO: 585746
cguaguucuaaagaagaau

SEQ ID NO: 664319 - RNA, 19 nt, Artificial Sequence
  Description of Artificial Sequence: Synthetic oligonucleotide
  Antisense strand to SEQ ID NO: 664318
auucuucuuuagaacuacg

SEQ ID NO: 664320 - RNA, 19 nt, Artificial Sequence
  Description of Artificial Sequence: Synthetic oligonucleotide
  Sense strand starting at position 3132 of SEQ ID NO: 585746
aguagaauuaagcguuuga

SEQ ID NO: 664321 - RNA, 19 nt, Artificial Sequence
  Description of Artificial Sequence: Synthetic oligonucleotide
  Antisense strand to SEQ ID NO: 664320
ucaaacgcuuaauucuacu

SEQ ID NO: 664322 - RNA, 19 nt, Artificial Sequence
  Description of Artificial Sequence: Synthetic oligonucleotide
  Sense strand starting at position 3136 of SEQ ID NO: 585746
gaauuaagcguuugagucu

SEQ ID NO: 664323 - RNA, 19 nt, Artificial Sequence
  Description of Artificial Sequence: Synthetic oligonucleotide
  Antisense strand to SEQ ID NO: 664322
agacucaaacgcuuaauuc

SEQ ID NO: 664324 - RNA, 19 nt, Artificial Sequence
  Description of Artificial Sequence: Synthetic oligonucleotide
  Sense strand starting at position 3145 of SEQ ID NO: 585746
guuugagucugguuaggca

SEQ ID NO: 664325 - RNA, 19 nt, Artificial Sequence
  Description of Artificial Sequence: Synthetic oligonucleotide
  Antisense strand to SEQ ID NO: 664324
ugccuaaccagacucaaac

SEQ ID NO: 664326 - RNA, 19 nt, Artificial Sequence
  Description of Artificial Sequence: Synthetic oligonucleotide
  Sense strand starting at position 3149 of SEQ ID NO: 585746
gagucugguuaggcaagau

SEQ ID NO: 664327 - RNA, 19 nt, Artificial Sequence
  Description of Artificial Sequence: Synthetic oligonucleotide
  Antisense strand to SEQ ID NO: 664326
aucuugccuaaccagacuc

SEQ ID NO: 664328 - RNA, 19 nt, Artificial Sequence
  Description of Artificial Sequence: Synthetic oligonucleotide
  Sense strand starting at position 3167 of SEQ ID NO: 585746
ugauguuaugcaggcagaa

SEQ ID NO: 664329 - RNA, 19 nt, Artificial Sequence
  Description of Artificial Sequence: Synthetic oligonucleotide
  Antisense strand to SEQ ID NO: 664328
uucugccugcauaacauca

SEQ ID NO: 664330 - RNA, 19 nt, Artificial Sequence
  Description of Artificial Sequence: Synthetic oligonucleotide
  Sense strand starting at position 3169 of SEQ ID NO: 585746
auguuaugcaggcagaaag

SEQ ID NO: 664331 - RNA, 19 nt, Artificial Sequence
  Description of Artificial Sequence: Synthetic oligonucleotide
  Antisense strand to SEQ ID NO: 664330
cuuucugccugcauaacau

SEQ ID NO: 664332 - RNA, 19 nt, Artificial Sequence
  Description of Artificial Sequence: Synthetic oligonucleotide
  Sense strand starting at position 3180 of SEQ ID NO: 585746
gcagaaagcuggcuacuuu

SEQ ID NO: 664333 - RNA, 19 nt, Artificial Sequence
  Description of Artificial Sequence: Synthetic oligonucleotide
  Antisense strand to SEQ ID NO: 664332
aaaguagccagcuuucugc

SEQ ID NO: 664334 - RNA, 19 nt, Artificial Sequence
  Description of Artificial Sequence: Synthetic oligonucleotide
  Sense strand starting at position 3187 of SEQ ID NO: 585746
gcuggcuacuuucuauuua

SEQ ID NO: 664335 - RNA, 19 nt, Artificial Sequence
  Description of Artificial Sequence: Synthetic oligonucleotide
  Antisense strand to SEQ ID NO: 664334
uaaauagaaaguagccagc

SEQ ID NO: 664336 - RNA, 19 nt, Artificial Sequence
  Description of Artificial Sequence: Synthetic oligonucleotide
  Sense strand starting at position 3339 of SEQ ID NO: 585746
agaagugucugucucggga

SEQ ID NO: 664337 - RNA, 19 nt, Artificial Sequence
  Description of Artificial Sequence: Synthetic oligonucleotide
  Antisense strand to SEQ ID NO: 664336
ucccgagacagacacuucu

SEQ ID NO: 664338 - RNA, 19 nt, Artificial Sequence
  Description of Artificial Sequence: Synthetic oligonucleotide
  Sense strand starting at position 3357 of SEQ ID NO: 585746
auggguccuggccagaaua

SEQ ID NO: 664339 - RNA, 19 nt, Artificial Sequence
  Description of Artificial Sequence: Synthetic oligonucleotide
  Antisense strand to SEQ ID NO: 664338
uauucuggccaggacccau

SEQ ID NO: 664340 - RNA, 19 nt, Artificial Sequence
  Description of Artificial Sequence: Synthetic oligonucleotide
  Sense strand starting at position 3359 of SEQ ID NO: 585746
ggguccuggccagaauaga

SEQ ID NO: 664341 - RNA, 19 nt, Artificial Sequence
  Description of Artificial Sequence: Synthetic oligonucleotide
  Antisense strand to SEQ ID NO: 664340
ucuauucuggccaggaccc

SEQ ID NO: 664342 - RNA, 19 nt, Artificial Sequence
  Description of Artificial Sequence: Synthetic oligonucleotide
  Sense strand starting at position 3406 of SEQ ID NO: 585746
gacccuuaggucugauaug

SEQ ID NO: 664343 - RNA, 19 nt, Artificial Sequence
  Description of Artificial Sequence: Synthetic oligonucleotide
  Antisense strand to SEQ ID NO: 664342
cauaucagaccuaaggguc

SEQ ID NO: 664344 - RNA, 19 nt, Artificial Sequence
  Description of Artificial Sequence: Synthetic oligonucleotide
  Sense strand starting at position 3411 of SEQ ID NO: 585746
uuaggucugauaugagaua

SEQ ID NO: 664345 - RNA, 19 nt, Artificial Sequence
  Description of Artificial Sequence: Synthetic oligonucleotide
  Antisense strand to SEQ ID NO: 664344
uaucucauaucagaccuaa

SEQ ID NO: 664346 - RNA, 19 nt, Artificial Sequence
  Description of Artificial Sequence: Synthetic oligonucleotide
  Sense strand starting at position 3412 of SEQ ID NO: 585746
uaggucugauaugagauaa

SEQ ID NO: 664347 - RNA, 19 nt, Artificial Sequence
  Description of Artificial Sequence: Synthetic oligonucleotide
  Antisense strand to SEQ ID NO: 664346
uuaucucauaucagaccua

SEQ ID NO: 664348 - RNA, 19 nt, Artificial Sequence
  Description of Artificial Sequence: Synthetic oligonucleotide
  Sense strand starting at position 3422 of SEQ ID NO: 585746
augagauaaguaggcuaaa

SEQ ID NO: 664349 - RNA, 19 nt, Artificial Sequence
  Description of Artificial Sequence: Synthetic oligonucleotide
  Antisense strand to SEQ ID NO: 664348
uuuagccuacuuaucucau

SEQ ID NO: 664350 - RNA, 19 nt, Artificial Sequence
  Description of Artificial Sequence: Synthetic oligonucleotide
  Sense strand starting at position 3515 of SEQ ID NO: 585746
cuguuauguuucccagggu

SEQ ID NO: 664351 - RNA, 19 nt, Artificial Sequence
  Description of Artificial Sequence: Synthetic oligonucleotide
  Antisense strand to SEQ ID NO: 664350
acccugggaaacauaacag

SEQ ID NO: 664352 - RNA, 19 nt, Artificial Sequence
  Description of Artificial Sequence: Synthetic oligonucleotide
  Sense strand starting at position 3518 of SEQ ID NO: 585746
uuauguuucccagggucua

SEQ ID NO: 664353 - RNA, 19 nt, Artificial Sequence
  Description of Artificial Sequence: Synthetic oligonucleotide
  Antisense strand to SEQ ID NO: 664352
uagacccugggaaacauaa

SEQ ID NO: 664354 - RNA, 19 nt, Artificial Sequence
  Description of Artificial Sequence: Synthetic oligonucleotide
  Sense strand starting at position 3529 of SEQ ID NO: 585746
agggucuacuguuuacuga

SEQ ID NO: 664355 - RNA, 19 nt, Artificial Sequence
  Description of Artificial Sequence: Synthetic oligonucleotide
  Antisense strand to SEQ ID NO: 664354
ucaguaaacaguagacccu

SEQ ID NO: 664356 - RNA, 19 nt, Artificial Sequence
  Description of Artificial Sequence: Synthetic oligonucleotide
  Sense strand starting at position 3530 of SEQ ID NO: 585746
gggucuacuguuuacugaa

SEQ ID NO: 664357 - RNA, 19 nt, Artificial Sequence
  Description of Artificial Sequence: Synthetic oligonucleotide
  Antisense strand to SEQ ID NO: 664356
uucaguaaacaguagaccc

SEQ ID NO: 664358 - RNA, 19 nt, Artificial Sequence
  Description of Artificial Sequence: Synthetic oligonucleotide
  Sense strand starting at position 3532 of SEQ ID NO: 585746
gucuacuguuuacugaaga

SEQ ID NO: 664359 - RNA, 19 nt, Artificial Sequence
  Description of Artificial Sequence: Synthetic oligonucleotide
  Antisense strand to SEQ ID NO: 664358
ucuucaguaaacaguagac

SEQ ID NO: 664360 - RNA, 19 nt, Artificial Sequence
  Description of Artificial Sequence: Synthetic oligonucleotide
  Sense strand starting at position 3708 of SEQ ID NO: 585746
uagaauaggugucuugugu

SEQ ID NO: 664361 - RNA, 19 nt, Artificial Sequence
  Description of Artificial Sequence: Synthetic oligonucleotide
  Antisense strand to SEQ ID NO: 664360
acacaagacaccuauucua

SEQ ID NO: 664362 - RNA, 19 nt, Artificial Sequence
  Description of Artificial Sequence: Synthetic oligonucleotide
  Sense strand starting at position 3715 of SEQ ID NO: 585746
ggugucuuguguuucuaag

SEQ ID NO: 664363 - RNA, 19 nt, Artificial Sequence
  Description of Artificial Sequence: Synthetic oligonucleotide
  Antisense strand to SEQ ID NO: 664362
cuuagaaacacaagacacc

SEQ ID NO: 664364 - RNA, 19 nt, Artificial Sequence
  Description of Artificial Sequence: Synthetic oligonucleotide
  Sense strand starting at position 3716 of SEQ ID NO: 585746
gugucuuguguuucuaagu

SEQ ID NO: 664365 - RNA, 19 nt, Artificial Sequence
  Description of Artificial Sequence: Synthetic oligonucleotide
  Antisense strand to SEQ ID NO: 664364
acuuagaaacacaagacac

SEQ ID NO: 664366 - RNA, 19 nt, Artificial Sequence
  Description of Artificial Sequence: Synthetic oligonucleotide
  Sense strand starting at position 3721 of SEQ ID NO: 585746
uuguguuucuaaguuguaa

SEQ ID NO: 664367 - RNA, 19 nt, Artificial Sequence
  Description of Artificial Sequence: Synthetic oligonucleotide
  Antisense strand to SEQ ID NO: 664366
uuacaacuuagaaacacaa

SEQ ID NO: 664368 - RNA, 19 nt, Artificial Sequence
  Description of Artificial Sequence: Synthetic oligonucleotide
  Sense strand starting at position 3723 of SEQ ID NO: 585746
guguuucuaaguuguaaug

SEQ ID NO: 664369 - RNA, 19 nt, Artificial Sequence
  Description of Artificial Sequence: Synthetic oligonucleotide
  Antisense strand to SEQ ID NO: 664368
cauuacaacuuagaaacac

SEQ ID NO: 664370 - RNA, 19 nt, Artificial Sequence
  Description of Artificial Sequence: Synthetic oligonucleotide
  Sense strand starting at position 3733 of SEQ ID NO: 585746
guuguaauguguuccaaug

SEQ ID NO: 664371 - RNA, 19 nt, Artificial Sequence
  Description of Artificial Sequence: Synthetic oligonucleotide
  Antisense strand to SEQ ID NO: 664370
cauuggaacacauuacaac

SEQ ID NO: 664372 - RNA, 19 nt, Artificial Sequence
  Description of Artificial Sequence: Synthetic oligonucleotide
  Sense strand starting at position 91 of SEQ ID NO: 585747
ccaaguccagcugauuauu

SEQ ID NO: 664373 - RNA, 19 nt, Artificial Sequence
  Description of Artificial Sequence: Synthetic oligonucleotide
  Antisense strand to SEQ ID NO: 664372
aauaaucagcuggacuugg

SEQ ID NO: 664374 - RNA, 19 nt, Artificial Sequence
  Description of Artificial Sequence: Synthetic oligonucleotide
  Sense strand starting at position 123 of SEQ ID NO: 585747
ggacgaguuucaccauguu

SEQ ID NO: 664375 - RNA, 19 nt, Artificial Sequence
  Description of Artificial Sequence: Synthetic oligonucleotide
  Antisense strand to SEQ ID NO: 664374
aacauggugaaacucgucc

SEQ ID NO: 664376 - RNA, 19 nt, Artificial Sequence
  Description of Artificial Sequence: Synthetic oligonucleotide
  Sense strand starting at position 536 of SEQ ID NO: 585747
auaggaguguuugacuacu

SEQ ID NO: 664377 - RNA, 19 nt, Artificial Sequence
  Description of Artificial Sequence: Synthetic oligonucleotide
  Antisense strand to SEQ ID NO: 664376
aguagucaaacacuccuau

SEQ ID NO: 664378 - RNA, 19 nt, Artificial Sequence
  Description of Artificial Sequence: Synthetic oligonucleotide
  Sense strand starting at position 538 of SEQ ID NO: 585747
aggaguguuugacuacuuu

SEQ ID NO: 664379 - RNA, 19 nt, Artificial Sequence
  Description of Artificial Sequence: Synthetic oligonucleotide
  Antisense strand to SEQ ID NO: 664378
aaaguagucaaacacuccu

SEQ ID NO: 664380 - RNA, 19 nt, Artificial Sequence
  Description of Artificial Sequence: Synthetic oligonucleotide
  Sense strand starting at position 542 of SEQ ID NO: 585747
guguuugacuacuuuauuc

SEQ ID NO: 664381 - RNA, 19 nt, Artificial Sequence
  Description of Artificial Sequence: Synthetic oligonucleotide
  Antisense strand to SEQ ID NO: 664380
gaauaaaguagucaaacac

SEQ ID NO: 664382 - RNA, 19 nt, Artificial Sequence
  Description of Artificial Sequence: Synthetic oligonucleotide
  Sense strand starting at position 575 of SEQ ID NO: 585747
cagcuagaacugugccuua

SEQ ID NO: 664383 - RNA, 19 nt, Artificial Sequence
  Description of Artificial Sequence: Synthetic oligonucleotide
  Antisense strand to SEQ ID NO: 664382
uaaggcacaguucuagcug

SEQ ID NO: 664384 - RNA, 19 nt, Artificial Sequence
  Description of Artificial Sequence: Synthetic oligonucleotide
  Sense strand starting at position 578 of SEQ ID NO: 585747
cuagaacugugccuuaaca

SEQ ID NO: 664385 - RNA, 19 nt, Artificial Sequence
  Description of Artificial Sequence: Synthetic oligonucleotide
  Antisense strand to SEQ ID NO: 664384
uguuaaggcacaguucuag

SEQ ID NO: 664386 - RNA, 19 nt, Artificial Sequence
  Description of Artificial Sequence: Synthetic oligonucleotide
  Sense strand starting at position 580 of SEQ ID NO: 585747
agaacugugccuuaacaaa

SEQ ID NO: 664387 - RNA, 19 nt, Artificial Sequence
  Description of Artificial Sequence: Synthetic oligonucleotide
  Antisense strand to SEQ ID NO: 664386
uuuguuaaggcacaguucu

SEQ ID NO: 664388 - RNA, 19 nt, Artificial Sequence
  Description of Artificial Sequence: Synthetic oligonucleotide
  Sense strand starting at position 605 of SEQ ID NO: 585747
gcagcauuugcugggcaca

SEQ ID NO: 664389 - RNA, 19 nt, Artificial Sequence
  Description of Artificial Sequence: Synthetic oligonucleotide
  Antisense strand to SEQ ID NO: 664388
ugugcccagcaaaugcugc

SEQ ID NO: 664390 - RNA, 19 nt, Artificial Sequence
  Description of Artificial Sequence: Synthetic oligonucleotide
  Sense strand starting at position 621 of SEQ ID NO: 585747
acaguaauccuguaauccu

SEQ ID NO: 664391 - RNA, 19 nt, Artificial Sequence
  Description of Artificial Sequence: Synthetic oligonucleotide
  Antisense strand to SEQ ID NO: 664390
aggauuacaggauuacugu

SEQ ID NO: 664392 - RNA, 19 nt, Artificial Sequence
  Description of Artificial Sequence: Synthetic oligonucleotide
  Sense strand starting at position 1020 of SEQ ID NO: 585747
agaccuuguuucuacauua

SEQ ID NO: 664393 - RNA, 19 nt, Artificial Sequence
  Description of Artificial Sequence: Synthetic oligonucleotide
  Antisense strand to SEQ ID NO: 664392
uaauguagaaacaaggucu

SEQ ID NO: 664394 - RNA, 19 nt, Artificial Sequence
  Description of Artificial Sequence: Synthetic oligonucleotide
  Sense strand starting at position 1155 of SEQ ID NO: 585747
cgcagugagccgucauggu

SEQ ID NO: 664395 - RNA, 19 nt, Artificial Sequence
  Description of Artificial Sequence: Synthetic oligonucleotide
  Antisense strand to SEQ ID NO: 664394
accaugacggcucacugcg

SEQ ID NO: 664396 - RNA, 19 nt, Artificial Sequence
  Description of Artificial Sequence: Synthetic oligonucleotide
  Sense strand starting at position 1554 of SEQ ID NO: 585747
acggaaucugcugaauucu

SEQ ID NO: 664397 - RNA, 19 nt, Artificial Sequence
  Description of Artificial Sequence: Synthetic oligonucleotide
  Antisense strand to SEQ ID NO: 664396
agaauucagcagauuccgu

SEQ ID NO: 664398 - RNA, 19 nt, Artificial Sequence
  Description of Artificial Sequence: Synthetic oligonucleotide
  Sense strand starting at position 1563 of SEQ ID NO: 585747
gcugaauucugaucuacua

SEQ ID NO: 664399 - RNA, 19 nt, Artificial Sequence
  Description of Artificial Sequence: Synthetic oligonucleotide
  Antisense strand to SEQ ID NO: 664398
uaguagaucagaauucagc

SEQ ID NO: 664400 - RNA, 19 nt, Artificial Sequence
  Description of Artificial Sequence: Synthetic oligonucleotide
  Sense strand starting at position 1654 of SEQ ID NO: 585747
cucauccugccgugaagaa

SEQ ID NO: 664401 - RNA, 19 nt, Artificial Sequence
  Description of Artificial Sequence: Synthetic oligonucleotide
  Antisense strand to SEQ ID NO: 664400
uucuucacggcaggaugag

SEQ ID NO: 664402 - RNA, 19 nt, Artificial Sequence
  Description of Artificial Sequence: Synthetic oligonucleotide
  Sense strand starting at position 1655 of SEQ ID NO: 585747
ucauccugccgugaagaaa

SEQ ID NO: 664403 - RNA, 19 nt, Artificial Sequence
  Description of Artificial Sequence: Synthetic oligonucleotide
  Antisense strand to SEQ ID NO: 664402
uuucuucacggcaggauga

SEQ ID NO: 664404 - RNA, 19 nt, Artificial Sequence
  Description of Artificial Sequence: Synthetic oligonucleotide
  Sense strand starting at position 1667 of SEQ ID NO: 585747
gaagaaacuucucaggaug

SEQ ID NO: 664405 - RNA, 19 nt, Artificial Sequence
  Description of Artificial Sequence: Synthetic oligonucleotide
  Antisense strand to SEQ ID NO: 664404
cauccugagaaguuucuuc

SEQ ID NO: 664406 - RNA, 19 nt, Artificial Sequence
  Description of Artificial Sequence: Synthetic oligonucleotide
  Sense strand starting at position 1684 of SEQ ID NO: 585747
uguccuaaucccggaagca

SEQ ID NO: 664407 - RNA, 19 nt, Artificial Sequence
  Description of Artificial Sequence: Synthetic oligonucleotide
  Antisense strand to SEQ ID NO: 664406
ugcuuccgggauuaggaca

SEQ ID NO: 664408 - RNA, 19 nt, Artificial Sequence
  Description of Artificial Sequence: Synthetic oligonucleotide
  Sense strand starting at position 1685 of SEQ ID NO: 585747
guccuaaucccggaagcau

SEQ ID NO: 664409 - RNA, 19 nt, Artificial Sequence
  Description of Artificial Sequence: Synthetic oligonucleotide
  Antisense strand to SEQ ID NO: 664408
augcuuccgggauuaggac

SEQ ID NO: 664410 - RNA, 19 nt, Artificial Sequence
  Description of Artificial Sequence: Synthetic oligonucleotide
  Sense strand starting at position 1999 of SEQ ID NO: 585747
ggcaguagcgcucggaaga

SEQ ID NO: 664411 - RNA, 19 nt, Artificial Sequence
  Description of Artificial Sequence: Synthetic oligonucleotide
  Antisense strand to SEQ ID NO: 664410
ucuuccgagcgcuacugcc

SEQ ID NO: 664412 - RNA, 19 nt, Artificial Sequence
  Description of Artificial Sequence: Synthetic oligonucleotide
  Sense strand starting at position 2228 of SEQ ID NO: 585747
gguggcauuugguuuccua

SEQ ID NO: 664413 - RNA, 19 nt, Artificial Sequence
  Description of Artificial Sequence: Synthetic oligonucleotide
  Antisense strand to SEQ ID NO: 664412
uaggaaaccaaaugccacc

SEQ ID NO: 664414 - RNA, 19 nt, Artificial Sequence
  Description of Artificial Sequence: Synthetic oligonucleotide
  Sense strand starting at position 2232 of SEQ ID NO: 585747
gcauuugguuuccuaauac

SEQ ID NO: 664415 - RNA, 19 nt, Artificial Sequence
  Description of Artificial Sequence: Synthetic oligonucleotide
  Antisense strand to SEQ ID NO: 664414
guauuaggaaaccaaaugc

SEQ ID NO: 664416 - RNA, 19 nt, Artificial Sequence
  Description of Artificial Sequence: Synthetic oligonucleotide
  Sense strand starting at position 2242 of SEQ ID NO: 585747
uccuaauacccuuggcuga

SEQ ID NO: 664417 - RNA, 19 nt, Artificial Sequence
  Description of Artificial Sequence: Synthetic oligonucleotide
  Antisense strand to SEQ ID NO: 664416
ucagccaaggguauuagga

SEQ ID NO: 664418 - RNA, 19 nt, Artificial Sequence
  Description of Artificial Sequence: Synthetic oligonucleotide
  Sense strand starting at position 2344 of SEQ ID NO: 585747
acacaacacguuuggagau

SEQ ID NO: 664419 - RNA, 19 nt, Artificial Sequence
  Description of Artificial Sequence: Synthetic oligonucleotide
  Antisense strand to SEQ ID NO: 664418
aucuccaaacguguugugu

SEQ ID NO: 664420 - RNA, 19 nt, Artificial Sequence
  Description of Artificial Sequence: Synthetic oligonucleotide
  Sense strand starting at position 3029 of SEQ ID NO: 585747
caagcuaagggauguuuga

SEQ ID NO: 664421 - RNA, 19 nt, Artificial Sequence
  Description of Artificial Sequence: Synthetic oligonucleotide
  Antisense strand to SEQ ID NO: 664420
ucaaacaucccuuagcuug

SEQ ID NO: 664422 - RNA, 19 nt, Artificial Sequence
  Description of Artificial Sequence: Synthetic oligonucleotide
  Sense strand starting at position 3038 of SEQ ID NO: 585747
ggauguuugaaccaagcua

SEQ ID NO: 664423 - RNA, 19 nt, Artificial Sequence
  Description of Artificial Sequence: Synthetic oligonucleotide
  Antisense strand to SEQ ID NO: 664422
uagcuugguucaaacaucc

SEQ ID NO: 664424 - RNA, 19 nt, Artificial Sequence
  Description of Artificial Sequence: Synthetic oligonucleotide
  Sense strand starting at position 3120 of SEQ ID NO: 585747
gaccuacuagguugaacaa

SEQ ID NO: 664425 - RNA, 19 nt, Artificial Sequence
  Description of Artificial Sequence: Synthetic oligonucleotide
  Antisense strand to SEQ ID NO: 664424
uuguucaaccuaguagguc

SEQ ID NO: 664426 - RNA, 19 nt, Artificial Sequence
  Description of Artificial Sequence: Synthetic oligonucleotide
  Sense strand starting at position 3203 of SEQ ID NO: 585747
uccgguuuauguuuaugua

SEQ ID NO: 664427 - RNA, 19 nt, Artificial Sequence
  Description of Artificial Sequence: Synthetic oligonucleotide
  Antisense strand to SEQ ID NO: 664426
uacauaaacauaaaccgga

SEQ ID NO: 664428 - RNA, 19 nt, Artificial Sequence
  Description of Artificial Sequence: Synthetic oligonucleotide
  Sense strand starting at position 3204 of SEQ ID NO: 585747
ccgguuuauguuuauguau

SEQ ID NO: 664429 - RNA, 19 nt, Artificial Sequence
  Description of Artificial Sequence: Synthetic oligonucleotide
  Antisense strand to SEQ ID NO: 664428
auacauaaacauaaaccgg

SEQ ID NO: 664430 - RNA, 19 nt, Artificial Sequence
  Description of Artificial Sequence: Synthetic oligonucleotide
  Sense strand starting at position 3245 of SEQ ID NO: 585747
gcaccugagaucuguguau

SEQ ID NO: 664431 - RNA, 19 nt, Artificial Sequence
  Description of Artificial Sequence: Synthetic oligonucleotide
  Antisense strand to SEQ ID NO: 664430
auacacagaucucaggugc

SEQ ID NO: 664432 - RNA, 19 nt, Artificial Sequence
  Description of Artificial Sequence: Synthetic oligonucleotide
  Sense strand starting at position 3247 of SEQ ID NO: 585747
accugagaucuguguauac

SEQ ID NO: 664433 - RNA, 19 nt, Artificial Sequence
  Description of Artificial Sequence: Synthetic oligonucleotide
  Antisense strand to SEQ ID NO: 664432
guauacacagaucucaggu

SEQ ID NO: 664434 - RNA, 19 nt, Artificial Sequence
  Description of Artificial Sequence: Synthetic oligonucleotide
  Sense strand starting at position 3249 of SEQ ID NO: 585747
cugagaucuguguauacau

SEQ ID NO: 664435 - RNA, 19 nt, Artificial Sequence
  Description of Artificial Sequence: Synthetic oligonucleotide
  Antisense strand to SEQ ID NO: 664434
auguauacacagaucucag

SEQ ID NO: 664436 - RNA, 19 nt, Artificial Sequence
  Description of Artificial Sequence: Synthetic oligonucleotide
  Sense strand starting at position 3251 of SEQ ID NO: 585747
gagaucuguguauacaugu

SEQ ID NO: 664437 - RNA, 19 nt, Artificial Sequence
  Description of Artificial Sequence: Synthetic oligonucleotide
  Antisense strand to SEQ ID NO: 664436
acauguauacacagaucuc

SEQ ID NO: 664438 - RNA, 19 nt, Artificial Sequence
  Description of Artificial Sequence: Synthetic oligonucleotide
  Sense strand starting at position 3260 of SEQ ID NO: 585747
guauacaugucagucaaca

SEQ ID NO: 664439 - RNA, 19 nt, Artificial Sequence
  Description of Artificial Sequence: Synthetic oligonucleotide
  Antisense strand to SEQ ID NO: 664438
uguugacugacauguauac

SEQ ID NO: 664440 - RNA, 19 nt, Artificial Sequence
  Description of Artificial Sequence: Synthetic oligonucleotide
  Sense strand starting at position 3784 of SEQ ID NO: 585747
gacgaaguaucucagaaug

SEQ ID NO: 664441 - RNA, 19 nt, Artificial Sequence
  Description of Artificial Sequence: Synthetic oligonucleotide
  Antisense strand to SEQ ID NO: 664440
cauucugagauacuucguc

SEQ ID NO: 664442 - RNA, 19 nt, Artificial Sequence
  Description of Artificial Sequence: Synthetic oligonucleotide
  Sense strand starting at position 3786 of SEQ ID NO: 585747
cgaaguaucucagaaugac

SEQ ID NO: 664443 - RNA, 19 nt, Artificial Sequence
  Description of Artificial Sequence: Synthetic oligonucleotide
  Antisense strand to SEQ ID NO: 664442
gucauucugagauacuucg

SEQ ID NO: 664444 - RNA, 19 nt, Artificial Sequence
  Description of Artificial Sequence: Synthetic oligonucleotide
  Sense strand starting at position 3830 of SEQ ID NO: 585747
guaacaucuggugguuaau

SEQ ID NO: 664445 - RNA, 19 nt, Artificial Sequence
  Description of Artificial Sequence: Synthetic oligonucleotide
  Antisense strand to SEQ ID NO: 664444
auuaaccaccagauguuac

SEQ ID NO: 664446 - RNA, 19 nt, Artificial Sequence
  Description of Artificial Sequence: Synthetic oligonucleotide
  Sense strand starting at position 3883 of SEQ ID NO: 585747
ggugguuaauuggaaccua

SEQ ID NO: 664447 - RNA, 19 nt, Artificial Sequence
  Description of Artificial Sequence: Synthetic oligonucleotide
  Antisense strand to SEQ ID NO: 664446
uagguuccaauuaaccacc

SEQ ID NO: 664448 - RNA, 19 nt, Artificial Sequence
  Description of Artificial Sequence: Synthetic oligonucleotide
  Sense strand starting at position 3950 of SEQ ID NO: 585747
uccagaggcuccuaaacuu

SEQ ID NO: 664449 - RNA, 19 nt, Artificial Sequence
  Description of Artificial Sequence: Synthetic oligonucleotide
  Antisense strand to SEQ ID NO: 664448
aaguuuaggagccucugga

SEQ ID NO: 664450 - RNA, 19 nt, Artificial Sequence
  Description of Artificial Sequence: Synthetic oligonucleotide
  Sense strand starting at position 3968 of SEQ ID NO: 585747
ugucuuuacuuugcagcua

SEQ ID NO: 664451 - RNA, 19 nt, Artificial Sequence
  Description of Artificial Sequence: Synthetic oligonucleotide
  Antisense strand to SEQ ID NO: 664450
uagcugcaaaguaaagaca

SEQ ID NO: 664452 - RNA, 19 nt, Artificial Sequence
  Description of Artificial Sequence: Synthetic oligonucleotide
  Sense strand starting at position 763 of SEQ ID NO: 585748
ugguccugcauggaagaau

SEQ ID NO: 664453 - RNA, 19 nt, Artificial Sequence
  Description of Artificial Sequence: Synthetic oligonucleotide
  Antisense strand to SEQ ID NO: 664452
auucuuccaugcaggacca

SEQ ID NO: 664454 - RNA, 19 nt, Artificial Sequence
  Description of Artificial Sequence: Synthetic oligonucleotide
  Sense strand starting at position 908 of SEQ ID NO: 585748
agcacuguggauuaacuaa

SEQ ID NO: 664455 - RNA, 19 nt, Artificial Sequence
  Description of Artificial Sequence: Synthetic oligonucleotide
  Antisense strand to SEQ ID NO: 664454
uuaguuaauccacagugcu

SEQ ID NO: 664456 - RNA, 19 nt, Artificial Sequence
  Description of Artificial Sequence: Synthetic oligonucleotide
  Sense strand starting at position 1140 of SEQ ID NO: 585748
uuuauuucggcagagugca

SEQ ID NO: 664457 - RNA, 19 nt, Artificial Sequence
  Description of Artificial Sequence: Synthetic oligonucleotide
  Antisense strand to SEQ ID NO: 664456
ugcacucugccgaaauaaa

SEQ ID NO: 664458 - RNA, 19 nt, Artificial Sequence
  Description of Artificial Sequence: Synthetic oligonucleotide
  Sense strand starting at position 1674 of SEQ ID NO: 585748
ccagguuucccgggaagga

SEQ ID NO: 664459 - RNA, 19 nt, Artificial Sequence
  Description of Artificial Sequence: Synthetic oligonucleotide
  Antisense strand to SEQ ID NO: 664458
uccuucccgggaaaccugg

SEQ ID NO: 664460 - RNA, 19 nt, Artificial Sequence
  Description of Artificial Sequence: Synthetic oligonucleotide
  Sense strand starting at position 2294 of SEQ ID NO: 585748
ucuaaagaaugucucuagu

SEQ ID NO: 664461 - RNA, 19 nt, Artificial Sequence
  Description of Artificial Sequence: Synthetic oligonucleotide
  Antisense strand to SEQ ID NO: 664460
acuagagacauucuuuaga

SEQ ID NO: 664462 - RNA, 19 nt, Artificial Sequence
  Description of Artificial Sequence: Synthetic oligonucleotide
  Sense strand starting at position 2383 of SEQ ID NO: 585748
uaucuuguaugagugaaug

SEQ ID NO: 664463 - RNA, 19 nt, Artificial Sequence
  Description of Artificial Sequence: Synthetic oligonucleotide
  Antisense strand to SEQ ID NO: 664462
cauucacucauacaagaua

SEQ ID NO: 664464 - RNA, 19 nt, Artificial Sequence
  Description of Artificial Sequence: Synthetic oligonucleotide
  Sense strand starting at position 2405 of SEQ ID NO: 585748
aucccuugugaucaguuau

SEQ ID NO: 664465 - RNA, 19 nt, Artificial Sequence
  Description of Artificial Sequence: Synthetic oligonucleotide
  Antisense strand to SEQ ID NO: 664464
auaacugaucacaagggau

SEQ ID NO: 664466 - RNA, 19 nt, Artificial Sequence
  Description of Artificial Sequence: Synthetic oligonucleotide
  Sense strand starting at position 2476 of SEQ ID NO: 585748
cagguucuagaauguacua

SEQ ID NO: 664467 - RNA, 19 nt, Artificial Sequence
  Description of Artificial Sequence: Synthetic oligonucleotide
  Antisense strand to SEQ ID NO: 664466
uaguacauucuagaaccug

SEQ ID NO: 664468 - RNA, 19 nt, Artificial Sequence
  Description of Artificial Sequence: Synthetic oligonucleotide
  Sense strand starting at position 2499 of SEQ ID NO: 585748
cgaaaccucaggcaaguua

SEQ ID NO: 664469 - RNA, 19 nt, Artificial Sequence
  Description of Artificial Sequence: Synthetic oligonucleotide
  Antisense strand to SEQ ID NO: 664468
uaacuugccugagguuucg

SEQ ID NO: 664470 - RNA, 19 nt, Artificial Sequence
  Description of Artificial Sequence: Synthetic oligonucleotide
  Sense strand starting at position 2630 of SEQ ID NO: 585748
auggcaagccuuuauauua

SEQ ID NO: 664471 - RNA, 19 nt, Artificial Sequence
  Description of Artificial Sequence: Synthetic oligonucleotide
  Antisense strand to SEQ ID NO: 664470
uaauauaaaggcuugccau

SEQ ID NO: 664472 - RNA, 19 nt, Artificial Sequence
  Description of Artificial Sequence: Synthetic oligonucleotide
  Sense strand starting at position 2644 of SEQ ID NO: 585748
uauuaagaucuggaccguu

SEQ ID NO: 664473 - RNA, 19 nt, Artificial Sequence
  Description of Artificial Sequence: Synthetic oligonucleotide
  Antisense strand to SEQ ID NO: 664472
aacgguccagaucuuaaua

SEQ ID NO: 664474 - RNA, 19 nt, Artificial Sequence
  Description of Artificial Sequence: Synthetic oligonucleotide
  Sense strand starting at position 2658 of SEQ ID NO: 585748
ccguucugugcuuugaagu

SEQ ID NO: 664475 - RNA, 19 nt, Artificial Sequence
  Description of Artificial Sequence: Synthetic oligonucleotide
  Antisense strand to SEQ ID NO: 664474
acuucaaagcacagaacgg

SEQ ID NO: 664476 - RNA, 19 nt, Artificial Sequence
  Description of Artificial Sequence: Synthetic oligonucleotide
  Sense strand starting at position 2671 of SEQ ID NO: 585748
ugaaguguaugaccuaaag

SEQ ID NO: 664477 - RNA, 19 nt, Artificial Sequence
  Description of Artificial Sequence: Synthetic oligonucleotide
  Antisense strand to SEQ ID NO: 664476
cuuuaggucauacacuuca

SEQ ID NO: 664478 - RNA, 19 nt, Artificial Sequence
  Description of Artificial Sequence: Synthetic oligonucleotide
  Sense strand starting at position 2688 of SEQ ID NO: 585748
agcagauguaggcauucua

SEQ ID NO: 664479 - RNA, 19 nt, Artificial Sequence
  Description of Artificial Sequence: Synthetic oligonucleotide
  Antisense strand to SEQ ID NO: 664478
uagaaugccuacaucugcu

SEQ ID NO: 664480 - RNA, 19 nt, Artificial Sequence
  Description of Artificial Sequence: Synthetic oligonucleotide
  Sense strand starting at position 2695 of SEQ ID NO: 585748
guaggcauucuauaaguaa

SEQ ID NO: 664481 - RNA, 19 nt, Artificial Sequence
  Description of Artificial Sequence: Synthetic oligonucleotide
  Antisense strand to SEQ ID NO: 664480
uuacuuauagaaugccuac

SEQ ID NO: 664482 - RNA, 19 nt, Artificial Sequence
  Description of Artificial Sequence: Synthetic oligonucleotide
  Sense strand starting at position 2718 of SEQ ID NO: 585748
agcauaaagguguauggua

SEQ ID NO: 664483 - RNA, 19 nt, Artificial Sequence
  Description of Artificial Sequence: Synthetic oligonucleotide
  Antisense strand to SEQ ID NO: 664482
uaccauacaccuuuaugcu

SEQ ID NO: 664484 - RNA, 19 nt, Artificial Sequence
  Description of Artificial Sequence: Synthetic oligonucleotide
  Sense strand starting at position 2720 of SEQ ID NO: 585748
cauaaagguguaugguaaa

SEQ ID NO: 664485 - RNA, 19 nt, Artificial Sequence
  Description of Artificial Sequence: Synthetic oligonucleotide
  Antisense strand to SEQ ID NO: 664484
uuuaccauacaccuuuaug

SEQ ID NO: 664486 - RNA, 19 nt, Artificial Sequence
  Description of Artificial Sequence: Synthetic oligonucleotide
  Sense strand starting at position 2734 of SEQ ID NO: 585748
guaaauucuagaggugaaa

SEQ ID NO: 664487 - RNA, 19 nt, Artificial Sequence
  Description of Artificial Sequence: Synthetic oligonucleotide
  Antisense strand to SEQ ID NO: 664486
uuucaccucuagaauuuac

SEQ ID NO: 664488 - RNA, 19 nt, Artificial Sequence
  Description of Artificial Sequence: Synthetic oligonucleotide
  Sense strand starting at position 2791 of SEQ ID NO: 585748
gagguaauuucugaaaggg

SEQ ID NO: 664489 - RNA, 19 nt, Artificial Sequence
  Description of Artificial Sequence: Synthetic oligonucleotide
  Antisense strand to SEQ ID NO: 664488
cccuuucagaaauuaccuc

SEQ ID NO: 664490 - RNA, 19 nt, Artificial Sequence
  Description of Artificial Sequence: Synthetic oligonucleotide
  Sense strand starting at position 2823 of SEQ ID NO: 585748
ugacauuuaaguuguguuu

SEQ ID NO: 664491 - RNA, 19 nt, Artificial Sequence
  Description of Artificial Sequence: Synthetic oligonucleotide
  Antisense strand to SEQ ID NO: 664490
aaacacaacuuaaauguca

SEQ ID NO: 664492 - RNA, 19 nt, Artificial Sequence
  Description of Artificial Sequence: Synthetic oligonucleotide
  Sense strand starting at position 2826 of SEQ ID NO: 585748
cauuuaaguuguguuugau

SEQ ID NO: 664493 - RNA, 19 nt, Artificial Sequence
  Description of Artificial Sequence: Synthetic oligonucleotide
  Antisense strand to SEQ ID NO: 664492
aucaaacacaacuuaaaug

SEQ ID NO: 664494 - RNA, 19 nt, Artificial Sequence
  Description of Artificial Sequence: Synthetic oligonucleotide
  Sense strand starting at position 2889 of SEQ ID NO: 585748
ucggaauggcuugaucaaa

SEQ ID NO: 664495 - RNA, 19 nt, Artificial Sequence
  Description of Artificial Sequence: Synthetic oligonucleotide
  Antisense strand to SEQ ID NO: 664494
uuugaucaagccauuccga

SEQ ID NO: 664496 - RNA, 19 nt, Artificial Sequence
  Description of Artificial Sequence: Synthetic oligonucleotide
  Sense strand starting at position 2947 of SEQ ID NO: 585748
aagguuuguguagaugagu

SEQ ID NO: 664497 - RNA, 19 nt, Artificial Sequence
  Description of Artificial Sequence: Synthetic oligonucleotide
  Antisense strand to SEQ ID NO: 664496
acucaucuacacaaaccuu

SEQ ID NO: 664498 - RNA, 19 nt, Artificial Sequence
  Description of Artificial Sequence: Synthetic oligonucleotide
  Sense strand starting at position 3114 of SEQ ID NO: 585748
uugguuaaccuggagggua

SEQ ID NO: 664499 - RNA, 19 nt, Artificial Sequence
  Description of Artificial Sequence: Synthetic oligonucleotide
  Antisense strand to SEQ ID NO: 664498
uacccuccagguuaaccaa

SEQ ID NO: 664500 - RNA, 19 nt, Artificial Sequence
  Description of Artificial Sequence: Synthetic oligonucleotide
  Sense strand starting at position 3330 of SEQ ID NO: 585748
ccaccauauuuggauuaga

SEQ ID NO: 664501 - RNA, 19 nt, Artificial Sequence
  Description of Artificial Sequence: Synthetic oligonucleotide
  Antisense strand to SEQ ID NO: 664500
ucuaauccaaauauggugg

SEQ ID NO: 664502 - RNA, 19 nt, Artificial Sequence
  Description of Artificial Sequence: Synthetic oligonucleotide
  Sense strand starting at position 3363 of SEQ ID NO: 585748
uuucuaggccuccaagaaa

SEQ ID NO: 664503 - RNA, 19 nt, Artificial Sequence
  Description of Artificial Sequence: Synthetic oligonucleotide
  Antisense strand to SEQ ID NO: 664502
uuucuuggaggccuagaaa

SEQ ID NO: 664504 - RNA, 19 nt, Artificial Sequence
  Description of Artificial Sequence: Synthetic oligonucleotide
  Sense strand starting at position 3428 of SEQ ID NO: 585748
gggcagaauugagugggua

SEQ ID NO: 664505 - RNA, 19 nt, Artificial Sequence
  Description of Artificial Sequence: Synthetic oligonucleotide
  Antisense strand to SEQ ID NO: 664504
uacccacucaauucugccc

SEQ ID NO: 664506 - RNA, 19 nt, Artificial Sequence
  Description of Artificial Sequence: Synthetic oligonucleotide
  Sense strand starting at position 3431 of SEQ ID NO: 585748
cagaauugaguggguauua

SEQ ID NO: 664507 - RNA, 19 nt, Artificial Sequence
  Description of Artificial Sequence: Synthetic oligonucleotide
  Antisense strand to SEQ ID NO: 664506
uaauacccacucaauucug

SEQ ID NO: 664508 - RNA, 19 nt, Artificial Sequence
  Description of Artificial Sequence: Synthetic oligonucleotide
  Sense strand starting at position 3432 of SEQ ID NO: 585748
agaauugaguggguauuaa

SEQ ID NO: 664509 - RNA, 19 nt, Artificial Sequence
  Description of Artificial Sequence: Synthetic oligonucleotide
  Antisense strand to SEQ ID NO: 664508
uuaauacccacucaauucu

SEQ ID NO: 664510 - RNA, 19 nt, Artificial Sequence
  Description of Artificial Sequence: Synthetic oligonucleotide
  Sense strand starting at position 3441 of SEQ ID NO: 585748
uggguauuaaguggguaaa

SEQ ID NO: 664511 - RNA, 19 nt, Artificial Sequence
  Description of Artificial Sequence: Synthetic oligonucleotide
  Antisense strand to SEQ ID NO: 664510
uuuacccacuuaauaccca

SEQ ID NO: 664512 - RNA, 19 nt, Artificial Sequence
  Description of Artificial Sequence: Synthetic oligonucleotide
  Sense strand starting at position 3442 of SEQ ID NO: 585748
ggguauuaaguggguaaac

SEQ ID NO: 664513 - RNA, 19 nt, Artificial Sequence
  Description of Artificial Sequence: Synthetic oligonucleotide
  Antisense strand to SEQ ID NO: 664512
guuuacccacuuaauaccc

SEQ ID NO: 664514 - RNA, 19 nt, Artificial Sequence
  Description of Artificial Sequence: Synthetic oligonucleotide
  Sense strand starting at position 3443 of SEQ ID NO: 585748
gguauuaaguggguaaaca

SEQ ID NO: 664515 - RNA, 19 nt, Artificial Sequence
  Description of Artificial Sequence: Synthetic oligonucleotide
  Antisense strand to SEQ ID NO: 664514
uguuuacccacuuaauacc

SEQ ID NO: 664516 - RNA, 19 nt, Artificial Sequence
  Description of Artificial Sequence: Synthetic oligonucleotide
  Sense strand starting at position 3478 of SEQ ID NO: 585748
cacagugggcuuuauaaag

SEQ ID NO: 664517 - RNA, 19 nt, Artificial Sequence
  Description of Artificial Sequence: Synthetic oligonucleotide
  Antisense strand to SEQ ID NO: 664516
cuuuauaaagcccacugug

SEQ ID NO: 664518 - RNA, 19 nt, Artificial Sequence
  Description of Artificial Sequence: Synthetic oligonucleotide
  Sense strand starting at position 3495 of SEQ ID NO: 585748
agaaauugauagccacuau

SEQ ID NO: 664519 - RNA, 19 nt, Artificial Sequence
  Description of Artificial Sequence: Synthetic oligonucleotide
  Antisense strand to SEQ ID NO: 664518
auaguggcuaucaauuucu

SEQ ID NO: 664520 - RNA, 19 nt, Artificial Sequence
  Description of Artificial Sequence: Synthetic oligonucleotide
  Sense strand starting at position 3499 of SEQ ID NO: 585748
auugauagccacuauaggu

SEQ ID NO: 664521 - RNA, 19 nt, Artificial Sequence
  Description of Artificial Sequence: Synthetic oligonucleotide
  Antisense strand to SEQ ID NO: 664520
accuauaguggcuaucaau

SEQ ID NO: 664522 - RNA, 19 nt, Artificial Sequence
  Description of Artificial Sequence: Synthetic oligonucleotide
  Sense strand starting at position 3917 of SEQ ID NO: 585748
cuauauacucaggguagca

SEQ ID NO: 664523 - RNA, 19 nt, Artificial Sequence
  Description of Artificial Sequence: Synthetic oligonucleotide
  Antisense strand to SEQ ID NO: 664522
ugcuacccugaguauauag

SEQ ID NO: 664524 - RNA, 19 nt, Artificial Sequence
  Description of Artificial Sequence: Synthetic oligonucleotide
  Sense strand starting at position 3955 of SEQ ID NO: 585748
agacuucucccucagguga

SEQ ID NO: 664525 - RNA, 19 nt, Artificial Sequence
  Description of Artificial Sequence: Synthetic oligonucleotide
  Antisense strand to SEQ ID NO: 664524
ucaccugagggagaagucu

SEQ ID NO: 664526 - RNA, 19 nt, Artificial Sequence
  Description of Artificial Sequence: Synthetic oligonucleotide
  Sense strand starting at position 3969 of SEQ ID NO: 585748
ggugacaguccuggauauc

SEQ ID NO: 664527 - RNA, 19 nt, Artificial Sequence
  Description of Artificial Sequence: Synthetic oligonucleotide
  Antisense strand to SEQ ID NO: 664526
gauauccaggacugucacc

SEQ ID NO: 664528 - RNA, 19 nt, Artificial Sequence
  Description of Artificial Sequence: Synthetic oligonucleotide
  Sense strand starting at position 3970 of SEQ ID NO: 585748
gugacaguccuggauaucu

SEQ ID NO: 664529 - RNA, 19 nt, Artificial Sequence
  Description of Artificial Sequence: Synthetic oligonucleotide
  Antisense strand to SEQ ID NO: 664528
agauauccaggacugucac

SEQ ID NO: 664530 - RNA, 19 nt, Artificial Sequence
  Description of Artificial Sequence: Synthetic oligonucleotide
  Sense strand starting at position 3975 of SEQ ID NO: 585748
aguccuggauaucugacua

SEQ ID NO: 664531 - RNA, 19 nt, Artificial Sequence
  Description of Artificial Sequence: Synthetic oligonucleotide
  Antisense strand to SEQ ID NO: 664530
uagucagauauccaggacu

SEQ ID NO: 664532 - RNA, 19 nt, Artificial Sequence
  Description of Artificial Sequence: Synthetic oligonucleotide
  Sense strand starting at position 53 of SEQ ID NO: 585749
uugugcuaccacuaaguau

SEQ ID NO: 664533 - RNA, 19 nt, Artificial Sequence
  Description of Artificial Sequence: Synthetic oligonucleotide
  Antisense strand to SEQ ID NO: 664532
auacuuagugguagcacaa

SEQ ID NO: 664534 - RNA, 19 nt, Artificial Sequence
  Description of Artificial Sequence: Synthetic oligonucleotide
  Sense strand starting at position 227 of SEQ ID NO: 585749
cauggaagcugaguucuga

SEQ ID NO: 664535 - RNA, 19 nt, Artificial Sequence
  Description of Artificial Sequence: Synthetic oligonucleotide
  Antisense strand to SEQ ID NO: 664534
ucagaacucagcuuccaug

SEQ ID NO: 664536 - RNA, 19 nt, Artificial Sequence
  Description of Artificial Sequence: Synthetic oligonucleotide
  Sense strand starting at position 317 of SEQ ID NO: 585749
gagcuuagugauggaggga

SEQ ID NO: 664537 - RNA, 19 nt, Artificial Sequence
  Description of Artificial Sequence: Synthetic oligonucleotide
  Antisense strand to SEQ ID NO: 664536
ucccuccaucacuaagcuc

SEQ ID NO: 664538 - RNA, 19 nt, Artificial Sequence
  Description of Artificial Sequence: Synthetic oligonucleotide
  Sense strand starting at position 366 of SEQ ID NO: 585749
cuggaaucuugagcaaauu

SEQ ID NO: 664539 - RNA, 19 nt, Artificial Sequence
  Description of Artificial Sequence: Synthetic oligonucleotide
  Antisense strand to SEQ ID NO: 664538
aauuugcucaagauuccag

SEQ ID NO: 664540 - RNA, 19 nt, Artificial Sequence
  Description of Artificial Sequence: Synthetic oligonucleotide
  Sense strand starting at position 383 of SEQ ID NO: 585749
uuagguucuccaugacuug

SEQ ID NO: 664541 - RNA, 19 nt, Artificial Sequence
  Description of Artificial Sequence: Synthetic oligonucleotide
  Antisense strand to SEQ ID NO: 664540
caagucauggagaaccuaa

SEQ ID NO: 664542 - RNA, 19 nt, Artificial Sequence
  Description of Artificial Sequence: Synthetic oligonucleotide
  Sense strand starting at position 394 of SEQ ID NO: 585749
augacuuggucuccucauu

SEQ ID NO: 664543 - RNA, 19 nt, Artificial Sequence
  Description of Artificial Sequence: Synthetic oligonucleotide
  Antisense strand to SEQ ID NO: 664542
aaugaggagaccaagucau

SEQ ID NO: 664544 - RNA, 19 nt, Artificial Sequence
  Description of Artificial Sequence: Synthetic oligonucleotide
  Sense strand starting at position 474 of SEQ ID NO: 585749
cugacccuaucauuaugua

SEQ ID NO: 664545 - RNA, 19 nt, Artificial Sequence
  Description of Artificial Sequence: Synthetic oligonucleotide
  Antisense strand to SEQ ID NO: 664544
uacauaaugauagggucag

SEQ ID NO: 664546 - RNA, 19 nt, Artificial Sequence
  Description of Artificial Sequence: Synthetic oligonucleotide
  Sense strand starting at position 563 of SEQ ID NO: 585749
ggcagaacauauguagacu

SEQ ID NO: 664547 - RNA, 19 nt, Artificial Sequence
  Description of Artificial Sequence: Synthetic oligonucleotide
  Antisense strand to SEQ ID NO: 664546
agucuacauauguucugcc

SEQ ID NO: 664548 - RNA, 19 nt, Artificial Sequence
  Description of Artificial Sequence: Synthetic oligonucleotide
  Sense strand starting at position 635 of SEQ ID NO: 585749
cuuguauagugaccaauuc

SEQ ID NO: 664549 - RNA, 19 nt, Artificial Sequence
  Description of Artificial Sequence: Synthetic oligonucleotide
  Antisense strand to SEQ ID NO: 664548
gaauuggucacuauacaag

SEQ ID NO: 664550 - RNA, 19 nt, Artificial Sequence
  Description of Artificial Sequence: Synthetic oligonucleotide
  Sense strand starting at position 644 of SEQ ID NO: 585749
ugaccaauucuccgaguuu

SEQ ID NO: 664551 - RNA, 19 nt, Artificial Sequence
  Description of Artificial Sequence: Synthetic oligonucleotide
  Antisense strand to SEQ ID NO: 664550
aaacucggagaauugguca

SEQ ID NO: 664552 - RNA, 19 nt, Artificial Sequence
  Description of Artificial Sequence: Synthetic oligonucleotide
  Sense strand starting at position 656 of SEQ ID NO: 585749
cgaguuugcgaggacuaag

SEQ ID NO: 664553 - RNA, 19 nt, Artificial Sequence
  Description of Artificial Sequence: Synthetic oligonucleotide
  Antisense strand to SEQ ID NO: 664552
cuuaguccucgcaaacucg

SEQ ID NO: 664554 - RNA, 19 nt, Artificial Sequence
  Description of Artificial Sequence: Synthetic oligonucleotide
  Sense strand starting at position 781 of SEQ ID NO: 585749
acagaugagagacgugauu

SEQ ID NO: 664555 - RNA, 19 nt, Artificial Sequence
  Description of Artificial Sequence: Synthetic oligonucleotide
  Antisense strand to SEQ ID NO: 664554
aaucacgucucucaucugu

SEQ ID NO: 664556 - RNA, 19 nt, Artificial Sequence
  Description of Artificial Sequence: Synthetic oligonucleotide
  Sense strand starting at position 837 of SEQ ID NO: 585749
uggagagaugcuuggacuu

SEQ ID NO: 664557 - RNA, 19 nt, Artificial Sequence
  Description of Artificial Sequence: Synthetic oligonucleotide
  Antisense strand to SEQ ID NO: 664556
aaguccaagcaucucucca

SEQ ID NO: 664558 - RNA, 19 nt, Artificial Sequence
  Description of Artificial Sequence: Synthetic oligonucleotide
  Sense strand starting at position 849 of SEQ ID NO: 585749
uggacuuuauggucuuuau

SEQ ID NO: 664559 - RNA, 19 nt, Artificial Sequence
  Description of Artificial Sequence: Synthetic oligonucleotide
  Antisense strand to SEQ ID NO: 664558
auaaagaccauaaagucca

SEQ ID NO: 664560 - RNA, 19 nt, Artificial Sequence
  Description of Artificial Sequence: Synthetic oligonucleotide
  Sense strand starting at position 852 of SEQ ID NO: 585749
acuuuauggucuuuauggu

SEQ ID NO: 664561 - RNA, 19 nt, Artificial Sequence
  Description of Artificial Sequence: Synthetic oligonucleotide
  Antisense strand to SEQ ID NO: 664560
accauaaagaccauaaagu

SEQ ID NO: 664562 - RNA, 19 nt, Artificial Sequence
  Description of Artificial Sequence: Synthetic oligonucleotide
  Sense strand starting at position 919 of SEQ ID NO: 585749
ugccuagggucuuuaaaga

SEQ ID NO: 664563 - RNA, 19 nt, Artificial Sequence
  Description of Artificial Sequence: Synthetic oligonucleotide
  Antisense strand to SEQ ID NO: 664562
ucuuuaaagacccuaggca

SEQ ID NO: 664564 - RNA, 19 nt, Artificial Sequence
  Description of Artificial Sequence: Synthetic oligonucleotide
  Sense strand starting at position 1013 of SEQ ID NO: 585749
ugagucaugugauccagag

SEQ ID NO: 664565 - RNA, 19 nt, Artificial Sequence
  Description of Artificial Sequence: Synthetic oligonucleotide
  Antisense strand to SEQ ID NO: 664564
cucuggaucacaugacuca

SEQ ID NO: 664566 - RNA, 19 nt, Artificial Sequence
  Description of Artificial Sequence: Synthetic oligonucleotide
  Sense strand starting at position 1015 of SEQ ID NO: 585749
agucaugugauccagaguu

SEQ ID NO: 664567 - RNA, 19 nt, Artificial Sequence
  Description of Artificial Sequence: Synthetic oligonucleotide
  Antisense strand to SEQ ID NO: 664566
aacucuggaucacaugacu

SEQ ID NO: 664568 - RNA, 19 nt, Artificial Sequence
  Description of Artificial Sequence: Synthetic oligonucleotide
  Sense strand starting at position 1017 of SEQ ID NO: 585749
ucaugugauccagaguuau

SEQ ID NO: 664569 - RNA, 19 nt, Artificial Sequence
  Description of Artificial Sequence: Synthetic oligonucleotide
  Antisense strand to SEQ ID NO: 664568
auaacucuggaucacauga

SEQ ID NO: 664570 - RNA, 19 nt, Artificial Sequence
  Description of Artificial Sequence: Synthetic oligonucleotide
  Sense strand starting at position 1021 of SEQ ID NO: 585749
gugauccagaguuauguca

SEQ ID NO: 664571 - RNA, 19 nt, Artificial Sequence
  Description of Artificial Sequence: Synthetic oligonucleotide
  Antisense strand to SEQ ID NO: 664570
ugacauaacucuggaucac

SEQ ID NO: 664572 - RNA, 19 nt, Artificial Sequence
  Description of Artificial Sequence: Synthetic oligonucleotide
  Sense strand starting at position 1028 of SEQ ID NO: 585749
agaguuaugucauuaacuc

SEQ ID NO: 664573 - RNA, 19 nt, Artificial Sequence
  Description of Artificial Sequence: Synthetic oligonucleotide
  Antisense strand to SEQ ID NO: 664572
gaguuaaugacauaacucu

SEQ ID NO: 664574 - RNA, 19 nt, Artificial Sequence
  Description of Artificial Sequence: Synthetic oligonucleotide
  Sense strand starting at position 2258 of SEQ ID NO: 585749
gucugagacugauccaagu

SEQ ID NO: 664575 - RNA, 19 nt, Artificial Sequence
  Description of Artificial Sequence: Synthetic oligonucleotide
  Antisense strand to SEQ ID NO: 664574
acuuggaucagucucagac

SEQ ID NO: 664576 - RNA, 19 nt, Artificial Sequence
  Description of Artificial Sequence: Synthetic oligonucleotide
  Sense strand starting at position 2310 of SEQ ID NO: 585749
gggacaguguauucaugaa

SEQ ID NO: 664577 - RNA, 19 nt, Artificial Sequence
  Description of Artificial Sequence: Synthetic oligonucleotide
  Antisense strand to SEQ ID NO: 664576
uucaugaauacacuguccc

SEQ ID NO: 664578 - RNA, 19 nt, Artificial Sequence
  Description of Artificial Sequence: Synthetic oligonucleotide
  Sense strand starting at position 2441 of SEQ ID NO: 585749
agagacugaccuugguaau

SEQ ID NO: 664579 - RNA, 19 nt, Artificial Sequence
  Description of Artificial Sequence: Synthetic oligonucleotide
  Antisense strand to SEQ ID NO: 664578
auuaccaaggucagucucu

SEQ ID NO: 664580 - RNA, 19 nt, Artificial Sequence
  Description of Artificial Sequence: Synthetic oligonucleotide
  Sense strand starting at position 2442 of SEQ ID NO: 585749
gagacugaccuugguaauc

SEQ ID NO: 664581 - RNA, 19 nt, Artificial Sequence
  Description of Artificial Sequence: Synthetic oligonucleotide
  Antisense strand to SEQ ID NO: 664580
gauuaccaaggucagucuc

SEQ ID NO: 664582 - RNA, 19 nt, Artificial Sequence
  Description of Artificial Sequence: Synthetic oligonucleotide
  Sense strand starting at position 2516 of SEQ ID NO: 585749
ucacauuuagcgugcauca

SEQ ID NO: 664583 - RNA, 19 nt, Artificial Sequence
  Description of Artificial Sequence: Synthetic oligonucleotide
  Antisense strand to SEQ ID NO: 664582
ugaugcacgcuaaauguga

SEQ ID NO: 664584 - RNA, 19 nt, Artificial Sequence
  Description of Artificial Sequence: Synthetic oligonucleotide
  Sense strand starting at position 2550 of SEQ ID NO: 585749
cucuaaagacucggagaau

SEQ ID NO: 664585 - RNA, 19 nt, Artificial Sequence
  Description of Artificial Sequence: Synthetic oligonucleotide
  Antisense strand to SEQ ID NO: 664584
auucuccgagucuuuagag

SEQ ID NO: 664586 - RNA, 19 nt, Artificial Sequence
  Description of Artificial Sequence: Synthetic oligonucleotide
  Sense strand starting at position 2606 of SEQ ID NO: 585749
aaggaaucuccuggugauu

SEQ ID NO: 664587 - RNA, 19 nt, Artificial Sequence
  Description of Artificial Sequence: Synthetic oligonucleotide
  Antisense strand to SEQ ID NO: 664586
aaucaccaggagauuccuu

SEQ ID NO: 664588 - RNA, 19 nt, Artificial Sequence
  Description of Artificial Sequence: Synthetic oligonucleotide
  Sense strand starting at position 2615 of SEQ ID NO: 585749
ccuggugauuaggcagaau

SEQ ID NO: 664589 - RNA, 19 nt, Artificial Sequence
  Description of Artificial Sequence: Synthetic oligonucleotide
  Antisense strand to SEQ ID NO: 664588
auucugccuaaucaccagg

SEQ ID NO: 664590 - RNA, 19 nt, Artificial Sequence
  Description of Artificial Sequence: Synthetic oligonucleotide
  Sense strand starting at position 2820 of SEQ ID NO: 585749
aguauacagucuccaauau

SEQ ID NO: 664591 - RNA, 19 nt, Artificial Sequence
  Description of Artificial Sequence: Synthetic oligonucleotide
  Antisense strand to SEQ ID NO: 664590
auauuggagacuguauacu

SEQ ID NO: 664592 - RNA, 19 nt, Artificial Sequence
  Description of Artificial Sequence: Synthetic oligonucleotide
  Sense strand starting at position 2949 of SEQ ID NO: 585749
acaaauacuuggcauuuga

SEQ ID NO: 664593 - RNA, 19 nt, Artificial Sequence
  Description of Artificial Sequence: Synthetic oligonucleotide
  Antisense strand to SEQ ID NO: 664592
ucaaaugccaaguauuugu

SEQ ID NO: 664594 - RNA, 19 nt, Artificial Sequence
  Description of Artificial Sequence: Synthetic oligonucleotide
  Sense strand starting at position 2978 of SEQ ID NO: 585749
ugauauagcuucuauuuag

SEQ ID NO: 664595 - RNA, 19 nt, Artificial Sequence
  Description of Artificial Sequence: Synthetic oligonucleotide
  Antisense strand to SEQ ID NO: 664594
cuaaauagaagcuauauca

SEQ ID NO: 664596 - RNA, 19 nt, Artificial Sequence
  Description of Artificial Sequence: Synthetic oligonucleotide
  Sense strand starting at position 3153 of SEQ ID NO: 585749
ucaaaugucugggauuuag

SEQ ID NO: 664597 - RNA, 19 nt, Artificial Sequence
  Description of Artificial Sequence: Synthetic oligonucleotide
  Antisense strand to SEQ ID NO: 664596
cuaaaucccagacauuuga

SEQ ID NO: 664598 - RNA, 19 nt, Artificial Sequence
  Description of Artificial Sequence: Synthetic oligonucleotide
  Sense strand starting at position 3235 of SEQ ID NO: 585749
ugguaauuggugcaagagu

SEQ ID NO: 664599 - RNA, 19 nt, Artificial Sequence
  Description of Artificial Sequence: Synthetic oligonucleotide
  Antisense strand to SEQ ID NO: 664598
acucuugcaccaauuacca

SEQ ID NO: 664600 - RNA, 19 nt, Artificial Sequence
  Description of Artificial Sequence: Synthetic oligonucleotide
  Sense strand starting at position 3242 of SEQ ID NO: 585749
uggugcaagaguugaggaa

SEQ ID NO: 664601 - RNA, 19 nt, Artificial Sequence
  Description of Artificial Sequence: Synthetic oligonucleotide
  Antisense strand to SEQ ID NO: 664600
uuccucaacucuugcacca

SEQ ID NO: 664602 - RNA, 19 nt, Artificial Sequence
  Description of Artificial Sequence: Synthetic oligonucleotide
  Sense strand starting at position 3246 of SEQ ID NO: 585749
gcaagaguugaggaaguua

SEQ ID NO: 664603 - RNA, 19 nt, Artificial Sequence
  Description of Artificial Sequence: Synthetic oligonucleotide
  Antisense strand to SEQ ID NO: 664602
uaacuuccucaacucuugc

SEQ ID NO: 664604 - RNA, 19 nt, Artificial Sequence
  Description of Artificial Sequence: Synthetic oligonucleotide
  Sense strand starting at position 3251 of SEQ ID NO: 585749
aguugaggaaguuagcauu

SEQ ID NO: 664605 - RNA, 19 nt, Artificial Sequence
  Description of Artificial Sequence: Synthetic oligonucleotide
  Antisense strand to SEQ ID NO: 664604
aaugcuaacuuccucaacu

SEQ ID NO: 664606 - RNA, 19 nt, Artificial Sequence
  Description of Artificial Sequence: Synthetic oligonucleotide
  Sense strand starting at position 3888 of SEQ ID NO: 585749
acagacauagcuugcuuau

SEQ ID NO: 664607 - RNA, 19 nt, Artificial Sequence
  Description of Artificial Sequence: Synthetic oligonucleotide
  Antisense strand to SEQ ID NO: 664606
auaagcaagcuaugucugu

SEQ ID NO: 664608 - RNA, 19 nt, Artificial Sequence
  Description of Artificial Sequence: Synthetic oligonucleotide
  Sense strand starting at position 3900 of SEQ ID NO: 585749
ugcuuaucucuccaguuua

SEQ ID NO: 664609 - RNA, 19 nt, Artificial Sequence
  Description of Artificial Sequence: Synthetic oligonucleotide
  Antisense strand to SEQ ID NO: 664608
uaaacuggagagauaagca

SEQ ID NO: 664610 - RNA, 19 nt, Artificial Sequence
  Description of Artificial Sequence: Synthetic oligonucleotide
  Sense strand starting at position 3911 of SEQ ID NO: 585749
ccaguuuaggagugaagag

SEQ ID NO: 664611 - RNA, 19 nt, Artificial Sequence
  Description of Artificial Sequence: Synthetic oligonucleotide
  Antisense strand to SEQ ID NO: 664610
cucuucacuccuaaacugg

SEQ ID NO: 664612 - RNA, 19 nt, Artificial Sequence
  Description of Artificial Sequence: Synthetic oligonucleotide
  Sense strand starting at position 239 of SEQ ID NO: 585750
aguaguguuucaccgcguu

SEQ ID NO: 664613 - RNA, 19 nt, Artificial Sequence
  Description of Artificial Sequence: Synthetic oligonucleotide
  Antisense strand to SEQ ID NO: 664612
aacgcggugaaacacuacu

SEQ ID NO: 664614 - RNA, 19 nt, Artificial Sequence
  Description of Artificial Sequence: Synthetic oligonucleotide
  Sense strand starting at position 407 of SEQ ID NO: 585750
uggacugcuuuguaaggua

SEQ ID NO: 664615 - RNA, 19 nt, Artificial Sequence
  Description of Artificial Sequence: Synthetic oligonucleotide
  Antisense strand to SEQ ID NO: 664614
uaccuuacaaagcagucca

SEQ ID NO: 664616 - RNA, 19 nt, Artificial Sequence
  Description of Artificial Sequence: Synthetic oligonucleotide
  Sense strand starting at position 410 of SEQ ID NO: 585750
acugcuuuguaagguagua

SEQ ID NO: 664617 - RNA, 19 nt, Artificial Sequence
  Description of Artificial Sequence: Synthetic oligonucleotide
  Antisense strand to SEQ ID NO: 664616
uacuaccuuacaaagcagu

SEQ ID NO: 664618 - RNA, 19 nt, Artificial Sequence
  Description of Artificial Sequence: Synthetic oligonucleotide
  Sense strand starting at position 1137 of SEQ ID NO: 585750
uuccgcauucguucucuau

SEQ ID NO: 664619 - RNA, 19 nt, Artificial Sequence
  Description of Artificial Sequence: Synthetic oligonucleotide
  Antisense strand to SEQ ID NO: 664618
auagagaacgaaugcggaa

SEQ ID NO: 664620 - RNA, 19 nt, Artificial Sequence
  Description of Artificial Sequence: Synthetic oligonucleotide
  Sense strand starting at position 1138 of SEQ ID NO: 585750
uccgcauucguucucuauu

SEQ ID NO: 664621 - RNA, 19 nt, Artificial Sequence
  Description of Artificial Sequence: Synthetic oligonucleotide
  Antisense strand to SEQ ID NO: 664620
aauagagaacgaaugcgga

SEQ ID NO: 664622 - RNA, 19 nt, Artificial Sequence
  Description of Artificial Sequence: Synthetic oligonucleotide
  Sense strand starting at position 1139 of SEQ ID NO: 585750
ccgcauucguucucuauuu

SEQ ID NO: 664623 - RNA, 19 nt, Artificial Sequence
  Description of Artificial Sequence: Synthetic oligonucleotide
  Antisense strand to SEQ ID NO: 664622
aaauagagaacgaaugcgg

SEQ ID NO: 664624 - RNA, 19 nt, Artificial Sequence
  Description of Artificial Sequence: Synthetic oligonucleotide
  Sense strand starting at position 1220 of SEQ ID NO: 585750
gcgucugacucuucuccaa

SEQ ID NO: 664625 - RNA, 19 nt, Artificial Sequence
  Description of Artificial Sequence: Synthetic oligonucleotide
  Antisense strand to SEQ ID NO: 664624
uuggagaagagucagacgc

SEQ ID NO: 664626 - RNA, 19 nt, Artificial Sequence
  Description of Artificial Sequence: Synthetic oligonucleotide
  Sense strand starting at position 1346 of SEQ ID NO: 585750
ggcccugucucucuuauaa

SEQ ID NO: 664627 - RNA, 19 nt, Artificial Sequence
  Description of Artificial Sequence: Synthetic oligonucleotide
  Antisense strand to SEQ ID NO: 664626
uuauaagagagacagggcc

SEQ ID NO: 664628 - RNA, 19 nt, Artificial Sequence
  Description of Artificial Sequence: Synthetic oligonucleotide
  Sense strand starting at position 1364 of SEQ ID NO: 585750
aacccauccgcauguaagu

SEQ ID NO: 664629 - RNA, 19 nt, Artificial Sequence
  Description of Artificial Sequence: Synthetic oligonucleotide
  Antisense strand to SEQ ID NO: 664628
acuuacaugcggauggguu

SEQ ID NO: 664630 - RNA, 19 nt, Artificial Sequence
  Description of Artificial Sequence: Synthetic oligonucleotide
  Sense strand starting at position 1482 of SEQ ID NO: 585750
gccucagauuccgagacau

SEQ ID NO: 664631 - RNA, 19 nt, Artificial Sequence
  Description of Artificial Sequence: Synthetic oligonucleotide
  Antisense strand to SEQ ID NO: 664630
augucucggaaucugaggc

SEQ ID NO: 664632 - RNA, 19 nt, Artificial Sequence
  Description of Artificial Sequence: Synthetic oligonucleotide
  Sense strand starting at position 2095 of SEQ ID NO: 585750
cccucauccuuuccagagu

SEQ ID NO: 664633 - RNA, 19 nt, Artificial Sequence
  Description of Artificial Sequence: Synthetic oligonucleotide
  Antisense strand to SEQ ID NO: 664632
acucuggaaaggaugaggg

SEQ ID NO: 664634 - RNA, 19 nt, Artificial Sequence
  Description of Artificial Sequence: Synthetic oligonucleotide
  Sense strand starting at position 2096 of SEQ ID NO: 585750
ccucauccuuuccagaguu

SEQ ID NO: 664635 - RNA, 19 nt, Artificial Sequence
  Description of Artificial Sequence: Synthetic oligonucleotide
  Antisense strand to SEQ ID NO: 664634
aacucuggaaaggaugagg

SEQ ID NO: 664636 - RNA, 19 nt, Artificial Sequence
  Description of Artificial Sequence: Synthetic oligonucleotide
  Sense strand starting at position 2244 of SEQ ID NO: 585750
agucgacauuuagagucuu

SEQ ID NO: 664637 - RNA, 19 nt, Artificial Sequence
  Description of Artificial Sequence: Synthetic oligonucleotide
  Antisense strand to SEQ ID NO: 664636
aagacucuaaaugucgacu

SEQ ID NO: 664638 - RNA, 19 nt, Artificial Sequence
  Description of Artificial Sequence: Synthetic oligonucleotide
  Sense strand starting at position 2347 of SEQ ID NO: 585750
gucacuucuugaccucaga

SEQ ID NO: 664639 - RNA, 19 nt, Artificial Sequence
  Description of Artificial Sequence: Synthetic oligonucleotide
  Antisense strand to SEQ ID NO: 664638
ucugaggucaagaagugac

SEQ ID NO: 664640 - RNA, 19 nt, Artificial Sequence
  Description of Artificial Sequence: Synthetic oligonucleotide
  Sense strand starting at position 2358 of SEQ ID NO: 585750
accucagaaugaucuguga

SEQ ID NO: 664641 - RNA, 19 nt, Artificial Sequence
  Description of Artificial Sequence: Synthetic oligonucleotide
  Antisense strand to SEQ ID NO: 664640
ucacagaucauucugaggu

SEQ ID NO: 664642 - RNA, 19 nt, Artificial Sequence
  Description of Artificial Sequence: Synthetic oligonucleotide
  Sense strand starting at position 2360 of SEQ ID NO: 585750
cucagaaugaucugugaag

SEQ ID NO: 664643 - RNA, 19 nt, Artificial Sequence
  Description of Artificial Sequence: Synthetic oligonucleotide
  Antisense strand to SEQ ID NO: 664642
cuucacagaucauucugag

SEQ ID NO: 664644 - RNA, 19 nt, Artificial Sequence
  Description of Artificial Sequence: Synthetic oligonucleotide
  Sense strand starting at position 2374 of SEQ ID NO: 585750
ugaagaauuugagauuccu

SEQ ID NO: 664645 - RNA, 19 nt, Artificial Sequence
  Description of Artificial Sequence: Synthetic oligonucleotide
  Antisense strand to SEQ ID NO: 664644
aggaaucucaaauucuuca

SEQ ID NO: 664646 - RNA, 19 nt, Artificial Sequence
  Description of Artificial Sequence: Synthetic oligonucleotide
  Sense strand starting at position 2383 of SEQ ID NO: 585750
ugagauuccuccuggcucu

SEQ ID NO: 664647 - RNA, 19 nt, Artificial Sequence
  Description of Artificial Sequence: Synthetic oligonucleotide
  Antisense strand to SEQ ID NO: 664646
agagccaggaggaaucuca

SEQ ID NO: 664648 - RNA, 19 nt, Artificial Sequence
  Description of Artificial Sequence: Synthetic oligonucleotide
  Sense strand starting at position 2384 of SEQ ID NO: 585750
gagauuccuccuggcucua

SEQ ID NO: 664649 - RNA, 19 nt, Artificial Sequence
  Description of Artificial Sequence: Synthetic oligonucleotide
  Antisense strand to SEQ ID NO: 664648
uagagccaggaggaaucuc

SEQ ID NO: 664650 - RNA, 19 nt, Artificial Sequence
  Description of Artificial Sequence: Synthetic oligonucleotide
  Sense strand starting at position 2447 of SEQ ID NO: 585750
caagccaggucuuacagaa

SEQ ID NO: 664651 - RNA, 19 nt, Artificial Sequence
  Description of Artificial Sequence: Synthetic oligonucleotide
  Antisense strand to SEQ ID NO: 664650
uucuguaagaccuggcuug

SEQ ID NO: 664652 - RNA, 19 nt, Artificial Sequence
  Description of Artificial Sequence: Synthetic oligonucleotide
  Sense strand starting at position 2495 of SEQ ID NO: 585750
ccagcugucuucuuuaucu

SEQ ID NO: 664653 - RNA, 19 nt, Artificial Sequence
  Description of Artificial Sequence: Synthetic oligonucleotide
  Antisense strand to SEQ ID NO: 664652
agauaaagaagacagcugg

SEQ ID NO: 664654 - RNA, 19 nt, Artificial Sequence
  Description of Artificial Sequence: Synthetic oligonucleotide
  Sense strand starting at position 2703 of SEQ ID NO: 585750
uccaaaugguagcaagaga

SEQ ID NO: 664655 - RNA, 19 nt, Artificial Sequence
  Description of Artificial Sequence: Synthetic oligonucleotide
  Antisense strand to SEQ ID NO: 664654
ucucuugcuaccauuugga

SEQ ID NO: 664656 - RNA, 19 nt, Artificial Sequence
  Description of Artificial Sequence: Synthetic oligonucleotide
  Sense strand starting at position 2847 of SEQ ID NO: 585750
ggagaugggcuuuaucguu

SEQ ID NO: 664657 - RNA, 19 nt, Artificial Sequence
  Description of Artificial Sequence: Synthetic oligonucleotide
  Antisense strand to SEQ ID NO: 664656
aacgauaaagcccaucucc

SEQ ID NO: 664658 - RNA, 19 nt, Artificial Sequence
  Description of Artificial Sequence: Synthetic oligonucleotide
  Sense strand starting at position 2852 of SEQ ID NO: 585750
ugggcuuuaucguuaaugu

SEQ ID NO: 664659 - RNA, 19 nt, Artificial Sequence
  Description of Artificial Sequence: Synthetic oligonucleotide
  Antisense strand to SEQ ID NO: 664658
acauuaacgauaaagccca

SEQ ID NO: 664660 - RNA, 19 nt, Artificial Sequence
  Description of Artificial Sequence: Synthetic oligonucleotide
  Sense strand starting at position 2853 of SEQ ID NO: 585750
gggcuuuaucguuaauguu

SEQ ID NO: 664661 - RNA, 19 nt, Artificial Sequence
  Description of Artificial Sequence: Synthetic oligonucleotide
  Antisense strand to SEQ ID NO: 664660
aacauuaacgauaaagccc

SEQ ID NO: 664662 - RNA, 19 nt, Artificial Sequence
  Description of Artificial Sequence: Synthetic oligonucleotide
  Sense strand starting at position 2865 of SEQ ID NO: 585750
uaauguugcuaguugauau

SEQ ID NO: 664663 - RNA, 19 nt, Artificial Sequence
  Description of Artificial Sequence: Synthetic oligonucleotide
  Antisense strand to SEQ ID NO: 664662
auaucaacuagcaacauua

SEQ ID NO: 664664 - RNA, 19 nt, Artificial Sequence
  Description of Artificial Sequence: Synthetic oligonucleotide
  Sense strand starting at position 2891 of SEQ ID NO: 585750
ucuggauuccuuugaagag

SEQ ID NO: 664665 - RNA, 19 nt, Artificial Sequence
  Description of Artificial Sequence: Synthetic oligonucleotide
  Antisense strand to SEQ ID NO: 664664
cucuucaaaggaauccaga

SEQ ID NO: 664666 - RNA, 19 nt, Artificial Sequence
  Description of Artificial Sequence: Synthetic oligonucleotide
  Sense strand starting at position 2941 of SEQ ID NO: 585750
gcugauaaauaagugugua

SEQ ID NO: 664667 - RNA, 19 nt, Artificial Sequence
  Description of Artificial Sequence: Synthetic oligonucleotide
  Antisense strand to SEQ ID NO: 664666
uacacacuuauuuaucagc

SEQ ID NO: 664668 - RNA, 19 nt, Artificial Sequence
  Description of Artificial Sequence: Synthetic oligonucleotide
  Sense strand starting at position 2953 of SEQ ID NO: 585750
guguguaaauaacccagau

SEQ ID NO: 664669 - RNA, 19 nt, Artificial Sequence
  Description of Artificial Sequence: Synthetic oligonucleotide
  Antisense strand to SEQ ID NO: 664668
aucuggguuauuuacacac

SEQ ID NO: 664670 - RNA, 19 nt, Artificial Sequence
  Description of Artificial Sequence: Synthetic oligonucleotide
  Sense strand starting at position 3048 of SEQ ID NO: 585750
aguguaguggugugugauc

SEQ ID NO: 664671 - RNA, 19 nt, Artificial Sequence
  Description of Artificial Sequence: Synthetic oligonucleotide
  Antisense strand to SEQ ID NO: 664670
gaucacacaccacuacacu

SEQ ID NO: 664672 - RNA, 19 nt, Artificial Sequence
  Description of Artificial Sequence: Synthetic oligonucleotide
  Sense strand starting at position 3301 of SEQ ID NO: 585750
ggcauuguuuaggaaggca

SEQ ID NO: 664673 - RNA, 19 nt, Artificial Sequence
  Description of Artificial Sequence: Synthetic oligonucleotide
  Antisense strand to SEQ ID NO: 664672
ugccuuccuaaacaaugcc

SEQ ID NO: 664674 - RNA, 19 nt, Artificial Sequence
  Description of Artificial Sequence: Synthetic oligonucleotide
  Sense strand starting at position 3309 of SEQ ID NO: 585750
uuaggaaggcauuguuaug

SEQ ID NO: 664675 - RNA, 19 nt, Artificial Sequence
  Description of Artificial Sequence: Synthetic oligonucleotide
  Antisense strand to SEQ ID NO: 664674
cauaacaaugccuuccuaa

SEQ ID NO: 664676 - RNA, 19 nt, Artificial Sequence
  Description of Artificial Sequence: Synthetic oligonucleotide
  Sense strand starting at position 3314 of SEQ ID NO: 585750
aaggcauuguuaugagauc

SEQ ID NO: 664677 - RNA, 19 nt, Artificial Sequence
  Description of Artificial Sequence: Synthetic oligonucleotide
  Antisense strand to SEQ ID NO: 664676
gaucucauaacaaugccuu

SEQ ID NO: 664678 - RNA, 19 nt, Artificial Sequence
  Description of Artificial Sequence: Synthetic oligonucleotide
  Sense strand starting at position 3315 of SEQ ID NO: 585750
aggcauuguuaugagauca

SEQ ID NO: 664679 - RNA, 19 nt, Artificial Sequence
  Description of Artificial Sequence: Synthetic oligonucleotide
  Antisense strand to SEQ ID NO: 664678
ugaucucauaacaaugccu

SEQ ID NO: 664680 - RNA, 19 nt, Artificial Sequence
  Description of Artificial Sequence: Synthetic oligonucleotide
  Sense strand starting at position 3561 of SEQ ID NO: 585750
auuaguauuugagggaguu

SEQ ID NO: 664681 - RNA, 19 nt, Artificial Sequence
  Description of Artificial Sequence: Synthetic oligonucleotide
  Antisense strand to SEQ ID NO: 664680
aacucccucaaauacuaau

SEQ ID NO: 664682 - RNA, 19 nt, Artificial Sequence
  Description of Artificial Sequence: Synthetic oligonucleotide
  Sense strand starting at position 3573 of SEQ ID NO: 585750
gggaguugauuuggcuuaa

SEQ ID NO: 664683 - RNA, 19 nt, Artificial Sequence
  Description of Artificial Sequence: Synthetic oligonucleotide
  Antisense strand to SEQ ID NO: 664682
uuaagccaaaucaacuccc

SEQ ID NO: 664684 - RNA, 19 nt, Artificial Sequence
  Description of Artificial Sequence: Synthetic oligonucleotide
  Sense strand starting at position 3585 of SEQ ID NO: 585750
ggcuuaauguguuaucuca

SEQ ID NO: 664685 - RNA, 19 nt, Artificial Sequence
  Description of Artificial Sequence: Synthetic oligonucleotide
  Antisense strand to SEQ ID NO: 664684
ugagauaacacauuaagcc

SEQ ID NO: 664686 - RNA, 19 nt, Artificial Sequence
  Description of Artificial Sequence: Synthetic oligonucleotide
  Sense strand starting at position 3587 of SEQ ID NO: 585750
cuuaauguguuaucucaaa

SEQ ID NO: 664687 - RNA, 19 nt, Artificial Sequence
  Description of Artificial Sequence: Synthetic oligonucleotide
  Antisense strand to SEQ ID NO: 664686
uuugagauaacacauuaag

SEQ ID NO: 664688 - RNA, 19 nt, Artificial Sequence
  Description of Artificial Sequence: Synthetic oligonucleotide
  Sense strand starting at position 3770 of SEQ ID NO: 585750
cucauauugucuuaugcca

SEQ ID NO: 664689 - RNA, 19 nt, Artificial Sequence
  Description of Artificial Sequence: Synthetic oligonucleotide
  Antisense strand to SEQ ID NO: 664688
uggcauaagacaauaugag

SEQ ID NO: 664690 - RNA, 19 nt, Artificial Sequence
  Description of Artificial Sequence: Synthetic oligonucleotide
  Sense strand starting at position 3826 of SEQ ID NO: 585750
aaugaaauccacgggcaga

SEQ ID NO: 664691 - RNA, 19 nt, Artificial Sequence
  Description of Artificial Sequence: Synthetic oligonucleotide
  Antisense strand to SEQ ID NO: 664690
ucugcccguggauuucauu

SEQ ID NO: 664692 - RNA, 19 nt, Artificial Sequence
  Description of Artificial Sequence: Synthetic oligonucleotide
  Sense strand starting at position 74 of SEQ ID NO: 585751
aucggaugcccugacauau

SEQ ID NO: 664693 - RNA, 19 nt, Artificial Sequence
  Description of Artificial Sequence: Synthetic oligonucleotide
  Antisense strand to SEQ ID NO: 664692
auaugucagggcauccgau

SEQ ID NO: 664694 - RNA, 19 nt, Artificial Sequence
  Description of Artificial Sequence: Synthetic oligonucleotide
  Sense strand starting at position 114 of SEQ ID NO: 585751
ccugcuaggugauccuaaa

SEQ ID NO: 664695 - RNA, 19 nt, Artificial Sequence
  Description of Artificial Sequence: Synthetic oligonucleotide
  Antisense strand to SEQ ID NO: 664694
uuuaggaucaccuagcagg

SEQ ID NO: 664696 - RNA, 19 nt, Artificial Sequence
  Description of Artificial Sequence: Synthetic oligonucleotide
  Sense strand starting at position 292 of SEQ ID NO: 585751
ccgagaagcgauuacuaaa

SEQ ID NO: 664697 - RNA, 19 nt, Artificial Sequence
  Description of Artificial Sequence: Synthetic oligonucleotide
  Antisense strand to SEQ ID NO: 664696
uuuaguaaucgcuucucgg

SEQ ID NO: 664698 - RNA, 19 nt, Artificial Sequence
  Description of Artificial Sequence: Synthetic oligonucleotide
  Sense strand starting at position 295 of SEQ ID NO: 585751
agaagcgauuacuaaauuu

SEQ ID NO: 664699 - RNA, 19 nt, Artificial Sequence
  Description of Artificial Sequence: Synthetic oligonucleotide
  Antisense strand to SEQ ID NO: 664698
aaauuuaguaaucgcuucu

SEQ ID NO: 664700 - RNA, 19 nt, Artificial Sequence
  Description of Artificial Sequence: Synthetic oligonucleotide
  Sense strand starting at position 564 of SEQ ID NO: 585751
ugcucugagaucugcgaaa

SEQ ID NO: 664701 - RNA, 19 nt, Artificial Sequence
  Description of Artificial Sequence: Synthetic oligonucleotide
  Antisense strand to SEQ ID NO: 664700
uuucgcagaucucagagca

SEQ ID NO: 664702 - RNA, 19 nt, Artificial Sequence
  Description of Artificial Sequence: Synthetic oligonucleotide
  Sense strand starting at position 677 of SEQ ID NO: 585751
uugggaagauucuaccuuu

SEQ ID NO: 664703 - RNA, 19 nt, Artificial Sequence
  Description of Artificial Sequence: Synthetic oligonucleotide
  Antisense strand to SEQ ID NO: 664702
aaagguagaaucuucccaa

SEQ ID NO: 664704 - RNA, 19 nt, Artificial Sequence
  Description of Artificial Sequence: Synthetic oligonucleotide
  Sense strand starting at position 724 of SEQ ID NO: 585751
cguggugguguccgcuuaa

SEQ ID NO: 664705 - RNA, 19 nt, Artificial Sequence
  Description of Artificial Sequence: Synthetic oligonucleotide
  Antisense strand to SEQ ID NO: 664704
uuaagcggacaccaccacg

SEQ ID NO: 664706 - RNA, 19 nt, Artificial Sequence
  Description of Artificial Sequence: Synthetic oligonucleotide
  Sense strand starting at position 727 of SEQ ID NO: 585751
ggugguguccgcuuaauuc

SEQ ID NO: 664707 - RNA, 19 nt, Artificial Sequence
  Description of Artificial Sequence: Synthetic oligonucleotide
  Antisense strand to SEQ ID NO: 664706
gaauuaagcggacaccacc

SEQ ID NO: 664708 - RNA, 19 nt, Artificial Sequence
  Description of Artificial Sequence: Synthetic oligonucleotide
  Sense strand starting at position 898 of SEQ ID NO: 585751
gcucacaugugacaagaga

SEQ ID NO: 664709 - RNA, 19 nt, Artificial Sequence
  Description of Artificial Sequence: Synthetic oligonucleotide
  Antisense strand to SEQ ID NO: 664708
ucucuugucacaugugagc

SEQ ID NO: 664710 - RNA, 19 nt, Artificial Sequence
  Description of Artificial Sequence: Synthetic oligonucleotide
  Sense strand starting at position 1204 of SEQ ID NO: 585751
gcgccucccuugucauuua

SEQ ID NO: 664711 - RNA, 19 nt, Artificial Sequence
  Description of Artificial Sequence: Synthetic oligonucleotide
  Antisense strand to SEQ ID NO: 664710
uaaaugacaagggaggcgc

SEQ ID NO: 664712 - RNA, 19 nt, Artificial Sequence
  Description of Artificial Sequence: Synthetic oligonucleotide
  Sense strand starting at position 1215 of SEQ ID NO: 585751
gucauuuacucagcgguca

SEQ ID NO: 664713 - RNA, 19 nt, Artificial Sequence
  Description of Artificial Sequence: Synthetic oligonucleotide
  Antisense strand to SEQ ID NO: 664712
ugaccgcugaguaaaugac

SEQ ID NO: 664714 - RNA, 19 nt, Artificial Sequence
  Description of Artificial Sequence: Synthetic oligonucleotide
  Sense strand starting at position 1333 of SEQ ID NO: 585751
gaccgaacuuucccgcgaa

SEQ ID NO: 664715 - RNA, 19 nt, Artificial Sequence
  Description of Artificial Sequence: Synthetic oligonucleotide
  Antisense strand to SEQ ID NO: 664714
uucgcgggaaaguucgguc

SEQ ID NO: 664716 - RNA, 19 nt, Artificial Sequence
  Description of Artificial Sequence: Synthetic oligonucleotide
  Sense strand starting at position 1336 of SEQ ID NO: 585751
cgaacuuucccgcgaaccu

SEQ ID NO: 664717 - RNA, 19 nt, Artificial Sequence
  Description of Artificial Sequence: Synthetic oligonucleotide
  Antisense strand to SEQ ID NO: 664716
agguucgcgggaaaguucg

SEQ ID NO: 664718 - RNA, 19 nt, Artificial Sequence
  Description of Artificial Sequence: Synthetic oligonucleotide
  Sense strand starting at position 2528 of SEQ ID NO: 585751
gcagugacggccggagaau

SEQ ID NO: 664719 - RNA, 19 nt, Artificial Sequence
  Description of Artificial Sequence: Synthetic oligonucleotide
  Antisense strand to SEQ ID NO: 664718
auucuccggccgucacugc

SEQ ID NO: 664720 - RNA, 19 nt, Artificial Sequence
  Description of Artificial Sequence: Synthetic oligonucleotide
  Sense strand starting at position 2529 of SEQ ID NO: 585751
cagugacggccggagaauu

SEQ ID NO: 664721 - RNA, 19 nt, Artificial Sequence
  Description of Artificial Sequence: Synthetic oligonucleotide
  Antisense strand to SEQ ID NO: 664720
aauucuccggccgucacug

SEQ ID NO: 664722 - RNA, 19 nt, Artificial Sequence
  Description of Artificial Sequence: Synthetic oligonucleotide
  Sense strand starting at position 2803 of SEQ ID NO: 585751
ggcagaucgcuggagaguu

SEQ ID NO: 664723 - RNA, 19 nt, Artificial Sequence
  Description of Artificial Sequence: Synthetic oligonucleotide
  Antisense strand to SEQ ID NO: 664722
aacucuccagcgaucugcc

SEQ ID NO: 664724 - RNA, 19 nt, Artificial Sequence
  Description of Artificial Sequence: Synthetic oligonucleotide
  Sense strand starting at position 2804 of SEQ ID NO: 585751
gcagaucgcuggagaguuu

SEQ ID NO: 664725 - RNA, 19 nt, Artificial Sequence
  Description of Artificial Sequence: Synthetic oligonucleotide
  Antisense strand to SEQ ID NO: 664724
aaacucuccagcgaucugc

SEQ ID NO: 664726 - RNA, 19 nt, Artificial Sequence
  Description of Artificial Sequence: Synthetic oligonucleotide
  Sense strand starting at position 2815 of SEQ ID NO: 585751
gagaguuucuggcugcuga

SEQ ID NO: 664727 - RNA, 19 nt, Artificial Sequence
  Description of Artificial Sequence: Synthetic oligonucleotide
  Antisense strand to SEQ ID NO: 664726
ucagcagccagaaacucuc

SEQ ID NO: 664728 - RNA, 19 nt, Artificial Sequence
  Description of Artificial Sequence: Synthetic oligonucleotide
  Sense strand starting at position 3160 of SEQ ID NO: 585751
gucagcuacucugagguuu

SEQ ID NO: 664729 - RNA, 19 nt, Artificial Sequence
  Description of Artificial Sequence: Synthetic oligonucleotide
  Antisense strand to SEQ ID NO: 664728
aaaccucagaguagcugac

SEQ ID NO: 664730 - RNA, 19 nt, Artificial Sequence
  Description of Artificial Sequence: Synthetic oligonucleotide
  Sense strand starting at position 3220 of SEQ ID NO: 585751
ggaccuucccguuggaaau

SEQ ID NO: 664731 - RNA, 19 nt, Artificial Sequence
  Description of Artificial Sequence: Synthetic oligonucleotide
  Antisense strand to SEQ ID NO: 664730
auuuccaacgggaaggucc

SEQ ID NO: 664732 - RNA, 19 nt, Artificial Sequence
  Description of Artificial Sequence: Synthetic oligonucleotide
  Sense strand starting at position 3221 of SEQ ID NO: 585751
gaccuucccguuggaaaug

SEQ ID NO: 664733 - RNA, 19 nt, Artificial Sequence
  Description of Artificial Sequence: Synthetic oligonucleotide
  Antisense strand to SEQ ID NO: 664732
cauuuccaacgggaagguc

SEQ ID NO: 664734 - RNA, 19 nt, Artificial Sequence
  Description of Artificial Sequence: Synthetic oligonucleotide
  Sense strand starting at position 3250 of SEQ ID NO: 585751
acggcuuucuuccaaacca

SEQ ID NO: 664735 - RNA, 19 nt, Artificial Sequence
  Description of Artificial Sequence: Synthetic oligonucleotide
  Antisense strand to SEQ ID NO: 664734
ugguuuggaagaaagccgu

SEQ ID NO: 664736 - RNA, 19 nt, Artificial Sequence
  Description of Artificial Sequence: Synthetic oligonucleotide
  Sense strand starting at position 3275 of SEQ ID NO: 585751
uucuguggcuuuggaagau

SEQ ID NO: 664737 - RNA, 19 nt, Artificial Sequence
  Description of Artificial Sequence: Synthetic oligonucleotide
  Antisense strand to SEQ ID NO: 664736
aucuuccaaagccacagaa

SEQ ID NO: 664738 - RNA, 19 nt, Artificial Sequence
  Description of Artificial Sequence: Synthetic oligonucleotide
  Sense strand starting at position 3308 of SEQ ID NO: 585751
ggcaauucccucuauaguc

SEQ ID NO: 664739 - RNA, 19 nt, Artificial Sequence
  Description of Artificial Sequence: Synthetic oligonucleotide
  Antisense strand to SEQ ID NO: 664738
gacuauagagggaauugcc

SEQ ID NO: 664740 - RNA, 19 nt, Artificial Sequence
  Description of Artificial Sequence: Synthetic oligonucleotide
  Sense strand starting at position 3365 of SEQ ID NO: 585751
cucccaguguucuugagag

SEQ ID NO: 664741 - RNA, 19 nt, Artificial Sequence
  Description of Artificial Sequence: Synthetic oligonucleotide
  Antisense strand to SEQ ID NO: 664740
cucucaagaacacugggag

SEQ ID NO: 664742 - RNA, 19 nt, Artificial Sequence
  Description of Artificial Sequence: Synthetic oligonucleotide
  Sense strand starting at position 3367 of SEQ ID NO: 585751
cccaguguucuugagagga

SEQ ID NO: 664743 - RNA, 19 nt, Artificial Sequence
  Description of Artificial Sequence: Synthetic oligonucleotide
  Antisense strand to SEQ ID NO: 664742
uccucucaagaacacuggg

SEQ ID NO: 664744 - RNA, 19 nt, Artificial Sequence
  Description of Artificial Sequence: Synthetic oligonucleotide
  Sense strand starting at position 3369 of SEQ ID NO: 585751
caguguucuugagaggauc

SEQ ID NO: 664745 - RNA, 19 nt, Artificial Sequence
  Description of Artificial Sequence: Synthetic oligonucleotide
  Antisense strand to SEQ ID NO: 664744
gauccucucaagaacacug

SEQ ID NO: 664746 - RNA, 19 nt, Artificial Sequence
  Description of Artificial Sequence: Synthetic oligonucleotide
  Sense strand starting at position 3381 of SEQ ID NO: 585751
gaggaucuguuguacauuc

SEQ ID NO: 664747 - RNA, 19 nt, Artificial Sequence
  Description of Artificial Sequence: Synthetic oligonucleotide
  Antisense strand to SEQ ID NO: 664746
gaauguacaacagauccuc

SEQ ID NO: 664748 - RNA, 19 nt, Artificial Sequence
  Description of Artificial Sequence: Synthetic oligonucleotide
  Sense strand starting at position 3383 of SEQ ID NO: 585751
ggaucuguuguacauucua

SEQ ID NO: 664749 - RNA, 19 nt, Artificial Sequence
  Description of Artificial Sequence: Synthetic oligonucleotide
  Antisense strand to SEQ ID NO: 664748
uagaauguacaacagaucc

SEQ ID NO: 664750 - RNA, 19 nt, Artificial Sequence
  Description of Artificial Sequence: Synthetic oligonucleotide
  Sense strand starting at position 3589 of SEQ ID NO: 585751
ccuggcugucguuaguaaa

SEQ ID NO: 664751 - RNA, 19 nt, Artificial Sequence
  Description of Artificial Sequence: Synthetic oligonucleotide
  Antisense strand to SEQ ID NO: 664750
uuuacuaacgacagccagg

SEQ ID NO: 664752 - RNA, 19 nt, Artificial Sequence
  Description of Artificial Sequence: Synthetic oligonucleotide
  Sense strand starting at position 3595 of SEQ ID NO: 585751
ugucguuaguaaaugguga

SEQ ID NO: 664753 - RNA, 19 nt, Artificial Sequence
  Description of Artificial Sequence: Synthetic oligonucleotide
  Antisense strand to SEQ ID NO: 664752
ucaccauuuacuaacgaca

SEQ ID NO: 664754 - RNA, 19 nt, Artificial Sequence
  Description of Artificial Sequence: Synthetic oligonucleotide
  Sense strand starting at position 3600 of SEQ ID NO: 585751
uuaguaaauggugagcuuu

SEQ ID NO: 664755 - RNA, 19 nt, Artificial Sequence
  Description of Artificial Sequence: Synthetic oligonucleotide
  Antisense strand to SEQ ID NO: 664754
aaagcucaccauuuacuaa

SEQ ID NO: 664756 - RNA, 19 nt, Artificial Sequence
  Description of Artificial Sequence: Synthetic oligonucleotide
  Sense strand starting at position 3610 of SEQ ID NO: 585751
gugagcuuuccacgucuuu

SEQ ID NO: 664757 - RNA, 19 nt, Artificial Sequence
  Description of Artificial Sequence: Synthetic oligonucleotide
  Antisense strand to SEQ ID NO: 664756
aaagacguggaaagcucac

SEQ ID NO: 664758 - RNA, 19 nt, Artificial Sequence
  Description of Artificial Sequence: Synthetic oligonucleotide
  Sense strand starting at position 3721 of SEQ ID NO: 585751
ugcccuauguauuauauuu

SEQ ID NO: 664759 - RNA, 19 nt, Artificial Sequence
  Description of Artificial Sequence: Synthetic oligonucleotide
  Antisense strand to SEQ ID NO: 664758
aaauauaauacauagggca

SEQ ID NO: 664760 - RNA, 19 nt, Artificial Sequence
  Description of Artificial Sequence: Synthetic oligonucleotide
  Sense strand starting at position 3787 of SEQ ID NO: 585751
gcaaacuucugggagguca

SEQ ID NO: 664761 - RNA, 19 nt, Artificial Sequence
  Description of Artificial Sequence: Synthetic oligonucleotide
  Antisense strand to SEQ ID NO: 664760
ugaccucccagaaguuugc

SEQ ID NO: 664762 - RNA, 19 nt, Artificial Sequence
  Description of Artificial Sequence: Synthetic oligonucleotide
  Sense strand starting at position 3798 of SEQ ID NO: 585751
ggaggucacuuugaaagag

SEQ ID NO: 664763 - RNA, 19 nt, Artificial Sequence
  Description of Artificial Sequence: Synthetic oligonucleotide
  Antisense strand to SEQ ID NO: 664762
cucuuucaaagugaccucc

SEQ ID NO: 664764 - RNA, 19 nt, Artificial Sequence
  Description of Artificial Sequence: Synthetic oligonucleotide
  Sense strand starting at position 3808 of SEQ ID NO: 585751
uugaaagagucccugauuc

SEQ ID NO: 664765 - RNA, 19 nt, Artificial Sequence
  Description of Artificial Sequence: Synthetic oligonucleotide
  Antisense strand to SEQ ID NO: 664764
gaaucagggacucuuucaa

SEQ ID NO: 664766 - RNA, 19 nt, Artificial Sequence
  Description of Artificial Sequence: Synthetic oligonucleotide
  Sense strand starting at position 3827 of SEQ ID NO: 585751
auaggugcuuugcuaauuu

SEQ ID NO: 664767 - RNA, 19 nt, Artificial Sequence
  Description of Artificial Sequence: Synthetic oligonucleotide
  Antisense strand to SEQ ID NO: 664766
aaauuagcaaagcaccuau

SEQ ID NO: 664768 - RNA, 19 nt, Artificial Sequence
  Description of Artificial Sequence: Synthetic oligonucleotide
  Sense strand starting at position 3933 of SEQ ID NO: 585751
uguaaucccuauuacugga

SEQ ID NO: 664769 - RNA, 19 nt, Artificial Sequence
  Description of Artificial Sequence: Synthetic oligonucleotide
  Antisense strand to SEQ ID NO: 664768
uccaguaauagggauuaca

SEQ ID NO: 664770 - RNA, 19 nt, Artificial Sequence
  Description of Artificial Sequence: Synthetic oligonucleotide
  Sense strand starting at position 3982 of SEQ ID NO: 585751
uuacaugaauuagagcauu

SEQ ID NO: 664771 - RNA, 19 nt, Artificial Sequence
  Description of Artificial Sequence: Synthetic oligonucleotide
  Antisense strand to SEQ ID NO: 664770
aaugcucuaauucauguaa

SEQ ID NO: 664772 - RNA, 19 nt, Artificial Sequence
  Description of Artificial Sequence: Synthetic oligonucleotide
  Sense strand starting at position 57 of SEQ ID NO: 585752
acaugcugaucauugagua

SEQ ID NO: 664773 - RNA, 19 nt, Artificial Sequence
  Description of Artificial Sequence: Synthetic oligonucleotide
  Antisense strand to SEQ ID NO: 664772
uacucaaugaucagcaugu

SEQ ID NO: 664774 - RNA, 19 nt, Artificial Sequence
  Description of Artificial Sequence: Synthetic oligonucleotide
  Sense strand starting at position 58 of SEQ ID NO: 585752
caugcugaucauugaguaa

SEQ ID NO: 664775 - RNA, 19 nt, Artificial Sequence
  Description of Artificial Sequence: Synthetic oligonucleotide
  Antisense strand to SEQ ID NO: 664774
uuacucaaugaucagcaug

SEQ ID NO: 664776 - RNA, 19 nt, Artificial Sequence
  Description of Artificial Sequence: Synthetic oligonucleotide
  Sense strand starting at position 651 of SEQ ID NO: 585752
ccacaaaguucccuggaca

SEQ ID NO: 664777 - RNA, 19 nt, Artificial Sequence
  Description of Artificial Sequence: Synthetic oligonucleotide
  Antisense strand to SEQ ID NO: 664776
uguccagggaacuuugugg

SEQ ID NO: 664778 - RNA, 19 nt, Artificial Sequence
  Description of Artificial Sequence: Synthetic oligonucleotide
  Sense strand starting at position 1074 of SEQ ID NO: 585752
gaaggauucccuggccauu

SEQ ID NO: 664779 - RNA, 19 nt, Artificial Sequence
  Description of Artificial Sequence: Synthetic oligonucleotide
  Antisense strand to SEQ ID NO: 664778
aauggccagggaauccuuc

SEQ ID NO: 664780 - RNA, 19 nt, Artificial Sequence
  Description of Artificial Sequence: Synthetic oligonucleotide
  Sense strand starting at position 1161 of SEQ ID NO: 585752
accaaagaagcguagucaa

SEQ ID NO: 664781 - RNA, 19 nt, Artificial Sequence
  Description of Artificial Sequence: Synthetic oligonucleotide
  Antisense strand to SEQ ID NO: 664780
uugacuacgcuucuuuggu

SEQ ID NO: 664782 - RNA, 19 nt, Artificial Sequence
  Description of Artificial Sequence: Synthetic oligonucleotide
  Sense strand starting at position 1254 of SEQ ID NO: 585752
cauauuaacgucuauagga

SEQ ID NO: 664783 - RNA, 19 nt, Artificial Sequence
  Description of Artificial Sequence: Synthetic oligonucleotide
  Antisense strand to SEQ ID NO: 664782
uccuauagacguuaauaug

SEQ ID NO: 664784 - RNA, 19 nt, Artificial Sequence
  Description of Artificial Sequence: Synthetic oligonucleotide
  Sense strand starting at position 1256 of SEQ ID NO: 585752
uauuaacgucuauaggauu

SEQ ID NO: 664785 - RNA, 19 nt, Artificial Sequence
  Description of Artificial Sequence: Synthetic oligonucleotide
  Antisense strand to SEQ ID NO: 664784
aauccuauagacguuaaua

SEQ ID NO: 664786 - RNA, 19 nt, Artificial Sequence
  Description of Artificial Sequence: Synthetic oligonucleotide
  Sense strand starting at position 1317 of SEQ ID NO: 585752
guguaugauaggcaucauc

SEQ ID NO: 664787 - RNA, 19 nt, Artificial Sequence
  Description of Artificial Sequence: Synthetic oligonucleotide
  Antisense strand to SEQ ID NO: 664786
gaugaugccuaucauacac

SEQ ID NO: 664788 - RNA, 19 nt, Artificial Sequence
  Description of Artificial Sequence: Synthetic oligonucleotide
  Sense strand starting at position 1335 of SEQ ID NO: 585752
cauguucugagugaaucga

SEQ ID NO: 664789 - RNA, 19 nt, Artificial Sequence
  Description of Artificial Sequence: Synthetic oligonucleotide
  Antisense strand to SEQ ID NO: 664788
ucgauucacucagaacaug

SEQ ID NO: 664790 - RNA, 19 nt, Artificial Sequence
  Description of Artificial Sequence: Synthetic oligonucleotide
  Sense strand starting at position 1455 of SEQ ID NO: 585752
uuugcuucuccagaagcaa

SEQ ID NO: 664791 - RNA, 19 nt, Artificial Sequence
  Description of Artificial Sequence: Synthetic oligonucleotide
  Antisense strand to SEQ ID NO: 664790
uugcuucuggagaagcaaa

SEQ ID NO: 664792 - RNA, 19 nt, Artificial Sequence
  Description of Artificial Sequence: Synthetic oligonucleotide
  Sense strand starting at position 1480 of SEQ ID NO: 585752
gugcaugcauuucuucuaa

SEQ ID NO: 664793 - RNA, 19 nt, Artificial Sequence
  Description of Artificial Sequence: Synthetic oligonucleotide
  Antisense strand to SEQ ID NO: 664792
uuagaagaaaugcaugcac

SEQ ID NO: 664794 - RNA, 19 nt, Artificial Sequence
  Description of Artificial Sequence: Synthetic oligonucleotide
  Sense strand starting at position 1482 of SEQ ID NO: 585752
gcaugcauuucuucuaagu

SEQ ID NO: 664795 - RNA, 19 nt, Artificial Sequence
  Description of Artificial Sequence: Synthetic oligonucleotide
  Antisense strand to SEQ ID NO: 664794
acuuagaagaaaugcaugc

SEQ ID NO: 664796 - RNA, 19 nt, Artificial Sequence
  Description of Artificial Sequence: Synthetic oligonucleotide
  Sense strand starting at position 1521 of SEQ ID NO: 585752
cauuguaaacacugguuga

SEQ ID NO: 664797 - RNA, 19 nt, Artificial Sequence
  Description of Artificial Sequence: Synthetic oligonucleotide
  Antisense strand to SEQ ID NO: 664796
ucaaccaguguuuacaaug

SEQ ID NO: 664798 - RNA, 19 nt, Artificial Sequence
  Description of Artificial Sequence: Synthetic oligonucleotide
  Sense strand starting at position 1524 of SEQ ID NO: 585752
uguaaacacugguugaacu

SEQ ID NO: 664799 - RNA, 19 nt, Artificial Sequence
  Description of Artificial Sequence: Synthetic oligonucleotide
  Antisense strand to SEQ ID NO: 664798
aguucaaccaguguuuaca

SEQ ID NO: 664800 - RNA, 19 nt, Artificial Sequence
  Description of Artificial Sequence: Synthetic oligonucleotide
  Sense strand starting at position 1722 of SEQ ID NO: 585752
auaugaaaugcucgaauua

SEQ ID NO: 664801 - RNA, 19 nt, Artificial Sequence
  Description of Artificial Sequence: Synthetic oligonucleotide
  Antisense strand to SEQ ID NO: 664800
uaauucgagcauuucauau

SEQ ID NO: 664802 - RNA, 19 nt, Artificial Sequence
  Description of Artificial Sequence: Synthetic oligonucleotide
  Sense strand starting at position 2008 of SEQ ID NO: 585752
accaaucgccuacaaagau

SEQ ID NO: 664803 - RNA, 19 nt, Artificial Sequence
  Description of Artificial Sequence: Synthetic oligonucleotide
  Antisense strand to SEQ ID NO: 664802
aucuuuguaggcgauuggu

SEQ ID NO: 664804 - RNA, 19 nt, Artificial Sequence
  Description of Artificial Sequence: Synthetic oligonucleotide
  Sense strand starting at position 2201 of SEQ ID NO: 585752
ccgagaagugaguggaauu

SEQ ID NO: 664805 - RNA, 19 nt, Artificial Sequence
  Description of Artificial Sequence: Synthetic oligonucleotide
  Antisense strand to SEQ ID NO: 664804
aauuccacucacuucucgg

SEQ ID NO: 664806 - RNA, 19 nt, Artificial Sequence
  Description of Artificial Sequence: Synthetic oligonucleotide
  Sense strand starting at position 2254 of SEQ ID NO: 585752
aacggacuucguugacaaa

SEQ ID NO: 664807 - RNA, 19 nt, Artificial Sequence
  Description of Artificial Sequence: Synthetic oligonucleotide
  Antisense strand to SEQ ID NO: 664806
uuugucaacgaaguccguu

SEQ ID NO: 664808 - RNA, 19 nt, Artificial Sequence
  Description of Artificial Sequence: Synthetic oligonucleotide
  Sense strand starting at position 2311 of SEQ ID NO: 585752
cugcuuccucuagaacuga

SEQ ID NO: 664809 - RNA, 19 nt, Artificial Sequence
  Description of Artificial Sequence: Synthetic oligonucleotide
  Antisense strand to SEQ ID NO: 664808
ucaguucuagaggaagcag

SEQ ID NO: 664810 - RNA, 19 nt, Artificial Sequence
  Description of Artificial Sequence: Synthetic oligonucleotide
  Sense strand starting at position 2389 of SEQ ID NO: 585752
ggaccuuagcagggaaauc

SEQ ID NO: 664811 - RNA, 19 nt, Artificial Sequence
  Description of Artificial Sequence: Synthetic oligonucleotide
  Antisense strand to SEQ ID NO: 664810
gauuucccugcuaaggucc

SEQ ID NO: 664812 - RNA, 19 nt, Artificial Sequence
  Description of Artificial Sequence: Synthetic oligonucleotide
  Sense strand starting at position 2418 of SEQ ID NO: 585752
ggaucuguaggguggugaa

SEQ ID NO: 664813 - RNA, 19 nt, Artificial Sequence
  Description of Artificial Sequence: Synthetic oligonucleotide
  Antisense strand to SEQ ID NO: 664812
uucaccacccuacagaucc

SEQ ID NO: 664814 - RNA, 19 nt, Artificial Sequence
  Description of Artificial Sequence: Synthetic oligonucleotide
  Sense strand starting at position 2453 of SEQ ID NO: 585752
agacauuugcucuggugua

SEQ ID NO: 664815 - RNA, 19 nt, Artificial Sequence
  Description of Artificial Sequence: Synthetic oligonucleotide
  Antisense strand to SEQ ID NO: 664814
uacaccagagcaaaugucu

SEQ ID NO: 664816 - RNA, 19 nt, Artificial Sequence
  Description of Artificial Sequence: Synthetic oligonucleotide
  Sense strand starting at position 2558 of SEQ ID NO: 585752
gcugcaguugucgcuaaga

SEQ ID NO: 664817 - RNA, 19 nt, Artificial Sequence
  Description of Artificial Sequence: Synthetic oligonucleotide
  Antisense strand to SEQ ID NO: 664816
ucuuagcgacaacugcagc

SEQ ID NO: 664818 - RNA, 19 nt, Artificial Sequence
  Description of Artificial Sequence: Synthetic oligonucleotide
  Sense strand starting at position 2633 of SEQ ID NO: 585752
aagaauucguucucuagga

SEQ ID NO: 664819 - RNA, 19 nt, Artificial Sequence
  Description of Artificial Sequence: Synthetic oligonucleotide
  Antisense strand to SEQ ID NO: 664818
uccuagagaacgaauucuu

SEQ ID NO: 664820 - RNA, 19 nt, Artificial Sequence
  Description of Artificial Sequence: Synthetic oligonucleotide
  Sense strand starting at position 2634 of SEQ ID NO: 585752
agaauucguucucuaggau

SEQ ID NO: 664821 - RNA, 19 nt, Artificial Sequence
  Description of Artificial Sequence: Synthetic oligonucleotide
  Antisense strand to SEQ ID NO: 664820
auccuagagaacgaauucu

SEQ ID NO: 664822 - RNA, 19 nt, Artificial Sequence
  Description of Artificial Sequence: Synthetic oligonucleotide
  Sense strand starting at position 2635 of SEQ ID NO: 585752
gaauucguucucuaggauu

SEQ ID NO: 664823 - RNA, 19 nt, Artificial Sequence
  Description of Artificial Sequence: Synthetic oligonucleotide
  Antisense strand to SEQ ID NO: 664822
aauccuagagaacgaauuc

SEQ ID NO: 664824 - RNA, 19 nt, Artificial Sequence
  Description of Artificial Sequence: Synthetic oligonucleotide
  Sense strand starting at position 2649 of SEQ ID NO: 585752
ggauuuaccuaccacuaag

SEQ ID NO: 664825 - RNA, 19 nt, Artificial Sequence
  Description of Artificial Sequence: Synthetic oligonucleotide
  Antisense strand to SEQ ID NO: 664824
cuuagugguagguaaaucc

SEQ ID NO: 664826 - RNA, 19 nt, Artificial Sequence
  Description of Artificial Sequence: Synthetic oligonucleotide
  Sense strand starting at position 2713 of SEQ ID NO: 585752
guuugaauucuagacugua

SEQ ID NO: 664827 - RNA, 19 nt, Artificial Sequence
  Description of Artificial Sequence: Synthetic oligonucleotide
  Antisense strand to SEQ ID NO: 664826
uacagucuagaauucaaac

SEQ ID NO: 664828 - RNA, 19 nt, Artificial Sequence
  Description of Artificial Sequence: Synthetic oligonucleotide
  Sense strand starting at position 2728 of SEQ ID NO: 585752
uguauuugugaaugcuuuc

SEQ ID NO: 664829 - RNA, 19 nt, Artificial Sequence
  Description of Artificial Sequence: Synthetic oligonucleotide
  Antisense strand to SEQ ID NO: 664828
gaaagcauucacaaauaca

SEQ ID NO: 664830 - RNA, 19 nt, Artificial Sequence
  Description of Artificial Sequence: Synthetic oligonucleotide
  Sense strand starting at position 2791 of SEQ ID NO: 585752
uuaaucgguguugaaguaa

SEQ ID NO: 664831 - RNA, 19 nt, Artificial Sequence
  Description of Artificial Sequence: Synthetic oligonucleotide
  Antisense strand to SEQ ID NO: 664830
uuacuucaacaccgauuaa

SEQ ID NO: 664832 - RNA, 19 nt, Artificial Sequence
  Description of Artificial Sequence: Synthetic oligonucleotide
  Sense strand starting at position 2802 of SEQ ID NO: 585752
ugaaguaaucauuguaaca

SEQ ID NO: 664833 - RNA, 19 nt, Artificial Sequence
  Description of Artificial Sequence: Synthetic oligonucleotide
  Antisense strand to SEQ ID NO: 664832
uguuacaaugauuacuuca

SEQ ID NO: 664834 - RNA, 19 nt, Artificial Sequence
  Description of Artificial Sequence: Synthetic oligonucleotide
  Sense strand starting at position 2975 of SEQ ID NO: 585752
gcagauauggcuggaaucu

SEQ ID NO: 664835 - RNA, 19 nt, Artificial Sequence
  Description of Artificial Sequence: Synthetic oligonucleotide
  Antisense strand to SEQ ID NO: 664834
agauuccagccauaucugc

SEQ ID NO: 664836 - RNA, 19 nt, Artificial Sequence
  Description of Artificial Sequence: Synthetic oligonucleotide
  Sense strand starting at position 3001 of SEQ ID NO: 585752
uacguuauuucugcuguua

SEQ ID NO: 664837 - RNA, 19 nt, Artificial Sequence
  Description of Artificial Sequence: Synthetic oligonucleotide
  Antisense strand to SEQ ID NO: 664836
uaacagcagaaauaacgua

SEQ ID NO: 664838 - RNA, 19 nt, Artificial Sequence
  Description of Artificial Sequence: Synthetic oligonucleotide
  Sense strand starting at position 3161 of SEQ ID NO: 585752
ugguaaguucgggaguaug

SEQ ID NO: 664839 - RNA, 19 nt, Artificial Sequence
  Description of Artificial Sequence: Synthetic oligonucleotide
  Antisense strand to SEQ ID NO: 664838
cauacucccgaacuuacca

SEQ ID NO: 664840 - RNA, 19 nt, Artificial Sequence
  Description of Artificial Sequence: Synthetic oligonucleotide
  Sense strand starting at position 3169 of SEQ ID NO: 585752
ucgggaguaugguuuaaug

SEQ ID NO: 664841 - RNA, 19 nt, Artificial Sequence
  Description of Artificial Sequence: Synthetic oligonucleotide
  Antisense strand to SEQ ID NO: 664840
cauuaaaccauacucccga

SEQ ID NO: 664842 - RNA, 19 nt, Artificial Sequence
  Description of Artificial Sequence: Synthetic oligonucleotide
  Sense strand starting at position 3172 of SEQ ID NO: 585752
ggaguaugguuuaauggag

SEQ ID NO: 664843 - RNA, 19 nt, Artificial Sequence
  Description of Artificial Sequence: Synthetic oligonucleotide
  Antisense strand to SEQ ID NO: 664842
cuccauuaaaccauacucc

SEQ ID NO: 664844 - RNA, 19 nt, Artificial Sequence
  Description of Artificial Sequence: Synthetic oligonucleotide
  Sense strand starting at position 3197 of SEQ ID NO: 585752
ggugauuucugguaagaag

SEQ ID NO: 664845 - RNA, 19 nt, Artificial Sequence
  Description of Artificial Sequence: Synthetic oligonucleotide
  Antisense strand to SEQ ID NO: 664844
cuucuuaccagaaaucacc

SEQ ID NO: 664846 - RNA, 19 nt, Artificial Sequence
  Description of Artificial Sequence: Synthetic oligonucleotide
  Sense strand starting at position 3281 of SEQ ID NO: 585752
guuuguuucccagcuggca

SEQ ID NO: 664847 - RNA, 19 nt, Artificial Sequence
  Description of Artificial Sequence: Synthetic oligonucleotide
  Antisense strand to SEQ ID NO: 664846
ugccagcugggaaacaaac

SEQ ID NO: 664848 - RNA, 19 nt, Artificial Sequence
  Description of Artificial Sequence: Synthetic oligonucleotide
  Sense strand starting at position 3889 of SEQ ID NO: 585752
guagcaaugcaaugggaau

SEQ ID NO: 664849 - RNA, 19 nt, Artificial Sequence
  Description of Artificial Sequence: Synthetic oligonucleotide
  Antisense strand to SEQ ID NO: 664848
auucccauugcauugcuac

SEQ ID NO: 664850 - RNA, 19 nt, Artificial Sequence
  Description of Artificial Sequence: Synthetic oligonucleotide
  Sense strand starting at position 3900 of SEQ ID NO: 585752
augggaauauguguaauau

SEQ ID NO: 664851 - RNA, 19 nt, Artificial Sequence
  Description of Artificial Sequence: Synthetic oligonucleotide
  Antisense strand to SEQ ID NO: 664850
auauuacacauauucccau

SEQ ID NO: 664852 - RNA, 19 nt, Artificial Sequence
  Description of Artificial Sequence: Synthetic oligonucleotide
  Sense strand starting at position 23 of SEQ ID NO: 585753
uguagucuagcuguguuua

SEQ ID NO: 664853 - RNA, 19 nt, Artificial Sequence
  Description of Artificial Sequence: Synthetic oligonucleotide
  Antisense strand to SEQ ID NO: 664852
uaaacacagcuagacuaca

SEQ ID NO: 664854 - RNA, 19 nt, Artificial Sequence
  Description of Artificial Sequence: Synthetic oligonucleotide
  Sense strand starting at position 26 of SEQ ID NO: 585753
agucuagcuguguuuaugu

SEQ ID NO: 664855 - RNA, 19 nt, Artificial Sequence
  Description of Artificial Sequence: Synthetic oligonucleotide
  Antisense strand to SEQ ID NO: 664854
acauaaacacagcuagacu

SEQ ID NO: 664856 - RNA, 19 nt, Artificial Sequence
  Description of Artificial Sequence: Synthetic oligonucleotide
  Sense strand starting at position 157 of SEQ ID NO: 585753
acagcuauugagggaguca

SEQ ID NO: 664857 - RNA, 19 nt, Artificial Sequence
  Description of Artificial Sequence: Synthetic oligonucleotide
  Antisense strand to SEQ ID NO: 664856
ugacucccucaauagcugu

SEQ ID NO: 664858 - RNA, 19 nt, Artificial Sequence
  Description of Artificial Sequence: Synthetic oligonucleotide
  Sense strand starting at position 219 of SEQ ID NO: 585753
uuccucacccuguaagaga

SEQ ID NO: 664859 - RNA, 19 nt, Artificial Sequence
  Description of Artificial Sequence: Synthetic oligonucleotide
  Antisense strand to SEQ ID NO: 664858
ucucuuacagggugaggaa

SEQ ID NO: 664860 - RNA, 19 nt, Artificial Sequence
  Description of Artificial Sequence: Synthetic oligonucleotide
  Sense strand starting at position 286 of SEQ ID NO: 585753
ugagacugauccucuagua

SEQ ID NO: 664861 - RNA, 19 nt, Artificial Sequence
  Description of Artificial Sequence: Synthetic oligonucleotide
  Antisense strand to SEQ ID NO: 664860
uacuagaggaucagucuca

SEQ ID NO: 664862 - RNA, 19 nt, Artificial Sequence
  Description of Artificial Sequence: Synthetic oligonucleotide
  Sense strand starting at position 586 of SEQ ID NO: 585753
ggacaagauuaugccuacu

SEQ ID NO: 664863 - RNA, 19 nt, Artificial Sequence
  Description of Artificial Sequence: Synthetic oligonucleotide
  Antisense strand to SEQ ID NO: 664862
aguaggcauaaucuugucc

SEQ ID NO: 664864 - RNA, 19 nt, Artificial Sequence
  Description of Artificial Sequence: Synthetic oligonucleotide
  Sense strand starting at position 713 of SEQ ID NO: 585753
uagguccaagaaugugauu

SEQ ID NO: 664865 - RNA, 19 nt, Artificial Sequence
  Description of Artificial Sequence: Synthetic oligonucleotide
  Antisense strand to SEQ ID NO: 664864
aaucacauucuuggaccua

SEQ ID NO: 664866 - RNA, 19 nt, Artificial Sequence
  Description of Artificial Sequence: Synthetic oligonucleotide
  Sense strand starting at position 715 of SEQ ID NO: 585753
gguccaagaaugugauuaa

SEQ ID NO: 664867 - RNA, 19 nt, Artificial Sequence
  Description of Artificial Sequence: Synthetic oligonucleotide
  Antisense strand to SEQ ID NO: 664866
uuaaucacauucuuggacc

SEQ ID NO: 664868 - RNA, 19 nt, Artificial Sequence
  Description of Artificial Sequence: Synthetic oligonucleotide
  Sense strand starting at position 783 of SEQ ID NO: 585753
ggauaacaguguguagaug

SEQ ID NO: 664869 - RNA, 19 nt, Artificial Sequence
  Description of Artificial Sequence: Synthetic oligonucleotide
  Antisense strand to SEQ ID NO: 664868
caucuacacacuguuaucc

SEQ ID NO: 664870 - RNA, 19 nt, Artificial Sequence
  Description of Artificial Sequence: Synthetic oligonucleotide
  Sense strand starting at position 866 of SEQ ID NO: 585753
uuaauauccugggcaacua

SEQ ID NO: 664871 - RNA, 19 nt, Artificial Sequence
  Description of Artificial Sequence: Synthetic oligonucleotide
  Antisense strand to SEQ ID NO: 664870
uaguugcccaggauauuaa

SEQ ID NO: 664872 - RNA, 19 nt, Artificial Sequence
  Description of Artificial Sequence: Synthetic oligonucleotide
  Sense strand starting at position 1049 of SEQ ID NO: 585753
acagguuuauuucuguguu

SEQ ID NO: 664873 - RNA, 19 nt, Artificial Sequence
  Description of Artificial Sequence: Synthetic oligonucleotide
  Antisense strand to SEQ ID NO: 664872
aacacagaaauaaaccugu

SEQ ID NO: 664874 - RNA, 19 nt, Artificial Sequence
  Description of Artificial Sequence: Synthetic oligonucleotide
  Sense strand starting at position 1051 of SEQ ID NO: 585753
agguuuauuucuguguuau

SEQ ID NO: 664875 - RNA, 19 nt, Artificial Sequence
  Description of Artificial Sequence: Synthetic oligonucleotide
  Antisense strand to SEQ ID NO: 664874
auaacacagaaauaaaccu

SEQ ID NO: 664876 - RNA, 19 nt, Artificial Sequence
  Description of Artificial Sequence: Synthetic oligonucleotide
  Sense strand starting at position 1052 of SEQ ID NO: 585753
gguuuauuucuguguuaua

SEQ ID NO: 664877 - RNA, 19 nt, Artificial Sequence
  Description of Artificial Sequence: Synthetic oligonucleotide
  Antisense strand to SEQ ID NO: 664876
uauaacacagaaauaaacc

SEQ ID NO: 664878 - RNA, 19 nt, Artificial Sequence
  Description of Artificial Sequence: Synthetic oligonucleotide
  Sense strand starting at position 1053 of SEQ ID NO: 585753
guuuauuucuguguuauac

SEQ ID NO: 664879 - RNA, 19 nt, Artificial Sequence
  Description of Artificial Sequence: Synthetic oligonucleotide
  Antisense strand to SEQ ID NO: 664878
guauaacacagaaauaaac

SEQ ID NO: 664880 - RNA, 19 nt, Artificial Sequence
  Description of Artificial Sequence: Synthetic oligonucleotide
  Sense strand starting at position 1071 of SEQ ID NO: 585753
caugguagaccauaauguu

SEQ ID NO: 664881 - RNA, 19 nt, Artificial Sequence
  Description of Artificial Sequence: Synthetic oligonucleotide
  Antisense strand to SEQ ID NO: 664880
aacauuauggucuaccaug

SEQ ID NO: 664882 - RNA, 19 nt, Artificial Sequence
  Description of Artificial Sequence: Synthetic oligonucleotide
  Sense strand starting at position 1153 of SEQ ID NO: 585753
gggagcugccggagucaau

SEQ ID NO: 664883 - RNA, 19 nt, Artificial Sequence
  Description of Artificial Sequence: Synthetic oligonucleotide
  Antisense strand to SEQ ID NO: 664882
auugacuccggcagcuccc

SEQ ID NO: 664884 - RNA, 19 nt, Artificial Sequence
  Description of Artificial Sequence: Synthetic oligonucleotide
  Sense strand starting at position 1186 of SEQ ID NO: 585753
ugauuaauuuaggaucuga

SEQ ID NO: 664885 - RNA, 19 nt, Artificial Sequence
  Description of Artificial Sequence: Synthetic oligonucleotide
  Antisense strand to SEQ ID NO: 664884
ucagauccuaaauuaauca

SEQ ID NO: 664886 - RNA, 19 nt, Artificial Sequence
  Description of Artificial Sequence: Synthetic oligonucleotide
  Sense strand starting at position 1697 of SEQ ID NO: 585753
acaguaugccuggaguaca

SEQ ID NO: 664887 - RNA, 19 nt, Artificial Sequence
  Description of Artificial Sequence: Synthetic oligonucleotide
  Antisense strand to SEQ ID NO: 664886
uguacuccaggcauacugu

SEQ ID NO: 664888 - RNA, 19 nt, Artificial Sequence
  Description of Artificial Sequence: Synthetic oligonucleotide
  Sense strand starting at position 2191 of SEQ ID NO: 585753
uggcauccagaaggauaua

SEQ ID NO: 664889 - RNA, 19 nt, Artificial Sequence
  Description of Artificial Sequence: Synthetic oligonucleotide
  Antisense strand to SEQ ID NO: 664888
uauauccuucuggaugcca

SEQ ID NO: 664890 - RNA, 19 nt, Artificial Sequence
  Description of Artificial Sequence: Synthetic oligonucleotide
  Sense strand starting at position 2229 of SEQ ID NO: 585753
ucaugaggauuuggauaga

SEQ ID NO: 664891 - RNA, 19 nt, Artificial Sequence
  Description of Artificial Sequence: Synthetic oligonucleotide
  Antisense strand to SEQ ID NO: 664890
ucuauccaaauccucauga

SEQ ID NO: 664892 - RNA, 19 nt, Artificial Sequence
  Description of Artificial Sequence: Synthetic oligonucleotide
  Sense strand starting at position 2266 of SEQ ID NO: 585753
cccaaacuccuguaagguu

SEQ ID NO: 664893 - RNA, 19 nt, Artificial Sequence
  Description of Artificial Sequence: Synthetic oligonucleotide
  Antisense strand to SEQ ID NO: 664892
aaccuuacaggaguuuggg

SEQ ID NO: 664894 - RNA, 19 nt, Artificial Sequence
  Description of Artificial Sequence: Synthetic oligonucleotide
  Sense strand starting at position 2428 of SEQ ID NO: 585753
ucugaacaacagugaugau

SEQ ID NO: 664895 - RNA, 19 nt, Artificial Sequence
  Description of Artificial Sequence: Synthetic oligonucleotide
  Antisense strand to SEQ ID NO: 664894
aucaucacuguuguucaga

SEQ ID NO: 664896 - RNA, 19 nt, Artificial Sequence
  Description of Artificial Sequence: Synthetic oligonucleotide
  Sense strand starting at position 2461 of SEQ ID NO: 585753
aucuuuggacuguaucaca

SEQ ID NO: 664897 - RNA, 19 nt, Artificial Sequence
  Description of Artificial Sequence: Synthetic oligonucleotide
  Antisense strand to SEQ ID NO: 664896
ugugauacaguccaaagau

SEQ ID NO: 664898 - RNA, 19 nt, Artificial Sequence
  Description of Artificial Sequence: Synthetic oligonucleotide
  Sense strand starting at position 2720 of SEQ ID NO: 585753
cggccuuuacaauaaagau

SEQ ID NO: 664899 - RNA, 19 nt, Artificial Sequence
  Description of Artificial Sequence: Synthetic oligonucleotide
  Antisense strand to SEQ ID NO: 664898
aucuuuauuguaaaggccg

SEQ ID NO: 664900 - RNA, 19 nt, Artificial Sequence
  Description of Artificial Sequence: Synthetic oligonucleotide
  Sense strand starting at position 2819 of SEQ ID NO: 585753
uaguuuauuggaugaaucu

SEQ ID NO: 664901 - RNA, 19 nt, Artificial Sequence
  Description of Artificial Sequence: Synthetic oligonucleotide
  Antisense strand to SEQ ID NO: 664900
agauucauccaauaaacua

SEQ ID NO: 664902 - RNA, 19 nt, Artificial Sequence
  Description of Artificial Sequence: Synthetic oligonucleotide
  Sense strand starting at position 2901 of SEQ ID NO: 585753
cuuuaaguaguuuagacau

SEQ ID NO: 664903 - RNA, 19 nt, Artificial Sequence
  Description of Artificial Sequence: Synthetic oligonucleotide
  Antisense strand to SEQ ID NO: 664902
augucuaaacuacuuaaag

SEQ ID NO: 664904 - RNA, 19 nt, Artificial Sequence
  Description of Artificial Sequence: Synthetic oligonucleotide
  Sense strand starting at position 2919 of SEQ ID NO: 585753
uuaauagaguuucugauag

SEQ ID NO: 664905 - RNA, 19 nt, Artificial Sequence
  Description of Artificial Sequence: Synthetic oligonucleotide
  Antisense strand to SEQ ID NO: 664904
cuaucagaaacucuauuaa

SEQ ID NO: 664906 - RNA, 19 nt, Artificial Sequence
  Description of Artificial Sequence: Synthetic oligonucleotide
  Sense strand starting at position 2937 of SEQ ID NO: 585753
gcagaucuucuauaaagua

SEQ ID NO: 664907 - RNA, 19 nt, Artificial Sequence
  Description of Artificial Sequence: Synthetic oligonucleotide
  Antisense strand to SEQ ID NO: 664906
uacuuuauagaagaucugc

SEQ ID NO: 664908 - RNA, 19 nt, Artificial Sequence
  Description of Artificial Sequence: Synthetic oligonucleotide
  Sense strand starting at position 2990 of SEQ ID NO: 585753
uugauucuaugagcuuaga

SEQ ID NO: 664909 - RNA, 19 nt, Artificial Sequence
  Description of Artificial Sequence: Synthetic oligonucleotide
  Antisense strand to SEQ ID NO: 664908
ucuaagcucauagaaucaa

SEQ ID NO: 664910 - RNA, 19 nt, Artificial Sequence
  Description of Artificial Sequence: Synthetic oligonucleotide
  Sense strand starting at position 3003 of SEQ ID NO: 585753
cuuagaauagaguggguua

SEQ ID NO: 664911 - RNA, 19 nt, Artificial Sequence
  Description of Artificial Sequence: Synthetic oligonucleotide
  Antisense strand to SEQ ID NO: 664910
uaacccacucuauucuaag

SEQ ID NO: 664912 - RNA, 19 nt, Artificial Sequence
  Description of Artificial Sequence: Synthetic oligonucleotide
  Sense strand starting at position 3004 of SEQ ID NO: 585753
uuagaauagaguggguuaa

SEQ ID NO: 664913 - RNA, 19 nt, Artificial Sequence
  Description of Artificial Sequence: Synthetic oligonucleotide
  Antisense strand to SEQ ID NO: 664912
uuaacccacucuauucuaa

SEQ ID NO: 664914 - RNA, 19 nt, Artificial Sequence
  Description of Artificial Sequence: Synthetic oligonucleotide
  Sense strand starting at position 3081 of SEQ ID NO: 585753
guguguaguaaggaauaau

SEQ ID NO: 664915 - RNA, 19 nt, Artificial Sequence
  Description of Artificial Sequence: Synthetic oligonucleotide
  Antisense strand to SEQ ID NO: 664914
auuauuccuuacuacacac

SEQ ID NO: 664916 - RNA, 19 nt, Artificial Sequence
  Description of Artificial Sequence: Synthetic oligonucleotide
  Sense strand starting at position 3114 of SEQ ID NO: 585753
uauguuagucgucucgauu

SEQ ID NO: 664917 - RNA, 19 nt, Artificial Sequence
  Description of Artificial Sequence: Synthetic oligonucleotide
  Antisense strand to SEQ ID NO: 664916
aaucgagacgacuaacaua

SEQ ID NO: 664918 - RNA, 19 nt, Artificial Sequence
  Description of Artificial Sequence: Synthetic oligonucleotide
  Sense strand starting at position 3127 of SEQ ID NO: 585753
ucgauuugcuaauucugau

SEQ ID NO: 664919 - RNA, 19 nt, Artificial Sequence
  Description of Artificial Sequence: Synthetic oligonucleotide
  Antisense strand to SEQ ID NO: 664918
aucagaauuagcaaaucga

SEQ ID NO: 664920 - RNA, 19 nt, Artificial Sequence
  Description of Artificial Sequence: Synthetic oligonucleotide
  Sense strand starting at position 3169 of SEQ ID NO: 585753
uugggaaacuaucuccuuu

SEQ ID NO: 664921 - RNA, 19 nt, Artificial Sequence
  Description of Artificial Sequence: Synthetic oligonucleotide
  Antisense strand to SEQ ID NO: 664920
aaaggagauaguuucccaa

SEQ ID NO: 664922 - RNA, 19 nt, Artificial Sequence
  Description of Artificial Sequence: Synthetic oligonucleotide
  Sense strand starting at position 3239 of SEQ ID NO: 585753
uauauaucauaggcaguga

SEQ ID NO: 664923 - RNA, 19 nt, Artificial Sequence
  Description of Artificial Sequence: Synthetic oligonucleotide
  Antisense strand to SEQ ID NO: 664922
ucacugccuaugauauaua

SEQ ID NO: 664924 - RNA, 19 nt, Artificial Sequence
  Description of Artificial Sequence: Synthetic oligonucleotide
  Sense strand starting at position 3296 of SEQ ID NO: 585753
uugggagcgauggaguauu

SEQ ID NO: 664925 - RNA, 19 nt, Artificial Sequence
  Description of Artificial Sequence: Synthetic oligonucleotide
  Antisense strand to SEQ ID NO: 664924
aauacuccaucgcucccaa

SEQ ID NO: 664926 - RNA, 19 nt, Artificial Sequence
  Description of Artificial Sequence: Synthetic oligonucleotide
  Sense strand starting at position 3425 of SEQ ID NO: 585753
cuaggaguggcauaaagua

SEQ ID NO: 664927 - RNA, 19 nt, Artificial Sequence
  Description of Artificial Sequence: Synthetic oligonucleotide
  Antisense strand to SEQ ID NO: 664926
uacuuuaugccacuccuag

SEQ ID NO: 664928 - RNA, 19 nt, Artificial Sequence
  Description of Artificial Sequence: Synthetic oligonucleotide
  Sense strand starting at position 3544 of SEQ ID NO: 585753
guguucuuccuagugcuau

SEQ ID NO: 664929 - RNA, 19 nt, Artificial Sequence
  Description of Artificial Sequence: Synthetic oligonucleotide
  Antisense strand to SEQ ID NO: 664928
auagcacuaggaagaacac

SEQ ID NO: 664930 - RNA, 19 nt, Artificial Sequence
  Description of Artificial Sequence: Synthetic oligonucleotide
  Sense strand starting at position 3661 of SEQ ID NO: 585753
aggguaugggaaugauucu

SEQ ID NO: 664931 - RNA, 19 nt, Artificial Sequence
  Description of Artificial Sequence: Synthetic oligonucleotide
  Antisense strand to SEQ ID NO: 664930
agaaucauucccauacccu

SEQ ID NO: 664932 - RNA, 19 nt, Artificial Sequence
  Description of Artificial Sequence: Synthetic oligonucleotide
  Sense strand starting at position 311 of SEQ ID NO: 585754
ggaaaucuggaucggguua

SEQ ID NO: 664933 - RNA, 19 nt, Artificial Sequence
  Description of Artificial Sequence: Synthetic oligonucleotide
  Antisense strand to SEQ ID NO: 664932
uaacccgauccagauuucc

SEQ ID NO: 664934 - RNA, 19 nt, Artificial Sequence
  Description of Artificial Sequence: Synthetic oligonucleotide
  Sense strand starting at position 312 of SEQ ID NO: 585754
gaaaucuggaucggguuau

SEQ ID NO: 664935 - RNA, 19 nt, Artificial Sequence
  Description of Artificial Sequence: Synthetic oligonucleotide
  Antisense strand to SEQ ID NO: 664934
auaacccgauccagauuuc

SEQ ID NO: 664936 - RNA, 19 nt, Artificial Sequence
  Description of Artificial Sequence: Synthetic oligonucleotide
  Sense strand starting at position 322 of SEQ ID NO: 585754
ucggguuauggagagccau

SEQ ID NO: 664937 - RNA, 19 nt, Artificial Sequence
  Description of Artificial Sequence: Synthetic oligonucleotide
  Antisense strand to SEQ ID NO: 664936
auggcucuccauaacccga

SEQ ID NO: 664938 - RNA, 19 nt, Artificial Sequence
  Description of Artificial Sequence: Synthetic oligonucleotide
  Sense strand starting at position 633 of SEQ ID NO: 585754
aaaguuguuccacagguuu

SEQ ID NO: 664939 - RNA, 19 nt, Artificial Sequence
  Description of Artificial Sequence: Synthetic oligonucleotide
  Antisense strand to SEQ ID NO: 664938
aaaccuguggaacaacuuu

SEQ ID NO: 664940 - RNA, 19 nt, Artificial Sequence
  Description of Artificial Sequence: Synthetic oligonucleotide
  Sense strand starting at position 1091 of SEQ ID NO: 585754
ggcguuuggcugugaggga

SEQ ID NO: 664941 - RNA, 19 nt, Artificial Sequence
  Description of Artificial Sequence: Synthetic oligonucleotide
  Antisense strand to SEQ ID NO: 664940
ucccucacagccaaacgcc

SEQ ID NO: 664942 - RNA, 19 nt, Artificial Sequence
  Description of Artificial Sequence: Synthetic oligonucleotide
  Sense strand starting at position 1173 of SEQ ID NO: 585754
ccgggaugucccggaagga

SEQ ID NO: 664943 - RNA, 19 nt, Artificial Sequence
  Description of Artificial Sequence: Synthetic oligonucleotide
  Antisense strand to SEQ ID NO: 664942
uccuuccgggacaucccgg

SEQ ID NO: 664944 - RNA, 19 nt, Artificial Sequence
  Description of Artificial Sequence: Synthetic oligonucleotide
  Sense strand starting at position 1267 of SEQ ID NO: 585754
gugcaagaguggguacuuu

SEQ ID NO: 664945 - RNA, 19 nt, Artificial Sequence
  Description of Artificial Sequence: Synthetic oligonucleotide
  Antisense strand to SEQ ID NO: 664944
aaaguacccacucuugcac

SEQ ID NO: 664946 - RNA, 19 nt, Artificial Sequence
  Description of Artificial Sequence: Synthetic oligonucleotide
  Sense strand starting at position 1317 of SEQ ID NO: 585754
aggagugagugagaaucaa

SEQ ID NO: 664947 - RNA, 19 nt, Artificial Sequence
  Description of Artificial Sequence: Synthetic oligonucleotide
  Antisense strand to SEQ ID NO: 664946
uugauucucacucacuccu

SEQ ID NO: 664948 - RNA, 19 nt, Artificial Sequence
  Description of Artificial Sequence: Synthetic oligonucleotide
  Sense strand starting at position 2236 of SEQ ID NO: 585754
cgcagaucuuugccggagu

SEQ ID NO: 664949 - RNA, 19 nt, Artificial Sequence
  Description of Artificial Sequence: Synthetic oligonucleotide
  Antisense strand to SEQ ID NO: 664948
acuccggcaaagaucugcg

SEQ ID NO: 664950 - RNA, 19 nt, Artificial Sequence
  Description of Artificial Sequence: Synthetic oligonucleotide
  Sense strand starting at position 2239 of SEQ ID NO: 585754
agaucuuugccggagucuu

SEQ ID NO: 664951 - RNA, 19 nt, Artificial Sequence
  Description of Artificial Sequence: Synthetic oligonucleotide
  Antisense strand to SEQ ID NO: 664950
aagacuccggcaaagaucu

SEQ ID NO: 664952 - RNA, 19 nt, Artificial Sequence
  Description of Artificial Sequence: Synthetic oligonucleotide
  Sense strand starting at position 2326 of SEQ ID NO: 585754
gaguuugcagcuuggaaug

SEQ ID NO: 664953 - RNA, 19 nt, Artificial Sequence
  Description of Artificial Sequence: Synthetic oligonucleotide
  Antisense strand to SEQ ID NO: 664952
cauuccaagcugcaaacuc

SEQ ID NO: 664954 - RNA, 19 nt, Artificial Sequence
  Description of Artificial Sequence: Synthetic oligonucleotide
  Sense strand starting at position 2392 of SEQ ID NO: 585754
guuggaguccgguggugaa

SEQ ID NO: 664955 - RNA, 19 nt, Artificial Sequence
  Description of Artificial Sequence: Synthetic oligonucleotide
  Antisense strand to SEQ ID NO: 664954
uucaccaccggacuccaac

SEQ ID NO: 664956 - RNA, 19 nt, Artificial Sequence
  Description of Artificial Sequence: Synthetic oligonucleotide
  Sense strand starting at position 2765 of SEQ ID NO: 585754
gaaucucgagccugcgaau

SEQ ID NO: 664957 - RNA, 19 nt, Artificial Sequence
  Description of Artificial Sequence: Synthetic oligonucleotide
  Antisense strand to SEQ ID NO: 664956
auucgcaggcucgagauuc

SEQ ID NO: 664958 - RNA, 19 nt, Artificial Sequence
  Description of Artificial Sequence: Synthetic oligonucleotide
  Sense strand starting at position 2930 of SEQ ID NO: 585754
cccucuuuguaggaagaga

SEQ ID NO: 664959 - RNA, 19 nt, Artificial Sequence
  Description of Artificial Sequence: Synthetic oligonucleotide
  Antisense strand to SEQ ID NO: 664958
ucucuuccuacaaagaggg

SEQ ID NO: 664960 - RNA, 19 nt, Artificial Sequence
  Description of Artificial Sequence: Synthetic oligonucleotide
  Sense strand starting at position 2944 of SEQ ID NO: 585754
agagauugaagccgagaca

SEQ ID NO: 664961 - RNA, 19 nt, Artificial Sequence
  Description of Artificial Sequence: Synthetic oligonucleotide
  Antisense strand to SEQ ID NO: 664960
ugucucggcuucaaucucu

SEQ ID NO: 664962 - RNA, 19 nt, Artificial Sequence
  Description of Artificial Sequence: Synthetic oligonucleotide
  Sense strand starting at position 3257 of SEQ ID NO: 585754
ucuugucauuccuagagaa

SEQ ID NO: 664963 - RNA, 19 nt, Artificial Sequence
  Description of Artificial Sequence: Synthetic oligonucleotide
  Antisense strand to SEQ ID NO: 664962
uucucuaggaaugacaaga

SEQ ID NO: 664964 - RNA, 19 nt, Artificial Sequence
  Description of Artificial Sequence: Synthetic oligonucleotide
  Sense strand starting at position 3273 of SEQ ID NO: 585754
gaacaagaaugagguguuu

SEQ ID NO: 664965 - RNA, 19 nt, Artificial Sequence
  Description of Artificial Sequence: Synthetic oligonucleotide
  Antisense strand to SEQ ID NO: 664964
aaacaccucauucuuguuc

SEQ ID NO: 664966 - RNA, 19 nt, Artificial Sequence
  Description of Artificial Sequence: Synthetic oligonucleotide
  Sense strand starting at position 3275 of SEQ ID NO: 585754
acaagaaugagguguuugu

SEQ ID NO: 664967 - RNA, 19 nt, Artificial Sequence
  Description of Artificial Sequence: Synthetic oligonucleotide
  Antisense strand to SEQ ID NO: 664966
acaaacaccucauucuugu

SEQ ID NO: 664968 - RNA, 19 nt, Artificial Sequence
  Description of Artificial Sequence: Synthetic oligonucleotide
  Sense strand starting at position 3279 of SEQ ID NO: 585754
gaaugagguguuuguuugu

SEQ ID NO: 664969 - RNA, 19 nt, Artificial Sequence
  Description of Artificial Sequence: Synthetic oligonucleotide
  Antisense strand to SEQ ID NO: 664968
acaaacaaacaccucauuc

SEQ ID NO: 664970 - RNA, 19 nt, Artificial Sequence
  Description of Artificial Sequence: Synthetic oligonucleotide
  Sense strand starting at position 3322 of SEQ ID NO: 585754
aacugucagcuuugugauu

SEQ ID NO: 664971 - RNA, 19 nt, Artificial Sequence
  Description of Artificial Sequence: Synthetic oligonucleotide
  Antisense strand to SEQ ID NO: 664970
aaucacaaagcugacaguu

SEQ ID NO: 664972 - RNA, 19 nt, Artificial Sequence
  Description of Artificial Sequence: Synthetic oligonucleotide
  Sense strand starting at position 3323 of SEQ ID NO: 585754
acugucagcuuugugauua

SEQ ID NO: 664973 - RNA, 19 nt, Artificial Sequence
  Description of Artificial Sequence: Synthetic oligonucleotide
  Antisense strand to SEQ ID NO: 664972
uaaucacaaagcugacagu

SEQ ID NO: 664974 - RNA, 19 nt, Artificial Sequence
  Description of Artificial Sequence: Synthetic oligonucleotide
  Sense strand starting at position 3430 of SEQ ID NO: 585754
cuaaguuucgugucugucu

SEQ ID NO: 664975 - RNA, 19 nt, Artificial Sequence
  Description of Artificial Sequence: Synthetic oligonucleotide
  Antisense strand to SEQ ID NO: 664974
agacagacacgaaacuuag

SEQ ID NO: 664976 - RNA, 19 nt, Artificial Sequence
  Description of Artificial Sequence: Synthetic oligonucleotide
  Sense strand starting at position 3503 of SEQ ID NO: 585754
uuccguggcuguuuauuua

SEQ ID NO: 664977 - RNA, 19 nt, Artificial Sequence
  Description of Artificial Sequence: Synthetic oligonucleotide
  Antisense strand to SEQ ID NO: 664976
uaaauaaacagccacggaa

SEQ ID NO: 664978 - RNA, 19 nt, Artificial Sequence
  Description of Artificial Sequence: Synthetic oligonucleotide
  Sense strand starting at position 3507 of SEQ ID NO: 585754
guggcuguuuauuuaugua

SEQ ID NO: 664979 - RNA, 19 nt, Artificial Sequence
  Description of Artificial Sequence: Synthetic oligonucleotide
  Antisense strand to SEQ ID NO: 664978
uacauaaauaaacagccac

SEQ ID NO: 664980 - RNA, 19 nt, Artificial Sequence
  Description of Artificial Sequence: Synthetic oligonucleotide
  Sense strand starting at position 3523 of SEQ ID NO: 585754
guauuuauuuccuagugug

SEQ ID NO: 664981 - RNA, 19 nt, Artificial Sequence
  Description of Artificial Sequence: Synthetic oligonucleotide
  Antisense strand to SEQ ID NO: 664980
cacacuaggaaauaaauac

SEQ ID NO: 664982 - RNA, 19 nt, Artificial Sequence
  Description of Artificial Sequence: Synthetic oligonucleotide
  Sense strand starting at position 3530 of SEQ ID NO: 585754
uuuccuaguguggguuuaa

SEQ ID NO: 664983 - RNA, 19 nt, Artificial Sequence
  Description of Artificial Sequence: Synthetic oligonucleotide
  Antisense strand to SEQ ID NO: 664982
uuaaacccacacuaggaaa

SEQ ID NO: 664984 - RNA, 19 nt, Artificial Sequence
  Description of Artificial Sequence: Synthetic oligonucleotide
  Sense strand starting at position 3531 of SEQ ID NO: 585754
uuccuaguguggguuuaaa

SEQ ID NO: 664985 - RNA, 19 nt, Artificial Sequence
  Description of Artificial Sequence: Synthetic oligonucleotide
  Antisense strand to SEQ ID NO: 664984
uuuaaacccacacuaggaa

SEQ ID NO: 664986 - RNA, 19 nt, Artificial Sequence
  Description of Artificial Sequence: Synthetic oligonucleotide
  Sense strand starting at position 3571 of SEQ ID NO: 585754
aaaguuguggucgagagga

SEQ ID NO: 664987 - RNA, 19 nt, Artificial Sequence
  Description of Artificial Sequence: Synthetic oligonucleotide
  Antisense strand to SEQ ID NO: 664986
uccucucgaccacaacuuu

SEQ ID NO: 664988 - RNA, 19 nt, Artificial Sequence
  Description of Artificial Sequence: Synthetic oligonucleotide
  Sense strand starting at position 3573 of SEQ ID NO: 585754
aguuguggucgagaggaug

SEQ ID NO: 664989 - RNA, 19 nt, Artificial Sequence
  Description of Artificial Sequence: Synthetic oligonucleotide
  Antisense strand to SEQ ID NO: 664988
cauccucucgaccacaacu

SEQ ID NO: 664990 - RNA, 19 nt, Artificial Sequence
  Description of Artificial Sequence: Synthetic oligonucleotide
  Sense strand starting at position 3646 of SEQ ID NO: 585754
ugggauuucuaaugauuag

SEQ ID NO: 664991 - RNA, 19 nt, Artificial Sequence
  Description of Artificial Sequence: Synthetic oligonucleotide
  Antisense strand to SEQ ID NO: 664990
cuaaucauuagaaauccca

SEQ ID NO: 664992 - RNA, 19 nt, Artificial Sequence
  Description of Artificial Sequence: Synthetic oligonucleotide
  Sense strand starting at position 3671 of SEQ ID NO: 585754
gugguuuauauagacacga

SEQ ID NO: 664993 - RNA, 19 nt, Artificial Sequence
  Description of Artificial Sequence: Synthetic oligonucleotide
  Antisense strand to SEQ ID NO: 664992
ucgugucuauauaaaccac

SEQ ID NO: 664994 - RNA, 19 nt, Artificial Sequence
  Description of Artificial Sequence: Synthetic oligonucleotide
  Sense strand starting at position 3673 of SEQ ID NO: 585754
gguuuauauagacacgacu

SEQ ID NO: 664995 - RNA, 19 nt, Artificial Sequence
  Description of Artificial Sequence: Synthetic oligonucleotide
  Antisense strand to SEQ ID NO: 664994
agucgugucuauauaaacc

SEQ ID NO: 664996 - RNA, 19 nt, Artificial Sequence
  Description of Artificial Sequence: Synthetic oligonucleotide
  Sense strand starting at position 3702 of SEQ ID NO: 585754
cgaucauuacgcugaugag

SEQ ID NO: 664997 - RNA, 19 nt, Artificial Sequence
  Description of Artificial Sequence: Synthetic oligonucleotide
  Antisense strand to SEQ ID NO: 664996
cucaucagcguaaugaucg

SEQ ID NO: 664998 - RNA, 19 nt, Artificial Sequence
  Description of Artificial Sequence: Synthetic oligonucleotide
  Sense strand starting at position 3703 of SEQ ID NO: 585754
gaucauuacgcugaugaga

SEQ ID NO: 664999 - RNA, 19 nt, Artificial Sequence
  Description of Artificial Sequence: Synthetic oligonucleotide
  Antisense strand to SEQ ID NO: 664998
ucucaucagcguaaugauc

SEQ ID NO: 665000 - RNA, 19 nt, Artificial Sequence
  Description of Artificial Sequence: Synthetic oligonucleotide
  Sense strand starting at position 3806 of SEQ ID NO: 585754
gggaaauccgcuugaggcu

SEQ ID NO: 665001 - RNA, 19 nt, Artificial Sequence
  Description of Artificial Sequence: Synthetic oligonucleotide
  Antisense strand to SEQ ID NO: 665000
agccucaagcggauuuccc

SEQ ID NO: 665002 - RNA, 19 nt, Artificial Sequence
  Description of Artificial Sequence: Synthetic oligonucleotide
  Sense strand starting at position 3807 of SEQ ID NO: 585754
ggaaauccgcuugaggcua

SEQ ID NO: 665003 - RNA, 19 nt, Artificial Sequence
  Description of Artificial Sequence: Synthetic oligonucleotide
  Antisense strand to SEQ ID NO: 665002
uagccucaagcggauuucc

SEQ ID NO: 665004 - RNA, 19 nt, Artificial Sequence
  Description of Artificial Sequence: Synthetic oligonucleotide
  Sense strand starting at position 3876 of SEQ ID NO: 585754
cuacuacguuucuugcuua

SEQ ID NO: 665005 - RNA, 19 nt, Artificial Sequence
  Description of Artificial Sequence: Synthetic oligonucleotide
  Antisense strand to SEQ ID NO: 665004
uaagcaagaaacguaguag

SEQ ID NO: 665006 - RNA, 19 nt, Artificial Sequence
  Description of Artificial Sequence: Synthetic oligonucleotide
  Sense strand starting at position 3879 of SEQ ID NO: 585754
cuacguuucuugcuuauua

SEQ ID NO: 665007 - RNA, 19 nt, Artificial Sequence
  Description of Artificial Sequence: Synthetic oligonucleotide
  Antisense strand to SEQ ID NO: 665006
uaauaagcaagaaacguag

SEQ ID NO: 665008 - RNA, 19 nt, Artificial Sequence
  Description of Artificial Sequence: Synthetic oligonucleotide
  Sense strand starting at position 3947 of SEQ ID NO: 585754
aucaucaguugccaaaguu

SEQ ID NO: 665009 - RNA, 19 nt, Artificial Sequence
  Description of Artificial Sequence: Synthetic oligonucleotide
  Antisense strand to SEQ ID NO: 665008
aacuuuggcaacugaugau

SEQ ID NO: 665010 - RNA, 19 nt, Artificial Sequence
  Description of Artificial Sequence: Synthetic oligonucleotide
  Sense strand starting at position 3968 of SEQ ID NO: 585754
aaagauuccuaguggagua

SEQ ID NO: 665011 - RNA, 19 nt, Artificial Sequence
  Description of Artificial Sequence: Synthetic oligonucleotide
  Antisense strand to SEQ ID NO: 665010
uacuccacuaggaaucuuu

SEQ ID NO: 665012 - RNA, 19 nt, Artificial Sequence
  Description of Artificial Sequence: Synthetic oligonucleotide
  Sense strand starting at position 7 of SEQ ID NO: 585755
ggcucagaauccucaagca

SEQ ID NO: 665013 - RNA, 19 nt, Artificial Sequence
  Description of Artificial Sequence: Synthetic oligonucleotide
  Antisense strand to SEQ ID NO: 665012
ugcuugaggauucugagcc

SEQ ID NO: 665014 - RNA, 19 nt, Artificial Sequence
  Description of Artificial Sequence: Synthetic oligonucleotide
  Sense strand starting at position 55 of SEQ ID NO: 585755
cgaacuauaccagagcugu

SEQ ID NO: 665015 - RNA, 19 nt, Artificial Sequence
  Description of Artificial Sequence: Synthetic oligonucleotide
  Antisense strand to SEQ ID NO: 665014
acagcucugguauaguucg

SEQ ID NO: 665016 - RNA, 19 nt, Artificial Sequence
  Description of Artificial Sequence: Synthetic oligonucleotide
  Sense strand starting at position 150 of SEQ ID NO: 585755
ugcuuauaugcauaggauu

SEQ ID NO: 665017 - RNA, 19 nt, Artificial Sequence
  Description of Artificial Sequence: Synthetic oligonucleotide
  Antisense strand to SEQ ID NO: 665016
aauccuaugcauauaagca

SEQ ID NO: 665018 - RNA, 19 nt, Artificial Sequence
  Description of Artificial Sequence: Synthetic oligonucleotide
  Sense strand starting at position 175 of SEQ ID NO: 585755
gggauagcuuauguccaaa

SEQ ID NO: 665019 - RNA, 19 nt, Artificial Sequence
  Description of Artificial Sequence: Synthetic oligonucleotide
  Antisense strand to SEQ ID NO: 665018
uuuggacauaagcuauccc

SEQ ID NO: 665020 - RNA, 19 nt, Artificial Sequence
  Description of Artificial Sequence: Synthetic oligonucleotide
  Sense strand starting at position 177 of SEQ ID NO: 585755
gauagcuuauguccaaaga

SEQ ID NO: 665021 - RNA, 19 nt, Artificial Sequence
  Description of Artificial Sequence: Synthetic oligonucleotide
  Antisense strand to SEQ ID NO: 665020
ucuuuggacauaagcuauc

SEQ ID NO: 665022 - RNA, 19 nt, Artificial Sequence
  Description of Artificial Sequence: Synthetic oligonucleotide
  Sense strand starting at position 178 of SEQ ID NO: 585755
auagcuuauguccaaagaa

SEQ ID NO: 665023 - RNA, 19 nt, Artificial Sequence
  Description of Artificial Sequence: Synthetic oligonucleotide
  Antisense strand to SEQ ID NO: 665022
uucuuuggacauaagcuau

SEQ ID NO: 665024 - RNA, 19 nt, Artificial Sequence
  Description of Artificial Sequence: Synthetic oligonucleotide
  Sense strand starting at position 710 of SEQ ID NO: 585755
agguucuacucacucauau

SEQ ID NO: 665025 - RNA, 19 nt, Artificial Sequence
  Description of Artificial Sequence: Synthetic oligonucleotide
  Antisense strand to SEQ ID NO: 665024
auaugagugaguagaaccu

SEQ ID NO: 665026 - RNA, 19 nt, Artificial Sequence
  Description of Artificial Sequence: Synthetic oligonucleotide
  Sense strand starting at position 731 of SEQ ID NO: 585755
gcuuuauuugaccgcuucu

SEQ ID NO: 665027 - RNA, 19 nt, Artificial Sequence
  Description of Artificial Sequence: Synthetic oligonucleotide
  Antisense strand to SEQ ID NO: 665026
agaagcggucaaauaaagc

SEQ ID NO: 665028 - RNA, 19 nt, Artificial Sequence
  Description of Artificial Sequence: Synthetic oligonucleotide
  Sense strand starting at position 803 of SEQ ID NO: 585755
cgaagcauggcuuaauaga

SEQ ID NO: 665029 - RNA, 19 nt, Artificial Sequence
  Description of Artificial Sequence: Synthetic oligonucleotide
  Antisense strand to SEQ ID NO: 665028
ucuauuaagccaugcuucg

SEQ ID NO: 665030 - RNA, 19 nt, Artificial Sequence
  Description of Artificial Sequence: Synthetic oligonucleotide
  Sense strand starting at position 819 of SEQ ID NO: 585755
agagaaaucucguccucua

SEQ ID NO: 665031 - RNA, 19 nt, Artificial Sequence
  Description of Artificial Sequence: Synthetic oligonucleotide
  Antisense strand to SEQ ID NO: 665030
uagaggacgagauuucucu

SEQ ID NO: 665032 - RNA, 19 nt, Artificial Sequence
  Description of Artificial Sequence: Synthetic oligonucleotide
  Sense strand starting at position 935 of SEQ ID NO: 585755
agucccauaugucuggaaa

SEQ ID NO: 665033 - RNA, 19 nt, Artificial Sequence
  Description of Artificial Sequence: Synthetic oligonucleotide
  Antisense strand to SEQ ID NO: 665032
uuuccagacauaugggacu

SEQ ID NO: 665034 - RNA, 19 nt, Artificial Sequence
  Description of Artificial Sequence: Synthetic oligonucleotide
  Sense strand starting at position 936 of SEQ ID NO: 585755
gucccauaugucuggaaag

SEQ ID NO: 665035 - RNA, 19 nt, Artificial Sequence
  Description of Artificial Sequence: Synthetic oligonucleotide
  Antisense strand to SEQ ID NO: 665034
cuuuccagacauaugggac

SEQ ID NO: 665036 - RNA, 19 nt, Artificial Sequence
  Description of Artificial Sequence: Synthetic oligonucleotide
  Sense strand starting at position 938 of SEQ ID NO: 585755
cccauaugucuggaaagug

SEQ ID NO: 665037 - RNA, 19 nt, Artificial Sequence
  Description of Artificial Sequence: Synthetic oligonucleotide
  Antisense strand to SEQ ID NO: 665036
cacuuuccagacauauggg

SEQ ID NO: 665038 - RNA, 19 nt, Artificial Sequence
  Description of Artificial Sequence: Synthetic oligonucleotide
  Sense strand starting at position 1088 of SEQ ID NO: 585755
gauagaugauguuuaaucu

SEQ ID NO: 665039 - RNA, 19 nt, Artificial Sequence
  Description of Artificial Sequence: Synthetic oligonucleotide
  Antisense strand to SEQ ID NO: 665038
agauuaaacaucaucuauc

SEQ ID NO: 665040 - RNA, 19 nt, Artificial Sequence
  Description of Artificial Sequence: Synthetic oligonucleotide
  Sense strand starting at position 1234 of SEQ ID NO: 585755
ggacuaugcuacucucaaa

SEQ ID NO: 665041 - RNA, 19 nt, Artificial Sequence
  Description of Artificial Sequence: Synthetic oligonucleotide
  Antisense strand to SEQ ID NO: 665040
uuugagaguagcauagucc

SEQ ID NO: 665042 - RNA, 19 nt, Artificial Sequence
  Description of Artificial Sequence: Synthetic oligonucleotide
  Sense strand starting at position 1552 of SEQ ID NO: 585755
gcugguaagugacugaaga

SEQ ID NO: 665043 - RNA, 19 nt, Artificial Sequence
  Description of Artificial Sequence: Synthetic oligonucleotide
  Antisense strand to SEQ ID NO: 665042
ucuucagucacuuaccagc

SEQ ID NO: 665044 - RNA, 19 nt, Artificial Sequence
  Description of Artificial Sequence: Synthetic oligonucleotide
  Sense strand starting at position 1553 of SEQ ID NO: 585755
cugguaagugacugaagaa

SEQ ID NO: 665045 - RNA, 19 nt, Artificial Sequence
  Description of Artificial Sequence: Synthetic oligonucleotide
  Antisense strand to SEQ ID NO: 665044
uucuucagucacuuaccag

SEQ ID NO: 665046 - RNA, 19 nt, Artificial Sequence
  Description of Artificial Sequence: Synthetic oligonucleotide
  Sense strand starting at position 1704 of SEQ ID NO: 585755
gggagucaccugugaagga

SEQ ID NO: 665047 - RNA, 19 nt, Artificial Sequence
  Description of Artificial Sequence: Synthetic oligonucleotide
  Antisense strand to SEQ ID NO: 665046
uccuucacaggugacuccc

SEQ ID NO: 665048 - RNA, 19 nt, Artificial Sequence
  Description of Artificial Sequence: Synthetic oligonucleotide
  Sense strand starting at position 2160 of SEQ ID NO: 585755
cgaugagucugggcugaaa

SEQ ID NO: 665049 - RNA, 19 nt, Artificial Sequence
  Description of Artificial Sequence: Synthetic oligonucleotide
  Antisense strand to SEQ ID NO: 665048
uuucagcccagacucaucg

SEQ ID NO: 665050 - RNA, 19 nt, Artificial Sequence
  Description of Artificial Sequence: Synthetic oligonucleotide
  Sense strand starting at position 2452 of SEQ ID NO: 585755
uauggaagggucggucuaa

SEQ ID NO: 665051 - RNA, 19 nt, Artificial Sequence
  Description of Artificial Sequence: Synthetic oligonucleotide
  Antisense strand to SEQ ID NO: 665050
uuagaccgacccuuccaua

SEQ ID NO: 665052 - RNA, 19 nt, Artificial Sequence
  Description of Artificial Sequence: Synthetic oligonucleotide
  Sense strand starting at position 2464 of SEQ ID NO: 585755
ggucuaacugcuuaauaag

SEQ ID NO: 665053 - RNA, 19 nt, Artificial Sequence
  Description of Artificial Sequence: Synthetic oligonucleotide
  Antisense strand to SEQ ID NO: 665052
cuuauuaagcaguuagacc

SEQ ID NO: 665054 - RNA, 19 nt, Artificial Sequence
  Description of Artificial Sequence: Synthetic oligonucleotide
  Sense strand starting at position 2592 of SEQ ID NO: 585755
aucucaagaugucugugau

SEQ ID NO: 665055 - RNA, 19 nt, Artificial Sequence
  Description of Artificial Sequence: Synthetic oligonucleotide
  Antisense strand to SEQ ID NO: 665054
aucacagacaucuugagau

SEQ ID NO: 665056 - RNA, 19 nt, Artificial Sequence
  Description of Artificial Sequence: Synthetic oligonucleotide
  Sense strand starting at position 2593 of SEQ ID NO: 585755
ucucaagaugucugugauu

SEQ ID NO: 665057 - RNA, 19 nt, Artificial Sequence
  Description of Artificial Sequence: Synthetic oligonucleotide
  Antisense strand to SEQ ID NO: 665056
aaucacagacaucuugaga

SEQ ID NO: 665058 - RNA, 19 nt, Artificial Sequence
  Description of Artificial Sequence: Synthetic oligonucleotide
  Sense strand starting at position 2606 of SEQ ID NO: 585755
gugauuguguauuugugaa

SEQ ID NO: 665059 - RNA, 19 nt, Artificial Sequence
  Description of Artificial Sequence: Synthetic oligonucleotide
  Antisense strand to SEQ ID NO: 665058
uucacaaauacacaaucac

SEQ ID NO: 665060 - RNA, 19 nt, Artificial Sequence
  Description of Artificial Sequence: Synthetic oligonucleotide
  Sense strand starting at position 2638 of SEQ ID NO: 585755
uguagaucucaguaauaac

SEQ ID NO: 665061 - RNA, 19 nt, Artificial Sequence
  Description of Artificial Sequence: Synthetic oligonucleotide
  Antisense strand to SEQ ID NO: 665060
guuauuacugagaucuaca

SEQ ID NO: 665062 - RNA, 19 nt, Artificial Sequence
  Description of Artificial Sequence: Synthetic oligonucleotide
  Sense strand starting at position 2847 of SEQ ID NO: 585755
caugguuagcuuuaugaaa

SEQ ID NO: 665063 - RNA, 19 nt, Artificial Sequence
  Description of Artificial Sequence: Synthetic oligonucleotide
  Antisense strand to SEQ ID NO: 665062
uuucauaaagcuaaccaug

SEQ ID NO: 665064 - RNA, 19 nt, Artificial Sequence
  Description of Artificial Sequence: Synthetic oligonucleotide
  Sense strand starting at position 3030 of SEQ ID NO: 585755
acugguauagugggaggaa

SEQ ID NO: 665065 - RNA, 19 nt, Artificial Sequence
  Description of Artificial Sequence: Synthetic oligonucleotide
  Antisense strand to SEQ ID NO: 665064
uuccucccacuauaccagu

SEQ ID NO: 665066 - RNA, 19 nt, Artificial Sequence
  Description of Artificial Sequence: Synthetic oligonucleotide
  Sense strand starting at position 3119 of SEQ ID NO: 585755
aggagugcugcuuaccuau

SEQ ID NO: 665067 - RNA, 19 nt, Artificial Sequence
  Description of Artificial Sequence: Synthetic oligonucleotide
  Antisense strand to SEQ ID NO: 665066
auagguaagcagcacuccu

SEQ ID NO: 665068 - RNA, 19 nt, Artificial Sequence
  Description of Artificial Sequence: Synthetic oligonucleotide
  Sense strand starting at position 3171 of SEQ ID NO: 585755
uacgguauuaaggguugau

SEQ ID NO: 665069 - RNA, 19 nt, Artificial Sequence
  Description of Artificial Sequence: Synthetic oligonucleotide
  Antisense strand to SEQ ID NO: 665068
aucaacccuuaauaccgua

SEQ ID NO: 665070 - RNA, 19 nt, Artificial Sequence
  Description of Artificial Sequence: Synthetic oligonucleotide
  Sense strand starting at position 3223 of SEQ ID NO: 585755
ggagucuccuaacuaugau

SEQ ID NO: 665071 - RNA, 19 nt, Artificial Sequence
  Description of Artificial Sequence: Synthetic oligonucleotide
  Antisense strand to SEQ ID NO: 665070
aucauaguuaggagacucc

SEQ ID NO: 665072 - RNA, 19 nt, Artificial Sequence
  Description of Artificial Sequence: Synthetic oligonucleotide
  Sense strand starting at position 3325 of SEQ ID NO: 585755
acugauuuauuaugaggaa

SEQ ID NO: 665073 - RNA, 19 nt, Artificial Sequence
  Description of Artificial Sequence: Synthetic oligonucleotide
  Antisense strand to SEQ ID NO: 665072
uuccucauaauaaaucagu

SEQ ID NO: 665074 - RNA, 19 nt, Artificial Sequence
  Description of Artificial Sequence: Synthetic oligonucleotide
  Sense strand starting at position 3326 of SEQ ID NO: 585755
cugauuuauuaugaggaaa

SEQ ID NO: 665075 - RNA, 19 nt, Artificial Sequence
  Description of Artificial Sequence: Synthetic oligonucleotide
  Antisense strand to SEQ ID NO: 665074
uuuccucauaauaaaucag

SEQ ID NO: 665076 - RNA, 19 nt, Artificial Sequence
  Description of Artificial Sequence: Synthetic oligonucleotide
  Sense strand starting at position 3328 of SEQ ID NO: 585755
gauuuauuaugaggaaaga

SEQ ID NO: 665077 - RNA, 19 nt, Artificial Sequence
  Description of Artificial Sequence: Synthetic oligonucleotide
  Antisense strand to SEQ ID NO: 665076
ucuuuccucauaauaaauc

SEQ ID NO: 665078 - RNA, 19 nt, Artificial Sequence
  Description of Artificial Sequence: Synthetic oligonucleotide
  Sense strand starting at position 3426 of SEQ ID NO: 585755
cgaaguucuguugaccaaa

SEQ ID NO: 665079 - RNA, 19 nt, Artificial Sequence
  Description of Artificial Sequence: Synthetic oligonucleotide
  Antisense strand to SEQ ID NO: 665078
uuuggucaacagaacuucg

SEQ ID NO: 665080 - RNA, 19 nt, Artificial Sequence
  Description of Artificial Sequence: Synthetic oligonucleotide
  Sense strand starting at position 3484 of SEQ ID NO: 585755
ggcauuacaucuuuaaaug

SEQ ID NO: 665081 - RNA, 19 nt, Artificial Sequence
  Description of Artificial Sequence: Synthetic oligonucleotide
  Antisense strand to SEQ ID NO: 665080
cauuuaaagauguaaugcc

SEQ ID NO: 665082 - RNA, 19 nt, Artificial Sequence
  Description of Artificial Sequence: Synthetic oligonucleotide
  Sense strand starting at position 3646 of SEQ ID NO: 585755
guugcaauccaguaaaugu

SEQ ID NO: 665083 - RNA, 19 nt, Artificial Sequence
  Description of Artificial Sequence: Synthetic oligonucleotide
  Antisense strand to SEQ ID NO: 665082
acauuuacuggauugcaac

SEQ ID NO: 665084 - RNA, 19 nt, Artificial Sequence
  Description of Artificial Sequence: Synthetic oligonucleotide
  Sense strand starting at position 3725 of SEQ ID NO: 585755
ccuuauguaucacuguaaa

SEQ ID NO: 665085 - RNA, 19 nt, Artificial Sequence
  Description of Artificial Sequence: Synthetic oligonucleotide
  Antisense strand to SEQ ID NO: 665084
uuuacagugauacauaagg

SEQ ID NO: 665086 - RNA, 19 nt, Artificial Sequence
  Description of Artificial Sequence: Synthetic oligonucleotide
  Sense strand starting at position 3760 of SEQ ID NO: 585755
cagaaugcucaagaguguu

SEQ ID NO: 665087 - RNA, 19 nt, Artificial Sequence
  Description of Artificial Sequence: Synthetic oligonucleotide
  Antisense strand to SEQ ID NO: 665086
aacacucuugagcauucug

SEQ ID NO: 665088 - RNA, 19 nt, Artificial Sequence
  Description of Artificial Sequence: Synthetic oligonucleotide
  Sense strand starting at position 3768 of SEQ ID NO: 585755
ucaagaguguuacuuugau

SEQ ID NO: 665089 - RNA, 19 nt, Artificial Sequence
  Description of Artificial Sequence: Synthetic oligonucleotide
  Antisense strand to SEQ ID NO: 665088
aucaaaguaacacucuuga

SEQ ID NO: 665090 - RNA, 19 nt, Artificial Sequence
  Description of Artificial Sequence: Synthetic oligonucleotide
  Sense strand starting at position 3795 of SEQ ID NO: 585755
uggcucuuguaaucaagaa

SEQ ID NO: 665091 - RNA, 19 nt, Artificial Sequence
  Description of Artificial Sequence: Synthetic oligonucleotide
  Antisense strand to SEQ ID NO: 665090
uucuugauuacaagagcca

SEQ ID NO: 665092 - RNA, 19 nt, Artificial Sequence
  Description of Artificial Sequence: Synthetic oligonucleotide
  Sense strand starting at position 55 of SEQ ID NO: 585756
gaggguuccauugaagugu

SEQ ID NO: 665093 - RNA, 19 nt, Artificial Sequence
  Description of Artificial Sequence: Synthetic oligonucleotide
  Antisense strand to SEQ ID NO: 665092
acacuucaauggaacccuc

SEQ ID NO: 665094 - RNA, 19 nt, Artificial Sequence
  Description of Artificial Sequence: Synthetic oligonucleotide
  Sense strand starting at position 105 of SEQ ID NO: 585756
accagaaagucuccucuga

SEQ ID NO: 665095 - RNA, 19 nt, Artificial Sequence
  Description of Artificial Sequence: Synthetic oligonucleotide
  Antisense strand to SEQ ID NO: 665094
ucagaggagacuuucuggu

SEQ ID NO: 665096 - RNA, 19 nt, Artificial Sequence
  Description of Artificial Sequence: Synthetic oligonucleotide
  Sense strand starting at position 109 of SEQ ID NO: 585756
gaaagucuccucugaggga

SEQ ID NO: 665097 - RNA, 19 nt, Artificial Sequence
  Description of Artificial Sequence: Synthetic oligonucleotide
  Antisense strand to SEQ ID NO: 665096
ucccucagaggagacuuuc

SEQ ID NO: 665098 - RNA, 19 nt, Artificial Sequence
  Description of Artificial Sequence: Synthetic oligonucleotide
  Sense strand starting at position 113 of SEQ ID NO: 585756
gucuccucugagggaauaa

SEQ ID NO: 665099 - RNA, 19 nt, Artificial Sequence
  Description of Artificial Sequence: Synthetic oligonucleotide
  Antisense strand to SEQ ID NO: 665098
uuauucccucagaggagac

SEQ ID NO: 665100 - RNA, 19 nt, Artificial Sequence
  Description of Artificial Sequence: Synthetic oligonucleotide
  Sense strand starting at position 203 of SEQ ID NO: 585756
augcuaauguugcuggaga

SEQ ID NO: 665101 - RNA, 19 nt, Artificial Sequence
  Description of Artificial Sequence: Synthetic oligonucleotide
  Antisense strand to SEQ ID NO: 665100
ucuccagcaacauuagcau

SEQ ID NO: 665102 - RNA, 19 nt, Artificial Sequence
  Description of Artificial Sequence: Synthetic oligonucleotide
  Sense strand starting at position 221 of SEQ ID NO: 585756
auaaauggaucagaagaug

SEQ ID NO: 665103 - RNA, 19 nt, Artificial Sequence
  Description of Artificial Sequence: Synthetic oligonucleotide
  Antisense strand to SEQ ID NO: 665102
caucuucugauccauuuau

SEQ ID NO: 665104 - RNA, 19 nt, Artificial Sequence
  Description of Artificial Sequence: Synthetic oligonucleotide
  Sense strand starting at position 282 of SEQ ID NO: 585756
uugcuuucuguguuauggu

SEQ ID NO: 665105 - RNA, 19 nt, Artificial Sequence
  Description of Artificial Sequence: Synthetic oligonucleotide
  Antisense strand to SEQ ID NO: 665104
accauaacacagaaagcaa

SEQ ID NO: 665106 - RNA, 19 nt, Artificial Sequence
  Description of Artificial Sequence: Synthetic oligonucleotide
  Sense strand starting at position 338 of SEQ ID NO: 585756
aguuauguuacaggagaua

SEQ ID NO: 665107 - RNA, 19 nt, Artificial Sequence
  Description of Artificial Sequence: Synthetic oligonucleotide
  Antisense strand to SEQ ID NO: 665106
uaucuccuguaacauaacu

SEQ ID NO: 665108 - RNA, 19 nt, Artificial Sequence
  Description of Artificial Sequence: Synthetic oligonucleotide
  Sense strand starting at position 383 of SEQ ID NO: 585756
ugugaaagguaguccaacu

SEQ ID NO: 665109 - RNA, 19 nt, Artificial Sequence
  Description of Artificial Sequence: Synthetic oligonucleotide
  Antisense strand to SEQ ID NO: 665108
aguuggacuaccuuucaca

SEQ ID NO: 665110 - RNA, 19 nt, Artificial Sequence
  Description of Artificial Sequence: Synthetic oligonucleotide
  Sense strand starting at position 436 of SEQ ID NO: 585756
gcaagauagcgucaauaaa

SEQ ID NO: 665111 - RNA, 19 nt, Artificial Sequence
  Description of Artificial Sequence: Synthetic oligonucleotide
  Antisense strand to SEQ ID NO: 665110
uuuauugacgcuaucuugc

SEQ ID NO: 665112 - RNA, 19 nt, Artificial Sequence
  Description of Artificial Sequence: Synthetic oligonucleotide
  Sense strand starting at position 476 of SEQ ID NO: 585756
aaagguguauauguuuaca

SEQ ID NO: 665113 - RNA, 19 nt, Artificial Sequence
  Description of Artificial Sequence: Synthetic oligonucleotide
  Antisense strand to SEQ ID NO: 665112
uguaaacauauacaccuuu

SEQ ID NO: 665114 - RNA, 19 nt, Artificial Sequence
  Description of Artificial Sequence: Synthetic oligonucleotide
  Sense strand starting at position 478 of SEQ ID NO: 585756
agguguauauguuuacaua

SEQ ID NO: 665115 - RNA, 19 nt, Artificial Sequence
  Description of Artificial Sequence: Synthetic oligonucleotide
  Antisense strand to SEQ ID NO: 665114
uauguaaacauauacaccu

SEQ ID NO: 665116 - RNA, 19 nt, Artificial Sequence
  Description of Artificial Sequence: Synthetic oligonucleotide
  Sense strand starting at position 479 of SEQ ID NO: 585756
gguguauauguuuacauaa

SEQ ID NO: 665117 - RNA, 19 nt, Artificial Sequence
  Description of Artificial Sequence: Synthetic oligonucleotide
  Antisense strand to SEQ ID NO: 665116
uuauguaaacauauacacc

SEQ ID NO: 665118 - RNA, 19 nt, Artificial Sequence
  Description of Artificial Sequence: Synthetic oligonucleotide
  Sense strand starting at position 527 of SEQ ID NO: 585756
uagagcauuccguaucuuu

SEQ ID NO: 665119 - RNA, 19 nt, Artificial Sequence
  Description of Artificial Sequence: Synthetic oligonucleotide
  Antisense strand to SEQ ID NO: 665118
aaagauacggaaugcucua

SEQ ID NO: 665120 - RNA, 19 nt, Artificial Sequence
  Description of Artificial Sequence: Synthetic oligonucleotide
  Sense strand starting at position 592 of SEQ ID NO: 585756
gaaagcucauguucuagau

SEQ ID NO: 665121 - RNA, 19 nt, Artificial Sequence
  Description of Artificial Sequence: Synthetic oligonucleotide
  Antisense strand to SEQ ID NO: 665120
aucuagaacaugagcuuuc

SEQ ID NO: 665122 - RNA, 19 nt, Artificial Sequence
  Description of Artificial Sequence: Synthetic oligonucleotide
  Sense strand starting at position 1229 of SEQ ID NO: 585756
gccugaauucugggaaagg

SEQ ID NO: 665123 - RNA, 19 nt, Artificial Sequence
  Description of Artificial Sequence: Synthetic oligonucleotide
  Antisense strand to SEQ ID NO: 665122
ccuuucccagaauucaggc

SEQ ID NO: 665124 - RNA, 19 nt, Artificial Sequence
  Description of Artificial Sequence: Synthetic oligonucleotide
  Sense strand starting at position 1497 of SEQ ID NO: 585756
gggugucucagaggucauu

SEQ ID NO: 665125 - RNA, 19 nt, Artificial Sequence
  Description of Artificial Sequence: Synthetic oligonucleotide
  Antisense strand to SEQ ID NO: 665124
aaugaccucugagacaccc

SEQ ID NO: 665126 - RNA, 19 nt, Artificial Sequence
  Description of Artificial Sequence: Synthetic oligonucleotide
  Sense strand starting at position 1500 of SEQ ID NO: 585756
ugucucagaggucauuaaa

SEQ ID NO: 665127 - RNA, 19 nt, Artificial Sequence
  Description of Artificial Sequence: Synthetic oligonucleotide
  Antisense strand to SEQ ID NO: 665126
uuuaaugaccucugagaca

SEQ ID NO: 665128 - RNA, 19 nt, Artificial Sequence
  Description of Artificial Sequence: Synthetic oligonucleotide
  Sense strand starting at position 1573 of SEQ ID NO: 585756
ggagaaggcuucccagauu

SEQ ID NO: 665129 - RNA, 19 nt, Artificial Sequence
  Description of Artificial Sequence: Synthetic oligonucleotide
  Antisense strand to SEQ ID NO: 665128
aaucugggaagccuucucc

SEQ ID NO: 665130 - RNA, 19 nt, Artificial Sequence
  Description of Artificial Sequence: Synthetic oligonucleotide
  Sense strand starting at position 2121 of SEQ ID NO: 585756
ggcuuccugaccgagguaa

SEQ ID NO: 665131 - RNA, 19 nt, Artificial Sequence
  Description of Artificial Sequence: Synthetic oligonucleotide
  Antisense strand to SEQ ID NO: 665130
uuaccucggucaggaagcc

SEQ ID NO: 665132 - RNA, 19 nt, Artificial Sequence
  Description of Artificial Sequence: Synthetic oligonucleotide
  Sense strand starting at position 2526 of SEQ ID NO: 585756
aaggcauucgcagaggcau

SEQ ID NO: 665133 - RNA, 19 nt, Artificial Sequence
  Description of Artificial Sequence: Synthetic oligonucleotide
  Antisense strand to SEQ ID NO: 665132
augccucugcgaaugccuu

SEQ ID NO: 665134 - RNA, 19 nt, Artificial Sequence
  Description of Artificial Sequence: Synthetic oligonucleotide
  Sense strand starting at position 2534 of SEQ ID NO: 585756
cgcagaggcauugaaagua

SEQ ID NO: 665135 - RNA, 19 nt, Artificial Sequence
  Description of Artificial Sequence: Synthetic oligonucleotide
  Antisense strand to SEQ ID NO: 665134
uacuuucaaugccucugcg

SEQ ID NO: 665136 - RNA, 19 nt, Artificial Sequence
  Description of Artificial Sequence: Synthetic oligonucleotide
  Sense strand starting at position 2626 of SEQ ID NO: 585756
aguuaacaggacugguuua

SEQ ID NO: 665137 - RNA, 19 nt, Artificial Sequence
  Description of Artificial Sequence: Synthetic oligonucleotide
  Antisense strand to SEQ ID NO: 665136
uaaaccaguccuguuaacu

SEQ ID NO: 665138 - RNA, 19 nt, Artificial Sequence
  Description of Artificial Sequence: Synthetic oligonucleotide
  Sense strand starting at position 2716 of SEQ ID NO: 585756
gagaucugaucacugucuu

SEQ ID NO: 665139 - RNA, 19 nt, Artificial Sequence
  Description of Artificial Sequence: Synthetic oligonucleotide
  Antisense strand to SEQ ID NO: 665138
aagacagugaucagaucuc

SEQ ID NO: 665140 - RNA, 19 nt, Artificial Sequence
  Description of Artificial Sequence: Synthetic oligonucleotide
  Sense strand starting at position 2720 of SEQ ID NO: 585756
ucugaucacugucuugaac

SEQ ID NO: 665141 - RNA, 19 nt, Artificial Sequence
  Description of Artificial Sequence: Synthetic oligonucleotide
  Antisense strand to SEQ ID NO: 665140
guucaagacagugaucaga

SEQ ID NO: 665142 - RNA, 19 nt, Artificial Sequence
  Description of Artificial Sequence: Synthetic oligonucleotide
  Sense strand starting at position 2879 of SEQ ID NO: 585756
uccucaucucugggcuaau

SEQ ID NO: 665143 - RNA, 19 nt, Artificial Sequence
  Description of Artificial Sequence: Synthetic oligonucleotide
  Antisense strand to SEQ ID NO: 665142
auuagcccagagaugagga

SEQ ID NO: 665144 - RNA, 19 nt, Artificial Sequence
  Description of Artificial Sequence: Synthetic oligonucleotide
  Sense strand starting at position 2880 of SEQ ID NO: 585756
ccucaucucugggcuaauu

SEQ ID NO: 665145 - RNA, 19 nt, Artificial Sequence
  Description of Artificial Sequence: Synthetic oligonucleotide
  Antisense strand to SEQ ID NO: 665144
aauuagcccagagaugagg

SEQ ID NO: 665146 - RNA, 19 nt, Artificial Sequence
  Description of Artificial Sequence: Synthetic oligonucleotide
  Sense strand starting at position 2974 of SEQ ID NO: 585756
guuccacuuaaugggagua

SEQ ID NO: 665147 - RNA, 19 nt, Artificial Sequence
  Description of Artificial Sequence: Synthetic oligonucleotide
  Antisense strand to SEQ ID NO: 665146
uacucccauuaaguggaac

SEQ ID NO: 665148 - RNA, 19 nt, Artificial Sequence
  Description of Artificial Sequence: Synthetic oligonucleotide
  Sense strand starting at position 3004 of SEQ ID NO: 585756
acaguauuagugggcuaag

SEQ ID NO: 665149 - RNA, 19 nt, Artificial Sequence
  Description of Artificial Sequence: Synthetic oligonucleotide
  Antisense strand to SEQ ID NO: 665148
cuuagcccacuaauacugu

SEQ ID NO: 665150 - RNA, 19 nt, Artificial Sequence
  Description of Artificial Sequence: Synthetic oligonucleotide
  Sense strand starting at position 3685 of SEQ ID NO: 585756
uuagaaggguguccugauu

SEQ ID NO: 665151 - RNA, 19 nt, Artificial Sequence
  Description of Artificial Sequence: Synthetic oligonucleotide
  Antisense strand to SEQ ID NO: 665150
aaucaggacacccuucuaa

SEQ ID NO: 665152 - RNA, 19 nt, Artificial Sequence
  Description of Artificial Sequence: Synthetic oligonucleotide
  Sense strand starting at position 3727 of SEQ ID NO: 585756
cuggguagucuuggagaag

SEQ ID NO: 665153 - RNA, 19 nt, Artificial Sequence
  Description of Artificial Sequence: Synthetic oligonucleotide
  Antisense strand to SEQ ID NO: 665152
cuucuccaagacuacccag

SEQ ID NO: 665154 - RNA, 19 nt, Artificial Sequence
  Description of Artificial Sequence: Synthetic oligonucleotide
  Sense strand starting at position 3770 of SEQ ID NO: 585756
uuaagaauaugucucugua

SEQ ID NO: 665155 - RNA, 19 nt, Artificial Sequence
  Description of Artificial Sequence: Synthetic oligonucleotide
  Antisense strand to SEQ ID NO: 665154
uacagagacauauucuuaa

SEQ ID NO: 665156 - RNA, 19 nt, Artificial Sequence
  Description of Artificial Sequence: Synthetic oligonucleotide
  Sense strand starting at position 3772 of SEQ ID NO: 585756
aagaauaugucucuguagu

SEQ ID NO: 665157 - RNA, 19 nt, Artificial Sequence
  Description of Artificial Sequence: Synthetic oligonucleotide
  Antisense strand to SEQ ID NO: 665156
acuacagagacauauucuu

SEQ ID NO: 665158 - RNA, 19 nt, Artificial Sequence
  Description of Artificial Sequence: Synthetic oligonucleotide
  Sense strand starting at position 3780 of SEQ ID NO: 585756
gucucuguaguuugggaga

SEQ ID NO: 665159 - RNA, 19 nt, Artificial Sequence
  Description of Artificial Sequence: Synthetic oligonucleotide
  Antisense strand to SEQ ID NO: 665158
ucucccaaacuacagagac

SEQ ID NO: 665160 - RNA, 19 nt, Artificial Sequence
  Description of Artificial Sequence: Synthetic oligonucleotide
  Sense strand starting at position 3933 of SEQ ID NO: 585756
augaaaugaucuuugagcu

SEQ ID NO: 665161 - RNA, 19 nt, Artificial Sequence
  Description of Artificial Sequence: Synthetic oligonucleotide
  Antisense strand to SEQ ID NO: 665160
agcucaaagaucauuucau

SEQ ID NO: 665162 - RNA, 19 nt, Artificial Sequence
  Description of Artificial Sequence: Synthetic oligonucleotide
  Sense strand starting at position 3934 of SEQ ID NO: 585756
ugaaaugaucuuugagcuc

SEQ ID NO: 665163 - RNA, 19 nt, Artificial Sequence
  Description of Artificial Sequence: Synthetic oligonucleotide
  Antisense strand to SEQ ID NO: 665162
gagcucaaagaucauuuca

SEQ ID NO: 665164 - RNA, 19 nt, Artificial Sequence
  Description of Artificial Sequence: Synthetic oligonucleotide
  Sense strand starting at position 3940 of SEQ ID NO: 585756
gaucuuugagcucauugga

SEQ ID NO: 665165 - RNA, 19 nt, Artificial Sequence
  Description of Artificial Sequence: Synthetic oligonucleotide
  Antisense strand to SEQ ID NO: 665164
uccaaugagcucaaagauc

SEQ ID NO: 665166 - RNA, 19 nt, Artificial Sequence
  Description of Artificial Sequence: Synthetic oligonucleotide
  Sense strand starting at position 3956 of SEQ ID NO: 585756
ggagucucugaauaggugu

SEQ ID NO: 665167 - RNA, 19 nt, Artificial Sequence
  Description of Artificial Sequence: Synthetic oligonucleotide
  Antisense strand to SEQ ID NO: 665166
acaccuauucagagacucc

SEQ ID NO: 665168 - RNA, 19 nt, Artificial Sequence
  Description of Artificial Sequence: Synthetic oligonucleotide
  Sense strand starting at position 3958 of SEQ ID NO: 585756
agucucugaauagguguaa

SEQ ID NO: 665169 - RNA, 19 nt, Artificial Sequence
  Description of Artificial Sequence: Synthetic oligonucleotide
  Antisense strand to SEQ ID NO: 665168
uuacaccuauucagagacu

SEQ ID NO: 665170 - RNA, 19 nt, Artificial Sequence
  Description of Artificial Sequence: Synthetic oligonucleotide
  Sense strand starting at position 3959 of SEQ ID NO: 585756
gucucugaauagguguaaa

SEQ ID NO: 665171 - RNA, 19 nt, Artificial Sequence
  Description of Artificial Sequence: Synthetic oligonucleotide
  Antisense strand to SEQ ID NO: 665170
uuuacaccuauucagagac

SEQ ID NO: 665172 - RNA, 19 nt, Artificial Sequence
  Description of Artificial Sequence: Synthetic oligonucleotide
  Sense strand starting at position 54 of SEQ ID NO: 585757
ucaagaauaucagaauuag

SEQ ID NO: 665173 - RNA, 19 nt, Artificial Sequence
  Description of Artificial Sequence: Synthetic oligonucleotide
  Antisense strand to SEQ ID NO: 665172
cuaauucugauauucuuga

SEQ ID NO: 665174 - RNA, 19 nt, Artificial Sequence
  Description of Artificial Sequence: Synthetic oligonucleotide
  Sense strand starting at position 287 of SEQ ID NO: 585757
ggaagcaugcacugaaaga

SEQ ID NO: 665175 - RNA, 19 nt, Artificial Sequence
  Description of Artificial Sequence: Synthetic oligonucleotide
  Antisense strand to SEQ ID NO: 665174
ucuuucagugcaugcuucc

SEQ ID NO: 665176 - RNA, 19 nt, Artificial Sequence
  Description of Artificial Sequence: Synthetic oligonucleotide
  Sense strand starting at position 446 of SEQ ID NO: 585757
ggcaguaaguuggucacaa

SEQ ID NO: 665177 - RNA, 19 nt, Artificial Sequence
  Description of Artificial Sequence: Synthetic oligonucleotide
  Antisense strand to SEQ ID NO: 665176
uugugaccaacuuacugcc

SEQ ID NO: 665178 - RNA, 19 nt, Artificial Sequence
  Description of Artificial Sequence: Synthetic oligonucleotide
  Sense strand starting at position 447 of SEQ ID NO: 585757
gcaguaaguuggucacaac

SEQ ID NO: 665179 - RNA, 19 nt, Artificial Sequence
  Description of Artificial Sequence: Synthetic oligonucleotide
  Antisense strand to SEQ ID NO: 665178
guugugaccaacuuacugc

SEQ ID NO: 665180 - RNA, 19 nt, Artificial Sequence
  Description of Artificial Sequence: Synthetic oligonucleotide
  Sense strand starting at position 617 of SEQ ID NO: 585757
aagggauggagcuguugaa

SEQ ID NO: 665181 - RNA, 19 nt, Artificial Sequence
  Description of Artificial Sequence: Synthetic oligonucleotide
  Antisense strand to SEQ ID NO: 665180
uucaacagcuccaucccuu

SEQ ID NO: 665182 - RNA, 19 nt, Artificial Sequence
  Description of Artificial Sequence: Synthetic oligonucleotide
  Sense strand starting at position 695 of SEQ ID NO: 585757
ggaggagcugucugggcuu

SEQ ID NO: 665183 - RNA, 19 nt, Artificial Sequence
  Description of Artificial Sequence: Synthetic oligonucleotide
  Antisense strand to SEQ ID NO: 665182
aagcccagacagcuccucc

SEQ ID NO: 665184 - RNA, 19 nt, Artificial Sequence
  Description of Artificial Sequence: Synthetic oligonucleotide
  Sense strand starting at position 979 of SEQ ID NO: 585757
ugcuauauuugacuggcua

SEQ ID NO: 665185 - RNA, 19 nt, Artificial Sequence
  Description of Artificial Sequence: Synthetic oligonucleotide
  Antisense strand to SEQ ID NO: 665184
uagccagucaaauauagca

SEQ ID NO: 665186 - RNA, 19 nt, Artificial Sequence
  Description of Artificial Sequence: Synthetic oligonucleotide
  Sense strand starting at position 1012 of SEQ ID NO: 585757
cagcguaacuccucauugu

SEQ ID NO: 665187 - RNA, 19 nt, Artificial Sequence
  Description of Artificial Sequence: Synthetic oligonucleotide
  Antisense strand to SEQ ID NO: 665186
acaaugaggaguuacgcug

SEQ ID NO: 665188 - RNA, 19 nt, Artificial Sequence
  Description of Artificial Sequence: Synthetic oligonucleotide
  Sense strand starting at position 1022 of SEQ ID NO: 585757
ccucauuguggugagagga

SEQ ID NO: 665189 - RNA, 19 nt, Artificial Sequence
  Description of Artificial Sequence: Synthetic oligonucleotide
  Antisense strand to SEQ ID NO: 665188
uccucucaccacaaugagg

SEQ ID NO: 665190 - RNA, 19 nt, Artificial Sequence
  Description of Artificial Sequence: Synthetic oligonucleotide
  Sense strand starting at position 1101 of SEQ ID NO: 585757
gaaugaauaccaggucauc

SEQ ID NO: 665191 - RNA, 19 nt, Artificial Sequence
  Description of Artificial Sequence: Synthetic oligonucleotide
  Antisense strand to SEQ ID NO: 665190
gaugaccugguauucauuc

SEQ ID NO: 665192 - RNA, 19 nt, Artificial Sequence
  Description of Artificial Sequence: Synthetic oligonucleotide
  Sense strand starting at position 1176 of SEQ ID NO: 585757
cucuauucccagcguaaag

SEQ ID NO: 665193 - RNA, 19 nt, Artificial Sequence
  Description of Artificial Sequence: Synthetic oligonucleotide
  Antisense strand to SEQ ID NO: 665192
cuuuacgcugggaauagag

SEQ ID NO: 665194 - RNA, 19 nt, Artificial Sequence
  Description of Artificial Sequence: Synthetic oligonucleotide
  Sense strand starting at position 1252 of SEQ ID NO: 585757
gcaggaucugccuguaaac

SEQ ID NO: 665195 - RNA, 19 nt, Artificial Sequence
  Description of Artificial Sequence: Synthetic oligonucleotide
  Antisense strand to SEQ ID NO: 665194
guuuacaggcagauccugc

SEQ ID NO: 665196 - RNA, 19 nt, Artificial Sequence
  Description of Artificial Sequence: Synthetic oligonucleotide
  Sense strand starting at position 1271 of SEQ ID NO: 585757
gcccaaaguccugagguuu

SEQ ID NO: 665197 - RNA, 19 nt, Artificial Sequence
  Description of Artificial Sequence: Synthetic oligonucleotide
  Antisense strand to SEQ ID NO: 665196
aaaccucaggacuuugggc

SEQ ID NO: 665198 - RNA, 19 nt, Artificial Sequence
  Description of Artificial Sequence: Synthetic oligonucleotide
  Sense strand starting at position 1283 of SEQ ID NO: 585757
gagguuuaagaggaaucgu

SEQ ID NO: 665199 - RNA, 19 nt, Artificial Sequence
  Description of Artificial Sequence: Synthetic oligonucleotide
  Antisense strand to SEQ ID NO: 665198
acgauuccucuuaaaccuc

SEQ ID NO: 665200 - RNA, 19 nt, Artificial Sequence
  Description of Artificial Sequence: Synthetic oligonucleotide
  Sense strand starting at position 1775 of SEQ ID NO: 585757
agacaugaucccuggcuga

SEQ ID NO: 665201 - RNA, 19 nt, Artificial Sequence
  Description of Artificial Sequence: Synthetic oligonucleotide
  Antisense strand to SEQ ID NO: 665200
ucagccagggaucaugucu

SEQ ID NO: 665202 - RNA, 19 nt, Artificial Sequence
  Description of Artificial Sequence: Synthetic oligonucleotide
  Sense strand starting at position 1828 of SEQ ID NO: 585757
aaggauugaucggaggauu

SEQ ID NO: 665203 - RNA, 19 nt, Artificial Sequence
  Description of Artificial Sequence: Synthetic oligonucleotide
  Antisense strand to SEQ ID NO: 665202
aauccuccgaucaauccuu

SEQ ID NO: 665204 - RNA, 19 nt, Artificial Sequence
  Description of Artificial Sequence: Synthetic oligonucleotide
  Sense strand starting at position 1873 of SEQ ID NO: 585757
gaaagacucuggccuggau

SEQ ID NO: 665205 - RNA, 19 nt, Artificial Sequence
  Description of Artificial Sequence: Synthetic oligonucleotide
  Antisense strand to SEQ ID NO: 665204
auccaggccagagucuuuc

SEQ ID NO: 665206 - RNA, 19 nt, Artificial Sequence
  Description of Artificial Sequence: Synthetic oligonucleotide
  Sense strand starting at position 1885 of SEQ ID NO: 585757
ccuggauugggucgaauua

SEQ ID NO: 665207 - RNA, 19 nt, Artificial Sequence
  Description of Artificial Sequence: Synthetic oligonucleotide
  Antisense strand to SEQ ID NO: 665206
uaauucgacccaauccagg

SEQ ID NO: 665208 - RNA, 19 nt, Artificial Sequence
  Description of Artificial Sequence: Synthetic oligonucleotide
  Sense strand starting at position 1886 of SEQ ID NO: 585757
cuggauugggucgaauuaa

SEQ ID NO: 665209 - RNA, 19 nt, Artificial Sequence
  Description of Artificial Sequence: Synthetic oligonucleotide
  Antisense strand to SEQ ID NO: 665208
uuaauucgacccaauccag

SEQ ID NO: 665210 - RNA, 19 nt, Artificial Sequence
  Description of Artificial Sequence: Synthetic oligonucleotide
  Sense strand starting at position 1898 of SEQ ID NO: 585757
gaauuaagcccgucgcucu

SEQ ID NO: 665211 - RNA, 19 nt, Artificial Sequence
  Description of Artificial Sequence: Synthetic oligonucleotide
  Antisense strand to SEQ ID NO: 665210
agagcgacgggcuuaauuc

SEQ ID NO: 665212 - RNA, 19 nt, Artificial Sequence
  Description of Artificial Sequence: Synthetic oligonucleotide
  Sense strand starting at position 1911 of SEQ ID NO: 585757
cgcucugcucaguaccaaa

SEQ ID NO: 665213 - RNA, 19 nt, Artificial Sequence
  Description of Artificial Sequence: Synthetic oligonucleotide
  Antisense strand to SEQ ID NO: 665212
uuugguacugagcagagcg

SEQ ID NO: 665214 - RNA, 19 nt, Artificial Sequence
  Description of Artificial Sequence: Synthetic oligonucleotide
  Sense strand starting at position 1947 of SEQ ID NO: 585757
gcagccaucuuuguacaga

SEQ ID NO: 665215 - RNA, 19 nt, Artificial Sequence
  Description of Artificial Sequence: Synthetic oligonucleotide
  Antisense strand to SEQ ID NO: 665214
ucuguacaaagauggcugc

SEQ ID NO: 665216 - RNA, 19 nt, Artificial Sequence
  Description of Artificial Sequence: Synthetic oligonucleotide
  Sense strand starting at position 1967 of SEQ ID NO: 585757
gggaagucucggcgcgagu

SEQ ID NO: 665217 - RNA, 19 nt, Artificial Sequence
  Description of Artificial Sequence: Synthetic oligonucleotide
  Antisense strand to SEQ ID NO: 665216
acucgcgccgagacuuccc

SEQ ID NO: 665218 - RNA, 19 nt, Artificial Sequence
  Description of Artificial Sequence: Synthetic oligonucleotide
  Sense strand starting at position 1968 of SEQ ID NO: 585757
ggaagucucggcgcgaguu

SEQ ID NO: 665219 - RNA, 19 nt, Artificial Sequence
  Description of Artificial Sequence: Synthetic oligonucleotide
  Antisense strand to SEQ ID NO: 665218
aacucgcgccgagacuucc

SEQ ID NO: 665220 - RNA, 19 nt, Artificial Sequence
  Description of Artificial Sequence: Synthetic oligonucleotide
  Sense strand starting at position 2089 of SEQ ID NO: 585757
gugucagugcaggauggau

SEQ ID NO: 665221 - RNA, 19 nt, Artificial Sequence
  Description of Artificial Sequence: Synthetic oligonucleotide
  Antisense strand to SEQ ID NO: 665220
auccauccugcacugacac

SEQ ID NO: 665222 - RNA, 19 nt, Artificial Sequence
  Description of Artificial Sequence: Synthetic oligonucleotide
  Sense strand starting at position 2103 of SEQ ID NO: 585757
uggauucgucgcuaccgga

SEQ ID NO: 665223 - RNA, 19 nt, Artificial Sequence
  Description of Artificial Sequence: Synthetic oligonucleotide
  Antisense strand to SEQ ID NO: 665222
uccgguagcgacgaaucca

SEQ ID NO: 665224 - RNA, 19 nt, Artificial Sequence
  Description of Artificial Sequence: Synthetic oligonucleotide
  Sense strand starting at position 2116 of SEQ ID NO: 585757
accggagugccgccauauu

SEQ ID NO: 665225 - RNA, 19 nt, Artificial Sequence
  Description of Artificial Sequence: Synthetic oligonucleotide
  Antisense strand to SEQ ID NO: 665224
aauauggcggcacuccggu

SEQ ID NO: 665226 - RNA, 19 nt, Artificial Sequence
  Description of Artificial Sequence: Synthetic oligonucleotide
  Sense strand starting at position 2953 of SEQ ID NO: 585757
gggcuuaugugagucucca

SEQ ID NO: 665227 - RNA, 19 nt, Artificial Sequence
  Description of Artificial Sequence: Synthetic oligonucleotide
  Antisense strand to SEQ ID NO: 665226
uggagacucacauaagccc

SEQ ID NO: 665228 - RNA, 19 nt, Artificial Sequence
  Description of Artificial Sequence: Synthetic oligonucleotide
  Sense strand starting at position 2994 of SEQ ID NO: 585757
gguucuggauuguugggaa

SEQ ID NO: 665229 - RNA, 19 nt, Artificial Sequence
  Description of Artificial Sequence: Synthetic oligonucleotide
  Antisense strand to SEQ ID NO: 665228
uucccaacaauccagaacc

SEQ ID NO: 665230 - RNA, 19 nt, Artificial Sequence
  Description of Artificial Sequence: Synthetic oligonucleotide
  Sense strand starting at position 2997 of SEQ ID NO: 585757
ucuggauuguugggaaacu

SEQ ID NO: 665231 - RNA, 19 nt, Artificial Sequence
  Description of Artificial Sequence: Synthetic oligonucleotide
  Antisense strand to SEQ ID NO: 665230
aguuucccaacaauccaga

SEQ ID NO: 665232 - RNA, 19 nt, Artificial Sequence
  Description of Artificial Sequence: Synthetic oligonucleotide
  Sense strand starting at position 3205 of SEQ ID NO: 585757
ccucaugcucuugguaagu

SEQ ID NO: 665233 - RNA, 19 nt, Artificial Sequence
  Description of Artificial Sequence: Synthetic oligonucleotide
  Antisense strand to SEQ ID NO: 665232
acuuaccaagagcaugagg

SEQ ID NO: 665234 - RNA, 19 nt, Artificial Sequence
  Description of Artificial Sequence: Synthetic oligonucleotide
  Sense strand starting at position 3218 of SEQ ID NO: 585757
guaaguaaccucugacuuc

SEQ ID NO: 665235 - RNA, 19 nt, Artificial Sequence
  Description of Artificial Sequence: Synthetic oligonucleotide
  Antisense strand to SEQ ID NO: 665234
gaagucagagguuacuuac

SEQ ID NO: 665236 - RNA, 19 nt, Artificial Sequence
  Description of Artificial Sequence: Synthetic oligonucleotide
  Sense strand starting at position 3255 of SEQ ID NO: 585757
uuucguucuuuggaggaaa

SEQ ID NO: 665237 - RNA, 19 nt, Artificial Sequence
  Description of Artificial Sequence: Synthetic oligonucleotide
  Antisense strand to SEQ ID NO: 665236
uuuccuccaaagaacgaaa

SEQ ID NO: 665238 - RNA, 19 nt, Artificial Sequence
  Description of Artificial Sequence: Synthetic oligonucleotide
  Sense strand starting at position 3274 of SEQ ID NO: 585757
aggguucuuucuccuuuau

SEQ ID NO: 665239 - RNA, 19 nt, Artificial Sequence
  Description of Artificial Sequence: Synthetic oligonucleotide
  Antisense strand to SEQ ID NO: 665238
auaaaggagaaagaacccu

SEQ ID NO: 665240 - RNA, 19 nt, Artificial Sequence
  Description of Artificial Sequence: Synthetic oligonucleotide
  Sense strand starting at position 3276 of SEQ ID NO: 585757
gguucuuucuccuuuauga

SEQ ID NO: 665241 - RNA, 19 nt, Artificial Sequence
  Description of Artificial Sequence: Synthetic oligonucleotide
  Antisense strand to SEQ ID NO: 665240
ucauaaaggagaaagaacc

SEQ ID NO: 665242 - RNA, 19 nt, Artificial Sequence
  Description of Artificial Sequence: Synthetic oligonucleotide
  Sense strand starting at position 3296 of SEQ ID NO: 585757
cccugaccuuucgauauuc

SEQ ID NO: 665243 - RNA, 19 nt, Artificial Sequence
  Description of Artificial Sequence: Synthetic oligonucleotide
  Antisense strand to SEQ ID NO: 665242
gaauaucgaaaggucaggg

SEQ ID NO: 665244 - RNA, 19 nt, Artificial Sequence
  Description of Artificial Sequence: Synthetic oligonucleotide
  Sense strand starting at position 3328 of SEQ ID NO: 585757
cucauugugucagauauuc

SEQ ID NO: 665245 - RNA, 19 nt, Artificial Sequence
  Description of Artificial Sequence: Synthetic oligonucleotide
  Antisense strand to SEQ ID NO: 665244
gaauaucugacacaaugag

SEQ ID NO: 665246 - RNA, 19 nt, Artificial Sequence
  Description of Artificial Sequence: Synthetic oligonucleotide
  Sense strand starting at position 3336 of SEQ ID NO: 585757
gucagauauucccucaucu

SEQ ID NO: 665247 - RNA, 19 nt, Artificial Sequence
  Description of Artificial Sequence: Synthetic oligonucleotide
  Antisense strand to SEQ ID NO: 665246
agaugagggaauaucugac

SEQ ID NO: 665248 - RNA, 19 nt, Artificial Sequence
  Description of Artificial Sequence: Synthetic oligonucleotide
  Sense strand starting at position 3514 of SEQ ID NO: 585757
ggaggagucuggaaugcac

SEQ ID NO: 665249 - RNA, 19 nt, Artificial Sequence
  Description of Artificial Sequence: Synthetic oligonucleotide
  Antisense strand to SEQ ID NO: 665248
gugcauuccagacuccucc

SEQ ID NO: 665250 - RNA, 19 nt, Artificial Sequence
  Description of Artificial Sequence: Synthetic oligonucleotide
  Sense strand starting at position 3761 of SEQ ID NO: 585757
ugacuugccugccucagaa

SEQ ID NO: 665251 - RNA, 19 nt, Artificial Sequence
  Description of Artificial Sequence: Synthetic oligonucleotide
  Antisense strand to SEQ ID NO: 665250
uucugaggcaggcaaguca

SEQ ID NO: 665252 - RNA, 19 nt, Artificial Sequence
  Description of Artificial Sequence: Synthetic oligonucleotide
  Sense strand starting at position 130 of SEQ ID NO: 585758
ggaagcaugcacugaaaga

SEQ ID NO: 665253 - RNA, 19 nt, Artificial Sequence
  Description of Artificial Sequence: Synthetic oligonucleotide
  Antisense strand to SEQ ID NO: 665252
ucuuucagugcaugcuucc

SEQ ID NO: 665254 - RNA, 19 nt, Artificial Sequence
  Description of Artificial Sequence: Synthetic oligonucleotide
  Sense strand starting at position 289 of SEQ ID NO: 585758
ggcaguaaguuggucacaa

SEQ ID NO: 665255 - RNA, 19 nt, Artificial Sequence
  Description of Artificial Sequence: Synthetic oligonucleotide
  Antisense strand to SEQ ID NO: 665254
uugugaccaacuuacugcc

SEQ ID NO: 665256 - RNA, 19 nt, Artificial Sequence
  Description of Artificial Sequence: Synthetic oligonucleotide
  Sense strand starting at position 290 of SEQ ID NO: 585758
gcaguaaguuggucacaac

SEQ ID NO: 665257 - RNA, 19 nt, Artificial Sequence
  Description of Artificial Sequence: Synthetic oligonucleotide
  Antisense strand to SEQ ID NO: 665256
guugugaccaacuuacugc

SEQ ID NO: 665258 - RNA, 19 nt, Artificial Sequence
  Description of Artificial Sequence: Synthetic oligonucleotide
  Sense strand starting at position 460 of SEQ ID NO: 585758
aagggauggagcuguugaa

SEQ ID NO: 665259 - RNA, 19 nt, Artificial Sequence
  Description of Artificial Sequence: Synthetic oligonucleotide
  Antisense strand to SEQ ID NO: 665258
uucaacagcuccaucccuu

SEQ ID NO: 665260 - RNA, 19 nt, Artificial Sequence
  Description of Artificial Sequence: Synthetic oligonucleotide
  Sense strand starting at position 538 of SEQ ID NO: 585758
ggaggagcugucugggcuu

SEQ ID NO: 665261 - RNA, 19 nt, Artificial Sequence
  Description of Artificial Sequence: Synthetic oligonucleotide
  Antisense strand to SEQ ID NO: 665260
aagcccagacagcuccucc

SEQ ID NO: 665262 - RNA, 19 nt, Artificial Sequence
  Description of Artificial Sequence: Synthetic oligonucleotide
  Sense strand starting at position 822 of SEQ ID NO: 585758
ugcuauauuugacuggcua

SEQ ID NO: 665263 - RNA, 19 nt, Artificial Sequence
  Description of Artificial Sequence: Synthetic oligonucleotide
  Antisense strand to SEQ ID NO: 665262
uagccagucaaauauagca

SEQ ID NO: 665264 - RNA, 19 nt, Artificial Sequence
  Description of Artificial Sequence: Synthetic oligonucleotide
  Sense strand starting at position 865 of SEQ ID NO: 585758
ccucauuguggugagagga

SEQ ID NO: 665265 - RNA, 19 nt, Artificial Sequence
  Description of Artificial Sequence: Synthetic oligonucleotide
  Antisense strand to SEQ ID NO: 665264
uccucucaccacaaugagg

SEQ ID NO: 665266 - RNA, 19 nt, Artificial Sequence
  Description of Artificial Sequence: Synthetic oligonucleotide
  Sense strand starting at position 944 of SEQ ID NO: 585758
gaaugaauaccaggucauc

SEQ ID NO: 665267 - RNA, 19 nt, Artificial Sequence
  Description of Artificial Sequence: Synthetic oligonucleotide
  Antisense strand to SEQ ID NO: 665266
gaugaccugguauucauuc

SEQ ID NO: 665268 - RNA, 19 nt, Artificial Sequence
  Description of Artificial Sequence: Synthetic oligonucleotide
  Sense strand starting at position 1019 of SEQ ID NO: 585758
cucuauucccagcguaaag

SEQ ID NO: 665269 - RNA, 19 nt, Artificial Sequence
  Description of Artificial Sequence: Synthetic oligonucleotide
  Antisense strand to SEQ ID NO: 665268
cuuuacgcugggaauagag

SEQ ID NO: 665270 - RNA, 19 nt, Artificial Sequence
  Description of Artificial Sequence: Synthetic oligonucleotide
  Sense strand starting at position 1095 of SEQ ID NO: 585758
gcaggaucugccuguaaac

SEQ ID NO: 665271 - RNA, 19 nt, Artificial Sequence
  Description of Artificial Sequence: Synthetic oligonucleotide
  Antisense strand to SEQ ID NO: 665270
guuuacaggcagauccugc

SEQ ID NO: 665272 - RNA, 19 nt, Artificial Sequence
  Description of Artificial Sequence: Synthetic oligonucleotide
  Sense strand starting at position 1114 of SEQ ID NO: 585758
gcccaaaguccugagguuu

SEQ ID NO: 665273 - RNA, 19 nt, Artificial Sequence
  Description of Artificial Sequence: Synthetic oligonucleotide
  Antisense strand to SEQ ID NO: 665272
aaaccucaggacuuugggc

SEQ ID NO: 665274 - RNA, 19 nt, Artificial Sequence
  Description of Artificial Sequence: Synthetic oligonucleotide
  Sense strand starting at position 1126 of SEQ ID NO: 585758
gagguuuaagaggaaucgu

SEQ ID NO: 665275 - RNA, 19 nt, Artificial Sequence
  Description of Artificial Sequence: Synthetic oligonucleotide
  Antisense strand to SEQ ID NO: 665274
acgauuccucuuaaaccuc

SEQ ID NO: 665276 - RNA, 19 nt, Artificial Sequence
  Description of Artificial Sequence: Synthetic oligonucleotide
  Sense strand starting at position 1618 of SEQ ID NO: 585758
agacaugaucccuggcuga

SEQ ID NO: 665277 - RNA, 19 nt, Artificial Sequence
  Description of Artificial Sequence: Synthetic oligonucleotide
  Antisense strand to SEQ ID NO: 665276
ucagccagggaucaugucu

SEQ ID NO: 665278 - RNA, 19 nt, Artificial Sequence
  Description of Artificial Sequence: Synthetic oligonucleotide
  Sense strand starting at position 1671 of SEQ ID NO: 585758
aaggauugaucggaggauu

SEQ ID NO: 665279 - RNA, 19 nt, Artificial Sequence
  Description of Artificial Sequence: Synthetic oligonucleotide
  Antisense strand to SEQ ID NO: 665278
aauccuccgaucaauccuu

SEQ ID NO: 665280 - RNA, 19 nt, Artificial Sequence
  Description of Artificial Sequence: Synthetic oligonucleotide
  Sense strand starting at position 1716 of SEQ ID NO: 585758
gaaagacucuggccuggau

SEQ ID NO: 665281 - RNA, 19 nt, Artificial Sequence
  Description of Artificial Sequence: Synthetic oligonucleotide
  Antisense strand to SEQ ID NO: 665280
auccaggccagagucuuuc

SEQ ID NO: 665282 - RNA, 19 nt, Artificial Sequence
  Description of Artificial Sequence: Synthetic oligonucleotide
  Sense strand starting at position 1728 of SEQ ID NO: 585758
ccuggauugggucgaauua

SEQ ID NO: 665283 - RNA, 19 nt, Artificial Sequence
  Description of Artificial Sequence: Synthetic oligonucleotide
  Antisense strand to SEQ ID NO: 665282
uaauucgacccaauccagg

SEQ ID NO: 665284 - RNA, 19 nt, Artificial Sequence
  Description of Artificial Sequence: Synthetic oligonucleotide
  Sense strand starting at position 1729 of SEQ ID NO: 585758
cuggauugggucgaauuaa

SEQ ID NO: 665285 - RNA, 19 nt, Artificial Sequence
  Description of Artificial Sequence: Synthetic oligonucleotide
  Antisense strand to SEQ ID NO: 665284
uuaauucgacccaauccag

SEQ ID NO: 665286 - RNA, 19 nt, Artificial Sequence
  Description of Artificial Sequence: Synthetic oligonucleotide
  Sense strand starting at position 1741 of SEQ ID NO: 585758
gaauuaagcccgucgcucu

SEQ ID NO: 665287 - RNA, 19 nt, Artificial Sequence
  Description of Artificial Sequence: Synthetic oligonucleotide
  Antisense strand to SEQ ID NO: 665286
agagcgacgggcuuaauuc

SEQ ID NO: 665288 - RNA, 19 nt, Artificial Sequence
  Description of Artificial Sequence: Synthetic oligonucleotide
  Sense strand starting at position 1754 of SEQ ID NO: 585758
cgcucugcucaguaccaaa

SEQ ID NO: 665289 - RNA, 19 nt, Artificial Sequence
  Description of Artificial Sequence: Synthetic oligonucleotide
  Antisense strand to SEQ ID NO: 665288
uuugguacugagcagagcg

SEQ ID NO: 665290 - RNA, 19 nt, Artificial Sequence
  Description of Artificial Sequence: Synthetic oligonucleotide
  Sense strand starting at position 1790 of SEQ ID NO: 585758
gcagccaucuuuguacaga

SEQ ID NO: 665291 - RNA, 19 nt, Artificial Sequence
  Description of Artificial Sequence: Synthetic oligonucleotide
  Antisense strand to SEQ ID NO: 665290
ucuguacaaagauggcugc

SEQ ID NO: 665292 - RNA, 19 nt, Artificial Sequence
  Description of Artificial Sequence: Synthetic oligonucleotide
  Sense strand starting at position 1811 of SEQ ID NO: 585758
ggaagucucggcgcgaguu

SEQ ID NO: 665293 - RNA, 19 nt, Artificial Sequence
  Description of Artificial Sequence: Synthetic oligonucleotide
  Antisense strand to SEQ ID NO: 665292
aacucgcgccgagacuucc

SEQ ID NO: 665294 - RNA, 19 nt, Artificial Sequence
  Description of Artificial Sequence: Synthetic oligonucleotide
  Sense strand starting at position 1932 of SEQ ID NO: 585758
gugucagugcaggauggau

SEQ ID NO: 665295 - RNA, 19 nt, Artificial Sequence
  Description of Artificial Sequence: Synthetic oligonucleotide
  Antisense strand to SEQ ID NO: 665294
auccauccugcacugacac

SEQ ID NO: 665296 - RNA, 19 nt, Artificial Sequence
  Description of Artificial Sequence: Synthetic oligonucleotide
  Sense strand starting at position 1959 of SEQ ID NO: 585758
accggagugccgccauauu

SEQ ID NO: 665297 - RNA, 19 nt, Artificial Sequence
  Description of Artificial Sequence: Synthetic oligonucleotide
  Antisense strand to SEQ ID NO: 665296
aauauggcggcacuccggu

SEQ ID NO: 665298 - RNA, 19 nt, Artificial Sequence
  Description of Artificial Sequence: Synthetic oligonucleotide
  Sense strand starting at position 2796 of SEQ ID NO: 585758
gggcuuaugugagucucca

SEQ ID NO: 665299 - RNA, 19 nt, Artificial Sequence
  Description of Artificial Sequence: Synthetic oligonucleotide
  Antisense strand to SEQ ID NO: 665298
uggagacucacauaagccc

SEQ ID NO: 665300 - RNA, 19 nt, Artificial Sequence
  Description of Artificial Sequence: Synthetic oligonucleotide
  Sense strand starting at position 2837 of SEQ ID NO: 585758
gguucuggauuguugggaa

SEQ ID NO: 665301 - RNA, 19 nt, Artificial Sequence
  Description of Artificial Sequence: Synthetic oligonucleotide
  Antisense strand to SEQ ID NO: 665300
uucccaacaauccagaacc

SEQ ID NO: 665302 - RNA, 19 nt, Artificial Sequence
  Description of Artificial Sequence: Synthetic oligonucleotide
  Sense strand starting at position 3061 of SEQ ID NO: 585758
guaaguaaccucugacuuc

SEQ ID NO: 665303 - RNA, 19 nt, Artificial Sequence
  Description of Artificial Sequence: Synthetic oligonucleotide
  Antisense strand to SEQ ID NO: 665302
gaagucagagguuacuuac

SEQ ID NO: 665304 - RNA, 19 nt, Artificial Sequence
  Description of Artificial Sequence: Synthetic oligonucleotide
  Sense strand starting at position 3117 of SEQ ID NO: 585758
aggguucuuucuccuuuau

SEQ ID NO: 665305 - RNA, 19 nt, Artificial Sequence
  Description of Artificial Sequence: Synthetic oligonucleotide
  Antisense strand to SEQ ID NO: 665304
auaaaggagaaagaacccu

SEQ ID NO: 665306 - RNA, 19 nt, Artificial Sequence
  Description of Artificial Sequence: Synthetic oligonucleotide
  Sense strand starting at position 3119 of SEQ ID NO: 585758
gguucuuucuccuuuauga

SEQ ID NO: 665307 - RNA, 19 nt, Artificial Sequence
  Description of Artificial Sequence: Synthetic oligonucleotide
  Antisense strand to SEQ ID NO: 665306
ucauaaaggagaaagaacc

SEQ ID NO: 665308 - RNA, 19 nt, Artificial Sequence
  Description of Artificial Sequence: Synthetic oligonucleotide
  Sense strand starting at position 3179 of SEQ ID NO: 585758
gucagauauucccucaucu

SEQ ID NO: 665309 - RNA, 19 nt, Artificial Sequence
  Description of Artificial Sequence: Synthetic oligonucleotide
  Antisense strand to SEQ ID NO: 665308
agaugagggaauaucugac

SEQ ID NO: 665310 - RNA, 19 nt, Artificial Sequence
  Description of Artificial Sequence: Synthetic oligonucleotide
  Sense strand starting at position 3357 of SEQ ID NO: 585758
ggaggagucuggaaugcac

SEQ ID NO: 665311 - RNA, 19 nt, Artificial Sequence
  Description of Artificial Sequence: Synthetic oligonucleotide
  Antisense strand to SEQ ID NO: 665310
gugcauuccagacuccucc

SEQ ID NO: 665312 - RNA, 19 nt, Artificial Sequence
  Description of Artificial Sequence: Synthetic oligonucleotide
  Sense strand starting at position 3604 of SEQ ID NO: 585758
ugacuugccugccucagaa

SEQ ID NO: 665313 - RNA, 19 nt, Artificial Sequence
  Description of Artificial Sequence: Synthetic oligonucleotide
  Antisense strand to SEQ ID NO: 665312
uucugaggcaggcaaguca

SEQ ID NO: 665314 - RNA, 19 nt, Artificial Sequence
  Description of Artificial Sequence: Synthetic oligonucleotide
  Sense strand starting at position 3852 of SEQ ID NO: 585758
gggccagaguuggugauaa

SEQ ID NO: 665315 - RNA, 19 nt, Artificial Sequence
  Description of Artificial Sequence: Synthetic oligonucleotide
  Antisense strand to SEQ ID NO: 665314
uuaucaccaacucuggccc

SEQ ID NO: 665316 - RNA, 19 nt, Artificial Sequence
  Description of Artificial Sequence: Synthetic oligonucleotide
  Sense strand starting at position 3854 of SEQ ID NO: 585758
gccagaguuggugauaaau

SEQ ID NO: 665317 - RNA, 19 nt, Artificial Sequence
  Description of Artificial Sequence: Synthetic oligonucleotide
  Antisense strand to SEQ ID NO: 665316
auuuaucaccaacucuggc

SEQ ID NO: 665318 - RNA, 19 nt, Artificial Sequence
  Description of Artificial Sequence: Synthetic oligonucleotide
  Sense strand starting at position 3856 of SEQ ID NO: 585758
cagaguuggugauaaauuu

SEQ ID NO: 665319 - RNA, 19 nt, Artificial Sequence
  Description of Artificial Sequence: Synthetic oligonucleotide
  Antisense strand to SEQ ID NO: 665318
aaauuuaucaccaacucug

SEQ ID NO: 665320 - RNA, 19 nt, Artificial Sequence
  Description of Artificial Sequence: Synthetic oligonucleotide
  Sense strand starting at position 3904 of SEQ ID NO: 585758
gaauaugugcuguggguaa

SEQ ID NO: 665321 - RNA, 19 nt, Artificial Sequence
  Description of Artificial Sequence: Synthetic oligonucleotide
  Antisense strand to SEQ ID NO: 665320
uuacccacagcacauauuc

SEQ ID NO: 665322 - RNA, 19 nt, Artificial Sequence
  Description of Artificial Sequence: Synthetic oligonucleotide
  Sense strand starting at position 3916 of SEQ ID NO: 585758
uggguaauggcagguaucu

SEQ ID NO: 665323 - RNA, 19 nt, Artificial Sequence
  Description of Artificial Sequence: Synthetic oligonucleotide
  Antisense strand to SEQ ID NO: 665322
agauaccugccauuaccca

SEQ ID NO: 665324 - RNA, 19 nt, Artificial Sequence
  Description of Artificial Sequence: Synthetic oligonucleotide
  Sense strand starting at position 3918 of SEQ ID NO: 585758
gguaauggcagguaucuga

SEQ ID NO: 665325 - RNA, 19 nt, Artificial Sequence
  Description of Artificial Sequence: Synthetic oligonucleotide
  Antisense strand to SEQ ID NO: 665324
ucagauaccugccauuacc

SEQ ID NO: 665326 - RNA, 19 nt, Artificial Sequence
  Description of Artificial Sequence: Synthetic oligonucleotide
  Sense strand starting at position 3921 of SEQ ID NO: 585758
aauggcagguaucugagaa

SEQ ID NO: 665327 - RNA, 19 nt, Artificial Sequence
  Description of Artificial Sequence: Synthetic oligonucleotide
  Antisense strand to SEQ ID NO: 665326
uucucagauaccugccauu

SEQ ID NO: 665328 - RNA, 19 nt, Artificial Sequence
  Description of Artificial Sequence: Synthetic oligonucleotide
  Sense strand starting at position 3922 of SEQ ID NO: 585758
auggcagguaucugagaaa

SEQ ID NO: 665329 - RNA, 19 nt, Artificial Sequence
  Description of Artificial Sequence: Synthetic oligonucleotide
  Antisense strand to SEQ ID NO: 665328
uuucucagauaccugccau

SEQ ID NO: 665330 - RNA, 19 nt, Artificial Sequence
  Description of Artificial Sequence: Synthetic oligonucleotide
  Sense strand starting at position 3954 of SEQ ID NO: 585758
gguguaaaguggucucuga

SEQ ID NO: 665331 - RNA, 19 nt, Artificial Sequence
  Description of Artificial Sequence: Synthetic oligonucleotide
  Antisense strand to SEQ ID NO: 665330
ucagagaccacuuuacacc

SEQ ID NO: 665332 - RNA, 19 nt, Artificial Sequence
  Description of Artificial Sequence: Synthetic oligonucleotide
  Sense strand starting at position 254 of SEQ ID NO: 585759
uugggauaaugccucauaa

SEQ ID NO: 665333 - RNA, 19 nt, Artificial Sequence
  Description of Artificial Sequence: Synthetic oligonucleotide
  Antisense strand to SEQ ID NO: 665332
uuaugaggcauuaucccaa

SEQ ID NO: 665334 - RNA, 19 nt, Artificial Sequence
  Description of Artificial Sequence: Synthetic oligonucleotide
  Sense strand starting at position 522 of SEQ ID NO: 585759
gccuacuauugaucagaau

SEQ ID NO: 665335 - RNA, 19 nt, Artificial Sequence
  Description of Artificial Sequence: Synthetic oligonucleotide
  Antisense strand to SEQ ID NO: 665334
auucugaucaauaguaggc

SEQ ID NO: 665336 - RNA, 19 nt, Artificial Sequence
  Description of Artificial Sequence: Synthetic oligonucleotide
  Sense strand starting at position 716 of SEQ ID NO: 585759
cgucgucuugcagugagua

SEQ ID NO: 665337 - RNA, 19 nt, Artificial Sequence
  Description of Artificial Sequence: Synthetic oligonucleotide
  Antisense strand to SEQ ID NO: 665336
uacucacugcaagacgacg

SEQ ID NO: 665338 - RNA, 19 nt, Artificial Sequence
  Description of Artificial Sequence: Synthetic oligonucleotide
  Sense strand starting at position 1117 of SEQ ID NO: 585759
uugaaaguccuggaguuua

SEQ ID NO: 665339 - RNA, 19 nt, Artificial Sequence
  Description of Artificial Sequence: Synthetic oligonucleotide
  Antisense strand to SEQ ID NO: 665338
uaaacuccaggacuuucaa

SEQ ID NO: 665340 - RNA, 19 nt, Artificial Sequence
  Description of Artificial Sequence: Synthetic oligonucleotide
  Sense strand starting at position 1127 of SEQ ID NO: 585759
uggaguuuacaggguaacu

SEQ ID NO: 665341 - RNA, 19 nt, Artificial Sequence
  Description of Artificial Sequence: Synthetic oligonucleotide
  Antisense strand to SEQ ID NO: 665340
aguuacccuguaaacucca

SEQ ID NO: 665342 - RNA, 19 nt, Artificial Sequence
  Description of Artificial Sequence: Synthetic oligonucleotide
  Sense strand starting at position 1270 of SEQ ID NO: 585759
uucuaagaaugugccuaaa

SEQ ID NO: 665343 - RNA, 19 nt, Artificial Sequence
  Description of Artificial Sequence: Synthetic oligonucleotide
  Antisense strand to SEQ ID NO: 665342
uuuaggcacauucuuagaa

SEQ ID NO: 665344 - RNA, 19 nt, Artificial Sequence
  Description of Artificial Sequence: Synthetic oligonucleotide
  Sense strand starting at position 1272 of SEQ ID NO: 585759
cuaagaaugugccuaaaga

SEQ ID NO: 665345 - RNA, 19 nt, Artificial Sequence
  Description of Artificial Sequence: Synthetic oligonucleotide
  Antisense strand to SEQ ID NO: 665344
ucuuuaggcacauucuuag

SEQ ID NO: 665346 - RNA, 19 nt, Artificial Sequence
  Description of Artificial Sequence: Synthetic oligonucleotide
  Sense strand starting at position 1307 of SEQ ID NO: 585759
cacaaagaugugugccaua

SEQ ID NO: 665347 - RNA, 19 nt, Artificial Sequence
  Description of Artificial Sequence: Synthetic oligonucleotide
  Antisense strand to SEQ ID NO: 665346
uauggcacacaucuuugug

SEQ ID NO: 665348 - RNA, 19 nt, Artificial Sequence
  Description of Artificial Sequence: Synthetic oligonucleotide
  Sense strand starting at position 1312 of SEQ ID NO: 585759
agaugugugccauagcaau

SEQ ID NO: 665349 - RNA, 19 nt, Artificial Sequence
  Description of Artificial Sequence: Synthetic oligonucleotide
  Antisense strand to SEQ ID NO: 665348
auugcuauggcacacaucu

SEQ ID NO: 665350 - RNA, 19 nt, Artificial Sequence
  Description of Artificial Sequence: Synthetic oligonucleotide
  Sense strand starting at position 1323 of SEQ ID NO: 585759
auagcaaugguccgaauag

SEQ ID NO: 665351 - RNA, 19 nt, Artificial Sequence
  Description of Artificial Sequence: Synthetic oligonucleotide
  Antisense strand to SEQ ID NO: 665350
cuauucggaccauugcuau

SEQ ID NO: 665352 - RNA, 19 nt, Artificial Sequence
  Description of Artificial Sequence: Synthetic oligonucleotide
  Sense strand starting at position 1376 of SEQ ID NO: 585759
ggaauuggccaaugaauua

SEQ ID NO: 665353 - RNA, 19 nt, Artificial Sequence
  Description of Artificial Sequence: Synthetic oligonucleotide
  Antisense strand to SEQ ID NO: 665352
uaauucauuggccaauucc

SEQ ID NO: 665354 - RNA, 19 nt, Artificial Sequence
  Description of Artificial Sequence: Synthetic oligonucleotide
  Sense strand starting at position 1479 of SEQ ID NO: 585759
ggauaugguuaacugcaaa

SEQ ID NO: 665355 - RNA, 19 nt, Artificial Sequence
  Description of Artificial Sequence: Synthetic oligonucleotide
  Antisense strand to SEQ ID NO: 665354
uuugcaguuaaccauaucc

SEQ ID NO: 665356 - RNA, 19 nt, Artificial Sequence
  Description of Artificial Sequence: Synthetic oligonucleotide
  Sense strand starting at position 1549 of SEQ ID NO: 585759
gaaugaaaugcuugguuac

SEQ ID NO: 665357 - RNA, 19 nt, Artificial Sequence
  Description of Artificial Sequence: Synthetic oligonucleotide
  Antisense strand to SEQ ID NO: 665356
guaaccaagcauuucauuc

SEQ ID NO: 665358 - RNA, 19 nt, Artificial Sequence
  Description of Artificial Sequence: Synthetic oligonucleotide
  Sense strand starting at position 1551 of SEQ ID NO: 585759
augaaaugcuugguuacac

SEQ ID NO: 665359 - RNA, 19 nt, Artificial Sequence
  Description of Artificial Sequence: Synthetic oligonucleotide
  Antisense strand to SEQ ID NO: 665358
guguaaccaagcauuucau

SEQ ID NO: 665360 - RNA, 19 nt, Artificial Sequence
  Description of Artificial Sequence: Synthetic oligonucleotide
  Sense strand starting at position 1552 of SEQ ID NO: 585759
ugaaaugcuugguuacaca

SEQ ID NO: 665361 - RNA, 19 nt, Artificial Sequence
  Description of Artificial Sequence: Synthetic oligonucleotide
  Antisense strand to SEQ ID NO: 665360
uguguaaccaagcauuuca

SEQ ID NO: 665362 - RNA, 19 nt, Artificial Sequence
  Description of Artificial Sequence: Synthetic oligonucleotide
  Sense strand starting at position 1606 of SEQ ID NO: 585759
gcaaucucuguuuggagga

SEQ ID NO: 665363 - RNA, 19 nt, Artificial Sequence
  Description of Artificial Sequence: Synthetic oligonucleotide
  Antisense strand to SEQ ID NO: 665362
uccuccaaacagagauugc

SEQ ID NO: 665364 - RNA, 19 nt, Artificial Sequence
  Description of Artificial Sequence: Synthetic oligonucleotide
  Sense strand starting at position 1737 of SEQ ID NO: 585759
uacggauuauugcuggaga

SEQ ID NO: 665365 - RNA, 19 nt, Artificial Sequence
  Description of Artificial Sequence: Synthetic oligonucleotide
  Antisense strand to SEQ ID NO: 665364
ucuccagcaauaauccgua

SEQ ID NO: 665366 - RNA, 19 nt, Artificial Sequence
  Description of Artificial Sequence: Synthetic oligonucleotide
  Sense strand starting at position 1762 of SEQ ID NO: 585759
ugguccaucucuuccagaa

SEQ ID NO: 665367 - RNA, 19 nt, Artificial Sequence
  Description of Artificial Sequence: Synthetic oligonucleotide
  Antisense strand to SEQ ID NO: 665366
uucuggaagagauggacca

SEQ ID NO: 665368 - RNA, 19 nt, Artificial Sequence
  Description of Artificial Sequence: Synthetic oligonucleotide
  Sense strand starting at position 1816 of SEQ ID NO: 585759
ggcaaauccgaucagugga

SEQ ID NO: 665369 - RNA, 19 nt, Artificial Sequence
  Description of Artificial Sequence: Synthetic oligonucleotide
  Antisense strand to SEQ ID NO: 665368
uccacugaucggauuugcc

SEQ ID NO: 665370 - RNA, 19 nt, Artificial Sequence
  Description of Artificial Sequence: Synthetic oligonucleotide
  Sense strand starting at position 1889 of SEQ ID NO: 585759
cuggaaucuugguuucucu

SEQ ID NO: 665371 - RNA, 19 nt, Artificial Sequence
  Description of Artificial Sequence: Synthetic oligonucleotide
  Antisense strand to SEQ ID NO: 665370
agagaaaccaagauuccag

SEQ ID NO: 665372 - RNA, 19 nt, Artificial Sequence
  Description of Artificial Sequence: Synthetic oligonucleotide
  Sense strand starting at position 1892 of SEQ ID NO: 585759
gaaucuugguuucucuuga

SEQ ID NO: 665373 - RNA, 19 nt, Artificial Sequence
  Description of Artificial Sequence: Synthetic oligonucleotide
  Antisense strand to SEQ ID NO: 665372
ucaagagaaaccaagauuc

SEQ ID NO: 665374 - RNA, 19 nt, Artificial Sequence
  Description of Artificial Sequence: Synthetic oligonucleotide
  Sense strand starting at position 1925 of SEQ ID NO: 585759
uggugauacuggguucaua

SEQ ID NO: 665375 - RNA, 19 nt, Artificial Sequence
  Description of Artificial Sequence: Synthetic oligonucleotide
  Antisense strand to SEQ ID NO: 665374
uaugaacccaguaucacca

SEQ ID NO: 665376 - RNA, 19 nt, Artificial Sequence
  Description of Artificial Sequence: Synthetic oligonucleotide
  Sense strand starting at position 2017 of SEQ ID NO: 585759
ggaagcauaagguaaguuu

SEQ ID NO: 665377 - RNA, 19 nt, Artificial Sequence
  Description of Artificial Sequence: Synthetic oligonucleotide
  Antisense strand to SEQ ID NO: 665376
aaacuuaccuuaugcuucc

SEQ ID NO: 665378 - RNA, 19 nt, Artificial Sequence
  Description of Artificial Sequence: Synthetic oligonucleotide
  Sense strand starting at position 2020 of SEQ ID NO: 585759
agcauaagguaaguuugaa

SEQ ID NO: 665379 - RNA, 19 nt, Artificial Sequence
  Description of Artificial Sequence: Synthetic oligonucleotide
  Antisense strand to SEQ ID NO: 665378
uucaaacuuaccuuaugcu

SEQ ID NO: 665380 - RNA, 19 nt, Artificial Sequence
  Description of Artificial Sequence: Synthetic oligonucleotide
  Sense strand starting at position 2044 of SEQ ID NO: 585759
guggaucucagacagcuaa

SEQ ID NO: 665381 - RNA, 19 nt, Artificial Sequence
  Description of Artificial Sequence: Synthetic oligonucleotide
  Antisense strand to SEQ ID NO: 665380
uuagcugucugagauccac

SEQ ID NO: 665382 - RNA, 19 nt, Artificial Sequence
  Description of Artificial Sequence: Synthetic oligonucleotide
  Sense strand starting at position 2089 of SEQ ID NO: 585759
uucugacaagugugacaaa

SEQ ID NO: 665383 - RNA, 19 nt, Artificial Sequence
  Description of Artificial Sequence: Synthetic oligonucleotide
  Antisense strand to SEQ ID NO: 665382
uuugucacacuugucagaa

SEQ ID NO: 665384 - RNA, 19 nt, Artificial Sequence
  Description of Artificial Sequence: Synthetic oligonucleotide
  Sense strand starting at position 2119 of SEQ ID NO: 585759
guacauacauguuuaccau

SEQ ID NO: 665385 - RNA, 19 nt, Artificial Sequence
  Description of Artificial Sequence: Synthetic oligonucleotide
  Antisense strand to SEQ ID NO: 665384
augguaaacauguauguac

SEQ ID NO: 665386 - RNA, 19 nt, Artificial Sequence
  Description of Artificial Sequence: Synthetic oligonucleotide
  Sense strand starting at position 2345 of SEQ ID NO: 585759
guagcuacaucauugaacu

SEQ ID NO: 665387 - RNA, 19 nt, Artificial Sequence
  Description of Artificial Sequence: Synthetic oligonucleotide
  Antisense strand to SEQ ID NO: 665386
aguucaaugauguagcuac

SEQ ID NO: 665388 - RNA, 19 nt, Artificial Sequence
  Description of Artificial Sequence: Synthetic oligonucleotide
  Sense strand starting at position 2402 of SEQ ID NO: 585759
uguaauucucguuacauag

SEQ ID NO: 665389 - RNA, 19 nt, Artificial Sequence
  Description of Artificial Sequence: Synthetic oligonucleotide
  Antisense strand to SEQ ID NO: 665388
cuauguaacgagaauuaca

SEQ ID NO: 665390 - RNA, 19 nt, Artificial Sequence
  Description of Artificial Sequence: Synthetic oligonucleotide
  Sense strand starting at position 2548 of SEQ ID NO: 585759
aggugacuucuguauccac

SEQ ID NO: 665391 - RNA, 19 nt, Artificial Sequence
  Description of Artificial Sequence: Synthetic oligonucleotide
  Antisense strand to SEQ ID NO: 665390
guggauacagaagucaccu

SEQ ID NO: 665392 - RNA, 19 nt, Artificial Sequence
  Description of Artificial Sequence: Synthetic oligonucleotide
  Sense strand starting at position 2551 of SEQ ID NO: 585759
ugacuucuguauccaccua

SEQ ID NO: 665393 - RNA, 19 nt, Artificial Sequence
  Description of Artificial Sequence: Synthetic oligonucleotide
  Antisense strand to SEQ ID NO: 665392
uagguggauacagaaguca

SEQ ID NO: 665394 - RNA, 19 nt, Artificial Sequence
  Description of Artificial Sequence: Synthetic oligonucleotide
  Sense strand starting at position 2668 of SEQ ID NO: 585759
gguaguggaucuucuuaau

SEQ ID NO: 665395 - RNA, 19 nt, Artificial Sequence
  Description of Artificial Sequence: Synthetic oligonucleotide
  Antisense strand to SEQ ID NO: 665394
auuaagaagauccacuacc

SEQ ID NO: 665396 - RNA, 19 nt, Artificial Sequence
  Description of Artificial Sequence: Synthetic oligonucleotide
  Sense strand starting at position 2877 of SEQ ID NO: 585759
gaguguguuacagugcagu

SEQ ID NO: 665397 - RNA, 19 nt, Artificial Sequence
  Description of Artificial Sequence: Synthetic oligonucleotide
  Antisense strand to SEQ ID NO: 665396
acugcacuguaacacacuc

SEQ ID NO: 665398 - RNA, 19 nt, Artificial Sequence
  Description of Artificial Sequence: Synthetic oligonucleotide
  Sense strand starting at position 3035 of SEQ ID NO: 585759
ggagaaugggugcacaguu

SEQ ID NO: 665399 - RNA, 19 nt, Artificial Sequence
  Description of Artificial Sequence: Synthetic oligonucleotide
  Antisense strand to SEQ ID NO: 665398
aacugugcacccauucucc

SEQ ID NO: 665400 - RNA, 19 nt, Artificial Sequence
  Description of Artificial Sequence: Synthetic oligonucleotide
  Sense strand starting at position 3185 of SEQ ID NO: 585759
cuacgugguccacaucaua

SEQ ID NO: 665401 - RNA, 19 nt, Artificial Sequence
  Description of Artificial Sequence: Synthetic oligonucleotide
  Antisense strand to SEQ ID NO: 665400
uaugauguggaccacguag

SEQ ID NO: 665402 - RNA, 19 nt, Artificial Sequence
  Description of Artificial Sequence: Synthetic oligonucleotide
  Sense strand starting at position 3230 of SEQ ID NO: 585759
caguguauucugccagugu

SEQ ID NO: 665403 - RNA, 19 nt, Artificial Sequence
  Description of Artificial Sequence: Synthetic oligonucleotide
  Antisense strand to SEQ ID NO: 665402
acacuggcagaauacacug

SEQ ID NO: 665404 - RNA, 19 nt, Artificial Sequence
  Description of Artificial Sequence: Synthetic oligonucleotide
  Sense strand starting at position 3532 of SEQ ID NO: 585759
uguguuucucaugagugac

SEQ ID NO: 665405 - RNA, 19 nt, Artificial Sequence
  Description of Artificial Sequence: Synthetic oligonucleotide
  Antisense strand to SEQ ID NO: 665404
gucacucaugagaaacaca

SEQ ID NO: 665406 - RNA, 19 nt, Artificial Sequence
  Description of Artificial Sequence: Synthetic oligonucleotide
  Sense strand starting at position 3534 of SEQ ID NO: 585759
uguuucucaugagugacaa

SEQ ID NO: 665407 - RNA, 19 nt, Artificial Sequence
  Description of Artificial Sequence: Synthetic oligonucleotide
  Antisense strand to SEQ ID NO: 665406
uugucacucaugagaaaca

SEQ ID NO: 665408 - RNA, 19 nt, Artificial Sequence
  Description of Artificial Sequence: Synthetic oligonucleotide
  Sense strand starting at position 3535 of SEQ ID NO: 585759
guuucucaugagugacaaa

SEQ ID NO: 665409 - RNA, 19 nt, Artificial Sequence
  Description of Artificial Sequence: Synthetic oligonucleotide
  Antisense strand to SEQ ID NO: 665408
uuugucacucaugagaaac

SEQ ID NO: 665410 - RNA, 19 nt, Artificial Sequence
  Description of Artificial Sequence: Synthetic oligonucleotide
  Sense strand starting at position 3546 of SEQ ID NO: 585759
gugacaaaugcucaugcuu

SEQ ID NO: 665411 - RNA, 19 nt, Artificial Sequence
  Description of Artificial Sequence: Synthetic oligonucleotide
  Antisense strand to SEQ ID NO: 665410
aagcaugagcauuugucac

SEQ ID NO: 665412 - RNA, 19 nt, Artificial Sequence
  Description of Artificial Sequence: Synthetic oligonucleotide
  Sense strand starting at position 40 of SEQ ID NO: 585760
guuaauucuugauuccaga

SEQ ID NO: 665413 - RNA, 19 nt, Artificial Sequence
  Description of Artificial Sequence: Synthetic oligonucleotide
  Antisense strand to SEQ ID NO: 665412
ucuggaaucaagaauuaac

SEQ ID NO: 665414 - RNA, 19 nt, Artificial Sequence
  Description of Artificial Sequence: Synthetic oligonucleotide
  Sense strand starting at position 140 of SEQ ID NO: 585760
gaggaucugugacuuguag

SEQ ID NO: 665415 - RNA, 19 nt, Artificial Sequence
  Description of Artificial Sequence: Synthetic oligonucleotide
  Antisense strand to SEQ ID NO: 665414
cuacaagucacagauccuc

SEQ ID NO: 665416 - RNA, 19 nt, Artificial Sequence
  Description of Artificial Sequence: Synthetic oligonucleotide
  Sense strand starting at position 142 of SEQ ID NO: 585760
ggaucugugacuuguagga

SEQ ID NO: 665417 - RNA, 19 nt, Artificial Sequence
  Description of Artificial Sequence: Synthetic oligonucleotide
  Antisense strand to SEQ ID NO: 665416
uccuacaagucacagaucc

SEQ ID NO: 665418 - RNA, 19 nt, Artificial Sequence
  Description of Artificial Sequence: Synthetic oligonucleotide
  Sense strand starting at position 146 of SEQ ID NO: 585760
cugugacuuguaggaagaa

SEQ ID NO: 665419 - RNA, 19 nt, Artificial Sequence
  Description of Artificial Sequence: Synthetic oligonucleotide
  Antisense strand to SEQ ID NO: 665418
uucuuccuacaagucacag

SEQ ID NO: 665420 - RNA, 19 nt, Artificial Sequence
  Description of Artificial Sequence: Synthetic oligonucleotide
  Sense strand starting at position 327 of SEQ ID NO: 585760
auaagaugggcuuguucua

SEQ ID NO: 665421 - RNA, 19 nt, Artificial Sequence
  Description of Artificial Sequence: Synthetic oligonucleotide
  Antisense strand to SEQ ID NO: 665420
uagaacaagcccaucuuau

SEQ ID NO: 665422 - RNA, 19 nt, Artificial Sequence
  Description of Artificial Sequence: Synthetic oligonucleotide
  Sense strand starting at position 345 of SEQ ID NO: 585760
aguggaaauuuacauaucu

SEQ ID NO: 665423 - RNA, 19 nt, Artificial Sequence
  Description of Artificial Sequence: Synthetic oligonucleotide
  Antisense strand to SEQ ID NO: 665422
agauauguaaauuuccacu

SEQ ID NO: 665424 - RNA, 19 nt, Artificial Sequence
  Description of Artificial Sequence: Synthetic oligonucleotide
  Sense strand starting at position 381 of SEQ ID NO: 585760
aaauauuaugugugaagug

SEQ ID NO: 665425 - RNA, 19 nt, Artificial Sequence
  Description of Artificial Sequence: Synthetic oligonucleotide
  Antisense strand to SEQ ID NO: 665424
cacuucacacauaauauuu

SEQ ID NO: 665426 - RNA, 19 nt, Artificial Sequence
  Description of Artificial Sequence: Synthetic oligonucleotide
  Sense strand starting at position 405 of SEQ ID NO: 585760
cuacuugauggcgagaagu

SEQ ID NO: 665427 - RNA, 19 nt, Artificial Sequence
  Description of Artificial Sequence: Synthetic oligonucleotide
  Antisense strand to SEQ ID NO: 665426
acuucucgccaucaaguag

SEQ ID NO: 665428 - RNA, 19 nt, Artificial Sequence
  Description of Artificial Sequence: Synthetic oligonucleotide
  Sense strand starting at position 407 of SEQ ID NO: 585760
acuugauggcgagaaguag

SEQ ID NO: 665429 - RNA, 19 nt, Artificial Sequence
  Description of Artificial Sequence: Synthetic oligonucleotide
  Antisense strand to SEQ ID NO: 665428
cuacuucucgccaucaagu

SEQ ID NO: 665430 - RNA, 19 nt, Artificial Sequence
  Description of Artificial Sequence: Synthetic oligonucleotide
  Sense strand starting at position 432 of SEQ ID NO: 585760
guugacuucuauccauuau

SEQ ID NO: 665431 - RNA, 19 nt, Artificial Sequence
  Description of Artificial Sequence: Synthetic oligonucleotide
  Antisense strand to SEQ ID NO: 665430
auaauggauagaagucaac

SEQ ID NO: 665432 - RNA, 19 nt, Artificial Sequence
  Description of Artificial Sequence: Synthetic oligonucleotide
  Sense strand starting at position 514 of SEQ ID NO: 585760
ugggaagauauuggccauu

SEQ ID NO: 665433 - RNA, 19 nt, Artificial Sequence
  Description of Artificial Sequence: Synthetic oligonucleotide
  Antisense strand to SEQ ID NO: 665432
aauggccaauaucuuccca

SEQ ID NO: 665434 - RNA, 19 nt, Artificial Sequence
  Description of Artificial Sequence: Synthetic oligonucleotide
  Sense strand starting at position 516 of SEQ ID NO: 585760
ggaagauauuggccauuag

SEQ ID NO: 665435 - RNA, 19 nt, Artificial Sequence
  Description of Artificial Sequence: Synthetic oligonucleotide
  Antisense strand to SEQ ID NO: 665434
cuaauggccaauaucuucc

SEQ ID NO: 665436 - RNA, 19 nt, Artificial Sequence
  Description of Artificial Sequence: Synthetic oligonucleotide
  Sense strand starting at position 517 of SEQ ID NO: 585760
gaagauauuggccauuagu

SEQ ID NO: 665437 - RNA, 19 nt, Artificial Sequence
  Description of Artificial Sequence: Synthetic oligonucleotide
  Antisense strand to SEQ ID NO: 665436
acuaauggccaauaucuuc

SEQ ID NO: 665438 - RNA, 19 nt, Artificial Sequence
  Description of Artificial Sequence: Synthetic oligonucleotide
  Sense strand starting at position 520 of SEQ ID NO: 585760
gauauuggccauuaguaag

SEQ ID NO: 665439 - RNA, 19 nt, Artificial Sequence
  Description of Artificial Sequence: Synthetic oligonucleotide
  Antisense strand to SEQ ID NO: 665438
cuuacuaauggccaauauc

SEQ ID NO: 665440 - RNA, 19 nt, Artificial Sequence
  Description of Artificial Sequence: Synthetic oligonucleotide
  Sense strand starting at position 553 of SEQ ID NO: 585760
cugagauucccuugagcac

SEQ ID NO: 665441 - RNA, 19 nt, Artificial Sequence
  Description of Artificial Sequence: Synthetic oligonucleotide
  Antisense strand to SEQ ID NO: 665440
gugcucaagggaaucucag

SEQ ID NO: 665442 - RNA, 19 nt, Artificial Sequence
  Description of Artificial Sequence: Synthetic oligonucleotide
  Sense strand starting at position 554 of SEQ ID NO: 585760
ugagauucccuugagcacu

SEQ ID NO: 665443 - RNA, 19 nt, Artificial Sequence
  Description of Artificial Sequence: Synthetic oligonucleotide
  Antisense strand to SEQ ID NO: 665442
agugcucaagggaaucuca

SEQ ID NO: 665444 - RNA, 19 nt, Artificial Sequence
  Description of Artificial Sequence: Synthetic oligonucleotide
  Sense strand starting at position 590 of SEQ ID NO: 585760
uauaacuaauguguugaga

SEQ ID NO: 665445 - RNA, 19 nt, Artificial Sequence
  Description of Artificial Sequence: Synthetic oligonucleotide
  Antisense strand to SEQ ID NO: 665444
ucucaacacauuaguuaua

SEQ ID NO: 665446 - RNA, 19 nt, Artificial Sequence
  Description of Artificial Sequence: Synthetic oligonucleotide
  Sense strand starting at position 665 of SEQ ID NO: 585760
cucuucugagacuaauagu

SEQ ID NO: 665447 - RNA, 19 nt, Artificial Sequence
  Description of Artificial Sequence: Synthetic oligonucleotide
  Antisense strand to SEQ ID NO: 665446
acuauuagucucagaagag

SEQ ID NO: 665448 - RNA, 19 nt, Artificial Sequence
  Description of Artificial Sequence: Synthetic oligonucleotide
  Sense strand starting at position 961 of SEQ ID NO: 585760
ggacuaugagccuauuccu

SEQ ID NO: 665449 - RNA, 19 nt, Artificial Sequence
  Description of Artificial Sequence: Synthetic oligonucleotide
  Antisense strand to SEQ ID NO: 665448
aggaauaggcucauagucc

SEQ ID NO: 665450 - RNA, 19 nt, Artificial Sequence
  Description of Artificial Sequence: Synthetic oligonucleotide
  Sense strand starting at position 1053 of SEQ ID NO: 585760
caggguguuucuuuauaaa

SEQ ID NO: 665451 - RNA, 19 nt, Artificial Sequence
  Description of Artificial Sequence: Synthetic oligonucleotide
  Antisense strand to SEQ ID NO: 665450
uuuauaaagaaacacccug

SEQ ID NO: 665452 - RNA, 19 nt, Artificial Sequence
  Description of Artificial Sequence: Synthetic oligonucleotide
  Sense strand starting at position 1105 of SEQ ID NO: 585760
agcacacuccuuugauaug

SEQ ID NO: 665453 - RNA, 19 nt, Artificial Sequence
  Description of Artificial Sequence: Synthetic oligonucleotide
  Antisense strand to SEQ ID NO: 665452
cauaucaaaggagugugcu

SEQ ID NO: 665454 - RNA, 19 nt, Artificial Sequence
  Description of Artificial Sequence: Synthetic oligonucleotide
  Sense strand starting at position 1116 of SEQ ID NO: 585760
uugauauggugcuugacaa

SEQ ID NO: 665455 - RNA, 19 nt, Artificial Sequence
  Description of Artificial Sequence: Synthetic oligonucleotide
  Antisense strand to SEQ ID NO: 665454
uugucaagcaccauaucaa

SEQ ID NO: 665456 - RNA, 19 nt, Artificial Sequence
  Description of Artificial Sequence: Synthetic oligonucleotide
  Sense strand starting at position 1117 of SEQ ID NO: 585760
ugauauggugcuugacaaa

SEQ ID NO: 665457 - RNA, 19 nt, Artificial Sequence
  Description of Artificial Sequence: Synthetic oligonucleotide
  Antisense strand to SEQ ID NO: 665456
uuugucaagcaccauauca

SEQ ID NO: 665458 - RNA, 19 nt, Artificial Sequence
  Description of Artificial Sequence: Synthetic oligonucleotide
  Sense strand starting at position 1170 of SEQ ID NO: 585760
ggcugugggcuagaauacu

SEQ ID NO: 665459 - RNA, 19 nt, Artificial Sequence
  Description of Artificial Sequence: Synthetic oligonucleotide
  Antisense strand to SEQ ID NO: 665458
aguauucuagcccacagcc

SEQ ID NO: 665460 - RNA, 19 nt, Artificial Sequence
  Description of Artificial Sequence: Synthetic oligonucleotide
  Sense strand starting at position 1220 of SEQ ID NO: 585760
augguuuauaaaggugacu

SEQ ID NO: 665461 - RNA, 19 nt, Artificial Sequence
  Description of Artificial Sequence: Synthetic oligonucleotide
  Antisense strand to SEQ ID NO: 665460
agucaccuuuauaaaccau

SEQ ID NO: 665462 - RNA, 19 nt, Artificial Sequence
  Description of Artificial Sequence: Synthetic oligonucleotide
  Sense strand starting at position 1222 of SEQ ID NO: 585760
gguuuauaaaggugacuca

SEQ ID NO: 665463 - RNA, 19 nt, Artificial Sequence
  Description of Artificial Sequence: Synthetic oligonucleotide
  Antisense strand to SEQ ID NO: 665462
ugagucaccuuuauaaacc

SEQ ID NO: 665464 - RNA, 19 nt, Artificial Sequence
  Description of Artificial Sequence: Synthetic oligonucleotide
  Sense strand starting at position 1223 of SEQ ID NO: 585760
guuuauaaaggugacucau

SEQ ID NO: 665465 - RNA, 19 nt, Artificial Sequence
  Description of Artificial Sequence: Synthetic oligonucleotide
  Antisense strand to SEQ ID NO: 665464
augagucaccuuuauaaac

SEQ ID NO: 665466 - RNA, 19 nt, Artificial Sequence
  Description of Artificial Sequence: Synthetic oligonucleotide
  Sense strand starting at position 1337 of SEQ ID NO: 585760
ucuucuagucaaggcaaga

SEQ ID NO: 665467 - RNA, 19 nt, Artificial Sequence
  Description of Artificial Sequence: Synthetic oligonucleotide
  Antisense strand to SEQ ID NO: 665466
ucuugccuugacuagaaga

SEQ ID NO: 665468 - RNA, 19 nt, Artificial Sequence
  Description of Artificial Sequence: Synthetic oligonucleotide
  Sense strand starting at position 1522 of SEQ ID NO: 585760
agaucacacgccgaaauaa

SEQ ID NO: 665469 - RNA, 19 nt, Artificial Sequence
  Description of Artificial Sequence: Synthetic oligonucleotide
  Antisense strand to SEQ ID NO: 665468
uuauuucggcgugugaucu

SEQ ID NO: 665470 - RNA, 19 nt, Artificial Sequence
  Description of Artificial Sequence: Synthetic oligonucleotide
  Sense strand starting at position 1679 of SEQ ID NO: 585760
augaaacuuuacuuacgga

SEQ ID NO: 665471 - RNA, 19 nt, Artificial Sequence
  Description of Artificial Sequence: Synthetic oligonucleotide
  Antisense strand to SEQ ID NO: 665470
uccguaaguaaaguuucau

SEQ ID NO: 665472 - RNA, 19 nt, Artificial Sequence
  Description of Artificial Sequence: Synthetic oligonucleotide
  Sense strand starting at position 1695 of SEQ ID NO: 585760
ggaauuggccugcauauau

SEQ ID NO: 665473 - RNA, 19 nt, Artificial Sequence
  Description of Artificial Sequence: Synthetic oligonucleotide
  Antisense strand to SEQ ID NO: 665472
auauaugcaggccaauucc

SEQ ID NO: 665474 - RNA, 19 nt, Artificial Sequence
  Description of Artificial Sequence: Synthetic oligonucleotide
  Sense strand starting at position 1733 of SEQ ID NO: 585760
ccgaauuagagacgacaua

SEQ ID NO: 665475 - RNA, 19 nt, Artificial Sequence
  Description of Artificial Sequence: Synthetic oligonucleotide
  Antisense strand to SEQ ID NO: 665474
uaugucgucucuaauucgg

SEQ ID NO: 665476 - RNA, 19 nt, Artificial Sequence
  Description of Artificial Sequence: Synthetic oligonucleotide
  Sense strand starting at position 2297 of SEQ ID NO: 585760
gguacuuuguucccaaaga

SEQ ID NO: 665477 - RNA, 19 nt, Artificial Sequence
  Description of Artificial Sequence: Synthetic oligonucleotide
  Antisense strand to SEQ ID NO: 665476
ucuuugggaacaaaguacc

SEQ ID NO: 665478 - RNA, 19 nt, Artificial Sequence
  Description of Artificial Sequence: Synthetic oligonucleotide
  Sense strand starting at position 3424 of SEQ ID NO: 585760
gcguuaauucaugauugag

SEQ ID NO: 665479 - RNA, 19 nt, Artificial Sequence
  Description of Artificial Sequence: Synthetic oligonucleotide
  Antisense strand to SEQ ID NO: 665478
cucaaucaugaauuaacgc

SEQ ID NO: 665480 - RNA, 19 nt, Artificial Sequence
  Description of Artificial Sequence: Synthetic oligonucleotide
  Sense strand starting at position 3555 of SEQ ID NO: 585760
uagucuugucuguaagaga

SEQ ID NO: 665481 - RNA, 19 nt, Artificial Sequence
  Description of Artificial Sequence: Synthetic oligonucleotide
  Antisense strand to SEQ ID NO: 665480
ucucuuacagacaagacua

SEQ ID NO: 665482 - RNA, 19 nt, Artificial Sequence
  Description of Artificial Sequence: Synthetic oligonucleotide
  Sense strand starting at position 3661 of SEQ ID NO: 585760
agcucucuguguguauuua

SEQ ID NO: 665483 - RNA, 19 nt, Artificial Sequence
  Description of Artificial Sequence: Synthetic oligonucleotide
  Antisense strand to SEQ ID NO: 665482
uaaauacacacagagagcu

SEQ ID NO: 665484 - RNA, 19 nt, Artificial Sequence
  Description of Artificial Sequence: Synthetic oligonucleotide
  Sense strand starting at position 3676 of SEQ ID NO: 585760
uuuaccgcuguuugauuua

SEQ ID NO: 665485 - RNA, 19 nt, Artificial Sequence
  Description of Artificial Sequence: Synthetic oligonucleotide
  Antisense strand to SEQ ID NO: 665484
uaaaucaaacagcgguaaa

SEQ ID NO: 665486 - RNA, 19 nt, Artificial Sequence
  Description of Artificial Sequence: Synthetic oligonucleotide
  Sense strand starting at position 3679 of SEQ ID NO: 585760
accgcuguuugauuuagaa

SEQ ID NO: 665487 - RNA, 19 nt, Artificial Sequence
  Description of Artificial Sequence: Synthetic oligonucleotide
  Antisense strand to SEQ ID NO: 665486
uucuaaaucaaacagcggu

SEQ ID NO: 665488 - RNA, 19 nt, Artificial Sequence
  Description of Artificial Sequence: Synthetic oligonucleotide
  Sense strand starting at position 3756 of SEQ ID NO: 585760
auugguaaugucggagaga

SEQ ID NO: 665489 - RNA, 19 nt, Artificial Sequence
  Description of Artificial Sequence: Synthetic oligonucleotide
  Antisense strand to SEQ ID NO: 665488
ucucuccgacauuaccaau

SEQ ID NO: 665490 - RNA, 19 nt, Artificial Sequence
  Description of Artificial Sequence: Synthetic oligonucleotide
  Sense strand starting at position 3797 of SEQ ID NO: 585760
guaauugacuaauuggaau

SEQ ID NO: 665491 - RNA, 19 nt, Artificial Sequence
  Description of Artificial Sequence: Synthetic oligonucleotide
  Antisense strand to SEQ ID NO: 665490
auuccaauuagucaauuac

SEQ ID NO: 665492 - RNA, 19 nt, Artificial Sequence
  Description of Artificial Sequence: Synthetic oligonucleotide
  Sense strand starting at position 368 of SEQ ID NO: 585761
gggcuuuaaacccaaacgu

SEQ ID NO: 665493 - RNA, 19 nt, Artificial Sequence
  Description of Artificial Sequence: Synthetic oligonucleotide
  Antisense strand to SEQ ID NO: 665492
acguuuggguuuaaagccc

SEQ ID NO: 665494 - RNA, 19 nt, Artificial Sequence
  Description of Artificial Sequence: Synthetic oligonucleotide
  Sense strand starting at position 392 of SEQ ID NO: 585761
ucuagccaucauugggaaa

SEQ ID NO: 665495 - RNA, 19 nt, Artificial Sequence
  Description of Artificial Sequence: Synthetic oligonucleotide
  Antisense strand to SEQ ID NO: 665494
uuucccaaugauggcuaga

SEQ ID NO: 665496 - RNA, 19 nt, Artificial Sequence
  Description of Artificial Sequence: Synthetic oligonucleotide
  Sense strand starting at position 505 of SEQ ID NO: 585761
ggacuucaguccuugagug

SEQ ID NO: 665497 - RNA, 19 nt, Artificial Sequence
  Description of Artificial Sequence: Synthetic oligonucleotide
  Antisense strand to SEQ ID NO: 665496
cacucaaggacugaagucc

SEQ ID NO: 665498 - RNA, 19 nt, Artificial Sequence
  Description of Artificial Sequence: Synthetic oligonucleotide
  Sense strand starting at position 519 of SEQ ID NO: 585761
gaguguucugcuuguauuu

SEQ ID NO: 665499 - RNA, 19 nt, Artificial Sequence
  Description of Artificial Sequence: Synthetic oligonucleotide
  Antisense strand to SEQ ID NO: 665498
aaauacaagcagaacacuc

SEQ ID NO: 665500 - RNA, 19 nt, Artificial Sequence
  Description of Artificial Sequence: Synthetic oligonucleotide
  Sense strand starting at position 629 of SEQ ID NO: 585761
cuuacuucuuccucuggga

SEQ ID NO: 665501 - RNA, 19 nt, Artificial Sequence
  Description of Artificial Sequence: Synthetic oligonucleotide
  Antisense strand to SEQ ID NO: 665500
ucccagaggaagaaguaag

SEQ ID NO: 665502 - RNA, 19 nt, Artificial Sequence
  Description of Artificial Sequence: Synthetic oligonucleotide
  Sense strand starting at position 939 of SEQ ID NO: 585761
uuaggaaauuauucuucgu

SEQ ID NO: 665503 - RNA, 19 nt, Artificial Sequence
  Description of Artificial Sequence: Synthetic oligonucleotide
  Antisense strand to SEQ ID NO: 665502
acgaagaauaauuuccuaa

SEQ ID NO: 665504 - RNA, 19 nt, Artificial Sequence
  Description of Artificial Sequence: Synthetic oligonucleotide
  Sense strand starting at position 941 of SEQ ID NO: 585761
aggaaauuauucuucguaa

SEQ ID NO: 665505 - RNA, 19 nt, Artificial Sequence
  Description of Artificial Sequence: Synthetic oligonucleotide
  Antisense strand to SEQ ID NO: 665504
uuacgaagaauaauuuccu

SEQ ID NO: 665506 - RNA, 19 nt, Artificial Sequence
  Description of Artificial Sequence: Synthetic oligonucleotide
  Sense strand starting at position 942 of SEQ ID NO: 585761
ggaaauuauucuucguaau

SEQ ID NO: 665507 - RNA, 19 nt, Artificial Sequence
  Description of Artificial Sequence: Synthetic oligonucleotide
  Antisense strand to SEQ ID NO: 665506
auuacgaagaauaauuucc

SEQ ID NO: 665508 - RNA, 19 nt, Artificial Sequence
  Description of Artificial Sequence: Synthetic oligonucleotide
  Sense strand starting at position 1066 of SEQ ID NO: 585761
uuaagugacccguaagacu

SEQ ID NO: 665509 - RNA, 19 nt, Artificial Sequence
  Description of Artificial Sequence: Synthetic oligonucleotide
  Antisense strand to SEQ ID NO: 665508
agucuuacgggucacuuaa

SEQ ID NO: 665510 - RNA, 19 nt, Artificial Sequence
  Description of Artificial Sequence: Synthetic oligonucleotide
  Sense strand starting at position 1111 of SEQ ID NO: 585761
uauucucuuguggauguua

SEQ ID NO: 665511 - RNA, 19 nt, Artificial Sequence
  Description of Artificial Sequence: Synthetic oligonucleotide
  Antisense strand to SEQ ID NO: 665510
uaacauccacaagagaaua

SEQ ID NO: 665512 - RNA, 19 nt, Artificial Sequence
  Description of Artificial Sequence: Synthetic oligonucleotide
  Sense strand starting at position 1147 of SEQ ID NO: 585761
ugcuacaguccauaaagaa

SEQ ID NO: 665513 - RNA, 19 nt, Artificial Sequence
  Description of Artificial Sequence: Synthetic oligonucleotide
  Antisense strand to SEQ ID NO: 665512
uucuuuauggacuguagca

SEQ ID NO: 665514 - RNA, 19 nt, Artificial Sequence
  Description of Artificial Sequence: Synthetic oligonucleotide
  Sense strand starting at position 1214 of SEQ ID NO: 585761
acagacauuuggcaacaaa

SEQ ID NO: 665515 - RNA, 19 nt, Artificial Sequence
  Description of Artificial Sequence: Synthetic oligonucleotide
  Antisense strand to SEQ ID NO: 665514
uuuguugccaaaugucugu

SEQ ID NO: 665516 - RNA, 19 nt, Artificial Sequence
  Description of Artificial Sequence: Synthetic oligonucleotide
  Sense strand starting at position 1424 of SEQ ID NO: 585761
gucagagaauucuccagcu

SEQ ID NO: 665517 - RNA, 19 nt, Artificial Sequence
  Description of Artificial Sequence: Synthetic oligonucleotide
  Antisense strand to SEQ ID NO: 665516
agcuggagaauucucugac

SEQ ID NO: 665518 - RNA, 19 nt, Artificial Sequence
  Description of Artificial Sequence: Synthetic oligonucleotide
  Sense strand starting at position 1794 of SEQ ID NO: 585761
ucaggaagugguugacauu

SEQ ID NO: 665519 - RNA, 19 nt, Artificial Sequence
  Description of Artificial Sequence: Synthetic oligonucleotide
  Antisense strand to SEQ ID NO: 665518
aaugucaaccacuuccuga

SEQ ID NO: 665520 - RNA, 19 nt, Artificial Sequence
  Description of Artificial Sequence: Synthetic oligonucleotide
  Sense strand starting at position 1797 of SEQ ID NO: 585761
ggaagugguugacauuuac

SEQ ID NO: 665521 - RNA, 19 nt, Artificial Sequence
  Description of Artificial Sequence: Synthetic oligonucleotide
  Antisense strand to SEQ ID NO: 665520
guaaaugucaaccacuucc

SEQ ID NO: 665522 - RNA, 19 nt, Artificial Sequence
  Description of Artificial Sequence: Synthetic oligonucleotide
  Sense strand starting at position 1892 of SEQ ID NO: 585761
cccuuaguagacugguuaa

SEQ ID NO: 665523 - RNA, 19 nt, Artificial Sequence
  Description of Artificial Sequence: Synthetic oligonucleotide
  Antisense strand to SEQ ID NO: 665522
uuaaccagucuacuaaggg

SEQ ID NO: 665524 - RNA, 19 nt, Artificial Sequence
  Description of Artificial Sequence: Synthetic oligonucleotide
  Sense strand starting at position 1917 of SEQ ID NO: 585761
gcuucuccuggcuaggaga

SEQ ID NO: 665525 - RNA, 19 nt, Artificial Sequence
  Description of Artificial Sequence: Synthetic oligonucleotide
  Antisense strand to SEQ ID NO: 665524
ucuccuagccaggagaagc

SEQ ID NO: 665526 - RNA, 19 nt, Artificial Sequence
  Description of Artificial Sequence: Synthetic oligonucleotide
  Sense strand starting at position 2007 of SEQ ID NO: 585761
ggagaaucugaauguuucu

SEQ ID NO: 665527 - RNA, 19 nt, Artificial Sequence
  Description of Artificial Sequence: Synthetic oligonucleotide
  Antisense strand to SEQ ID NO: 665526
agaaacauucagauucucc

SEQ ID NO: 665528 - RNA, 19 nt, Artificial Sequence
  Description of Artificial Sequence: Synthetic oligonucleotide
  Sense strand starting at position 2058 of SEQ ID NO: 585761
cucugaguucuagaacuuu

SEQ ID NO: 665529 - RNA, 19 nt, Artificial Sequence
  Description of Artificial Sequence: Synthetic oligonucleotide
  Antisense strand to SEQ ID NO: 665528
aaaguucuagaacucagag

SEQ ID NO: 665530 - RNA, 19 nt, Artificial Sequence
  Description of Artificial Sequence: Synthetic oligonucleotide
  Sense strand starting at position 2083 of SEQ ID NO: 585761
cacuguuaugauugguaag

SEQ ID NO: 665531 - RNA, 19 nt, Artificial Sequence
  Description of Artificial Sequence: Synthetic oligonucleotide
  Antisense strand to SEQ ID NO: 665530
cuuaccaaucauaacagug

SEQ ID NO: 665532 - RNA, 19 nt, Artificial Sequence
  Description of Artificial Sequence: Synthetic oligonucleotide
  Sense strand starting at position 2084 of SEQ ID NO: 585761
acuguuaugauugguaaga

SEQ ID NO: 665533 - RNA, 19 nt, Artificial Sequence
  Description of Artificial Sequence: Synthetic oligonucleotide
  Antisense strand to SEQ ID NO: 665532
ucuuaccaaucauaacagu

SEQ ID NO: 665534 - RNA, 19 nt, Artificial Sequence
  Description of Artificial Sequence: Synthetic oligonucleotide
  Sense strand starting at position 2085 of SEQ ID NO: 585761
cuguuaugauugguaagau

SEQ ID NO: 665535 - RNA, 19 nt, Artificial Sequence
  Description of Artificial Sequence: Synthetic oligonucleotide
  Antisense strand to SEQ ID NO: 665534
aucuuaccaaucauaacag

SEQ ID NO: 665536 - RNA, 19 nt, Artificial Sequence
  Description of Artificial Sequence: Synthetic oligonucleotide
  Sense strand starting at position 2139 of SEQ ID NO: 585761
uuacuuaauugggcagauu

SEQ ID NO: 665537 - RNA, 19 nt, Artificial Sequence
  Description of Artificial Sequence: Synthetic oligonucleotide
  Antisense strand to SEQ ID NO: 665536
aaucugcccaauuaaguaa

SEQ ID NO: 665538 - RNA, 19 nt, Artificial Sequence
  Description of Artificial Sequence: Synthetic oligonucleotide
  Sense strand starting at position 2210 of SEQ ID NO: 585761
gcaaguuugcaagauauau

SEQ ID NO: 665539 - RNA, 19 nt, Artificial Sequence
  Description of Artificial Sequence: Synthetic oligonucleotide
  Antisense strand to SEQ ID NO: 665538
auauaucuugcaaacuugc

SEQ ID NO: 665540 - RNA, 19 nt, Artificial Sequence
  Description of Artificial Sequence: Synthetic oligonucleotide
  Sense strand starting at position 2475 of SEQ ID NO: 585761
acugacuauucuguaaaga

SEQ ID NO: 665541 - RNA, 19 nt, Artificial Sequence
  Description of Artificial Sequence: Synthetic oligonucleotide
  Antisense strand to SEQ ID NO: 665540
ucuuuacagaauagucagu

SEQ ID NO: 665542 - RNA, 19 nt, Artificial Sequence
  Description of Artificial Sequence: Synthetic oligonucleotide
  Sense strand starting at position 2589 of SEQ ID NO: 585761
auggaacuauuguuguauu

SEQ ID NO: 665543 - RNA, 19 nt, Artificial Sequence
  Description of Artificial Sequence: Synthetic oligonucleotide
  Antisense strand to SEQ ID NO: 665542
aauacaacaauaguuccau

SEQ ID NO: 665544 - RNA, 19 nt, Artificial Sequence
  Description of Artificial Sequence: Synthetic oligonucleotide
  Sense strand starting at position 2680 of SEQ ID NO: 585761
guuuaccuugcauauguga

SEQ ID NO: 665545 - RNA, 19 nt, Artificial Sequence
  Description of Artificial Sequence: Synthetic oligonucleotide
  Antisense strand to SEQ ID NO: 665544
ucacauaugcaagguaaac

SEQ ID NO: 665546 - RNA, 19 nt, Artificial Sequence
  Description of Artificial Sequence: Synthetic oligonucleotide
  Sense strand starting at position 2909 of SEQ ID NO: 585761
gcaauagcagggugugaaa

SEQ ID NO: 665547 - RNA, 19 nt, Artificial Sequence
  Description of Artificial Sequence: Synthetic oligonucleotide
  Antisense strand to SEQ ID NO: 665546
uuucacacccugcuauugc

SEQ ID NO: 665548 - RNA, 19 nt, Artificial Sequence
  Description of Artificial Sequence: Synthetic oligonucleotide
  Sense strand starting at position 3095 of SEQ ID NO: 585761
cuuguagucaucgauggau

SEQ ID NO: 665549 - RNA, 19 nt, Artificial Sequence
  Description of Artificial Sequence: Synthetic oligonucleotide
  Antisense strand to SEQ ID NO: 665548
auccaucgaugacuacaag

SEQ ID NO: 665550 - RNA, 19 nt, Artificial Sequence
  Description of Artificial Sequence: Synthetic oligonucleotide
  Sense strand starting at position 3097 of SEQ ID NO: 585761
uguagucaucgauggauaa

SEQ ID NO: 665551 - RNA, 19 nt, Artificial Sequence
  Description of Artificial Sequence: Synthetic oligonucleotide
  Antisense strand to SEQ ID NO: 665550
uuauccaucgaugacuaca

SEQ ID NO: 665552 - RNA, 19 nt, Artificial Sequence
  Description of Artificial Sequence: Synthetic oligonucleotide
  Sense strand starting at position 3098 of SEQ ID NO: 585761
guagucaucgauggauaaa

SEQ ID NO: 665553 - RNA, 19 nt, Artificial Sequence
  Description of Artificial Sequence: Synthetic oligonucleotide
  Antisense strand to SEQ ID NO: 665552
uuuauccaucgaugacuac

SEQ ID NO: 665554 - RNA, 19 nt, Artificial Sequence
  Description of Artificial Sequence: Synthetic oligonucleotide
  Sense strand starting at position 3316 of SEQ ID NO: 585761
aacguaacaucuuugagua

SEQ ID NO: 665555 - RNA, 19 nt, Artificial Sequence
  Description of Artificial Sequence: Synthetic oligonucleotide
  Antisense strand to SEQ ID NO: 665554
uacucaaagauguuacguu

SEQ ID NO: 665556 - RNA, 19 nt, Artificial Sequence
  Description of Artificial Sequence: Synthetic oligonucleotide
  Sense strand starting at position 3317 of SEQ ID NO: 585761
acguaacaucuuugaguag

SEQ ID NO: 665557 - RNA, 19 nt, Artificial Sequence
  Description of Artificial Sequence: Synthetic oligonucleotide
  Antisense strand to SEQ ID NO: 665556
cuacucaaagauguuacgu

SEQ ID NO: 665558 - RNA, 19 nt, Artificial Sequence
  Description of Artificial Sequence: Synthetic oligonucleotide
  Sense strand starting at position 3488 of SEQ ID NO: 585761
aggcaagcauuaucucuaa

SEQ ID NO: 665559 - RNA, 19 nt, Artificial Sequence
  Description of Artificial Sequence: Synthetic oligonucleotide
  Antisense strand to SEQ ID NO: 665558
uuagagauaaugcuugccu

SEQ ID NO: 665560 - RNA, 19 nt, Artificial Sequence
  Description of Artificial Sequence: Synthetic oligonucleotide
  Sense strand starting at position 3501 of SEQ ID NO: 585761
cucuaaauaguugaauagu

SEQ ID NO: 665561 - RNA, 19 nt, Artificial Sequence
  Description of Artificial Sequence: Synthetic oligonucleotide
  Antisense strand to SEQ ID NO: 665560
acuauucaacuauuuagag

SEQ ID NO: 665562 - RNA, 19 nt, Artificial Sequence
  Description of Artificial Sequence: Synthetic oligonucleotide
  Sense strand starting at position 3675 of SEQ ID NO: 585761
gcuaaagcagccuaaauau

SEQ ID NO: 665563 - RNA, 19 nt, Artificial Sequence
  Description of Artificial Sequence: Synthetic oligonucleotide
  Antisense strand to SEQ ID NO: 665562
auauuuaggcugcuuuagc

SEQ ID NO: 665564 - RNA, 19 nt, Artificial Sequence
  Description of Artificial Sequence: Synthetic oligonucleotide
  Sense strand starting at position 3685 of SEQ ID NO: 585761
ccuaaauaugggcaagcuu

SEQ ID NO: 665565 - RNA, 19 nt, Artificial Sequence
  Description of Artificial Sequence: Synthetic oligonucleotide
  Antisense strand to SEQ ID NO: 665564
aagcuugcccauauuuagg

SEQ ID NO: 665566 - RNA, 19 nt, Artificial Sequence
  Description of Artificial Sequence: Synthetic oligonucleotide
  Sense strand starting at position 3751 of SEQ ID NO: 585761
ugcugugaacgugauuuau

SEQ ID NO: 665567 - RNA, 19 nt, Artificial Sequence
  Description of Artificial Sequence: Synthetic oligonucleotide
  Antisense strand to SEQ ID NO: 665566
auaaaucacguucacagca

SEQ ID NO: 665568 - RNA, 19 nt, Artificial Sequence
  Description of Artificial Sequence: Synthetic oligonucleotide
  Sense strand starting at position 3963 of SEQ ID NO: 585761
ugcccacuccuggaucaau

SEQ ID NO: 665569 - RNA, 19 nt, Artificial Sequence
  Description of Artificial Sequence: Synthetic oligonucleotide
  Antisense strand to SEQ ID NO: 665568
auugauccaggagugggca

SEQ ID NO: 665570 - RNA, 19 nt, Artificial Sequence
  Description of Artificial Sequence: Synthetic oligonucleotide
  Sense strand starting at position 3982 of SEQ ID NO: 585761
accucauucugcccugaga

SEQ ID NO: 665571 - RNA, 19 nt, Artificial Sequence
  Description of Artificial Sequence: Synthetic oligonucleotide
  Antisense strand to SEQ ID NO: 665570
ucucagggcagaaugaggu

SEQ ID NO: 665572 - RNA, 19 nt, Artificial Sequence
  Description of Artificial Sequence: Synthetic oligonucleotide
  Sense strand starting at position 17 of SEQ ID NO: 585762
ucccaucuaccuuagguau

SEQ ID NO: 665573 - RNA, 19 nt, Artificial Sequence
  Description of Artificial Sequence: Synthetic oligonucleotide
  Antisense strand to SEQ ID NO: 665572
auaccuaagguagauggga

SEQ ID NO: 665574 - RNA, 19 nt, Artificial Sequence
  Description of Artificial Sequence: Synthetic oligonucleotide
  Sense strand starting at position 167 of SEQ ID NO: 585762
cuauuagggaguuggguuu

SEQ ID NO: 665575 - RNA, 19 nt, Artificial Sequence
  Description of Artificial Sequence: Synthetic oligonucleotide
  Antisense strand to SEQ ID NO: 665574
aaacccaacucccuaauag

SEQ ID NO: 665576 - RNA, 19 nt, Artificial Sequence
  Description of Artificial Sequence: Synthetic oligonucleotide
  Sense strand starting at position 200 of SEQ ID NO: 585762
cugaguauguuugccauca

SEQ ID NO: 665577 - RNA, 19 nt, Artificial Sequence
  Description of Artificial Sequence: Synthetic oligonucleotide
  Antisense strand to SEQ ID NO: 665576
ugauggcaaacauacucag

SEQ ID NO: 665578 - RNA, 19 nt, Artificial Sequence
  Description of Artificial Sequence: Synthetic oligonucleotide
  Sense strand starting at position 201 of SEQ ID NO: 585762
ugaguauguuugccaucau

SEQ ID NO: 665579 - RNA, 19 nt, Artificial Sequence
  Description of Artificial Sequence: Synthetic oligonucleotide
  Antisense strand to SEQ ID NO: 665578
augauggcaaacauacuca

SEQ ID NO: 665580 - RNA, 19 nt, Artificial Sequence
  Description of Artificial Sequence: Synthetic oligonucleotide
  Sense strand starting at position 229 of SEQ ID NO: 585762
gggcucuucuaagucuuga

SEQ ID NO: 665581 - RNA, 19 nt, Artificial Sequence
  Description of Artificial Sequence: Synthetic oligonucleotide
  Antisense strand to SEQ ID NO: 665580
ucaagacuuagaagagccc

SEQ ID NO: 665582 - RNA, 19 nt, Artificial Sequence
  Description of Artificial Sequence: Synthetic oligonucleotide
  Sense strand starting at position 264 of SEQ ID NO: 585762
cucauauuccugugcaccu

SEQ ID NO: 665583 - RNA, 19 nt, Artificial Sequence
  Description of Artificial Sequence: Synthetic oligonucleotide
  Antisense strand to SEQ ID NO: 665582
aggugcacaggaauaugag

SEQ ID NO: 665584 - RNA, 19 nt, Artificial Sequence
  Description of Artificial Sequence: Synthetic oligonucleotide
  Sense strand starting at position 282 of SEQ ID NO: 585762
uucugcaauccugagcguu

SEQ ID NO: 665585 - RNA, 19 nt, Artificial Sequence
  Description of Artificial Sequence: Synthetic oligonucleotide
  Antisense strand to SEQ ID NO: 665584
aacgcucaggauugcagaa

SEQ ID NO: 665586 - RNA, 19 nt, Artificial Sequence
  Description of Artificial Sequence: Synthetic oligonucleotide
  Sense strand starting at position 296 of SEQ ID NO: 585762
gcguuaccugugcugucua

SEQ ID NO: 665587 - RNA, 19 nt, Artificial Sequence
  Description of Artificial Sequence: Synthetic oligonucleotide
  Antisense strand to SEQ ID NO: 665586
uagacagcacagguaacgc

SEQ ID NO: 665588 - RNA, 19 nt, Artificial Sequence
  Description of Artificial Sequence: Synthetic oligonucleotide
  Sense strand starting at position 396 of SEQ ID NO: 585762
agagcucuggugugaagua

SEQ ID NO: 665589 - RNA, 19 nt, Artificial Sequence
  Description of Artificial Sequence: Synthetic oligonucleotide
  Antisense strand to SEQ ID NO: 665588
uacuucacaccagagcucu

SEQ ID NO: 665590 - RNA, 19 nt, Artificial Sequence
  Description of Artificial Sequence: Synthetic oligonucleotide
  Sense strand starting at position 401 of SEQ ID NO: 585762
ucuggugugaaguaccauu

SEQ ID NO: 665591 - RNA, 19 nt, Artificial Sequence
  Description of Artificial Sequence: Synthetic oligonucleotide
  Antisense strand to SEQ ID NO: 665590
aaugguacuucacaccaga

SEQ ID NO: 665592 - RNA, 19 nt, Artificial Sequence
  Description of Artificial Sequence: Synthetic oligonucleotide
  Sense strand starting at position 548 of SEQ ID NO: 585762
ucacacuuccuggaaguca

SEQ ID NO: 665593 - RNA, 19 nt, Artificial Sequence
  Description of Artificial Sequence: Synthetic oligonucleotide
  Antisense strand to SEQ ID NO: 665592
ugacuuccaggaaguguga

SEQ ID NO: 665594 - RNA, 19 nt, Artificial Sequence
  Description of Artificial Sequence: Synthetic oligonucleotide
  Sense strand starting at position 638 of SEQ ID NO: 585762
cauccuguggcccgauuau

SEQ ID NO: 665595 - RNA, 19 nt, Artificial Sequence
  Description of Artificial Sequence: Synthetic oligonucleotide
  Antisense strand to SEQ ID NO: 665594
auaaucgggccacaggaug

SEQ ID NO: 665596 - RNA, 19 nt, Artificial Sequence
  Description of Artificial Sequence: Synthetic oligonucleotide
  Sense strand starting at position 647 of SEQ ID NO: 585762
gcccgauuaucucugaugu

SEQ ID NO: 665597 - RNA, 19 nt, Artificial Sequence
  Description of Artificial Sequence: Synthetic oligonucleotide
  Antisense strand to SEQ ID NO: 665596
acaucagagauaaucgggc

SEQ ID NO: 665598 - RNA, 19 nt, Artificial Sequence
  Description of Artificial Sequence: Synthetic oligonucleotide
  Sense strand starting at position 648 of SEQ ID NO: 585762
cccgauuaucucugauguc

SEQ ID NO: 665599 - RNA, 19 nt, Artificial Sequence
  Description of Artificial Sequence: Synthetic oligonucleotide
  Antisense strand to SEQ ID NO: 665598
gacaucagagauaaucggg

SEQ ID NO: 665600 - RNA, 19 nt, Artificial Sequence
  Description of Artificial Sequence: Synthetic oligonucleotide
  Sense strand starting at position 674 of SEQ ID NO: 585762
ccuuauugccuccaguaua

SEQ ID NO: 665601 - RNA, 19 nt, Artificial Sequence
  Description of Artificial Sequence: Synthetic oligonucleotide
  Antisense strand to SEQ ID NO: 665600
uauacuggaggcaauaagg

SEQ ID NO: 665602 - RNA, 19 nt, Artificial Sequence
  Description of Artificial Sequence: Synthetic oligonucleotide
  Sense strand starting at position 692 of SEQ ID NO: 585762
acacaaguuuaggaaauca

SEQ ID NO: 665603 - RNA, 19 nt, Artificial Sequence
  Description of Artificial Sequence: Synthetic oligonucleotide
  Antisense strand to SEQ ID NO: 665602
ugauuuccuaaacuugugu

SEQ ID NO: 665604 - RNA, 19 nt, Artificial Sequence
  Description of Artificial Sequence: Synthetic oligonucleotide
  Sense strand starting at position 756 of SEQ ID NO: 585762
ugcucaugugaaugguaag

SEQ ID NO: 665605 - RNA, 19 nt, Artificial Sequence
  Description of Artificial Sequence: Synthetic oligonucleotide
  Antisense strand to SEQ ID NO: 665604
cuuaccauucacaugagca

SEQ ID NO: 665606 - RNA, 19 nt, Artificial Sequence
  Description of Artificial Sequence: Synthetic oligonucleotide
  Sense strand starting at position 767 of SEQ ID NO: 585762
augguaagcuucucaaauu

SEQ ID NO: 665607 - RNA, 19 nt, Artificial Sequence
  Description of Artificial Sequence: Synthetic oligonucleotide
  Antisense strand to SEQ ID NO: 665606
aauuugagaagcuuaccau

SEQ ID NO: 665608 - RNA, 19 nt, Artificial Sequence
  Description of Artificial Sequence: Synthetic oligonucleotide
  Sense strand starting at position 768 of SEQ ID NO: 585762
ugguaagcuucucaaauuu

SEQ ID NO: 665609 - RNA, 19 nt, Artificial Sequence
  Description of Artificial Sequence: Synthetic oligonucleotide
  Antisense strand to SEQ ID NO: 665608
aaauuugagaagcuuacca

SEQ ID NO: 665610 - RNA, 19 nt, Artificial Sequence
  Description of Artificial Sequence: Synthetic oligonucleotide
  Sense strand starting at position 915 of SEQ ID NO: 585762
gguagaaagcaauguaggu

SEQ ID NO: 665611 - RNA, 19 nt, Artificial Sequence
  Description of Artificial Sequence: Synthetic oligonucleotide
  Antisense strand to SEQ ID NO: 665610
accuacauugcuuucuacc

SEQ ID NO: 665612 - RNA, 19 nt, Artificial Sequence
  Description of Artificial Sequence: Synthetic oligonucleotide
  Sense strand starting at position 919 of SEQ ID NO: 585762
gaaagcaauguagguauua

SEQ ID NO: 665613 - RNA, 19 nt, Artificial Sequence
  Description of Artificial Sequence: Synthetic oligonucleotide
  Antisense strand to SEQ ID NO: 665612
uaauaccuacauugcuuuc

SEQ ID NO: 665614 - RNA, 19 nt, Artificial Sequence
  Description of Artificial Sequence: Synthetic oligonucleotide
  Sense strand starting at position 920 of SEQ ID NO: 585762
aaagcaauguagguauuaa

SEQ ID NO: 665615 - RNA, 19 nt, Artificial Sequence
  Description of Artificial Sequence: Synthetic oligonucleotide
  Antisense strand to SEQ ID NO: 665614
uuaauaccuacauugcuuu

SEQ ID NO: 665616 - RNA, 19 nt, Artificial Sequence
  Description of Artificial Sequence: Synthetic oligonucleotide
  Sense strand starting at position 974 of SEQ ID NO: 585762
uauagagggcguuaggaau

SEQ ID NO: 665617 - RNA, 19 nt, Artificial Sequence
  Description of Artificial Sequence: Synthetic oligonucleotide
  Antisense strand to SEQ ID NO: 665616
auuccuaacgcccucuaua

SEQ ID NO: 665618 - RNA, 19 nt, Artificial Sequence
  Description of Artificial Sequence: Synthetic oligonucleotide
  Sense strand starting at position 1017 of SEQ ID NO: 585762
gcgcgaguccgauuccuga

SEQ ID NO: 665619 - RNA, 19 nt, Artificial Sequence
  Description of Artificial Sequence: Synthetic oligonucleotide
  Antisense strand to SEQ ID NO: 665618
ucaggaaucggacucgcgc

SEQ ID NO: 665620 - RNA, 19 nt, Artificial Sequence
  Description of Artificial Sequence: Synthetic oligonucleotide
  Sense strand starting at position 1100 of SEQ ID NO: 585762
gggcuugucuuaccaacca

SEQ ID NO: 665621 - RNA, 19 nt, Artificial Sequence
  Description of Artificial Sequence: Synthetic oligonucleotide
  Antisense strand to SEQ ID NO: 665620
ugguugguaagacaagccc

SEQ ID NO: 665622 - RNA, 19 nt, Artificial Sequence
  Description of Artificial Sequence: Synthetic oligonucleotide
  Sense strand starting at position 1135 of SEQ ID NO: 585762
ggacgaaauaaugggcuaa

SEQ ID NO: 665623 - RNA, 19 nt, Artificial Sequence
  Description of Artificial Sequence: Synthetic oligonucleotide
  Antisense strand to SEQ ID NO: 665622
uuagcccauuauuucgucc

SEQ ID NO: 665624 - RNA, 19 nt, Artificial Sequence
  Description of Artificial Sequence: Synthetic oligonucleotide
  Sense strand starting at position 1137 of SEQ ID NO: 585762
acgaaauaaugggcuaaua

SEQ ID NO: 665625 - RNA, 19 nt, Artificial Sequence
  Description of Artificial Sequence: Synthetic oligonucleotide
  Antisense strand to SEQ ID NO: 665624
uauuagcccauuauuucgu

SEQ ID NO: 665626 - RNA, 19 nt, Artificial Sequence
  Description of Artificial Sequence: Synthetic oligonucleotide
  Sense strand starting at position 2295 of SEQ ID NO: 585762
cuagucuucgcgaguguca

SEQ ID NO: 665627 - RNA, 19 nt, Artificial Sequence
  Description of Artificial Sequence: Synthetic oligonucleotide
  Antisense strand to SEQ ID NO: 665626
ugacacucgcgaagacuag

SEQ ID NO: 665628 - RNA, 19 nt, Artificial Sequence
  Description of Artificial Sequence: Synthetic oligonucleotide
  Sense strand starting at position 2304 of SEQ ID NO: 585762
gcgagugucagucacugua

SEQ ID NO: 665629 - RNA, 19 nt, Artificial Sequence
  Description of Artificial Sequence: Synthetic oligonucleotide
  Antisense strand to SEQ ID NO: 665628
uacagugacugacacucgc

SEQ ID NO: 665630 - RNA, 19 nt, Artificial Sequence
  Description of Artificial Sequence: Synthetic oligonucleotide
  Sense strand starting at position 2306 of SEQ ID NO: 585762
gagugucagucacuguagu

SEQ ID NO: 665631 - RNA, 19 nt, Artificial Sequence
  Description of Artificial Sequence: Synthetic oligonucleotide
  Antisense strand to SEQ ID NO: 665630
acuacagugacugacacuc

SEQ ID NO: 665632 - RNA, 19 nt, Artificial Sequence
  Description of Artificial Sequence: Synthetic oligonucleotide
  Sense strand starting at position 2410 of SEQ ID NO: 585762
cucuucuacccguggaagu

SEQ ID NO: 665633 - RNA, 19 nt, Artificial Sequence
  Description of Artificial Sequence: Synthetic oligonucleotide
  Antisense strand to SEQ ID NO: 665632
acuuccacggguagaagag

SEQ ID NO: 665634 - RNA, 19 nt, Artificial Sequence
  Description of Artificial Sequence: Synthetic oligonucleotide
  Sense strand starting at position 2421 of SEQ ID NO: 585762
guggaagucugugcucacu

SEQ ID NO: 665635 - RNA, 19 nt, Artificial Sequence
  Description of Artificial Sequence: Synthetic oligonucleotide
  Antisense strand to SEQ ID NO: 665634
agugagcacagacuuccac

SEQ ID NO: 665636 - RNA, 19 nt, Artificial Sequence
  Description of Artificial Sequence: Synthetic oligonucleotide
  Sense strand starting at position 2547 of SEQ ID NO: 585762
uccggauccgcguuugaau

SEQ ID NO: 665637 - RNA, 19 nt, Artificial Sequence
  Description of Artificial Sequence: Synthetic oligonucleotide
  Antisense strand to SEQ ID NO: 665636
auucaaacgcggauccgga

SEQ ID NO: 665638 - RNA, 19 nt, Artificial Sequence
  Description of Artificial Sequence: Synthetic oligonucleotide
  Sense strand starting at position 3137 of SEQ ID NO: 585762
ccaucaugccaaugucuga

SEQ ID NO: 665639 - RNA, 19 nt, Artificial Sequence
  Description of Artificial Sequence: Synthetic oligonucleotide
  Antisense strand to SEQ ID NO: 665638
ucagacauuggcaugaugg

SEQ ID NO: 665640 - RNA, 19 nt, Artificial Sequence
  Description of Artificial Sequence: Synthetic oligonucleotide
  Sense strand starting at position 3213 of SEQ ID NO: 585762
cccauuucccggugucuga

SEQ ID NO: 665641 - RNA, 19 nt, Artificial Sequence
  Description of Artificial Sequence: Synthetic oligonucleotide
  Antisense strand to SEQ ID NO: 665640
ucagacaccgggaaauggg

SEQ ID NO: 665642 - RNA, 19 nt, Artificial Sequence
  Description of Artificial Sequence: Synthetic oligonucleotide
  Sense strand starting at position 3229 of SEQ ID NO: 585762
ugaccucuucuugggacua

SEQ ID NO: 665643 - RNA, 19 nt, Artificial Sequence
  Description of Artificial Sequence: Synthetic oligonucleotide
  Antisense strand to SEQ ID NO: 665642
uagucccaagaagagguca

SEQ ID NO: 665644 - RNA, 19 nt, Artificial Sequence
  Description of Artificial Sequence: Synthetic oligonucleotide
  Sense strand starting at position 3527 of SEQ ID NO: 585762
cuuaaagaaucagaugaca

SEQ ID NO: 665645 - RNA, 19 nt, Artificial Sequence
  Description of Artificial Sequence: Synthetic oligonucleotide
  Antisense strand to SEQ ID NO: 665644
ugucaucugauucuuuaag

SEQ ID NO: 665646 - RNA, 19 nt, Artificial Sequence
  Description of Artificial Sequence: Synthetic oligonucleotide
  Sense strand starting at position 3966 of SEQ ID NO: 585762
agaagaaagugggcuuuau

SEQ ID NO: 665647 - RNA, 19 nt, Artificial Sequence
  Description of Artificial Sequence: Synthetic oligonucleotide
  Antisense strand to SEQ ID NO: 665646
auaaagcccacuuucuucu

SEQ ID NO: 665648 - RNA, 19 nt, Artificial Sequence
  Description of Artificial Sequence: Synthetic oligonucleotide
  Sense strand starting at position 3975 of SEQ ID NO: 585762
ugggcuuuauggcuuuaua

SEQ ID NO: 665649 - RNA, 19 nt, Artificial Sequence
  Description of Artificial Sequence: Synthetic oligonucleotide
  Antisense strand to SEQ ID NO: 665648
uauaaagccauaaagccca

SEQ ID NO: 665650 - RNA, 19 nt, Artificial Sequence
  Description of Artificial Sequence: Synthetic oligonucleotide
  Sense strand starting at position 3978 of SEQ ID NO: 585762
gcuuuauggcuuuauacug

SEQ ID NO: 665651 - RNA, 19 nt, Artificial Sequence
  Description of Artificial Sequence: Synthetic oligonucleotide
  Antisense strand to SEQ ID NO: 665650
caguauaaagccauaaagc

SEQ ID NO: 665652 - RNA, 19 nt, Artificial Sequence
  Description of Artificial Sequence: Synthetic oligonucleotide
  Sense strand starting at position 93 of SEQ ID NO: 585763
uggauauucccacaaugca

SEQ ID NO: 665653 - RNA, 19 nt, Artificial Sequence
  Description of Artificial Sequence: Synthetic oligonucleotide
  Antisense strand to SEQ ID NO: 665652
ugcauugugggaauaucca

SEQ ID NO: 665654 - RNA, 19 nt, Artificial Sequence
  Description of Artificial Sequence: Synthetic oligonucleotide
  Sense strand starting at position 551 of SEQ ID NO: 585763
cuugacaacuccuggagga

SEQ ID NO: 665655 - RNA, 19 nt, Artificial Sequence
  Description of Artificial Sequence: Synthetic oligonucleotide
  Antisense strand to SEQ ID NO: 665654
uccuccaggaguugucaag

SEQ ID NO: 665656 - RNA, 19 nt, Artificial Sequence
  Description of Artificial Sequence: Synthetic oligonucleotide
  Sense strand starting at position 621 of SEQ ID NO: 585763
gcccuccuucuugaaguuu

SEQ ID NO: 665657 - RNA, 19 nt, Artificial Sequence
  Description of Artificial Sequence: Synthetic oligonucleotide
  Antisense strand to SEQ ID NO: 665656
aaacuucaagaaggagggc

SEQ ID NO: 665658 - RNA, 19 nt, Artificial Sequence
  Description of Artificial Sequence: Synthetic oligonucleotide
  Sense strand starting at position 976 of SEQ ID NO: 585763
ggucgucugccacucuauu

SEQ ID NO: 665659 - RNA, 19 nt, Artificial Sequence
  Description of Artificial Sequence: Synthetic oligonucleotide
  Antisense strand to SEQ ID NO: 665658
aauagaguggcagacgacc

SEQ ID NO: 665660 - RNA, 19 nt, Artificial Sequence
  Description of Artificial Sequence: Synthetic oligonucleotide
  Sense strand starting at position 1180 of SEQ ID NO: 585763
uggaauaauccaggccaca

SEQ ID NO: 665661 - RNA, 19 nt, Artificial Sequence
  Description of Artificial Sequence: Synthetic oligonucleotide
  Antisense strand to SEQ ID NO: 665660
uguggccuggauuauucca

SEQ ID NO: 665662 - RNA, 19 nt, Artificial Sequence
  Description of Artificial Sequence: Synthetic oligonucleotide
  Sense strand starting at position 1220 of SEQ ID NO: 585763
ccaaaucccucugaaugga

SEQ ID NO: 665663 - RNA, 19 nt, Artificial Sequence
  Description of Artificial Sequence: Synthetic oligonucleotide
  Antisense strand to SEQ ID NO: 665662
uccauucagagggauuugg

SEQ ID NO: 665664 - RNA, 19 nt, Artificial Sequence
  Description of Artificial Sequence: Synthetic oligonucleotide
  Sense strand starting at position 1292 of SEQ ID NO: 585763
ggcauccugucauuacgau

SEQ ID NO: 665665 - RNA, 19 nt, Artificial Sequence
  Description of Artificial Sequence: Synthetic oligonucleotide
  Antisense strand to SEQ ID NO: 665664
aucguaaugacaggaugcc

SEQ ID NO: 665666 - RNA, 19 nt, Artificial Sequence
  Description of Artificial Sequence: Synthetic oligonucleotide
  Sense strand starting at position 1619 of SEQ ID NO: 585763
acaguagggcucuggguua

SEQ ID NO: 665667 - RNA, 19 nt, Artificial Sequence
  Description of Artificial Sequence: Synthetic oligonucleotide
  Antisense strand to SEQ ID NO: 665666
uaacccagagcccuacugu

SEQ ID NO: 665668 - RNA, 19 nt, Artificial Sequence
  Description of Artificial Sequence: Synthetic oligonucleotide
  Sense strand starting at position 1670 of SEQ ID NO: 585763
cuguguggucacugagugu

SEQ ID NO: 665669 - RNA, 19 nt, Artificial Sequence
  Description of Artificial Sequence: Synthetic oligonucleotide
  Antisense strand to SEQ ID NO: 665668
acacucagugaccacacag

SEQ ID NO: 665670 - RNA, 19 nt, Artificial Sequence
  Description of Artificial Sequence: Synthetic oligonucleotide
  Sense strand starting at position 1751 of SEQ ID NO: 585763
ccucaaguugaauggaaau

SEQ ID NO: 665671 - RNA, 19 nt, Artificial Sequence
  Description of Artificial Sequence: Synthetic oligonucleotide
  Antisense strand to SEQ ID NO: 665670
auuuccauucaacuugagg

SEQ ID NO: 665672 - RNA, 19 nt, Artificial Sequence
  Description of Artificial Sequence: Synthetic oligonucleotide
  Sense strand starting at position 1778 of SEQ ID NO: 585763
cagaucuauugagagaguu

SEQ ID NO: 665673 - RNA, 19 nt, Artificial Sequence
  Description of Artificial Sequence: Synthetic oligonucleotide
  Antisense strand to SEQ ID NO: 665672
aacucucucaauagaucug

SEQ ID NO: 665674 - RNA, 19 nt, Artificial Sequence
  Description of Artificial Sequence: Synthetic oligonucleotide
  Sense strand starting at position 1805 of SEQ ID NO: 585763
accucuuguugggcugaua

SEQ ID NO: 665675 - RNA, 19 nt, Artificial Sequence
  Description of Artificial Sequence: Synthetic oligonucleotide
  Antisense strand to SEQ ID NO: 665674
uaucagcccaacaagaggu

SEQ ID NO: 665676 - RNA, 19 nt, Artificial Sequence
  Description of Artificial Sequence: Synthetic oligonucleotide
  Sense strand starting at position 1816 of SEQ ID NO: 585763
ggcugauacucacccaaag

SEQ ID NO: 665677 - RNA, 19 nt, Artificial Sequence
  Description of Artificial Sequence: Synthetic oligonucleotide
  Antisense strand to SEQ ID NO: 665676
cuuugggugaguaucagcc

SEQ ID NO: 665678 - RNA, 19 nt, Artificial Sequence
  Description of Artificial Sequence: Synthetic oligonucleotide
  Sense strand starting at position 2563 of SEQ ID NO: 585763
acuaaugucuggcaacuga

SEQ ID NO: 665679 - RNA, 19 nt, Artificial Sequence
  Description of Artificial Sequence: Synthetic oligonucleotide
  Antisense strand to SEQ ID NO: 665678
ucaguugccagacauuagu

SEQ ID NO: 665680 - RNA, 19 nt, Artificial Sequence
  Description of Artificial Sequence: Synthetic oligonucleotide
  Sense strand starting at position 2567 of SEQ ID NO: 585763
augucuggcaacugaagaa

SEQ ID NO: 665681 - RNA, 19 nt, Artificial Sequence
  Description of Artificial Sequence: Synthetic oligonucleotide
  Antisense strand to SEQ ID NO: 665680
uucuucaguugccagacau

SEQ ID NO: 665682 - RNA, 19 nt, Artificial Sequence
  Description of Artificial Sequence: Synthetic oligonucleotide
  Sense strand starting at position 2595 of SEQ ID NO: 585763
ucgcaagauuuauggcaga

SEQ ID NO: 665683 - RNA, 19 nt, Artificial Sequence
  Description of Artificial Sequence: Synthetic oligonucleotide
  Antisense strand to SEQ ID NO: 665682
ucugccauaaaucuugcga

SEQ ID NO: 665684 - RNA, 19 nt, Artificial Sequence
  Description of Artificial Sequence: Synthetic oligonucleotide
  Sense strand starting at position 2598 of SEQ ID NO: 585763
caagauuuauggcagaaug

SEQ ID NO: 665685 - RNA, 19 nt, Artificial Sequence
  Description of Artificial Sequence: Synthetic oligonucleotide
  Antisense strand to SEQ ID NO: 665684
cauucugccauaaaucuug

SEQ ID NO: 665686 - RNA, 19 nt, Artificial Sequence
  Description of Artificial Sequence: Synthetic oligonucleotide
  Sense strand starting at position 2693 of SEQ ID NO: 585763
aaagaaaugguggguuucu

SEQ ID NO: 665687 - RNA, 19 nt, Artificial Sequence
  Description of Artificial Sequence: Synthetic oligonucleotide
  Antisense strand to SEQ ID NO: 665686
agaaacccaccauuucuuu

SEQ ID NO: 665688 - RNA, 19 nt, Artificial Sequence
  Description of Artificial Sequence: Synthetic oligonucleotide
  Sense strand starting at position 2702 of SEQ ID NO: 585763
guggguuucugaagggcaa

SEQ ID NO: 665689 - RNA, 19 nt, Artificial Sequence
  Description of Artificial Sequence: Synthetic oligonucleotide
  Antisense strand to SEQ ID NO: 665688
uugcccuucagaaacccac

SEQ ID NO: 665690 - RNA, 19 nt, Artificial Sequence
  Description of Artificial Sequence: Synthetic oligonucleotide
  Sense strand starting at position 2703 of SEQ ID NO: 585763
uggguuucugaagggcaaa

SEQ ID NO: 665691 - RNA, 19 nt, Artificial Sequence
  Description of Artificial Sequence: Synthetic oligonucleotide
  Antisense strand to SEQ ID NO: 665690
uuugcccuucagaaaccca

SEQ ID NO: 665692 - RNA, 19 nt, Artificial Sequence
  Description of Artificial Sequence: Synthetic oligonucleotide
  Sense strand starting at position 2715 of SEQ ID NO: 585763
gggcaaagugcuggaggaa

SEQ ID NO: 665693 - RNA, 19 nt, Artificial Sequence
  Description of Artificial Sequence: Synthetic oligonucleotide
  Antisense strand to SEQ ID NO: 665692
uuccuccagcacuuugccc

SEQ ID NO: 665694 - RNA, 19 nt, Artificial Sequence
  Description of Artificial Sequence: Synthetic oligonucleotide
  Sense strand starting at position 2871 of SEQ ID NO: 585763
gaucaagucugagaccuag

SEQ ID NO: 665695 - RNA, 19 nt, Artificial Sequence
  Description of Artificial Sequence: Synthetic oligonucleotide
  Antisense strand to SEQ ID NO: 665694
cuaggucucagacuugauc

SEQ ID NO: 665696 - RNA, 19 nt, Artificial Sequence
  Description of Artificial Sequence: Synthetic oligonucleotide
  Sense strand starting at position 2948 of SEQ ID NO: 585763
ucagaaauccuguggaccu

SEQ ID NO: 665697 - RNA, 19 nt, Artificial Sequence
  Description of Artificial Sequence: Synthetic oligonucleotide
  Antisense strand to SEQ ID NO: 665696
agguccacaggauuucuga

SEQ ID NO: 665698 - RNA, 19 nt, Artificial Sequence
  Description of Artificial Sequence: Synthetic oligonucleotide
  Sense strand starting at position 2949 of SEQ ID NO: 585763
cagaaauccuguggaccua

SEQ ID NO: 665699 - RNA, 19 nt, Artificial Sequence
  Description of Artificial Sequence: Synthetic oligonucleotide
  Antisense strand to SEQ ID NO: 665698
uagguccacaggauuucug

SEQ ID NO: 665700 - RNA, 19 nt, Artificial Sequence
  Description of Artificial Sequence: Synthetic oligonucleotide
  Sense strand starting at position 3165 of SEQ ID NO: 585763
acaggucuccauggucuua

SEQ ID NO: 665701 - RNA, 19 nt, Artificial Sequence
  Description of Artificial Sequence: Synthetic oligonucleotide
  Antisense strand to SEQ ID NO: 665700
uaagaccauggagaccugu

SEQ ID NO: 665702 - RNA, 19 nt, Artificial Sequence
  Description of Artificial Sequence: Synthetic oligonucleotide
  Sense strand starting at position 3167 of SEQ ID NO: 585763
aggucuccauggucuuaaa

SEQ ID NO: 665703 - RNA, 19 nt, Artificial Sequence
  Description of Artificial Sequence: Synthetic oligonucleotide
  Antisense strand to SEQ ID NO: 665702
uuuaagaccauggagaccu

SEQ ID NO: 665704 - RNA, 19 nt, Artificial Sequence
  Description of Artificial Sequence: Synthetic oligonucleotide
  Sense strand starting at position 3227 of SEQ ID NO: 585763
uccugaaacccuuggccaa

SEQ ID NO: 665705 - RNA, 19 nt, Artificial Sequence
  Description of Artificial Sequence: Synthetic oligonucleotide
  Antisense strand to SEQ ID NO: 665704
uuggccaaggguuucagga

SEQ ID NO: 665706 - RNA, 19 nt, Artificial Sequence
  Description of Artificial Sequence: Synthetic oligonucleotide
  Sense strand starting at position 3228 of SEQ ID NO: 585763
ccugaaacccuuggccaau

SEQ ID NO: 665707 - RNA, 19 nt, Artificial Sequence
  Description of Artificial Sequence: Synthetic oligonucleotide
  Antisense strand to SEQ ID NO: 665706
auuggccaaggguuucagg

SEQ ID NO: 665708 - RNA, 19 nt, Artificial Sequence
  Description of Artificial Sequence: Synthetic oligonucleotide
  Sense strand starting at position 3292 of SEQ ID NO: 585763
gggagcccuuguucugaua

SEQ ID NO: 665709 - RNA, 19 nt, Artificial Sequence
  Description of Artificial Sequence: Synthetic oligonucleotide
  Antisense strand to SEQ ID NO: 665708
uaucagaacaagggcuccc

SEQ ID NO: 665710 - RNA, 19 nt, Artificial Sequence
  Description of Artificial Sequence: Synthetic oligonucleotide
  Sense strand starting at position 3294 of SEQ ID NO: 585763
gagcccuuguucugauaga

SEQ ID NO: 665711 - RNA, 19 nt, Artificial Sequence
  Description of Artificial Sequence: Synthetic oligonucleotide
  Antisense strand to SEQ ID NO: 665710
ucuaucagaacaagggcuc

SEQ ID NO: 665712 - RNA, 19 nt, Artificial Sequence
  Description of Artificial Sequence: Synthetic oligonucleotide
  Sense strand starting at position 3295 of SEQ ID NO: 585763
agcccuuguucugauagag

SEQ ID NO: 665713 - RNA, 19 nt, Artificial Sequence
  Description of Artificial Sequence: Synthetic oligonucleotide
  Antisense strand to SEQ ID NO: 665712
cucuaucagaacaagggcu

SEQ ID NO: 665714 - RNA, 19 nt, Artificial Sequence
  Description of Artificial Sequence: Synthetic oligonucleotide
  Sense strand starting at position 3361 of SEQ ID NO: 585763
gagcuagauuggucuccuc

SEQ ID NO: 665715 - RNA, 19 nt, Artificial Sequence
  Description of Artificial Sequence: Synthetic oligonucleotide
  Antisense strand to SEQ ID NO: 665714
gaggagaccaaucuagcuc

SEQ ID NO: 665716 - RNA, 19 nt, Artificial Sequence
  Description of Artificial Sequence: Synthetic oligonucleotide
  Sense strand starting at position 3597 of SEQ ID NO: 585763
uucccugucucguguucua

SEQ ID NO: 665717 - RNA, 19 nt, Artificial Sequence
  Description of Artificial Sequence: Synthetic oligonucleotide
  Antisense strand to SEQ ID NO: 665716
uagaacacgagacagggaa

SEQ ID NO: 665718 - RNA, 19 nt, Artificial Sequence
  Description of Artificial Sequence: Synthetic oligonucleotide
  Sense strand starting at position 3599 of SEQ ID NO: 585763
cccugucucguguucuauu

SEQ ID NO: 665719 - RNA, 19 nt, Artificial Sequence
  Description of Artificial Sequence: Synthetic oligonucleotide
  Antisense strand to SEQ ID NO: 665718
aauagaacacgagacaggg

SEQ ID NO: 665720 - RNA, 19 nt, Artificial Sequence
  Description of Artificial Sequence: Synthetic oligonucleotide
  Sense strand starting at position 3600 of SEQ ID NO: 585763
ccugucucguguucuauuu

SEQ ID NO: 665721 - RNA, 19 nt, Artificial Sequence
  Description of Artificial Sequence: Synthetic oligonucleotide
  Antisense strand to SEQ ID NO: 665720
aaauagaacacgagacagg

SEQ ID NO: 665722 - RNA, 19 nt, Artificial Sequence
  Description of Artificial Sequence: Synthetic oligonucleotide
  Sense strand starting at position 3831 of SEQ ID NO: 585763
agggaaaguuaguauugga

SEQ ID NO: 665723 - RNA, 19 nt, Artificial Sequence
  Description of Artificial Sequence: Synthetic oligonucleotide
  Antisense strand to SEQ ID NO: 665722
uccaauacuaacuuucccu

SEQ ID NO: 665724 - RNA, 19 nt, Artificial Sequence
  Description of Artificial Sequence: Synthetic oligonucleotide
  Sense strand starting at position 3869 of SEQ ID NO: 585763
acaguuggccugugaauaa

SEQ ID NO: 665725 - RNA, 19 nt, Artificial Sequence
  Description of Artificial Sequence: Synthetic oligonucleotide
  Antisense strand to SEQ ID NO: 665724
uuauucacaggccaacugu

SEQ ID NO: 665726 - RNA, 19 nt, Artificial Sequence
  Description of Artificial Sequence: Synthetic oligonucleotide
  Sense strand starting at position 3881 of SEQ ID NO: 585763
ugaauaaagcuguauacau

SEQ ID NO: 665727 - RNA, 19 nt, Artificial Sequence
  Description of Artificial Sequence: Synthetic oligonucleotide
  Antisense strand to SEQ ID NO: 665726
auguauacagcuuuauuca

SEQ ID NO: 665728 - RNA, 19 nt, Artificial Sequence
  Description of Artificial Sequence: Synthetic oligonucleotide
  Sense strand starting at position 3915 of SEQ ID NO: 585763
cugcaaguucuugaauggu

SEQ ID NO: 665729 - RNA, 19 nt, Artificial Sequence
  Description of Artificial Sequence: Synthetic oligonucleotide
  Antisense strand to SEQ ID NO: 665728
accauucaagaacuugcag

SEQ ID NO: 665730 - RNA, 19 nt, Artificial Sequence
  Description of Artificial Sequence: Synthetic oligonucleotide
  Sense strand starting at position 361 of SEQ ID NO: 585764
gguugaaugacuuggccaa

SEQ ID NO: 665731 - RNA, 19 nt, Artificial Sequence
  Description of Artificial Sequence: Synthetic oligonucleotide
  Antisense strand to SEQ ID NO: 665730
uuggccaagucauucaacc

SEQ ID NO: 665732 - RNA, 19 nt, Artificial Sequence
  Description of Artificial Sequence: Synthetic oligonucleotide
  Sense strand starting at position 363 of SEQ ID NO: 585764
uugaaugacuuggccaaga

SEQ ID NO: 665733 - RNA, 19 nt, Artificial Sequence
  Description of Artificial Sequence: Synthetic oligonucleotide
  Antisense strand to SEQ ID NO: 665732
ucuuggccaagucauucaa

SEQ ID NO: 665734 - RNA, 19 nt, Artificial Sequence
  Description of Artificial Sequence: Synthetic oligonucleotide
  Sense strand starting at position 405 of SEQ ID NO: 585764
gcuggcauuugaccuagua

SEQ ID NO: 665735 - RNA, 19 nt, Artificial Sequence
  Description of Artificial Sequence: Synthetic oligonucleotide
  Antisense strand to SEQ ID NO: 665734
uacuaggucaaaugccagc

SEQ ID NO: 665736 - RNA, 19 nt, Artificial Sequence
  Description of Artificial Sequence: Synthetic oligonucleotide
  Sense strand starting at position 429 of SEQ ID NO: 585764
uacuuugaagcccaagagu

SEQ ID NO: 665737 - RNA, 19 nt, Artificial Sequence
  Description of Artificial Sequence: Synthetic oligonucleotide
  Antisense strand to SEQ ID NO: 665736
acucuugggcuucaaagua

SEQ ID NO: 665738 - RNA, 19 nt, Artificial Sequence
  Description of Artificial Sequence: Synthetic oligonucleotide
  Sense strand starting at position 432 of SEQ ID NO: 585764
uuugaagcccaagaguuua

SEQ ID NO: 665739 - RNA, 19 nt, Artificial Sequence
  Description of Artificial Sequence: Synthetic oligonucleotide
  Antisense strand to SEQ ID NO: 665738
uaaacucuugggcuucaaa

SEQ ID NO: 665740 - RNA, 19 nt, Artificial Sequence
  Description of Artificial Sequence: Synthetic oligonucleotide
  Sense strand starting at position 440 of SEQ ID NO: 585764
ccaagaguuuaaucacugu

SEQ ID NO: 665741 - RNA, 19 nt, Artificial Sequence
  Description of Artificial Sequence: Synthetic oligonucleotide
  Antisense strand to SEQ ID NO: 665740
acagugauuaaacucuugg

SEQ ID NO: 665742 - RNA, 19 nt, Artificial Sequence
  Description of Artificial Sequence: Synthetic oligonucleotide
  Sense strand starting at position 475 of SEQ ID NO: 585764
gguuuaucauucccaaaga

SEQ ID NO: 665743 - RNA, 19 nt, Artificial Sequence
  Description of Artificial Sequence: Synthetic oligonucleotide
  Antisense strand to SEQ ID NO: 665742
ucuuugggaaugauaaacc

SEQ ID NO: 665744 - RNA, 19 nt, Artificial Sequence
  Description of Artificial Sequence: Synthetic oligonucleotide
  Sense strand starting at position 619 of SEQ ID NO: 585764
ggauuaagaugucugacug

SEQ ID NO: 665745 - RNA, 19 nt, Artificial Sequence
  Description of Artificial Sequence: Synthetic oligonucleotide
  Antisense strand to SEQ ID NO: 665744
cagucagacaucuuaaucc

SEQ ID NO: 665746 - RNA, 19 nt, Artificial Sequence
  Description of Artificial Sequence: Synthetic oligonucleotide
  Sense strand starting at position 620 of SEQ ID NO: 585764
gauuaagaugucugacugu

SEQ ID NO: 665747 - RNA, 19 nt, Artificial Sequence
  Description of Artificial Sequence: Synthetic oligonucleotide
  Antisense strand to SEQ ID NO: 665746
acagucagacaucuuaauc

SEQ ID NO: 665748 - RNA, 19 nt, Artificial Sequence
  Description of Artificial Sequence: Synthetic oligonucleotide
  Sense strand starting at position 623 of SEQ ID NO: 585764
uaagaugucugacuguaau

SEQ ID NO: 665749 - RNA, 19 nt, Artificial Sequence
  Description of Artificial Sequence: Synthetic oligonucleotide
  Antisense strand to SEQ ID NO: 665748
auuacagucagacaucuua

SEQ ID NO: 665750 - RNA, 19 nt, Artificial Sequence
  Description of Artificial Sequence: Synthetic oligonucleotide
  Sense strand starting at position 721 of SEQ ID NO: 585764
caacccugagcagguuaaa

SEQ ID NO: 665751 - RNA, 19 nt, Artificial Sequence
  Description of Artificial Sequence: Synthetic oligonucleotide
  Antisense strand to SEQ ID NO: 665750
uuuaaccugcucaggguug

SEQ ID NO: 665752 - RNA, 19 nt, Artificial Sequence
  Description of Artificial Sequence: Synthetic oligonucleotide
  Sense strand starting at position 769 of SEQ ID NO: 585764
cccagagacuaugccaaau

SEQ ID NO: 665753 - RNA, 19 nt, Artificial Sequence
  Description of Artificial Sequence: Synthetic oligonucleotide
  Antisense strand to SEQ ID NO: 665752
auuuggcauagucucuggg

SEQ ID NO: 665754 - RNA, 19 nt, Artificial Sequence
  Description of Artificial Sequence: Synthetic oligonucleotide
  Sense strand starting at position 940 of SEQ ID NO: 585764
ggcaguucugaguaaggaa

SEQ ID NO: 665755 - RNA, 19 nt, Artificial Sequence
  Description of Artificial Sequence: Synthetic oligonucleotide
  Antisense strand to SEQ ID NO: 665754
uuccuuacucagaacugcc

SEQ ID NO: 665756 - RNA, 19 nt, Artificial Sequence
  Description of Artificial Sequence: Synthetic oligonucleotide
  Sense strand starting at position 948 of SEQ ID NO: 585764
ugaguaaggaaauguuugu

SEQ ID NO: 665757 - RNA, 19 nt, Artificial Sequence
  Description of Artificial Sequence: Synthetic oligonucleotide
  Antisense strand to SEQ ID NO: 665756
acaaacauuuccuuacuca

SEQ ID NO: 665758 - RNA, 19 nt, Artificial Sequence
  Description of Artificial Sequence: Synthetic oligonucleotide
  Sense strand starting at position 970 of SEQ ID NO: 585764
cccucuuguggucacacaa

SEQ ID NO: 665759 - RNA, 19 nt, Artificial Sequence
  Description of Artificial Sequence: Synthetic oligonucleotide
  Antisense strand to SEQ ID NO: 665758
uugugugaccacaagaggg

SEQ ID NO: 665760 - RNA, 19 nt, Artificial Sequence
  Description of Artificial Sequence: Synthetic oligonucleotide
  Sense strand starting at position 1111 of SEQ ID NO: 585764
gcaggugucccagauuaaa

SEQ ID NO: 665761 - RNA, 19 nt, Artificial Sequence
  Description of Artificial Sequence: Synthetic oligonucleotide
  Antisense strand to SEQ ID NO: 665760
uuuaaucugggacaccugc

SEQ ID NO: 665762 - RNA, 19 nt, Artificial Sequence
  Description of Artificial Sequence: Synthetic oligonucleotide
  Sense strand starting at position 1195 of SEQ ID NO: 585764
uuaauuaggguuugaaauc

SEQ ID NO: 665763 - RNA, 19 nt, Artificial Sequence
  Description of Artificial Sequence: Synthetic oligonucleotide
  Antisense strand to SEQ ID NO: 665762
gauuucaaacccuaauuaa

SEQ ID NO: 665764 - RNA, 19 nt, Artificial Sequence
  Description of Artificial Sequence: Synthetic oligonucleotide
  Sense strand starting at position 1205 of SEQ ID NO: 585764
uuugaaauccuauacugug

SEQ ID NO: 665765 - RNA, 19 nt, Artificial Sequence
  Description of Artificial Sequence: Synthetic oligonucleotide
  Antisense strand to SEQ ID NO: 665764
cacaguauaggauuucaaa

SEQ ID NO: 665766 - RNA, 19 nt, Artificial Sequence
  Description of Artificial Sequence: Synthetic oligonucleotide
  Sense strand starting at position 1212 of SEQ ID NO: 585764
uccuauacuguguguauuu

SEQ ID NO: 665767 - RNA, 19 nt, Artificial Sequence
  Description of Artificial Sequence: Synthetic oligonucleotide
  Antisense strand to SEQ ID NO: 665766
aaauacacacaguauagga

SEQ ID NO: 665768 - RNA, 19 nt, Artificial Sequence
  Description of Artificial Sequence: Synthetic oligonucleotide
  Sense strand starting at position 1213 of SEQ ID NO: 585764
ccuauacuguguguauuua

SEQ ID NO: 665769 - RNA, 19 nt, Artificial Sequence
  Description of Artificial Sequence: Synthetic oligonucleotide
  Antisense strand to SEQ ID NO: 665768
uaaauacacacaguauagg

SEQ ID NO: 665770 - RNA, 19 nt, Artificial Sequence
  Description of Artificial Sequence: Synthetic oligonucleotide
  Sense strand starting at position 2041 of SEQ ID NO: 585764
aaagaaagcguuuagcaac

SEQ ID NO: 665771 - RNA, 19 nt, Artificial Sequence
  Description of Artificial Sequence: Synthetic oligonucleotide
  Antisense strand to SEQ ID NO: 665770
guugcuaaacgcuuucuuu

SEQ ID NO: 665772 - RNA, 19 nt, Artificial Sequence
  Description of Artificial Sequence: Synthetic oligonucleotide
  Sense strand starting at position 2080 of SEQ ID NO: 585764
gcucuuugcauggaaauga

SEQ ID NO: 665773 - RNA, 19 nt, Artificial Sequence
  Description of Artificial Sequence: Synthetic oligonucleotide
  Antisense strand to SEQ ID NO: 665772
ucauuuccaugcaaagagc

SEQ ID NO: 665774 - RNA, 19 nt, Artificial Sequence
  Description of Artificial Sequence: Synthetic oligonucleotide
  Sense strand starting at position 2211 of SEQ ID NO: 585764
cgagaaaguuaaucuuuaa

SEQ ID NO: 665775 - RNA, 19 nt, Artificial Sequence
  Description of Artificial Sequence: Synthetic oligonucleotide
  Antisense strand to SEQ ID NO: 665774
uuaaagauuaacuuucucg

SEQ ID NO: 665776 - RNA, 19 nt, Artificial Sequence
  Description of Artificial Sequence: Synthetic oligonucleotide
  Sense strand starting at position 2253 of SEQ ID NO: 585764
caaguaguccgugucgcua

SEQ ID NO: 665777 - RNA, 19 nt, Artificial Sequence
  Description of Artificial Sequence: Synthetic oligonucleotide
  Antisense strand to SEQ ID NO: 665776
uagcgacacggacuacuug

SEQ ID NO: 665778 - RNA, 19 nt, Artificial Sequence
  Description of Artificial Sequence: Synthetic oligonucleotide
  Sense strand starting at position 2459 of SEQ ID NO: 585764
cggcuaauuaagggaaaug

SEQ ID NO: 665779 - RNA, 19 nt, Artificial Sequence
  Description of Artificial Sequence: Synthetic oligonucleotide
  Antisense strand to SEQ ID NO: 665778
cauuucccuuaauuagccg

SEQ ID NO: 665780 - RNA, 19 nt, Artificial Sequence
  Description of Artificial Sequence: Synthetic oligonucleotide
  Sense strand starting at position 2701 of SEQ ID NO: 585764
uuccuuggaaggugacaau

SEQ ID NO: 665781 - RNA, 19 nt, Artificial Sequence
  Description of Artificial Sequence: Synthetic oligonucleotide
  Antisense strand to SEQ ID NO: 665780
auugucaccuuccaaggaa

SEQ ID NO: 665782 - RNA, 19 nt, Artificial Sequence
  Description of Artificial Sequence: Synthetic oligonucleotide
  Sense strand starting at position 2735 of SEQ ID NO: 585764
uuuggugauugaucacuuu

SEQ ID NO: 665783 - RNA, 19 nt, Artificial Sequence
  Description of Artificial Sequence: Synthetic oligonucleotide
  Antisense strand to SEQ ID NO: 665782
aaagugaucaaucaccaaa

SEQ ID NO: 665784 - RNA, 19 nt, Artificial Sequence
  Description of Artificial Sequence: Synthetic oligonucleotide
  Sense strand starting at position 2958 of SEQ ID NO: 585764
gggauaagagcauguccuu

SEQ ID NO: 665785 - RNA, 19 nt, Artificial Sequence
  Description of Artificial Sequence: Synthetic oligonucleotide
  Antisense strand to SEQ ID NO: 665784
aaggacaugcucuuauccc

SEQ ID NO: 665786 - RNA, 19 nt, Artificial Sequence
  Description of Artificial Sequence: Synthetic oligonucleotide
  Sense strand starting at position 2961 of SEQ ID NO: 585764
auaagagcauguccuugaa

SEQ ID NO: 665787 - RNA, 19 nt, Artificial Sequence
  Description of Artificial Sequence: Synthetic oligonucleotide
  Antisense strand to SEQ ID NO: 665786
uucaaggacaugcucuuau

SEQ ID NO: 665788 - RNA, 19 nt, Artificial Sequence
  Description of Artificial Sequence: Synthetic oligonucleotide
  Sense strand starting at position 3002 of SEQ ID NO: 585764
ugcugugagcaccaaucaa

SEQ ID NO: 665789 - RNA, 19 nt, Artificial Sequence
  Description of Artificial Sequence: Synthetic oligonucleotide
  Antisense strand to SEQ ID NO: 665788
uugauuggugcucacagca

SEQ ID NO: 665790 - RNA, 19 nt, Artificial Sequence
  Description of Artificial Sequence: Synthetic oligonucleotide
  Sense strand starting at position 3019 of SEQ ID NO: 585764
aaugcaaugggugaauagu

SEQ ID NO: 665791 - RNA, 19 nt, Artificial Sequence
  Description of Artificial Sequence: Synthetic oligonucleotide
  Antisense strand to SEQ ID NO: 665790
acuauucacccauugcauu

SEQ ID NO: 665792 - RNA, 19 nt, Artificial Sequence
  Description of Artificial Sequence: Synthetic oligonucleotide
  Sense strand starting at position 3028 of SEQ ID NO: 585764
ggugaauaguccuuacagg

SEQ ID NO: 665793 - RNA, 19 nt, Artificial Sequence
  Description of Artificial Sequence: Synthetic oligonucleotide
  Antisense strand to SEQ ID NO: 665792
ccuguaaggacuauucacc

SEQ ID NO: 665794 - RNA, 19 nt, Artificial Sequence
  Description of Artificial Sequence: Synthetic oligonucleotide
  Sense strand starting at position 3034 of SEQ ID NO: 585764
uaguccuuacaggaaaguu

SEQ ID NO: 665795 - RNA, 19 nt, Artificial Sequence
  Description of Artificial Sequence: Synthetic oligonucleotide
  Antisense strand to SEQ ID NO: 665794
aacuuuccuguaaggacua

SEQ ID NO: 665796 - RNA, 19 nt, Artificial Sequence
  Description of Artificial Sequence: Synthetic oligonucleotide
  Sense strand starting at position 3411 of SEQ ID NO: 585764
ggaagacucucugucucca

SEQ ID NO: 665797 - RNA, 19 nt, Artificial Sequence
  Description of Artificial Sequence: Synthetic oligonucleotide
  Antisense strand to SEQ ID NO: 665796
uggagacagagagucuucc

SEQ ID NO: 665798 - RNA, 19 nt, Artificial Sequence
  Description of Artificial Sequence: Synthetic oligonucleotide
  Sense strand starting at position 3737 of SEQ ID NO: 585764
agucucugacgauaauguu

SEQ ID NO: 665799 - RNA, 19 nt, Artificial Sequence
  Description of Artificial Sequence: Synthetic oligonucleotide
  Antisense strand to SEQ ID NO: 665798
aacauuaucgucagagacu

SEQ ID NO: 665800 - RNA, 19 nt, Artificial Sequence
  Description of Artificial Sequence: Synthetic oligonucleotide
  Sense strand starting at position 3743 of SEQ ID NO: 585764
ugacgauaauguuugugaa

SEQ ID NO: 665801 - RNA, 19 nt, Artificial Sequence
  Description of Artificial Sequence: Synthetic oligonucleotide
  Antisense strand to SEQ ID NO: 665800
uucacaaacauuaucguca

SEQ ID NO: 665802 - RNA, 19 nt, Artificial Sequence
  Description of Artificial Sequence: Synthetic oligonucleotide
  Sense strand starting at position 3745 of SEQ ID NO: 585764
acgauaauguuugugaaag

SEQ ID NO: 665803 - RNA, 19 nt, Artificial Sequence
  Description of Artificial Sequence: Synthetic oligonucleotide
  Antisense strand to SEQ ID NO: 665802
cuuucacaaacauuaucgu

SEQ ID NO: 665804 - RNA, 19 nt, Artificial Sequence
  Description of Artificial Sequence: Synthetic oligonucleotide
  Sense strand starting at position 3827 of SEQ ID NO: 585764
agcacugaacuaugaguca

SEQ ID NO: 665805 - RNA, 19 nt, Artificial Sequence
  Description of Artificial Sequence: Synthetic oligonucleotide
  Antisense strand to SEQ ID NO: 665804
ugacucauaguucagugcu

SEQ ID NO: 665806 - RNA, 19 nt, Artificial Sequence
  Description of Artificial Sequence: Synthetic oligonucleotide
  Sense strand starting at position 3830 of SEQ ID NO: 585764
acugaacuaugagucagua

SEQ ID NO: 665807 - RNA, 19 nt, Artificial Sequence
  Description of Artificial Sequence: Synthetic oligonucleotide
  Antisense strand to SEQ ID NO: 665806
uacugacucauaguucagu

SEQ ID NO: 665808 - RNA, 19 nt, Artificial Sequence
  Description of Artificial Sequence: Synthetic oligonucleotide
  Sense strand starting at position 3882 of SEQ ID NO: 585764
ggaguuaggccagaugggu

SEQ ID NO: 665809 - RNA, 19 nt, Artificial Sequence
  Description of Artificial Sequence: Synthetic oligonucleotide
  Antisense strand to SEQ ID NO: 665808
acccaucuggccuaacucc

SEQ ID NO: 665810 - RNA, 19 nt, Artificial Sequence
  Description of Artificial Sequence: Synthetic oligonucleotide
  Sense strand starting at position 25 of SEQ ID NO: 585765
guuggaaauggguaguaac

SEQ ID NO: 665811 - RNA, 19 nt, Artificial Sequence
  Description of Artificial Sequence: Synthetic oligonucleotide
  Antisense strand to SEQ ID NO: 665810
guuacuacccauuuccaac

SEQ ID NO: 665812 - RNA, 19 nt, Artificial Sequence
  Description of Artificial Sequence: Synthetic oligonucleotide
  Sense strand starting at position 62 of SEQ ID NO: 585765
gucuucuuggagugauaga

SEQ ID NO: 665813 - RNA, 19 nt, Artificial Sequence
  Description of Artificial Sequence: Synthetic oligonucleotide
  Antisense strand to SEQ ID NO: 665812
ucuaucacuccaagaagac

SEQ ID NO: 665814 - RNA, 19 nt, Artificial Sequence
  Description of Artificial Sequence: Synthetic oligonucleotide
  Sense strand starting at position 71 of SEQ ID NO: 585765
gagugauagagacguucua

SEQ ID NO: 665815 - RNA, 19 nt, Artificial Sequence
  Description of Artificial Sequence: Synthetic oligonucleotide
  Antisense strand to SEQ ID NO: 665814
uagaacgucucuaucacuc

SEQ ID NO: 665816 - RNA, 19 nt, Artificial Sequence
  Description of Artificial Sequence: Synthetic oligonucleotide
  Sense strand starting at position 101 of SEQ ID NO: 585765
augguugcaugacucaaua

SEQ ID NO: 665817 - RNA, 19 nt, Artificial Sequence
  Description of Artificial Sequence: Synthetic oligonucleotide
  Antisense strand to SEQ ID NO: 665816
uauugagucaugcaaccau

SEQ ID NO: 665818 - RNA, 19 nt, Artificial Sequence
  Description of Artificial Sequence: Synthetic oligonucleotide
  Sense strand starting at position 416 of SEQ ID NO: 585765
ggcagagucccuuauggaa

SEQ ID NO: 665819 - RNA, 19 nt, Artificial Sequence
  Description of Artificial Sequence: Synthetic oligonucleotide
  Antisense strand to SEQ ID NO: 665818
uuccauaagggacucugcc

SEQ ID NO: 665820 - RNA, 19 nt, Artificial Sequence
  Description of Artificial Sequence: Synthetic oligonucleotide
  Sense strand starting at position 547 of SEQ ID NO: 585765
cuggguccaccucaaugau

SEQ ID NO: 665821 - RNA, 19 nt, Artificial Sequence
  Description of Artificial Sequence: Synthetic oligonucleotide
  Antisense strand to SEQ ID NO: 665820
aucauugagguggacccag

SEQ ID NO: 665822 - RNA, 19 nt, Artificial Sequence
  Description of Artificial Sequence: Synthetic oligonucleotide
  Sense strand starting at position 562 of SEQ ID NO: 585765
ugaucucauuccuuuggaa

SEQ ID NO: 665823 - RNA, 19 nt, Artificial Sequence
  Description of Artificial Sequence: Synthetic oligonucleotide
  Antisense strand to SEQ ID NO: 665822
uuccaaaggaaugagauca

SEQ ID NO: 665824 - RNA, 19 nt, Artificial Sequence
  Description of Artificial Sequence: Synthetic oligonucleotide
  Sense strand starting at position 603 of SEQ ID NO: 585765
cauugcauggguuagacau

SEQ ID NO: 665825 - RNA, 19 nt, Artificial Sequence
  Description of Artificial Sequence: Synthetic oligonucleotide
  Antisense strand to SEQ ID NO: 665824
augucuaacccaugcaaug

SEQ ID NO: 665826 - RNA, 19 nt, Artificial Sequence
  Description of Artificial Sequence: Synthetic oligonucleotide
  Sense strand starting at position 802 of SEQ ID NO: 585765
gcuggaauccuguauauca

SEQ ID NO: 665827 - RNA, 19 nt, Artificial Sequence
  Description of Artificial Sequence: Synthetic oligonucleotide
  Antisense strand to SEQ ID NO: 665826
ugauauacaggauuccagc

SEQ ID NO: 665828 - RNA, 19 nt, Artificial Sequence
  Description of Artificial Sequence: Synthetic oligonucleotide
  Sense strand starting at position 804 of SEQ ID NO: 585765
uggaauccuguauaucacu

SEQ ID NO: 665829 - RNA, 19 nt, Artificial Sequence
  Description of Artificial Sequence: Synthetic oligonucleotide
  Antisense strand to SEQ ID NO: 665828
agugauauacaggauucca

SEQ ID NO: 665830 - RNA, 19 nt, Artificial Sequence
  Description of Artificial Sequence: Synthetic oligonucleotide
  Sense strand starting at position 809 of SEQ ID NO: 585765
uccuguauaucacugagaa

SEQ ID NO: 665831 - RNA, 19 nt, Artificial Sequence
  Description of Artificial Sequence: Synthetic oligonucleotide
  Antisense strand to SEQ ID NO: 665830
uucucagugauauacagga

SEQ ID NO: 665832 - RNA, 19 nt, Artificial Sequence
  Description of Artificial Sequence: Synthetic oligonucleotide
  Sense strand starting at position 810 of SEQ ID NO: 585765
ccuguauaucacugagaau

SEQ ID NO: 665833 - RNA, 19 nt, Artificial Sequence
  Description of Artificial Sequence: Synthetic oligonucleotide
  Antisense strand to SEQ ID NO: 665832
auucucagugauauacagg

SEQ ID NO: 665834 - RNA, 19 nt, Artificial Sequence
  Description of Artificial Sequence: Synthetic oligonucleotide
  Sense strand starting at position 880 of SEQ ID NO: 585765
aucaaauguugugcaauaa

SEQ ID NO: 665835 - RNA, 19 nt, Artificial Sequence
  Description of Artificial Sequence: Synthetic oligonucleotide
  Antisense strand to SEQ ID NO: 665834
uuauugcacaacauuugau

SEQ ID NO: 665836 - RNA, 19 nt, Artificial Sequence
  Description of Artificial Sequence: Synthetic oligonucleotide
  Sense strand starting at position 881 of SEQ ID NO: 585765
ucaaauguugugcaauaau

SEQ ID NO: 665837 - RNA, 19 nt, Artificial Sequence
  Description of Artificial Sequence: Synthetic oligonucleotide
  Antisense strand to SEQ ID NO: 665836
auuauugcacaacauuuga

SEQ ID NO: 665838 - RNA, 19 nt, Artificial Sequence
  Description of Artificial Sequence: Synthetic oligonucleotide
  Sense strand starting at position 884 of SEQ ID NO: 585765
aauguugugcaauaauaga

SEQ ID NO: 665839 - RNA, 19 nt, Artificial Sequence
  Description of Artificial Sequence: Synthetic oligonucleotide
  Antisense strand to SEQ ID NO: 665838
ucuauuauugcacaacauu

SEQ ID NO: 665840 - RNA, 19 nt, Artificial Sequence
  Description of Artificial Sequence: Synthetic oligonucleotide
  Sense strand starting at position 1015 of SEQ ID NO: 585765
gggcacaaauuguuacaaa

SEQ ID NO: 665841 - RNA, 19 nt, Artificial Sequence
  Description of Artificial Sequence: Synthetic oligonucleotide
  Antisense strand to SEQ ID NO: 665840
uuuguaacaauuugugccc

SEQ ID NO: 665842 - RNA, 19 nt, Artificial Sequence
  Description of Artificial Sequence: Synthetic oligonucleotide
  Sense strand starting at position 1373 of SEQ ID NO: 585765
ugcgaaucaaaugaaguuu

SEQ ID NO: 665843 - RNA, 19 nt, Artificial Sequence
  Description of Artificial Sequence: Synthetic oligonucleotide
  Antisense strand to SEQ ID NO: 665842
aaacuucauuugauucgca

SEQ ID NO: 665844 - RNA, 19 nt, Artificial Sequence
  Description of Artificial Sequence: Synthetic oligonucleotide
  Sense strand starting at position 1403 of SEQ ID NO: 585765
acuugugaucgguauccaa

SEQ ID NO: 665845 - RNA, 19 nt, Artificial Sequence
  Description of Artificial Sequence: Synthetic oligonucleotide
  Antisense strand to SEQ ID NO: 665844
uuggauaccgaucacaagu

SEQ ID NO: 665846 - RNA, 19 nt, Artificial Sequence
  Description of Artificial Sequence: Synthetic oligonucleotide
  Sense strand starting at position 1511 of SEQ ID NO: 585765
cucaauucggagugaauaa

SEQ ID NO: 665847 - RNA, 19 nt, Artificial Sequence
  Description of Artificial Sequence: Synthetic oligonucleotide
  Antisense strand to SEQ ID NO: 665846
uuauucacuccgaauugag

SEQ ID NO: 665848 - RNA, 19 nt, Artificial Sequence
  Description of Artificial Sequence: Synthetic oligonucleotide
  Sense strand starting at position 1523 of SEQ ID NO: 585765
ugaauaauuuaagagcaga

SEQ ID NO: 665849 - RNA, 19 nt, Artificial Sequence
  Description of Artificial Sequence: Synthetic oligonucleotide
  Antisense strand to SEQ ID NO: 665848
ucugcucuuaaauuauuca

SEQ ID NO: 665850 - RNA, 19 nt, Artificial Sequence
  Description of Artificial Sequence: Synthetic oligonucleotide
  Sense strand starting at position 2142 of SEQ ID NO: 585765
cgucuccuccguuugugaa

SEQ ID NO: 665851 - RNA, 19 nt, Artificial Sequence
  Description of Artificial Sequence: Synthetic oligonucleotide
  Antisense strand to SEQ ID NO: 665850
uucacaaacggaggagacg

SEQ ID NO: 665852 - RNA, 19 nt, Artificial Sequence
  Description of Artificial Sequence: Synthetic oligonucleotide
  Sense strand starting at position 2429 of SEQ ID NO: 585765
uccagcgucagaggaauaa

SEQ ID NO: 665853 - RNA, 19 nt, Artificial Sequence
  Description of Artificial Sequence: Synthetic oligonucleotide
  Antisense strand to SEQ ID NO: 665852
uuauuccucugacgcugga

SEQ ID NO: 665854 - RNA, 19 nt, Artificial Sequence
  Description of Artificial Sequence: Synthetic oligonucleotide
  Sense strand starting at position 2669 of SEQ ID NO: 585765
gaauaugacucaguagauu

SEQ ID NO: 665855 - RNA, 19 nt, Artificial Sequence
  Description of Artificial Sequence: Synthetic oligonucleotide
  Antisense strand to SEQ ID NO: 665854
aaucuacugagucauauuc

SEQ ID NO: 665856 - RNA, 19 nt, Artificial Sequence
  Description of Artificial Sequence: Synthetic oligonucleotide
  Sense strand starting at position 2677 of SEQ ID NO: 585765
cucaguagauuugcucuua

SEQ ID NO: 665857 - RNA, 19 nt, Artificial Sequence
  Description of Artificial Sequence: Synthetic oligonucleotide
  Antisense strand to SEQ ID NO: 665856
uaagagcaaaucuacugag

SEQ ID NO: 665858 - RNA, 19 nt, Artificial Sequence
  Description of Artificial Sequence: Synthetic oligonucleotide
  Sense strand starting at position 2678 of SEQ ID NO: 585765
ucaguagauuugcucuuau

SEQ ID NO: 665859 - RNA, 19 nt, Artificial Sequence
  Description of Artificial Sequence: Synthetic oligonucleotide
  Antisense strand to SEQ ID NO: 665858
auaagagcaaaucuacuga

SEQ ID NO: 665860 - RNA, 19 nt, Artificial Sequence
  Description of Artificial Sequence: Synthetic oligonucleotide
  Sense strand starting at position 2928 of SEQ ID NO: 585765
agaacagagucauccauuc

SEQ ID NO: 665861 - RNA, 19 nt, Artificial Sequence
  Description of Artificial Sequence: Synthetic oligonucleotide
  Antisense strand to SEQ ID NO: 665860
gaauggaugacucuguucu

SEQ ID NO: 665862 - RNA, 19 nt, Artificial Sequence
  Description of Artificial Sequence: Synthetic oligonucleotide
  Sense strand starting at position 3079 of SEQ ID NO: 585765
acaaauguguaucuacaua

SEQ ID NO: 665863 - RNA, 19 nt, Artificial Sequence
  Description of Artificial Sequence: Synthetic oligonucleotide
  Antisense strand to SEQ ID NO: 665862
uauguagauacacauuugu

SEQ ID NO: 665864 - RNA, 19 nt, Artificial Sequence
  Description of Artificial Sequence: Synthetic oligonucleotide
  Sense strand starting at position 3152 of SEQ ID NO: 585765
ggcaaugguggagguauua

SEQ ID NO: 665865 - RNA, 19 nt, Artificial Sequence
  Description of Artificial Sequence: Synthetic oligonucleotide
  Antisense strand to SEQ ID NO: 665864
uaauaccuccaccauugcc

SEQ ID NO: 665866 - RNA, 19 nt, Artificial Sequence
  Description of Artificial Sequence: Synthetic oligonucleotide
  Sense strand starting at position 3172 of SEQ ID NO: 585765
agaagaccucccugaaggu

SEQ ID NO: 665867 - RNA, 19 nt, Artificial Sequence
  Description of Artificial Sequence: Synthetic oligonucleotide
  Antisense strand to SEQ ID NO: 665866
accuucagggaggucuucu

SEQ ID NO: 665868 - RNA, 19 nt, Artificial Sequence
  Description of Artificial Sequence: Synthetic oligonucleotide
  Sense strand starting at position 3187 of SEQ ID NO: 585765
agguuugucauuugggcau

SEQ ID NO: 665869 - RNA, 19 nt, Artificial Sequence
  Description of Artificial Sequence: Synthetic oligonucleotide
  Antisense strand to SEQ ID NO: 665868
augcccaaaugacaaaccu

SEQ ID NO: 665870 - RNA, 19 nt, Artificial Sequence
  Description of Artificial Sequence: Synthetic oligonucleotide
  Sense strand starting at position 3206 of SEQ ID NO: 585765
agacuuaaaugagugaggu

SEQ ID NO: 665871 - RNA, 19 nt, Artificial Sequence
  Description of Artificial Sequence: Synthetic oligonucleotide
  Antisense strand to SEQ ID NO: 665870
accucacucauuuaagucu

SEQ ID NO: 665872 - RNA, 19 nt, Artificial Sequence
  Description of Artificial Sequence: Synthetic oligonucleotide
  Sense strand starting at position 3207 of SEQ ID NO: 585765
gacuuaaaugagugaggua

SEQ ID NO: 665873 - RNA, 19 nt, Artificial Sequence
  Description of Artificial Sequence: Synthetic oligonucleotide
  Antisense strand to SEQ ID NO: 665872
uaccucacucauuuaaguc

SEQ ID NO: 665874 - RNA, 19 nt, Artificial Sequence
  Description of Artificial Sequence: Synthetic oligonucleotide
  Sense strand starting at position 3214 of SEQ ID NO: 585765
augagugagguauguagau

SEQ ID NO: 665875 - RNA, 19 nt, Artificial Sequence
  Description of Artificial Sequence: Synthetic oligonucleotide
  Antisense strand to SEQ ID NO: 665874
aucuacauaccucacucau

SEQ ID NO: 665876 - RNA, 19 nt, Artificial Sequence
  Description of Artificial Sequence: Synthetic oligonucleotide
  Sense strand starting at position 3216 of SEQ ID NO: 585765
gagugagguauguagauau

SEQ ID NO: 665877 - RNA, 19 nt, Artificial Sequence
  Description of Artificial Sequence: Synthetic oligonucleotide
  Antisense strand to SEQ ID NO: 665876
auaucuacauaccucacuc

SEQ ID NO: 665878 - RNA, 19 nt, Artificial Sequence
  Description of Artificial Sequence: Synthetic oligonucleotide
  Sense strand starting at position 3223 of SEQ ID NO: 585765
guauguagauaucugaaca

SEQ ID NO: 665879 - RNA, 19 nt, Artificial Sequence
  Description of Artificial Sequence: Synthetic oligonucleotide
  Antisense strand to SEQ ID NO: 665878
uguucagauaucuacauac

SEQ ID NO: 665880 - RNA, 19 nt, Artificial Sequence
  Description of Artificial Sequence: Synthetic oligonucleotide
  Sense strand starting at position 3241 of SEQ ID NO: 585765
aggaguguuucagucagag

SEQ ID NO: 665881 - RNA, 19 nt, Artificial Sequence
  Description of Artificial Sequence: Synthetic oligonucleotide
  Antisense strand to SEQ ID NO: 665880
cucugacugaaacacuccu

SEQ ID NO: 665882 - RNA, 19 nt, Artificial Sequence
  Description of Artificial Sequence: Synthetic oligonucleotide
  Sense strand starting at position 3562 of SEQ ID NO: 585765
aaaggauuacacuggcuga

SEQ ID NO: 665883 - RNA, 19 nt, Artificial Sequence
  Description of Artificial Sequence: Synthetic oligonucleotide
  Antisense strand to SEQ ID NO: 665882
ucagccaguguaauccuuu

SEQ ID NO: 665884 - RNA, 19 nt, Artificial Sequence
  Description of Artificial Sequence: Synthetic oligonucleotide
  Sense strand starting at position 3661 of SEQ ID NO: 585765
aguaguuugagcuagagug

SEQ ID NO: 665885 - RNA, 19 nt, Artificial Sequence
  Description of Artificial Sequence: Synthetic oligonucleotide
  Antisense strand to SEQ ID NO: 665884
cacucuagcucaaacuacu

SEQ ID NO: 665886 - RNA, 19 nt, Artificial Sequence
  Description of Artificial Sequence: Synthetic oligonucleotide
  Sense strand starting at position 3693 of SEQ ID NO: 585765
ucacgagaauuggucagau

SEQ ID NO: 665887 - RNA, 19 nt, Artificial Sequence
  Description of Artificial Sequence: Synthetic oligonucleotide
  Antisense strand to SEQ ID NO: 665886
aucugaccaauucucguga

SEQ ID NO: 665888 - RNA, 19 nt, Artificial Sequence
  Description of Artificial Sequence: Synthetic oligonucleotide
  Sense strand starting at position 3941 of SEQ ID NO: 585765
gaugacagguuucuuccau

SEQ ID NO: 665889 - RNA, 19 nt, Artificial Sequence
  Description of Artificial Sequence: Synthetic oligonucleotide
  Antisense strand to SEQ ID NO: 665888
auggaagaaaccugucauc

SEQ ID NO: 665890 - RNA, 19 nt, Artificial Sequence
  Description of Artificial Sequence: Synthetic oligonucleotide
  Sense strand starting at position 82 of SEQ ID NO: 585766
uccuauuugggccgucaca

SEQ ID NO: 665891 - RNA, 19 nt, Artificial Sequence
  Description of Artificial Sequence: Synthetic oligonucleotide
  Antisense strand to SEQ ID NO: 665890
ugugacggcccaaauagga

SEQ ID NO: 665892 - RNA, 19 nt, Artificial Sequence
  Description of Artificial Sequence: Synthetic oligonucleotide
  Sense strand starting at position 153 of SEQ ID NO: 585766
cauaguaucgaauaaagua

SEQ ID NO: 665893 - RNA, 19 nt, Artificial Sequence
  Description of Artificial Sequence: Synthetic oligonucleotide
  Antisense strand to SEQ ID NO: 665892
uacuuuauucgauacuaug

SEQ ID NO: 665894 - RNA, 19 nt, Artificial Sequence
  Description of Artificial Sequence: Synthetic oligonucleotide
  Sense strand starting at position 161 of SEQ ID NO: 585766
cgaauaaaguauuggcacu

SEQ ID NO: 665895 - RNA, 19 nt, Artificial Sequence
  Description of Artificial Sequence: Synthetic oligonucleotide
  Antisense strand to SEQ ID NO: 665894
agugccaauacuuuauucg

SEQ ID NO: 665896 - RNA, 19 nt, Artificial Sequence
  Description of Artificial Sequence: Synthetic oligonucleotide
  Sense strand starting at position 524 of SEQ ID NO: 585766
acuguucccggccauaauu

SEQ ID NO: 665897 - RNA, 19 nt, Artificial Sequence
  Description of Artificial Sequence: Synthetic oligonucleotide
  Antisense strand to SEQ ID NO: 665896
aauuauggccgggaacagu

SEQ ID NO: 665898 - RNA, 19 nt, Artificial Sequence
  Description of Artificial Sequence: Synthetic oligonucleotide
  Sense strand starting at position 586 of SEQ ID NO: 585766
gcagauguguacuugcuau

SEQ ID NO: 665899 - RNA, 19 nt, Artificial Sequence
  Description of Artificial Sequence: Synthetic oligonucleotide
  Antisense strand to SEQ ID NO: 665898
auagcaaguacacaucugc

SEQ ID NO: 665900 - RNA, 19 nt, Artificial Sequence
  Description of Artificial Sequence: Synthetic oligonucleotide
  Sense strand starting at position 593 of SEQ ID NO: 585766
uguacuugcuauguuugau

SEQ ID NO: 665901 - RNA, 19 nt, Artificial Sequence
  Description of Artificial Sequence: Synthetic oligonucleotide
  Antisense strand to SEQ ID NO: 665900
aucaaacauagcaaguaca

SEQ ID NO: 665902 - RNA, 19 nt, Artificial Sequence
  Description of Artificial Sequence: Synthetic oligonucleotide
  Sense strand starting at position 605 of SEQ ID NO: 585766
guuugauguuuacauuaag

SEQ ID NO: 665903 - RNA, 19 nt, Artificial Sequence
  Description of Artificial Sequence: Synthetic oligonucleotide
  Antisense strand to SEQ ID NO: 665902
cuuaauguaaacaucaaac

SEQ ID NO: 665904 - RNA, 19 nt, Artificial Sequence
  Description of Artificial Sequence: Synthetic oligonucleotide
  Sense strand starting at position 624 of SEQ ID NO: 585766
gccuauugaagucggaguu

SEQ ID NO: 665905 - RNA, 19 nt, Artificial Sequence
  Description of Artificial Sequence: Synthetic oligonucleotide
  Antisense strand to SEQ ID NO: 665904
aacuccgacuucaauaggc

SEQ ID NO: 665906 - RNA, 19 nt, Artificial Sequence
  Description of Artificial Sequence: Synthetic oligonucleotide
  Sense strand starting at position 625 of SEQ ID NO: 585766
ccuauugaagucggaguuu

SEQ ID NO: 665907 - RNA, 19 nt, Artificial Sequence
  Description of Artificial Sequence: Synthetic oligonucleotide
  Antisense strand to SEQ ID NO: 665906
aaacuccgacuucaauagg

SEQ ID NO: 665908 - RNA, 19 nt, Artificial Sequence
  Description of Artificial Sequence: Synthetic oligonucleotide
  Sense strand starting at position 668 of SEQ ID NO: 585766
ccugucuucuuccagacua

SEQ ID NO: 665909 - RNA, 19 nt, Artificial Sequence
  Description of Artificial Sequence: Synthetic oligonucleotide
  Antisense strand to SEQ ID NO: 665908
uagucuggaagaagacagg

SEQ ID NO: 665910 - RNA, 19 nt, Artificial Sequence
  Description of Artificial Sequence: Synthetic oligonucleotide
  Sense strand starting at position 670 of SEQ ID NO: 585766
ugucuucuuccagacuagu

SEQ ID NO: 665911 - RNA, 19 nt, Artificial Sequence
  Description of Artificial Sequence: Synthetic oligonucleotide
  Antisense strand to SEQ ID NO: 665910
acuagucuggaagaagaca

SEQ ID NO: 665912 - RNA, 19 nt, Artificial Sequence
  Description of Artificial Sequence: Synthetic oligonucleotide
  Sense strand starting at position 728 of SEQ ID NO: 585766
aaucuuguuugacacguga

SEQ ID NO: 665913 - RNA, 19 nt, Artificial Sequence
  Description of Artificial Sequence: Synthetic oligonucleotide
  Antisense strand to SEQ ID NO: 665912
ucacgugucaaacaagauu

SEQ ID NO: 665914 - RNA, 19 nt, Artificial Sequence
  Description of Artificial Sequence: Synthetic oligonucleotide
  Sense strand starting at position 730 of SEQ ID NO: 585766
ucuuguuugacacgugaau

SEQ ID NO: 665915 - RNA, 19 nt, Artificial Sequence
  Description of Artificial Sequence: Synthetic oligonucleotide
  Antisense strand to SEQ ID NO: 665914
auucacgugucaaacaaga

SEQ ID NO: 665916 - RNA, 19 nt, Artificial Sequence
  Description of Artificial Sequence: Synthetic oligonucleotide
  Sense strand starting at position 732 of SEQ ID NO: 585766
uuguuugacacgugaauga

SEQ ID NO: 665917 - RNA, 19 nt, Artificial Sequence
  Description of Artificial Sequence: Synthetic oligonucleotide
  Antisense strand to SEQ ID NO: 665916
ucauucacgugucaaacaa

SEQ ID NO: 665918 - RNA, 19 nt, Artificial Sequence
  Description of Artificial Sequence: Synthetic oligonucleotide
  Sense strand starting at position 817 of SEQ ID NO: 585766
ucuuuaugucgugauggau

SEQ ID NO: 665919 - RNA, 19 nt, Artificial Sequence
  Description of Artificial Sequence: Synthetic oligonucleotide
  Antisense strand to SEQ ID NO: 665918
auccaucacgacauaaaga

SEQ ID NO: 665920 - RNA, 19 nt, Artificial Sequence
  Description of Artificial Sequence: Synthetic oligonucleotide
  Sense strand starting at position 821 of SEQ ID NO: 585766
uaugucgugauggauuaga

SEQ ID NO: 665921 - RNA, 19 nt, Artificial Sequence
  Description of Artificial Sequence: Synthetic oligonucleotide
  Antisense strand to SEQ ID NO: 665920
ucuaauccaucacgacaua

SEQ ID NO: 665922 - RNA, 19 nt, Artificial Sequence
  Description of Artificial Sequence: Synthetic oligonucleotide
  Sense strand starting at position 951 of SEQ ID NO: 585766
uuauaaacacuacguguaa

SEQ ID NO: 665923 - RNA, 19 nt, Artificial Sequence
  Description of Artificial Sequence: Synthetic oligonucleotide
  Antisense strand to SEQ ID NO: 665922
uuacacguaguguuuauaa

SEQ ID NO: 665924 - RNA, 19 nt, Artificial Sequence
  Description of Artificial Sequence: Synthetic oligonucleotide
  Sense strand starting at position 964 of SEQ ID NO: 585766
guguaacgugaccacagau

SEQ ID NO: 665925 - RNA, 19 nt, Artificial Sequence
  Description of Artificial Sequence: Synthetic oligonucleotide
  Antisense strand to SEQ ID NO: 665924
aucuguggucacguuacac

SEQ ID NO: 665926 - RNA, 19 nt, Artificial Sequence
  Description of Artificial Sequence: Synthetic oligonucleotide
  Sense strand starting at position 1023 of SEQ ID NO: 585766
guguuagccucagugagga

SEQ ID NO: 665927 - RNA, 19 nt, Artificial Sequence
  Description of Artificial Sequence: Synthetic oligonucleotide
  Antisense strand to SEQ ID NO: 665926
uccucacugaggcuaacac

SEQ ID NO: 665928 - RNA, 19 nt, Artificial Sequence
  Description of Artificial Sequence: Synthetic oligonucleotide
  Sense strand starting at position 1043 of SEQ ID NO: 585766
ccgggaaggucuggagagu

SEQ ID NO: 665929 - RNA, 19 nt, Artificial Sequence
  Description of Artificial Sequence: Synthetic oligonucleotide
  Antisense strand to SEQ ID NO: 665928
acucuccagaccuucccgg

SEQ ID NO: 665930 - RNA, 19 nt, Artificial Sequence
  Description of Artificial Sequence: Synthetic oligonucleotide
  Sense strand starting at position 2258 of SEQ ID NO: 585766
cuaauaagagccuaaacgu

SEQ ID NO: 665931 - RNA, 19 nt, Artificial Sequence
  Description of Artificial Sequence: Synthetic oligonucleotide
  Antisense strand to SEQ ID NO: 665930
acguuuaggcucuuauuag

SEQ ID NO: 665932 - RNA, 19 nt, Artificial Sequence
  Description of Artificial Sequence: Synthetic oligonucleotide
  Sense strand starting at position 2267 of SEQ ID NO: 585766
gccuaaacgugcccaagaa

SEQ ID NO: 665933 - RNA, 19 nt, Artificial Sequence
  Description of Artificial Sequence: Synthetic oligonucleotide
  Antisense strand to SEQ ID NO: 665932
uucuugggcacguuuaggc

SEQ ID NO: 665934 - RNA, 19 nt, Artificial Sequence
  Description of Artificial Sequence: Synthetic oligonucleotide
  Sense strand starting at position 2295 of SEQ ID NO: 585766
ugaggaaaugugcgcguuu

SEQ ID NO: 665935 - RNA, 19 nt, Artificial Sequence
  Description of Artificial Sequence: Synthetic oligonucleotide
  Antisense strand to SEQ ID NO: 665934
aaacgcgcacauuuccuca

SEQ ID NO: 665936 - RNA, 19 nt, Artificial Sequence
  Description of Artificial Sequence: Synthetic oligonucleotide
  Sense strand starting at position 2382 of SEQ ID NO: 585766
uggacagugcccuaaacau

SEQ ID NO: 665937 - RNA, 19 nt, Artificial Sequence
  Description of Artificial Sequence: Synthetic oligonucleotide
  Antisense strand to SEQ ID NO: 665936
auguuuagggcacugucca

SEQ ID NO: 665938 - RNA, 19 nt, Artificial Sequence
  Description of Artificial Sequence: Synthetic oligonucleotide
  Sense strand starting at position 2402 of SEQ ID NO: 585766
cgcagccuucgccaagaaa

SEQ ID NO: 665939 - RNA, 19 nt, Artificial Sequence
  Description of Artificial Sequence: Synthetic oligonucleotide
  Antisense strand to SEQ ID NO: 665938
uuucuuggcgaaggcugcg

SEQ ID NO: 665940 - RNA, 19 nt, Artificial Sequence
  Description of Artificial Sequence: Synthetic oligonucleotide
  Sense strand starting at position 2422 of SEQ ID NO: 585766
aguuccuggucaucuauuu

SEQ ID NO: 665941 - RNA, 19 nt, Artificial Sequence
  Description of Artificial Sequence: Synthetic oligonucleotide
  Antisense strand to SEQ ID NO: 665940
aaauagaugaccaggaacu

SEQ ID NO: 665942 - RNA, 19 nt, Artificial Sequence
  Description of Artificial Sequence: Synthetic oligonucleotide
  Sense strand starting at position 2671 of SEQ ID NO: 585766
ucuguuucggaagaugaau

SEQ ID NO: 665943 - RNA, 19 nt, Artificial Sequence
  Description of Artificial Sequence: Synthetic oligonucleotide
  Antisense strand to SEQ ID NO: 665942
auucaucuuccgaaacaga

SEQ ID NO: 665944 - RNA, 19 nt, Artificial Sequence
  Description of Artificial Sequence: Synthetic oligonucleotide
  Sense strand starting at position 2683 of SEQ ID NO: 585766
gaugaauuguucuaaagga

SEQ ID NO: 665945 - RNA, 19 nt, Artificial Sequence
  Description of Artificial Sequence: Synthetic oligonucleotide
  Antisense strand to SEQ ID NO: 665944
uccuuuagaacaauucauc

SEQ ID NO: 665946 - RNA, 19 nt, Artificial Sequence
  Description of Artificial Sequence: Synthetic oligonucleotide
  Sense strand starting at position 2710 of SEQ ID NO: 585766
cuaggauacuuggaguaaa

SEQ ID NO: 665947 - RNA, 19 nt, Artificial Sequence
  Description of Artificial Sequence: Synthetic oligonucleotide
  Antisense strand to SEQ ID NO: 665946
uuuacuccaaguauccuag

SEQ ID NO: 665948 - RNA, 19 nt, Artificial Sequence
  Description of Artificial Sequence: Synthetic oligonucleotide
  Sense strand starting at position 2737 of SEQ ID NO: 585766
caguauuucuuagauggau

SEQ ID NO: 665949 - RNA, 19 nt, Artificial Sequence
  Description of Artificial Sequence: Synthetic oligonucleotide
  Antisense strand to SEQ ID NO: 665948
auccaucuaagaaauacug

SEQ ID NO: 665950 - RNA, 19 nt, Artificial Sequence
  Description of Artificial Sequence: Synthetic oligonucleotide
  Sense strand starting at position 2757 of SEQ ID NO: 585766
aggagaugcugcuaguaaa

SEQ ID NO: 665951 - RNA, 19 nt, Artificial Sequence
  Description of Artificial Sequence: Synthetic oligonucleotide
  Antisense strand to SEQ ID NO: 665950
uuuacuagcagcaucuccu

SEQ ID NO: 665952 - RNA, 19 nt, Artificial Sequence
  Description of Artificial Sequence: Synthetic oligonucleotide
  Sense strand starting at position 2871 of SEQ ID NO: 585766
gcuguccucuuguugaaag

SEQ ID NO: 665953 - RNA, 19 nt, Artificial Sequence
  Description of Artificial Sequence: Synthetic oligonucleotide
  Antisense strand to SEQ ID NO: 665952
cuuucaacaagaggacagc

SEQ ID NO: 665954 - RNA, 19 nt, Artificial Sequence
  Description of Artificial Sequence: Synthetic oligonucleotide
  Sense strand starting at position 2971 of SEQ ID NO: 585766
gaaucaagguaguuccuaa

SEQ ID NO: 665955 - RNA, 19 nt, Artificial Sequence
  Description of Artificial Sequence: Synthetic oligonucleotide
  Antisense strand to SEQ ID NO: 665954
uuaggaacuaccuugauuc

SEQ ID NO: 665956 - RNA, 19 nt, Artificial Sequence
  Description of Artificial Sequence: Synthetic oligonucleotide
  Sense strand starting at position 3007 of SEQ ID NO: 585766
ccgugaaacugggaaagua

SEQ ID NO: 665957 - RNA, 19 nt, Artificial Sequence
  Description of Artificial Sequence: Synthetic oligonucleotide
  Antisense strand to SEQ ID NO: 665956
uacuuucccaguuucacgg

SEQ ID NO: 665958 - RNA, 19 nt, Artificial Sequence
  Description of Artificial Sequence: Synthetic oligonucleotide
  Sense strand starting at position 3239 of SEQ ID NO: 585766
ccuugcuugucuuccuaca

SEQ ID NO: 665959 - RNA, 19 nt, Artificial Sequence
  Description of Artificial Sequence: Synthetic oligonucleotide
  Antisense strand to SEQ ID NO: 665958
uguaggaagacaagcaagg

SEQ ID NO: 665960 - RNA, 19 nt, Artificial Sequence
  Description of Artificial Sequence: Synthetic oligonucleotide
  Sense strand starting at position 3241 of SEQ ID NO: 585766
uugcuugucuuccuacagu

SEQ ID NO: 665961 - RNA, 19 nt, Artificial Sequence
  Description of Artificial Sequence: Synthetic oligonucleotide
  Antisense strand to SEQ ID NO: 665960
acuguaggaagacaagcaa

SEQ ID NO: 665962 - RNA, 19 nt, Artificial Sequence
  Description of Artificial Sequence: Synthetic oligonucleotide
  Sense strand starting at position 3458 of SEQ ID NO: 585766
gccuuucuguuacuugaca

SEQ ID NO: 665963 - RNA, 19 nt, Artificial Sequence
  Description of Artificial Sequence: Synthetic oligonucleotide
  Antisense strand to SEQ ID NO: 665962
ugucaaguaacagaaaggc

SEQ ID NO: 665964 - RNA, 19 nt, Artificial Sequence
  Description of Artificial Sequence: Synthetic oligonucleotide
  Sense strand starting at position 3463 of SEQ ID NO: 585766
ucuguuacuugacaagaag

SEQ ID NO: 665965 - RNA, 19 nt, Artificial Sequence
  Description of Artificial Sequence: Synthetic oligonucleotide
  Antisense strand to SEQ ID NO: 665964
cuucuugucaaguaacaga

SEQ ID NO: 665966 - RNA, 19 nt, Artificial Sequence
  Description of Artificial Sequence: Synthetic oligonucleotide
  Sense strand starting at position 3536 of SEQ ID NO: 585766
uuguccuuuccauagcuga

SEQ ID NO: 665967 - RNA, 19 nt, Artificial Sequence
  Description of Artificial Sequence: Synthetic oligonucleotide
  Antisense strand to SEQ ID NO: 665966
ucagcuauggaaaggacaa

SEQ ID NO: 665968 - RNA, 19 nt, Artificial Sequence
  Description of Artificial Sequence: Synthetic oligonucleotide
  Sense strand starting at position 3613 of SEQ ID NO: 585766
uuuacuguggcuugagaaa

SEQ ID NO: 665969 - RNA, 19 nt, Artificial Sequence
  Description of Artificial Sequence: Synthetic oligonucleotide
  Antisense strand to SEQ ID NO: 665968
uuucucaagccacaguaaa

SEQ ID NO: 665970 - RNA, 19 nt, Artificial Sequence
  Description of Artificial Sequence: Synthetic oligonucleotide
  Sense strand starting at position 49 of SEQ ID NO: 585767
cuaugaaugcccuacugga

SEQ ID NO: 665971 - RNA, 19 nt, Artificial Sequence
  Description of Artificial Sequence: Synthetic oligonucleotide
  Antisense strand to SEQ ID NO: 665970
uccaguagggcauucauag

SEQ ID NO: 665972 - RNA, 19 nt, Artificial Sequence
  Description of Artificial Sequence: Synthetic oligonucleotide
  Sense strand starting at position 180 of SEQ ID NO: 585767
ggacauauuuaccaucaga

SEQ ID NO: 665973 - RNA, 19 nt, Artificial Sequence
  Description of Artificial Sequence: Synthetic oligonucleotide
  Antisense strand to SEQ ID NO: 665972
ucugaugguaaauaugucc

SEQ ID NO: 665974 - RNA, 19 nt, Artificial Sequence
  Description of Artificial Sequence: Synthetic oligonucleotide
  Sense strand starting at position 206 of SEQ ID NO: 585767
uagauagauuggcuuccau

SEQ ID NO: 665975 - RNA, 19 nt, Artificial Sequence
  Description of Artificial Sequence: Synthetic oligonucleotide
  Antisense strand to SEQ ID NO: 665974
auggaagccaaucuaucua

SEQ ID NO: 665976 - RNA, 19 nt, Artificial Sequence
  Description of Artificial Sequence: Synthetic oligonucleotide
  Sense strand starting at position 338 of SEQ ID NO: 585767
uuugcuaucagaggaguau

SEQ ID NO: 665977 - RNA, 19 nt, Artificial Sequence
  Description of Artificial Sequence: Synthetic oligonucleotide
  Antisense strand to SEQ ID NO: 665976
auacuccucugauagcaaa

SEQ ID NO: 665978 - RNA, 19 nt, Artificial Sequence
  Description of Artificial Sequence: Synthetic oligonucleotide
  Sense strand starting at position 339 of SEQ ID NO: 585767
uugcuaucagaggaguauc

SEQ ID NO: 665979 - RNA, 19 nt, Artificial Sequence
  Description of Artificial Sequence: Synthetic oligonucleotide
  Antisense strand to SEQ ID NO: 665978
gauacuccucugauagcaa

SEQ ID NO: 665980 - RNA, 19 nt, Artificial Sequence
  Description of Artificial Sequence: Synthetic oligonucleotide
  Sense strand starting at position 487 of SEQ ID NO: 585767
guuaacugagucuacaguu

SEQ ID NO: 665981 - RNA, 19 nt, Artificial Sequence
  Description of Artificial Sequence: Synthetic oligonucleotide
  Antisense strand to SEQ ID NO: 665980
aacuguagacucaguuaac

SEQ ID NO: 665982 - RNA, 19 nt, Artificial Sequence
  Description of Artificial Sequence: Synthetic oligonucleotide
  Sense strand starting at position 506 of SEQ ID NO: 585767
aggaucucugaguggauga

SEQ ID NO: 665983 - RNA, 19 nt, Artificial Sequence
  Description of Artificial Sequence: Synthetic oligonucleotide
  Antisense strand to SEQ ID NO: 665982
ucauccacucagagauccu

SEQ ID NO: 665984 - RNA, 19 nt, Artificial Sequence
  Description of Artificial Sequence: Synthetic oligonucleotide
  Sense strand starting at position 517 of SEQ ID NO: 585767
guggaugacagauguuaca

SEQ ID NO: 665985 - RNA, 19 nt, Artificial Sequence
  Description of Artificial Sequence: Synthetic oligonucleotide
  Antisense strand to SEQ ID NO: 665984
uguaacaucugucauccac

SEQ ID NO: 665986 - RNA, 19 nt, Artificial Sequence
  Description of Artificial Sequence: Synthetic oligonucleotide
  Sense strand starting at position 970 of SEQ ID NO: 585767
cuagaauacauggguuuga

SEQ ID NO: 665987 - RNA, 19 nt, Artificial Sequence
  Description of Artificial Sequence: Synthetic oligonucleotide
  Antisense strand to SEQ ID NO: 665986
ucaaacccauguauucuag

SEQ ID NO: 665988 - RNA, 19 nt, Artificial Sequence
  Description of Artificial Sequence: Synthetic oligonucleotide
  Sense strand starting at position 991 of SEQ ID NO: 585767
aguaaacacuguuccagaa

SEQ ID NO: 665989 - RNA, 19 nt, Artificial Sequence
  Description of Artificial Sequence: Synthetic oligonucleotide
  Antisense strand to SEQ ID NO: 665988
uucuggaacaguguuuacu

SEQ ID NO: 665990 - RNA, 19 nt, Artificial Sequence
  Description of Artificial Sequence: Synthetic oligonucleotide
  Sense strand starting at position 1019 of SEQ ID NO: 585767
uaugcuaggguuuauauua

SEQ ID NO: 665991 - RNA, 19 nt, Artificial Sequence
  Description of Artificial Sequence: Synthetic oligonucleotide
  Antisense strand to SEQ ID NO: 665990
uaauauaaacccuagcaua

SEQ ID NO: 665992 - RNA, 19 nt, Artificial Sequence
  Description of Artificial Sequence: Synthetic oligonucleotide
  Sense strand starting at position 1030 of SEQ ID NO: 585767
uuauauuagugcuuggaaa

SEQ ID NO: 665993 - RNA, 19 nt, Artificial Sequence
  Description of Artificial Sequence: Synthetic oligonucleotide
  Antisense strand to SEQ ID NO: 665992
uuuccaagcacuaauauaa

SEQ ID NO: 665994 - RNA, 19 nt, Artificial Sequence
  Description of Artificial Sequence: Synthetic oligonucleotide
  Sense strand starting at position 1054 of SEQ ID NO: 585767
ggcuauuaaguacaugaau

SEQ ID NO: 665995 - RNA, 19 nt, Artificial Sequence
  Description of Artificial Sequence: Synthetic oligonucleotide
  Antisense strand to SEQ ID NO: 665994
auucauguacuuaauagcc

SEQ ID NO: 665996 - RNA, 19 nt, Artificial Sequence
  Description of Artificial Sequence: Synthetic oligonucleotide
  Sense strand starting at position 1140 of SEQ ID NO: 585767
acuuaacagguguaaguau

SEQ ID NO: 665997 - RNA, 19 nt, Artificial Sequence
  Description of Artificial Sequence: Synthetic oligonucleotide
  Antisense strand to SEQ ID NO: 665996
auacuuacaccuguuaagu

SEQ ID NO: 665998 - RNA, 19 nt, Artificial Sequence
  Description of Artificial Sequence: Synthetic oligonucleotide
  Sense strand starting at position 1441 of SEQ ID NO: 585767
auauauguaugucuaccau

SEQ ID NO: 665999 - RNA, 19 nt, Artificial Sequence
  Description of Artificial Sequence: Synthetic oligonucleotide
  Antisense strand to SEQ ID NO: 665998
augguagacauacauauau

SEQ ID NO: 666000 - RNA, 19 nt, Artificial Sequence
  Description of Artificial Sequence: Synthetic oligonucleotide
  Sense strand starting at position 1534 of SEQ ID NO: 585767
gguauauagauguguauca

SEQ ID NO: 666001 - RNA, 19 nt, Artificial Sequence
  Description of Artificial Sequence: Synthetic oligonucleotide
  Antisense strand to SEQ ID NO: 666000
ugauacacaucuauauacc

SEQ ID NO: 666002 - RNA, 19 nt, Artificial Sequence
  Description of Artificial Sequence: Synthetic oligonucleotide
  Sense strand starting at position 1605 of SEQ ID NO: 585767
aacccaggucgauaacuuu

SEQ ID NO: 666003 - RNA, 19 nt, Artificial Sequence
  Description of Artificial Sequence: Synthetic oligonucleotide
  Antisense strand to SEQ ID NO: 666002
aaaguuaucgaccuggguu

SEQ ID NO: 666004 - RNA, 19 nt, Artificial Sequence
  Description of Artificial Sequence: Synthetic oligonucleotide
  Sense strand starting at position 2150 of SEQ ID NO: 585767
gcuucucagacucggagaa

SEQ ID NO: 666005 - RNA, 19 nt, Artificial Sequence
  Description of Artificial Sequence: Synthetic oligonucleotide
  Antisense strand to SEQ ID NO: 666004
uucuccgagucugagaagc

SEQ ID NO: 666006 - RNA, 19 nt, Artificial Sequence
  Description of Artificial Sequence: Synthetic oligonucleotide
  Sense strand starting at position 2272 of SEQ ID NO: 585767
guccuuuggacuugaggau

SEQ ID NO: 666007 - RNA, 19 nt, Artificial Sequence
  Description of Artificial Sequence: Synthetic oligonucleotide
  Antisense strand to SEQ ID NO: 666006
auccucaaguccaaaggac

SEQ ID NO: 666008 - RNA, 19 nt, Artificial Sequence
  Description of Artificial Sequence: Synthetic oligonucleotide
  Sense strand starting at position 2344 of SEQ ID NO: 585767
agugguucccuuuaaggaa

SEQ ID NO: 666009 - RNA, 19 nt, Artificial Sequence
  Description of Artificial Sequence: Synthetic oligonucleotide
  Antisense strand to SEQ ID NO: 666008
uuccuuaaagggaaccacu

SEQ ID NO: 666010 - RNA, 19 nt, Artificial Sequence
  Description of Artificial Sequence: Synthetic oligonucleotide
  Sense strand starting at position 2372 of SEQ ID NO: 585767
agcaauuauugaguccuga

SEQ ID NO: 666011 - RNA, 19 nt, Artificial Sequence
  Description of Artificial Sequence: Synthetic oligonucleotide
  Antisense strand to SEQ ID NO: 666010
ucaggacucaauaauugcu

SEQ ID NO: 666012 - RNA, 19 nt, Artificial Sequence
  Description of Artificial Sequence: Synthetic oligonucleotide
  Sense strand starting at position 2398 of SEQ ID NO: 585767
ggacauacacauugcugua

SEQ ID NO: 666013 - RNA, 19 nt, Artificial Sequence
  Description of Artificial Sequence: Synthetic oligonucleotide
  Antisense strand to SEQ ID NO: 666012
uacagcaauguguaugucc

SEQ ID NO: 666014 - RNA, 19 nt, Artificial Sequence
  Description of Artificial Sequence: Synthetic oligonucleotide
  Sense strand starting at position 2439 of SEQ ID NO: 585767
gcaacuaaacagggauacu

SEQ ID NO: 666015 - RNA, 19 nt, Artificial Sequence
  Description of Artificial Sequence: Synthetic oligonucleotide
  Antisense strand to SEQ ID NO: 666014
aguaucccuguuuaguugc

SEQ ID NO: 666016 - RNA, 19 nt, Artificial Sequence
  Description of Artificial Sequence: Synthetic oligonucleotide
  Sense strand starting at position 2475 of SEQ ID NO: 585767
aaaguagcaucauuaggau

SEQ ID NO: 666017 - RNA, 19 nt, Artificial Sequence
  Description of Artificial Sequence: Synthetic oligonucleotide
  Antisense strand to SEQ ID NO: 666016
auccuaaugaugcuacuuu

SEQ ID NO: 666018 - RNA, 19 nt, Artificial Sequence
  Description of Artificial Sequence: Synthetic oligonucleotide
  Sense strand starting at position 2697 of SEQ ID NO: 585767
uguggaaacguguacaaac

SEQ ID NO: 666019 - RNA, 19 nt, Artificial Sequence
  Description of Artificial Sequence: Synthetic oligonucleotide
  Antisense strand to SEQ ID NO: 666018
guuuguacacguuuccaca

SEQ ID NO: 666020 - RNA, 19 nt, Artificial Sequence
  Description of Artificial Sequence: Synthetic oligonucleotide
  Sense strand starting at position 2699 of SEQ ID NO: 585767
uggaaacguguacaaacua

SEQ ID NO: 666021 - RNA, 19 nt, Artificial Sequence
  Description of Artificial Sequence: Synthetic oligonucleotide
  Antisense strand to SEQ ID NO: 666020
uaguuuguacacguuucca

SEQ ID NO: 666022 - RNA, 19 nt, Artificial Sequence
  Description of Artificial Sequence: Synthetic oligonucleotide
  Sense strand starting at position 2765 of SEQ ID NO: 585767
uauagaaagugcuuggaua

SEQ ID NO: 666023 - RNA, 19 nt, Artificial Sequence
  Description of Artificial Sequence: Synthetic oligonucleotide
  Antisense strand to SEQ ID NO: 666022
uauccaagcacuuucuaua

SEQ ID NO: 666024 - RNA, 19 nt, Artificial Sequence
  Description of Artificial Sequence: Synthetic oligonucleotide
  Sense strand starting at position 2873 of SEQ ID NO: 585767
auguauaagucaucuaaac

SEQ ID NO: 666025 - RNA, 19 nt, Artificial Sequence
  Description of Artificial Sequence: Synthetic oligonucleotide
  Antisense strand to SEQ ID NO: 666024
guuuagaugacuuauacau

SEQ ID NO: 666026 - RNA, 19 nt, Artificial Sequence
  Description of Artificial Sequence: Synthetic oligonucleotide
  Sense strand starting at position 2882 of SEQ ID NO: 585767
ucaucuaaaccagaguagu

SEQ ID NO: 666027 - RNA, 19 nt, Artificial Sequence
  Description of Artificial Sequence: Synthetic oligonucleotide
  Antisense strand to SEQ ID NO: 666026
acuacucugguuuagauga

SEQ ID NO: 666028 - RNA, 19 nt, Artificial Sequence
  Description of Artificial Sequence: Synthetic oligonucleotide
  Sense strand starting at position 2966 of SEQ ID NO: 585767
cuuugugaacugcaccauu

SEQ ID NO: 666029 - RNA, 19 nt, Artificial Sequence
  Description of Artificial Sequence: Synthetic oligonucleotide
  Antisense strand to SEQ ID NO: 666028
aauggugcaguucacaaag

SEQ ID NO: 666030 - RNA, 19 nt, Artificial Sequence
  Description of Artificial Sequence: Synthetic oligonucleotide
  Sense strand starting at position 2969 of SEQ ID NO: 585767
ugugaacugcaccauuagu

SEQ ID NO: 666031 - RNA, 19 nt, Artificial Sequence
  Description of Artificial Sequence: Synthetic oligonucleotide
  Antisense strand to SEQ ID NO: 666030
acuaauggugcaguucaca

SEQ ID NO: 666032 - RNA, 19 nt, Artificial Sequence
  Description of Artificial Sequence: Synthetic oligonucleotide
  Sense strand starting at position 3080 of SEQ ID NO: 585767
aguaaugcacaaugaauua

SEQ ID NO: 666033 - RNA, 19 nt, Artificial Sequence
  Description of Artificial Sequence: Synthetic oligonucleotide
  Antisense strand to SEQ ID NO: 666032
uaauucauugugcauuacu

SEQ ID NO: 666034 - RNA, 19 nt, Artificial Sequence
  Description of Artificial Sequence: Synthetic oligonucleotide
  Sense strand starting at position 3124 of SEQ ID NO: 585767
gagggaugacucuguuaga

SEQ ID NO: 666035 - RNA, 19 nt, Artificial Sequence
  Description of Artificial Sequence: Synthetic oligonucleotide
  Antisense strand to SEQ ID NO: 666034
ucuaacagagucaucccuc

SEQ ID NO: 666036 - RNA, 19 nt, Artificial Sequence
  Description of Artificial Sequence: Synthetic oligonucleotide
  Sense strand starting at position 3155 of SEQ ID NO: 585767
agucuaagagauugucaua

SEQ ID NO: 666037 - RNA, 19 nt, Artificial Sequence
  Description of Artificial Sequence: Synthetic oligonucleotide
  Antisense strand to SEQ ID NO: 666036
uaugacaaucucuuagacu

SEQ ID NO: 666038 - RNA, 19 nt, Artificial Sequence
  Description of Artificial Sequence: Synthetic oligonucleotide
  Sense strand starting at position 3225 of SEQ ID NO: 585767
ggugugaugccggaacaga

SEQ ID NO: 666039 - RNA, 19 nt, Artificial Sequence
  Description of Artificial Sequence: Synthetic oligonucleotide
  Antisense strand to SEQ ID NO: 666038
ucuguuccggcaucacacc

SEQ ID NO: 666040 - RNA, 19 nt, Artificial Sequence
  Description of Artificial Sequence: Synthetic oligonucleotide
  Sense strand starting at position 3283 of SEQ ID NO: 585767
cacggacuuuaguuaauaa

SEQ ID NO: 666041 - RNA, 19 nt, Artificial Sequence
  Description of Artificial Sequence: Synthetic oligonucleotide
  Antisense strand to SEQ ID NO: 666040
uuauuaacuaaaguccgug

SEQ ID NO: 666042 - RNA, 19 nt, Artificial Sequence
  Description of Artificial Sequence: Synthetic oligonucleotide
  Sense strand starting at position 3605 of SEQ ID NO: 585767
uguggcuuagccuaaagga

SEQ ID NO: 666043 - RNA, 19 nt, Artificial Sequence
  Description of Artificial Sequence: Synthetic oligonucleotide
  Antisense strand to SEQ ID NO: 666042
uccuuuaggcuaagccaca

SEQ ID NO: 666044 - RNA, 19 nt, Artificial Sequence
  Description of Artificial Sequence: Synthetic oligonucleotide
  Sense strand starting at position 3635 of SEQ ID NO: 585767
auuaucaccgauuaagcaa

SEQ ID NO: 666045 - RNA, 19 nt, Artificial Sequence
  Description of Artificial Sequence: Synthetic oligonucleotide
  Antisense strand to SEQ ID NO: 666044
uugcuuaaucggugauaau

SEQ ID NO: 666046 - RNA, 19 nt, Artificial Sequence
  Description of Artificial Sequence: Synthetic oligonucleotide
  Sense strand starting at position 3698 of SEQ ID NO: 585767
gguguaaggguucaguauc

SEQ ID NO: 666047 - RNA, 19 nt, Artificial Sequence
  Description of Artificial Sequence: Synthetic oligonucleotide
  Antisense strand to SEQ ID NO: 666046
gauacugaacccuuacacc

SEQ ID NO: 666048 - RNA, 19 nt, Artificial Sequence
  Description of Artificial Sequence: Synthetic oligonucleotide
  Sense strand starting at position 3953 of SEQ ID NO: 585767
gaagcuugaugauccagaa

SEQ ID NO: 666049 - RNA, 19 nt, Artificial Sequence
  Description of Artificial Sequence: Synthetic oligonucleotide
  Antisense strand to SEQ ID NO: 666048
uucuggaucaucaagcuuc

SEQ ID NO: 666050 - RNA, 19 nt, Artificial Sequence
  Description of Artificial Sequence: Synthetic oligonucleotide
  Sense strand starting at position 65 of SEQ ID NO: 585768
ugauuucccucgccucgaa

SEQ ID NO: 666051 - RNA, 19 nt, Artificial Sequence
  Description of Artificial Sequence: Synthetic oligonucleotide
  Antisense strand to SEQ ID NO: 666050
uucgaggcgagggaaauca

SEQ ID NO: 666052 - RNA, 19 nt, Artificial Sequence
  Description of Artificial Sequence: Synthetic oligonucleotide
  Sense strand starting at position 428 of SEQ ID NO: 585768
aaaguuauaguuugugaag

SEQ ID NO: 666053 - RNA, 19 nt, Artificial Sequence
  Description of Artificial Sequence: Synthetic oligonucleotide
  Antisense strand to SEQ ID NO: 666052
cuucacaaacuauaacuuu

SEQ ID NO: 666054 - RNA, 19 nt, Artificial Sequence
  Description of Artificial Sequence: Synthetic oligonucleotide
  Sense strand starting at position 812 of SEQ ID NO: 585768
cuggauuacuuucucaagu

SEQ ID NO: 666055 - RNA, 19 nt, Artificial Sequence
  Description of Artificial Sequence: Synthetic oligonucleotide
  Antisense strand to SEQ ID NO: 666054
acuugagaaaguaauccag

SEQ ID NO: 666056 - RNA, 19 nt, Artificial Sequence
  Description of Artificial Sequence: Synthetic oligonucleotide
  Sense strand starting at position 813 of SEQ ID NO: 585768
uggauuacuuucucaagua

SEQ ID NO: 666057 - RNA, 19 nt, Artificial Sequence
  Description of Artificial Sequence: Synthetic oligonucleotide
  Antisense strand to SEQ ID NO: 666056
uacuugagaaaguaaucca

SEQ ID NO: 666058 - RNA, 19 nt, Artificial Sequence
  Description of Artificial Sequence: Synthetic oligonucleotide
  Sense strand starting at position 830 of SEQ ID NO: 585768
uacuguagugucugagauc

SEQ ID NO: 666059 - RNA, 19 nt, Artificial Sequence
  Description of Artificial Sequence: Synthetic oligonucleotide
  Antisense strand to SEQ ID NO: 666058
gaucucagacacuacagua

SEQ ID NO: 666060 - RNA, 19 nt, Artificial Sequence
  Description of Artificial Sequence: Synthetic oligonucleotide
  Sense strand starting at position 836 of SEQ ID NO: 585768
agugucugagaucaguaaa

SEQ ID NO: 666061 - RNA, 19 nt, Artificial Sequence
  Description of Artificial Sequence: Synthetic oligonucleotide
  Antisense strand to SEQ ID NO: 666060
uuuacugaucucagacacu

SEQ ID NO: 666062 - RNA, 19 nt, Artificial Sequence
  Description of Artificial Sequence: Synthetic oligonucleotide
  Sense strand starting at position 866 of SEQ ID NO: 585768
ucagaaagccacugauugu

SEQ ID NO: 666063 - RNA, 19 nt, Artificial Sequence
  Description of Artificial Sequence: Synthetic oligonucleotide
  Antisense strand to SEQ ID NO: 666062
acaaucaguggcuuucuga

SEQ ID NO: 666064 - RNA, 19 nt, Artificial Sequence
  Description of Artificial Sequence: Synthetic oligonucleotide
  Sense strand starting at position 869 of SEQ ID NO: 585768
gaaagccacugauugucua

SEQ ID NO: 666065 - RNA, 19 nt, Artificial Sequence
  Description of Artificial Sequence: Synthetic oligonucleotide
  Antisense strand to SEQ ID NO: 666064
uagacaaucaguggcuuuc

SEQ ID NO: 666066 - RNA, 19 nt, Artificial Sequence
  Description of Artificial Sequence: Synthetic oligonucleotide
  Sense strand starting at position 881 of SEQ ID NO: 585768
uugucuaacccucaugagu

SEQ ID NO: 666067 - RNA, 19 nt, Artificial Sequence
  Description of Artificial Sequence: Synthetic oligonucleotide
  Antisense strand to SEQ ID NO: 666066
acucaugaggguuagacaa

SEQ ID NO: 666068 - RNA, 19 nt, Artificial Sequence
  Description of Artificial Sequence: Synthetic oligonucleotide
  Sense strand starting at position 897 of SEQ ID NO: 585768
aguaccgucauggaaucua

SEQ ID NO: 666069 - RNA, 19 nt, Artificial Sequence
  Description of Artificial Sequence: Synthetic oligonucleotide
  Antisense strand to SEQ ID NO: 666068
uagauuccaugacgguacu

SEQ ID NO: 666070 - RNA, 19 nt, Artificial Sequence
  Description of Artificial Sequence: Synthetic oligonucleotide
  Sense strand starting at position 1164 of SEQ ID NO: 585768
acuccauagucaccaguuu

SEQ ID NO: 666071 - RNA, 19 nt, Artificial Sequence
  Description of Artificial Sequence: Synthetic oligonucleotide
  Antisense strand to SEQ ID NO: 666070
aaacuggugacuauggagu

SEQ ID NO: 666072 - RNA, 19 nt, Artificial Sequence
  Description of Artificial Sequence: Synthetic oligonucleotide
  Sense strand starting at position 1280 of SEQ ID NO: 585768
auauucuaccugggauauu

SEQ ID NO: 666073 - RNA, 19 nt, Artificial Sequence
  Description of Artificial Sequence: Synthetic oligonucleotide
  Antisense strand to SEQ ID NO: 666072
aauaucccagguagaauau

SEQ ID NO: 666074 - RNA, 19 nt, Artificial Sequence
  Description of Artificial Sequence: Synthetic oligonucleotide
  Sense strand starting at position 1457 of SEQ ID NO: 585768
uaacuaaccgguuacuuga

SEQ ID NO: 666075 - RNA, 19 nt, Artificial Sequence
  Description of Artificial Sequence: Synthetic oligonucleotide
  Antisense strand to SEQ ID NO: 666074
ucaaguaaccgguuaguua

SEQ ID NO: 666076 - RNA, 19 nt, Artificial Sequence
  Description of Artificial Sequence: Synthetic oligonucleotide
  Sense strand starting at position 1515 of SEQ ID NO: 585768
ugcagaguuaaagaguaau

SEQ ID NO: 666077 - RNA, 19 nt, Artificial Sequence
  Description of Artificial Sequence: Synthetic oligonucleotide
  Antisense strand to SEQ ID NO: 666076
auuacucuuuaacucugca

SEQ ID NO: 666078 - RNA, 19 nt, Artificial Sequence
  Description of Artificial Sequence: Synthetic oligonucleotide
  Sense strand starting at position 1619 of SEQ ID NO: 585768
guacuuugcauaugaggaa

SEQ ID NO: 666079 - RNA, 19 nt, Artificial Sequence
  Description of Artificial Sequence: Synthetic oligonucleotide
  Antisense strand to SEQ ID NO: 666078
uuccucauaugcaaaguac

SEQ ID NO: 666080 - RNA, 19 nt, Artificial Sequence
  Description of Artificial Sequence: Synthetic oligonucleotide
  Sense strand starting at position 1685 of SEQ ID NO: 585768
gugcguugccauagaggua

SEQ ID NO: 666081 - RNA, 19 nt, Artificial Sequence
  Description of Artificial Sequence: Synthetic oligonucleotide
  Antisense strand to SEQ ID NO: 666080
uaccucuauggcaacgcac

SEQ ID NO: 666082 - RNA, 19 nt, Artificial Sequence
  Description of Artificial Sequence: Synthetic oligonucleotide
  Sense strand starting at position 1736 of SEQ ID NO: 585768
accugucaugcugacaguu

SEQ ID NO: 666083 - RNA, 19 nt, Artificial Sequence
  Description of Artificial Sequence: Synthetic oligonucleotide
  Antisense strand to SEQ ID NO: 666082
aacugucagcaugacaggu

SEQ ID NO: 666084 - RNA, 19 nt, Artificial Sequence
  Description of Artificial Sequence: Synthetic oligonucleotide
  Sense strand starting at position 1926 of SEQ ID NO: 585768
cguguuaguagcucacagu

SEQ ID NO: 666085 - RNA, 19 nt, Artificial Sequence
  Description of Artificial Sequence: Synthetic oligonucleotide
  Antisense strand to SEQ ID NO: 666084
acugugagcuacuaacacg

SEQ ID NO: 666086 - RNA, 19 nt, Artificial Sequence
  Description of Artificial Sequence: Synthetic oligonucleotide
  Sense strand starting at position 2067 of SEQ ID NO: 585768
accacaucauguccggaaa

SEQ ID NO: 666087 - RNA, 19 nt, Artificial Sequence
  Description of Artificial Sequence: Synthetic oligonucleotide
  Antisense strand to SEQ ID NO: 666086
uuuccggacaugauguggu

SEQ ID NO: 666088 - RNA, 19 nt, Artificial Sequence
  Description of Artificial Sequence: Synthetic oligonucleotide
  Sense strand starting at position 2215 of SEQ ID NO: 585768
cucuuagcagccuaagaga

SEQ ID NO: 666089 - RNA, 19 nt, Artificial Sequence
  Description of Artificial Sequence: Synthetic oligonucleotide
  Antisense strand to SEQ ID NO: 666088
ucucuuaggcugcuaagag

SEQ ID NO: 666090 - RNA, 19 nt, Artificial Sequence
  Description of Artificial Sequence: Synthetic oligonucleotide
  Sense strand starting at position 2228 of SEQ ID NO: 585768
aagagaaaugugcagugua

SEQ ID NO: 666091 - RNA, 19 nt, Artificial Sequence
  Description of Artificial Sequence: Synthetic oligonucleotide
  Antisense strand to SEQ ID NO: 666090
uacacugcacauuucucuu

SEQ ID NO: 666092 - RNA, 19 nt, Artificial Sequence
  Description of Artificial Sequence: Synthetic oligonucleotide
  Sense strand starting at position 2295 of SEQ ID NO: 585768
guaguuacauccuuguaau

SEQ ID NO: 666093 - RNA, 19 nt, Artificial Sequence
  Description of Artificial Sequence: Synthetic oligonucleotide
  Antisense strand to SEQ ID NO: 666092
auuacaaggauguaacuac

SEQ ID NO: 666094 - RNA, 19 nt, Artificial Sequence
  Description of Artificial Sequence: Synthetic oligonucleotide
  Sense strand starting at position 2324 of SEQ ID NO: 585768
augucacaaugguuagaau

SEQ ID NO: 666095 - RNA, 19 nt, Artificial Sequence
  Description of Artificial Sequence: Synthetic oligonucleotide
  Antisense strand to SEQ ID NO: 666094
auucuaaccauugugacau

SEQ ID NO: 666096 - RNA, 19 nt, Artificial Sequence
  Description of Artificial Sequence: Synthetic oligonucleotide
  Sense strand starting at position 2453 of SEQ ID NO: 585768
cuuauaagacacuggugau

SEQ ID NO: 666097 - RNA, 19 nt, Artificial Sequence
  Description of Artificial Sequence: Synthetic oligonucleotide
  Antisense strand to SEQ ID NO: 666096
aucaccagugucuuauaag

SEQ ID NO: 666098 - RNA, 19 nt, Artificial Sequence
  Description of Artificial Sequence: Synthetic oligonucleotide
  Sense strand starting at position 2459 of SEQ ID NO: 585768
agacacuggugaucugaca

SEQ ID NO: 666099 - RNA, 19 nt, Artificial Sequence
  Description of Artificial Sequence: Synthetic oligonucleotide
  Antisense strand to SEQ ID NO: 666098
ugucagaucaccagugucu

SEQ ID NO: 666100 - RNA, 19 nt, Artificial Sequence
  Description of Artificial Sequence: Synthetic oligonucleotide
  Sense strand starting at position 2476 of SEQ ID NO: 585768
cagagugaauguuugacuu

SEQ ID NO: 666101 - RNA, 19 nt, Artificial Sequence
  Description of Artificial Sequence: Synthetic oligonucleotide
  Antisense strand to SEQ ID NO: 666100
aagucaaacauucacucug

SEQ ID NO: 666102 - RNA, 19 nt, Artificial Sequence
  Description of Artificial Sequence: Synthetic oligonucleotide
  Sense strand starting at position 2480 of SEQ ID NO: 585768
gugaauguuugacuuugga

SEQ ID NO: 666103 - RNA, 19 nt, Artificial Sequence
  Description of Artificial Sequence: Synthetic oligonucleotide
  Antisense strand to SEQ ID NO: 666102
uccaaagucaaacauucac

SEQ ID NO: 666104 - RNA, 19 nt, Artificial Sequence
  Description of Artificial Sequence: Synthetic oligonucleotide
  Sense strand starting at position 2483 of SEQ ID NO: 585768
aauguuugacuuuggacaa

SEQ ID NO: 666105 - RNA, 19 nt, Artificial Sequence
  Description of Artificial Sequence: Synthetic oligonucleotide
  Antisense strand to SEQ ID NO: 666104
uuguccaaagucaaacauu

SEQ ID NO: 666106 - RNA, 19 nt, Artificial Sequence
  Description of Artificial Sequence: Synthetic oligonucleotide
  Sense strand starting at position 2550 of SEQ ID NO: 585768
gugugauucccagagcagu

SEQ ID NO: 666107 - RNA, 19 nt, Artificial Sequence
  Description of Artificial Sequence: Synthetic oligonucleotide
  Antisense strand to SEQ ID NO: 666106
acugcucugggaaucacac

SEQ ID NO: 666108 - RNA, 19 nt, Artificial Sequence
  Description of Artificial Sequence: Synthetic oligonucleotide
  Sense strand starting at position 2627 of SEQ ID NO: 585768
acaacauauguguacaguu

SEQ ID NO: 666109 - RNA, 19 nt, Artificial Sequence
  Description of Artificial Sequence: Synthetic oligonucleotide
  Antisense strand to SEQ ID NO: 666108
aacuguacacauauguugu

SEQ ID NO: 666110 - RNA, 19 nt, Artificial Sequence
  Description of Artificial Sequence: Synthetic oligonucleotide
  Sense strand starting at position 2746 of SEQ ID NO: 585768
gggcaagagugacuauuca

SEQ ID NO: 666111 - RNA, 19 nt, Artificial Sequence
  Description of Artificial Sequence: Synthetic oligonucleotide
  Antisense strand to SEQ ID NO: 666110
ugaauagucacucuugccc

SEQ ID NO: 666112 - RNA, 19 nt, Artificial Sequence
  Description of Artificial Sequence: Synthetic oligonucleotide
  Sense strand starting at position 2873 of SEQ ID NO: 585768
ucauccacucugggauauu

SEQ ID NO: 666113 - RNA, 19 nt, Artificial Sequence
  Description of Artificial Sequence: Synthetic oligonucleotide
  Antisense strand to SEQ ID NO: 666112
aauaucccagaguggauga

SEQ ID NO: 666114 - RNA, 19 nt, Artificial Sequence
  Description of Artificial Sequence: Synthetic oligonucleotide
  Sense strand starting at position 2901 of SEQ ID NO: 585768
acagguauuuccuacaaga

SEQ ID NO: 666115 - RNA, 19 nt, Artificial Sequence
  Description of Artificial Sequence: Synthetic oligonucleotide
  Antisense strand to SEQ ID NO: 666114
ucuuguaggaaauaccugu

SEQ ID NO: 666116 - RNA, 19 nt, Artificial Sequence
  Description of Artificial Sequence: Synthetic oligonucleotide
  Sense strand starting at position 2945 of SEQ ID NO: 585768
ggcuuacuccuagggauga

SEQ ID NO: 666117 - RNA, 19 nt, Artificial Sequence
  Description of Artificial Sequence: Synthetic oligonucleotide
  Antisense strand to SEQ ID NO: 666116
ucaucccuaggaguaagcc

SEQ ID NO: 666118 - RNA, 19 nt, Artificial Sequence
  Description of Artificial Sequence: Synthetic oligonucleotide
  Sense strand starting at position 3066 of SEQ ID NO: 585768
acuugagguuucucuaaau

SEQ ID NO: 666119 - RNA, 19 nt, Artificial Sequence
  Description of Artificial Sequence: Synthetic oligonucleotide
  Antisense strand to SEQ ID NO: 666118
auuuagagaaaccucaagu

SEQ ID NO: 666120 - RNA, 19 nt, Artificial Sequence
  Description of Artificial Sequence: Synthetic oligonucleotide
  Sense strand starting at position 3077 of SEQ ID NO: 585768
cucuaaauauauguguaga

SEQ ID NO: 666121 - RNA, 19 nt, Artificial Sequence
  Description of Artificial Sequence: Synthetic oligonucleotide
  Antisense strand to SEQ ID NO: 666120
ucuacacauauauuuagag

SEQ ID NO: 666122 - RNA, 19 nt, Artificial Sequence
  Description of Artificial Sequence: Synthetic oligonucleotide
  Sense strand starting at position 3079 of SEQ ID NO: 585768
cuaaauauauguguagagu

SEQ ID NO: 666123 - RNA, 19 nt, Artificial Sequence
  Description of Artificial Sequence: Synthetic oligonucleotide
  Antisense strand to SEQ ID NO: 666122
acucuacacauauauuuag

SEQ ID NO: 666124 - RNA, 19 nt, Artificial Sequence
  Description of Artificial Sequence: Synthetic oligonucleotide
  Sense strand starting at position 3080 of SEQ ID NO: 585768
uaaauauauguguagaguc

SEQ ID NO: 666125 - RNA, 19 nt, Artificial Sequence
  Description of Artificial Sequence: Synthetic oligonucleotide
  Antisense strand to SEQ ID NO: 666124
gacucuacacauauauuua

SEQ ID NO: 666126 - RNA, 19 nt, Artificial Sequence
  Description of Artificial Sequence: Synthetic oligonucleotide
  Sense strand starting at position 3172 of SEQ ID NO: 585768
ccuuguaauuaauugagca

SEQ ID NO: 666127 - RNA, 19 nt, Artificial Sequence
  Description of Artificial Sequence: Synthetic oligonucleotide
  Antisense strand to SEQ ID NO: 666126
ugcucaauuaauuacaagg

SEQ ID NO: 666128 - RNA, 19 nt, Artificial Sequence
  Description of Artificial Sequence: Synthetic oligonucleotide
  Sense strand starting at position 3176 of SEQ ID NO: 585768
guaauuaauugagcaagaa

SEQ ID NO: 666129 - RNA, 19 nt, Artificial Sequence
  Description of Artificial Sequence: Synthetic oligonucleotide
  Antisense strand to SEQ ID NO: 666128
uucuugcucaauuaauuac

SEQ ID NO: 666130 - RNA, 19 nt, Artificial Sequence
  Description of Artificial Sequence: Synthetic oligonucleotide
  Sense strand starting at position 53 of SEQ ID NO: 585769
uuuaauugcaguggagaau

SEQ ID NO: 666131 - RNA, 19 nt, Artificial Sequence
  Description of Artificial Sequence: Synthetic oligonucleotide
  Antisense strand to SEQ ID NO: 666130
auucuccacugcaauuaaa

SEQ ID NO: 666132 - RNA, 19 nt, Artificial Sequence
  Description of Artificial Sequence: Synthetic oligonucleotide
  Sense strand starting at position 217 of SEQ ID NO: 585769
acgagagcaugcuuaaaua

SEQ ID NO: 666133 - RNA, 19 nt, Artificial Sequence
  Description of Artificial Sequence: Synthetic oligonucleotide
  Antisense strand to SEQ ID NO: 666132
uauuuaagcaugcucucgu

SEQ ID NO: 666134 - RNA, 19 nt, Artificial Sequence
  Description of Artificial Sequence: Synthetic oligonucleotide
  Sense strand starting at position 415 of SEQ ID NO: 585769
acucuagaagcauguaaac

SEQ ID NO: 666135 - RNA, 19 nt, Artificial Sequence
  Description of Artificial Sequence: Synthetic oligonucleotide
  Antisense strand to SEQ ID NO: 666134
guuuacaugcuucuagagu

SEQ ID NO: 666136 - RNA, 19 nt, Artificial Sequence
  Description of Artificial Sequence: Synthetic oligonucleotide
  Sense strand starting at position 493 of SEQ ID NO: 585769
cgguuuagggaucaaagcu

SEQ ID NO: 666137 - RNA, 19 nt, Artificial Sequence
  Description of Artificial Sequence: Synthetic oligonucleotide
  Antisense strand to SEQ ID NO: 666136
agcuuugaucccuaaaccg

SEQ ID NO: 666138 - RNA, 19 nt, Artificial Sequence
  Description of Artificial Sequence: Synthetic oligonucleotide
  Sense strand starting at position 501 of SEQ ID NO: 585769
ggaucaaagcuucaggguu

SEQ ID NO: 666139 - RNA, 19 nt, Artificial Sequence
  Description of Artificial Sequence: Synthetic oligonucleotide
  Antisense strand to SEQ ID NO: 666138
aacccugaagcuuugaucc

SEQ ID NO: 666140 - RNA, 19 nt, Artificial Sequence
  Description of Artificial Sequence: Synthetic oligonucleotide
  Sense strand starting at position 790 of SEQ ID NO: 585769
aacggaccuuauguauaaa

SEQ ID NO: 666141 - RNA, 19 nt, Artificial Sequence
  Description of Artificial Sequence: Synthetic oligonucleotide
  Antisense strand to SEQ ID NO: 666140
uuuauacauaagguccguu

SEQ ID NO: 666142 - RNA, 19 nt, Artificial Sequence
  Description of Artificial Sequence: Synthetic oligonucleotide
  Sense strand starting at position 879 of SEQ ID NO: 585769
gugggcucggacuauugau

SEQ ID NO: 666143 - RNA, 19 nt, Artificial Sequence
  Description of Artificial Sequence: Synthetic oligonucleotide
  Antisense strand to SEQ ID NO: 666142
aucaauaguccgagcccac

SEQ ID NO: 666144 - RNA, 19 nt, Artificial Sequence
  Description of Artificial Sequence: Synthetic oligonucleotide
  Sense strand starting at position 1193 of SEQ ID NO: 585769
ggccuugcucaggauugau

SEQ ID NO: 666145 - RNA, 19 nt, Artificial Sequence
  Description of Artificial Sequence: Synthetic oligonucleotide
  Antisense strand to SEQ ID NO: 666144
aucaauccugagcaaggcc

SEQ ID NO: 666146 - RNA, 19 nt, Artificial Sequence
  Description of Artificial Sequence: Synthetic oligonucleotide
  Sense strand starting at position 1339 of SEQ ID NO: 585769
agagauuccuagcccugaa

SEQ ID NO: 666147 - RNA, 19 nt, Artificial Sequence
  Description of Artificial Sequence: Synthetic oligonucleotide
  Antisense strand to SEQ ID NO: 666146
uucagggcuaggaaucucu

SEQ ID NO: 666148 - RNA, 19 nt, Artificial Sequence
  Description of Artificial Sequence: Synthetic oligonucleotide
  Sense strand starting at position 1388 of SEQ ID NO: 585769
cgcagauuuguagagcugu

SEQ ID NO: 666149 - RNA, 19 nt, Artificial Sequence
  Description of Artificial Sequence: Synthetic oligonucleotide
  Antisense strand to SEQ ID NO: 666148
acagcucuacaaaucugcg

SEQ ID NO: 666150 - RNA, 19 nt, Artificial Sequence
  Description of Artificial Sequence: Synthetic oligonucleotide
  Sense strand starting at position 1437 of SEQ ID NO: 585769
ugccaucaccuagauagua

SEQ ID NO: 666151 - RNA, 19 nt, Artificial Sequence
  Description of Artificial Sequence: Synthetic oligonucleotide
  Antisense strand to SEQ ID NO: 666150
uacuaucuaggugauggca

SEQ ID NO: 666152 - RNA, 19 nt, Artificial Sequence
  Description of Artificial Sequence: Synthetic oligonucleotide
  Sense strand starting at position 1809 of SEQ ID NO: 585769
uguucuugcagauaaggga

SEQ ID NO: 666153 - RNA, 19 nt, Artificial Sequence
  Description of Artificial Sequence: Synthetic oligonucleotide
  Antisense strand to SEQ ID NO: 666152
ucccuuaucugcaagaaca

SEQ ID NO: 666154 - RNA, 19 nt, Artificial Sequence
  Description of Artificial Sequence: Synthetic oligonucleotide
  Sense strand starting at position 1897 of SEQ ID NO: 585769
accuaugaggcugagcauu

SEQ ID NO: 666155 - RNA, 19 nt, Artificial Sequence
  Description of Artificial Sequence: Synthetic oligonucleotide
  Antisense strand to SEQ ID NO: 666154
aaugcucagccucauaggu

SEQ ID NO: 666156 - RNA, 19 nt, Artificial Sequence
  Description of Artificial Sequence: Synthetic oligonucleotide
  Sense strand starting at position 1998 of SEQ ID NO: 585769
aucacucagcccugagaau

SEQ ID NO: 666157 - RNA, 19 nt, Artificial Sequence
  Description of Artificial Sequence: Synthetic oligonucleotide
  Antisense strand to SEQ ID NO: 666156
auucucagggcugagugau

SEQ ID NO: 666158 - RNA, 19 nt, Artificial Sequence
  Description of Artificial Sequence: Synthetic oligonucleotide
  Sense strand starting at position 2224 of SEQ ID NO: 585769
aagucaucuguuugggaua

SEQ ID NO: 666159 - RNA, 19 nt, Artificial Sequence
  Description of Artificial Sequence: Synthetic oligonucleotide
  Antisense strand to SEQ ID NO: 666158
uaucccaaacagaugacuu

SEQ ID NO: 666160 - RNA, 19 nt, Artificial Sequence
  Description of Artificial Sequence: Synthetic oligonucleotide
  Sense strand starting at position 2237 of SEQ ID NO: 585769
gggauaaugaauggccuuu

SEQ ID NO: 666161 - RNA, 19 nt, Artificial Sequence
  Description of Artificial Sequence: Synthetic oligonucleotide
  Antisense strand to SEQ ID NO: 666160
aaaggccauucauuauccc

SEQ ID NO: 666162 - RNA, 19 nt, Artificial Sequence
  Description of Artificial Sequence: Synthetic oligonucleotide
  Sense strand starting at position 2256 of SEQ ID NO: 585769
cugugcucucgggaggaga

SEQ ID NO: 666163 - RNA, 19 nt, Artificial Sequence
  Description of Artificial Sequence: Synthetic oligonucleotide
  Antisense strand to SEQ ID NO: 666162
ucuccucccgagagcacag

SEQ ID NO: 666164 - RNA, 19 nt, Artificial Sequence
  Description of Artificial Sequence: Synthetic oligonucleotide
  Sense strand starting at position 2334 of SEQ ID NO: 585769
uuaugagaauucccgagag

SEQ ID NO: 666165 - RNA, 19 nt, Artificial Sequence
  Description of Artificial Sequence: Synthetic oligonucleotide
  Antisense strand to SEQ ID NO: 666164
cucucgggaauucucauaa

SEQ ID NO: 666166 - RNA, 19 nt, Artificial Sequence
  Description of Artificial Sequence: Synthetic oligonucleotide
  Sense strand starting at position 2336 of SEQ ID NO: 585769
augagaauucccgagagcu

SEQ ID NO: 666167 - RNA, 19 nt, Artificial Sequence
  Description of Artificial Sequence: Synthetic oligonucleotide
  Antisense strand to SEQ ID NO: 666166
agcucucgggaauucucau

SEQ ID NO: 666168 - RNA, 19 nt, Artificial Sequence
  Description of Artificial Sequence: Synthetic oligonucleotide
  Sense strand starting at position 2452 of SEQ ID NO: 585769
agugguccuuaaucaggaa

SEQ ID NO: 666169 - RNA, 19 nt, Artificial Sequence
  Description of Artificial Sequence: Synthetic oligonucleotide
  Antisense strand to SEQ ID NO: 666168
uuccugauuaaggaccacu

SEQ ID NO: 666170 - RNA, 19 nt, Artificial Sequence
  Description of Artificial Sequence: Synthetic oligonucleotide
  Sense strand starting at position 2474 of SEQ ID NO: 585769
gcugaaguuccuggaauag

SEQ ID NO: 666171 - RNA, 19 nt, Artificial Sequence
  Description of Artificial Sequence: Synthetic oligonucleotide
  Antisense strand to SEQ ID NO: 666170
cuauuccaggaacuucagc

SEQ ID NO: 666172 - RNA, 19 nt, Artificial Sequence
  Description of Artificial Sequence: Synthetic oligonucleotide
  Sense strand starting at position 2524 of SEQ ID NO: 585769
acaucucgacuuugagaga

SEQ ID NO: 666173 - RNA, 19 nt, Artificial Sequence
  Description of Artificial Sequence: Synthetic oligonucleotide
  Antisense strand to SEQ ID NO: 666172
ucucucaaagucgagaugu

SEQ ID NO: 666174 - RNA, 19 nt, Artificial Sequence
  Description of Artificial Sequence: Synthetic oligonucleotide
  Sense strand starting at position 2631 of SEQ ID NO: 585769
accaacagcucauuggaaa

SEQ ID NO: 666175 - RNA, 19 nt, Artificial Sequence
  Description of Artificial Sequence: Synthetic oligonucleotide
  Antisense strand to SEQ ID NO: 666174
uuuccaaugagcuguuggu

SEQ ID NO: 666176 - RNA, 19 nt, Artificial Sequence
  Description of Artificial Sequence: Synthetic oligonucleotide
  Sense strand starting at position 2658 of SEQ ID NO: 585769
ugcugacaaccaugugaaa

SEQ ID NO: 666177 - RNA, 19 nt, Artificial Sequence
  Description of Artificial Sequence: Synthetic oligonucleotide
  Antisense strand to SEQ ID NO: 666176
uuucacaugguugucagca

SEQ ID NO: 666178 - RNA, 19 nt, Artificial Sequence
  Description of Artificial Sequence: Synthetic oligonucleotide
  Sense strand starting at position 2700 of SEQ ID NO: 585769
cuaguugagguuugagaug

SEQ ID NO: 666179 - RNA, 19 nt, Artificial Sequence
  Description of Artificial Sequence: Synthetic oligonucleotide
  Antisense strand to SEQ ID NO: 666178
caucucaaaccucaacuag

SEQ ID NO: 666180 - RNA, 19 nt, Artificial Sequence
  Description of Artificial Sequence: Synthetic oligonucleotide
  Sense strand starting at position 2896 of SEQ ID NO: 585769
ucugcauguccagauugga

SEQ ID NO: 666181 - RNA, 19 nt, Artificial Sequence
  Description of Artificial Sequence: Synthetic oligonucleotide
  Antisense strand to SEQ ID NO: 666180
uccaaucuggacaugcaga

SEQ ID NO: 666182 - RNA, 19 nt, Artificial Sequence
  Description of Artificial Sequence: Synthetic oligonucleotide
  Sense strand starting at position 2912 of SEQ ID NO: 585769
ggaaguugucauuauuaac

SEQ ID NO: 666183 - RNA, 19 nt, Artificial Sequence
  Description of Artificial Sequence: Synthetic oligonucleotide
  Antisense strand to SEQ ID NO: 666182
guuaauaaugacaacuucc

SEQ ID NO: 666184 - RNA, 19 nt, Artificial Sequence
  Description of Artificial Sequence: Synthetic oligonucleotide
  Sense strand starting at position 2941 of SEQ ID NO: 585769
cuaggauagaucugguaca

SEQ ID NO: 666185 - RNA, 19 nt, Artificial Sequence
  Description of Artificial Sequence: Synthetic oligonucleotide
  Antisense strand to SEQ ID NO: 666184
uguaccagaucuauccuag

SEQ ID NO: 666186 - RNA, 19 nt, Artificial Sequence
  Description of Artificial Sequence: Synthetic oligonucleotide
  Sense strand starting at position 3029 of SEQ ID NO: 585769
guugcuuaugaaugaaaca

SEQ ID NO: 666187 - RNA, 19 nt, Artificial Sequence
  Description of Artificial Sequence: Synthetic oligonucleotide
  Antisense strand to SEQ ID NO: 666186
uguuucauucauaagcaac

SEQ ID NO: 666188 - RNA, 19 nt, Artificial Sequence
  Description of Artificial Sequence: Synthetic oligonucleotide
  Sense strand starting at position 3154 of SEQ ID NO: 585769
aguucucaagcauggacaa

SEQ ID NO: 666189 - RNA, 19 nt, Artificial Sequence
  Description of Artificial Sequence: Synthetic oligonucleotide
  Antisense strand to SEQ ID NO: 666188
uuguccaugcuugagaacu

SEQ ID NO: 666190 - RNA, 19 nt, Artificial Sequence
  Description of Artificial Sequence: Synthetic oligonucleotide
  Sense strand starting at position 3173 of SEQ ID NO: 585769
cagauaauggugugaguag

SEQ ID NO: 666191 - RNA, 19 nt, Artificial Sequence
  Description of Artificial Sequence: Synthetic oligonucleotide
  Antisense strand to SEQ ID NO: 666190
cuacucacaccauuaucug

SEQ ID NO: 666192 - RNA, 19 nt, Artificial Sequence
  Description of Artificial Sequence: Synthetic oligonucleotide
  Sense strand starting at position 3194 of SEQ ID NO: 585769
ugcagauagcaguaccuua

SEQ ID NO: 666193 - RNA, 19 nt, Artificial Sequence
  Description of Artificial Sequence: Synthetic oligonucleotide
  Antisense strand to SEQ ID NO: 666192
uaagguacugcuaucugca

SEQ ID NO: 666194 - RNA, 19 nt, Artificial Sequence
  Description of Artificial Sequence: Synthetic oligonucleotide
  Sense strand starting at position 3374 of SEQ ID NO: 585769
cagagaacuugguuuccaa

SEQ ID NO: 666195 - RNA, 19 nt, Artificial Sequence
  Description of Artificial Sequence: Synthetic oligonucleotide
  Antisense strand to SEQ ID NO: 666194
uuggaaaccaaguucucug

SEQ ID NO: 666196 - RNA, 19 nt, Artificial Sequence
  Description of Artificial Sequence: Synthetic oligonucleotide
  Sense strand starting at position 3623 of SEQ ID NO: 585769
acaggagauuuccaguaga

SEQ ID NO: 666197 - RNA, 19 nt, Artificial Sequence
  Description of Artificial Sequence: Synthetic oligonucleotide
  Antisense strand to SEQ ID NO: 666196
ucuacuggaaaucuccugu

SEQ ID NO: 666198 - RNA, 19 nt, Artificial Sequence
  Description of Artificial Sequence: Synthetic oligonucleotide
  Sense strand starting at position 3704 of SEQ ID NO: 585769
gucagccuucuaggaagaa

SEQ ID NO: 666199 - RNA, 19 nt, Artificial Sequence
  Description of Artificial Sequence: Synthetic oligonucleotide
  Antisense strand to SEQ ID NO: 666198
uucuuccuagaaggcugac

SEQ ID NO: 666200 - RNA, 19 nt, Artificial Sequence
  Description of Artificial Sequence: Synthetic oligonucleotide
  Sense strand starting at position 3861 of SEQ ID NO: 585769
aauugugauuuagacaaga

SEQ ID NO: 666201 - RNA, 19 nt, Artificial Sequence
  Description of Artificial Sequence: Synthetic oligonucleotide
  Antisense strand to SEQ ID NO: 666200
ucuugucuaaaucacaauu

SEQ ID NO: 666202 - RNA, 19 nt, Artificial Sequence
  Description of Artificial Sequence: Synthetic oligonucleotide
  Sense strand starting at position 3945 of SEQ ID NO: 585769
gggucaacgugacucaaua

SEQ ID NO: 666203 - RNA, 19 nt, Artificial Sequence
  Description of Artificial Sequence: Synthetic oligonucleotide
  Antisense strand to SEQ ID NO: 666202
uauugagucacguugaccc

SEQ ID NO: 666204 - RNA, 19 nt, Artificial Sequence
  Description of Artificial Sequence: Synthetic oligonucleotide
  Sense strand starting at position 3980 of SEQ ID NO: 585769
ugaagauaccuugggcgau

SEQ ID NO: 666205 - RNA, 19 nt, Artificial Sequence
  Description of Artificial Sequence: Synthetic oligonucleotide
  Antisense strand to SEQ ID NO: 666204
aucgcccaagguaucuuca

SEQ ID NO: 666206 - RNA, 19 nt, Artificial Sequence
  Description of Artificial Sequence: Synthetic oligonucleotide
  Sense strand starting at position 3982 of SEQ ID NO: 585769
aagauaccuugggcgauua

SEQ ID NO: 666207 - RNA, 19 nt, Artificial Sequence
  Description of Artificial Sequence: Synthetic oligonucleotide
  Antisense strand to SEQ ID NO: 666206
uaaucgcccaagguaucuu

SEQ ID NO: 666208 - RNA, 19 nt, Artificial Sequence
  Description of Artificial Sequence: Synthetic oligonucleotide
  Sense strand starting at position 3983 of SEQ ID NO: 585769
agauaccuugggcgauuaa

SEQ ID NO: 666209 - RNA, 19 nt, Artificial Sequence
  Description of Artificial Sequence: Synthetic oligonucleotide
  Antisense strand to SEQ ID NO: 666208
uuaaucgcccaagguaucu

SEQ ID NO: 666210 - RNA, 19 nt, Artificial Sequence
  Description of Artificial Sequence: Synthetic oligonucleotide
  Sense strand starting at position 27 of SEQ ID NO: 585770
aaggguggccugugaauga

SEQ ID NO: 666211 - RNA, 19 nt, Artificial Sequence
  Description of Artificial Sequence: Synthetic oligonucleotide
  Antisense strand to SEQ ID NO: 666210
ucauucacaggccacccuu

SEQ ID NO: 666212 - RNA, 19 nt, Artificial Sequence
  Description of Artificial Sequence: Synthetic oligonucleotide
  Sense strand starting at position 31 of SEQ ID NO: 585770
guggccugugaaugagaua

SEQ ID NO: 666213 - RNA, 19 nt, Artificial Sequence
  Description of Artificial Sequence: Synthetic oligonucleotide
  Antisense strand to SEQ ID NO: 666212
uaucucauucacaggccac

SEQ ID NO: 666214 - RNA, 19 nt, Artificial Sequence
  Description of Artificial Sequence: Synthetic oligonucleotide
  Sense strand starting at position 126 of SEQ ID NO: 585770
cagggaguccaaugaaagu

SEQ ID NO: 666215 - RNA, 19 nt, Artificial Sequence
  Description of Artificial Sequence: Synthetic oligonucleotide
  Antisense strand to SEQ ID NO: 666214
acuuucauuggacucccug

SEQ ID NO: 666216 - RNA, 19 nt, Artificial Sequence
  Description of Artificial Sequence: Synthetic oligonucleotide
  Sense strand starting at position 176 of SEQ ID NO: 585770
acucccguuccugaaucau

SEQ ID NO: 666217 - RNA, 19 nt, Artificial Sequence
  Description of Artificial Sequence: Synthetic oligonucleotide
  Antisense strand to SEQ ID NO: 666216
augauucaggaacgggagu

SEQ ID NO: 666218 - RNA, 19 nt, Artificial Sequence
  Description of Artificial Sequence: Synthetic oligonucleotide
  Sense strand starting at position 185 of SEQ ID NO: 585770
ccugaaucaugagcugauc

SEQ ID NO: 666219 - RNA, 19 nt, Artificial Sequence
  Description of Artificial Sequence: Synthetic oligonucleotide
  Antisense strand to SEQ ID NO: 666218
gaucagcucaugauucagg

SEQ ID NO: 666220 - RNA, 19 nt, Artificial Sequence
  Description of Artificial Sequence: Synthetic oligonucleotide
  Sense strand starting at position 197 of SEQ ID NO: 585770
gcugaucucccauacuuga

SEQ ID NO: 666221 - RNA, 19 nt, Artificial Sequence
  Description of Artificial Sequence: Synthetic oligonucleotide
  Antisense strand to SEQ ID NO: 666220
ucaaguaugggagaucagc

SEQ ID NO: 666222 - RNA, 19 nt, Artificial Sequence
  Description of Artificial Sequence: Synthetic oligonucleotide
  Sense strand starting at position 353 of SEQ ID NO: 585770
uuaucuugucucuagguua

SEQ ID NO: 666223 - RNA, 19 nt, Artificial Sequence
  Description of Artificial Sequence: Synthetic oligonucleotide
  Antisense strand to SEQ ID NO: 666222
uaaccuagagacaagauaa

SEQ ID NO: 666224 - RNA, 19 nt, Artificial Sequence
  Description of Artificial Sequence: Synthetic oligonucleotide
  Sense strand starting at position 419 of SEQ ID NO: 585770
ccauguuaugaguaaguca

SEQ ID NO: 666225 - RNA, 19 nt, Artificial Sequence
  Description of Artificial Sequence: Synthetic oligonucleotide
  Antisense strand to SEQ ID NO: 666224
ugacuuacucauaacaugg

SEQ ID NO: 666226 - RNA, 19 nt, Artificial Sequence
  Description of Artificial Sequence: Synthetic oligonucleotide
  Sense strand starting at position 426 of SEQ ID NO: 585770
augaguaagucagcacaca

SEQ ID NO: 666227 - RNA, 19 nt, Artificial Sequence
  Description of Artificial Sequence: Synthetic oligonucleotide
  Antisense strand to SEQ ID NO: 666226
ugugugcugacuuacucau

SEQ ID NO: 666228 - RNA, 19 nt, Artificial Sequence
  Description of Artificial Sequence: Synthetic oligonucleotide
  Sense strand starting at position 453 of SEQ ID NO: 585770
gccagcuuuguuuaugaaa

SEQ ID NO: 666229 - RNA, 19 nt, Artificial Sequence
  Description of Artificial Sequence: Synthetic oligonucleotide
  Antisense strand to SEQ ID NO: 666228
uuucauaaacaaagcuggc

SEQ ID NO: 666230 - RNA, 19 nt, Artificial Sequence
  Description of Artificial Sequence: Synthetic oligonucleotide
  Sense strand starting at position 523 of SEQ ID NO: 585770
ggcgaugcgcugucuggaa

SEQ ID NO: 666231 - RNA, 19 nt, Artificial Sequence
  Description of Artificial Sequence: Synthetic oligonucleotide
  Antisense strand to SEQ ID NO: 666230
uuccagacagcgcaucgcc

SEQ ID NO: 666232 - RNA, 19 nt, Artificial Sequence
  Description of Artificial Sequence: Synthetic oligonucleotide
  Sense strand starting at position 591 of SEQ ID NO: 585770
uccaguauuugacagcuga

SEQ ID NO: 666233 - RNA, 19 nt, Artificial Sequence
  Description of Artificial Sequence: Synthetic oligonucleotide
  Antisense strand to SEQ ID NO: 666232
ucagcugucaaauacugga

SEQ ID NO: 666234 - RNA, 19 nt, Artificial Sequence
  Description of Artificial Sequence: Synthetic oligonucleotide
  Sense strand starting at position 621 of SEQ ID NO: 585770
guuucaguucugugaaagg

SEQ ID NO: 666235 - RNA, 19 nt, Artificial Sequence
  Description of Artificial Sequence: Synthetic oligonucleotide
  Antisense strand to SEQ ID NO: 666234
ccuuucacagaacugaaac

SEQ ID NO: 666236 - RNA, 19 nt, Artificial Sequence
  Description of Artificial Sequence: Synthetic oligonucleotide
  Sense strand starting at position 653 of SEQ ID NO: 585770
ggaagagguuagcugaaga

SEQ ID NO: 666237 - RNA, 19 nt, Artificial Sequence
  Description of Artificial Sequence: Synthetic oligonucleotide
  Antisense strand to SEQ ID NO: 666236
ucuucagcuaaccucuucc

SEQ ID NO: 666238 - RNA, 19 nt, Artificial Sequence
  Description of Artificial Sequence: Synthetic oligonucleotide
  Sense strand starting at position 901 of SEQ ID NO: 585770
ucauacucuccugggcaaa

SEQ ID NO: 666239 - RNA, 19 nt, Artificial Sequence
  Description of Artificial Sequence: Synthetic oligonucleotide
  Antisense strand to SEQ ID NO: 666238
uuugcccaggagaguauga

SEQ ID NO: 666240 - RNA, 19 nt, Artificial Sequence
  Description of Artificial Sequence: Synthetic oligonucleotide
  Sense strand starting at position 952 of SEQ ID NO: 585770
auaaaucucuugucgguga

SEQ ID NO: 666241 - RNA, 19 nt, Artificial Sequence
  Description of Artificial Sequence: Synthetic oligonucleotide
  Antisense strand to SEQ ID NO: 666240
ucaccgacaagagauuuau

SEQ ID NO: 666242 - RNA, 19 nt, Artificial Sequence
  Description of Artificial Sequence: Synthetic oligonucleotide
  Sense strand starting at position 955 of SEQ ID NO: 585770
aaucucuugucggugagga

SEQ ID NO: 666243 - RNA, 19 nt, Artificial Sequence
  Description of Artificial Sequence: Synthetic oligonucleotide
  Antisense strand to SEQ ID NO: 666242
uccucaccgacaagagauu

SEQ ID NO: 666244 - RNA, 19 nt, Artificial Sequence
  Description of Artificial Sequence: Synthetic oligonucleotide
  Sense strand starting at position 956 of SEQ ID NO: 585770
aucucuugucggugaggac

SEQ ID NO: 666245 - RNA, 19 nt, Artificial Sequence
  Description of Artificial Sequence: Synthetic oligonucleotide
  Antisense strand to SEQ ID NO: 666244
guccucaccgacaagagau

SEQ ID NO: 666246 - RNA, 19 nt, Artificial Sequence
  Description of Artificial Sequence: Synthetic oligonucleotide
  Sense strand starting at position 957 of SEQ ID NO: 585770
ucucuugucggugaggaca

SEQ ID NO: 666247 - RNA, 19 nt, Artificial Sequence
  Description of Artificial Sequence: Synthetic oligonucleotide
  Antisense strand to SEQ ID NO: 666246
uguccucaccgacaagaga

SEQ ID NO: 666248 - RNA, 19 nt, Artificial Sequence
  Description of Artificial Sequence: Synthetic oligonucleotide
  Sense strand starting at position 1011 of SEQ ID NO: 585770
aggagaaacugucccgaga

SEQ ID NO: 666249 - RNA, 19 nt, Artificial Sequence
  Description of Artificial Sequence: Synthetic oligonucleotide
  Antisense strand to SEQ ID NO: 666248
ucucgggacaguuucuccu

SEQ ID NO: 666250 - RNA, 19 nt, Artificial Sequence
  Description of Artificial Sequence: Synthetic oligonucleotide
  Sense strand starting at position 1022 of SEQ ID NO: 585770
ucccgagagaacuguagua

SEQ ID NO: 666251 - RNA, 19 nt, Artificial Sequence
  Description of Artificial Sequence: Synthetic oligonucleotide
  Antisense strand to SEQ ID NO: 666250
uacuacaguucucucggga

SEQ ID NO: 666252 - RNA, 19 nt, Artificial Sequence
  Description of Artificial Sequence: Synthetic oligonucleotide
  Sense strand starting at position 1024 of SEQ ID NO: 585770
ccgagagaacuguaguaca

SEQ ID NO: 666253 - RNA, 19 nt, Artificial Sequence
  Description of Artificial Sequence: Synthetic oligonucleotide
  Antisense strand to SEQ ID NO: 666252
uguacuacaguucucucgg

SEQ ID NO: 666254 - RNA, 19 nt, Artificial Sequence
  Description of Artificial Sequence: Synthetic oligonucleotide
  Sense strand starting at position 1139 of SEQ ID NO: 585770
ccuagagggaucugucaga

SEQ ID NO: 666255 - RNA, 19 nt, Artificial Sequence
  Description of Artificial Sequence: Synthetic oligonucleotide
  Antisense strand to SEQ ID NO: 666254
ucugacagaucccucuagg

SEQ ID NO: 666256 - RNA, 19 nt, Artificial Sequence
  Description of Artificial Sequence: Synthetic oligonucleotide
  Sense strand starting at position 1168 of SEQ ID NO: 585770
cuggaauucuacuuuguua

SEQ ID NO: 666257 - RNA, 19 nt, Artificial Sequence
  Description of Artificial Sequence: Synthetic oligonucleotide
  Antisense strand to SEQ ID NO: 666256
uaacaaaguagaauuccag

SEQ ID NO: 666258 - RNA, 19 nt, Artificial Sequence
  Description of Artificial Sequence: Synthetic oligonucleotide
  Sense strand starting at position 1170 of SEQ ID NO: 585770
ggaauucuacuuuguuauu

SEQ ID NO: 666259 - RNA, 19 nt, Artificial Sequence
  Description of Artificial Sequence: Synthetic oligonucleotide
  Antisense strand to SEQ ID NO: 666258
aauaacaaaguagaauucc

SEQ ID NO: 666260 - RNA, 19 nt, Artificial Sequence
  Description of Artificial Sequence: Synthetic oligonucleotide
  Sense strand starting at position 1192 of SEQ ID NO: 585770
augcaauucugaccuggau

SEQ ID NO: 666261 - RNA, 19 nt, Artificial Sequence
  Description of Artificial Sequence: Synthetic oligonucleotide
  Antisense strand to SEQ ID NO: 666260
auccaggucagaauugcau

SEQ ID NO: 666262 - RNA, 19 nt, Artificial Sequence
  Description of Artificial Sequence: Synthetic oligonucleotide
  Sense strand starting at position 1365 of SEQ ID NO: 585770
ccuaccauccggugagaga

SEQ ID NO: 666263 - RNA, 19 nt, Artificial Sequence
  Description of Artificial Sequence: Synthetic oligonucleotide
  Antisense strand to SEQ ID NO: 666262
ucucucaccggaugguagg

SEQ ID NO: 666264 - RNA, 19 nt, Artificial Sequence
  Description of Artificial Sequence: Synthetic oligonucleotide
  Sense strand starting at position 1366 of SEQ ID NO: 585770
cuaccauccggugagagau

SEQ ID NO: 666265 - RNA, 19 nt, Artificial Sequence
  Description of Artificial Sequence: Synthetic oligonucleotide
  Antisense strand to SEQ ID NO: 666264
aucucucaccggaugguag

SEQ ID NO: 666266 - RNA, 19 nt, Artificial Sequence
  Description of Artificial Sequence: Synthetic oligonucleotide
  Sense strand starting at position 1451 of SEQ ID NO: 585770
agaaaugucuaacuuugca

SEQ ID NO: 666267 - RNA, 19 nt, Artificial Sequence
  Description of Artificial Sequence: Synthetic oligonucleotide
  Antisense strand to SEQ ID NO: 666266
ugcaaaguuagacauuucu

SEQ ID NO: 666268 - RNA, 19 nt, Artificial Sequence
  Description of Artificial Sequence: Synthetic oligonucleotide
  Sense strand starting at position 1554 of SEQ ID NO: 585770
aguuucuggcaauguuuga

SEQ ID NO: 666269 - RNA, 19 nt, Artificial Sequence
  Description of Artificial Sequence: Synthetic oligonucleotide
  Antisense strand to SEQ ID NO: 666268
ucaaacauugccagaaacu

SEQ ID NO: 666270 - RNA, 19 nt, Artificial Sequence
  Description of Artificial Sequence: Synthetic oligonucleotide
  Sense strand starting at position 1558 of SEQ ID NO: 585770
ucuggcaauguuugagaga

SEQ ID NO: 666271 - RNA, 19 nt, Artificial Sequence
  Description of Artificial Sequence: Synthetic oligonucleotide
  Antisense strand to SEQ ID NO: 666270
ucucucaaacauugccaga

SEQ ID NO: 666272 - RNA, 19 nt, Artificial Sequence
  Description of Artificial Sequence: Synthetic oligonucleotide
  Sense strand starting at position 1636 of SEQ ID NO: 585770
gaugaagucgagcggaauu

SEQ ID NO: 666273 - RNA, 19 nt, Artificial Sequence
  Description of Artificial Sequence: Synthetic oligonucleotide
  Antisense strand to SEQ ID NO: 666272
aauuccgcucgacuucauc

SEQ ID NO: 666274 - RNA, 19 nt, Artificial Sequence
  Description of Artificial Sequence: Synthetic oligonucleotide
  Sense strand starting at position 3241 of SEQ ID NO: 585770
aguuaaggccuuggaggua

SEQ ID NO: 666275 - RNA, 19 nt, Artificial Sequence
  Description of Artificial Sequence: Synthetic oligonucleotide
  Antisense strand to SEQ ID NO: 666274
uaccuccaaggccuuaacu

SEQ ID NO: 666276 - RNA, 19 nt, Artificial Sequence
  Description of Artificial Sequence: Synthetic oligonucleotide
  Sense strand starting at position 3346 of SEQ ID NO: 585770
cagaaucaugucuaugugu

SEQ ID NO: 666277 - RNA, 19 nt, Artificial Sequence
  Description of Artificial Sequence: Synthetic oligonucleotide
  Antisense strand to SEQ ID NO: 666276
acacauagacaugauucug

SEQ ID NO: 666278 - RNA, 19 nt, Artificial Sequence
  Description of Artificial Sequence: Synthetic oligonucleotide
  Sense strand starting at position 3348 of SEQ ID NO: 585770
gaaucaugucuauguguau

SEQ ID NO: 666279 - RNA, 19 nt, Artificial Sequence
  Description of Artificial Sequence: Synthetic oligonucleotide
  Antisense strand to SEQ ID NO: 666278
auacacauagacaugauuc

SEQ ID NO: 666280 - RNA, 19 nt, Artificial Sequence
  Description of Artificial Sequence: Synthetic oligonucleotide
  Sense strand starting at position 3351 of SEQ ID NO: 585770
ucaugucuauguguauaaa

SEQ ID NO: 666281 - RNA, 19 nt, Artificial Sequence
  Description of Artificial Sequence: Synthetic oligonucleotide
  Antisense strand to SEQ ID NO: 666280
uuuauacacauagacauga

SEQ ID NO: 666282 - RNA, 19 nt, Artificial Sequence
  Description of Artificial Sequence: Synthetic oligonucleotide
  Sense strand starting at position 3354 of SEQ ID NO: 585770
ugucuauguguauaaacac

SEQ ID NO: 666283 - RNA, 19 nt, Artificial Sequence
  Description of Artificial Sequence: Synthetic oligonucleotide
  Antisense strand to SEQ ID NO: 666282
guguuuauacacauagaca

SEQ ID NO: 666284 - RNA, 19 nt, Artificial Sequence
  Description of Artificial Sequence: Synthetic oligonucleotide
  Sense strand starting at position 3635 of SEQ ID NO: 585770
gaagacuuucuuggagugu

SEQ ID NO: 666285 - RNA, 19 nt, Artificial Sequence
  Description of Artificial Sequence: Synthetic oligonucleotide
  Antisense strand to SEQ ID NO: 666284
acacuccaagaaagucuuc

SEQ ID NO: 666286 - RNA, 19 nt, Artificial Sequence
  Description of Artificial Sequence: Synthetic oligonucleotide
  Sense strand starting at position 3939 of SEQ ID NO: 585770
acuucuuauccugggauga

SEQ ID NO: 666287 - RNA, 19 nt, Artificial Sequence
  Description of Artificial Sequence: Synthetic oligonucleotide
  Antisense strand to SEQ ID NO: 666286
ucaucccaggauaagaagu

SEQ ID NO: 666288 - RNA, 19 nt, Artificial Sequence
  Description of Artificial Sequence: Synthetic oligonucleotide
  Sense strand starting at position 3940 of SEQ ID NO: 585770
cuucuuauccugggaugaa

SEQ ID NO: 666289 - RNA, 19 nt, Artificial Sequence
  Description of Artificial Sequence: Synthetic oligonucleotide
  Antisense strand to SEQ ID NO: 666288
uucaucccaggauaagaag

SEQ ID NO: 666290 - RNA, 19 nt, Artificial Sequence
  Description of Artificial Sequence: Synthetic oligonucleotide
  Sense strand starting at position 89 of SEQ ID NO: 585771
acaagaauggccuagguuu

SEQ ID NO: 666291 - RNA, 19 nt, Artificial Sequence
  Description of Artificial Sequence: Synthetic oligonucleotide
  Antisense strand to SEQ ID NO: 666290
aaaccuaggccauucuugu

SEQ ID NO: 666292 - RNA, 19 nt, Artificial Sequence
  Description of Artificial Sequence: Synthetic oligonucleotide
  Sense strand starting at position 412 of SEQ ID NO: 585771
auuccaagucaagaauguu

SEQ ID NO: 666293 - RNA, 19 nt, Artificial Sequence
  Description of Artificial Sequence: Synthetic oligonucleotide
  Antisense strand to SEQ ID NO: 666292
aacauucuugacuuggaau

SEQ ID NO: 666294 - RNA, 19 nt, Artificial Sequence
  Description of Artificial Sequence: Synthetic oligonucleotide
  Sense strand starting at position 415 of SEQ ID NO: 585771
ccaagucaagaauguuagu

SEQ ID NO: 666295 - RNA, 19 nt, Artificial Sequence
  Description of Artificial Sequence: Synthetic oligonucleotide
  Antisense strand to SEQ ID NO: 666294
acuaacauucuugacuugg

SEQ ID NO: 666296 - RNA, 19 nt, Artificial Sequence
  Description of Artificial Sequence: Synthetic oligonucleotide
  Sense strand starting at position 420 of SEQ ID NO: 585771
ucaagaauguuaguuuccu

SEQ ID NO: 666297 - RNA, 19 nt, Artificial Sequence
  Description of Artificial Sequence: Synthetic oligonucleotide
  Antisense strand to SEQ ID NO: 666296
aggaaacuaacauucuuga

SEQ ID NO: 666298 - RNA, 19 nt, Artificial Sequence
  Description of Artificial Sequence: Synthetic oligonucleotide
  Sense strand starting at position 424 of SEQ ID NO: 585771
gaauguuaguuuccugcag

SEQ ID NO: 666299 - RNA, 19 nt, Artificial Sequence
  Description of Artificial Sequence: Synthetic oligonucleotide
  Antisense strand to SEQ ID NO: 666298
cugcaggaaacuaacauuc

SEQ ID NO: 666300 - RNA, 19 nt, Artificial Sequence
  Description of Artificial Sequence: Synthetic oligonucleotide
  Sense strand starting at position 425 of SEQ ID NO: 585771
aauguuaguuuccugcaga

SEQ ID NO: 666301 - RNA, 19 nt, Artificial Sequence
  Description of Artificial Sequence: Synthetic oligonucleotide
  Antisense strand to SEQ ID NO: 666300
ucugcaggaaacuaacauu

SEQ ID NO: 666302 - RNA, 19 nt, Artificial Sequence
  Description of Artificial Sequence: Synthetic oligonucleotide
  Sense strand starting at position 428 of SEQ ID NO: 585771
guuaguuuccugcagauca

SEQ ID NO: 666303 - RNA, 19 nt, Artificial Sequence
  Description of Artificial Sequence: Synthetic oligonucleotide
  Antisense strand to SEQ ID NO: 666302
ugaucugcaggaaacuaac

SEQ ID NO: 666304 - RNA, 19 nt, Artificial Sequence
  Description of Artificial Sequence: Synthetic oligonucleotide
  Sense strand starting at position 623 of SEQ ID NO: 585771
acagcucuugugcaauaga

SEQ ID NO: 666305 - RNA, 19 nt, Artificial Sequence
  Description of Artificial Sequence: Synthetic oligonucleotide
  Antisense strand to SEQ ID NO: 666304
ucuauugcacaagagcugu

SEQ ID NO: 666306 - RNA, 19 nt, Artificial Sequence
  Description of Artificial Sequence: Synthetic oligonucleotide
  Sense strand starting at position 626 of SEQ ID NO: 585771
gcucuugugcaauagaaag

SEQ ID NO: 666307 - RNA, 19 nt, Artificial Sequence
  Description of Artificial Sequence: Synthetic oligonucleotide
  Antisense strand to SEQ ID NO: 666306
cuuucuauugcacaagagc

SEQ ID NO: 666308 - RNA, 19 nt, Artificial Sequence
  Description of Artificial Sequence: Synthetic oligonucleotide
  Sense strand starting at position 637 of SEQ ID NO: 585771
auagaaagcuuucccuaag

SEQ ID NO: 666309 - RNA, 19 nt, Artificial Sequence
  Description of Artificial Sequence: Synthetic oligonucleotide
  Antisense strand to SEQ ID NO: 666308
cuuagggaaagcuuucuau

SEQ ID NO: 666310 - RNA, 19 nt, Artificial Sequence
  Description of Artificial Sequence: Synthetic oligonucleotide
  Sense strand starting at position 640 of SEQ ID NO: 585771
gaaagcuuucccuaaguug

SEQ ID NO: 666311 - RNA, 19 nt, Artificial Sequence
  Description of Artificial Sequence: Synthetic oligonucleotide
  Antisense strand to SEQ ID NO: 666310
caacuuagggaaagcuuuc

SEQ ID NO: 666312 - RNA, 19 nt, Artificial Sequence
  Description of Artificial Sequence: Synthetic oligonucleotide
  Sense strand starting at position 719 of SEQ ID NO: 585771
gcaguuacaucagcuuuaa

SEQ ID NO: 666313 - RNA, 19 nt, Artificial Sequence
  Description of Artificial Sequence: Synthetic oligonucleotide
  Antisense strand to SEQ ID NO: 666312
uuaaagcugauguaacugc

SEQ ID NO: 666314 - RNA, 19 nt, Artificial Sequence
  Description of Artificial Sequence: Synthetic oligonucleotide
  Sense strand starting at position 758 of SEQ ID NO: 585771
ccuaguagagugcaacaaa

SEQ ID NO: 666315 - RNA, 19 nt, Artificial Sequence
  Description of Artificial Sequence: Synthetic oligonucleotide
  Antisense strand to SEQ ID NO: 666314
uuuguugcacucuacuagg

SEQ ID NO: 666316 - RNA, 19 nt, Artificial Sequence
  Description of Artificial Sequence: Synthetic oligonucleotide
  Sense strand starting at position 964 of SEQ ID NO: 585771
acaggaaacuccgaagaaa

SEQ ID NO: 666317 - RNA, 19 nt, Artificial Sequence
  Description of Artificial Sequence: Synthetic oligonucleotide
  Antisense strand to SEQ ID NO: 666316
uuucuucggaguuuccugu

SEQ ID NO: 666318 - RNA, 19 nt, Artificial Sequence
  Description of Artificial Sequence: Synthetic oligonucleotide
  Sense strand starting at position 1219 of SEQ ID NO: 585771
agaguugugcccgcacguu

SEQ ID NO: 666319 - RNA, 19 nt, Artificial Sequence
  Description of Artificial Sequence: Synthetic oligonucleotide
  Antisense strand to SEQ ID NO: 666318
aacgugcgggcacaacucu

SEQ ID NO: 666320 - RNA, 19 nt, Artificial Sequence
  Description of Artificial Sequence: Synthetic oligonucleotide
  Sense strand starting at position 1284 of SEQ ID NO: 585771
ccgcuuccuccauaaagaa

SEQ ID NO: 666321 - RNA, 19 nt, Artificial Sequence
  Description of Artificial Sequence: Synthetic oligonucleotide
  Antisense strand to SEQ ID NO: 666320
uucuuuauggaggaagcgg

SEQ ID NO: 666322 - RNA, 19 nt, Artificial Sequence
  Description of Artificial Sequence: Synthetic oligonucleotide
  Sense strand starting at position 1683 of SEQ ID NO: 585771
agaagaagguguucccacu

SEQ ID NO: 666323 - RNA, 19 nt, Artificial Sequence
  Description of Artificial Sequence: Synthetic oligonucleotide
  Antisense strand to SEQ ID NO: 666322
agugggaacaccuucuucu

SEQ ID NO: 666324 - RNA, 19 nt, Artificial Sequence
  Description of Artificial Sequence: Synthetic oligonucleotide
  Sense strand starting at position 2022 of SEQ ID NO: 585771
cggcgaggucucgcccuua

SEQ ID NO: 666325 - RNA, 19 nt, Artificial Sequence
  Description of Artificial Sequence: Synthetic oligonucleotide
  Antisense strand to SEQ ID NO: 666324
uaagggcgagaccucgccg

SEQ ID NO: 666326 - RNA, 19 nt, Artificial Sequence
  Description of Artificial Sequence: Synthetic oligonucleotide
  Sense strand starting at position 2263 of SEQ ID NO: 585771
uguccugcccucuggauua

SEQ ID NO: 666327 - RNA, 19 nt, Artificial Sequence
  Description of Artificial Sequence: Synthetic oligonucleotide
  Antisense strand to SEQ ID NO: 666326
uaauccagagggcaggaca

SEQ ID NO: 666328 - RNA, 19 nt, Artificial Sequence
  Description of Artificial Sequence: Synthetic oligonucleotide
  Sense strand starting at position 2265 of SEQ ID NO: 585771
uccugcccucuggauuaau

SEQ ID NO: 666329 - RNA, 19 nt, Artificial Sequence
  Description of Artificial Sequence: Synthetic oligonucleotide
  Antisense strand to SEQ ID NO: 666328
auuaauccagagggcagga

SEQ ID NO: 666330 - RNA, 19 nt, Artificial Sequence
  Description of Artificial Sequence: Synthetic oligonucleotide
  Sense strand starting at position 2275 of SEQ ID NO: 585771
uggauuaauugcccugguu

SEQ ID NO: 666331 - RNA, 19 nt, Artificial Sequence
  Description of Artificial Sequence: Synthetic oligonucleotide
  Antisense strand to SEQ ID NO: 666330
aaccagggcaauuaaucca

SEQ ID NO: 666332 - RNA, 19 nt, Artificial Sequence
  Description of Artificial Sequence: Synthetic oligonucleotide
  Sense strand starting at position 2277 of SEQ ID NO: 585771
gauuaauugcccugguuga

SEQ ID NO: 666333 - RNA, 19 nt, Artificial Sequence
  Description of Artificial Sequence: Synthetic oligonucleotide
  Antisense strand to SEQ ID NO: 666332
ucaaccagggcaauuaauc

SEQ ID NO: 666334 - RNA, 19 nt, Artificial Sequence
  Description of Artificial Sequence: Synthetic oligonucleotide
  Sense strand starting at position 2278 of SEQ ID NO: 585771
auuaauugcccugguugau

SEQ ID NO: 666335 - RNA, 19 nt, Artificial Sequence
  Description of Artificial Sequence: Synthetic oligonucleotide
  Antisense strand to SEQ ID NO: 666334
aucaaccagggcaauuaau

SEQ ID NO: 666336 - RNA, 19 nt, Artificial Sequence
  Description of Artificial Sequence: Synthetic oligonucleotide
  Sense strand starting at position 2343 of SEQ ID NO: 585771
ggaaacaagugucauuuag

SEQ ID NO: 666337 - RNA, 19 nt, Artificial Sequence
  Description of Artificial Sequence: Synthetic oligonucleotide
  Antisense strand to SEQ ID NO: 666336
cuaaaugacacuuguuucc

SEQ ID NO: 666338 - RNA, 19 nt, Artificial Sequence
  Description of Artificial Sequence: Synthetic oligonucleotide
  Sense strand starting at position 2868 of SEQ ID NO: 585771
ggcgacagauuugaaucua

SEQ ID NO: 666339 - RNA, 19 nt, Artificial Sequence
  Description of Artificial Sequence: Synthetic oligonucleotide
  Antisense strand to SEQ ID NO: 666338
uagauucaaaucugucgcc

SEQ ID NO: 666340 - RNA, 19 nt, Artificial Sequence
  Description of Artificial Sequence: Synthetic oligonucleotide
  Sense strand starting at position 2893 of SEQ ID NO: 585771
gcccaucuugcagaugaag

SEQ ID NO: 666341 - RNA, 19 nt, Artificial Sequence
  Description of Artificial Sequence: Synthetic oligonucleotide
  Antisense strand to SEQ ID NO: 666340
cuucaucugcaagaugggc

SEQ ID NO: 666342 - RNA, 19 nt, Artificial Sequence
  Description of Artificial Sequence: Synthetic oligonucleotide
  Sense strand starting at position 2987 of SEQ ID NO: 585771
ggcugagaccuuuauuguu

SEQ ID NO: 666343 - RNA, 19 nt, Artificial Sequence
  Description of Artificial Sequence: Synthetic oligonucleotide
  Antisense strand to SEQ ID NO: 666342
aacaauaaaggucucagcc

SEQ ID NO: 666344 - RNA, 19 nt, Artificial Sequence
  Description of Artificial Sequence: Synthetic oligonucleotide
  Sense strand starting at position 3006 of SEQ ID NO: 585771
uugugucauuuagucauca

SEQ ID NO: 666345 - RNA, 19 nt, Artificial Sequence
  Description of Artificial Sequence: Synthetic oligonucleotide
  Antisense strand to SEQ ID NO: 666344
ugaugacuaaaugacacaa

SEQ ID NO: 666346 - RNA, 19 nt, Artificial Sequence
  Description of Artificial Sequence: Synthetic oligonucleotide
  Sense strand starting at position 3049 of SEQ ID NO: 585771
guaugucugcucuacaaau

SEQ ID NO: 666347 - RNA, 19 nt, Artificial Sequence
  Description of Artificial Sequence: Synthetic oligonucleotide
  Antisense strand to SEQ ID NO: 666346
auuuguagagcagacauac

SEQ ID NO: 666348 - RNA, 19 nt, Artificial Sequence
  Description of Artificial Sequence: Synthetic oligonucleotide
  Sense strand starting at position 3228 of SEQ ID NO: 585771
gcggguugugaacaggaaa

SEQ ID NO: 666349 - RNA, 19 nt, Artificial Sequence
  Description of Artificial Sequence: Synthetic oligonucleotide
  Antisense strand to SEQ ID NO: 666348
uuuccuguucacaacccgc

SEQ ID NO: 666350 - RNA, 19 nt, Artificial Sequence
  Description of Artificial Sequence: Synthetic oligonucleotide
  Sense strand starting at position 3349 of SEQ ID NO: 585771
uggacuucugcccagaucu

SEQ ID NO: 666351 - RNA, 19 nt, Artificial Sequence
  Description of Artificial Sequence: Synthetic oligonucleotide
  Antisense strand to SEQ ID NO: 666350
agaucugggcagaagucca

SEQ ID NO: 666352 - RNA, 19 nt, Artificial Sequence
  Description of Artificial Sequence: Synthetic oligonucleotide
  Sense strand starting at position 3357 of SEQ ID NO: 585771
ugcccagaucuuugaacga

SEQ ID NO: 666353 - RNA, 19 nt, Artificial Sequence
  Description of Artificial Sequence: Synthetic oligonucleotide
  Antisense strand to SEQ ID NO: 666352
ucguucaaagaucugggca

SEQ ID NO: 666354 - RNA, 19 nt, Artificial Sequence
  Description of Artificial Sequence: Synthetic oligonucleotide
  Sense strand starting at position 3404 of SEQ ID NO: 585771
gggucuaucccagagucca

SEQ ID NO: 666355 - RNA, 19 nt, Artificial Sequence
  Description of Artificial Sequence: Synthetic oligonucleotide
  Antisense strand to SEQ ID NO: 666354
uggacucugggauagaccc

SEQ ID NO: 666356 - RNA, 19 nt, Artificial Sequence
  Description of Artificial Sequence: Synthetic oligonucleotide
  Sense strand starting at position 3454 of SEQ ID NO: 585771
ccugguugcagagauugaa

SEQ ID NO: 666357 - RNA, 19 nt, Artificial Sequence
  Description of Artificial Sequence: Synthetic oligonucleotide
  Antisense strand to SEQ ID NO: 666356
uucaaucucugcaaccagg

SEQ ID NO: 666358 - RNA, 19 nt, Artificial Sequence
  Description of Artificial Sequence: Synthetic oligonucleotide
  Sense strand starting at position 3597 of SEQ ID NO: 585771
ccuuccauuguuggaggaa

SEQ ID NO: 666359 - RNA, 19 nt, Artificial Sequence
  Description of Artificial Sequence: Synthetic oligonucleotide
  Antisense strand to SEQ ID NO: 666358
uuccuccaacaauggaagg

SEQ ID NO: 666360 - RNA, 19 nt, Artificial Sequence
  Description of Artificial Sequence: Synthetic oligonucleotide
  Sense strand starting at position 3657 of SEQ ID NO: 585771
cuaguaucuuaaucaguaa

SEQ ID NO: 666361 - RNA, 19 nt, Artificial Sequence
  Description of Artificial Sequence: Synthetic oligonucleotide
  Antisense strand to SEQ ID NO: 666360
uuacugauuaagauacuag

SEQ ID NO: 666362 - RNA, 19 nt, Artificial Sequence
  Description of Artificial Sequence: Synthetic oligonucleotide
  Sense strand starting at position 3873 of SEQ ID NO: 585771
ucaacauagcauugugauc

SEQ ID NO: 666363 - RNA, 19 nt, Artificial Sequence
  Description of Artificial Sequence: Synthetic oligonucleotide
  Antisense strand to SEQ ID NO: 666362
gaucacaaugcuauguuga

SEQ ID NO: 666364 - RNA, 19 nt, Artificial Sequence
  Description of Artificial Sequence: Synthetic oligonucleotide
  Sense strand starting at position 3878 of SEQ ID NO: 585771
auagcauugugaucuccca

SEQ ID NO: 666365 - RNA, 19 nt, Artificial Sequence
  Description of Artificial Sequence: Synthetic oligonucleotide
  Antisense strand to SEQ ID NO: 666364
ugggagaucacaaugcuau

SEQ ID NO: 666366 - RNA, 19 nt, Artificial Sequence
  Description of Artificial Sequence: Synthetic oligonucleotide
  Sense strand starting at position 3886 of SEQ ID NO: 585771
gugaucucccaacgcugau

SEQ ID NO: 666367 - RNA, 19 nt, Artificial Sequence
  Description of Artificial Sequence: Synthetic oligonucleotide
  Antisense strand to SEQ ID NO: 666366
aucagcguugggagaucac

SEQ ID NO: 666368 - RNA, 19 nt, Artificial Sequence
  Description of Artificial Sequence: Synthetic oligonucleotide
  Sense strand starting at position 3889 of SEQ ID NO: 585771
aucucccaacgcugauaua

SEQ ID NO: 666369 - RNA, 19 nt, Artificial Sequence
  Description of Artificial Sequence: Synthetic oligonucleotide
  Antisense strand to SEQ ID NO: 666368
uauaucagcguugggagau

SEQ ID NO: 666370 - RNA, 19 nt, Artificial Sequence
  Description of Artificial Sequence: Synthetic oligonucleotide
  Sense strand starting at position 25 of SEQ ID NO: 585772
ggaaaucuccuguaaaguu

SEQ ID NO: 666371 - RNA, 19 nt, Artificial Sequence
  Description of Artificial Sequence: Synthetic oligonucleotide
  Antisense strand to SEQ ID NO: 666370
aacuuuacaggagauuucc

SEQ ID NO: 666372 - RNA, 19 nt, Artificial Sequence
  Description of Artificial Sequence: Synthetic oligonucleotide
  Sense strand starting at position 33 of SEQ ID NO: 585772
ccuguaaaguucucaucac

SEQ ID NO: 666373 - RNA, 19 nt, Artificial Sequence
  Description of Artificial Sequence: Synthetic oligonucleotide
  Antisense strand to SEQ ID NO: 666372
gugaugagaacuuuacagg

SEQ ID NO: 666374 - RNA, 19 nt, Artificial Sequence
  Description of Artificial Sequence: Synthetic oligonucleotide
  Sense strand starting at position 66 of SEQ ID NO: 585772
uggcuuguacgguaagacu

SEQ ID NO: 666375 - RNA, 19 nt, Artificial Sequence
  Description of Artificial Sequence: Synthetic oligonucleotide
  Antisense strand to SEQ ID NO: 666374
agucuuaccguacaagcca

SEQ ID NO: 666376 - RNA, 19 nt, Artificial Sequence
  Description of Artificial Sequence: Synthetic oligonucleotide
  Sense strand starting at position 101 of SEQ ID NO: 585772
auacucaaguaagaagaau

SEQ ID NO: 666377 - RNA, 19 nt, Artificial Sequence
  Description of Artificial Sequence: Synthetic oligonucleotide
  Antisense strand to SEQ ID NO: 666376
auucuucuuacuugaguau

SEQ ID NO: 666378 - RNA, 19 nt, Artificial Sequence
  Description of Artificial Sequence: Synthetic oligonucleotide
  Sense strand starting at position 251 of SEQ ID NO: 585772
uauagaaccuguuuaggga

SEQ ID NO: 666379 - RNA, 19 nt, Artificial Sequence
  Description of Artificial Sequence: Synthetic oligonucleotide
  Antisense strand to SEQ ID NO: 666378
ucccuaaacagguucuaua

SEQ ID NO: 666380 - RNA, 19 nt, Artificial Sequence
  Description of Artificial Sequence: Synthetic oligonucleotide
  Sense strand starting at position 306 of SEQ ID NO: 585772
ucaguaaucuuuccgaaac

SEQ ID NO: 666381 - RNA, 19 nt, Artificial Sequence
  Description of Artificial Sequence: Synthetic oligonucleotide
  Antisense strand to SEQ ID NO: 666380
guuucggaaagauuacuga

SEQ ID NO: 666382 - RNA, 19 nt, Artificial Sequence
  Description of Artificial Sequence: Synthetic oligonucleotide
  Sense strand starting at position 396 of SEQ ID NO: 585772
uccaaagaguaguuaauuc

SEQ ID NO: 666383 - RNA, 19 nt, Artificial Sequence
  Description of Artificial Sequence: Synthetic oligonucleotide
  Antisense strand to SEQ ID NO: 666382
gaauuaacuacucuuugga

SEQ ID NO: 666384 - RNA, 19 nt, Artificial Sequence
  Description of Artificial Sequence: Synthetic oligonucleotide
  Sense strand starting at position 426 of SEQ ID NO: 585772
aagaaugagucucugagca

SEQ ID NO: 666385 - RNA, 19 nt, Artificial Sequence
  Description of Artificial Sequence: Synthetic oligonucleotide
  Antisense strand to SEQ ID NO: 666384
ugcucagagacucauucuu

SEQ ID NO: 666386 - RNA, 19 nt, Artificial Sequence
  Description of Artificial Sequence: Synthetic oligonucleotide
  Sense strand starting at position 666 of SEQ ID NO: 585772
guuuaacuuucccucacga

SEQ ID NO: 666387 - RNA, 19 nt, Artificial Sequence
  Description of Artificial Sequence: Synthetic oligonucleotide
  Antisense strand to SEQ ID NO: 666386
ucgugagggaaaguuaaac

SEQ ID NO: 666388 - RNA, 19 nt, Artificial Sequence
  Description of Artificial Sequence: Synthetic oligonucleotide
  Sense strand starting at position 668 of SEQ ID NO: 585772
uuaacuuucccucacgagu

SEQ ID NO: 666389 - RNA, 19 nt, Artificial Sequence
  Description of Artificial Sequence: Synthetic oligonucleotide
  Antisense strand to SEQ ID NO: 666388
acucgugagggaaaguuaa

SEQ ID NO: 666390 - RNA, 19 nt, Artificial Sequence
  Description of Artificial Sequence: Synthetic oligonucleotide
  Sense strand starting at position 674 of SEQ ID NO: 585772
uucccucacgagugaguaa

SEQ ID NO: 666391 - RNA, 19 nt, Artificial Sequence
  Description of Artificial Sequence: Synthetic oligonucleotide
  Antisense strand to SEQ ID NO: 666390
uuacucacucgugagggaa

SEQ ID NO: 666392 - RNA, 19 nt, Artificial Sequence
  Description of Artificial Sequence: Synthetic oligonucleotide
  Sense strand starting at position 675 of SEQ ID NO: 585772
ucccucacgagugaguaaa

SEQ ID NO: 666393 - RNA, 19 nt, Artificial Sequence
  Description of Artificial Sequence: Synthetic oligonucleotide
  Antisense strand to SEQ ID NO: 666392
uuuacucacucgugaggga

SEQ ID NO: 666394 - RNA, 19 nt, Artificial Sequence
  Description of Artificial Sequence: Synthetic oligonucleotide
  Sense strand starting at position 705 of SEQ ID NO: 585772
gucaauaagcuuuaguuac

SEQ ID NO: 666395 - RNA, 19 nt, Artificial Sequence
  Description of Artificial Sequence: Synthetic oligonucleotide
  Antisense strand to SEQ ID NO: 666394
guaacuaaagcuuauugac

SEQ ID NO: 666396 - RNA, 19 nt, Artificial Sequence
  Description of Artificial Sequence: Synthetic oligonucleotide
  Sense strand starting at position 802 of SEQ ID NO: 585772
ccgaaagaauaucagacaa

SEQ ID NO: 666397 - RNA, 19 nt, Artificial Sequence
  Description of Artificial Sequence: Synthetic oligonucleotide
  Antisense strand to SEQ ID NO: 666396
uugucugauauucuuucgg

SEQ ID NO: 666398 - RNA, 19 nt, Artificial Sequence
  Description of Artificial Sequence: Synthetic oligonucleotide
  Sense strand starting at position 2337 of SEQ ID NO: 585772
aaugucauuucuugaggag

SEQ ID NO: 666399 - RNA, 19 nt, Artificial Sequence
  Description of Artificial Sequence: Synthetic oligonucleotide
  Antisense strand to SEQ ID NO: 666398
cuccucaagaaaugacauu

SEQ ID NO: 666400 - RNA, 19 nt, Artificial Sequence
  Description of Artificial Sequence: Synthetic oligonucleotide
  Sense strand starting at position 2395 of SEQ ID NO: 585772
uagugagguacuggaauca

SEQ ID NO: 666401 - RNA, 19 nt, Artificial Sequence
  Description of Artificial Sequence: Synthetic oligonucleotide
  Antisense strand to SEQ ID NO: 666400
ugauuccaguaccucacua

SEQ ID NO: 666402 - RNA, 19 nt, Artificial Sequence
  Description of Artificial Sequence: Synthetic oligonucleotide
  Sense strand starting at position 2405 of SEQ ID NO: 585772
cuggaaucauauguuuagu

SEQ ID NO: 666403 - RNA, 19 nt, Artificial Sequence
  Description of Artificial Sequence: Synthetic oligonucleotide
  Antisense strand to SEQ ID NO: 666402
acuaaacauaugauuccag

SEQ ID NO: 666404 - RNA, 19 nt, Artificial Sequence
  Description of Artificial Sequence: Synthetic oligonucleotide
  Sense strand starting at position 2421 of SEQ ID NO: 585772
aguaaaugauucguggucu

SEQ ID NO: 666405 - RNA, 19 nt, Artificial Sequence
  Description of Artificial Sequence: Synthetic oligonucleotide
  Antisense strand to SEQ ID NO: 666404
agaccacgaaucauuuacu

SEQ ID NO: 666406 - RNA, 19 nt, Artificial Sequence
  Description of Artificial Sequence: Synthetic oligonucleotide
  Sense strand starting at position 2425 of SEQ ID NO: 585772
aaugauucguggucuacau

SEQ ID NO: 666407 - RNA, 19 nt, Artificial Sequence
  Description of Artificial Sequence: Synthetic oligonucleotide
  Antisense strand to SEQ ID NO: 666406
auguagaccacgaaucauu

SEQ ID NO: 666408 - RNA, 19 nt, Artificial Sequence
  Description of Artificial Sequence: Synthetic oligonucleotide
  Sense strand starting at position 2537 of SEQ ID NO: 585772
uugucauuuacgugccuga

SEQ ID NO: 666409 - RNA, 19 nt, Artificial Sequence
  Description of Artificial Sequence: Synthetic oligonucleotide
  Antisense strand to SEQ ID NO: 666408
ucaggcacguaaaugacaa

SEQ ID NO: 666410 - RNA, 19 nt, Artificial Sequence
  Description of Artificial Sequence: Synthetic oligonucleotide
  Sense strand starting at position 2541 of SEQ ID NO: 585772
cauuuacgugccugagacu

SEQ ID NO: 666411 - RNA, 19 nt, Artificial Sequence
  Description of Artificial Sequence: Synthetic oligonucleotide
  Antisense strand to SEQ ID NO: 666410
agucucaggcacguaaaug

SEQ ID NO: 666412 - RNA, 19 nt, Artificial Sequence
  Description of Artificial Sequence: Synthetic oligonucleotide
  Sense strand starting at position 2710 of SEQ ID NO: 585772
acucaacuccuguagguuu

SEQ ID NO: 666413 - RNA, 19 nt, Artificial Sequence
  Description of Artificial Sequence: Synthetic oligonucleotide
  Antisense strand to SEQ ID NO: 666412
aaaccuacaggaguugagu

SEQ ID NO: 666414 - RNA, 19 nt, Artificial Sequence
  Description of Artificial Sequence: Synthetic oligonucleotide
  Sense strand starting at position 2900 of SEQ ID NO: 585772
gcuauuaacgaaggccuaa

SEQ ID NO: 666415 - RNA, 19 nt, Artificial Sequence
  Description of Artificial Sequence: Synthetic oligonucleotide
  Antisense strand to SEQ ID NO: 666414
uuaggccuucguuaauagc

SEQ ID NO: 666416 - RNA, 19 nt, Artificial Sequence
  Description of Artificial Sequence: Synthetic oligonucleotide
  Sense strand starting at position 2918 of SEQ ID NO: 585772
agcggaaaggcuuauuguu

SEQ ID NO: 666417 - RNA, 19 nt, Artificial Sequence
  Description of Artificial Sequence: Synthetic oligonucleotide
  Antisense strand to SEQ ID NO: 666416
aacaauaagccuuuccgcu

SEQ ID NO: 666418 - RNA, 19 nt, Artificial Sequence
  Description of Artificial Sequence: Synthetic oligonucleotide
  Sense strand starting at position 2920 of SEQ ID NO: 585772
cggaaaggcuuauuguuua

SEQ ID NO: 666419 - RNA, 19 nt, Artificial Sequence
  Description of Artificial Sequence: Synthetic oligonucleotide
  Antisense strand to SEQ ID NO: 666418
uaaacaauaagccuuuccg

SEQ ID NO: 666420 - RNA, 19 nt, Artificial Sequence
  Description of Artificial Sequence: Synthetic oligonucleotide
  Sense strand starting at position 2984 of SEQ ID NO: 585772
ccugauuggcaagaguagu

SEQ ID NO: 666421 - RNA, 19 nt, Artificial Sequence
  Description of Artificial Sequence: Synthetic oligonucleotide
  Antisense strand to SEQ ID NO: 666420
acuacucuugccaaucagg

SEQ ID NO: 666422 - RNA, 19 nt, Artificial Sequence
  Description of Artificial Sequence: Synthetic oligonucleotide
  Sense strand starting at position 2992 of SEQ ID NO: 585772
gcaagaguaguguaaugaa

SEQ ID NO: 666423 - RNA, 19 nt, Artificial Sequence
  Description of Artificial Sequence: Synthetic oligonucleotide
  Antisense strand to SEQ ID NO: 666422
uucauuacacuacucuugc

SEQ ID NO: 666424 - RNA, 19 nt, Artificial Sequence
  Description of Artificial Sequence: Synthetic oligonucleotide
  Sense strand starting at position 3032 of SEQ ID NO: 585772
gagguuauugcaugauccu

SEQ ID NO: 666425 - RNA, 19 nt, Artificial Sequence
  Description of Artificial Sequence: Synthetic oligonucleotide
  Antisense strand to SEQ ID NO: 666424
aggaucaugcaauaaccuc

SEQ ID NO: 666426 - RNA, 19 nt, Artificial Sequence
  Description of Artificial Sequence: Synthetic oligonucleotide
  Sense strand starting at position 3072 of SEQ ID NO: 585772
gucugugccaaugacagua

SEQ ID NO: 666427 - RNA, 19 nt, Artificial Sequence
  Description of Artificial Sequence: Synthetic oligonucleotide
  Antisense strand to SEQ ID NO: 666426
uacugucauuggcacagac

SEQ ID NO: 666428 - RNA, 19 nt, Artificial Sequence
  Description of Artificial Sequence: Synthetic oligonucleotide
  Sense strand starting at position 3077 of SEQ ID NO: 585772
ugccaaugacaguauaaua

SEQ ID NO: 666429 - RNA, 19 nt, Artificial Sequence
  Description of Artificial Sequence: Synthetic oligonucleotide
  Antisense strand to SEQ ID NO: 666428
uauuauacugucauuggca

SEQ ID NO: 666430 - RNA, 19 nt, Artificial Sequence
  Description of Artificial Sequence: Synthetic oligonucleotide
  Sense strand starting at position 3094 of SEQ ID NO: 585772
uacugagaaguguagguaa

SEQ ID NO: 666431 - RNA, 19 nt, Artificial Sequence
  Description of Artificial Sequence: Synthetic oligonucleotide
  Antisense strand to SEQ ID NO: 666430
uuaccuacacuucucagua

SEQ ID NO: 666432 - RNA, 19 nt, Artificial Sequence
  Description of Artificial Sequence: Synthetic oligonucleotide
  Sense strand starting at position 3096 of SEQ ID NO: 585772
cugagaaguguagguaaua

SEQ ID NO: 666433 - RNA, 19 nt, Artificial Sequence
  Description of Artificial Sequence: Synthetic oligonucleotide
  Antisense strand to SEQ ID NO: 666432
uauuaccuacacuucucag

SEQ ID NO: 666434 - RNA, 19 nt, Artificial Sequence
  Description of Artificial Sequence: Synthetic oligonucleotide
  Sense strand starting at position 3097 of SEQ ID NO: 585772
ugagaaguguagguaauag

SEQ ID NO: 666435 - RNA, 19 nt, Artificial Sequence
  Description of Artificial Sequence: Synthetic oligonucleotide
  Antisense strand to SEQ ID NO: 666434
cuauuaccuacacuucuca

SEQ ID NO: 666436 - RNA, 19 nt, Artificial Sequence
  Description of Artificial Sequence: Synthetic oligonucleotide
  Sense strand starting at position 3105 of SEQ ID NO: 585772
guagguaauaggcaaaugu

SEQ ID NO: 666437 - RNA, 19 nt, Artificial Sequence
  Description of Artificial Sequence: Synthetic oligonucleotide
  Antisense strand to SEQ ID NO: 666436
acauuugccuauuaccuac

SEQ ID NO: 666438 - RNA, 19 nt, Artificial Sequence
  Description of Artificial Sequence: Synthetic oligonucleotide
  Sense strand starting at position 3636 of SEQ ID NO: 585772
aucaguucuccucaagagu

SEQ ID NO: 666439 - RNA, 19 nt, Artificial Sequence
  Description of Artificial Sequence: Synthetic oligonucleotide
  Antisense strand to SEQ ID NO: 666438
acucuugaggagaacugau

SEQ ID NO: 666440 - RNA, 19 nt, Artificial Sequence
  Description of Artificial Sequence: Synthetic oligonucleotide
  Sense strand starting at position 3645 of SEQ ID NO: 585772
ccucaagagucuccagaaa

SEQ ID NO: 666441 - RNA, 19 nt, Artificial Sequence
  Description of Artificial Sequence: Synthetic oligonucleotide
  Antisense strand to SEQ ID NO: 666440
uuucuggagacucuugagg

SEQ ID NO: 666442 - RNA, 19 nt, Artificial Sequence
  Description of Artificial Sequence: Synthetic oligonucleotide
  Sense strand starting at position 3750 of SEQ ID NO: 585772
auugcuaaauuagugguaa

SEQ ID NO: 666443 - RNA, 19 nt, Artificial Sequence
  Description of Artificial Sequence: Synthetic oligonucleotide
  Antisense strand to SEQ ID NO: 666442
uuaccacuaauuuagcaau

SEQ ID NO: 666444 - RNA, 19 nt, Artificial Sequence
  Description of Artificial Sequence: Synthetic oligonucleotide
  Sense strand starting at position 3763 of SEQ ID NO: 585772
ugguaauuaccauguguua

SEQ ID NO: 666445 - RNA, 19 nt, Artificial Sequence
  Description of Artificial Sequence: Synthetic oligonucleotide
  Antisense strand to SEQ ID NO: 666444
uaacacaugguaauuacca

SEQ ID NO: 666446 - RNA, 19 nt, Artificial Sequence
  Description of Artificial Sequence: Synthetic oligonucleotide
  Sense strand starting at position 3804 of SEQ ID NO: 585772
caagguaaaguguguagaa

SEQ ID NO: 666447 - RNA, 19 nt, Artificial Sequence
  Description of Artificial Sequence: Synthetic oligonucleotide
  Antisense strand to SEQ ID NO: 666446
uucuacacacuuuaccuug

SEQ ID NO: 666448 - RNA, 19 nt, Artificial Sequence
  Description of Artificial Sequence: Synthetic oligonucleotide
  Sense strand starting at position 3806 of SEQ ID NO: 585772
agguaaaguguguagaaga

SEQ ID NO: 666449 - RNA, 19 nt, Artificial Sequence
  Description of Artificial Sequence: Synthetic oligonucleotide
  Antisense strand to SEQ ID NO: 666448
ucuucuacacacuuuaccu

SEQ ID NO: 666450 - RNA, 19 nt, Artificial Sequence
  Description of Artificial Sequence: Synthetic oligonucleotide
  Sense strand starting at position 18 of SEQ ID NO: 585773
acuaaacucccguauguaa

SEQ ID NO: 666451 - RNA, 19 nt, Artificial Sequence
  Description of Artificial Sequence: Synthetic oligonucleotide
  Antisense strand to SEQ ID NO: 666450
uuacauacgggaguuuagu

SEQ ID NO: 666452 - RNA, 19 nt, Artificial Sequence
  Description of Artificial Sequence: Synthetic oligonucleotide
  Sense strand starting at position 26 of SEQ ID NO: 585773
cccguauguaaauagguau

SEQ ID NO: 666453 - RNA, 19 nt, Artificial Sequence
  Description of Artificial Sequence: Synthetic oligonucleotide
  Antisense strand to SEQ ID NO: 666452
auaccuauuuacauacggg

SEQ ID NO: 666454 - RNA, 19 nt, Artificial Sequence
  Description of Artificial Sequence: Synthetic oligonucleotide
  Sense strand starting at position 29 of SEQ ID NO: 585773
guauguaaauagguauguu

SEQ ID NO: 666455 - RNA, 19 nt, Artificial Sequence
  Description of Artificial Sequence: Synthetic oligonucleotide
  Antisense strand to SEQ ID NO: 666454
aacauaccuauuuacauac

SEQ ID NO: 666456 - RNA, 19 nt, Artificial Sequence
  Description of Artificial Sequence: Synthetic oligonucleotide
  Sense strand starting at position 32 of SEQ ID NO: 585773
uguaaauagguauguuucu

SEQ ID NO: 666457 - RNA, 19 nt, Artificial Sequence
  Description of Artificial Sequence: Synthetic oligonucleotide
  Antisense strand to SEQ ID NO: 666456
agaaacauaccuauuuaca

SEQ ID NO: 666458 - RNA, 19 nt, Artificial Sequence
  Description of Artificial Sequence: Synthetic oligonucleotide
  Sense strand starting at position 33 of SEQ ID NO: 585773
guaaauagguauguuucua

SEQ ID NO: 666459 - RNA, 19 nt, Artificial Sequence
  Description of Artificial Sequence: Synthetic oligonucleotide
  Antisense strand to SEQ ID NO: 666458
uagaaacauaccuauuuac

SEQ ID NO: 666460 - RNA, 19 nt, Artificial Sequence
  Description of Artificial Sequence: Synthetic oligonucleotide
  Sense strand starting at position 37 of SEQ ID NO: 585773
auagguauguuucuagugu

SEQ ID NO: 666461 - RNA, 19 nt, Artificial Sequence
  Description of Artificial Sequence: Synthetic oligonucleotide
  Antisense strand to SEQ ID NO: 666460
acacuagaaacauaccuau

SEQ ID NO: 666462 - RNA, 19 nt, Artificial Sequence
  Description of Artificial Sequence: Synthetic oligonucleotide
  Sense strand starting at position 316 of SEQ ID NO: 585773
uuuguugagucuuuccauc

SEQ ID NO: 666463 - RNA, 19 nt, Artificial Sequence
  Description of Artificial Sequence: Synthetic oligonucleotide
  Antisense strand to SEQ ID NO: 666462
gauggaaagacucaacaaa

SEQ ID NO: 666464 - RNA, 19 nt, Artificial Sequence
  Description of Artificial Sequence: Synthetic oligonucleotide
  Sense strand starting at position 318 of SEQ ID NO: 585773
uguugagucuuuccaucua

SEQ ID NO: 666465 - RNA, 19 nt, Artificial Sequence
  Description of Artificial Sequence: Synthetic oligonucleotide
  Antisense strand to SEQ ID NO: 666464
uagauggaaagacucaaca

SEQ ID NO: 666466 - RNA, 19 nt, Artificial Sequence
  Description of Artificial Sequence: Synthetic oligonucleotide
  Sense strand starting at position 334 of SEQ ID NO: 585773
cuauuaauacgguauaucu

SEQ ID NO: 666467 - RNA, 19 nt, Artificial Sequence
  Description of Artificial Sequence: Synthetic oligonucleotide
  Antisense strand to SEQ ID NO: 666466
agauauaccguauuaauag

SEQ ID NO: 666468 - RNA, 19 nt, Artificial Sequence
  Description of Artificial Sequence: Synthetic oligonucleotide
  Sense strand starting at position 456 of SEQ ID NO: 585773
uuugaaugccauuaugaau

SEQ ID NO: 666469 - RNA, 19 nt, Artificial Sequence
  Description of Artificial Sequence: Synthetic oligonucleotide
  Antisense strand to SEQ ID NO: 666468
auucauaauggcauucaaa

SEQ ID NO: 666470 - RNA, 19 nt, Artificial Sequence
  Description of Artificial Sequence: Synthetic oligonucleotide
  Sense strand starting at position 501 of SEQ ID NO: 585773
aguuaauuguuacugguau

SEQ ID NO: 666471 - RNA, 19 nt, Artificial Sequence
  Description of Artificial Sequence: Synthetic oligonucleotide
  Antisense strand to SEQ ID NO: 666470
auaccaguaacaauuaacu

SEQ ID NO: 666472 - RNA, 19 nt, Artificial Sequence
  Description of Artificial Sequence: Synthetic oligonucleotide
  Sense strand starting at position 509 of SEQ ID NO: 585773
guuacugguauacagaagu

SEQ ID NO: 666473 - RNA, 19 nt, Artificial Sequence
  Description of Artificial Sequence: Synthetic oligonucleotide
  Antisense strand to SEQ ID NO: 666472
acuucuguauaccaguaac

SEQ ID NO: 666474 - RNA, 19 nt, Artificial Sequence
  Description of Artificial Sequence: Synthetic oligonucleotide
  Sense strand starting at position 612 of SEQ ID NO: 585773
gguacuuauuccuuaacug

SEQ ID NO: 666475 - RNA, 19 nt, Artificial Sequence
  Description of Artificial Sequence: Synthetic oligonucleotide
  Antisense strand to SEQ ID NO: 666474
caguuaaggaauaaguacc

SEQ ID NO: 666476 - RNA, 19 nt, Artificial Sequence
  Description of Artificial Sequence: Synthetic oligonucleotide
  Sense strand starting at position 682 of SEQ ID NO: 585773
aucccaagcgucuagaaua

SEQ ID NO: 666477 - RNA, 19 nt, Artificial Sequence
  Description of Artificial Sequence: Synthetic oligonucleotide
  Antisense strand to SEQ ID NO: 666476
uauucuagacgcuugggau

SEQ ID NO: 666478 - RNA, 19 nt, Artificial Sequence
  Description of Artificial Sequence: Synthetic oligonucleotide
  Sense strand starting at position 750 of SEQ ID NO: 585773
aagagaauguaugcaagau

SEQ ID NO: 666479 - RNA, 19 nt, Artificial Sequence
  Description of Artificial Sequence: Synthetic oligonucleotide
  Antisense strand to SEQ ID NO: 666478
aucuugcauacauucucuu

SEQ ID NO: 666480 - RNA, 19 nt, Artificial Sequence
  Description of Artificial Sequence: Synthetic oligonucleotide
  Sense strand starting at position 906 of SEQ ID NO: 585773
cuggguuccuuagcgauca

SEQ ID NO: 666481 - RNA, 19 nt, Artificial Sequence
  Description of Artificial Sequence: Synthetic oligonucleotide
  Antisense strand to SEQ ID NO: 666480
ugaucgcuaaggaacccag

SEQ ID NO: 666482 - RNA, 19 nt, Artificial Sequence
  Description of Artificial Sequence: Synthetic oligonucleotide
  Sense strand starting at position 908 of SEQ ID NO: 585773
ggguuccuuagcgaucaca

SEQ ID NO: 666483 - RNA, 19 nt, Artificial Sequence
  Description of Artificial Sequence: Synthetic oligonucleotide
  Antisense strand to SEQ ID NO: 666482
ugugaucgcuaaggaaccc

SEQ ID NO: 666484 - RNA, 19 nt, Artificial Sequence
  Description of Artificial Sequence: Synthetic oligonucleotide
  Sense strand starting at position 911 of SEQ ID NO: 585773
uuccuuagcgaucacauga

SEQ ID NO: 666485 - RNA, 19 nt, Artificial Sequence
  Description of Artificial Sequence: Synthetic oligonucleotide
  Antisense strand to SEQ ID NO: 666484
ucaugugaucgcuaaggaa

SEQ ID NO: 666486 - RNA, 19 nt, Artificial Sequence
  Description of Artificial Sequence: Synthetic oligonucleotide
  Sense strand starting at position 1284 of SEQ ID NO: 585773
gagcuuaaugcgggaagua

SEQ ID NO: 666487 - RNA, 19 nt, Artificial Sequence
  Description of Artificial Sequence: Synthetic oligonucleotide
  Antisense strand to SEQ ID NO: 666486
uacuucccgcauuaagcuc

SEQ ID NO: 666488 - RNA, 19 nt, Artificial Sequence
  Description of Artificial Sequence: Synthetic oligonucleotide
  Sense strand starting at position 1358 of SEQ ID NO: 585773
augacaguguuccuuuaga

SEQ ID NO: 666489 - RNA, 19 nt, Artificial Sequence
  Description of Artificial Sequence: Synthetic oligonucleotide
  Antisense strand to SEQ ID NO: 666488
ucuaaaggaacacugucau

SEQ ID NO: 666490 - RNA, 19 nt, Artificial Sequence
  Description of Artificial Sequence: Synthetic oligonucleotide
  Sense strand starting at position 1564 of SEQ ID NO: 585773
uccucaucucuccgugacu

SEQ ID NO: 666491 - RNA, 19 nt, Artificial Sequence
  Description of Artificial Sequence: Synthetic oligonucleotide
  Antisense strand to SEQ ID NO: 666490
agucacggagagaugagga

SEQ ID NO: 666492 - RNA, 19 nt, Artificial Sequence
  Description of Artificial Sequence: Synthetic oligonucleotide
  Sense strand starting at position 1565 of SEQ ID NO: 585773
ccucaucucuccgugacua

SEQ ID NO: 666493 - RNA, 19 nt, Artificial Sequence
  Description of Artificial Sequence: Synthetic oligonucleotide
  Antisense strand to SEQ ID NO: 666492
uagucacggagagaugagg

SEQ ID NO: 666494 - RNA, 19 nt, Artificial Sequence
  Description of Artificial Sequence: Synthetic oligonucleotide
  Sense strand starting at position 2295 of SEQ ID NO: 585773
ccucguuuaaucguggguu

SEQ ID NO: 666495 - RNA, 19 nt, Artificial Sequence
  Description of Artificial Sequence: Synthetic oligonucleotide
  Antisense strand to SEQ ID NO: 666494
aacccacgauuaaacgagg

SEQ ID NO: 666496 - RNA, 19 nt, Artificial Sequence
  Description of Artificial Sequence: Synthetic oligonucleotide
  Sense strand starting at position 2351 of SEQ ID NO: 585773
aguggaaguuaauuaaaug

SEQ ID NO: 666497 - RNA, 19 nt, Artificial Sequence
  Description of Artificial Sequence: Synthetic oligonucleotide
  Antisense strand to SEQ ID NO: 666496
cauuuaauuaacuuccacu

SEQ ID NO: 666498 - RNA, 19 nt, Artificial Sequence
  Description of Artificial Sequence: Synthetic oligonucleotide
  Sense strand starting at position 2369 of SEQ ID NO: 585773
gggcguacgcugagugguu

SEQ ID NO: 666499 - RNA, 19 nt, Artificial Sequence
  Description of Artificial Sequence: Synthetic oligonucleotide
  Antisense strand to SEQ ID NO: 666498
aaccacucagcguacgccc

SEQ ID NO: 666500 - RNA, 19 nt, Artificial Sequence
  Description of Artificial Sequence: Synthetic oligonucleotide
  Sense strand starting at position 2433 of SEQ ID NO: 585773
gggcacaagaucuggagau

SEQ ID NO: 666501 - RNA, 19 nt, Artificial Sequence
  Description of Artificial Sequence: Synthetic oligonucleotide
  Antisense strand to SEQ ID NO: 666500
aucuccagaucuugugccc

SEQ ID NO: 666502 - RNA, 19 nt, Artificial Sequence
  Description of Artificial Sequence: Synthetic oligonucleotide
  Sense strand starting at position 2446 of SEQ ID NO: 585773
ggagaucuggcuuguacuu

SEQ ID NO: 666503 - RNA, 19 nt, Artificial Sequence
  Description of Artificial Sequence: Synthetic oligonucleotide
  Antisense strand to SEQ ID NO: 666502
aaguacaagccagaucucc

SEQ ID NO: 666504 - RNA, 19 nt, Artificial Sequence
  Description of Artificial Sequence: Synthetic oligonucleotide
  Sense strand starting at position 2467 of SEQ ID NO: 585773
uuccuuuggccaggaacua

SEQ ID NO: 666505 - RNA, 19 nt, Artificial Sequence
  Description of Artificial Sequence: Synthetic oligonucleotide
  Antisense strand to SEQ ID NO: 666504
uaguuccuggccaaaggaa

SEQ ID NO: 666506 - RNA, 19 nt, Artificial Sequence
  Description of Artificial Sequence: Synthetic oligonucleotide
  Sense strand starting at position 2487 of SEQ ID NO: 585773
ggcuuaaucucuuccuuug

SEQ ID NO: 666507 - RNA, 19 nt, Artificial Sequence
  Description of Artificial Sequence: Synthetic oligonucleotide
  Antisense strand to SEQ ID NO: 666506
caaaggaagagauuaagcc

SEQ ID NO: 666508 - RNA, 19 nt, Artificial Sequence
  Description of Artificial Sequence: Synthetic oligonucleotide
  Sense strand starting at position 2498 of SEQ ID NO: 585773
uuccuuuggucuccucaua

SEQ ID NO: 666509 - RNA, 19 nt, Artificial Sequence
  Description of Artificial Sequence: Synthetic oligonucleotide
  Antisense strand to SEQ ID NO: 666508
uaugaggagaccaaaggaa

SEQ ID NO: 666510 - RNA, 19 nt, Artificial Sequence
  Description of Artificial Sequence: Synthetic oligonucleotide
  Sense strand starting at position 2946 of SEQ ID NO: 585773
ucugucucgaaguguauau

SEQ ID NO: 666511 - RNA, 19 nt, Artificial Sequence
  Description of Artificial Sequence: Synthetic oligonucleotide
  Antisense strand to SEQ ID NO: 666510
auauacacuucgagacaga

SEQ ID NO: 666512 - RNA, 19 nt, Artificial Sequence
  Description of Artificial Sequence: Synthetic oligonucleotide
  Sense strand starting at position 2948 of SEQ ID NO: 585773
ugucucgaaguguauauau

SEQ ID NO: 666513 - RNA, 19 nt, Artificial Sequence
  Description of Artificial Sequence: Synthetic oligonucleotide
  Antisense strand to SEQ ID NO: 666512
auauauacacuucgagaca

SEQ ID NO: 666514 - RNA, 19 nt, Artificial Sequence
  Description of Artificial Sequence: Synthetic oligonucleotide
  Sense strand starting at position 3773 of SEQ ID NO: 585773
uugggcucacuguauaauu

SEQ ID NO: 666515 - RNA, 19 nt, Artificial Sequence
  Description of Artificial Sequence: Synthetic oligonucleotide
  Antisense strand to SEQ ID NO: 666514
aauuauacagugagcccaa

SEQ ID NO: 666516 - RNA, 19 nt, Artificial Sequence
  Description of Artificial Sequence: Synthetic oligonucleotide
  Sense strand starting at position 3826 of SEQ ID NO: 585773
ccugucucccaggaucuua

SEQ ID NO: 666517 - RNA, 19 nt, Artificial Sequence
  Description of Artificial Sequence: Synthetic oligonucleotide
  Antisense strand to SEQ ID NO: 666516
uaagauccugggagacagg

SEQ ID NO: 666518 - RNA, 19 nt, Artificial Sequence
  Description of Artificial Sequence: Synthetic oligonucleotide
  Sense strand starting at position 3881 of SEQ ID NO: 585773
uugaauaauggacgguuua

SEQ ID NO: 666519 - RNA, 19 nt, Artificial Sequence
  Description of Artificial Sequence: Synthetic oligonucleotide
  Antisense strand to SEQ ID NO: 666518
uaaaccguccauuauucaa

SEQ ID NO: 666520 - RNA, 19 nt, Artificial Sequence
  Description of Artificial Sequence: Synthetic oligonucleotide
  Sense strand starting at position 3882 of SEQ ID NO: 585773
ugaauaauggacgguuuau

SEQ ID NO: 666521 - RNA, 19 nt, Artificial Sequence
  Description of Artificial Sequence: Synthetic oligonucleotide
  Antisense strand to SEQ ID NO: 666520
auaaaccguccauuauuca

SEQ ID NO: 666522 - RNA, 19 nt, Artificial Sequence
  Description of Artificial Sequence: Synthetic oligonucleotide
  Sense strand starting at position 3911 of SEQ ID NO: 585773
ggcacacugguguagaguu

SEQ ID NO: 666523 - RNA, 19 nt, Artificial Sequence
  Description of Artificial Sequence: Synthetic oligonucleotide
  Antisense strand to SEQ ID NO: 666522
aacucuacaccagugugcc

SEQ ID NO: 666524 - RNA, 19 nt, Artificial Sequence
  Description of Artificial Sequence: Synthetic oligonucleotide
  Sense strand starting at position 3941 of SEQ ID NO: 585773
uucuauuagggcuaauuga

SEQ ID NO: 666525 - RNA, 19 nt, Artificial Sequence
  Description of Artificial Sequence: Synthetic oligonucleotide
  Antisense strand to SEQ ID NO: 666524
ucaauuagcccuaauagaa

SEQ ID NO: 666526 - RNA, 19 nt, Artificial Sequence
  Description of Artificial Sequence: Synthetic oligonucleotide
  Sense strand starting at position 3952 of SEQ ID NO: 585773
cuaauugaccuuggguaga

SEQ ID NO: 666527 - RNA, 19 nt, Artificial Sequence
  Description of Artificial Sequence: Synthetic oligonucleotide
  Antisense strand to SEQ ID NO: 666526
ucuacccaaggucaauuag

SEQ ID NO: 666528 - RNA, 19 nt, Artificial Sequence
  Description of Artificial Sequence: Synthetic oligonucleotide
  Sense strand starting at position 3954 of SEQ ID NO: 585773
aauugaccuuggguagaau

SEQ ID NO: 666529 - RNA, 19 nt, Artificial Sequence
  Description of Artificial Sequence: Synthetic oligonucleotide
  Antisense strand to SEQ ID NO: 666528
auucuacccaaggucaauu

SEQ ID NO: 666530 - RNA, 19 nt, Artificial Sequence
  Description of Artificial Sequence: Synthetic oligonucleotide
  Sense strand starting at position 100 of SEQ ID NO: 585774
cuaaguaaaugagcacauu

SEQ ID NO: 666531 - RNA, 19 nt, Artificial Sequence
  Description of Artificial Sequence: Synthetic oligonucleotide
  Antisense strand to SEQ ID NO: 666530
aaugugcucauuuacuuag

SEQ ID NO: 666532 - RNA, 19 nt, Artificial Sequence
  Description of Artificial Sequence: Synthetic oligonucleotide
  Sense strand starting at position 157 of SEQ ID NO: 585774
acuauuggccugcaguaaa

SEQ ID NO: 666533 - RNA, 19 nt, Artificial Sequence
  Description of Artificial Sequence: Synthetic oligonucleotide
  Antisense strand to SEQ ID NO: 666532
uuuacugcaggccaauagu

SEQ ID NO: 666534 - RNA, 19 nt, Artificial Sequence
  Description of Artificial Sequence: Synthetic oligonucleotide
  Sense strand starting at position 502 of SEQ ID NO: 585774
aauaaagguggcgaucuau

SEQ ID NO: 666535 - RNA, 19 nt, Artificial Sequence
  Description of Artificial Sequence: Synthetic oligonucleotide
  Antisense strand to SEQ ID NO: 666534
auagaucgccaccuuuauu

SEQ ID NO: 666536 - RNA, 19 nt, Artificial Sequence
  Description of Artificial Sequence: Synthetic oligonucleotide
  Sense strand starting at position 914 of SEQ ID NO: 585774
ggaaucauuugggaaguca

SEQ ID NO: 666537 - RNA, 19 nt, Artificial Sequence
  Description of Artificial Sequence: Synthetic oligonucleotide
  Antisense strand to SEQ ID NO: 666536
ugacuucccaaaugauucc

SEQ ID NO: 666538 - RNA, 19 nt, Artificial Sequence
  Description of Artificial Sequence: Synthetic oligonucleotide
  Sense strand starting at position 1067 of SEQ ID NO: 585774
ggcagagauuaucuuaaau

SEQ ID NO: 666539 - RNA, 19 nt, Artificial Sequence
  Description of Artificial Sequence: Synthetic oligonucleotide
  Antisense strand to SEQ ID NO: 666538
auuuaagauaaucucugcc

SEQ ID NO: 666540 - RNA, 19 nt, Artificial Sequence
  Description of Artificial Sequence: Synthetic oligonucleotide
  Sense strand starting at position 1178 of SEQ ID NO: 585774
gcuaauuaagcaugaaauu

SEQ ID NO: 666541 - RNA, 19 nt, Artificial Sequence
  Description of Artificial Sequence: Synthetic oligonucleotide
  Antisense strand to SEQ ID NO: 666540
aauuucaugcuuaauuagc

SEQ ID NO: 666542 - RNA, 19 nt, Artificial Sequence
  Description of Artificial Sequence: Synthetic oligonucleotide
  Sense strand starting at position 1317 of SEQ ID NO: 585774
acggcagagcuaugacuau

SEQ ID NO: 666543 - RNA, 19 nt, Artificial Sequence
  Description of Artificial Sequence: Synthetic oligonucleotide
  Antisense strand to SEQ ID NO: 666542
auagucauagcucugccgu

SEQ ID NO: 666544 - RNA, 19 nt, Artificial Sequence
  Description of Artificial Sequence: Synthetic oligonucleotide
  Sense strand starting at position 1467 of SEQ ID NO: 585774
gucugaggucgccaggaaa

SEQ ID NO: 666545 - RNA, 19 nt, Artificial Sequence
  Description of Artificial Sequence: Synthetic oligonucleotide
  Antisense strand to SEQ ID NO: 666544
uuuccuggcgaccucagac

SEQ ID NO: 666546 - RNA, 19 nt, Artificial Sequence
  Description of Artificial Sequence: Synthetic oligonucleotide
  Sense strand starting at position 1524 of SEQ ID NO: 585774
ggcaaagaccuuuguagag

SEQ ID NO: 666547 - RNA, 19 nt, Artificial Sequence
  Description of Artificial Sequence: Synthetic oligonucleotide
  Antisense strand to SEQ ID NO: 666546
cucuacaaaggucuuugcc

SEQ ID NO: 666548 - RNA, 19 nt, Artificial Sequence
  Description of Artificial Sequence: Synthetic oligonucleotide
  Sense strand starting at position 2004 of SEQ ID NO: 585774
uacuaucugcgagacacuu

SEQ ID NO: 666549 - RNA, 19 nt, Artificial Sequence
  Description of Artificial Sequence: Synthetic oligonucleotide
  Antisense strand to SEQ ID NO: 666548
aagugucucgcagauagua

SEQ ID NO: 666550 - RNA, 19 nt, Artificial Sequence
  Description of Artificial Sequence: Synthetic oligonucleotide
  Sense strand starting at position 2333 of SEQ ID NO: 585774
ugaggaaccucucugcuuu

SEQ ID NO: 666551 - RNA, 19 nt, Artificial Sequence
  Description of Artificial Sequence: Synthetic oligonucleotide
  Antisense strand to SEQ ID NO: 666550
aaagcagagagguuccuca

SEQ ID NO: 666552 - RNA, 19 nt, Artificial Sequence
  Description of Artificial Sequence: Synthetic oligonucleotide
  Sense strand starting at position 2377 of SEQ ID NO: 585774
gucuuuguccguccuaacu

SEQ ID NO: 666553 - RNA, 19 nt, Artificial Sequence
  Description of Artificial Sequence: Synthetic oligonucleotide
  Antisense strand to SEQ ID NO: 666552
aguuaggacggacaaagac

SEQ ID NO: 666554 - RNA, 19 nt, Artificial Sequence
  Description of Artificial Sequence: Synthetic oligonucleotide
  Sense strand starting at position 2433 of SEQ ID NO: 585774
uuugcucuugcguuugcaa

SEQ ID NO: 666555 - RNA, 19 nt, Artificial Sequence
  Description of Artificial Sequence: Synthetic oligonucleotide
  Antisense strand to SEQ ID NO: 666554
uugcaaacgcaagagcaaa

SEQ ID NO: 666556 - RNA, 19 nt, Artificial Sequence
  Description of Artificial Sequence: Synthetic oligonucleotide
  Sense strand starting at position 2516 of SEQ ID NO: 585774
ucaguuucucuguaucauu

SEQ ID NO: 666557 - RNA, 19 nt, Artificial Sequence
  Description of Artificial Sequence: Synthetic oligonucleotide
  Antisense strand to SEQ ID NO: 666556
aaugauacagagaaacuga

SEQ ID NO: 666558 - RNA, 19 nt, Artificial Sequence
  Description of Artificial Sequence: Synthetic oligonucleotide
  Sense strand starting at position 2529 of SEQ ID NO: 585774
aucauuucuguuugcuauu

SEQ ID NO: 666559 - RNA, 19 nt, Artificial Sequence
  Description of Artificial Sequence: Synthetic oligonucleotide
  Antisense strand to SEQ ID NO: 666558
aauagcaaacagaaaugau

SEQ ID NO: 666560 - RNA, 19 nt, Artificial Sequence
  Description of Artificial Sequence: Synthetic oligonucleotide
  Sense strand starting at position 2538 of SEQ ID NO: 585774
guuugcuauugacuuauau

SEQ ID NO: 666561 - RNA, 19 nt, Artificial Sequence
  Description of Artificial Sequence: Synthetic oligonucleotide
  Antisense strand to SEQ ID NO: 666560
auauaagucaauagcaaac

SEQ ID NO: 666562 - RNA, 19 nt, Artificial Sequence
  Description of Artificial Sequence: Synthetic oligonucleotide
  Sense strand starting at position 2688 of SEQ ID NO: 585774
cuugcauauuaggugauga

SEQ ID NO: 666563 - RNA, 19 nt, Artificial Sequence
  Description of Artificial Sequence: Synthetic oligonucleotide
  Antisense strand to SEQ ID NO: 666562
ucaucaccuaauaugcaag

SEQ ID NO: 666564 - RNA, 19 nt, Artificial Sequence
  Description of Artificial Sequence: Synthetic oligonucleotide
  Sense strand starting at position 2689 of SEQ ID NO: 585774
uugcauauuaggugaugau

SEQ ID NO: 666565 - RNA, 19 nt, Artificial Sequence
  Description of Artificial Sequence: Synthetic oligonucleotide
  Antisense strand to SEQ ID NO: 666564
aucaucaccuaauaugcaa

SEQ ID NO: 666566 - RNA, 19 nt, Artificial Sequence
  Description of Artificial Sequence: Synthetic oligonucleotide
  Sense strand starting at position 2690 of SEQ ID NO: 585774
ugcauauuaggugaugaug

SEQ ID NO: 666567 - RNA, 19 nt, Artificial Sequence
  Description of Artificial Sequence: Synthetic oligonucleotide
  Antisense strand to SEQ ID NO: 666566
caucaucaccuaauaugca

SEQ ID NO: 666568 - RNA, 19 nt, Artificial Sequence
  Description of Artificial Sequence: Synthetic oligonucleotide
  Sense strand starting at position 2719 of SEQ ID NO: 585774
gggaaugcauuccuauaaa

SEQ ID NO: 666569 - RNA, 19 nt, Artificial Sequence
  Description of Artificial Sequence: Synthetic oligonucleotide
  Antisense strand to SEQ ID NO: 666568
uuuauaggaaugcauuccc

SEQ ID NO: 666570 - RNA, 19 nt, Artificial Sequence
  Description of Artificial Sequence: Synthetic oligonucleotide
  Sense strand starting at position 2936 of SEQ ID NO: 585774
gggacaaucuugcuuuauu

SEQ ID NO: 666571 - RNA, 19 nt, Artificial Sequence
  Description of Artificial Sequence: Synthetic oligonucleotide
  Antisense strand to SEQ ID NO: 666570
aauaaagcaagauuguccc

SEQ ID NO: 666572 - RNA, 19 nt, Artificial Sequence
  Description of Artificial Sequence: Synthetic oligonucleotide
  Sense strand starting at position 2937 of SEQ ID NO: 585774
ggacaaucuugcuuuauuc

SEQ ID NO: 666573 - RNA, 19 nt, Artificial Sequence
  Description of Artificial Sequence: Synthetic oligonucleotide
  Antisense strand to SEQ ID NO: 666572
gaauaaagcaagauugucc

SEQ ID NO: 666574 - RNA, 19 nt, Artificial Sequence
  Description of Artificial Sequence: Synthetic oligonucleotide
  Sense strand starting at position 3035 of SEQ ID NO: 585774
uguggaaaugcuuguaauc

SEQ ID NO: 666575 - RNA, 19 nt, Artificial Sequence
  Description of Artificial Sequence: Synthetic oligonucleotide
  Antisense strand to SEQ ID NO: 666574
gauuacaagcauuuccaca

SEQ ID NO: 666576 - RNA, 19 nt, Artificial Sequence
  Description of Artificial Sequence: Synthetic oligonucleotide
  Sense strand starting at position 3372 of SEQ ID NO: 585774
cguuauuuaugggagaaga

SEQ ID NO: 666577 - RNA, 19 nt, Artificial Sequence
  Description of Artificial Sequence: Synthetic oligonucleotide
  Antisense strand to SEQ ID NO: 666576
ucuucucccauaaauaacg

SEQ ID NO: 666578 - RNA, 19 nt, Artificial Sequence
  Description of Artificial Sequence: Synthetic oligonucleotide
  Sense strand starting at position 3450 of SEQ ID NO: 585774
acuuauaugugaguaacuu

SEQ ID NO: 666579 - RNA, 19 nt, Artificial Sequence
  Description of Artificial Sequence: Synthetic oligonucleotide
  Antisense strand to SEQ ID NO: 666578
aaguuacucacauauaagu

SEQ ID NO: 666580 - RNA, 19 nt, Artificial Sequence
  Description of Artificial Sequence: Synthetic oligonucleotide
  Sense strand starting at position 3451 of SEQ ID NO: 585774
cuuauaugugaguaacuuu

SEQ ID NO: 666581 - RNA, 19 nt, Artificial Sequence
  Description of Artificial Sequence: Synthetic oligonucleotide
  Antisense strand to SEQ ID NO: 666580
aaaguuacucacauauaag

SEQ ID NO: 666582 - RNA, 19 nt, Artificial Sequence
  Description of Artificial Sequence: Synthetic oligonucleotide
  Sense strand starting at position 3463 of SEQ ID NO: 585774
uaacuuuaaggucguaaag

SEQ ID NO: 666583 - RNA, 19 nt, Artificial Sequence
  Description of Artificial Sequence: Synthetic oligonucleotide
  Antisense strand to SEQ ID NO: 666582
cuuuacgaccuuaaaguua

SEQ ID NO: 666584 - RNA, 19 nt, Artificial Sequence
  Description of Artificial Sequence: Synthetic oligonucleotide
  Sense strand starting at position 3472 of SEQ ID NO: 585774
ggucguaaagaauauguuu

SEQ ID NO: 666585 - RNA, 19 nt, Artificial Sequence
  Description of Artificial Sequence: Synthetic oligonucleotide
  Antisense strand to SEQ ID NO: 666584
aaacauauucuuuacgacc

SEQ ID NO: 666586 - RNA, 19 nt, Artificial Sequence
  Description of Artificial Sequence: Synthetic oligonucleotide
  Sense strand starting at position 3480 of SEQ ID NO: 585774
agaauauguuuauuagcca

SEQ ID NO: 666587 - RNA, 19 nt, Artificial Sequence
  Description of Artificial Sequence: Synthetic oligonucleotide
  Antisense strand to SEQ ID NO: 666586
uggcuaauaaacauauucu

SEQ ID NO: 666588 - RNA, 19 nt, Artificial Sequence
  Description of Artificial Sequence: Synthetic oligonucleotide
  Sense strand starting at position 3557 of SEQ ID NO: 585774
uuaagaggguuucugagau

SEQ ID NO: 666589 - RNA, 19 nt, Artificial Sequence
  Description of Artificial Sequence: Synthetic oligonucleotide
  Antisense strand to SEQ ID NO: 666588
aucucagaaacccucuuaa

SEQ ID NO: 666590 - RNA, 19 nt, Artificial Sequence
  Description of Artificial Sequence: Synthetic oligonucleotide
  Sense strand starting at position 3648 of SEQ ID NO: 585774
uuaaucuuucuggaaugua

SEQ ID NO: 666591 - RNA, 19 nt, Artificial Sequence
  Description of Artificial Sequence: Synthetic oligonucleotide
  Antisense strand to SEQ ID NO: 666590
uacauuccagaaagauuaa

SEQ ID NO: 666592 - RNA, 19 nt, Artificial Sequence
  Description of Artificial Sequence: Synthetic oligonucleotide
  Sense strand starting at position 3651 of SEQ ID NO: 585774
aucuuucuggaauguaaca

SEQ ID NO: 666593 - RNA, 19 nt, Artificial Sequence
  Description of Artificial Sequence: Synthetic oligonucleotide
  Antisense strand to SEQ ID NO: 666592
uguuacauuccagaaagau

SEQ ID NO: 666594 - RNA, 19 nt, Artificial Sequence
  Description of Artificial Sequence: Synthetic oligonucleotide
  Sense strand starting at position 3667 of SEQ ID NO: 585774
acacuuggccuugaaauac

SEQ ID NO: 666595 - RNA, 19 nt, Artificial Sequence
  Description of Artificial Sequence: Synthetic oligonucleotide
  Antisense strand to SEQ ID NO: 666594
guauuucaaggccaagugu

SEQ ID NO: 666596 - RNA, 19 nt, Artificial Sequence
  Description of Artificial Sequence: Synthetic oligonucleotide
  Sense strand starting at position 3718 of SEQ ID NO: 585774
ggcuauguggaguggaauu

SEQ ID NO: 666597 - RNA, 19 nt, Artificial Sequence
  Description of Artificial Sequence: Synthetic oligonucleotide
  Antisense strand to SEQ ID NO: 666596
aauuccacuccacauagcc

SEQ ID NO: 666598 - RNA, 19 nt, Artificial Sequence
  Description of Artificial Sequence: Synthetic oligonucleotide
  Sense strand starting at position 3765 of SEQ ID NO: 585774
auuaauuggacacgacagu

SEQ ID NO: 666599 - RNA, 19 nt, Artificial Sequence
  Description of Artificial Sequence: Synthetic oligonucleotide
  Antisense strand to SEQ ID NO: 666598
acugucguguccaauuaau

SEQ ID NO: 666600 - RNA, 19 nt, Artificial Sequence
  Description of Artificial Sequence: Synthetic oligonucleotide
  Sense strand starting at position 3805 of SEQ ID NO: 585774
uuagaagagucuucgacac

SEQ ID NO: 666601 - RNA, 19 nt, Artificial Sequence
  Description of Artificial Sequence: Synthetic oligonucleotide
  Antisense strand to SEQ ID NO: 666600
gugucgaagacucuucuaa

SEQ ID NO: 666602 - RNA, 19 nt, Artificial Sequence
  Description of Artificial Sequence: Synthetic oligonucleotide
  Sense strand starting at position 3809 of SEQ ID NO: 585774
aagagucuucgacaccagu

SEQ ID NO: 666603 - RNA, 19 nt, Artificial Sequence
  Description of Artificial Sequence: Synthetic oligonucleotide
  Antisense strand to SEQ ID NO: 666602
acuggugucgaagacucuu

SEQ ID NO: 666604 - RNA, 19 nt, Artificial Sequence
  Description of Artificial Sequence: Synthetic oligonucleotide
  Sense strand starting at position 3839 of SEQ ID NO: 585774
cuuugccaacuaugaaaga

SEQ ID NO: 666605 - RNA, 19 nt, Artificial Sequence
  Description of Artificial Sequence: Synthetic oligonucleotide
  Antisense strand to SEQ ID NO: 666604
ucuuucauaguuggcaaag

SEQ ID NO: 666606 - RNA, 19 nt, Artificial Sequence
  Description of Artificial Sequence: Synthetic oligonucleotide
  Sense strand starting at position 3958 of SEQ ID NO: 585774
ggugacuuccuguagcaca

SEQ ID NO: 666607 - RNA, 19 nt, Artificial Sequence
  Description of Artificial Sequence: Synthetic oligonucleotide
  Antisense strand to SEQ ID NO: 666606
ugugcuacaggaagucacc

SEQ ID NO: 666608 - RNA, 19 nt, Artificial Sequence
  Description of Artificial Sequence: Synthetic oligonucleotide
  Sense strand starting at position 3969 of SEQ ID NO: 585774
guagcacacguauaacuua

SEQ ID NO: 666609 - RNA, 19 nt, Artificial Sequence
  Description of Artificial Sequence: Synthetic oligonucleotide
  Antisense strand to SEQ ID NO: 666608
uaaguuauacgugugcuac

SEQ ID NO: 666610 - RNA, 19 nt, Artificial Sequence
  Description of Artificial Sequence: Synthetic oligonucleotide
  Sense strand starting at position 28 of SEQ ID NO: 585775
ggaagaugcuagcucagga

SEQ ID NO: 666611 - RNA, 19 nt, Artificial Sequence
  Description of Artificial Sequence: Synthetic oligonucleotide
  Antisense strand to SEQ ID NO: 666610
uccugagcuagcaucuucc

SEQ ID NO: 666612 - RNA, 19 nt, Artificial Sequence
  Description of Artificial Sequence: Synthetic oligonucleotide
  Sense strand starting at position 141 of SEQ ID NO: 585775
ucuccucagcaauacgaaa

SEQ ID NO: 666613 - RNA, 19 nt, Artificial Sequence
  Description of Artificial Sequence: Synthetic oligonucleotide
  Antisense strand to SEQ ID NO: 666612
uuucguauugcugaggaga

SEQ ID NO: 666614 - RNA, 19 nt, Artificial Sequence
  Description of Artificial Sequence: Synthetic oligonucleotide
  Sense strand starting at position 174 of SEQ ID NO: 585775
cgugguagguacuuaggaa

SEQ ID NO: 666615 - RNA, 19 nt, Artificial Sequence
  Description of Artificial Sequence: Synthetic oligonucleotide
  Antisense strand to SEQ ID NO: 666614
uuccuaaguaccuaccacg

SEQ ID NO: 666616 - RNA, 19 nt, Artificial Sequence
  Description of Artificial Sequence: Synthetic oligonucleotide
  Sense strand starting at position 175 of SEQ ID NO: 585775
gugguagguacuuaggaaa

SEQ ID NO: 666617 - RNA, 19 nt, Artificial Sequence
  Description of Artificial Sequence: Synthetic oligonucleotide
  Antisense strand to SEQ ID NO: 666616
uuuccuaaguaccuaccac

SEQ ID NO: 666618 - RNA, 19 nt, Artificial Sequence
  Description of Artificial Sequence: Synthetic oligonucleotide
  Sense strand starting at position 216 of SEQ ID NO: 585775
ugcauacaagugugacuuu

SEQ ID NO: 666619 - RNA, 19 nt, Artificial Sequence
  Description of Artificial Sequence: Synthetic oligonucleotide
  Antisense strand to SEQ ID NO: 666618
aaagucacacuuguaugca

SEQ ID NO: 666620 - RNA, 19 nt, Artificial Sequence
  Description of Artificial Sequence: Synthetic oligonucleotide
  Sense strand starting at position 236 of SEQ ID NO: 585775
cugaaagucugaucucaua

SEQ ID NO: 666621 - RNA, 19 nt, Artificial Sequence
  Description of Artificial Sequence: Synthetic oligonucleotide
  Antisense strand to SEQ ID NO: 666620
uaugagaucagacuuucag

SEQ ID NO: 666622 - RNA, 19 nt, Artificial Sequence
  Description of Artificial Sequence: Synthetic oligonucleotide
  Sense strand starting at position 314 of SEQ ID NO: 585775
uguccauucguagggagau

SEQ ID NO: 666623 - RNA, 19 nt, Artificial Sequence
  Description of Artificial Sequence: Synthetic oligonucleotide
  Antisense strand to SEQ ID NO: 666622
aucucccuacgaauggaca

SEQ ID NO: 666624 - RNA, 19 nt, Artificial Sequence
  Description of Artificial Sequence: Synthetic oligonucleotide
  Sense strand starting at position 418 of SEQ ID NO: 585775
ggccauagcagaugaaaug

SEQ ID NO: 666625 - RNA, 19 nt, Artificial Sequence
  Description of Artificial Sequence: Synthetic oligonucleotide
  Antisense strand to SEQ ID NO: 666624
cauuucaucugcuauggcc

SEQ ID NO: 666626 - RNA, 19 nt, Artificial Sequence
  Description of Artificial Sequence: Synthetic oligonucleotide
  Sense strand starting at position 464 of SEQ ID NO: 585775
gccggauuguucucacuca

SEQ ID NO: 666627 - RNA, 19 nt, Artificial Sequence
  Description of Artificial Sequence: Synthetic oligonucleotide
  Antisense strand to SEQ ID NO: 666626
ugagugagaacaauccggc

SEQ ID NO: 666628 - RNA, 19 nt, Artificial Sequence
  Description of Artificial Sequence: Synthetic oligonucleotide
  Sense strand starting at position 525 of SEQ ID NO: 585775
ucagcugcuccauggugaa

SEQ ID NO: 666629 - RNA, 19 nt, Artificial Sequence
  Description of Artificial Sequence: Synthetic oligonucleotide
  Antisense strand to SEQ ID NO: 666628
uucaccauggagcagcuga

SEQ ID NO: 666630 - RNA, 19 nt, Artificial Sequence
  Description of Artificial Sequence: Synthetic oligonucleotide
  Sense strand starting at position 592 of SEQ ID NO: 585775
cagauuaggcagcacuauu

SEQ ID NO: 666631 - RNA, 19 nt, Artificial Sequence
  Description of Artificial Sequence: Synthetic oligonucleotide
  Antisense strand to SEQ ID NO: 666630
aauagugcugccuaaucug

SEQ ID NO: 666632 - RNA, 19 nt, Artificial Sequence
  Description of Artificial Sequence: Synthetic oligonucleotide
  Sense strand starting at position 727 of SEQ ID NO: 585775
ggaccauucuggccaagga

SEQ ID NO: 666633 - RNA, 19 nt, Artificial Sequence
  Description of Artificial Sequence: Synthetic oligonucleotide
  Antisense strand to SEQ ID NO: 666632
uccuuggccagaauggucc

SEQ ID NO: 666634 - RNA, 19 nt, Artificial Sequence
  Description of Artificial Sequence: Synthetic oligonucleotide
  Sense strand starting at position 1303 of SEQ ID NO: 585775
gcugauuucuccuuguugu

SEQ ID NO: 666635 - RNA, 19 nt, Artificial Sequence
  Description of Artificial Sequence: Synthetic oligonucleotide
  Antisense strand to SEQ ID NO: 666634
acaacaaggagaaaucagc

SEQ ID NO: 666636 - RNA, 19 nt, Artificial Sequence
  Description of Artificial Sequence: Synthetic oligonucleotide
  Sense strand starting at position 1304 of SEQ ID NO: 585775
cugauuucuccuuguugug

SEQ ID NO: 666637 - RNA, 19 nt, Artificial Sequence
  Description of Artificial Sequence: Synthetic oligonucleotide
  Antisense strand to SEQ ID NO: 666636
cacaacaaggagaaaucag

SEQ ID NO: 666638 - RNA, 19 nt, Artificial Sequence
  Description of Artificial Sequence: Synthetic oligonucleotide
  Sense strand starting at position 1320 of SEQ ID NO: 585775
gugaaaucgucucuagaau

SEQ ID NO: 666639 - RNA, 19 nt, Artificial Sequence
  Description of Artificial Sequence: Synthetic oligonucleotide
  Antisense strand to SEQ ID NO: 666638
auucuagagacgauuucac

SEQ ID NO: 666640 - RNA, 19 nt, Artificial Sequence
  Description of Artificial Sequence: Synthetic oligonucleotide
  Sense strand starting at position 1321 of SEQ ID NO: 585775
ugaaaucgucucuagaauc

SEQ ID NO: 666641 - RNA, 19 nt, Artificial Sequence
  Description of Artificial Sequence: Synthetic oligonucleotide
  Antisense strand to SEQ ID NO: 666640
gauucuagagacgauuuca

SEQ ID NO: 666642 - RNA, 19 nt, Artificial Sequence
  Description of Artificial Sequence: Synthetic oligonucleotide
  Sense strand starting at position 1454 of SEQ ID NO: 585775
ggacaacauucugaucuca

SEQ ID NO: 666643 - RNA, 19 nt, Artificial Sequence
  Description of Artificial Sequence: Synthetic oligonucleotide
  Antisense strand to SEQ ID NO: 666642
ugagaucagaauguugucc

SEQ ID NO: 666644 - RNA, 19 nt, Artificial Sequence
  Description of Artificial Sequence: Synthetic oligonucleotide
  Sense strand starting at position 1836 of SEQ ID NO: 585775
gcucuuauagcaggcggaa

SEQ ID NO: 666645 - RNA, 19 nt, Artificial Sequence
  Description of Artificial Sequence: Synthetic oligonucleotide
  Antisense strand to SEQ ID NO: 666644
uuccgccugcuauaagagc

SEQ ID NO: 666646 - RNA, 19 nt, Artificial Sequence
  Description of Artificial Sequence: Synthetic oligonucleotide
  Sense strand starting at position 2051 of SEQ ID NO: 585775
cuuacuaaggugugaauga

SEQ ID NO: 666647 - RNA, 19 nt, Artificial Sequence
  Description of Artificial Sequence: Synthetic oligonucleotide
  Antisense strand to SEQ ID NO: 666646
ucauucacaccuuaguaag

SEQ ID NO: 666648 - RNA, 19 nt, Artificial Sequence
  Description of Artificial Sequence: Synthetic oligonucleotide
  Sense strand starting at position 2060 of SEQ ID NO: 585775
gugugaaugacugagacga

SEQ ID NO: 666649 - RNA, 19 nt, Artificial Sequence
  Description of Artificial Sequence: Synthetic oligonucleotide
  Antisense strand to SEQ ID NO: 666648
ucgucucagucauucacac

SEQ ID NO: 666650 - RNA, 19 nt, Artificial Sequence
  Description of Artificial Sequence: Synthetic oligonucleotide
  Sense strand starting at position 2132 of SEQ ID NO: 585775
uugggagcuuucuuugaga

SEQ ID NO: 666651 - RNA, 19 nt, Artificial Sequence
  Description of Artificial Sequence: Synthetic oligonucleotide
  Antisense strand to SEQ ID NO: 666650
ucucaaagaaagcucccaa

SEQ ID NO: 666652 - RNA, 19 nt, Artificial Sequence
  Description of Artificial Sequence: Synthetic oligonucleotide
  Sense strand starting at position 2134 of SEQ ID NO: 585775
gggagcuuucuuugagaga

SEQ ID NO: 666653 - RNA, 19 nt, Artificial Sequence
  Description of Artificial Sequence: Synthetic oligonucleotide
  Antisense strand to SEQ ID NO: 666652
ucucucaaagaaagcuccc

SEQ ID NO: 666654 - RNA, 19 nt, Artificial Sequence
  Description of Artificial Sequence: Synthetic oligonucleotide
  Sense strand starting at position 2268 of SEQ ID NO: 585775
guccucaaugguggaaagu

SEQ ID NO: 666655 - RNA, 19 nt, Artificial Sequence
  Description of Artificial Sequence: Synthetic oligonucleotide
  Antisense strand to SEQ ID NO: 666654
acuuuccaccauugaggac

SEQ ID NO: 666656 - RNA, 19 nt, Artificial Sequence
  Description of Artificial Sequence: Synthetic oligonucleotide
  Sense strand starting at position 2349 of SEQ ID NO: 585775
ugaggaaggugcccucaua

SEQ ID NO: 666657 - RNA, 19 nt, Artificial Sequence
  Description of Artificial Sequence: Synthetic oligonucleotide
  Antisense strand to SEQ ID NO: 666656
uaugagggcaccuuccuca

SEQ ID NO: 666658 - RNA, 19 nt, Artificial Sequence
  Description of Artificial Sequence: Synthetic oligonucleotide
  Sense strand starting at position 2397 of SEQ ID NO: 585775
uuaguauugcauugaggau

SEQ ID NO: 666659 - RNA, 19 nt, Artificial Sequence
  Description of Artificial Sequence: Synthetic oligonucleotide
  Antisense strand to SEQ ID NO: 666658
auccucaaugcaauacuaa

SEQ ID NO: 666660 - RNA, 19 nt, Artificial Sequence
  Description of Artificial Sequence: Synthetic oligonucleotide
  Sense strand starting at position 2522 of SEQ ID NO: 585775
cccaguggccuccaaaguu

SEQ ID NO: 666661 - RNA, 19 nt, Artificial Sequence
  Description of Artificial Sequence: Synthetic oligonucleotide
  Antisense strand to SEQ ID NO: 666660
aacuuuggaggccacuggg

SEQ ID NO: 666662 - RNA, 19 nt, Artificial Sequence
  Description of Artificial Sequence: Synthetic oligonucleotide
  Sense strand starting at position 2646 of SEQ ID NO: 585775
cagcuaugagcccgugaaa

SEQ ID NO: 666663 - RNA, 19 nt, Artificial Sequence
  Description of Artificial Sequence: Synthetic oligonucleotide
  Antisense strand to SEQ ID NO: 666662
uuucacgggcucauagcug

SEQ ID NO: 666664 - RNA, 19 nt, Artificial Sequence
  Description of Artificial Sequence: Synthetic oligonucleotide
  Sense strand starting at position 2649 of SEQ ID NO: 585775
cuaugagcccgugaaauca

SEQ ID NO: 666665 - RNA, 19 nt, Artificial Sequence
  Description of Artificial Sequence: Synthetic oligonucleotide
  Antisense strand to SEQ ID NO: 666664
ugauuucacgggcucauag

SEQ ID NO: 666666 - RNA, 19 nt, Artificial Sequence
  Description of Artificial Sequence: Synthetic oligonucleotide
  Sense strand starting at position 2658 of SEQ ID NO: 585775
cgugaaaucaaauagguua

SEQ ID NO: 666667 - RNA, 19 nt, Artificial Sequence
  Description of Artificial Sequence: Synthetic oligonucleotide
  Antisense strand to SEQ ID NO: 666666
uaaccuauuugauuucacg

SEQ ID NO: 666668 - RNA, 19 nt, Artificial Sequence
  Description of Artificial Sequence: Synthetic oligonucleotide
  Sense strand starting at position 2755 of SEQ ID NO: 585775
aggaguaucuggucccaag

SEQ ID NO: 666669 - RNA, 19 nt, Artificial Sequence
  Description of Artificial Sequence: Synthetic oligonucleotide
  Antisense strand to SEQ ID NO: 666668
cuugggaccagauacuccu

SEQ ID NO: 666670 - RNA, 19 nt, Artificial Sequence
  Description of Artificial Sequence: Synthetic oligonucleotide
  Sense strand starting at position 2956 of SEQ ID NO: 585775
uaggcucucccaggauaga

SEQ ID NO: 666671 - RNA, 19 nt, Artificial Sequence
  Description of Artificial Sequence: Synthetic oligonucleotide
  Antisense strand to SEQ ID NO: 666670
ucuauccugggagagccua

SEQ ID NO: 666672 - RNA, 19 nt, Artificial Sequence
  Description of Artificial Sequence: Synthetic oligonucleotide
  Sense strand starting at position 3092 of SEQ ID NO: 585775
uaaacauugcccuagugag

SEQ ID NO: 666673 - RNA, 19 nt, Artificial Sequence
  Description of Artificial Sequence: Synthetic oligonucleotide
  Antisense strand to SEQ ID NO: 666672
cucacuagggcaauguuua

SEQ ID NO: 666674 - RNA, 19 nt, Artificial Sequence
  Description of Artificial Sequence: Synthetic oligonucleotide
  Sense strand starting at position 3125 of SEQ ID NO: 585775
gccucaccucagugacaau

SEQ ID NO: 666675 - RNA, 19 nt, Artificial Sequence
  Description of Artificial Sequence: Synthetic oligonucleotide
  Antisense strand to SEQ ID NO: 666674
auugucacugaggugaggc

SEQ ID NO: 666676 - RNA, 19 nt, Artificial Sequence
  Description of Artificial Sequence: Synthetic oligonucleotide
  Sense strand starting at position 3310 of SEQ ID NO: 585775
gugggaugguggccaaaga

SEQ ID NO: 666677 - RNA, 19 nt, Artificial Sequence
  Description of Artificial Sequence: Synthetic oligonucleotide
  Antisense strand to SEQ ID NO: 666676
ucuuuggccaccaucccac

SEQ ID NO: 666678 - RNA, 19 nt, Artificial Sequence
  Description of Artificial Sequence: Synthetic oligonucleotide
  Sense strand starting at position 3323 of SEQ ID NO: 585775
caaagagugcugcaccaga

SEQ ID NO: 666679 - RNA, 19 nt, Artificial Sequence
  Description of Artificial Sequence: Synthetic oligonucleotide
  Antisense strand to SEQ ID NO: 666678
ucuggugcagcacucuuug

SEQ ID NO: 666680 - RNA, 19 nt, Artificial Sequence
  Description of Artificial Sequence: Synthetic oligonucleotide
  Sense strand starting at position 3406 of SEQ ID NO: 585775
uguccugaguccucccuua

SEQ ID NO: 666681 - RNA, 19 nt, Artificial Sequence
  Description of Artificial Sequence: Synthetic oligonucleotide
  Antisense strand to SEQ ID NO: 666680
uaagggaggacucaggaca

SEQ ID NO: 666682 - RNA, 19 nt, Artificial Sequence
  Description of Artificial Sequence: Synthetic oligonucleotide
  Sense strand starting at position 3490 of SEQ ID NO: 585775
cagaaaugccuuuggguuc

SEQ ID NO: 666683 - RNA, 19 nt, Artificial Sequence
  Description of Artificial Sequence: Synthetic oligonucleotide
  Antisense strand to SEQ ID NO: 666682
gaacccaaaggcauuucug

SEQ ID NO: 666684 - RNA, 19 nt, Artificial Sequence
  Description of Artificial Sequence: Synthetic oligonucleotide
  Sense strand starting at position 3758 of SEQ ID NO: 585775
caacgcuuugcucagagau

SEQ ID NO: 666685 - RNA, 19 nt, Artificial Sequence
  Description of Artificial Sequence: Synthetic oligonucleotide
  Antisense strand to SEQ ID NO: 666684
aucucugagcaaagcguug

SEQ ID NO: 666686 - RNA, 19 nt, Artificial Sequence
  Description of Artificial Sequence: Synthetic oligonucleotide
  Sense strand starting at position 3797 of SEQ ID NO: 585775
guuuauugccuuuaaguuc

SEQ ID NO: 666687 - RNA, 19 nt, Artificial Sequence
  Description of Artificial Sequence: Synthetic oligonucleotide
  Antisense strand to SEQ ID NO: 666686
gaacuuaaaggcaauaaac

SEQ ID NO: 666688 - RNA, 19 nt, Artificial Sequence
  Description of Artificial Sequence: Synthetic oligonucleotide
  Sense strand starting at position 3946 of SEQ ID NO: 585775
accgcauucugaucaagac

SEQ ID NO: 666689 - RNA, 19 nt, Artificial Sequence
  Description of Artificial Sequence: Synthetic oligonucleotide
  Antisense strand to SEQ ID NO: 666688
gucuugaucagaaugcggu

SEQ ID NO: 666690 - RNA, 19 nt, Artificial Sequence
  Description of Artificial Sequence: Synthetic oligonucleotide
  Sense strand starting at position 10 of SEQ ID NO: 585776
gugcccuuauuauuacaua

SEQ ID NO: 666691 - RNA, 19 nt, Artificial Sequence
  Description of Artificial Sequence: Synthetic oligonucleotide
  Antisense strand to SEQ ID NO: 666690
uauguaauaauaagggcac

SEQ ID NO: 666692 - RNA, 19 nt, Artificial Sequence
  Description of Artificial Sequence: Synthetic oligonucleotide
  Sense strand starting at position 35 of SEQ ID NO: 585776
aaagaauguugguucuauu

SEQ ID NO: 666693 - RNA, 19 nt, Artificial Sequence
  Description of Artificial Sequence: Synthetic oligonucleotide
  Antisense strand to SEQ ID NO: 666692
aauagaaccaacauucuuu

SEQ ID NO: 666694 - RNA, 19 nt, Artificial Sequence
  Description of Artificial Sequence: Synthetic oligonucleotide
  Sense strand starting at position 123 of SEQ ID NO: 585776
uggaauuggccuuaacuua

SEQ ID NO: 666695 - RNA, 19 nt, Artificial Sequence
  Description of Artificial Sequence: Synthetic oligonucleotide
  Antisense strand to SEQ ID NO: 666694
uaaguuaaggccaauucca

SEQ ID NO: 666696 - RNA, 19 nt, Artificial Sequence
  Description of Artificial Sequence: Synthetic oligonucleotide
  Sense strand starting at position 149 of SEQ ID NO: 585776
uaguuuacauagucgagua

SEQ ID NO: 666697 - RNA, 19 nt, Artificial Sequence
  Description of Artificial Sequence: Synthetic oligonucleotide
  Antisense strand to SEQ ID NO: 666696
uacucgacuauguaaacua

SEQ ID NO: 666698 - RNA, 19 nt, Artificial Sequence
  Description of Artificial Sequence: Synthetic oligonucleotide
  Sense strand starting at position 150 of SEQ ID NO: 585776
aguuuacauagucgaguau

SEQ ID NO: 666699 - RNA, 19 nt, Artificial Sequence
  Description of Artificial Sequence: Synthetic oligonucleotide
  Antisense strand to SEQ ID NO: 666698
auacucgacuauguaaacu

SEQ ID NO: 666700 - RNA, 19 nt, Artificial Sequence
  Description of Artificial Sequence: Synthetic oligonucleotide
  Sense strand starting at position 159 of SEQ ID NO: 585776
agucgaguaugaccaaagu

SEQ ID NO: 666701 - RNA, 19 nt, Artificial Sequence
  Description of Artificial Sequence: Synthetic oligonucleotide
  Antisense strand to SEQ ID NO: 666700
acuuuggucauacucgacu

SEQ ID NO: 666702 - RNA, 19 nt, Artificial Sequence
  Description of Artificial Sequence: Synthetic oligonucleotide
  Sense strand starting at position 206 of SEQ ID NO: 585776
ggaugcaauuacucagaua

SEQ ID NO: 666703 - RNA, 19 nt, Artificial Sequence
  Description of Artificial Sequence: Synthetic oligonucleotide
  Antisense strand to SEQ ID NO: 666702
uaucugaguaauugcaucc

SEQ ID NO: 666704 - RNA, 19 nt, Artificial Sequence
  Description of Artificial Sequence: Synthetic oligonucleotide
  Sense strand starting at position 247 of SEQ ID NO: 585776
gccaucuaugcugauaaca

SEQ ID NO: 666705 - RNA, 19 nt, Artificial Sequence
  Description of Artificial Sequence: Synthetic oligonucleotide
  Antisense strand to SEQ ID NO: 666704
uguuaucagcauagauggc

SEQ ID NO: 666706 - RNA, 19 nt, Artificial Sequence
  Description of Artificial Sequence: Synthetic oligonucleotide
  Sense strand starting at position 263 of SEQ ID NO: 585776
acagcagucacugguguua

SEQ ID NO: 666707 - RNA, 19 nt, Artificial Sequence
  Description of Artificial Sequence: Synthetic oligonucleotide
  Antisense strand to SEQ ID NO: 666706
uaacaccagugacugcugu

SEQ ID NO: 666708 - RNA, 19 nt, Artificial Sequence
  Description of Artificial Sequence: Synthetic oligonucleotide
  Sense strand starting at position 353 of SEQ ID NO: 585776
aucagaucucaucgcauca

SEQ ID NO: 666709 - RNA, 19 nt, Artificial Sequence
  Description of Artificial Sequence: Synthetic oligonucleotide
  Antisense strand to SEQ ID NO: 666708
ugaugcgaugagaucugau

SEQ ID NO: 666710 - RNA, 19 nt, Artificial Sequence
  Description of Artificial Sequence: Synthetic oligonucleotide
  Sense strand starting at position 411 of SEQ ID NO: 585776
gcugucauuaggcacgaga

SEQ ID NO: 666711 - RNA, 19 nt, Artificial Sequence
  Description of Artificial Sequence: Synthetic oligonucleotide
  Antisense strand to SEQ ID NO: 666710
ucucgugccuaaugacagc

SEQ ID NO: 666712 - RNA, 19 nt, Artificial Sequence
  Description of Artificial Sequence: Synthetic oligonucleotide
  Sense strand starting at position 481 of SEQ ID NO: 585776
aucugaguauuccugacag

SEQ ID NO: 666713 - RNA, 19 nt, Artificial Sequence
  Description of Artificial Sequence: Synthetic oligonucleotide
  Antisense strand to SEQ ID NO: 666712
cugucaggaauacucagau

SEQ ID NO: 666714 - RNA, 19 nt, Artificial Sequence
  Description of Artificial Sequence: Synthetic oligonucleotide
  Sense strand starting at position 483 of SEQ ID NO: 585776
cugaguauuccugacagca

SEQ ID NO: 666715 - RNA, 19 nt, Artificial Sequence
  Description of Artificial Sequence: Synthetic oligonucleotide
  Antisense strand to SEQ ID NO: 666714
ugcugucaggaauacucag

SEQ ID NO: 666716 - RNA, 19 nt, Artificial Sequence
  Description of Artificial Sequence: Synthetic oligonucleotide
  Sense strand starting at position 496 of SEQ ID NO: 585776
acagcaugugaacauuaau

SEQ ID NO: 666717 - RNA, 19 nt, Artificial Sequence
  Description of Artificial Sequence: Synthetic oligonucleotide
  Antisense strand to SEQ ID NO: 666716
auuaauguucacaugcugu

SEQ ID NO: 666718 - RNA, 19 nt, Artificial Sequence
  Description of Artificial Sequence: Synthetic oligonucleotide
  Sense strand starting at position 499 of SEQ ID NO: 585776
gcaugugaacauuaauuau

SEQ ID NO: 666719 - RNA, 19 nt, Artificial Sequence
  Description of Artificial Sequence: Synthetic oligonucleotide
  Antisense strand to SEQ ID NO: 666718
auaauuaauguucacaugc

SEQ ID NO: 666720 - RNA, 19 nt, Artificial Sequence
  Description of Artificial Sequence: Synthetic oligonucleotide
  Sense strand starting at position 599 of SEQ ID NO: 585776
gccaauuuguaguuaaagu

SEQ ID NO: 666721 - RNA, 19 nt, Artificial Sequence
  Description of Artificial Sequence: Synthetic oligonucleotide
  Antisense strand to SEQ ID NO: 666720
acuuuaacuacaaauuggc

SEQ ID NO: 666722 - RNA, 19 nt, Artificial Sequence
  Description of Artificial Sequence: Synthetic oligonucleotide
  Sense strand starting at position 619 of SEQ ID NO: 585776
uccucuuugccuugaagac

SEQ ID NO: 666723 - RNA, 19 nt, Artificial Sequence
  Description of Artificial Sequence: Synthetic oligonucleotide
  Antisense strand to SEQ ID NO: 666722
gucuucaaggcaaagagga

SEQ ID NO: 666724 - RNA, 19 nt, Artificial Sequence
  Description of Artificial Sequence: Synthetic oligonucleotide
  Sense strand starting at position 620 of SEQ ID NO: 585776
ccucuuugccuugaagaca

SEQ ID NO: 666725 - RNA, 19 nt, Artificial Sequence
  Description of Artificial Sequence: Synthetic oligonucleotide
  Antisense strand to SEQ ID NO: 666724
ugucuucaaggcaaagagg

SEQ ID NO: 666726 - RNA, 19 nt, Artificial Sequence
  Description of Artificial Sequence: Synthetic oligonucleotide
  Sense strand starting at position 1306 of SEQ ID NO: 585776
ccgacuuuggagcgacaaa

SEQ ID NO: 666727 - RNA, 19 nt, Artificial Sequence
  Description of Artificial Sequence: Synthetic oligonucleotide
  Antisense strand to SEQ ID NO: 666726
uuugucgcuccaaagucgg

SEQ ID NO: 666728 - RNA, 19 nt, Artificial Sequence
  Description of Artificial Sequence: Synthetic oligonucleotide
  Sense strand starting at position 1633 of SEQ ID NO: 585776
gcuggccuguuuccagaaa

SEQ ID NO: 666729 - RNA, 19 nt, Artificial Sequence
  Description of Artificial Sequence: Synthetic oligonucleotide
  Antisense strand to SEQ ID NO: 666728
uuucuggaaacaggccagc

SEQ ID NO: 666730 - RNA, 19 nt, Artificial Sequence
  Description of Artificial Sequence: Synthetic oligonucleotide
  Sense strand starting at position 2167 of SEQ ID NO: 585776
ccgacaaagcaguaauauc

SEQ ID NO: 666731 - RNA, 19 nt, Artificial Sequence
  Description of Artificial Sequence: Synthetic oligonucleotide
  Antisense strand to SEQ ID NO: 666730
gauauuacugcuuugucgg

SEQ ID NO: 666732 - RNA, 19 nt, Artificial Sequence
  Description of Artificial Sequence: Synthetic oligonucleotide
  Sense strand starting at position 2241 of SEQ ID NO: 585776
gugggcuggcaugaauaga

SEQ ID NO: 666733 - RNA, 19 nt, Artificial Sequence
  Description of Artificial Sequence: Synthetic oligonucleotide
  Antisense strand to SEQ ID NO: 666732
ucuauucaugccagcccac

SEQ ID NO: 666734 - RNA, 19 nt, Artificial Sequence
  Description of Artificial Sequence: Synthetic oligonucleotide
  Sense strand starting at position 2361 of SEQ ID NO: 585776
accuuacucccgcaagagu

SEQ ID NO: 666735 - RNA, 19 nt, Artificial Sequence
  Description of Artificial Sequence: Synthetic oligonucleotide
  Antisense strand to SEQ ID NO: 666734
acucuugcgggaguaaggu

SEQ ID NO: 666736 - RNA, 19 nt, Artificial Sequence
  Description of Artificial Sequence: Synthetic oligonucleotide
  Sense strand starting at position 2370 of SEQ ID NO: 585776
ccgcaagaguggccuuaau

SEQ ID NO: 666737 - RNA, 19 nt, Artificial Sequence
  Description of Artificial Sequence: Synthetic oligonucleotide
  Antisense strand to SEQ ID NO: 666736
auuaaggccacucuugcgg

SEQ ID NO: 666738 - RNA, 19 nt, Artificial Sequence
  Description of Artificial Sequence: Synthetic oligonucleotide
  Sense strand starting at position 2763 of SEQ ID NO: 585776
gggauuggagacuguuguu

SEQ ID NO: 666739 - RNA, 19 nt, Artificial Sequence
  Description of Artificial Sequence: Synthetic oligonucleotide
  Antisense strand to SEQ ID NO: 666738
aacaacagucuccaauccc

SEQ ID NO: 666740 - RNA, 19 nt, Artificial Sequence
  Description of Artificial Sequence: Synthetic oligonucleotide
  Sense strand starting at position 2768 of SEQ ID NO: 585776
uggagacuguuguucuaag

SEQ ID NO: 666741 - RNA, 19 nt, Artificial Sequence
  Description of Artificial Sequence: Synthetic oligonucleotide
  Antisense strand to SEQ ID NO: 666740
cuuagaacaacagucucca

SEQ ID NO: 666742 - RNA, 19 nt, Artificial Sequence
  Description of Artificial Sequence: Synthetic oligonucleotide
  Sense strand starting at position 2769 of SEQ ID NO: 585776
ggagacuguuguucuaagu

SEQ ID NO: 666743 - RNA, 19 nt, Artificial Sequence
  Description of Artificial Sequence: Synthetic oligonucleotide
  Antisense strand to SEQ ID NO: 666742
acuuagaacaacagucucc

SEQ ID NO: 666744 - RNA, 19 nt, Artificial Sequence
  Description of Artificial Sequence: Synthetic oligonucleotide
  Sense strand starting at position 2957 of SEQ ID NO: 585776
uacugcuaaggugauagau

SEQ ID NO: 666745 - RNA, 19 nt, Artificial Sequence
  Description of Artificial Sequence: Synthetic oligonucleotide
  Antisense strand to SEQ ID NO: 666744
aucuaucaccuuagcagua

SEQ ID NO: 666746 - RNA, 19 nt, Artificial Sequence
  Description of Artificial Sequence: Synthetic oligonucleotide
  Sense strand starting at position 3423 of SEQ ID NO: 585776
caucauugagccguguguu

SEQ ID NO: 666747 - RNA, 19 nt, Artificial Sequence
  Description of Artificial Sequence: Synthetic oligonucleotide
  Antisense strand to SEQ ID NO: 666746
aacacacggcucaaugaug

SEQ ID NO: 666748 - RNA, 19 nt, Artificial Sequence
  Description of Artificial Sequence: Synthetic oligonucleotide
  Sense strand starting at position 3450 of SEQ ID NO: 585776
uccaguucucuccaggcau

SEQ ID NO: 666749 - RNA, 19 nt, Artificial Sequence
  Description of Artificial Sequence: Synthetic oligonucleotide
  Antisense strand to SEQ ID NO: 666748
augccuggagagaacugga

SEQ ID NO: 666750 - RNA, 19 nt, Artificial Sequence
  Description of Artificial Sequence: Synthetic oligonucleotide
  Sense strand starting at position 3494 of SEQ ID NO: 585776
agguuagccaaguaaguau

SEQ ID NO: 666751 - RNA, 19 nt, Artificial Sequence
  Description of Artificial Sequence: Synthetic oligonucleotide
  Antisense strand to SEQ ID NO: 666750
auacuuacuuggcuaaccu

SEQ ID NO: 666752 - RNA, 19 nt, Artificial Sequence
  Description of Artificial Sequence: Synthetic oligonucleotide
  Sense strand starting at position 3586 of SEQ ID NO: 585776
agauacuagccagguguuu

SEQ ID NO: 666753 - RNA, 19 nt, Artificial Sequence
  Description of Artificial Sequence: Synthetic oligonucleotide
  Antisense strand to SEQ ID NO: 666752
aaacaccuggcuaguaucu

SEQ ID NO: 666754 - RNA, 19 nt, Artificial Sequence
  Description of Artificial Sequence: Synthetic oligonucleotide
  Sense strand starting at position 3692 of SEQ ID NO: 585776
ccgcaugaacccgauaacu

SEQ ID NO: 666755 - RNA, 19 nt, Artificial Sequence
  Description of Artificial Sequence: Synthetic oligonucleotide
  Antisense strand to SEQ ID NO: 666754
aguuaucggguucaugcgg

SEQ ID NO: 666756 - RNA, 19 nt, Artificial Sequence
  Description of Artificial Sequence: Synthetic oligonucleotide
  Sense strand starting at position 3694 of SEQ ID NO: 585776
gcaugaacccgauaacuug

SEQ ID NO: 666757 - RNA, 19 nt, Artificial Sequence
  Description of Artificial Sequence: Synthetic oligonucleotide
  Antisense strand to SEQ ID NO: 666756
caaguuaucggguucaugc

SEQ ID NO: 666758 - RNA, 19 nt, Artificial Sequence
  Description of Artificial Sequence: Synthetic oligonucleotide
  Sense strand starting at position 3808 of SEQ ID NO: 585776
cuaguuguggcuuaauuag

SEQ ID NO: 666759 - RNA, 19 nt, Artificial Sequence
  Description of Artificial Sequence: Synthetic oligonucleotide
  Antisense strand to SEQ ID NO: 666758
cuaauuaagccacaacuag

SEQ ID NO: 666760 - RNA, 19 nt, Artificial Sequence
  Description of Artificial Sequence: Synthetic oligonucleotide
  Sense strand starting at position 3814 of SEQ ID NO: 585776
guggcuuaauuagucuuaa

SEQ ID NO: 666761 - RNA, 19 nt, Artificial Sequence
  Description of Artificial Sequence: Synthetic oligonucleotide
  Antisense strand to SEQ ID NO: 666760
uuaagacuaauuaagccac

SEQ ID NO: 666762 - RNA, 19 nt, Artificial Sequence
  Description of Artificial Sequence: Synthetic oligonucleotide
  Sense strand starting at position 3832 of SEQ ID NO: 585776
agugauauaaauugcgaau

SEQ ID NO: 666763 - RNA, 19 nt, Artificial Sequence
  Description of Artificial Sequence: Synthetic oligonucleotide
  Antisense strand to SEQ ID NO: 666762
auucgcaauuuauaucacu

SEQ ID NO: 666764 - RNA, 19 nt, Artificial Sequence
  Description of Artificial Sequence: Synthetic oligonucleotide
  Sense strand starting at position 3917 of SEQ ID NO: 585776
uguagucaacuuuaaugau

SEQ ID NO: 666765 - RNA, 19 nt, Artificial Sequence
  Description of Artificial Sequence: Synthetic oligonucleotide
  Antisense strand to SEQ ID NO: 666764
aucauuaaaguugacuaca

SEQ ID NO: 666766 - RNA, 19 nt, Artificial Sequence
  Description of Artificial Sequence: Synthetic oligonucleotide
  Sense strand starting at position 3940 of SEQ ID NO: 585776
ccuuuauuguuucugaguc

SEQ ID NO: 666767 - RNA, 19 nt, Artificial Sequence
  Description of Artificial Sequence: Synthetic oligonucleotide
  Antisense strand to SEQ ID NO: 666766
gacucagaaacaauaaagg

SEQ ID NO: 666768 - RNA, 19 nt, Artificial Sequence
  Description of Artificial Sequence: Synthetic oligonucleotide
  Sense strand starting at position 3944 of SEQ ID NO: 585776
uauuguuucugagucguag

SEQ ID NO: 666769 - RNA, 19 nt, Artificial Sequence
  Description of Artificial Sequence: Synthetic oligonucleotide
  Antisense strand to SEQ ID NO: 666768
cuacgacucagaaacaaua

SEQ ID NO: 666770 - RNA, 19 nt, Artificial Sequence
  Description of Artificial Sequence: Synthetic oligonucleotide
  Sense strand starting at position 248 of SEQ ID NO: 585777
ccuguagcaucaccaguaa

SEQ ID NO: 666771 - RNA, 19 nt, Artificial Sequence
  Description of Artificial Sequence: Synthetic oligonucleotide
  Antisense strand to SEQ ID NO: 666770
uuacuggugaugcuacagg

SEQ ID NO: 666772 - RNA, 19 nt, Artificial Sequence
  Description of Artificial Sequence: Synthetic oligonucleotide
  Sense strand starting at position 259 of SEQ ID NO: 585777
accaguaacugagcaaugu

SEQ ID NO: 666773 - RNA, 19 nt, Artificial Sequence
  Description of Artificial Sequence: Synthetic oligonucleotide
  Antisense strand to SEQ ID NO: 666772
acauugcucaguuacuggu

SEQ ID NO: 666774 - RNA, 19 nt, Artificial Sequence
  Description of Artificial Sequence: Synthetic oligonucleotide
  Sense strand starting at position 260 of SEQ ID NO: 585777
ccaguaacugagcaauguu

SEQ ID NO: 666775 - RNA, 19 nt, Artificial Sequence
  Description of Artificial Sequence: Synthetic oligonucleotide
  Antisense strand to SEQ ID NO: 666774
aacauugcucaguuacugg

SEQ ID NO: 666776 - RNA, 19 nt, Artificial Sequence
  Description of Artificial Sequence: Synthetic oligonucleotide
  Sense strand starting at position 332 of SEQ ID NO: 585777
auugaauugugcuucucaa

SEQ ID NO: 666777 - RNA, 19 nt, Artificial Sequence
  Description of Artificial Sequence: Synthetic oligonucleotide
  Antisense strand to SEQ ID NO: 666776
uugagaagcacaauucaau

SEQ ID NO: 666778 - RNA, 19 nt, Artificial Sequence
  Description of Artificial Sequence: Synthetic oligonucleotide
  Sense strand starting at position 392 of SEQ ID NO: 585777
uuuaaagacugguuuaaug

SEQ ID NO: 666779 - RNA, 19 nt, Artificial Sequence
  Description of Artificial Sequence: Synthetic oligonucleotide
  Antisense strand to SEQ ID NO: 666778
cauuaaaccagucuuuaaa

SEQ ID NO: 666780 - RNA, 19 nt, Artificial Sequence
  Description of Artificial Sequence: Synthetic oligonucleotide
  Sense strand starting at position 491 of SEQ ID NO: 585777
uguuuaauauaucugagca

SEQ ID NO: 666781 - RNA, 19 nt, Artificial Sequence
  Description of Artificial Sequence: Synthetic oligonucleotide
  Antisense strand to SEQ ID NO: 666780
ugcucagauauauuaaaca

SEQ ID NO: 666782 - RNA, 19 nt, Artificial Sequence
  Description of Artificial Sequence: Synthetic oligonucleotide
  Sense strand starting at position 501 of SEQ ID NO: 585777
aucugagcagccuaacaua

SEQ ID NO: 666783 - RNA, 19 nt, Artificial Sequence
  Description of Artificial Sequence: Synthetic oligonucleotide
  Antisense strand to SEQ ID NO: 666782
uauguuaggcugcucagau

SEQ ID NO: 666784 - RNA, 19 nt, Artificial Sequence
  Description of Artificial Sequence: Synthetic oligonucleotide
  Sense strand starting at position 515 of SEQ ID NO: 585777
acauauaaaugggaguuaa

SEQ ID NO: 666785 - RNA, 19 nt, Artificial Sequence
  Description of Artificial Sequence: Synthetic oligonucleotide
  Antisense strand to SEQ ID NO: 666784
uuaacucccauuuauaugu

SEQ ID NO: 666786 - RNA, 19 nt, Artificial Sequence
  Description of Artificial Sequence: Synthetic oligonucleotide
  Sense strand starting at position 779 of SEQ ID NO: 585777
uuggaugccuuggcuuaau

SEQ ID NO: 666787 - RNA, 19 nt, Artificial Sequence
  Description of Artificial Sequence: Synthetic oligonucleotide
  Antisense strand to SEQ ID NO: 666786
auuaagccaaggcauccaa

SEQ ID NO: 666788 - RNA, 19 nt, Artificial Sequence
  Description of Artificial Sequence: Synthetic oligonucleotide
  Sense strand starting at position 804 of SEQ ID NO: 585777
ugcaguaagccuggaaaug

SEQ ID NO: 666789 - RNA, 19 nt, Artificial Sequence
  Description of Artificial Sequence: Synthetic oligonucleotide
  Antisense strand to SEQ ID NO: 666788
cauuuccaggcuuacugca

SEQ ID NO: 666790 - RNA, 19 nt, Artificial Sequence
  Description of Artificial Sequence: Synthetic oligonucleotide
  Sense strand starting at position 805 of SEQ ID NO: 585777
gcaguaagccuggaaaugu

SEQ ID NO: 666791 - RNA, 19 nt, Artificial Sequence
  Description of Artificial Sequence: Synthetic oligonucleotide
  Antisense strand to SEQ ID NO: 666790
acauuuccaggcuuacugc

SEQ ID NO: 666792 - RNA, 19 nt, Artificial Sequence
  Description of Artificial Sequence: Synthetic oligonucleotide
  Sense strand starting at position 866 of SEQ ID NO: 585777
gugcccuuauuauuacaua

SEQ ID NO: 666793 - RNA, 19 nt, Artificial Sequence
  Description of Artificial Sequence: Synthetic oligonucleotide
  Antisense strand to SEQ ID NO: 666792
uauguaauaauaagggcac

SEQ ID NO: 666794 - RNA, 19 nt, Artificial Sequence
  Description of Artificial Sequence: Synthetic oligonucleotide
  Sense strand starting at position 891 of SEQ ID NO: 585777
aaagaauguugguucuauu

SEQ ID NO: 666795 - RNA, 19 nt, Artificial Sequence
  Description of Artificial Sequence: Synthetic oligonucleotide
  Antisense strand to SEQ ID NO: 666794
aauagaaccaacauucuuu

SEQ ID NO: 666796 - RNA, 19 nt, Artificial Sequence
  Description of Artificial Sequence: Synthetic oligonucleotide
  Sense strand starting at position 979 of SEQ ID NO: 585777
uggaauuggccuuaacuua

SEQ ID NO: 666797 - RNA, 19 nt, Artificial Sequence
  Description of Artificial Sequence: Synthetic oligonucleotide
  Antisense strand to SEQ ID NO: 666796
uaaguuaaggccaauucca

SEQ ID NO: 666798 - RNA, 19 nt, Artificial Sequence
  Description of Artificial Sequence: Synthetic oligonucleotide
  Sense strand starting at position 1005 of SEQ ID NO: 585777
uaguuuacauagucgagua

SEQ ID NO: 666799 - RNA, 19 nt, Artificial Sequence
  Description of Artificial Sequence: Synthetic oligonucleotide
  Antisense strand to SEQ ID NO: 666798
uacucgacuauguaaacua

SEQ ID NO: 666800 - RNA, 19 nt, Artificial Sequence
  Description of Artificial Sequence: Synthetic oligonucleotide
  Sense strand starting at position 1006 of SEQ ID NO: 585777
aguuuacauagucgaguau

SEQ ID NO: 666801 - RNA, 19 nt, Artificial Sequence
  Description of Artificial Sequence: Synthetic oligonucleotide
  Antisense strand to SEQ ID NO: 666800
auacucgacuauguaaacu

SEQ ID NO: 666802 - RNA, 19 nt, Artificial Sequence
  Description of Artificial Sequence: Synthetic oligonucleotide
  Sense strand starting at position 1015 of SEQ ID NO: 585777
agucgaguaugaccaaagu

SEQ ID NO: 666803 - RNA, 19 nt, Artificial Sequence
  Description of Artificial Sequence: Synthetic oligonucleotide
  Antisense strand to SEQ ID NO: 666802
acuuuggucauacucgacu

SEQ ID NO: 666804 - RNA, 19 nt, Artificial Sequence
  Description of Artificial Sequence: Synthetic oligonucleotide
  Sense strand starting at position 1062 of SEQ ID NO: 585777
ggaugcaauuacucagaua

SEQ ID NO: 666805 - RNA, 19 nt, Artificial Sequence
  Description of Artificial Sequence: Synthetic oligonucleotide
  Antisense strand to SEQ ID NO: 666804
uaucugaguaauugcaucc

SEQ ID NO: 666806 - RNA, 19 nt, Artificial Sequence
  Description of Artificial Sequence: Synthetic oligonucleotide
  Sense strand starting at position 1103 of SEQ ID NO: 585777
gccaucuaugcugauaaca

SEQ ID NO: 666807 - RNA, 19 nt, Artificial Sequence
  Description of Artificial Sequence: Synthetic oligonucleotide
  Antisense strand to SEQ ID NO: 666806
uguuaucagcauagauggc

SEQ ID NO: 666808 - RNA, 19 nt, Artificial Sequence
  Description of Artificial Sequence: Synthetic oligonucleotide
  Sense strand starting at position 1119 of SEQ ID NO: 585777
acagcagucacugguguua

SEQ ID NO: 666809 - RNA, 19 nt, Artificial Sequence
  Description of Artificial Sequence: Synthetic oligonucleotide
  Antisense strand to SEQ ID NO: 666808
uaacaccagugacugcugu

SEQ ID NO: 666810 - RNA, 19 nt, Artificial Sequence
  Description of Artificial Sequence: Synthetic oligonucleotide
  Sense strand starting at position 1209 of SEQ ID NO: 585777
aucagaucucaucgcauca

SEQ ID NO: 666811 - RNA, 19 nt, Artificial Sequence
  Description of Artificial Sequence: Synthetic oligonucleotide
  Antisense strand to SEQ ID NO: 666810
ugaugcgaugagaucugau

SEQ ID NO: 666812 - RNA, 19 nt, Artificial Sequence
  Description of Artificial Sequence: Synthetic oligonucleotide
  Sense strand starting at position 1267 of SEQ ID NO: 585777
gcugucauuaggcacgaga

SEQ ID NO: 666813 - RNA, 19 nt, Artificial Sequence
  Description of Artificial Sequence: Synthetic oligonucleotide
  Antisense strand to SEQ ID NO: 666812
ucucgugccuaaugacagc

SEQ ID NO: 666814 - RNA, 19 nt, Artificial Sequence
  Description of Artificial Sequence: Synthetic oligonucleotide
  Sense strand starting at position 1337 of SEQ ID NO: 585777
aucugaguauuccugacag

SEQ ID NO: 666815 - RNA, 19 nt, Artificial Sequence
  Description of Artificial Sequence: Synthetic oligonucleotide
  Antisense strand to SEQ ID NO: 666814
cugucaggaauacucagau

SEQ ID NO: 666816 - RNA, 19 nt, Artificial Sequence
  Description of Artificial Sequence: Synthetic oligonucleotide
  Sense strand starting at position 1339 of SEQ ID NO: 585777
cugaguauuccugacagca

SEQ ID NO: 666817 - RNA, 19 nt, Artificial Sequence
  Description of Artificial Sequence: Synthetic oligonucleotide
  Antisense strand to SEQ ID NO: 666816
ugcugucaggaauacucag

SEQ ID NO: 666818 - RNA, 19 nt, Artificial Sequence
  Description of Artificial Sequence: Synthetic oligonucleotide
  Sense strand starting at position 1352 of SEQ ID NO: 585777
acagcaugugaacauuaau

SEQ ID NO: 666819 - RNA, 19 nt, Artificial Sequence
  Description of Artificial Sequence: Synthetic oligonucleotide
  Antisense strand to SEQ ID NO: 666818
auuaauguucacaugcugu

SEQ ID NO: 666820 - RNA, 19 nt, Artificial Sequence
  Description of Artificial Sequence: Synthetic oligonucleotide
  Sense strand starting at position 1355 of SEQ ID NO: 585777
gcaugugaacauuaauuau

SEQ ID NO: 666821 - RNA, 19 nt, Artificial Sequence
  Description of Artificial Sequence: Synthetic oligonucleotide
  Antisense strand to SEQ ID NO: 666820
auaauuaauguucacaugc

SEQ ID NO: 666822 - RNA, 19 nt, Artificial Sequence
  Description of Artificial Sequence: Synthetic oligonucleotide
  Sense strand starting at position 1455 of SEQ ID NO: 585777
gccaauuuguaguuaaagu

SEQ ID NO: 666823 - RNA, 19 nt, Artificial Sequence
  Description of Artificial Sequence: Synthetic oligonucleotide
  Antisense strand to SEQ ID NO: 666822
acuuuaacuacaaauuggc

SEQ ID NO: 666824 - RNA, 19 nt, Artificial Sequence
  Description of Artificial Sequence: Synthetic oligonucleotide
  Sense strand starting at position 1475 of SEQ ID NO: 585777
uccucuuugccuugaagac

SEQ ID NO: 666825 - RNA, 19 nt, Artificial Sequence
  Description of Artificial Sequence: Synthetic oligonucleotide
  Antisense strand to SEQ ID NO: 666824
gucuucaaggcaaagagga

SEQ ID NO: 666826 - RNA, 19 nt, Artificial Sequence
  Description of Artificial Sequence: Synthetic oligonucleotide
  Sense strand starting at position 1476 of SEQ ID NO: 585777
ccucuuugccuugaagaca

SEQ ID NO: 666827 - RNA, 19 nt, Artificial Sequence
  Description of Artificial Sequence: Synthetic oligonucleotide
  Antisense strand to SEQ ID NO: 666826
ugucuucaaggcaaagagg

SEQ ID NO: 666828 - RNA, 19 nt, Artificial Sequence
  Description of Artificial Sequence: Synthetic oligonucleotide
  Sense strand starting at position 2162 of SEQ ID NO: 585777
ccgacuuuggagcgacaaa

SEQ ID NO: 666829 - RNA, 19 nt, Artificial Sequence
  Description of Artificial Sequence: Synthetic oligonucleotide
  Antisense strand to SEQ ID NO: 666828
uuugucgcuccaaagucgg

SEQ ID NO: 666830 - RNA, 19 nt, Artificial Sequence
  Description of Artificial Sequence: Synthetic oligonucleotide
  Sense strand starting at position 2489 of SEQ ID NO: 585777
gcuggccuguuuccagaaa

SEQ ID NO: 666831 - RNA, 19 nt, Artificial Sequence
  Description of Artificial Sequence: Synthetic oligonucleotide
  Antisense strand to SEQ ID NO: 666830
uuucuggaaacaggccagc

SEQ ID NO: 666832 - RNA, 19 nt, Artificial Sequence
  Description of Artificial Sequence: Synthetic oligonucleotide
  Sense strand starting at position 3023 of SEQ ID NO: 585777
ccgacaaagcaguaauauc

SEQ ID NO: 666833 - RNA, 19 nt, Artificial Sequence
  Description of Artificial Sequence: Synthetic oligonucleotide
  Antisense strand to SEQ ID NO: 666832
gauauuacugcuuugucgg

SEQ ID NO: 666834 - RNA, 19 nt, Artificial Sequence
  Description of Artificial Sequence: Synthetic oligonucleotide
  Sense strand starting at position 3097 of SEQ ID NO: 585777
gugggcuggcaugaauaga

SEQ ID NO: 666835 - RNA, 19 nt, Artificial Sequence
  Description of Artificial Sequence: Synthetic oligonucleotide
  Antisense strand to SEQ ID NO: 666834
ucuauucaugccagcccac

SEQ ID NO: 666836 - RNA, 19 nt, Artificial Sequence
  Description of Artificial Sequence: Synthetic oligonucleotide
  Sense strand starting at position 3217 of SEQ ID NO: 585777
accuuacucccgcaagagu

SEQ ID NO: 666837 - RNA, 19 nt, Artificial Sequence
  Description of Artificial Sequence: Synthetic oligonucleotide
  Antisense strand to SEQ ID NO: 666836
acucuugcgggaguaaggu

SEQ ID NO: 666838 - RNA, 19 nt, Artificial Sequence
  Description of Artificial Sequence: Synthetic oligonucleotide
  Sense strand starting at position 3226 of SEQ ID NO: 585777
ccgcaagaguggccuuaau

SEQ ID NO: 666839 - RNA, 19 nt, Artificial Sequence
  Description of Artificial Sequence: Synthetic oligonucleotide
  Antisense strand to SEQ ID NO: 666838
auuaaggccacucuugcgg

SEQ ID NO: 666840 - RNA, 19 nt, Artificial Sequence
  Description of Artificial Sequence: Synthetic oligonucleotide
  Sense strand starting at position 3541 of SEQ ID NO: 585777
gaaacugugguaugcguau

SEQ ID NO: 666841 - RNA, 19 nt, Artificial Sequence
  Description of Artificial Sequence: Synthetic oligonucleotide
  Antisense strand to SEQ ID NO: 666840
auacgcauaccacaguuuc

SEQ ID NO: 666842 - RNA, 19 nt, Artificial Sequence
  Description of Artificial Sequence: Synthetic oligonucleotide
  Sense strand starting at position 3619 of SEQ ID NO: 585777
gggauuggagacuguuguu

SEQ ID NO: 666843 - RNA, 19 nt, Artificial Sequence
  Description of Artificial Sequence: Synthetic oligonucleotide
  Antisense strand to SEQ ID NO: 666842
aacaacagucuccaauccc

SEQ ID NO: 666844 - RNA, 19 nt, Artificial Sequence
  Description of Artificial Sequence: Synthetic oligonucleotide
  Sense strand starting at position 3624 of SEQ ID NO: 585777
uggagacuguuguucuaag

SEQ ID NO: 666845 - RNA, 19 nt, Artificial Sequence
  Description of Artificial Sequence: Synthetic oligonucleotide
  Antisense strand to SEQ ID NO: 666844
cuuagaacaacagucucca

SEQ ID NO: 666846 - RNA, 19 nt, Artificial Sequence
  Description of Artificial Sequence: Synthetic oligonucleotide
  Sense strand starting at position 3625 of SEQ ID NO: 585777
ggagacuguuguucuaagu

SEQ ID NO: 666847 - RNA, 19 nt, Artificial Sequence
  Description of Artificial Sequence: Synthetic oligonucleotide
  Antisense strand to SEQ ID NO: 666846
acuuagaacaacagucucc

SEQ ID NO: 666848 - RNA, 19 nt, Artificial Sequence
  Description of Artificial Sequence: Synthetic oligonucleotide
  Sense strand starting at position 3813 of SEQ ID NO: 585777
uacugcuaaggugauagau

SEQ ID NO: 666849 - RNA, 19 nt, Artificial Sequence
  Description of Artificial Sequence: Synthetic oligonucleotide
  Antisense strand to SEQ ID NO: 666848
aucuaucaccuuagcagua

SEQ ID NO: 666850 - RNA, 19 nt, Artificial Sequence
  Description of Artificial Sequence: Synthetic oligonucleotide
  Sense strand starting at position 173 of SEQ ID NO: 585778
ucagcaaacgugugaguaa

SEQ ID NO: 666851 - RNA, 19 nt, Artificial Sequence
  Description of Artificial Sequence: Synthetic oligonucleotide
  Antisense strand to SEQ ID NO: 666850
uuacucacacguuugcuga

SEQ ID NO: 666852 - RNA, 19 nt, Artificial Sequence
  Description of Artificial Sequence: Synthetic oligonucleotide
  Sense strand starting at position 176 of SEQ ID NO: 585778
gcaaacgugugaguaacaa

SEQ ID NO: 666853 - RNA, 19 nt, Artificial Sequence
  Description of Artificial Sequence: Synthetic oligonucleotide
  Antisense strand to SEQ ID NO: 666852
uuguuacucacacguuugc

SEQ ID NO: 666854 - RNA, 19 nt, Artificial Sequence
  Description of Artificial Sequence: Synthetic oligonucleotide
  Sense strand starting at position 250 of SEQ ID NO: 585778
ggaccuacuucuuuagcuu

SEQ ID NO: 666855 - RNA, 19 nt, Artificial Sequence
  Description of Artificial Sequence: Synthetic oligonucleotide
  Antisense strand to SEQ ID NO: 666854
aagcuaaagaaguaggucc

SEQ ID NO: 666856 - RNA, 19 nt, Artificial Sequence
  Description of Artificial Sequence: Synthetic oligonucleotide
  Sense strand starting at position 509 of SEQ ID NO: 585778
ccuguagcaucaccaguaa

SEQ ID NO: 666857 - RNA, 19 nt, Artificial Sequence
  Description of Artificial Sequence: Synthetic oligonucleotide
  Antisense strand to SEQ ID NO: 666856
uuacuggugaugcuacagg

SEQ ID NO: 666858 - RNA, 19 nt, Artificial Sequence
  Description of Artificial Sequence: Synthetic oligonucleotide
  Sense strand starting at position 520 of SEQ ID NO: 585778
accaguaacugagcaaugu

SEQ ID NO: 666859 - RNA, 19 nt, Artificial Sequence
  Description of Artificial Sequence: Synthetic oligonucleotide
  Antisense strand to SEQ ID NO: 666858
acauugcucaguuacuggu

SEQ ID NO: 666860 - RNA, 19 nt, Artificial Sequence
  Description of Artificial Sequence: Synthetic oligonucleotide
  Sense strand starting at position 521 of SEQ ID NO: 585778
ccaguaacugagcaauguu

SEQ ID NO: 666861 - RNA, 19 nt, Artificial Sequence
  Description of Artificial Sequence: Synthetic oligonucleotide
  Antisense strand to SEQ ID NO: 666860
aacauugcucaguuacugg

SEQ ID NO: 666862 - RNA, 19 nt, Artificial Sequence
  Description of Artificial Sequence: Synthetic oligonucleotide
  Sense strand starting at position 593 of SEQ ID NO: 585778
auugaauugugcuucucaa

SEQ ID NO: 666863 - RNA, 19 nt, Artificial Sequence
  Description of Artificial Sequence: Synthetic oligonucleotide
  Antisense strand to SEQ ID NO: 666862
uugagaagcacaauucaau

SEQ ID NO: 666864 - RNA, 19 nt, Artificial Sequence
  Description of Artificial Sequence: Synthetic oligonucleotide
  Sense strand starting at position 653 of SEQ ID NO: 585778
uuuaaagacugguuuaaug

SEQ ID NO: 666865 - RNA, 19 nt, Artificial Sequence
  Description of Artificial Sequence: Synthetic oligonucleotide
  Antisense strand to SEQ ID NO: 666864
cauuaaaccagucuuuaaa

SEQ ID NO: 666866 - RNA, 19 nt, Artificial Sequence
  Description of Artificial Sequence: Synthetic oligonucleotide
  Sense strand starting at position 752 of SEQ ID NO: 585778
uguuuaauauaucugagca

SEQ ID NO: 666867 - RNA, 19 nt, Artificial Sequence
  Description of Artificial Sequence: Synthetic oligonucleotide
  Antisense strand to SEQ ID NO: 666866
ugcucagauauauuaaaca

SEQ ID NO: 666868 - RNA, 19 nt, Artificial Sequence
  Description of Artificial Sequence: Synthetic oligonucleotide
  Sense strand starting at position 762 of SEQ ID NO: 585778
aucugagcagccuaacaua

SEQ ID NO: 666869 - RNA, 19 nt, Artificial Sequence
  Description of Artificial Sequence: Synthetic oligonucleotide
  Antisense strand to SEQ ID NO: 666868
uauguuaggcugcucagau

SEQ ID NO: 666870 - RNA, 19 nt, Artificial Sequence
  Description of Artificial Sequence: Synthetic oligonucleotide
  Sense strand starting at position 776 of SEQ ID NO: 585778
acauauaaaugggaguuaa

SEQ ID NO: 666871 - RNA, 19 nt, Artificial Sequence
  Description of Artificial Sequence: Synthetic oligonucleotide
  Antisense strand to SEQ ID NO: 666870
uuaacucccauuuauaugu

SEQ ID NO: 666872 - RNA, 19 nt, Artificial Sequence
  Description of Artificial Sequence: Synthetic oligonucleotide
  Sense strand starting at position 1040 of SEQ ID NO: 585778
uuggaugccuuggcuuaau

SEQ ID NO: 666873 - RNA, 19 nt, Artificial Sequence
  Description of Artificial Sequence: Synthetic oligonucleotide
  Antisense strand to SEQ ID NO: 666872
auuaagccaaggcauccaa

SEQ ID NO: 666874 - RNA, 19 nt, Artificial Sequence
  Description of Artificial Sequence: Synthetic oligonucleotide
  Sense strand starting at position 1065 of SEQ ID NO: 585778
ugcaguaagccuggaaaug

SEQ ID NO: 666875 - RNA, 19 nt, Artificial Sequence
  Description of Artificial Sequence: Synthetic oligonucleotide
  Antisense strand to SEQ ID NO: 666874
cauuuccaggcuuacugca

SEQ ID NO: 666876 - RNA, 19 nt, Artificial Sequence
  Description of Artificial Sequence: Synthetic oligonucleotide
  Sense strand starting at position 1066 of SEQ ID NO: 585778
gcaguaagccuggaaaugu

SEQ ID NO: 666877 - RNA, 19 nt, Artificial Sequence
  Description of Artificial Sequence: Synthetic oligonucleotide
  Antisense strand to SEQ ID NO: 666876
acauuuccaggcuuacugc

SEQ ID NO: 666878 - RNA, 19 nt, Artificial Sequence
  Description of Artificial Sequence: Synthetic oligonucleotide
  Sense strand starting at position 1127 of SEQ ID NO: 585778
gugcccuuauuauuacaua

SEQ ID NO: 666879 - RNA, 19 nt, Artificial Sequence
  Description of Artificial Sequence: Synthetic oligonucleotide
  Antisense strand to SEQ ID NO: 666878
uauguaauaauaagggcac

SEQ ID NO: 666880 - RNA, 19 nt, Artificial Sequence
  Description of Artificial Sequence: Synthetic oligonucleotide
  Sense strand starting at position 1152 of SEQ ID NO: 585778
aaagaauguugguucuauu

SEQ ID NO: 666881 - RNA, 19 nt, Artificial Sequence
  Description of Artificial Sequence: Synthetic oligonucleotide
  Antisense strand to SEQ ID NO: 666880
aauagaaccaacauucuuu

SEQ ID NO: 666882 - RNA, 19 nt, Artificial Sequence
  Description of Artificial Sequence: Synthetic oligonucleotide
  Sense strand starting at position 1240 of SEQ ID NO: 585778
uggaauuggccuuaacuua

SEQ ID NO: 666883 - RNA, 19 nt, Artificial Sequence
  Description of Artificial Sequence: Synthetic oligonucleotide
  Antisense strand to SEQ ID NO: 666882
uaaguuaaggccaauucca

SEQ ID NO: 666884 - RNA, 19 nt, Artificial Sequence
  Description of Artificial Sequence: Synthetic oligonucleotide
  Sense strand starting at position 1266 of SEQ ID NO: 585778
uaguuuacauagucgagua

SEQ ID NO: 666885 - RNA, 19 nt, Artificial Sequence
  Description of Artificial Sequence: Synthetic oligonucleotide
  Antisense strand to SEQ ID NO: 666884
uacucgacuauguaaacua

SEQ ID NO: 666886 - RNA, 19 nt, Artificial Sequence
  Description of Artificial Sequence: Synthetic oligonucleotide
  Sense strand starting at position 1267 of SEQ ID NO: 585778
aguuuacauagucgaguau

SEQ ID NO: 666887 - RNA, 19 nt, Artificial Sequence
  Description of Artificial Sequence: Synthetic oligonucleotide
  Antisense strand to SEQ ID NO: 666886
auacucgacuauguaaacu

SEQ ID NO: 666888 - RNA, 19 nt, Artificial Sequence
  Description of Artificial Sequence: Synthetic oligonucleotide
  Sense strand starting at position 1276 of SEQ ID NO: 585778
agucgaguaugaccaaagu

SEQ ID NO: 666889 - RNA, 19 nt, Artificial Sequence
  Description of Artificial Sequence: Synthetic oligonucleotide
  Antisense strand to SEQ ID NO: 666888
acuuuggucauacucgacu

SEQ ID NO: 666890 - RNA, 19 nt, Artificial Sequence
  Description of Artificial Sequence: Synthetic oligonucleotide
  Sense strand starting at position 1323 of SEQ ID NO: 585778
ggaugcaauuacucagaua

SEQ ID NO: 666891 - RNA, 19 nt, Artificial Sequence
  Description of Artificial Sequence: Synthetic oligonucleotide
  Antisense strand to SEQ ID NO: 666890
uaucugaguaauugcaucc

SEQ ID NO: 666892 - RNA, 19 nt, Artificial Sequence
  Description of Artificial Sequence: Synthetic oligonucleotide
  Sense strand starting at position 1364 of SEQ ID NO: 585778
gccaucuaugcugauaaca

SEQ ID NO: 666893 - RNA, 19 nt, Artificial Sequence
  Description of Artificial Sequence: Synthetic oligonucleotide
  Antisense strand to SEQ ID NO: 666892
uguuaucagcauagauggc

SEQ ID NO: 666894 - RNA, 19 nt, Artificial Sequence
  Description of Artificial Sequence: Synthetic oligonucleotide
  Sense strand starting at position 1380 of SEQ ID NO: 585778
acagcagucacugguguua

SEQ ID NO: 666895 - RNA, 19 nt, Artificial Sequence
  Description of Artificial Sequence: Synthetic oligonucleotide
  Antisense strand to SEQ ID NO: 666894
uaacaccagugacugcugu

SEQ ID NO: 666896 - RNA, 19 nt, Artificial Sequence
  Description of Artificial Sequence: Synthetic oligonucleotide
  Sense strand starting at position 1470 of SEQ ID NO: 585778
aucagaucucaucgcauca

SEQ ID NO: 666897 - RNA, 19 nt, Artificial Sequence
  Description of Artificial Sequence: Synthetic oligonucleotide
  Antisense strand to SEQ ID NO: 666896
ugaugcgaugagaucugau

SEQ ID NO: 666898 - RNA, 19 nt, Artificial Sequence
  Description of Artificial Sequence: Synthetic oligonucleotide
  Sense strand starting at position 1528 of SEQ ID NO: 585778
gcugucauuaggcacgaga

SEQ ID NO: 666899 - RNA, 19 nt, Artificial Sequence
  Description of Artificial Sequence: Synthetic oligonucleotide
  Antisense strand to SEQ ID NO: 666898
ucucgugccuaaugacagc

SEQ ID NO: 666900 - RNA, 19 nt, Artificial Sequence
  Description of Artificial Sequence: Synthetic oligonucleotide
  Sense strand starting at position 1598 of SEQ ID NO: 585778
aucugaguauuccugacag

SEQ ID NO: 666901 - RNA, 19 nt, Artificial Sequence
  Description of Artificial Sequence: Synthetic oligonucleotide
  Antisense strand to SEQ ID NO: 666900
cugucaggaauacucagau

SEQ ID NO: 666902 - RNA, 19 nt, Artificial Sequence
  Description of Artificial Sequence: Synthetic oligonucleotide
  Sense strand starting at position 1600 of SEQ ID NO: 585778
cugaguauuccugacagca

SEQ ID NO: 666903 - RNA, 19 nt, Artificial Sequence
  Description of Artificial Sequence: Synthetic oligonucleotide
  Antisense strand to SEQ ID NO: 666902
ugcugucaggaauacucag

SEQ ID NO: 666904 - RNA, 19 nt, Artificial Sequence
  Description of Artificial Sequence: Synthetic oligonucleotide
  Sense strand starting at position 1613 of SEQ ID NO: 585778
acagcaugugaacauuaau

SEQ ID NO: 666905 - RNA, 19 nt, Artificial Sequence
  Description of Artificial Sequence: Synthetic oligonucleotide
  Antisense strand to SEQ ID NO: 666904
auuaauguucacaugcugu

SEQ ID NO: 666906 - RNA, 19 nt, Artificial Sequence
  Description of Artificial Sequence: Synthetic oligonucleotide
  Sense strand starting at position 1616 of SEQ ID NO: 585778
gcaugugaacauuaauuau

SEQ ID NO: 666907 - RNA, 19 nt, Artificial Sequence
  Description of Artificial Sequence: Synthetic oligonucleotide
  Antisense strand to SEQ ID NO: 666906
auaauuaauguucacaugc

SEQ ID NO: 666908 - RNA, 19 nt, Artificial Sequence
  Description of Artificial Sequence: Synthetic oligonucleotide
  Sense strand starting at position 1716 of SEQ ID NO: 585778
gccaauuuguaguuaaagu

SEQ ID NO: 666909 - RNA, 19 nt, Artificial Sequence
  Description of Artificial Sequence: Synthetic oligonucleotide
  Antisense strand to SEQ ID NO: 666908
acuuuaacuacaaauuggc

SEQ ID NO: 666910 - RNA, 19 nt, Artificial Sequence
  Description of Artificial Sequence: Synthetic oligonucleotide
  Sense strand starting at position 1736 of SEQ ID NO: 585778
uccucuuugccuugaagac

SEQ ID NO: 666911 - RNA, 19 nt, Artificial Sequence
  Description of Artificial Sequence: Synthetic oligonucleotide
  Antisense strand to SEQ ID NO: 666910
gucuucaaggcaaagagga

SEQ ID NO: 666912 - RNA, 19 nt, Artificial Sequence
  Description of Artificial Sequence: Synthetic oligonucleotide
  Sense strand starting at position 1737 of SEQ ID NO: 585778
ccucuuugccuugaagaca

SEQ ID NO: 666913 - RNA, 19 nt, Artificial Sequence
  Description of Artificial Sequence: Synthetic oligonucleotide
  Antisense strand to SEQ ID NO: 666912
ugucuucaaggcaaagagg

SEQ ID NO: 666914 - RNA, 19 nt, Artificial Sequence
  Description of Artificial Sequence: Synthetic oligonucleotide
  Sense strand starting at position 2423 of SEQ ID NO: 585778
ccgacuuuggagcgacaaa

SEQ ID NO: 666915 - RNA, 19 nt, Artificial Sequence
  Description of Artificial Sequence: Synthetic oligonucleotide
  Antisense strand to SEQ ID NO: 666914
uuugucgcuccaaagucgg

SEQ ID NO: 666916 - RNA, 19 nt, Artificial Sequence
  Description of Artificial Sequence: Synthetic oligonucleotide
  Sense strand starting at position 2750 of SEQ ID NO: 585778
gcuggccuguuuccagaaa

SEQ ID NO: 666917 - RNA, 19 nt, Artificial Sequence
  Description of Artificial Sequence: Synthetic oligonucleotide
  Antisense strand to SEQ ID NO: 666916
uuucuggaaacaggccagc

SEQ ID NO: 666918 - RNA, 19 nt, Artificial Sequence
  Description of Artificial Sequence: Synthetic oligonucleotide
  Sense strand starting at position 3284 of SEQ ID NO: 585778
ccgacaaagcaguaauauc

SEQ ID NO: 666919 - RNA, 19 nt, Artificial Sequence
  Description of Artificial Sequence: Synthetic oligonucleotide
  Antisense strand to SEQ ID NO: 666918
gauauuacugcuuugucgg

SEQ ID NO: 666920 - RNA, 19 nt, Artificial Sequence
  Description of Artificial Sequence: Synthetic oligonucleotide
  Sense strand starting at position 3358 of SEQ ID NO: 585778
gugggcuggcaugaauaga

SEQ ID NO: 666921 - RNA, 19 nt, Artificial Sequence
  Description of Artificial Sequence: Synthetic oligonucleotide
  Antisense strand to SEQ ID NO: 666920
ucuauucaugccagcccac

SEQ ID NO: 666922 - RNA, 19 nt, Artificial Sequence
  Description of Artificial Sequence: Synthetic oligonucleotide
  Sense strand starting at position 3478 of SEQ ID NO: 585778
accuuacucccgcaagagu

SEQ ID NO: 666923 - RNA, 19 nt, Artificial Sequence
  Description of Artificial Sequence: Synthetic oligonucleotide
  Antisense strand to SEQ ID NO: 666922
acucuugcgggaguaaggu

SEQ ID NO: 666924 - RNA, 19 nt, Artificial Sequence
  Description of Artificial Sequence: Synthetic oligonucleotide
  Sense strand starting at position 3880 of SEQ ID NO: 585778
gggauuggagacuguuguu

SEQ ID NO: 666925 - RNA, 19 nt, Artificial Sequence
  Description of Artificial Sequence: Synthetic oligonucleotide
  Antisense strand to SEQ ID NO: 666924
aacaacagucuccaauccc

SEQ ID NO: 666926 - RNA, 19 nt, Artificial Sequence
  Description of Artificial Sequence: Synthetic oligonucleotide
  Sense strand starting at position 3885 of SEQ ID NO: 585778
uggagacuguuguucuaag

SEQ ID NO: 666927 - RNA, 19 nt, Artificial Sequence
  Description of Artificial Sequence: Synthetic oligonucleotide
  Antisense strand to SEQ ID NO: 666926
cuuagaacaacagucucca

SEQ ID NO: 666928 - RNA, 19 nt, Artificial Sequence
  Description of Artificial Sequence: Synthetic oligonucleotide
  Sense strand starting at position 3886 of SEQ ID NO: 585778
ggagacuguuguucuaagu

SEQ ID NO: 666929 - RNA, 19 nt, Artificial Sequence
  Description of Artificial Sequence: Synthetic oligonucleotide
  Antisense strand to SEQ ID NO: 666928
acuuagaacaacagucucc

SEQ ID NO: 666930 - RNA, 19 nt, Artificial Sequence
  Description of Artificial Sequence: Synthetic oligonucleotide
  Sense strand starting at position 168 of SEQ ID NO: 585779
gggcggaugcgcuuucuga

SEQ ID NO: 666931 - RNA, 19 nt, Artificial Sequence
  Description of Artificial Sequence: Synthetic oligonucleotide
  Antisense strand to SEQ ID NO: 666930
ucagaaagcgcauccgccc

SEQ ID NO: 666932 - RNA, 19 nt, Artificial Sequence
  Description of Artificial Sequence: Synthetic oligonucleotide
  Sense strand starting at position 320 of SEQ ID NO: 585779
guucucagauguuuaccaa

SEQ ID NO: 666933 - RNA, 19 nt, Artificial Sequence
  Description of Artificial Sequence: Synthetic oligonucleotide
  Antisense strand to SEQ ID NO: 666932
uugguaaacaucugagaac

SEQ ID NO: 666934 - RNA, 19 nt, Artificial Sequence
  Description of Artificial Sequence: Synthetic oligonucleotide
  Sense strand starting at position 323 of SEQ ID NO: 585779
cucagauguuuaccaaaug

SEQ ID NO: 666935 - RNA, 19 nt, Artificial Sequence
  Description of Artificial Sequence: Synthetic oligonucleotide
  Antisense strand to SEQ ID NO: 666934
cauuugguaaacaucugag

SEQ ID NO: 666936 - RNA, 19 nt, Artificial Sequence
  Description of Artificial Sequence: Synthetic oligonucleotide
  Sense strand starting at position 356 of SEQ ID NO: 585779
agagaaugccagcauucua

SEQ ID NO: 666937 - RNA, 19 nt, Artificial Sequence
  Description of Artificial Sequence: Synthetic oligonucleotide
  Antisense strand to SEQ ID NO: 666936
uagaaugcuggcauucucu

SEQ ID NO: 666938 - RNA, 19 nt, Artificial Sequence
  Description of Artificial Sequence: Synthetic oligonucleotide
  Sense strand starting at position 565 of SEQ ID NO: 585779
gagcaagugcuccaaagau

SEQ ID NO: 666939 - RNA, 19 nt, Artificial Sequence
  Description of Artificial Sequence: Synthetic oligonucleotide
  Antisense strand to SEQ ID NO: 666938
aucuuuggagcacuugcuc

SEQ ID NO: 666940 - RNA, 19 nt, Artificial Sequence
  Description of Artificial Sequence: Synthetic oligonucleotide
  Sense strand starting at position 577 of SEQ ID NO: 585779
caaagauaccugggucaua

SEQ ID NO: 666941 - RNA, 19 nt, Artificial Sequence
  Description of Artificial Sequence: Synthetic oligonucleotide
  Antisense strand to SEQ ID NO: 666940
uaugacccagguaucuuug

SEQ ID NO: 666942 - RNA, 19 nt, Artificial Sequence
  Description of Artificial Sequence: Synthetic oligonucleotide
  Sense strand starting at position 590 of SEQ ID NO: 585779
gucauaaucccugggaccu

SEQ ID NO: 666943 - RNA, 19 nt, Artificial Sequence
  Description of Artificial Sequence: Synthetic oligonucleotide
  Antisense strand to SEQ ID NO: 666942
aggucccagggauuaugac

SEQ ID NO: 666944 - RNA, 19 nt, Artificial Sequence
  Description of Artificial Sequence: Synthetic oligonucleotide
  Sense strand starting at position 691 of SEQ ID NO: 585779
uccaguugacccuaaaugu

SEQ ID NO: 666945 - RNA, 19 nt, Artificial Sequence
  Description of Artificial Sequence: Synthetic oligonucleotide
  Antisense strand to SEQ ID NO: 666944
acauuuagggucaacugga

SEQ ID NO: 666946 - RNA, 19 nt, Artificial Sequence
  Description of Artificial Sequence: Synthetic oligonucleotide
  Sense strand starting at position 790 of SEQ ID NO: 585779
cuccacuggccuugaagau

SEQ ID NO: 666947 - RNA, 19 nt, Artificial Sequence
  Description of Artificial Sequence: Synthetic oligonucleotide
  Antisense strand to SEQ ID NO: 666946
aucuucaaggccaguggag

SEQ ID NO: 666948 - RNA, 19 nt, Artificial Sequence
  Description of Artificial Sequence: Synthetic oligonucleotide
  Sense strand starting at position 946 of SEQ ID NO: 585779
caguuuagccacgaaucca

SEQ ID NO: 666949 - RNA, 19 nt, Artificial Sequence
  Description of Artificial Sequence: Synthetic oligonucleotide
  Antisense strand to SEQ ID NO: 666948
uggauucguggcuaaacug

SEQ ID NO: 666950 - RNA, 19 nt, Artificial Sequence
  Description of Artificial Sequence: Synthetic oligonucleotide
  Sense strand starting at position 954 of SEQ ID NO: 585779
ccacgaauccauggucauu

SEQ ID NO: 666951 - RNA, 19 nt, Artificial Sequence
  Description of Artificial Sequence: Synthetic oligonucleotide
  Antisense strand to SEQ ID NO: 666950
aaugaccauggauucgugg

SEQ ID NO: 666952 - RNA, 19 nt, Artificial Sequence
  Description of Artificial Sequence: Synthetic oligonucleotide
  Sense strand starting at position 1028 of SEQ ID NO: 585779
uuugcugugcuuguuuaaa

SEQ ID NO: 666953 - RNA, 19 nt, Artificial Sequence
  Description of Artificial Sequence: Synthetic oligonucleotide
  Antisense strand to SEQ ID NO: 666952
uuuaaacaagcacagcaaa

SEQ ID NO: 666954 - RNA, 19 nt, Artificial Sequence
  Description of Artificial Sequence: Synthetic oligonucleotide
  Sense strand starting at position 1572 of SEQ ID NO: 585779
ugagauggcuccuccauaa

SEQ ID NO: 666955 - RNA, 19 nt, Artificial Sequence
  Description of Artificial Sequence: Synthetic oligonucleotide
  Antisense strand to SEQ ID NO: 666954
uuauggaggagccaucuca

SEQ ID NO: 666956 - RNA, 19 nt, Artificial Sequence
  Description of Artificial Sequence: Synthetic oligonucleotide
  Sense strand starting at position 1919 of SEQ ID NO: 585779
cgguaauaucccggagaau

SEQ ID NO: 666957 - RNA, 19 nt, Artificial Sequence
  Description of Artificial Sequence: Synthetic oligonucleotide
  Antisense strand to SEQ ID NO: 666956
auucuccgggauauuaccg

SEQ ID NO: 666958 - RNA, 19 nt, Artificial Sequence
  Description of Artificial Sequence: Synthetic oligonucleotide
  Sense strand starting at position 2144 of SEQ ID NO: 585779
aggagaagucagugcacau

SEQ ID NO: 666959 - RNA, 19 nt, Artificial Sequence
  Description of Artificial Sequence: Synthetic oligonucleotide
  Antisense strand to SEQ ID NO: 666958
augugcacugacuucuccu

SEQ ID NO: 666960 - RNA, 19 nt, Artificial Sequence
  Description of Artificial Sequence: Synthetic oligonucleotide
  Sense strand starting at position 2180 of SEQ ID NO: 585779
gggauuuaaucugaaacac

SEQ ID NO: 666961 - RNA, 19 nt, Artificial Sequence
  Description of Artificial Sequence: Synthetic oligonucleotide
  Antisense strand to SEQ ID NO: 666960
guguuucagauuaaauccc

SEQ ID NO: 666962 - RNA, 19 nt, Artificial Sequence
  Description of Artificial Sequence: Synthetic oligonucleotide
  Sense strand starting at position 2316 of SEQ ID NO: 585779
uuccucucuguaugaggaa

SEQ ID NO: 666963 - RNA, 19 nt, Artificial Sequence
  Description of Artificial Sequence: Synthetic oligonucleotide
  Antisense strand to SEQ ID NO: 666962
uuccucauacagagaggaa

SEQ ID NO: 666964 - RNA, 19 nt, Artificial Sequence
  Description of Artificial Sequence: Synthetic oligonucleotide
  Sense strand starting at position 2345 of SEQ ID NO: 585779
cagauaaucuggguucccu

SEQ ID NO: 666965 - RNA, 19 nt, Artificial Sequence
  Description of Artificial Sequence: Synthetic oligonucleotide
  Antisense strand to SEQ ID NO: 666964
agggaacccagauuaucug

SEQ ID NO: 666966 - RNA, 19 nt, Artificial Sequence
  Description of Artificial Sequence: Synthetic oligonucleotide
  Sense strand starting at position 2442 of SEQ ID NO: 585779
cagugaggucaguaaugau

SEQ ID NO: 666967 - RNA, 19 nt, Artificial Sequence
  Description of Artificial Sequence: Synthetic oligonucleotide
  Antisense strand to SEQ ID NO: 666966
aucauuacugaccucacug

SEQ ID NO: 666968 - RNA, 19 nt, Artificial Sequence
  Description of Artificial Sequence: Synthetic oligonucleotide
  Sense strand starting at position 2676 of SEQ ID NO: 585779
cuuccuuaacaagguaaga

SEQ ID NO: 666969 - RNA, 19 nt, Artificial Sequence
  Description of Artificial Sequence: Synthetic oligonucleotide
  Antisense strand to SEQ ID NO: 666968
ucuuaccuuguuaaggaag

SEQ ID NO: 666970 - RNA, 19 nt, Artificial Sequence
  Description of Artificial Sequence: Synthetic oligonucleotide
  Sense strand starting at position 2687 of SEQ ID NO: 585779
agguaagaauuaccuacuu

SEQ ID NO: 666971 - RNA, 19 nt, Artificial Sequence
  Description of Artificial Sequence: Synthetic oligonucleotide
  Antisense strand to SEQ ID NO: 666970
aaguagguaauucuuaccu

SEQ ID NO: 666972 - RNA, 19 nt, Artificial Sequence
  Description of Artificial Sequence: Synthetic oligonucleotide
  Sense strand starting at position 2841 of SEQ ID NO: 585779
gaaacauaaugagaaagga

SEQ ID NO: 666973 - RNA, 19 nt, Artificial Sequence
  Description of Artificial Sequence: Synthetic oligonucleotide
  Antisense strand to SEQ ID NO: 666972
uccuuucucauuauguuuc

SEQ ID NO: 666974 - RNA, 19 nt, Artificial Sequence
  Description of Artificial Sequence: Synthetic oligonucleotide
  Sense strand starting at position 2854 of SEQ ID NO: 585779
aaaggagauugucagaaag

SEQ ID NO: 666975 - RNA, 19 nt, Artificial Sequence
  Description of Artificial Sequence: Synthetic oligonucleotide
  Antisense strand to SEQ ID NO: 666974
cuuucugacaaucuccuuu

SEQ ID NO: 666976 - RNA, 19 nt, Artificial Sequence
  Description of Artificial Sequence: Synthetic oligonucleotide
  Sense strand starting at position 2963 of SEQ ID NO: 585779
uggaguaacugggcuacua

SEQ ID NO: 666977 - RNA, 19 nt, Artificial Sequence
  Description of Artificial Sequence: Synthetic oligonucleotide
  Antisense strand to SEQ ID NO: 666976
uaguagcccaguuacucca

SEQ ID NO: 666978 - RNA, 19 nt, Artificial Sequence
  Description of Artificial Sequence: Synthetic oligonucleotide
  Sense strand starting at position 3113 of SEQ ID NO: 585779
ugauauauacuaugugcua

SEQ ID NO: 666979 - RNA, 19 nt, Artificial Sequence
  Description of Artificial Sequence: Synthetic oligonucleotide
  Antisense strand to SEQ ID NO: 666978
uagcacauaguauauauca

SEQ ID NO: 666980 - RNA, 19 nt, Artificial Sequence
  Description of Artificial Sequence: Synthetic oligonucleotide
  Sense strand starting at position 3114 of SEQ ID NO: 585779
gauauauacuaugugcuag

SEQ ID NO: 666981 - RNA, 19 nt, Artificial Sequence
  Description of Artificial Sequence: Synthetic oligonucleotide
  Antisense strand to SEQ ID NO: 666980
cuagcacauaguauauauc

SEQ ID NO: 666982 - RNA, 19 nt, Artificial Sequence
  Description of Artificial Sequence: Synthetic oligonucleotide
  Sense strand starting at position 3126 of SEQ ID NO: 585779
gugcuagguccacacugaa

SEQ ID NO: 666983 - RNA, 19 nt, Artificial Sequence
  Description of Artificial Sequence: Synthetic oligonucleotide
  Antisense strand to SEQ ID NO: 666982
uucaguguggaccuagcac

SEQ ID NO: 666984 - RNA, 19 nt, Artificial Sequence
  Description of Artificial Sequence: Synthetic oligonucleotide
  Sense strand starting at position 3129 of SEQ ID NO: 585779
cuagguccacacugaaaga

SEQ ID NO: 666985 - RNA, 19 nt, Artificial Sequence
  Description of Artificial Sequence: Synthetic oligonucleotide
  Antisense strand to SEQ ID NO: 666984
ucuuucaguguggaccuag

SEQ ID NO: 666986 - RNA, 19 nt, Artificial Sequence
  Description of Artificial Sequence: Synthetic oligonucleotide
  Sense strand starting at position 3220 of SEQ ID NO: 585779
aguaccaugucuccagaga

SEQ ID NO: 666987 - RNA, 19 nt, Artificial Sequence
  Description of Artificial Sequence: Synthetic oligonucleotide
  Antisense strand to SEQ ID NO: 666986
ucucuggagacaugguacu

SEQ ID NO: 666988 - RNA, 19 nt, Artificial Sequence
  Description of Artificial Sequence: Synthetic oligonucleotide
  Sense strand starting at position 3221 of SEQ ID NO: 585779
guaccaugucuccagagaa

SEQ ID NO: 666989 - RNA, 19 nt, Artificial Sequence
  Description of Artificial Sequence: Synthetic oligonucleotide
  Antisense strand to SEQ ID NO: 666988
uucucuggagacaugguac

SEQ ID NO: 666990 - RNA, 19 nt, Artificial Sequence
  Description of Artificial Sequence: Synthetic oligonucleotide
  Sense strand starting at position 3584 of SEQ ID NO: 585779
aaucuuacccaagggaguu

SEQ ID NO: 666991 - RNA, 19 nt, Artificial Sequence
  Description of Artificial Sequence: Synthetic oligonucleotide
  Antisense strand to SEQ ID NO: 666990
aacucccuuggguaagauu

SEQ ID NO: 666992 - RNA, 19 nt, Artificial Sequence
  Description of Artificial Sequence: Synthetic oligonucleotide
  Sense strand starting at position 3700 of SEQ ID NO: 585779
ugcccugaucaugacacau

SEQ ID NO: 666993 - RNA, 19 nt, Artificial Sequence
  Description of Artificial Sequence: Synthetic oligonucleotide
  Antisense strand to SEQ ID NO: 666992
augugucaugaucagggca

SEQ ID NO: 666994 - RNA, 19 nt, Artificial Sequence
  Description of Artificial Sequence: Synthetic oligonucleotide
  Sense strand starting at position 3710 of SEQ ID NO: 585779
augacacaucugugcuaac

SEQ ID NO: 666995 - RNA, 19 nt, Artificial Sequence
  Description of Artificial Sequence: Synthetic oligonucleotide
  Antisense strand to SEQ ID NO: 666994
guuagcacagaugugucau

SEQ ID NO: 666996 - RNA, 19 nt, Artificial Sequence
  Description of Artificial Sequence: Synthetic oligonucleotide
  Sense strand starting at position 3711 of SEQ ID NO: 585779
ugacacaucugugcuaaca

SEQ ID NO: 666997 - RNA, 19 nt, Artificial Sequence
  Description of Artificial Sequence: Synthetic oligonucleotide
  Antisense strand to SEQ ID NO: 666996
uguuagcacagauguguca

SEQ ID NO: 666998 - RNA, 19 nt, Artificial Sequence
  Description of Artificial Sequence: Synthetic oligonucleotide
  Sense strand starting at position 3747 of SEQ ID NO: 585779
ugccacuagcguguguaau

SEQ ID NO: 666999 - RNA, 19 nt, Artificial Sequence
  Description of Artificial Sequence: Synthetic oligonucleotide
  Antisense strand to SEQ ID NO: 666998
auuacacacgcuaguggca

SEQ ID NO: 667000 - RNA, 19 nt, Artificial Sequence
  Description of Artificial Sequence: Synthetic oligonucleotide
  Sense strand starting at position 3875 of SEQ ID NO: 585779
gcauaagcccauuauaaag

SEQ ID NO: 667001 - RNA, 19 nt, Artificial Sequence
  Description of Artificial Sequence: Synthetic oligonucleotide
  Antisense strand to SEQ ID NO: 667000
cuuuauaaugggcuuaugc

SEQ ID NO: 667002 - RNA, 19 nt, Artificial Sequence
  Description of Artificial Sequence: Synthetic oligonucleotide
  Sense strand starting at position 3887 of SEQ ID NO: 585779
uauaaagccuugucuggga

SEQ ID NO: 667003 - RNA, 19 nt, Artificial Sequence
  Description of Artificial Sequence: Synthetic oligonucleotide
  Antisense strand to SEQ ID NO: 667002
ucccagacaaggcuuuaua

SEQ ID NO: 667004 - RNA, 19 nt, Artificial Sequence
  Description of Artificial Sequence: Synthetic oligonucleotide
  Sense strand starting at position 3903 of SEQ ID NO: 585779
ggacacuuucucugucuca

SEQ ID NO: 667005 - RNA, 19 nt, Artificial Sequence
  Description of Artificial Sequence: Synthetic oligonucleotide
  Antisense strand to SEQ ID NO: 667004
ugagacagagaaagugucc

SEQ ID NO: 667006 - RNA, 19 nt, Artificial Sequence
  Description of Artificial Sequence: Synthetic oligonucleotide
  Sense strand starting at position 3946 of SEQ ID NO: 585779
cuaagaacccacgaucagu

SEQ ID NO: 667007 - RNA, 19 nt, Artificial Sequence
  Description of Artificial Sequence: Synthetic oligonucleotide
  Antisense strand to SEQ ID NO: 667006
acugaucguggguucuuag

SEQ ID NO: 667008 - RNA, 19 nt, Artificial Sequence
  Description of Artificial Sequence: Synthetic oligonucleotide
  Sense strand starting at position 3973 of SEQ ID NO: 585779
uguaaauugguacaccagu

SEQ ID NO: 667009 - RNA, 19 nt, Artificial Sequence
  Description of Artificial Sequence: Synthetic oligonucleotide
  Antisense strand to SEQ ID NO: 667008
acugguguaccaauuuaca

SEQ ID NO: 667010 - RNA, 19 nt, Artificial Sequence
  Description of Artificial Sequence: Synthetic oligonucleotide
  Sense strand starting at position 59 of SEQ ID NO: 585780
ugugcuuccuaacucagaa

SEQ ID NO: 667011 - RNA, 19 nt, Artificial Sequence
  Description of Artificial Sequence: Synthetic oligonucleotide
  Antisense strand to SEQ ID NO: 667010
uucugaguuaggaagcaca

SEQ ID NO: 667012 - RNA, 19 nt, Artificial Sequence
  Description of Artificial Sequence: Synthetic oligonucleotide
  Sense strand starting at position 78 of SEQ ID NO: 585780
acaucuauuugggagcuuu

SEQ ID NO: 667013 - RNA, 19 nt, Artificial Sequence
  Description of Artificial Sequence: Synthetic oligonucleotide
  Antisense strand to SEQ ID NO: 667012
aaagcucccaaauagaugu

SEQ ID NO: 667014 - RNA, 19 nt, Artificial Sequence
  Description of Artificial Sequence: Synthetic oligonucleotide
  Sense strand starting at position 86 of SEQ ID NO: 585780
uugggagcuuuacucauua

SEQ ID NO: 667015 - RNA, 19 nt, Artificial Sequence
  Description of Artificial Sequence: Synthetic oligonucleotide
  Antisense strand to SEQ ID NO: 667014
uaaugaguaaagcucccaa

SEQ ID NO: 667016 - RNA, 19 nt, Artificial Sequence
  Description of Artificial Sequence: Synthetic oligonucleotide
  Sense strand starting at position 125 of SEQ ID NO: 585780
uguagauugugcgugagag

SEQ ID NO: 667017 - RNA, 19 nt, Artificial Sequence
  Description of Artificial Sequence: Synthetic oligonucleotide
  Antisense strand to SEQ ID NO: 667016
cucucacgcacaaucuaca

SEQ ID NO: 667018 - RNA, 19 nt, Artificial Sequence
  Description of Artificial Sequence: Synthetic oligonucleotide
  Sense strand starting at position 126 of SEQ ID NO: 585780
guagauugugcgugagagg

SEQ ID NO: 667019 - RNA, 19 nt, Artificial Sequence
  Description of Artificial Sequence: Synthetic oligonucleotide
  Antisense strand to SEQ ID NO: 667018
ccucucacgcacaaucuac

SEQ ID NO: 667020 - RNA, 19 nt, Artificial Sequence
  Description of Artificial Sequence: Synthetic oligonucleotide
  Sense strand starting at position 127 of SEQ ID NO: 585780
uagauugugcgugagagga

SEQ ID NO: 667021 - RNA, 19 nt, Artificial Sequence
  Description of Artificial Sequence: Synthetic oligonucleotide
  Antisense strand to SEQ ID NO: 667020
uccucucacgcacaaucua

SEQ ID NO: 667022 - RNA, 19 nt, Artificial Sequence
  Description of Artificial Sequence: Synthetic oligonucleotide
  Sense strand starting at position 146 of SEQ ID NO: 585780
aggaucugaucccugcaga

SEQ ID NO: 667023 - RNA, 19 nt, Artificial Sequence
  Description of Artificial Sequence: Synthetic oligonucleotide
  Antisense strand to SEQ ID NO: 667022
ucugcagggaucagauccu

SEQ ID NO: 667024 - RNA, 19 nt, Artificial Sequence
  Description of Artificial Sequence: Synthetic oligonucleotide
  Sense strand starting at position 147 of SEQ ID NO: 585780
ggaucugaucccugcagaa

SEQ ID NO: 667025 - RNA, 19 nt, Artificial Sequence
  Description of Artificial Sequence: Synthetic oligonucleotide
  Antisense strand to SEQ ID NO: 667024
uucugcagggaucagaucc

SEQ ID NO: 667026 - RNA, 19 nt, Artificial Sequence
  Description of Artificial Sequence: Synthetic oligonucleotide
  Sense strand starting at position 247 of SEQ ID NO: 585780
uggagaccaaagugugaau

SEQ ID NO: 667027 - RNA, 19 nt, Artificial Sequence
  Description of Artificial Sequence: Synthetic oligonucleotide
  Antisense strand to SEQ ID NO: 667026
auucacacuuuggucucca

SEQ ID NO: 667028 - RNA, 19 nt, Artificial Sequence
  Description of Artificial Sequence: Synthetic oligonucleotide
  Sense strand starting at position 468 of SEQ ID NO: 585780
ggauucugugccuggucua

SEQ ID NO: 667029 - RNA, 19 nt, Artificial Sequence
  Description of Artificial Sequence: Synthetic oligonucleotide
  Antisense strand to SEQ ID NO: 667028
uagaccaggcacagaaucc

SEQ ID NO: 667030 - RNA, 19 nt, Artificial Sequence
  Description of Artificial Sequence: Synthetic oligonucleotide
  Sense strand starting at position 469 of SEQ ID NO: 585780
gauucugugccuggucuaa

SEQ ID NO: 667031 - RNA, 19 nt, Artificial Sequence
  Description of Artificial Sequence: Synthetic oligonucleotide
  Antisense strand to SEQ ID NO: 667030
uuagaccaggcacagaauc

SEQ ID NO: 667032 - RNA, 19 nt, Artificial Sequence
  Description of Artificial Sequence: Synthetic oligonucleotide
  Sense strand starting at position 581 of SEQ ID NO: 585780
gcuggagagccuuggacaa

SEQ ID NO: 667033 - RNA, 19 nt, Artificial Sequence
  Description of Artificial Sequence: Synthetic oligonucleotide
  Antisense strand to SEQ ID NO: 667032
uuguccaaggcucuccagc

SEQ ID NO: 667034 - RNA, 19 nt, Artificial Sequence
  Description of Artificial Sequence: Synthetic oligonucleotide
  Sense strand starting at position 650 of SEQ ID NO: 585780
cucagaaagcggugucuua

SEQ ID NO: 667035 - RNA, 19 nt, Artificial Sequence
  Description of Artificial Sequence: Synthetic oligonucleotide
  Antisense strand to SEQ ID NO: 667034
uaagacaccgcuuucugag

SEQ ID NO: 667036 - RNA, 19 nt, Artificial Sequence
  Description of Artificial Sequence: Synthetic oligonucleotide
  Sense strand starting at position 880 of SEQ ID NO: 585780
uguccaucacggcauuaau

SEQ ID NO: 667037 - RNA, 19 nt, Artificial Sequence
  Description of Artificial Sequence: Synthetic oligonucleotide
  Antisense strand to SEQ ID NO: 667036
auuaaugccgugauggaca

SEQ ID NO: 667038 - RNA, 19 nt, Artificial Sequence
  Description of Artificial Sequence: Synthetic oligonucleotide
  Sense strand starting at position 1004 of SEQ ID NO: 585780
gaaggugauuccucaucuu

SEQ ID NO: 667039 - RNA, 19 nt, Artificial Sequence
  Description of Artificial Sequence: Synthetic oligonucleotide
  Antisense strand to SEQ ID NO: 667038
aagaugaggaaucaccuuc

SEQ ID NO: 667040 - RNA, 19 nt, Artificial Sequence
  Description of Artificial Sequence: Synthetic oligonucleotide
  Sense strand starting at position 1007 of SEQ ID NO: 585780
ggugauuccucaucuugcu

SEQ ID NO: 667041 - RNA, 19 nt, Artificial Sequence
  Description of Artificial Sequence: Synthetic oligonucleotide
  Antisense strand to SEQ ID NO: 667040
agcaagaugaggaaucacc

SEQ ID NO: 667042 - RNA, 19 nt, Artificial Sequence
  Description of Artificial Sequence: Synthetic oligonucleotide
  Sense strand starting at position 1092 of SEQ ID NO: 585780
cccauucguuuagcugaau

SEQ ID NO: 667043 - RNA, 19 nt, Artificial Sequence
  Description of Artificial Sequence: Synthetic oligonucleotide
  Antisense strand to SEQ ID NO: 667042
auucagcuaaacgaauggg

SEQ ID NO: 667044 - RNA, 19 nt, Artificial Sequence
  Description of Artificial Sequence: Synthetic oligonucleotide
  Sense strand starting at position 1093 of SEQ ID NO: 585780
ccauucguuuagcugaauu

SEQ ID NO: 667045 - RNA, 19 nt, Artificial Sequence
  Description of Artificial Sequence: Synthetic oligonucleotide
  Antisense strand to SEQ ID NO: 667044
aauucagcuaaacgaaugg

SEQ ID NO: 667046 - RNA, 19 nt, Artificial Sequence
  Description of Artificial Sequence: Synthetic oligonucleotide
  Sense strand starting at position 1095 of SEQ ID NO: 585780
auucguuuagcugaauuau

SEQ ID NO: 667047 - RNA, 19 nt, Artificial Sequence
  Description of Artificial Sequence: Synthetic oligonucleotide
  Antisense strand to SEQ ID NO: 667046
auaauucagcuaaacgaau

SEQ ID NO: 667048 - RNA, 19 nt, Artificial Sequence
  Description of Artificial Sequence: Synthetic oligonucleotide
  Sense strand starting at position 1129 of SEQ ID NO: 585780
ggauaagagugcucagauu

SEQ ID NO: 667049 - RNA, 19 nt, Artificial Sequence
  Description of Artificial Sequence: Synthetic oligonucleotide
  Antisense strand to SEQ ID NO: 667048
aaucugagcacucuuaucc

SEQ ID NO: 667050 - RNA, 19 nt, Artificial Sequence
  Description of Artificial Sequence: Synthetic oligonucleotide
  Sense strand starting at position 1156 of SEQ ID NO: 585780
cgagacugguggcuuuauu

SEQ ID NO: 667051 - RNA, 19 nt, Artificial Sequence
  Description of Artificial Sequence: Synthetic oligonucleotide
  Antisense strand to SEQ ID NO: 667050
aauaaagccaccagucucg

SEQ ID NO: 667052 - RNA, 19 nt, Artificial Sequence
  Description of Artificial Sequence: Synthetic oligonucleotide
  Sense strand starting at position 1424 of SEQ ID NO: 585780
ucgaacuccugaucuccaa

SEQ ID NO: 667053 - RNA, 19 nt, Artificial Sequence
  Description of Artificial Sequence: Synthetic oligonucleotide
  Antisense strand to SEQ ID NO: 667052
uuggagaucaggaguucga

SEQ ID NO: 667054 - RNA, 19 nt, Artificial Sequence
  Description of Artificial Sequence: Synthetic oligonucleotide
  Sense strand starting at position 1505 of SEQ ID NO: 585780
cgagacuggugacuguaaa

SEQ ID NO: 667055 - RNA, 19 nt, Artificial Sequence
  Description of Artificial Sequence: Synthetic oligonucleotide
  Antisense strand to SEQ ID NO: 667054
uuuacagucaccagucucg

SEQ ID NO: 667056 - RNA, 19 nt, Artificial Sequence
  Description of Artificial Sequence: Synthetic oligonucleotide
  Sense strand starting at position 1506 of SEQ ID NO: 585780
gagacuggugacuguaaag

SEQ ID NO: 667057 - RNA, 19 nt, Artificial Sequence
  Description of Artificial Sequence: Synthetic oligonucleotide
  Antisense strand to SEQ ID NO: 667056
cuuuacagucaccagucuc

SEQ ID NO: 667058 - RNA, 19 nt, Artificial Sequence
  Description of Artificial Sequence: Synthetic oligonucleotide
  Sense strand starting at position 2456 of SEQ ID NO: 585780
ccacgccucuugucaugaa

SEQ ID NO: 667059 - RNA, 19 nt, Artificial Sequence
  Description of Artificial Sequence: Synthetic oligonucleotide
  Antisense strand to SEQ ID NO: 667058
uucaugacaagaggcgugg

SEQ ID NO: 667060 - RNA, 19 nt, Artificial Sequence
  Description of Artificial Sequence: Synthetic oligonucleotide
  Sense strand starting at position 2460 of SEQ ID NO: 585780
gccucuugucaugaauaug

SEQ ID NO: 667061 - RNA, 19 nt, Artificial Sequence
  Description of Artificial Sequence: Synthetic oligonucleotide
  Antisense strand to SEQ ID NO: 667060
cauauucaugacaagaggc

SEQ ID NO: 667062 - RNA, 19 nt, Artificial Sequence
  Description of Artificial Sequence: Synthetic oligonucleotide
  Sense strand starting at position 2634 of SEQ ID NO: 585780
ccgcaaagugaugggaaga

SEQ ID NO: 667063 - RNA, 19 nt, Artificial Sequence
  Description of Artificial Sequence: Synthetic oligonucleotide
  Antisense strand to SEQ ID NO: 667062
ucuucccaucacuuugcgg

SEQ ID NO: 667064 - RNA, 19 nt, Artificial Sequence
  Description of Artificial Sequence: Synthetic oligonucleotide
  Sense strand starting at position 2680 of SEQ ID NO: 585780
cuccuuguguccucuauca

SEQ ID NO: 667065 - RNA, 19 nt, Artificial Sequence
  Description of Artificial Sequence: Synthetic oligonucleotide
  Antisense strand to SEQ ID NO: 667064
ugauagaggacacaaggag

SEQ ID NO: 667066 - RNA, 19 nt, Artificial Sequence
  Description of Artificial Sequence: Synthetic oligonucleotide
  Sense strand starting at position 2741 of SEQ ID NO: 585780
ucgugaugucaucagauau

SEQ ID NO: 667067 - RNA, 19 nt, Artificial Sequence
  Description of Artificial Sequence: Synthetic oligonucleotide
  Antisense strand to SEQ ID NO: 667066
auaucugaugacaucacga

SEQ ID NO: 667068 - RNA, 19 nt, Artificial Sequence
  Description of Artificial Sequence: Synthetic oligonucleotide
  Sense strand starting at position 3141 of SEQ ID NO: 585780
ucaauaguucuugguauau

SEQ ID NO: 667069 - RNA, 19 nt, Artificial Sequence
  Description of Artificial Sequence: Synthetic oligonucleotide
  Antisense strand to SEQ ID NO: 667068
auauaccaagaacuauuga

SEQ ID NO: 667070 - RNA, 19 nt, Artificial Sequence
  Description of Artificial Sequence: Synthetic oligonucleotide
  Sense strand starting at position 3218 of SEQ ID NO: 585780
aaggaacugugauacccau

SEQ ID NO: 667071 - RNA, 19 nt, Artificial Sequence
  Description of Artificial Sequence: Synthetic oligonucleotide
  Antisense strand to SEQ ID NO: 667070
auggguaucacaguuccuu

SEQ ID NO: 667072 - RNA, 19 nt, Artificial Sequence
  Description of Artificial Sequence: Synthetic oligonucleotide
  Sense strand starting at position 3225 of SEQ ID NO: 585780
ugugauacccauuagcaau

SEQ ID NO: 667073 - RNA, 19 nt, Artificial Sequence
  Description of Artificial Sequence: Synthetic oligonucleotide
  Antisense strand to SEQ ID NO: 667072
auugcuaauggguaucaca

SEQ ID NO: 667074 - RNA, 19 nt, Artificial Sequence
  Description of Artificial Sequence: Synthetic oligonucleotide
  Sense strand starting at position 3414 of SEQ ID NO: 585780
agggucauucuugaugguu

SEQ ID NO: 667075 - RNA, 19 nt, Artificial Sequence
  Description of Artificial Sequence: Synthetic oligonucleotide
  Antisense strand to SEQ ID NO: 667074
aaccaucaagaaugacccu

SEQ ID NO: 667076 - RNA, 19 nt, Artificial Sequence
  Description of Artificial Sequence: Synthetic oligonucleotide
  Sense strand starting at position 3426 of SEQ ID NO: 585780
gaugguuccagguagcauu

SEQ ID NO: 667077 - RNA, 19 nt, Artificial Sequence
  Description of Artificial Sequence: Synthetic oligonucleotide
  Antisense strand to SEQ ID NO: 667076
aaugcuaccuggaaccauc

SEQ ID NO: 667078 - RNA, 19 nt, Artificial Sequence
  Description of Artificial Sequence: Synthetic oligonucleotide
  Sense strand starting at position 3433 of SEQ ID NO: 585780
ccagguagcauuuguuagu

SEQ ID NO: 667079 - RNA, 19 nt, Artificial Sequence
  Description of Artificial Sequence: Synthetic oligonucleotide
  Antisense strand to SEQ ID NO: 667078
acuaacaaaugcuaccugg

SEQ ID NO: 667080 - RNA, 19 nt, Artificial Sequence
  Description of Artificial Sequence: Synthetic oligonucleotide
  Sense strand starting at position 3434 of SEQ ID NO: 585780
cagguagcauuuguuagua

SEQ ID NO: 667081 - RNA, 19 nt, Artificial Sequence
  Description of Artificial Sequence: Synthetic oligonucleotide
  Antisense strand to SEQ ID NO: 667080
uacuaacaaaugcuaccug

SEQ ID NO: 667082 - RNA, 19 nt, Artificial Sequence
  Description of Artificial Sequence: Synthetic oligonucleotide
  Sense strand starting at position 3568 of SEQ ID NO: 585780
ggauguuauuaagucagcu

SEQ ID NO: 667083 - RNA, 19 nt, Artificial Sequence
  Description of Artificial Sequence: Synthetic oligonucleotide
  Antisense strand to SEQ ID NO: 667082
agcugacuuaauaacaucc

SEQ ID NO: 667084 - RNA, 19 nt, Artificial Sequence
  Description of Artificial Sequence: Synthetic oligonucleotide
  Sense strand starting at position 3603 of SEQ ID NO: 585780
gcaugaaaugccuauauua

SEQ ID NO: 667085 - RNA, 19 nt, Artificial Sequence
  Description of Artificial Sequence: Synthetic oligonucleotide
  Antisense strand to SEQ ID NO: 667084
uaauauaggcauuucaugc

SEQ ID NO: 667086 - RNA, 19 nt, Artificial Sequence
  Description of Artificial Sequence: Synthetic oligonucleotide
  Sense strand starting at position 3758 of SEQ ID NO: 585780
acuuuauaaugauagagac

SEQ ID NO: 667087 - RNA, 19 nt, Artificial Sequence
  Description of Artificial Sequence: Synthetic oligonucleotide
  Antisense strand to SEQ ID NO: 667086
gucucuaucauuauaaagu

SEQ ID NO: 667088 - RNA, 19 nt, Artificial Sequence
  Description of Artificial Sequence: Synthetic oligonucleotide
  Sense strand starting at position 3899 of SEQ ID NO: 585780
ucccaauuccagcgauucu

SEQ ID NO: 667089 - RNA, 19 nt, Artificial Sequence
  Description of Artificial Sequence: Synthetic oligonucleotide
  Antisense strand to SEQ ID NO: 667088
agaaucgcuggaauuggga

SEQ ID NO: 667090 - RNA, 19 nt, Artificial Sequence
  Description of Artificial Sequence: Synthetic oligonucleotide
  Sense strand starting at position 120 of SEQ ID NO: 585781
gagaucuagaaguguuaga

SEQ ID NO: 667091 - RNA, 19 nt, Artificial Sequence
  Description of Artificial Sequence: Synthetic oligonucleotide
  Antisense strand to SEQ ID NO: 667090
ucuaacacuucuagaucuc

SEQ ID NO: 667092 - RNA, 19 nt, Artificial Sequence
  Description of Artificial Sequence: Synthetic oligonucleotide
  Sense strand starting at position 214 of SEQ ID NO: 585781
acugaaaguccagguacuu

SEQ ID NO: 667093 - RNA, 19 nt, Artificial Sequence
  Description of Artificial Sequence: Synthetic oligonucleotide
  Antisense strand to SEQ ID NO: 667092
aaguaccuggacuuucagu

SEQ ID NO: 667094 - RNA, 19 nt, Artificial Sequence
  Description of Artificial Sequence: Synthetic oligonucleotide
  Sense strand starting at position 318 of SEQ ID NO: 585781
ggccauauuugugcccuau

SEQ ID NO: 667095 - RNA, 19 nt, Artificial Sequence
  Description of Artificial Sequence: Synthetic oligonucleotide
  Antisense strand to SEQ ID NO: 667094
auagggcacaaauauggcc

SEQ ID NO: 667096 - RNA, 19 nt, Artificial Sequence
  Description of Artificial Sequence: Synthetic oligonucleotide
  Sense strand starting at position 320 of SEQ ID NO: 585781
ccauauuugugcccuauac

SEQ ID NO: 667097 - RNA, 19 nt, Artificial Sequence
  Description of Artificial Sequence: Synthetic oligonucleotide
  Antisense strand to SEQ ID NO: 667096
guauagggcacaaauaugg

SEQ ID NO: 667098 - RNA, 19 nt, Artificial Sequence
  Description of Artificial Sequence: Synthetic oligonucleotide
  Sense strand starting at position 333 of SEQ ID NO: 585781
cuauacuuugcucaggagu

SEQ ID NO: 667099 - RNA, 19 nt, Artificial Sequence
  Description of Artificial Sequence: Synthetic oligonucleotide
  Antisense strand to SEQ ID NO: 667098
acuccugagcaaaguauag

SEQ ID NO: 667100 - RNA, 19 nt, Artificial Sequence
  Description of Artificial Sequence: Synthetic oligonucleotide
  Sense strand starting at position 798 of SEQ ID NO: 585781
uuuccaaagcgauacugua

SEQ ID NO: 667101 - RNA, 19 nt, Artificial Sequence
  Description of Artificial Sequence: Synthetic oligonucleotide
  Antisense strand to SEQ ID NO: 667100
uacaguaucgcuuuggaaa

SEQ ID NO: 667102 - RNA, 19 nt, Artificial Sequence
  Description of Artificial Sequence: Synthetic oligonucleotide
  Sense strand starting at position 1228 of SEQ ID NO: 585781
cuuaauacgcaagaguaaa

SEQ ID NO: 667103 - RNA, 19 nt, Artificial Sequence
  Description of Artificial Sequence: Synthetic oligonucleotide
  Antisense strand to SEQ ID NO: 667102
uuuacucuugcguauuaag

SEQ ID NO: 667104 - RNA, 19 nt, Artificial Sequence
  Description of Artificial Sequence: Synthetic oligonucleotide
  Sense strand starting at position 1362 of SEQ ID NO: 585781
ggaugaagguggcuaaaua

SEQ ID NO: 667105 - RNA, 19 nt, Artificial Sequence
  Description of Artificial Sequence: Synthetic oligonucleotide
  Antisense strand to SEQ ID NO: 667104
uauuuagccaccuucaucc

SEQ ID NO: 667106 - RNA, 19 nt, Artificial Sequence
  Description of Artificial Sequence: Synthetic oligonucleotide
  Sense strand starting at position 1460 of SEQ ID NO: 585781
uucugacuuguggagacuu

SEQ ID NO: 667107 - RNA, 19 nt, Artificial Sequence
  Description of Artificial Sequence: Synthetic oligonucleotide
  Antisense strand to SEQ ID NO: 667106
aagucuccacaagucagaa

SEQ ID NO: 667108 - RNA, 19 nt, Artificial Sequence
  Description of Artificial Sequence: Synthetic oligonucleotide
  Sense strand starting at position 1470 of SEQ ID NO: 585781
uggagacuuguccagacga

SEQ ID NO: 667109 - RNA, 19 nt, Artificial Sequence
  Description of Artificial Sequence: Synthetic oligonucleotide
  Antisense strand to SEQ ID NO: 667108
ucgucuggacaagucucca

SEQ ID NO: 667110 - RNA, 19 nt, Artificial Sequence
  Description of Artificial Sequence: Synthetic oligonucleotide
  Sense strand starting at position 1480 of SEQ ID NO: 585781
uccagacgacaauguuauu

SEQ ID NO: 667111 - RNA, 19 nt, Artificial Sequence
  Description of Artificial Sequence: Synthetic oligonucleotide
  Antisense strand to SEQ ID NO: 667110
aauaacauugucgucugga

SEQ ID NO: 667112 - RNA, 19 nt, Artificial Sequence
  Description of Artificial Sequence: Synthetic oligonucleotide
  Sense strand starting at position 1485 of SEQ ID NO: 585781
acgacaauguuauuuacgu

SEQ ID NO: 667113 - RNA, 19 nt, Artificial Sequence
  Description of Artificial Sequence: Synthetic oligonucleotide
  Antisense strand to SEQ ID NO: 667112
acguaaauaacauugucgu

SEQ ID NO: 667114 - RNA, 19 nt, Artificial Sequence
  Description of Artificial Sequence: Synthetic oligonucleotide
  Sense strand starting at position 1486 of SEQ ID NO: 585781
cgacaauguuauuuacgua

SEQ ID NO: 667115 - RNA, 19 nt, Artificial Sequence
  Description of Artificial Sequence: Synthetic oligonucleotide
  Antisense strand to SEQ ID NO: 667114
uacguaaauaacauugucg

SEQ ID NO: 667116 - RNA, 19 nt, Artificial Sequence
  Description of Artificial Sequence: Synthetic oligonucleotide
  Sense strand starting at position 2200 of SEQ ID NO: 585781
cuaauucucagguacggaa

SEQ ID NO: 667117 - RNA, 19 nt, Artificial Sequence
  Description of Artificial Sequence: Synthetic oligonucleotide
  Antisense strand to SEQ ID NO: 667116
uuccguaccugagaauuag

SEQ ID NO: 667118 - RNA, 19 nt, Artificial Sequence
  Description of Artificial Sequence: Synthetic oligonucleotide
  Sense strand starting at position 2473 of SEQ ID NO: 585781
aggacuuuggccuauaauc

SEQ ID NO: 667119 - RNA, 19 nt, Artificial Sequence
  Description of Artificial Sequence: Synthetic oligonucleotide
  Antisense strand to SEQ ID NO: 667118
gauuauaggccaaaguccu

SEQ ID NO: 667120 - RNA, 19 nt, Artificial Sequence
  Description of Artificial Sequence: Synthetic oligonucleotide
  Sense strand starting at position 2603 of SEQ ID NO: 585781
auucgaaggcuuuacaauu

SEQ ID NO: 667121 - RNA, 19 nt, Artificial Sequence
  Description of Artificial Sequence: Synthetic oligonucleotide
  Antisense strand to SEQ ID NO: 667120
aauuguaaagccuucgaau

SEQ ID NO: 667122 - RNA, 19 nt, Artificial Sequence
  Description of Artificial Sequence: Synthetic oligonucleotide
  Sense strand starting at position 2939 of SEQ ID NO: 585781
aguaguuauggccacagaa

SEQ ID NO: 667123 - RNA, 19 nt, Artificial Sequence
  Description of Artificial Sequence: Synthetic oligonucleotide
  Antisense strand to SEQ ID NO: 667122
uucuguggccauaacuacu

SEQ ID NO: 667124 - RNA, 19 nt, Artificial Sequence
  Description of Artificial Sequence: Synthetic oligonucleotide
  Sense strand starting at position 2941 of SEQ ID NO: 585781
uaguuauggccacagaaca

SEQ ID NO: 667125 - RNA, 19 nt, Artificial Sequence
  Description of Artificial Sequence: Synthetic oligonucleotide
  Antisense strand to SEQ ID NO: 667124
uguucuguggccauaacua

SEQ ID NO: 667126 - RNA, 19 nt, Artificial Sequence
  Description of Artificial Sequence: Synthetic oligonucleotide
  Sense strand starting at position 3112 of SEQ ID NO: 585781
ugauauauguucucuauac

SEQ ID NO: 667127 - RNA, 19 nt, Artificial Sequence
  Description of Artificial Sequence: Synthetic oligonucleotide
  Antisense strand to SEQ ID NO: 667126
guauagagaacauauauca

SEQ ID NO: 667128 - RNA, 19 nt, Artificial Sequence
  Description of Artificial Sequence: Synthetic oligonucleotide
  Sense strand starting at position 3114 of SEQ ID NO: 585781
auauauguucucuauacug

SEQ ID NO: 667129 - RNA, 19 nt, Artificial Sequence
  Description of Artificial Sequence: Synthetic oligonucleotide
  Antisense strand to SEQ ID NO: 667128
caguauagagaacauauau

SEQ ID NO: 667130 - RNA, 19 nt, Artificial Sequence
  Description of Artificial Sequence: Synthetic oligonucleotide
  Sense strand starting at position 3191 of SEQ ID NO: 585781
ugaguuaaugucgauauag

SEQ ID NO: 667131 - RNA, 19 nt, Artificial Sequence
  Description of Artificial Sequence: Synthetic oligonucleotide
  Antisense strand to SEQ ID NO: 667130
cuauaucgacauuaacuca

SEQ ID NO: 667132 - RNA, 19 nt, Artificial Sequence
  Description of Artificial Sequence: Synthetic oligonucleotide
  Sense strand starting at position 3193 of SEQ ID NO: 585781
aguuaaugucgauauagaa

SEQ ID NO: 667133 - RNA, 19 nt, Artificial Sequence
  Description of Artificial Sequence: Synthetic oligonucleotide
  Antisense strand to SEQ ID NO: 667132
uucuauaucgacauuaacu

SEQ ID NO: 667134 - RNA, 19 nt, Artificial Sequence
  Description of Artificial Sequence: Synthetic oligonucleotide
  Sense strand starting at position 3364 of SEQ ID NO: 585781
agauaaacugguuguaaau

SEQ ID NO: 667135 - RNA, 19 nt, Artificial Sequence
  Description of Artificial Sequence: Synthetic oligonucleotide
  Antisense strand to SEQ ID NO: 667134
auuuacaaccaguuuaucu

SEQ ID NO: 667136 - RNA, 19 nt, Artificial Sequence
  Description of Artificial Sequence: Synthetic oligonucleotide
  Sense strand starting at position 3374 of SEQ ID NO: 585781
guuguaaaugaaugaguug

SEQ ID NO: 667137 - RNA, 19 nt, Artificial Sequence
  Description of Artificial Sequence: Synthetic oligonucleotide
  Antisense strand to SEQ ID NO: 667136
caacucauucauuuacaac

SEQ ID NO: 667138 - RNA, 19 nt, Artificial Sequence
  Description of Artificial Sequence: Synthetic oligonucleotide
  Sense strand starting at position 3398 of SEQ ID NO: 585781
auaaaugcacuugauguau

SEQ ID NO: 667139 - RNA, 19 nt, Artificial Sequence
  Description of Artificial Sequence: Synthetic oligonucleotide
  Antisense strand to SEQ ID NO: 667138
auacaucaagugcauuuau

SEQ ID NO: 667140 - RNA, 19 nt, Artificial Sequence
  Description of Artificial Sequence: Synthetic oligonucleotide
  Sense strand starting at position 3406 of SEQ ID NO: 585781
acuugauguaugggauugu

SEQ ID NO: 667141 - RNA, 19 nt, Artificial Sequence
  Description of Artificial Sequence: Synthetic oligonucleotide
  Antisense strand to SEQ ID NO: 667140
acaaucccauacaucaagu

SEQ ID NO: 667142 - RNA, 19 nt, Artificial Sequence
  Description of Artificial Sequence: Synthetic oligonucleotide
  Sense strand starting at position 3434 of SEQ ID NO: 585781
aagcuaguuagguagaagu

SEQ ID NO: 667143 - RNA, 19 nt, Artificial Sequence
  Description of Artificial Sequence: Synthetic oligonucleotide
  Antisense strand to SEQ ID NO: 667142
acuucuaccuaacuagcuu

SEQ ID NO: 667144 - RNA, 19 nt, Artificial Sequence
  Description of Artificial Sequence: Synthetic oligonucleotide
  Sense strand starting at position 3436 of SEQ ID NO: 585781
gcuaguuagguagaaguau

SEQ ID NO: 667145 - RNA, 19 nt, Artificial Sequence
  Description of Artificial Sequence: Synthetic oligonucleotide
  Antisense strand to SEQ ID NO: 667144
auacuucuaccuaacuagc

SEQ ID NO: 667146 - RNA, 19 nt, Artificial Sequence
  Description of Artificial Sequence: Synthetic oligonucleotide
  Sense strand starting at position 3442 of SEQ ID NO: 585781
uagguagaaguaugugaaa

SEQ ID NO: 667147 - RNA, 19 nt, Artificial Sequence
  Description of Artificial Sequence: Synthetic oligonucleotide
  Antisense strand to SEQ ID NO: 667146
uuucacauacuucuaccua

SEQ ID NO: 667148 - RNA, 19 nt, Artificial Sequence
  Description of Artificial Sequence: Synthetic oligonucleotide
  Sense strand starting at position 3460 of SEQ ID NO: 585781
aaaugaugacucugguucu

SEQ ID NO: 667149 - RNA, 19 nt, Artificial Sequence
  Description of Artificial Sequence: Synthetic oligonucleotide
  Antisense strand to SEQ ID NO: 667148
agaaccagagucaucauuu

SEQ ID NO: 667150 - RNA, 19 nt, Artificial Sequence
  Description of Artificial Sequence: Synthetic oligonucleotide
  Sense strand starting at position 3463 of SEQ ID NO: 585781
ugaugacucugguucuaga

SEQ ID NO: 667151 - RNA, 19 nt, Artificial Sequence
  Description of Artificial Sequence: Synthetic oligonucleotide
  Antisense strand to SEQ ID NO: 667150
ucuagaaccagagucauca

SEQ ID NO: 667152 - RNA, 19 nt, Artificial Sequence
  Description of Artificial Sequence: Synthetic oligonucleotide
  Sense strand starting at position 3537 of SEQ ID NO: 585781
ggcauaaucuuaguuauga

SEQ ID NO: 667153 - RNA, 19 nt, Artificial Sequence
  Description of Artificial Sequence: Synthetic oligonucleotide
  Antisense strand to SEQ ID NO: 667152
ucauaacuaagauuaugcc

SEQ ID NO: 667154 - RNA, 19 nt, Artificial Sequence
  Description of Artificial Sequence: Synthetic oligonucleotide
  Sense strand starting at position 3681 of SEQ ID NO: 585781
cauauaguaggcugauacu

SEQ ID NO: 667155 - RNA, 19 nt, Artificial Sequence
  Description of Artificial Sequence: Synthetic oligonucleotide
  Antisense strand to SEQ ID NO: 667154
aguaucagccuacuauaug

SEQ ID NO: 667156 - RNA, 19 nt, Artificial Sequence
  Description of Artificial Sequence: Synthetic oligonucleotide
  Sense strand starting at position 3694 of SEQ ID NO: 585781
gauacuuagugcuugauaa

SEQ ID NO: 667157 - RNA, 19 nt, Artificial Sequence
  Description of Artificial Sequence: Synthetic oligonucleotide
  Antisense strand to SEQ ID NO: 667156
uuaucaagcacuaaguauc

SEQ ID NO: 667158 - RNA, 19 nt, Artificial Sequence
  Description of Artificial Sequence: Synthetic oligonucleotide
  Sense strand starting at position 3695 of SEQ ID NO: 585781
auacuuagugcuugauaaa

SEQ ID NO: 667159 - RNA, 19 nt, Artificial Sequence
  Description of Artificial Sequence: Synthetic oligonucleotide
  Antisense strand to SEQ ID NO: 667158
uuuaucaagcacuaaguau

SEQ ID NO: 667160 - RNA, 19 nt, Artificial Sequence
  Description of Artificial Sequence: Synthetic oligonucleotide
  Sense strand starting at position 3860 of SEQ ID NO: 585781
gugguuuauggagaaccuu

SEQ ID NO: 667161 - RNA, 19 nt, Artificial Sequence
  Description of Artificial Sequence: Synthetic oligonucleotide
  Antisense strand to SEQ ID NO: 667160
aagguucuccauaaaccac

SEQ ID NO: 667162 - RNA, 19 nt, Artificial Sequence
  Description of Artificial Sequence: Synthetic oligonucleotide
  Sense strand starting at position 3890 of SEQ ID NO: 585781
augucaagauuccuuuaug

SEQ ID NO: 667163 - RNA, 19 nt, Artificial Sequence
  Description of Artificial Sequence: Synthetic oligonucleotide
  Antisense strand to SEQ ID NO: 667162
cauaaaggaaucuugacau

SEQ ID NO: 667164 - RNA, 19 nt, Artificial Sequence
  Description of Artificial Sequence: Synthetic oligonucleotide
  Sense strand starting at position 3893 of SEQ ID NO: 585781
ucaagauuccuuuaugguc

SEQ ID NO: 667165 - RNA, 19 nt, Artificial Sequence
  Description of Artificial Sequence: Synthetic oligonucleotide
  Antisense strand to SEQ ID NO: 667164
gaccauaaaggaaucuuga

SEQ ID NO: 667166 - RNA, 19 nt, Artificial Sequence
  Description of Artificial Sequence: Synthetic oligonucleotide
  Sense strand starting at position 3902 of SEQ ID NO: 585781
cuuuauggucucuauaaag

SEQ ID NO: 667167 - RNA, 19 nt, Artificial Sequence
  Description of Artificial Sequence: Synthetic oligonucleotide
  Antisense strand to SEQ ID NO: 667166
cuuuauagagaccauaaag

SEQ ID NO: 667168 - RNA, 19 nt, Artificial Sequence
  Description of Artificial Sequence: Synthetic oligonucleotide
  Sense strand starting at position 3968 of SEQ ID NO: 585781
agagcacuagagugaauua

SEQ ID NO: 667169 - RNA, 19 nt, Artificial Sequence
  Description of Artificial Sequence: Synthetic oligonucleotide
  Antisense strand to SEQ ID NO: 667168
uaauucacucuagugcucu

SEQ ID NO: 667170 - RNA, 19 nt, Artificial Sequence
  Description of Artificial Sequence: Synthetic oligonucleotide
  Sense strand starting at position 47 of SEQ ID NO: 585782
gaagguguggcuggaagau

SEQ ID NO: 667171 - RNA, 19 nt, Artificial Sequence
  Description of Artificial Sequence: Synthetic oligonucleotide
  Antisense strand to SEQ ID NO: 667170
aucuuccagccacaccuuc

SEQ ID NO: 667172 - RNA, 19 nt, Artificial Sequence
  Description of Artificial Sequence: Synthetic oligonucleotide
  Sense strand starting at position 62 of SEQ ID NO: 585782
agauuaacaugagaacaau

SEQ ID NO: 667173 - RNA, 19 nt, Artificial Sequence
  Description of Artificial Sequence: Synthetic oligonucleotide
  Antisense strand to SEQ ID NO: 667172
auuguucucauguuaaucu

SEQ ID NO: 667174 - RNA, 19 nt, Artificial Sequence
  Description of Artificial Sequence: Synthetic oligonucleotide
  Sense strand starting at position 149 of SEQ ID NO: 585782
uucugauguuuccucaaug

SEQ ID NO: 667175 - RNA, 19 nt, Artificial Sequence
  Description of Artificial Sequence: Synthetic oligonucleotide
  Antisense strand to SEQ ID NO: 667174
cauugaggaaacaucagaa

SEQ ID NO: 667176 - RNA, 19 nt, Artificial Sequence
  Description of Artificial Sequence: Synthetic oligonucleotide
  Sense strand starting at position 154 of SEQ ID NO: 585782
auguuuccucaauguauaa

SEQ ID NO: 667177 - RNA, 19 nt, Artificial Sequence
  Description of Artificial Sequence: Synthetic oligonucleotide
  Antisense strand to SEQ ID NO: 667176
uuauacauugaggaaacau

SEQ ID NO: 667178 - RNA, 19 nt, Artificial Sequence
  Description of Artificial Sequence: Synthetic oligonucleotide
  Sense strand starting at position 247 of SEQ ID NO: 585782
auuguaucacuguaugaau

SEQ ID NO: 667179 - RNA, 19 nt, Artificial Sequence
  Description of Artificial Sequence: Synthetic oligonucleotide
  Antisense strand to SEQ ID NO: 667178
auucauacagugauacaau

SEQ ID NO: 667180 - RNA, 19 nt, Artificial Sequence
  Description of Artificial Sequence: Synthetic oligonucleotide
  Sense strand starting at position 249 of SEQ ID NO: 585782
uguaucacuguaugaauca

SEQ ID NO: 667181 - RNA, 19 nt, Artificial Sequence
  Description of Artificial Sequence: Synthetic oligonucleotide
  Antisense strand to SEQ ID NO: 667180
ugauucauacagugauaca

SEQ ID NO: 667182 - RNA, 19 nt, Artificial Sequence
  Description of Artificial Sequence: Synthetic oligonucleotide
  Sense strand starting at position 260 of SEQ ID NO: 585782
augaaucaauguuugugua

SEQ ID NO: 667183 - RNA, 19 nt, Artificial Sequence
  Description of Artificial Sequence: Synthetic oligonucleotide
  Antisense strand to SEQ ID NO: 667182
uacacaaacauugauucau

SEQ ID NO: 667184 - RNA, 19 nt, Artificial Sequence
  Description of Artificial Sequence: Synthetic oligonucleotide
  Sense strand starting at position 307 of SEQ ID NO: 585782
ucaaauuugugagauacau

SEQ ID NO: 667185 - RNA, 19 nt, Artificial Sequence
  Description of Artificial Sequence: Synthetic oligonucleotide
  Antisense strand to SEQ ID NO: 667184
auguaucucacaaauuuga

SEQ ID NO: 667186 - RNA, 19 nt, Artificial Sequence
  Description of Artificial Sequence: Synthetic oligonucleotide
  Sense strand starting at position 336 of SEQ ID NO: 585782
guaucaauauccuuaagug

SEQ ID NO: 667187 - RNA, 19 nt, Artificial Sequence
  Description of Artificial Sequence: Synthetic oligonucleotide
  Antisense strand to SEQ ID NO: 667186
cacuuaaggauauugauac

SEQ ID NO: 667188 - RNA, 19 nt, Artificial Sequence
  Description of Artificial Sequence: Synthetic oligonucleotide
  Sense strand starting at position 687 of SEQ ID NO: 585782
gagaucuagaaguguuaga

SEQ ID NO: 667189 - RNA, 19 nt, Artificial Sequence
  Description of Artificial Sequence: Synthetic oligonucleotide
  Antisense strand to SEQ ID NO: 667188
ucuaacacuucuagaucuc

SEQ ID NO: 667190 - RNA, 19 nt, Artificial Sequence
  Description of Artificial Sequence: Synthetic oligonucleotide
  Sense strand starting at position 781 of SEQ ID NO: 585782
acugaaaguccagguacuu

SEQ ID NO: 667191 - RNA, 19 nt, Artificial Sequence
  Description of Artificial Sequence: Synthetic oligonucleotide
  Antisense strand to SEQ ID NO: 667190
aaguaccuggacuuucagu

SEQ ID NO: 667192 - RNA, 19 nt, Artificial Sequence
  Description of Artificial Sequence: Synthetic oligonucleotide
  Sense strand starting at position 874 of SEQ ID NO: 585782
uguaauacuuaggccauau

SEQ ID NO: 667193 - RNA, 19 nt, Artificial Sequence
  Description of Artificial Sequence: Synthetic oligonucleotide
  Antisense strand to SEQ ID NO: 667192
auauggccuaaguauuaca

SEQ ID NO: 667194 - RNA, 19 nt, Artificial Sequence
  Description of Artificial Sequence: Synthetic oligonucleotide
  Sense strand starting at position 885 of SEQ ID NO: 585782
ggccauauuugugcccuau

SEQ ID NO: 667195 - RNA, 19 nt, Artificial Sequence
  Description of Artificial Sequence: Synthetic oligonucleotide
  Antisense strand to SEQ ID NO: 667194
auagggcacaaauauggcc

SEQ ID NO: 667196 - RNA, 19 nt, Artificial Sequence
  Description of Artificial Sequence: Synthetic oligonucleotide
  Sense strand starting at position 887 of SEQ ID NO: 585782
ccauauuugugcccuauac

SEQ ID NO: 667197 - RNA, 19 nt, Artificial Sequence
  Description of Artificial Sequence: Synthetic oligonucleotide
  Antisense strand to SEQ ID NO: 667196
guauagggcacaaauaugg

SEQ ID NO: 667198 - RNA, 19 nt, Artificial Sequence
  Description of Artificial Sequence: Synthetic oligonucleotide
  Sense strand starting at position 900 of SEQ ID NO: 585782
cuauacuuugcucaggagu

SEQ ID NO: 667199 - RNA, 19 nt, Artificial Sequence
  Description of Artificial Sequence: Synthetic oligonucleotide
  Antisense strand to SEQ ID NO: 667198
acuccugagcaaaguauag

SEQ ID NO: 667200 - RNA, 19 nt, Artificial Sequence
  Description of Artificial Sequence: Synthetic oligonucleotide
  Sense strand starting at position 1365 of SEQ ID NO: 585782
uuuccaaagcgauacugua

SEQ ID NO: 667201 - RNA, 19 nt, Artificial Sequence
  Description of Artificial Sequence: Synthetic oligonucleotide
  Antisense strand to SEQ ID NO: 667200
uacaguaucgcuuuggaaa

SEQ ID NO: 667202 - RNA, 19 nt, Artificial Sequence
  Description of Artificial Sequence: Synthetic oligonucleotide
  Sense strand starting at position 1795 of SEQ ID NO: 585782
cuuaauacgcaagaguaaa

SEQ ID NO: 667203 - RNA, 19 nt, Artificial Sequence
  Description of Artificial Sequence: Synthetic oligonucleotide
  Antisense strand to SEQ ID NO: 667202
uuuacucuugcguauuaag

SEQ ID NO: 667204 - RNA, 19 nt, Artificial Sequence
  Description of Artificial Sequence: Synthetic oligonucleotide
  Sense strand starting at position 1929 of SEQ ID NO: 585782
ggaugaagguggcuaaaua

SEQ ID NO: 667205 - RNA, 19 nt, Artificial Sequence
  Description of Artificial Sequence: Synthetic oligonucleotide
  Antisense strand to SEQ ID NO: 667204
uauuuagccaccuucaucc

SEQ ID NO: 667206 - RNA, 19 nt, Artificial Sequence
  Description of Artificial Sequence: Synthetic oligonucleotide
  Sense strand starting at position 2027 of SEQ ID NO: 585782
uucugacuuguggagacuu

SEQ ID NO: 667207 - RNA, 19 nt, Artificial Sequence
  Description of Artificial Sequence: Synthetic oligonucleotide
  Antisense strand to SEQ ID NO: 667206
aagucuccacaagucagaa

SEQ ID NO: 667208 - RNA, 19 nt, Artificial Sequence
  Description of Artificial Sequence: Synthetic oligonucleotide
  Sense strand starting at position 2037 of SEQ ID NO: 585782
uggagacuuguccagacga

SEQ ID NO: 667209 - RNA, 19 nt, Artificial Sequence
  Description of Artificial Sequence: Synthetic oligonucleotide
  Antisense strand to SEQ ID NO: 667208
ucgucuggacaagucucca

SEQ ID NO: 667210 - RNA, 19 nt, Artificial Sequence
  Description of Artificial Sequence: Synthetic oligonucleotide
  Sense strand starting at position 2047 of SEQ ID NO: 585782
uccagacgacaauguuauu

SEQ ID NO: 667211 - RNA, 19 nt, Artificial Sequence
  Description of Artificial Sequence: Synthetic oligonucleotide
  Antisense strand to SEQ ID NO: 667210
aauaacauugucgucugga

SEQ ID NO: 667212 - RNA, 19 nt, Artificial Sequence
  Description of Artificial Sequence: Synthetic oligonucleotide
  Sense strand starting at position 2052 of SEQ ID NO: 585782
acgacaauguuauuuacgu

SEQ ID NO: 667213 - RNA, 19 nt, Artificial Sequence
  Description of Artificial Sequence: Synthetic oligonucleotide
  Antisense strand to SEQ ID NO: 667212
acguaaauaacauugucgu

SEQ ID NO: 667214 - RNA, 19 nt, Artificial Sequence
  Description of Artificial Sequence: Synthetic oligonucleotide
  Sense strand starting at position 2053 of SEQ ID NO: 585782
cgacaauguuauuuacgua

SEQ ID NO: 667215 - RNA, 19 nt, Artificial Sequence
  Description of Artificial Sequence: Synthetic oligonucleotide
  Antisense strand to SEQ ID NO: 667214
uacguaaauaacauugucg

SEQ ID NO: 667216 - RNA, 19 nt, Artificial Sequence
  Description of Artificial Sequence: Synthetic oligonucleotide
  Sense strand starting at position 2767 of SEQ ID NO: 585782
cuaauucucagguacggaa

SEQ ID NO: 667217 - RNA, 19 nt, Artificial Sequence
  Description of Artificial Sequence: Synthetic oligonucleotide
  Antisense strand to SEQ ID NO: 667216
uuccguaccugagaauuag

SEQ ID NO: 667218 - RNA, 19 nt, Artificial Sequence
  Description of Artificial Sequence: Synthetic oligonucleotide
  Sense strand starting at position 3040 of SEQ ID NO: 585782
aggacuuuggccuauaauc

SEQ ID NO: 667219 - RNA, 19 nt, Artificial Sequence
  Description of Artificial Sequence: Synthetic oligonucleotide
  Antisense strand to SEQ ID NO: 667218
gauuauaggccaaaguccu

SEQ ID NO: 667220 - RNA, 19 nt, Artificial Sequence
  Description of Artificial Sequence: Synthetic oligonucleotide
  Sense strand starting at position 3170 of SEQ ID NO: 585782
auucgaaggcuuuacaauu

SEQ ID NO: 667221 - RNA, 19 nt, Artificial Sequence
  Description of Artificial Sequence: Synthetic oligonucleotide
  Antisense strand to SEQ ID NO: 667220
aauuguaaagccuucgaau

SEQ ID NO: 667222 - RNA, 19 nt, Artificial Sequence
  Description of Artificial Sequence: Synthetic oligonucleotide
  Sense strand starting at position 3298 of SEQ ID NO: 585782
ugacauuguugggcccaga

SEQ ID NO: 667223 - RNA, 19 nt, Artificial Sequence
  Description of Artificial Sequence: Synthetic oligonucleotide
  Antisense strand to SEQ ID NO: 667222
ucugggcccaacaauguca

SEQ ID NO: 667224 - RNA, 19 nt, Artificial Sequence
  Description of Artificial Sequence: Synthetic oligonucleotide
  Sense strand starting at position 3506 of SEQ ID NO: 585782
aguaguuauggccacagaa

SEQ ID NO: 667225 - RNA, 19 nt, Artificial Sequence
  Description of Artificial Sequence: Synthetic oligonucleotide
  Antisense strand to SEQ ID NO: 667224
uucuguggccauaacuacu

SEQ ID NO: 667226 - RNA, 19 nt, Artificial Sequence
  Description of Artificial Sequence: Synthetic oligonucleotide
  Sense strand starting at position 3508 of SEQ ID NO: 585782
uaguuauggccacagaaca

SEQ ID NO: 667227 - RNA, 19 nt, Artificial Sequence
  Description of Artificial Sequence: Synthetic oligonucleotide
  Antisense strand to SEQ ID NO: 667226
uguucuguggccauaacua

SEQ ID NO: 667228 - RNA, 19 nt, Artificial Sequence
  Description of Artificial Sequence: Synthetic oligonucleotide
  Sense strand starting at position 3552 of SEQ ID NO: 585782
agucuuagaagugacgcua

SEQ ID NO: 667229 - RNA, 19 nt, Artificial Sequence
  Description of Artificial Sequence: Synthetic oligonucleotide
  Antisense strand to SEQ ID NO: 667228
uagcgucacuucuaagacu

SEQ ID NO: 667230 - RNA, 19 nt, Artificial Sequence
  Description of Artificial Sequence: Synthetic oligonucleotide
  Sense strand starting at position 3679 of SEQ ID NO: 585782
ugauauauguucucuauac

SEQ ID NO: 667231 - RNA, 19 nt, Artificial Sequence
  Description of Artificial Sequence: Synthetic oligonucleotide
  Antisense strand to SEQ ID NO: 667230
guauagagaacauauauca

SEQ ID NO: 667232 - RNA, 19 nt, Artificial Sequence
  Description of Artificial Sequence: Synthetic oligonucleotide
  Sense strand starting at position 3681 of SEQ ID NO: 585782
auauauguucucuauacug

SEQ ID NO: 667233 - RNA, 19 nt, Artificial Sequence
  Description of Artificial Sequence: Synthetic oligonucleotide
  Antisense strand to SEQ ID NO: 667232
caguauagagaacauauau

SEQ ID NO: 667234 - RNA, 19 nt, Artificial Sequence
  Description of Artificial Sequence: Synthetic oligonucleotide
  Sense strand starting at position 3758 of SEQ ID NO: 585782
ugaguuaaugucgauauag

SEQ ID NO: 667235 - RNA, 19 nt, Artificial Sequence
  Description of Artificial Sequence: Synthetic oligonucleotide
  Antisense strand to SEQ ID NO: 667234
cuauaucgacauuaacuca

SEQ ID NO: 667236 - RNA, 19 nt, Artificial Sequence
  Description of Artificial Sequence: Synthetic oligonucleotide
  Sense strand starting at position 3760 of SEQ ID NO: 585782
aguuaaugucgauauagaa

SEQ ID NO: 667237 - RNA, 19 nt, Artificial Sequence
  Description of Artificial Sequence: Synthetic oligonucleotide
  Antisense strand to SEQ ID NO: 667236
uucuauaucgacauuaacu

SEQ ID NO: 667238 - RNA, 19 nt, Artificial Sequence
  Description of Artificial Sequence: Synthetic oligonucleotide
  Sense strand starting at position 3928 of SEQ ID NO: 585782
gcaagauaaacugguugua

SEQ ID NO: 667239 - RNA, 19 nt, Artificial Sequence
  Description of Artificial Sequence: Synthetic oligonucleotide
  Antisense strand to SEQ ID NO: 667238
uacaaccaguuuaucuugc

SEQ ID NO: 667240 - RNA, 19 nt, Artificial Sequence
  Description of Artificial Sequence: Synthetic oligonucleotide
  Sense strand starting at position 3931 of SEQ ID NO: 585782
agauaaacugguuguaaau

SEQ ID NO: 667241 - RNA, 19 nt, Artificial Sequence
  Description of Artificial Sequence: Synthetic oligonucleotide
  Antisense strand to SEQ ID NO: 667240
auuuacaaccaguuuaucu

SEQ ID NO: 667242 - RNA, 19 nt, Artificial Sequence
  Description of Artificial Sequence: Synthetic oligonucleotide
  Sense strand starting at position 3941 of SEQ ID NO: 585782
guuguaaaugaaugaguug

SEQ ID NO: 667243 - RNA, 19 nt, Artificial Sequence
  Description of Artificial Sequence: Synthetic oligonucleotide
  Antisense strand to SEQ ID NO: 667242
caacucauucauuuacaac

SEQ ID NO: 667244 - RNA, 19 nt, Artificial Sequence
  Description of Artificial Sequence: Synthetic oligonucleotide
  Sense strand starting at position 3965 of SEQ ID NO: 585782
auaaaugcacuugauguau

SEQ ID NO: 667245 - RNA, 19 nt, Artificial Sequence
  Description of Artificial Sequence: Synthetic oligonucleotide
  Antisense strand to SEQ ID NO: 667244
auacaucaagugcauuuau

SEQ ID NO: 667246 - RNA, 19 nt, Artificial Sequence
  Description of Artificial Sequence: Synthetic oligonucleotide
  Sense strand starting at position 3971 of SEQ ID NO: 585782
gcacuugauguaugggauu

SEQ ID NO: 667247 - RNA, 19 nt, Artificial Sequence
  Description of Artificial Sequence: Synthetic oligonucleotide
  Antisense strand to SEQ ID NO: 667246
aaucccauacaucaagugc

SEQ ID NO: 667248 - RNA, 19 nt, Artificial Sequence
  Description of Artificial Sequence: Synthetic oligonucleotide
  Sense strand starting at position 3973 of SEQ ID NO: 585782
acuugauguaugggauugu

SEQ ID NO: 667249 - RNA, 19 nt, Artificial Sequence
  Description of Artificial Sequence: Synthetic oligonucleotide
  Antisense strand to SEQ ID NO: 667248
acaaucccauacaucaagu

SEQ ID NO: 667250 - RNA, 19 nt, Artificial Sequence
  Description of Artificial Sequence: Synthetic oligonucleotide
  Sense strand starting at position 121 of SEQ ID NO: 585783
gcacaacaauaguugauau

SEQ ID NO: 667251 - RNA, 19 nt, Artificial Sequence
  Description of Artificial Sequence: Synthetic oligonucleotide
  Antisense strand to SEQ ID NO: 667250
auaucaacuauuguugugc

SEQ ID NO: 667252 - RNA, 19 nt, Artificial Sequence
  Description of Artificial Sequence: Synthetic oligonucleotide
  Sense strand starting at position 131 of SEQ ID NO: 585783
aguugauaugcauaaugau

SEQ ID NO: 667253 - RNA, 19 nt, Artificial Sequence
  Description of Artificial Sequence: Synthetic oligonucleotide
  Antisense strand to SEQ ID NO: 667252
aucauuaugcauaucaacu

SEQ ID NO: 667254 - RNA, 19 nt, Artificial Sequence
  Description of Artificial Sequence: Synthetic oligonucleotide
  Sense strand starting at position 171 of SEQ ID NO: 585783
gguuguuacagucacuaca

SEQ ID NO: 667255 - RNA, 19 nt, Artificial Sequence
  Description of Artificial Sequence: Synthetic oligonucleotide
  Antisense strand to SEQ ID NO: 667254
uguagugacuguaacaacc

SEQ ID NO: 667256 - RNA, 19 nt, Artificial Sequence
  Description of Artificial Sequence: Synthetic oligonucleotide
  Sense strand starting at position 291 of SEQ ID NO: 585783
uccaaaguguuagugagaa

SEQ ID NO: 667257 - RNA, 19 nt, Artificial Sequence
  Description of Artificial Sequence: Synthetic oligonucleotide
  Antisense strand to SEQ ID NO: 667256
uucucacuaacacuuugga

SEQ ID NO: 667258 - RNA, 19 nt, Artificial Sequence
  Description of Artificial Sequence: Synthetic oligonucleotide
  Sense strand starting at position 413 of SEQ ID NO: 585783
uuacauaguuacccaagua

SEQ ID NO: 667259 - RNA, 19 nt, Artificial Sequence
  Description of Artificial Sequence: Synthetic oligonucleotide
  Antisense strand to SEQ ID NO: 667258
uacuuggguaacuauguaa

SEQ ID NO: 667260 - RNA, 19 nt, Artificial Sequence
  Description of Artificial Sequence: Synthetic oligonucleotide
  Sense strand starting at position 473 of SEQ ID NO: 585783
acacacguggauugagaaa

SEQ ID NO: 667261 - RNA, 19 nt, Artificial Sequence
  Description of Artificial Sequence: Synthetic oligonucleotide
  Antisense strand to SEQ ID NO: 667260
uuucucaauccacgugugu

SEQ ID NO: 667262 - RNA, 19 nt, Artificial Sequence
  Description of Artificial Sequence: Synthetic oligonucleotide
  Sense strand starting at position 514 of SEQ ID NO: 585783
uaagguguugcugaauauu

SEQ ID NO: 667263 - RNA, 19 nt, Artificial Sequence
  Description of Artificial Sequence: Synthetic oligonucleotide
  Antisense strand to SEQ ID NO: 667262
aauauucagcaacaccuua

SEQ ID NO: 667264 - RNA, 19 nt, Artificial Sequence
  Description of Artificial Sequence: Synthetic oligonucleotide
  Sense strand starting at position 522 of SEQ ID NO: 585783
ugcugaauauugucaauau

SEQ ID NO: 667265 - RNA, 19 nt, Artificial Sequence
  Description of Artificial Sequence: Synthetic oligonucleotide
  Antisense strand to SEQ ID NO: 667264
auauugacaauauucagca

SEQ ID NO: 667266 - RNA, 19 nt, Artificial Sequence
  Description of Artificial Sequence: Synthetic oligonucleotide
  Sense strand starting at position 586 of SEQ ID NO: 585783
aggauaaauuaugaacgaa

SEQ ID NO: 667267 - RNA, 19 nt, Artificial Sequence
  Description of Artificial Sequence: Synthetic oligonucleotide
  Antisense strand to SEQ ID NO: 667266
uucguucauaauuuauccu

SEQ ID NO: 667268 - RNA, 19 nt, Artificial Sequence
  Description of Artificial Sequence: Synthetic oligonucleotide
  Sense strand starting at position 693 of SEQ ID NO: 585783
agagaaagcuaguugagca

SEQ ID NO: 667269 - RNA, 19 nt, Artificial Sequence
  Description of Artificial Sequence: Synthetic oligonucleotide
  Antisense strand to SEQ ID NO: 667268
ugcucaacuagcuuucucu

SEQ ID NO: 667270 - RNA, 19 nt, Artificial Sequence
  Description of Artificial Sequence: Synthetic oligonucleotide
  Sense strand starting at position 767 of SEQ ID NO: 585783
ugaagauauuagcuucuuu

SEQ ID NO: 667271 - RNA, 19 nt, Artificial Sequence
  Description of Artificial Sequence: Synthetic oligonucleotide
  Antisense strand to SEQ ID NO: 667270
aaagaagcuaauaucuuca

SEQ ID NO: 667272 - RNA, 19 nt, Artificial Sequence
  Description of Artificial Sequence: Synthetic oligonucleotide
  Sense strand starting at position 1140 of SEQ ID NO: 585783
cuacuuguuuacuuacaga

SEQ ID NO: 667273 - RNA, 19 nt, Artificial Sequence
  Description of Artificial Sequence: Synthetic oligonucleotide
  Antisense strand to SEQ ID NO: 667272
ucuguaaguaaacaaguag

SEQ ID NO: 667274 - RNA, 19 nt, Artificial Sequence
  Description of Artificial Sequence: Synthetic oligonucleotide
  Sense strand starting at position 1222 of SEQ ID NO: 585783
cgugaauaacggcaaguaa

SEQ ID NO: 667275 - RNA, 19 nt, Artificial Sequence
  Description of Artificial Sequence: Synthetic oligonucleotide
  Antisense strand to SEQ ID NO: 667274
uuacuugccguuauucacg

SEQ ID NO: 667276 - RNA, 19 nt, Artificial Sequence
  Description of Artificial Sequence: Synthetic oligonucleotide
  Sense strand starting at position 1250 of SEQ ID NO: 585783
guaguagagacauaguugu

SEQ ID NO: 667277 - RNA, 19 nt, Artificial Sequence
  Description of Artificial Sequence: Synthetic oligonucleotide
  Antisense strand to SEQ ID NO: 667276
acaacuaugucucuacuac

SEQ ID NO: 667278 - RNA, 19 nt, Artificial Sequence
  Description of Artificial Sequence: Synthetic oligonucleotide
  Sense strand starting at position 1256 of SEQ ID NO: 585783
gagacauaguuguauuuaa

SEQ ID NO: 667279 - RNA, 19 nt, Artificial Sequence
  Description of Artificial Sequence: Synthetic oligonucleotide
  Antisense strand to SEQ ID NO: 667278
uuaaauacaacuaugucuc

SEQ ID NO: 667280 - RNA, 19 nt, Artificial Sequence
  Description of Artificial Sequence: Synthetic oligonucleotide
  Sense strand starting at position 1447 of SEQ ID NO: 585783
gaacgaagauacucgguuu

SEQ ID NO: 667281 - RNA, 19 nt, Artificial Sequence
  Description of Artificial Sequence: Synthetic oligonucleotide
  Antisense strand to SEQ ID NO: 667280
aaaccgaguaucuucguuc

SEQ ID NO: 667282 - RNA, 19 nt, Artificial Sequence
  Description of Artificial Sequence: Synthetic oligonucleotide
  Sense strand starting at position 1688 of SEQ ID NO: 585783
acacacaucugggugacau

SEQ ID NO: 667283 - RNA, 19 nt, Artificial Sequence
  Description of Artificial Sequence: Synthetic oligonucleotide
  Antisense strand to SEQ ID NO: 667282
augucacccagaugugugu

SEQ ID NO: 667284 - RNA, 19 nt, Artificial Sequence
  Description of Artificial Sequence: Synthetic oligonucleotide
  Sense strand starting at position 1689 of SEQ ID NO: 585783
cacacaucugggugacauu

SEQ ID NO: 667285 - RNA, 19 nt, Artificial Sequence
  Description of Artificial Sequence: Synthetic oligonucleotide
  Antisense strand to SEQ ID NO: 667284
aaugucacccagaugugug

SEQ ID NO: 667286 - RNA, 19 nt, Artificial Sequence
  Description of Artificial Sequence: Synthetic oligonucleotide
  Sense strand starting at position 1779 of SEQ ID NO: 585783
gcagucuucuuucuggaaa

SEQ ID NO: 667287 - RNA, 19 nt, Artificial Sequence
  Description of Artificial Sequence: Synthetic oligonucleotide
  Antisense strand to SEQ ID NO: 667286
uuuccagaaagaagacugc

SEQ ID NO: 667288 - RNA, 19 nt, Artificial Sequence
  Description of Artificial Sequence: Synthetic oligonucleotide
  Sense strand starting at position 1830 of SEQ ID NO: 585783
uggcuuuggugggcagaga

SEQ ID NO: 667289 - RNA, 19 nt, Artificial Sequence
  Description of Artificial Sequence: Synthetic oligonucleotide
  Antisense strand to SEQ ID NO: 667288
ucucugcccaccaaagcca

SEQ ID NO: 667290 - RNA, 19 nt, Artificial Sequence
  Description of Artificial Sequence: Synthetic oligonucleotide
  Sense strand starting at position 1831 of SEQ ID NO: 585783
ggcuuuggugggcagagaa

SEQ ID NO: 667291 - RNA, 19 nt, Artificial Sequence
  Description of Artificial Sequence: Synthetic oligonucleotide
  Antisense strand to SEQ ID NO: 667290
uucucugcccaccaaagcc

SEQ ID NO: 667292 - RNA, 19 nt, Artificial Sequence
  Description of Artificial Sequence: Synthetic oligonucleotide
  Sense strand starting at position 3123 of SEQ ID NO: 585783
uccauuuccucugggauuu

SEQ ID NO: 667293 - RNA, 19 nt, Artificial Sequence
  Description of Artificial Sequence: Synthetic oligonucleotide
  Antisense strand to SEQ ID NO: 667292
aaaucccagaggaaaugga

SEQ ID NO: 667294 - RNA, 19 nt, Artificial Sequence
  Description of Artificial Sequence: Synthetic oligonucleotide
  Sense strand starting at position 3169 of SEQ ID NO: 585783
cccuuaguccaaggacuuu

SEQ ID NO: 667295 - RNA, 19 nt, Artificial Sequence
  Description of Artificial Sequence: Synthetic oligonucleotide
  Antisense strand to SEQ ID NO: 667294
aaaguccuuggacuaaggg

SEQ ID NO: 667296 - RNA, 19 nt, Artificial Sequence
  Description of Artificial Sequence: Synthetic oligonucleotide
  Sense strand starting at position 3389 of SEQ ID NO: 585783
uugggaucuccgcgcauuu

SEQ ID NO: 667297 - RNA, 19 nt, Artificial Sequence
  Description of Artificial Sequence: Synthetic oligonucleotide
  Antisense strand to SEQ ID NO: 667296
aaaugcgcggagaucccaa

SEQ ID NO: 667298 - RNA, 19 nt, Artificial Sequence
  Description of Artificial Sequence: Synthetic oligonucleotide
  Sense strand starting at position 3417 of SEQ ID NO: 585783
uuugccuuugcuuagggau

SEQ ID NO: 667299 - RNA, 19 nt, Artificial Sequence
  Description of Artificial Sequence: Synthetic oligonucleotide
  Antisense strand to SEQ ID NO: 667298
aucccuaagcaaaggcaaa

SEQ ID NO: 667300 - RNA, 19 nt, Artificial Sequence
  Description of Artificial Sequence: Synthetic oligonucleotide
  Sense strand starting at position 3430 of SEQ ID NO: 585783
agggauguucugggcuuua

SEQ ID NO: 667301 - RNA, 19 nt, Artificial Sequence
  Description of Artificial Sequence: Synthetic oligonucleotide
  Antisense strand to SEQ ID NO: 667300
uaaagcccagaacaucccu

SEQ ID NO: 667302 - RNA, 19 nt, Artificial Sequence
  Description of Artificial Sequence: Synthetic oligonucleotide
  Sense strand starting at position 3442 of SEQ ID NO: 585783
ggcuuuauuugcucaguca

SEQ ID NO: 667303 - RNA, 19 nt, Artificial Sequence
  Description of Artificial Sequence: Synthetic oligonucleotide
  Antisense strand to SEQ ID NO: 667302
ugacugagcaaauaaagcc

SEQ ID NO: 667304 - RNA, 19 nt, Artificial Sequence
  Description of Artificial Sequence: Synthetic oligonucleotide
  Sense strand starting at position 3443 of SEQ ID NO: 585783
gcuuuauuugcucagucaa

SEQ ID NO: 667305 - RNA, 19 nt, Artificial Sequence
  Description of Artificial Sequence: Synthetic oligonucleotide
  Antisense strand to SEQ ID NO: 667304
uugacugagcaaauaaagc

SEQ ID NO: 667306 - RNA, 19 nt, Artificial Sequence
  Description of Artificial Sequence: Synthetic oligonucleotide
  Sense strand starting at position 3484 of SEQ ID NO: 585783
gaaagcaaguugucaaauc

SEQ ID NO: 667307 - RNA, 19 nt, Artificial Sequence
  Description of Artificial Sequence: Synthetic oligonucleotide
  Antisense strand to SEQ ID NO: 667306
gauuugacaacuugcuuuc

SEQ ID NO: 667308 - RNA, 19 nt, Artificial Sequence
  Description of Artificial Sequence: Synthetic oligonucleotide
  Sense strand starting at position 3537 of SEQ ID NO: 585783
ggaauucuugcaggcuuua

SEQ ID NO: 667309 - RNA, 19 nt, Artificial Sequence
  Description of Artificial Sequence: Synthetic oligonucleotide
  Antisense strand to SEQ ID NO: 667308
uaaagccugcaagaauucc

SEQ ID NO: 667310 - RNA, 19 nt, Artificial Sequence
  Description of Artificial Sequence: Synthetic oligonucleotide
  Sense strand starting at position 3694 of SEQ ID NO: 585783
ccaucaguggacugauaau

SEQ ID NO: 667311 - RNA, 19 nt, Artificial Sequence
  Description of Artificial Sequence: Synthetic oligonucleotide
  Antisense strand to SEQ ID NO: 667310
auuaucaguccacugaugg

SEQ ID NO: 667312 - RNA, 19 nt, Artificial Sequence
  Description of Artificial Sequence: Synthetic oligonucleotide
  Sense strand starting at position 3701 of SEQ ID NO: 585783
uggacugauaaucggugua

SEQ ID NO: 667313 - RNA, 19 nt, Artificial Sequence
  Description of Artificial Sequence: Synthetic oligonucleotide
  Antisense strand to SEQ ID NO: 667312
uacaccgauuaucagucca

SEQ ID NO: 667314 - RNA, 19 nt, Artificial Sequence
  Description of Artificial Sequence: Synthetic oligonucleotide
  Sense strand starting at position 3703 of SEQ ID NO: 585783
gacugauaaucgguguaga

SEQ ID NO: 667315 - RNA, 19 nt, Artificial Sequence
  Description of Artificial Sequence: Synthetic oligonucleotide
  Antisense strand to SEQ ID NO: 667314
ucuacaccgauuaucaguc

SEQ ID NO: 667316 - RNA, 19 nt, Artificial Sequence
  Description of Artificial Sequence: Synthetic oligonucleotide
  Sense strand starting at position 3704 of SEQ ID NO: 585783
acugauaaucgguguagau

SEQ ID NO: 667317 - RNA, 19 nt, Artificial Sequence
  Description of Artificial Sequence: Synthetic oligonucleotide
  Antisense strand to SEQ ID NO: 667316
aucuacaccgauuaucagu

SEQ ID NO: 667318 - RNA, 19 nt, Artificial Sequence
  Description of Artificial Sequence: Synthetic oligonucleotide
  Sense strand starting at position 3776 of SEQ ID NO: 585783
uugcuaggcacugaguaua

SEQ ID NO: 667319 - RNA, 19 nt, Artificial Sequence
  Description of Artificial Sequence: Synthetic oligonucleotide
  Antisense strand to SEQ ID NO: 667318
uauacucagugccuagcaa

SEQ ID NO: 667320 - RNA, 19 nt, Artificial Sequence
  Description of Artificial Sequence: Synthetic oligonucleotide
  Sense strand starting at position 3824 of SEQ ID NO: 585783
agaggaacuaguuguuaga

SEQ ID NO: 667321 - RNA, 19 nt, Artificial Sequence
  Description of Artificial Sequence: Synthetic oligonucleotide
  Antisense strand to SEQ ID NO: 667320
ucuaacaacuaguuccucu

SEQ ID NO: 667322 - RNA, 19 nt, Artificial Sequence
  Description of Artificial Sequence: Synthetic oligonucleotide
  Sense strand starting at position 3826 of SEQ ID NO: 585783
aggaacuaguuguuagaca

SEQ ID NO: 667323 - RNA, 19 nt, Artificial Sequence
  Description of Artificial Sequence: Synthetic oligonucleotide
  Antisense strand to SEQ ID NO: 667322
ugucuaacaacuaguuccu

SEQ ID NO: 667324 - RNA, 19 nt, Artificial Sequence
  Description of Artificial Sequence: Synthetic oligonucleotide
  Sense strand starting at position 3833 of SEQ ID NO: 585783
aguuguuagacauacgguu

SEQ ID NO: 667325 - RNA, 19 nt, Artificial Sequence
  Description of Artificial Sequence: Synthetic oligonucleotide
  Antisense strand to SEQ ID NO: 667324
aaccguaugucuaacaacu

SEQ ID NO: 667326 - RNA, 19 nt, Artificial Sequence
  Description of Artificial Sequence: Synthetic oligonucleotide
  Sense strand starting at position 3886 of SEQ ID NO: 585783
ggagaugacuuagcccaau

SEQ ID NO: 667327 - RNA, 19 nt, Artificial Sequence
  Description of Artificial Sequence: Synthetic oligonucleotide
  Antisense strand to SEQ ID NO: 667326
auugggcuaagucaucucc

SEQ ID NO: 667328 - RNA, 19 nt, Artificial Sequence
  Description of Artificial Sequence: Synthetic oligonucleotide
  Sense strand starting at position 3896 of SEQ ID NO: 585783
uagcccaaucuuggaaagu

SEQ ID NO: 667329 - RNA, 19 nt, Artificial Sequence
  Description of Artificial Sequence: Synthetic oligonucleotide
  Antisense strand to SEQ ID NO: 667328
acuuuccaagauugggcua

SEQ ID NO: 667330 - RNA, 19 nt, Artificial Sequence
  Description of Artificial Sequence: Synthetic oligonucleotide
  Sense strand starting at position 529 of SEQ ID NO: 585784
augcuugccucuuugaagu

SEQ ID NO: 667331 - RNA, 19 nt, Artificial Sequence
  Description of Artificial Sequence: Synthetic oligonucleotide
  Antisense strand to SEQ ID NO: 667330
acuucaaagaggcaagcau

SEQ ID NO: 667332 - RNA, 19 nt, Artificial Sequence
  Description of Artificial Sequence: Synthetic oligonucleotide
  Sense strand starting at position 564 of SEQ ID NO: 585784
acauacucccagcguuagu

SEQ ID NO: 667333 - RNA, 19 nt, Artificial Sequence
  Description of Artificial Sequence: Synthetic oligonucleotide
  Antisense strand to SEQ ID NO: 667332
acuaacgcugggaguaugu

SEQ ID NO: 667334 - RNA, 19 nt, Artificial Sequence
  Description of Artificial Sequence: Synthetic oligonucleotide
  Sense strand starting at position 575 of SEQ ID NO: 585784
gcguuaguaccauugcacu

SEQ ID NO: 667335 - RNA, 19 nt, Artificial Sequence
  Description of Artificial Sequence: Synthetic oligonucleotide
  Antisense strand to SEQ ID NO: 667334
agugcaaugguacuaacgc

SEQ ID NO: 667336 - RNA, 19 nt, Artificial Sequence
  Description of Artificial Sequence: Synthetic oligonucleotide
  Sense strand starting at position 656 of SEQ ID NO: 585784
uccugaagucuuugcucaa

SEQ ID NO: 667337 - RNA, 19 nt, Artificial Sequence
  Description of Artificial Sequence: Synthetic oligonucleotide
  Antisense strand to SEQ ID NO: 667336
uugagcaaagacuucagga

SEQ ID NO: 667338 - RNA, 19 nt, Artificial Sequence
  Description of Artificial Sequence: Synthetic oligonucleotide
  Sense strand starting at position 657 of SEQ ID NO: 585784
ccugaagucuuugcucaaa

SEQ ID NO: 667339 - RNA, 19 nt, Artificial Sequence
  Description of Artificial Sequence: Synthetic oligonucleotide
  Antisense strand to SEQ ID NO: 667338
uuugagcaaagacuucagg

SEQ ID NO: 667340 - RNA, 19 nt, Artificial Sequence
  Description of Artificial Sequence: Synthetic oligonucleotide
  Sense strand starting at position 677 of SEQ ID NO: 585784
gucaccaucucaguaacuu

SEQ ID NO: 667341 - RNA, 19 nt, Artificial Sequence
  Description of Artificial Sequence: Synthetic oligonucleotide
  Antisense strand to SEQ ID NO: 667340
aaguuacugagauggugac

SEQ ID NO: 667342 - RNA, 19 nt, Artificial Sequence
  Description of Artificial Sequence: Synthetic oligonucleotide
  Sense strand starting at position 686 of SEQ ID NO: 585784
ucaguaacuugugcaucau

SEQ ID NO: 667343 - RNA, 19 nt, Artificial Sequence
  Description of Artificial Sequence: Synthetic oligonucleotide
  Antisense strand to SEQ ID NO: 667342
augaugcacaaguuacuga

SEQ ID NO: 667344 - RNA, 19 nt, Artificial Sequence
  Description of Artificial Sequence: Synthetic oligonucleotide
  Sense strand starting at position 922 of SEQ ID NO: 585784
cuugucauuucuggagaca

SEQ ID NO: 667345 - RNA, 19 nt, Artificial Sequence
  Description of Artificial Sequence: Synthetic oligonucleotide
  Antisense strand to SEQ ID NO: 667344
ugucuccagaaaugacaag

SEQ ID NO: 667346 - RNA, 19 nt, Artificial Sequence
  Description of Artificial Sequence: Synthetic oligonucleotide
  Sense strand starting at position 1125 of SEQ ID NO: 585784
gggaauuaauuauaaaggu

SEQ ID NO: 667347 - RNA, 19 nt, Artificial Sequence
  Description of Artificial Sequence: Synthetic oligonucleotide
  Antisense strand to SEQ ID NO: 667346
accuuuauaauuaauuccc

SEQ ID NO: 667348 - RNA, 19 nt, Artificial Sequence
  Description of Artificial Sequence: Synthetic oligonucleotide
  Sense strand starting at position 1154 of SEQ ID NO: 585784
gaucuaagugccuggccau

SEQ ID NO: 667349 - RNA, 19 nt, Artificial Sequence
  Description of Artificial Sequence: Synthetic oligonucleotide
  Antisense strand to SEQ ID NO: 667348
auggccaggcacuuagauc

SEQ ID NO: 667350 - RNA, 19 nt, Artificial Sequence
  Description of Artificial Sequence: Synthetic oligonucleotide
  Sense strand starting at position 1266 of SEQ ID NO: 585784
cugaacgauuucuaaacuu

SEQ ID NO: 667351 - RNA, 19 nt, Artificial Sequence
  Description of Artificial Sequence: Synthetic oligonucleotide
  Antisense strand to SEQ ID NO: 667350
aaguuuagaaaucguucag

SEQ ID NO: 667352 - RNA, 19 nt, Artificial Sequence
  Description of Artificial Sequence: Synthetic oligonucleotide
  Sense strand starting at position 1435 of SEQ ID NO: 585784
guucuaaggguccacauga

SEQ ID NO: 667353 - RNA, 19 nt, Artificial Sequence
  Description of Artificial Sequence: Synthetic oligonucleotide
  Antisense strand to SEQ ID NO: 667352
ucauguggacccuuagaac

SEQ ID NO: 667354 - RNA, 19 nt, Artificial Sequence
  Description of Artificial Sequence: Synthetic oligonucleotide
  Sense strand starting at position 1544 of SEQ ID NO: 585784
aggaauacuuaagaggauu

SEQ ID NO: 667355 - RNA, 19 nt, Artificial Sequence
  Description of Artificial Sequence: Synthetic oligonucleotide
  Antisense strand to SEQ ID NO: 667354
aauccucuuaaguauuccu

SEQ ID NO: 667356 - RNA, 19 nt, Artificial Sequence
  Description of Artificial Sequence: Synthetic oligonucleotide
  Sense strand starting at position 1712 of SEQ ID NO: 585784
ccgcaauggcgaaguaguu

SEQ ID NO: 667357 - RNA, 19 nt, Artificial Sequence
  Description of Artificial Sequence: Synthetic oligonucleotide
  Antisense strand to SEQ ID NO: 667356
aacuacuucgccauugcgg

SEQ ID NO: 667358 - RNA, 19 nt, Artificial Sequence
  Description of Artificial Sequence: Synthetic oligonucleotide
  Sense strand starting at position 1718 of SEQ ID NO: 585784
uggcgaaguaguugagaag

SEQ ID NO: 667359 - RNA, 19 nt, Artificial Sequence
  Description of Artificial Sequence: Synthetic oligonucleotide
  Antisense strand to SEQ ID NO: 667358
cuucucaacuacuucgcca

SEQ ID NO: 667360 - RNA, 19 nt, Artificial Sequence
  Description of Artificial Sequence: Synthetic oligonucleotide
  Sense strand starting at position 1724 of SEQ ID NO: 585784
aguaguugagaaggucgaa

SEQ ID NO: 667361 - RNA, 19 nt, Artificial Sequence
  Description of Artificial Sequence: Synthetic oligonucleotide
  Antisense strand to SEQ ID NO: 667360
uucgaccuucucaacuacu

SEQ ID NO: 667362 - RNA, 19 nt, Artificial Sequence
  Description of Artificial Sequence: Synthetic oligonucleotide
  Sense strand starting at position 1863 of SEQ ID NO: 585784
gguguagcggucagucauc

SEQ ID NO: 667363 - RNA, 19 nt, Artificial Sequence
  Description of Artificial Sequence: Synthetic oligonucleotide
  Antisense strand to SEQ ID NO: 667362
gaugacugaccgcuacacc

SEQ ID NO: 667364 - RNA, 19 nt, Artificial Sequence
  Description of Artificial Sequence: Synthetic oligonucleotide
  Sense strand starting at position 2022 of SEQ ID NO: 585784
agcguaacucucgcucaua

SEQ ID NO: 667365 - RNA, 19 nt, Artificial Sequence
  Description of Artificial Sequence: Synthetic oligonucleotide
  Antisense strand to SEQ ID NO: 667364
uaugagcgagaguuacgcu

SEQ ID NO: 667366 - RNA, 19 nt, Artificial Sequence
  Description of Artificial Sequence: Synthetic oligonucleotide
  Sense strand starting at position 2145 of SEQ ID NO: 585784
gagaauguugcaugauggu

SEQ ID NO: 667367 - RNA, 19 nt, Artificial Sequence
  Description of Artificial Sequence: Synthetic oligonucleotide
  Antisense strand to SEQ ID NO: 667366
accaucaugcaacauucuc

SEQ ID NO: 667368 - RNA, 19 nt, Artificial Sequence
  Description of Artificial Sequence: Synthetic oligonucleotide
  Sense strand starting at position 2217 of SEQ ID NO: 585784
acuuguggucuugggaguu

SEQ ID NO: 667369 - RNA, 19 nt, Artificial Sequence
  Description of Artificial Sequence: Synthetic oligonucleotide
  Antisense strand to SEQ ID NO: 667368
aacucccaagaccacaagu

SEQ ID NO: 667370 - RNA, 19 nt, Artificial Sequence
  Description of Artificial Sequence: Synthetic oligonucleotide
  Sense strand starting at position 2470 of SEQ ID NO: 585784
ggguuucacuggucucgaa

SEQ ID NO: 667371 - RNA, 19 nt, Artificial Sequence
  Description of Artificial Sequence: Synthetic oligonucleotide
  Antisense strand to SEQ ID NO: 667370
uucgagaccagugaaaccc

SEQ ID NO: 667372 - RNA, 19 nt, Artificial Sequence
  Description of Artificial Sequence: Synthetic oligonucleotide
  Sense strand starting at position 2698 of SEQ ID NO: 585784
auaaacucuugguguauuu

SEQ ID NO: 667373 - RNA, 19 nt, Artificial Sequence
  Description of Artificial Sequence: Synthetic oligonucleotide
  Antisense strand to SEQ ID NO: 667372
aaauacaccaagaguuuau

SEQ ID NO: 667374 - RNA, 19 nt, Artificial Sequence
  Description of Artificial Sequence: Synthetic oligonucleotide
  Sense strand starting at position 2782 of SEQ ID NO: 585784
gcgccaguucuggucccaa

SEQ ID NO: 667375 - RNA, 19 nt, Artificial Sequence
  Description of Artificial Sequence: Synthetic oligonucleotide
  Antisense strand to SEQ ID NO: 667374
uugggaccagaacuggcgc

SEQ ID NO: 667376 - RNA, 19 nt, Artificial Sequence
  Description of Artificial Sequence: Synthetic oligonucleotide
  Sense strand starting at position 2797 of SEQ ID NO: 585784
ccaacuaugucucuuagga

SEQ ID NO: 667377 - RNA, 19 nt, Artificial Sequence
  Description of Artificial Sequence: Synthetic oligonucleotide
  Antisense strand to SEQ ID NO: 667376
uccuaagagacauaguugg

SEQ ID NO: 667378 - RNA, 19 nt, Artificial Sequence
  Description of Artificial Sequence: Synthetic oligonucleotide
  Sense strand starting at position 2853 of SEQ ID NO: 585784
ggugcuuggugagcaagua

SEQ ID NO: 667379 - RNA, 19 nt, Artificial Sequence
  Description of Artificial Sequence: Synthetic oligonucleotide
  Antisense strand to SEQ ID NO: 667378
uacuugcucaccaagcacc

SEQ ID NO: 667380 - RNA, 19 nt, Artificial Sequence
  Description of Artificial Sequence: Synthetic oligonucleotide
  Sense strand starting at position 3035 of SEQ ID NO: 585784
aauaucagucuguaccgaa

SEQ ID NO: 667381 - RNA, 19 nt, Artificial Sequence
  Description of Artificial Sequence: Synthetic oligonucleotide
  Antisense strand to SEQ ID NO: 667380
uucgguacagacugauauu

SEQ ID NO: 667382 - RNA, 19 nt, Artificial Sequence
  Description of Artificial Sequence: Synthetic oligonucleotide
  Sense strand starting at position 3207 of SEQ ID NO: 585784
acuugagcauccucuaguu

SEQ ID NO: 667383 - RNA, 19 nt, Artificial Sequence
  Description of Artificial Sequence: Synthetic oligonucleotide
  Antisense strand to SEQ ID NO: 667382
aacuagaggaugcucaagu

SEQ ID NO: 667384 - RNA, 19 nt, Artificial Sequence
  Description of Artificial Sequence: Synthetic oligonucleotide
  Sense strand starting at position 3349 of SEQ ID NO: 585784
gucuguucccuuggugaac

SEQ ID NO: 667385 - RNA, 19 nt, Artificial Sequence
  Description of Artificial Sequence: Synthetic oligonucleotide
  Antisense strand to SEQ ID NO: 667384
guucaccaagggaacagac

SEQ ID NO: 667386 - RNA, 19 nt, Artificial Sequence
  Description of Artificial Sequence: Synthetic oligonucleotide
  Sense strand starting at position 3415 of SEQ ID NO: 585784
cuggcugcuccagacagau

SEQ ID NO: 667387 - RNA, 19 nt, Artificial Sequence
  Description of Artificial Sequence: Synthetic oligonucleotide
  Antisense strand to SEQ ID NO: 667386
aucugucuggagcagccag

SEQ ID NO: 667388 - RNA, 19 nt, Artificial Sequence
  Description of Artificial Sequence: Synthetic oligonucleotide
  Sense strand starting at position 3457 of SEQ ID NO: 585784
aguuauacgucucuuccuu

SEQ ID NO: 667389 - RNA, 19 nt, Artificial Sequence
  Description of Artificial Sequence: Synthetic oligonucleotide
  Antisense strand to SEQ ID NO: 667388
aaggaagagacguauaacu

SEQ ID NO: 667390 - RNA, 19 nt, Artificial Sequence
  Description of Artificial Sequence: Synthetic oligonucleotide
  Sense strand starting at position 3459 of SEQ ID NO: 585784
uuauacgucucuuccuuau

SEQ ID NO: 667391 - RNA, 19 nt, Artificial Sequence
  Description of Artificial Sequence: Synthetic oligonucleotide
  Antisense strand to SEQ ID NO: 667390
auaaggaagagacguauaa

SEQ ID NO: 667392 - RNA, 19 nt, Artificial Sequence
  Description of Artificial Sequence: Synthetic oligonucleotide
  Sense strand starting at position 3461 of SEQ ID NO: 585784
auacgucucuuccuuauua

SEQ ID NO: 667393 - RNA, 19 nt, Artificial Sequence
  Description of Artificial Sequence: Synthetic oligonucleotide
  Antisense strand to SEQ ID NO: 667392
uaauaaggaagagacguau

SEQ ID NO: 667394 - RNA, 19 nt, Artificial Sequence
  Description of Artificial Sequence: Synthetic oligonucleotide
  Sense strand starting at position 3472 of SEQ ID NO: 585784
ccuuauuauugcuuuaugu

SEQ ID NO: 667395 - RNA, 19 nt, Artificial Sequence
  Description of Artificial Sequence: Synthetic oligonucleotide
  Antisense strand to SEQ ID NO: 667394
acauaaagcaauaauaagg

SEQ ID NO: 667396 - RNA, 19 nt, Artificial Sequence
  Description of Artificial Sequence: Synthetic oligonucleotide
  Sense strand starting at position 3488 of SEQ ID NO: 585784
uguccuacuguuugguuua

SEQ ID NO: 667397 - RNA, 19 nt, Artificial Sequence
  Description of Artificial Sequence: Synthetic oligonucleotide
  Antisense strand to SEQ ID NO: 667396
uaaaccaaacaguaggaca

SEQ ID NO: 667398 - RNA, 19 nt, Artificial Sequence
  Description of Artificial Sequence: Synthetic oligonucleotide
  Sense strand starting at position 3490 of SEQ ID NO: 585784
uccuacuguuugguuuaau

SEQ ID NO: 667399 - RNA, 19 nt, Artificial Sequence
  Description of Artificial Sequence: Synthetic oligonucleotide
  Antisense strand to SEQ ID NO: 667398
auuaaaccaaacaguagga

SEQ ID NO: 667400 - RNA, 19 nt, Artificial Sequence
  Description of Artificial Sequence: Synthetic oligonucleotide
  Sense strand starting at position 3491 of SEQ ID NO: 585784
ccuacuguuugguuuaaua

SEQ ID NO: 667401 - RNA, 19 nt, Artificial Sequence
  Description of Artificial Sequence: Synthetic oligonucleotide
  Antisense strand to SEQ ID NO: 667400
uauuaaaccaaacaguagg

SEQ ID NO: 667402 - RNA, 19 nt, Artificial Sequence
  Description of Artificial Sequence: Synthetic oligonucleotide
  Sense strand starting at position 3665 of SEQ ID NO: 585784
cuguuuaaacuucguuaua

SEQ ID NO: 667403 - RNA, 19 nt, Artificial Sequence
  Description of Artificial Sequence: Synthetic oligonucleotide
  Antisense strand to SEQ ID NO: 667402
uauaacgaaguuuaaacag

SEQ ID NO: 667404 - RNA, 19 nt, Artificial Sequence
  Description of Artificial Sequence: Synthetic oligonucleotide
  Sense strand starting at position 3667 of SEQ ID NO: 585784
guuuaaacuucguuauaac

SEQ ID NO: 667405 - RNA, 19 nt, Artificial Sequence
  Description of Artificial Sequence: Synthetic oligonucleotide
  Antisense strand to SEQ ID NO: 667404
guuauaacgaaguuuaaac

SEQ ID NO: 667406 - RNA, 19 nt, Artificial Sequence
  Description of Artificial Sequence: Synthetic oligonucleotide
  Sense strand starting at position 3864 of SEQ ID NO: 585784
ccgucuauauuguuauaaa

SEQ ID NO: 667407 - RNA, 19 nt, Artificial Sequence
  Description of Artificial Sequence: Synthetic oligonucleotide
  Antisense strand to SEQ ID NO: 667406
uuuauaacaauauagacgg

SEQ ID NO: 667408 - RNA, 19 nt, Artificial Sequence
  Description of Artificial Sequence: Synthetic oligonucleotide
  Sense strand starting at position 3939 of SEQ ID NO: 585784
uguuuacugcuauacagua

SEQ ID NO: 667409 - RNA, 19 nt, Artificial Sequence
  Description of Artificial Sequence: Synthetic oligonucleotide
  Antisense strand to SEQ ID NO: 667408
uacuguauagcaguaaaca

SEQ ID NO: 667410 - RNA, 19 nt, Artificial Sequence
  Description of Artificial Sequence: Synthetic oligonucleotide
  Sense strand starting at position 28 of SEQ ID NO: 585785
ggaggccuuaucuaaguaa

SEQ ID NO: 667411 - RNA, 19 nt, Artificial Sequence
  Description of Artificial Sequence: Synthetic oligonucleotide
  Antisense strand to SEQ ID NO: 667410
uuacuuagauaaggccucc

SEQ ID NO: 667412 - RNA, 19 nt, Artificial Sequence
  Description of Artificial Sequence: Synthetic oligonucleotide
  Sense strand starting at position 31 of SEQ ID NO: 585785
ggccuuaucuaaguaauau

SEQ ID NO: 667413 - RNA, 19 nt, Artificial Sequence
  Description of Artificial Sequence: Synthetic oligonucleotide
  Antisense strand to SEQ ID NO: 667412
auauuacuuagauaaggcc

SEQ ID NO: 667414 - RNA, 19 nt, Artificial Sequence
  Description of Artificial Sequence: Synthetic oligonucleotide
  Sense strand starting at position 162 of SEQ ID NO: 585785
gguauuugcacuggucacu

SEQ ID NO: 667415 - RNA, 19 nt, Artificial Sequence
  Description of Artificial Sequence: Synthetic oligonucleotide
  Antisense strand to SEQ ID NO: 667414
agugaccagugcaaauacc

SEQ ID NO: 667416 - RNA, 19 nt, Artificial Sequence
  Description of Artificial Sequence: Synthetic oligonucleotide
  Sense strand starting at position 343 of SEQ ID NO: 585785
gugggcucaagauaaguga

SEQ ID NO: 667417 - RNA, 19 nt, Artificial Sequence
  Description of Artificial Sequence: Synthetic oligonucleotide
  Antisense strand to SEQ ID NO: 667416
ucacuuaucuugagcccac

SEQ ID NO: 667418 - RNA, 19 nt, Artificial Sequence
  Description of Artificial Sequence: Synthetic oligonucleotide
  Sense strand starting at position 346 of SEQ ID NO: 585785
ggcucaagauaagugauau

SEQ ID NO: 667419 - RNA, 19 nt, Artificial Sequence
  Description of Artificial Sequence: Synthetic oligonucleotide
  Antisense strand to SEQ ID NO: 667418
auaucacuuaucuugagcc

SEQ ID NO: 667420 - RNA, 19 nt, Artificial Sequence
  Description of Artificial Sequence: Synthetic oligonucleotide
  Sense strand starting at position 379 of SEQ ID NO: 585785
caaaguuuagaguagcacu

SEQ ID NO: 667421 - RNA, 19 nt, Artificial Sequence
  Description of Artificial Sequence: Synthetic oligonucleotide
  Antisense strand to SEQ ID NO: 667420
agugcuacucuaaacuuug

SEQ ID NO: 667422 - RNA, 19 nt, Artificial Sequence
  Description of Artificial Sequence: Synthetic oligonucleotide
  Sense strand starting at position 428 of SEQ ID NO: 585785
ucuguaucugcgcuguuua

SEQ ID NO: 667423 - RNA, 19 nt, Artificial Sequence
  Description of Artificial Sequence: Synthetic oligonucleotide
  Antisense strand to SEQ ID NO: 667422
uaaacagcgcagauacaga

SEQ ID NO: 667424 - RNA, 19 nt, Artificial Sequence
  Description of Artificial Sequence: Synthetic oligonucleotide
  Sense strand starting at position 430 of SEQ ID NO: 585785
uguaucugcgcuguuuaau

SEQ ID NO: 667425 - RNA, 19 nt, Artificial Sequence
  Description of Artificial Sequence: Synthetic oligonucleotide
  Antisense strand to SEQ ID NO: 667424
auuaaacagcgcagauaca

SEQ ID NO: 667426 - RNA, 19 nt, Artificial Sequence
  Description of Artificial Sequence: Synthetic oligonucleotide
  Sense strand starting at position 431 of SEQ ID NO: 585785
guaucugcgcuguuuaaua

SEQ ID NO: 667427 - RNA, 19 nt, Artificial Sequence
  Description of Artificial Sequence: Synthetic oligonucleotide
  Antisense strand to SEQ ID NO: 667426
uauuaaacagcgcagauac

SEQ ID NO: 667428 - RNA, 19 nt, Artificial Sequence
  Description of Artificial Sequence: Synthetic oligonucleotide
  Sense strand starting at position 462 of SEQ ID NO: 585785
accacaugugccuacugaa

SEQ ID NO: 667429 - RNA, 19 nt, Artificial Sequence
  Description of Artificial Sequence: Synthetic oligonucleotide
  Antisense strand to SEQ ID NO: 667428
uucaguaggcacauguggu

SEQ ID NO: 667430 - RNA, 19 nt, Artificial Sequence
  Description of Artificial Sequence: Synthetic oligonucleotide
  Sense strand starting at position 478 of SEQ ID NO: 585785
gaacaugugaaaugugguu

SEQ ID NO: 667431 - RNA, 19 nt, Artificial Sequence
  Description of Artificial Sequence: Synthetic oligonucleotide
  Antisense strand to SEQ ID NO: 667430
aaccacauuucacauguuc

SEQ ID NO: 667432 - RNA, 19 nt, Artificial Sequence
  Description of Artificial Sequence: Synthetic oligonucleotide
  Sense strand starting at position 493 of SEQ ID NO: 585785
gguugcugugacuaaggaa

SEQ ID NO: 667433 - RNA, 19 nt, Artificial Sequence
  Description of Artificial Sequence: Synthetic oligonucleotide
  Antisense strand to SEQ ID NO: 667432
uuccuuagucacagcaacc

SEQ ID NO: 667434 - RNA, 19 nt, Artificial Sequence
  Description of Artificial Sequence: Synthetic oligonucleotide
  Sense strand starting at position 882 of SEQ ID NO: 585785
ugugguaauauacagaguu

SEQ ID NO: 667435 - RNA, 19 nt, Artificial Sequence
  Description of Artificial Sequence: Synthetic oligonucleotide
  Antisense strand to SEQ ID NO: 667434
aacucuguauauuaccaca

SEQ ID NO: 667436 - RNA, 19 nt, Artificial Sequence
  Description of Artificial Sequence: Synthetic oligonucleotide
  Sense strand starting at position 975 of SEQ ID NO: 585785
ccaagugcugaguaaguau

SEQ ID NO: 667437 - RNA, 19 nt, Artificial Sequence
  Description of Artificial Sequence: Synthetic oligonucleotide
  Antisense strand to SEQ ID NO: 667436
auacuuacucagcacuugg

SEQ ID NO: 667438 - RNA, 19 nt, Artificial Sequence
  Description of Artificial Sequence: Synthetic oligonucleotide
  Sense strand starting at position 1152 of SEQ ID NO: 585785
aaccuucuugcuggaggaa

SEQ ID NO: 667439 - RNA, 19 nt, Artificial Sequence
  Description of Artificial Sequence: Synthetic oligonucleotide
  Antisense strand to SEQ ID NO: 667438
uuccuccagcaagaagguu

SEQ ID NO: 667440 - RNA, 19 nt, Artificial Sequence
  Description of Artificial Sequence: Synthetic oligonucleotide
  Sense strand starting at position 1249 of SEQ ID NO: 585785
ggcucacugccuuaacaga

SEQ ID NO: 667441 - RNA, 19 nt, Artificial Sequence
  Description of Artificial Sequence: Synthetic oligonucleotide
  Antisense strand to SEQ ID NO: 667440
ucuguuaaggcagugagcc

SEQ ID NO: 667442 - RNA, 19 nt, Artificial Sequence
  Description of Artificial Sequence: Synthetic oligonucleotide
  Sense strand starting at position 1426 of SEQ ID NO: 585785
ugcagcuugcaggauaaau

SEQ ID NO: 667443 - RNA, 19 nt, Artificial Sequence
  Description of Artificial Sequence: Synthetic oligonucleotide
  Antisense strand to SEQ ID NO: 667442
auuuauccugcaagcugca

SEQ ID NO: 667444 - RNA, 19 nt, Artificial Sequence
  Description of Artificial Sequence: Synthetic oligonucleotide
  Sense strand starting at position 1437 of SEQ ID NO: 585785
ggauaaaugcccugcauag

SEQ ID NO: 667445 - RNA, 19 nt, Artificial Sequence
  Description of Artificial Sequence: Synthetic oligonucleotide
  Antisense strand to SEQ ID NO: 667444
cuaugcagggcauuuaucc

SEQ ID NO: 667446 - RNA, 19 nt, Artificial Sequence
  Description of Artificial Sequence: Synthetic oligonucleotide
  Sense strand starting at position 1515 of SEQ ID NO: 585785
acgugggagcgauggauua

SEQ ID NO: 667447 - RNA, 19 nt, Artificial Sequence
  Description of Artificial Sequence: Synthetic oligonucleotide
  Antisense strand to SEQ ID NO: 667446
uaauccaucgcucccacgu

SEQ ID NO: 667448 - RNA, 19 nt, Artificial Sequence
  Description of Artificial Sequence: Synthetic oligonucleotide
  Sense strand starting at position 1517 of SEQ ID NO: 585785
gugggagcgauggauuauu

SEQ ID NO: 667449 - RNA, 19 nt, Artificial Sequence
  Description of Artificial Sequence: Synthetic oligonucleotide
  Antisense strand to SEQ ID NO: 667448
aauaauccaucgcucccac

SEQ ID NO: 667450 - RNA, 19 nt, Artificial Sequence
  Description of Artificial Sequence: Synthetic oligonucleotide
  Sense strand starting at position 1525 of SEQ ID NO: 585785
gauggauuauuugggaaag

SEQ ID NO: 667451 - RNA, 19 nt, Artificial Sequence
  Description of Artificial Sequence: Synthetic oligonucleotide
  Antisense strand to SEQ ID NO: 667450
cuuucccaaauaauccauc

SEQ ID NO: 667452 - RNA, 19 nt, Artificial Sequence
  Description of Artificial Sequence: Synthetic oligonucleotide
  Sense strand starting at position 1559 of SEQ ID NO: 585785
gcggauuccuaagucagaa

SEQ ID NO: 667453 - RNA, 19 nt, Artificial Sequence
  Description of Artificial Sequence: Synthetic oligonucleotide
  Antisense strand to SEQ ID NO: 667452
uucugacuuaggaauccgc

SEQ ID NO: 667454 - RNA, 19 nt, Artificial Sequence
  Description of Artificial Sequence: Synthetic oligonucleotide
  Sense strand starting at position 1637 of SEQ ID NO: 585785
acuggaaaguucucaaauu

SEQ ID NO: 667455 - RNA, 19 nt, Artificial Sequence
  Description of Artificial Sequence: Synthetic oligonucleotide
  Antisense strand to SEQ ID NO: 667454
aauuugagaacuuuccagu

SEQ ID NO: 667456 - RNA, 19 nt, Artificial Sequence
  Description of Artificial Sequence: Synthetic oligonucleotide
  Sense strand starting at position 2548 of SEQ ID NO: 585785
gcuauuucuuuacucaguu

SEQ ID NO: 667457 - RNA, 19 nt, Artificial Sequence
  Description of Artificial Sequence: Synthetic oligonucleotide
  Antisense strand to SEQ ID NO: 667456
aacugaguaaagaaauagc

SEQ ID NO: 667458 - RNA, 19 nt, Artificial Sequence
  Description of Artificial Sequence: Synthetic oligonucleotide
  Sense strand starting at position 2574 of SEQ ID NO: 585785
cagcuaggaguuugaaaga

SEQ ID NO: 667459 - RNA, 19 nt, Artificial Sequence
  Description of Artificial Sequence: Synthetic oligonucleotide
  Antisense strand to SEQ ID NO: 667458
ucuuucaaacuccuagcug

SEQ ID NO: 667460 - RNA, 19 nt, Artificial Sequence
  Description of Artificial Sequence: Synthetic oligonucleotide
  Sense strand starting at position 2793 of SEQ ID NO: 585785
cuaauauggucuccagaag

SEQ ID NO: 667461 - RNA, 19 nt, Artificial Sequence
  Description of Artificial Sequence: Synthetic oligonucleotide
  Antisense strand to SEQ ID NO: 667460
cuucuggagaccauauuag

SEQ ID NO: 667462 - RNA, 19 nt, Artificial Sequence
  Description of Artificial Sequence: Synthetic oligonucleotide
  Sense strand starting at position 2794 of SEQ ID NO: 585785
uaauauggucuccagaagu

SEQ ID NO: 667463 - RNA, 19 nt, Artificial Sequence
  Description of Artificial Sequence: Synthetic oligonucleotide
  Antisense strand to SEQ ID NO: 667462
acuucuggagaccauauua

SEQ ID NO: 667464 - RNA, 19 nt, Artificial Sequence
  Description of Artificial Sequence: Synthetic oligonucleotide
  Sense strand starting at position 2807 of SEQ ID NO: 585785
agaagucauuaagugauag

SEQ ID NO: 667465 - RNA, 19 nt, Artificial Sequence
  Description of Artificial Sequence: Synthetic oligonucleotide
  Antisense strand to SEQ ID NO: 667464
cuaucacuuaaugacuucu

SEQ ID NO: 667466 - RNA, 19 nt, Artificial Sequence
  Description of Artificial Sequence: Synthetic oligonucleotide
  Sense strand starting at position 2844 of SEQ ID NO: 585785
cuucuaggcuugguaagau

SEQ ID NO: 667467 - RNA, 19 nt, Artificial Sequence
  Description of Artificial Sequence: Synthetic oligonucleotide
  Antisense strand to SEQ ID NO: 667466
aucuuaccaagccuagaag

SEQ ID NO: 667468 - RNA, 19 nt, Artificial Sequence
  Description of Artificial Sequence: Synthetic oligonucleotide
  Sense strand starting at position 2964 of SEQ ID NO: 585785
ccuacugccucaguagaga

SEQ ID NO: 667469 - RNA, 19 nt, Artificial Sequence
  Description of Artificial Sequence: Synthetic oligonucleotide
  Antisense strand to SEQ ID NO: 667468
ucucuacugaggcaguagg

SEQ ID NO: 667470 - RNA, 19 nt, Artificial Sequence
  Description of Artificial Sequence: Synthetic oligonucleotide
  Sense strand starting at position 3050 of SEQ ID NO: 585785
uugugaugaaacgguccaa

SEQ ID NO: 667471 - RNA, 19 nt, Artificial Sequence
  Description of Artificial Sequence: Synthetic oligonucleotide
  Antisense strand to SEQ ID NO: 667470
uuggaccguuucaucacaa

SEQ ID NO: 667472 - RNA, 19 nt, Artificial Sequence
  Description of Artificial Sequence: Synthetic oligonucleotide
  Sense strand starting at position 3129 of SEQ ID NO: 585785
ugagaagucuuauccuuau

SEQ ID NO: 667473 - RNA, 19 nt, Artificial Sequence
  Description of Artificial Sequence: Synthetic oligonucleotide
  Antisense strand to SEQ ID NO: 667472
auaaggauaagacuucuca

SEQ ID NO: 667474 - RNA, 19 nt, Artificial Sequence
  Description of Artificial Sequence: Synthetic oligonucleotide
  Sense strand starting at position 3201 of SEQ ID NO: 585785
uauguuucuguugaauaag

SEQ ID NO: 667475 - RNA, 19 nt, Artificial Sequence
  Description of Artificial Sequence: Synthetic oligonucleotide
  Antisense strand to SEQ ID NO: 667474
cuuauucaacagaaacaua

SEQ ID NO: 667476 - RNA, 19 nt, Artificial Sequence
  Description of Artificial Sequence: Synthetic oligonucleotide
  Sense strand starting at position 3231 of SEQ ID NO: 585785
guaaguguuacgggaaagg

SEQ ID NO: 667477 - RNA, 19 nt, Artificial Sequence
  Description of Artificial Sequence: Synthetic oligonucleotide
  Antisense strand to SEQ ID NO: 667476
ccuuucccguaacacuuac

SEQ ID NO: 667478 - RNA, 19 nt, Artificial Sequence
  Description of Artificial Sequence: Synthetic oligonucleotide
  Sense strand starting at position 3336 of SEQ ID NO: 585785
agaggaacaucgguagucu

SEQ ID NO: 667479 - RNA, 19 nt, Artificial Sequence
  Description of Artificial Sequence: Synthetic oligonucleotide
  Antisense strand to SEQ ID NO: 667478
agacuaccgauguuccucu

SEQ ID NO: 667480 - RNA, 19 nt, Artificial Sequence
  Description of Artificial Sequence: Synthetic oligonucleotide
  Sense strand starting at position 3347 of SEQ ID NO: 585785
gguagucugaggcagagaa

SEQ ID NO: 667481 - RNA, 19 nt, Artificial Sequence
  Description of Artificial Sequence: Synthetic oligonucleotide
  Antisense strand to SEQ ID NO: 667480
uucucugccucagacuacc

SEQ ID NO: 667482 - RNA, 19 nt, Artificial Sequence
  Description of Artificial Sequence: Synthetic oligonucleotide
  Sense strand starting at position 3610 of SEQ ID NO: 585785
auaggcuaacuucgugaua

SEQ ID NO: 667483 - RNA, 19 nt, Artificial Sequence
  Description of Artificial Sequence: Synthetic oligonucleotide
  Antisense strand to SEQ ID NO: 667482
uaucacgaaguuagccuau

SEQ ID NO: 667484 - RNA, 19 nt, Artificial Sequence
  Description of Artificial Sequence: Synthetic oligonucleotide
  Sense strand starting at position 3613 of SEQ ID NO: 585785
ggcuaacuucgugauauug

SEQ ID NO: 667485 - RNA, 19 nt, Artificial Sequence
  Description of Artificial Sequence: Synthetic oligonucleotide
  Antisense strand to SEQ ID NO: 667484
caauaucacgaaguuagcc

SEQ ID NO: 667486 - RNA, 19 nt, Artificial Sequence
  Description of Artificial Sequence: Synthetic oligonucleotide
  Sense strand starting at position 3804 of SEQ ID NO: 585785
ugugucuuagaaugacuua

SEQ ID NO: 667487 - RNA, 19 nt, Artificial Sequence
  Description of Artificial Sequence: Synthetic oligonucleotide
  Antisense strand to SEQ ID NO: 667486
uaagucauucuaagacaca

SEQ ID NO: 667488 - RNA, 19 nt, Artificial Sequence
  Description of Artificial Sequence: Synthetic oligonucleotide
  Sense strand starting at position 3807 of SEQ ID NO: 585785
gucuuagaaugacuuaacu

SEQ ID NO: 667489 - RNA, 19 nt, Artificial Sequence
  Description of Artificial Sequence: Synthetic oligonucleotide
  Antisense strand to SEQ ID NO: 667488
aguuaagucauucuaagac

SEQ ID NO: 667490 - RNA, 19 nt, Artificial Sequence
  Description of Artificial Sequence: Synthetic oligonucleotide
  Sense strand starting at position 218 of SEQ ID NO: 585786
cuugguggguucccagaua

SEQ ID NO: 667491 - RNA, 19 nt, Artificial Sequence
  Description of Artificial Sequence: Synthetic oligonucleotide
  Antisense strand to SEQ ID NO: 667490
uaucugggaacccaccaag

SEQ ID NO: 667492 - RNA, 19 nt, Artificial Sequence
  Description of Artificial Sequence: Synthetic oligonucleotide
  Sense strand starting at position 229 of SEQ ID NO: 585786
cccagauacucuccgggau

SEQ ID NO: 667493 - RNA, 19 nt, Artificial Sequence
  Description of Artificial Sequence: Synthetic oligonucleotide
  Antisense strand to SEQ ID NO: 667492
aucccggagaguaucuggg

SEQ ID NO: 667494 - RNA, 19 nt, Artificial Sequence
  Description of Artificial Sequence: Synthetic oligonucleotide
  Sense strand starting at position 232 of SEQ ID NO: 585786
agauacucuccgggauguu

SEQ ID NO: 667495 - RNA, 19 nt, Artificial Sequence
  Description of Artificial Sequence: Synthetic oligonucleotide
  Antisense strand to SEQ ID NO: 667494
aacaucccggagaguaucu

SEQ ID NO: 667496 - RNA, 19 nt, Artificial Sequence
  Description of Artificial Sequence: Synthetic oligonucleotide
  Sense strand starting at position 233 of SEQ ID NO: 585786
gauacucuccgggauguuu

SEQ ID NO: 667497 - RNA, 19 nt, Artificial Sequence
  Description of Artificial Sequence: Synthetic oligonucleotide
  Antisense strand to SEQ ID NO: 667496
aaacaucccggagaguauc

SEQ ID NO: 667498 - RNA, 19 nt, Artificial Sequence
  Description of Artificial Sequence: Synthetic oligonucleotide
  Sense strand starting at position 329 of SEQ ID NO: 585786
ggcauacaccguuaaguaa

SEQ ID NO: 667499 - RNA, 19 nt, Artificial Sequence
  Description of Artificial Sequence: Synthetic oligonucleotide
  Antisense strand to SEQ ID NO: 667498
uuacuuaacgguguaugcc

SEQ ID NO: 667500 - RNA, 19 nt, Artificial Sequence
  Description of Artificial Sequence: Synthetic oligonucleotide
  Sense strand starting at position 779 of SEQ ID NO: 585786
uuagaucucaggugaguga

SEQ ID NO: 667501 - RNA, 19 nt, Artificial Sequence
  Description of Artificial Sequence: Synthetic oligonucleotide
  Antisense strand to SEQ ID NO: 667500
ucacucaccugagaucuaa

SEQ ID NO: 667502 - RNA, 19 nt, Artificial Sequence
  Description of Artificial Sequence: Synthetic oligonucleotide
  Sense strand starting at position 838 of SEQ ID NO: 585786
ggauaaugauaccuaguau

SEQ ID NO: 667503 - RNA, 19 nt, Artificial Sequence
  Description of Artificial Sequence: Synthetic oligonucleotide
  Antisense strand to SEQ ID NO: 667502
auacuagguaucauuaucc

SEQ ID NO: 667504 - RNA, 19 nt, Artificial Sequence
  Description of Artificial Sequence: Synthetic oligonucleotide
  Sense strand starting at position 864 of SEQ ID NO: 585786
ucaagacugcugcaagcau

SEQ ID NO: 667505 - RNA, 19 nt, Artificial Sequence
  Description of Artificial Sequence: Synthetic oligonucleotide
  Antisense strand to SEQ ID NO: 667504
augcuugcagcagucuuga

SEQ ID NO: 667506 - RNA, 19 nt, Artificial Sequence
  Description of Artificial Sequence: Synthetic oligonucleotide
  Sense strand starting at position 972 of SEQ ID NO: 585786
guuccuaugcaugcguaua

SEQ ID NO: 667507 - RNA, 19 nt, Artificial Sequence
  Description of Artificial Sequence: Synthetic oligonucleotide
  Antisense strand to SEQ ID NO: 667506
uauacgcaugcauaggaac

SEQ ID NO: 667508 - RNA, 19 nt, Artificial Sequence
  Description of Artificial Sequence: Synthetic oligonucleotide
  Sense strand starting at position 1075 of SEQ ID NO: 585786
ccuggaacccucugcucaa

SEQ ID NO: 667509 - RNA, 19 nt, Artificial Sequence
  Description of Artificial Sequence: Synthetic oligonucleotide
  Antisense strand to SEQ ID NO: 667508
uugagcagaggguuccagg

SEQ ID NO: 667510 - RNA, 19 nt, Artificial Sequence
  Description of Artificial Sequence: Synthetic oligonucleotide
  Sense strand starting at position 1166 of SEQ ID NO: 585786
ucaagcaaguuauugaauu

SEQ ID NO: 667511 - RNA, 19 nt, Artificial Sequence
  Description of Artificial Sequence: Synthetic oligonucleotide
  Antisense strand to SEQ ID NO: 667510
aauucaauaacuugcuuga

SEQ ID NO: 667512 - RNA, 19 nt, Artificial Sequence
  Description of Artificial Sequence: Synthetic oligonucleotide
  Sense strand starting at position 1313 of SEQ ID NO: 585786
ucauguguugcagacaaca

SEQ ID NO: 667513 - RNA, 19 nt, Artificial Sequence
  Description of Artificial Sequence: Synthetic oligonucleotide
  Antisense strand to SEQ ID NO: 667512
uguugucugcaacacauga

SEQ ID NO: 667514 - RNA, 19 nt, Artificial Sequence
  Description of Artificial Sequence: Synthetic oligonucleotide
  Sense strand starting at position 1315 of SEQ ID NO: 585786
auguguugcagacaacaug

SEQ ID NO: 667515 - RNA, 19 nt, Artificial Sequence
  Description of Artificial Sequence: Synthetic oligonucleotide
  Antisense strand to SEQ ID NO: 667514
cauguugucugcaacacau

SEQ ID NO: 667516 - RNA, 19 nt, Artificial Sequence
  Description of Artificial Sequence: Synthetic oligonucleotide
  Sense strand starting at position 1338 of SEQ ID NO: 585786
ugagaucuugcauggugga

SEQ ID NO: 667517 - RNA, 19 nt, Artificial Sequence
  Description of Artificial Sequence: Synthetic oligonucleotide
  Antisense strand to SEQ ID NO: 667516
uccaccaugcaagaucuca

SEQ ID NO: 667518 - RNA, 19 nt, Artificial Sequence
  Description of Artificial Sequence: Synthetic oligonucleotide
  Sense strand starting at position 1662 of SEQ ID NO: 585786
cugauuccuccggagacac

SEQ ID NO: 667519 - RNA, 19 nt, Artificial Sequence
  Description of Artificial Sequence: Synthetic oligonucleotide
  Antisense strand to SEQ ID NO: 667518
gugucuccggaggaaucag

SEQ ID NO: 667520 - RNA, 19 nt, Artificial Sequence
  Description of Artificial Sequence: Synthetic oligonucleotide
  Sense strand starting at position 2065 of SEQ ID NO: 585786
caguucucccaguaagaga

SEQ ID NO: 667521 - RNA, 19 nt, Artificial Sequence
  Description of Artificial Sequence: Synthetic oligonucleotide
  Antisense strand to SEQ ID NO: 667520
ucucuuacugggagaacug

SEQ ID NO: 667522 - RNA, 19 nt, Artificial Sequence
  Description of Artificial Sequence: Synthetic oligonucleotide
  Sense strand starting at position 2381 of SEQ ID NO: 585786
gguggauuaagccaaguuu

SEQ ID NO: 667523 - RNA, 19 nt, Artificial Sequence
  Description of Artificial Sequence: Synthetic oligonucleotide
  Antisense strand to SEQ ID NO: 667522
aaacuuggcuuaauccacc

SEQ ID NO: 667524 - RNA, 19 nt, Artificial Sequence
  Description of Artificial Sequence: Synthetic oligonucleotide
  Sense strand starting at position 2390 of SEQ ID NO: 585786
agccaaguuucuuccagaa

SEQ ID NO: 667525 - RNA, 19 nt, Artificial Sequence
  Description of Artificial Sequence: Synthetic oligonucleotide
  Antisense strand to SEQ ID NO: 667524
uucuggaagaaacuuggcu

SEQ ID NO: 667526 - RNA, 19 nt, Artificial Sequence
  Description of Artificial Sequence: Synthetic oligonucleotide
  Sense strand starting at position 2501 of SEQ ID NO: 585786
ucuauaauggacugugaac

SEQ ID NO: 667527 - RNA, 19 nt, Artificial Sequence
  Description of Artificial Sequence: Synthetic oligonucleotide
  Antisense strand to SEQ ID NO: 667526
guucacaguccauuauaga

SEQ ID NO: 667528 - RNA, 19 nt, Artificial Sequence
  Description of Artificial Sequence: Synthetic oligonucleotide
  Sense strand starting at position 2537 of SEQ ID NO: 585786
gguggcuuucuagaugaga

SEQ ID NO: 667529 - RNA, 19 nt, Artificial Sequence
  Description of Artificial Sequence: Synthetic oligonucleotide
  Antisense strand to SEQ ID NO: 667528
ucucaucuagaaagccacc

SEQ ID NO: 667530 - RNA, 19 nt, Artificial Sequence
  Description of Artificial Sequence: Synthetic oligonucleotide
  Sense strand starting at position 2539 of SEQ ID NO: 585786
uggcuuucuagaugagaaa

SEQ ID NO: 667531 - RNA, 19 nt, Artificial Sequence
  Description of Artificial Sequence: Synthetic oligonucleotide
  Antisense strand to SEQ ID NO: 667530
uuucucaucuagaaagcca

SEQ ID NO: 667532 - RNA, 19 nt, Artificial Sequence
  Description of Artificial Sequence: Synthetic oligonucleotide
  Sense strand starting at position 2555 of SEQ ID NO: 585786
aaaucuggucaugggaacu

SEQ ID NO: 667533 - RNA, 19 nt, Artificial Sequence
  Description of Artificial Sequence: Synthetic oligonucleotide
  Antisense strand to SEQ ID NO: 667532
aguucccaugaccagauuu

SEQ ID NO: 667534 - RNA, 19 nt, Artificial Sequence
  Description of Artificial Sequence: Synthetic oligonucleotide
  Sense strand starting at position 2567 of SEQ ID NO: 585786
gggaacuuccauugcugaa

SEQ ID NO: 667535 - RNA, 19 nt, Artificial Sequence
  Description of Artificial Sequence: Synthetic oligonucleotide
  Antisense strand to SEQ ID NO: 667534
uucagcaauggaaguuccc

SEQ ID NO: 667536 - RNA, 19 nt, Artificial Sequence
  Description of Artificial Sequence: Synthetic oligonucleotide
  Sense strand starting at position 2632 of SEQ ID NO: 585786
acacgaguuuccucagaca

SEQ ID NO: 667537 - RNA, 19 nt, Artificial Sequence
  Description of Artificial Sequence: Synthetic oligonucleotide
  Antisense strand to SEQ ID NO: 667536
ugucugaggaaacucgugu

SEQ ID NO: 667538 - RNA, 19 nt, Artificial Sequence
  Description of Artificial Sequence: Synthetic oligonucleotide
  Sense strand starting at position 2706 of SEQ ID NO: 585786
ccgagaugccuacaggcaa

SEQ ID NO: 667539 - RNA, 19 nt, Artificial Sequence
  Description of Artificial Sequence: Synthetic oligonucleotide
  Antisense strand to SEQ ID NO: 667538
uugccuguaggcaucucgg

SEQ ID NO: 667540 - RNA, 19 nt, Artificial Sequence
  Description of Artificial Sequence: Synthetic oligonucleotide
  Sense strand starting at position 2761 of SEQ ID NO: 585786
gggaguuacugacccucuu

SEQ ID NO: 667541 - RNA, 19 nt, Artificial Sequence
  Description of Artificial Sequence: Synthetic oligonucleotide
  Antisense strand to SEQ ID NO: 667540
aagagggucaguaacuccc

SEQ ID NO: 667542 - RNA, 19 nt, Artificial Sequence
  Description of Artificial Sequence: Synthetic oligonucleotide
  Sense strand starting at position 2806 of SEQ ID NO: 585786
gaggguaagugaccugcua

SEQ ID NO: 667543 - RNA, 19 nt, Artificial Sequence
  Description of Artificial Sequence: Synthetic oligonucleotide
  Antisense strand to SEQ ID NO: 667542
uagcaggucacuuacccuc

SEQ ID NO: 667544 - RNA, 19 nt, Artificial Sequence
  Description of Artificial Sequence: Synthetic oligonucleotide
  Sense strand starting at position 2808 of SEQ ID NO: 585786
ggguaagugaccugcuaag

SEQ ID NO: 667545 - RNA, 19 nt, Artificial Sequence
  Description of Artificial Sequence: Synthetic oligonucleotide
  Antisense strand to SEQ ID NO: 667544
cuuagcaggucacuuaccc

SEQ ID NO: 667546 - RNA, 19 nt, Artificial Sequence
  Description of Artificial Sequence: Synthetic oligonucleotide
  Sense strand starting at position 2897 of SEQ ID NO: 585786
auggaaacuugcuugaaca

SEQ ID NO: 667547 - RNA, 19 nt, Artificial Sequence
  Description of Artificial Sequence: Synthetic oligonucleotide
  Antisense strand to SEQ ID NO: 667546
uguucaagcaaguuuccau

SEQ ID NO: 667548 - RNA, 19 nt, Artificial Sequence
  Description of Artificial Sequence: Synthetic oligonucleotide
  Sense strand starting at position 2898 of SEQ ID NO: 585786
uggaaacuugcuugaacac

SEQ ID NO: 667549 - RNA, 19 nt, Artificial Sequence
  Description of Artificial Sequence: Synthetic oligonucleotide
  Antisense strand to SEQ ID NO: 667548
guguucaagcaaguuucca

SEQ ID NO: 667550 - RNA, 19 nt, Artificial Sequence
  Description of Artificial Sequence: Synthetic oligonucleotide
  Sense strand starting at position 3223 of SEQ ID NO: 585786
gagagaucuuccucggaga

SEQ ID NO: 667551 - RNA, 19 nt, Artificial Sequence
  Description of Artificial Sequence: Synthetic oligonucleotide
  Antisense strand to SEQ ID NO: 667550
ucuccgaggaagaucucuc

SEQ ID NO: 667552 - RNA, 19 nt, Artificial Sequence
  Description of Artificial Sequence: Synthetic oligonucleotide
  Sense strand starting at position 3224 of SEQ ID NO: 585786
agagaucuuccucggagaa

SEQ ID NO: 667553 - RNA, 19 nt, Artificial Sequence
  Description of Artificial Sequence: Synthetic oligonucleotide
  Antisense strand to SEQ ID NO: 667552
uucuccgaggaagaucucu

SEQ ID NO: 667554 - RNA, 19 nt, Artificial Sequence
  Description of Artificial Sequence: Synthetic oligonucleotide
  Sense strand starting at position 3225 of SEQ ID NO: 585786
gagaucuuccucggagaag

SEQ ID NO: 667555 - RNA, 19 nt, Artificial Sequence
  Description of Artificial Sequence: Synthetic oligonucleotide
  Antisense strand to SEQ ID NO: 667554
cuucuccgaggaagaucuc

SEQ ID NO: 667556 - RNA, 19 nt, Artificial Sequence
  Description of Artificial Sequence: Synthetic oligonucleotide
  Sense strand starting at position 3228 of SEQ ID NO: 585786
aucuuccucggagaagagu

SEQ ID NO: 667557 - RNA, 19 nt, Artificial Sequence
  Description of Artificial Sequence: Synthetic oligonucleotide
  Antisense strand to SEQ ID NO: 667556
acucuucuccgaggaagau

SEQ ID NO: 667558 - RNA, 19 nt, Artificial Sequence
  Description of Artificial Sequence: Synthetic oligonucleotide
  Sense strand starting at position 3608 of SEQ ID NO: 585786
cuaggcucaucacuaagua

SEQ ID NO: 667559 - RNA, 19 nt, Artificial Sequence
  Description of Artificial Sequence: Synthetic oligonucleotide
  Antisense strand to SEQ ID NO: 667558
uacuuagugaugagccuag

SEQ ID NO: 667560 - RNA, 19 nt, Artificial Sequence
  Description of Artificial Sequence: Synthetic oligonucleotide
  Sense strand starting at position 3639 of SEQ ID NO: 585786
gcauaagcgccugugaagu

SEQ ID NO: 667561 - RNA, 19 nt, Artificial Sequence
  Description of Artificial Sequence: Synthetic oligonucleotide
  Antisense strand to SEQ ID NO: 667560
acuucacaggcgcuuaugc

SEQ ID NO: 667562 - RNA, 19 nt, Artificial Sequence
  Description of Artificial Sequence: Synthetic oligonucleotide
  Sense strand starting at position 3649 of SEQ ID NO: 585786
cugugaaguagguacuaga

SEQ ID NO: 667563 - RNA, 19 nt, Artificial Sequence
  Description of Artificial Sequence: Synthetic oligonucleotide
  Antisense strand to SEQ ID NO: 667562
ucuaguaccuacuucacag

SEQ ID NO: 667564 - RNA, 19 nt, Artificial Sequence
  Description of Artificial Sequence: Synthetic oligonucleotide
  Sense strand starting at position 3706 of SEQ ID NO: 585786
ugugacuugccagagaaug

SEQ ID NO: 667565 - RNA, 19 nt, Artificial Sequence
  Description of Artificial Sequence: Synthetic oligonucleotide
  Antisense strand to SEQ ID NO: 667564
cauucucuggcaagucaca

SEQ ID NO: 667566 - RNA, 19 nt, Artificial Sequence
  Description of Artificial Sequence: Synthetic oligonucleotide
  Sense strand starting at position 3708 of SEQ ID NO: 585786
ugacuugccagagaaugca

SEQ ID NO: 667567 - RNA, 19 nt, Artificial Sequence
  Description of Artificial Sequence: Synthetic oligonucleotide
  Antisense strand to SEQ ID NO: 667566
ugcauucucuggcaaguca

SEQ ID NO: 667568 - RNA, 19 nt, Artificial Sequence
  Description of Artificial Sequence: Synthetic oligonucleotide
  Sense strand starting at position 3972 of SEQ ID NO: 585786
acucuuagguuuccagaag

SEQ ID NO: 667569 - RNA, 19 nt, Artificial Sequence
  Description of Artificial Sequence: Synthetic oligonucleotide
  Antisense strand to SEQ ID NO: 667568
cuucuggaaaccuaagagu

SEQ ID NO: 667570 - RNA, 19 nt, Artificial Sequence
  Description of Artificial Sequence: Synthetic oligonucleotide
  Sense strand starting at position 8 of SEQ ID NO: 585787
aggacagguugguuucauu

SEQ ID NO: 667571 - RNA, 19 nt, Artificial Sequence
  Description of Artificial Sequence: Synthetic oligonucleotide
  Antisense strand to SEQ ID NO: 667570
aaugaaaccaaccuguccu

SEQ ID NO: 667572 - RNA, 19 nt, Artificial Sequence
  Description of Artificial Sequence: Synthetic oligonucleotide
  Sense strand starting at position 50 of SEQ ID NO: 585787
gcccacagacuuggagaaa

SEQ ID NO: 667573 - RNA, 19 nt, Artificial Sequence
  Description of Artificial Sequence: Synthetic oligonucleotide
  Antisense strand to SEQ ID NO: 667572
uuucuccaagucugugggc

SEQ ID NO: 667574 - RNA, 19 nt, Artificial Sequence
  Description of Artificial Sequence: Synthetic oligonucleotide
  Sense strand starting at position 74 of SEQ ID NO: 585787
ugcuuuacugaugagaacu

SEQ ID NO: 667575 - RNA, 19 nt, Artificial Sequence
  Description of Artificial Sequence: Synthetic oligonucleotide
  Antisense strand to SEQ ID NO: 667574
aguucucaucaguaaagca

SEQ ID NO: 667576 - RNA, 19 nt, Artificial Sequence
  Description of Artificial Sequence: Synthetic oligonucleotide
  Sense strand starting at position 138 of SEQ ID NO: 585787
ugacauguugccugcauuu

SEQ ID NO: 667577 - RNA, 19 nt, Artificial Sequence
  Description of Artificial Sequence: Synthetic oligonucleotide
  Antisense strand to SEQ ID NO: 667576
aaaugcaggcaacauguca

SEQ ID NO: 667578 - RNA, 19 nt, Artificial Sequence
  Description of Artificial Sequence: Synthetic oligonucleotide
  Sense strand starting at position 323 of SEQ ID NO: 585787
guggaauugcccuagggua

SEQ ID NO: 667579 - RNA, 19 nt, Artificial Sequence
  Description of Artificial Sequence: Synthetic oligonucleotide
  Antisense strand to SEQ ID NO: 667578
uacccuagggcaauuccac

SEQ ID NO: 667580 - RNA, 19 nt, Artificial Sequence
  Description of Artificial Sequence: Synthetic oligonucleotide
  Sense strand starting at position 384 of SEQ ID NO: 585787
ucuuacguugcuuaggaaa

SEQ ID NO: 667581 - RNA, 19 nt, Artificial Sequence
  Description of Artificial Sequence: Synthetic oligonucleotide
  Antisense strand to SEQ ID NO: 667580
uuuccuaagcaacguaaga

SEQ ID NO: 667582 - RNA, 19 nt, Artificial Sequence
  Description of Artificial Sequence: Synthetic oligonucleotide
  Sense strand starting at position 397 of SEQ ID NO: 585787
aggaaacacuguccuuaag

SEQ ID NO: 667583 - RNA, 19 nt, Artificial Sequence
  Description of Artificial Sequence: Synthetic oligonucleotide
  Antisense strand to SEQ ID NO: 667582
cuuaaggacaguguuuccu

SEQ ID NO: 667584 - RNA, 19 nt, Artificial Sequence
  Description of Artificial Sequence: Synthetic oligonucleotide
  Sense strand starting at position 399 of SEQ ID NO: 585787
gaaacacuguccuuaagag

SEQ ID NO: 667585 - RNA, 19 nt, Artificial Sequence
  Description of Artificial Sequence: Synthetic oligonucleotide
  Antisense strand to SEQ ID NO: 667584
cucuuaaggacaguguuuc

SEQ ID NO: 667586 - RNA, 19 nt, Artificial Sequence
  Description of Artificial Sequence: Synthetic oligonucleotide
  Sense strand starting at position 423 of SEQ ID NO: 585787
gugucauuccuuuaacaau

SEQ ID NO: 667587 - RNA, 19 nt, Artificial Sequence
  Description of Artificial Sequence: Synthetic oligonucleotide
  Antisense strand to SEQ ID NO: 667586
auuguuaaaggaaugacac

SEQ ID NO: 667588 - RNA, 19 nt, Artificial Sequence
  Description of Artificial Sequence: Synthetic oligonucleotide
  Sense strand starting at position 458 of SEQ ID NO: 585787
cccgcuuguguauaaauuu

SEQ ID NO: 667589 - RNA, 19 nt, Artificial Sequence
  Description of Artificial Sequence: Synthetic oligonucleotide
  Antisense strand to SEQ ID NO: 667588
aaauuuauacacaagcggg

SEQ ID NO: 667590 - RNA, 19 nt, Artificial Sequence
  Description of Artificial Sequence: Synthetic oligonucleotide
  Sense strand starting at position 841 of SEQ ID NO: 585787
agcaaauuauuggcugaau

SEQ ID NO: 667591 - RNA, 19 nt, Artificial Sequence
  Description of Artificial Sequence: Synthetic oligonucleotide
  Antisense strand to SEQ ID NO: 667590
auucagccaauaauuugcu

SEQ ID NO: 667592 - RNA, 19 nt, Artificial Sequence
  Description of Artificial Sequence: Synthetic oligonucleotide
  Sense strand starting at position 842 of SEQ ID NO: 585787
gcaaauuauuggcugaaug

SEQ ID NO: 667593 - RNA, 19 nt, Artificial Sequence
  Description of Artificial Sequence: Synthetic oligonucleotide
  Antisense strand to SEQ ID NO: 667592
cauucagccaauaauuugc

SEQ ID NO: 667594 - RNA, 19 nt, Artificial Sequence
  Description of Artificial Sequence: Synthetic oligonucleotide
  Sense strand starting at position 926 of SEQ ID NO: 585787
guggaugaaagguguagaa

SEQ ID NO: 667595 - RNA, 19 nt, Artificial Sequence
  Description of Artificial Sequence: Synthetic oligonucleotide
  Antisense strand to SEQ ID NO: 667594
uucuacaccuuucauccac

SEQ ID NO: 667596 - RNA, 19 nt, Artificial Sequence
  Description of Artificial Sequence: Synthetic oligonucleotide
  Sense strand starting at position 1215 of SEQ ID NO: 585787
agaagcacggcuuacauua

SEQ ID NO: 667597 - RNA, 19 nt, Artificial Sequence
  Description of Artificial Sequence: Synthetic oligonucleotide
  Antisense strand to SEQ ID NO: 667596
uaauguaagccgugcuucu

SEQ ID NO: 667598 - RNA, 19 nt, Artificial Sequence
  Description of Artificial Sequence: Synthetic oligonucleotide
  Sense strand starting at position 1355 of SEQ ID NO: 585787
ggcugagcauuucuugacu

SEQ ID NO: 667599 - RNA, 19 nt, Artificial Sequence
  Description of Artificial Sequence: Synthetic oligonucleotide
  Antisense strand to SEQ ID NO: 667598
agucaagaaaugcucagcc

SEQ ID NO: 667600 - RNA, 19 nt, Artificial Sequence
  Description of Artificial Sequence: Synthetic oligonucleotide
  Sense strand starting at position 2063 of SEQ ID NO: 585787
uugggaggguuacuuuaaa

SEQ ID NO: 667601 - RNA, 19 nt, Artificial Sequence
  Description of Artificial Sequence: Synthetic oligonucleotide
  Antisense strand to SEQ ID NO: 667600
uuuaaaguaacccucccaa

SEQ ID NO: 667602 - RNA, 19 nt, Artificial Sequence
  Description of Artificial Sequence: Synthetic oligonucleotide
  Sense strand starting at position 2190 of SEQ ID NO: 585787
ugaauccuguugcugaaua

SEQ ID NO: 667603 - RNA, 19 nt, Artificial Sequence
  Description of Artificial Sequence: Synthetic oligonucleotide
  Antisense strand to SEQ ID NO: 667602
uauucagcaacaggauuca

SEQ ID NO: 667604 - RNA, 19 nt, Artificial Sequence
  Description of Artificial Sequence: Synthetic oligonucleotide
  Sense strand starting at position 2220 of SEQ ID NO: 585787
acggaaauguaaucacauu

SEQ ID NO: 667605 - RNA, 19 nt, Artificial Sequence
  Description of Artificial Sequence: Synthetic oligonucleotide
  Antisense strand to SEQ ID NO: 667604
aaugugauuacauuuccgu

SEQ ID NO: 667606 - RNA, 19 nt, Artificial Sequence
  Description of Artificial Sequence: Synthetic oligonucleotide
  Sense strand starting at position 2344 of SEQ ID NO: 585787
ccuacuugucauuauauag

SEQ ID NO: 667607 - RNA, 19 nt, Artificial Sequence
  Description of Artificial Sequence: Synthetic oligonucleotide
  Antisense strand to SEQ ID NO: 667606
cuauauaaugacaaguagg

SEQ ID NO: 667608 - RNA, 19 nt, Artificial Sequence
  Description of Artificial Sequence: Synthetic oligonucleotide
  Sense strand starting at position 2464 of SEQ ID NO: 585787
acacacgaguuauuaccaa

SEQ ID NO: 667609 - RNA, 19 nt, Artificial Sequence
  Description of Artificial Sequence: Synthetic oligonucleotide
  Antisense strand to SEQ ID NO: 667608
uugguaauaacucgugugu

SEQ ID NO: 667610 - RNA, 19 nt, Artificial Sequence
  Description of Artificial Sequence: Synthetic oligonucleotide
  Sense strand starting at position 2627 of SEQ ID NO: 585787
aauuguauguggcuuauuu

SEQ ID NO: 667611 - RNA, 19 nt, Artificial Sequence
  Description of Artificial Sequence: Synthetic oligonucleotide
  Antisense strand to SEQ ID NO: 667610
aaauaagccacauacaauu

SEQ ID NO: 667612 - RNA, 19 nt, Artificial Sequence
  Description of Artificial Sequence: Synthetic oligonucleotide
  Sense strand starting at position 2736 of SEQ ID NO: 585787
ggcaucugaccuggcagaa

SEQ ID NO: 667613 - RNA, 19 nt, Artificial Sequence
  Description of Artificial Sequence: Synthetic oligonucleotide
  Antisense strand to SEQ ID NO: 667612
uucugccaggucagaugcc

SEQ ID NO: 667614 - RNA, 19 nt, Artificial Sequence
  Description of Artificial Sequence: Synthetic oligonucleotide
  Sense strand starting at position 2921 of SEQ ID NO: 585787
ugacaaguguccucaggau

SEQ ID NO: 667615 - RNA, 19 nt, Artificial Sequence
  Description of Artificial Sequence: Synthetic oligonucleotide
  Antisense strand to SEQ ID NO: 667614
auccugaggacacuuguca

SEQ ID NO: 667616 - RNA, 19 nt, Artificial Sequence
  Description of Artificial Sequence: Synthetic oligonucleotide
  Sense strand starting at position 2994 of SEQ ID NO: 585787
gcgcaaugcuaauuugaaa

SEQ ID NO: 667617 - RNA, 19 nt, Artificial Sequence
  Description of Artificial Sequence: Synthetic oligonucleotide
  Antisense strand to SEQ ID NO: 667616
uuucaaauuagcauugcgc

SEQ ID NO: 667618 - RNA, 19 nt, Artificial Sequence
  Description of Artificial Sequence: Synthetic oligonucleotide
  Sense strand starting at position 3064 of SEQ ID NO: 585787
cauggaagucucugguaag

SEQ ID NO: 667619 - RNA, 19 nt, Artificial Sequence
  Description of Artificial Sequence: Synthetic oligonucleotide
  Antisense strand to SEQ ID NO: 667618
cuuaccagagacuuccaug

SEQ ID NO: 667620 - RNA, 19 nt, Artificial Sequence
  Description of Artificial Sequence: Synthetic oligonucleotide
  Sense strand starting at position 3107 of SEQ ID NO: 585787
gaaagaaaugcauggguuu

SEQ ID NO: 667621 - RNA, 19 nt, Artificial Sequence
  Description of Artificial Sequence: Synthetic oligonucleotide
  Antisense strand to SEQ ID NO: 667620
aaacccaugcauuucuuuc

SEQ ID NO: 667622 - RNA, 19 nt, Artificial Sequence
  Description of Artificial Sequence: Synthetic oligonucleotide
  Sense strand starting at position 3180 of SEQ ID NO: 585787
augaaauccuguuugcuaa

SEQ ID NO: 667623 - RNA, 19 nt, Artificial Sequence
  Description of Artificial Sequence: Synthetic oligonucleotide
  Antisense strand to SEQ ID NO: 667622
uuagcaaacaggauuucau

SEQ ID NO: 667624 - RNA, 19 nt, Artificial Sequence
  Description of Artificial Sequence: Synthetic oligonucleotide
  Sense strand starting at position 3181 of SEQ ID NO: 585787
ugaaauccuguuugcuaaa

SEQ ID NO: 667625 - RNA, 19 nt, Artificial Sequence
  Description of Artificial Sequence: Synthetic oligonucleotide
  Antisense strand to SEQ ID NO: 667624
uuuagcaaacaggauuuca

SEQ ID NO: 667626 - RNA, 19 nt, Artificial Sequence
  Description of Artificial Sequence: Synthetic oligonucleotide
  Sense strand starting at position 3286 of SEQ ID NO: 585787
uauguuaaguuguccaaga

SEQ ID NO: 667627 - RNA, 19 nt, Artificial Sequence
  Description of Artificial Sequence: Synthetic oligonucleotide
  Antisense strand to SEQ ID NO: 667626
ucuuggacaacuuaacaua

SEQ ID NO: 667628 - RNA, 19 nt, Artificial Sequence
  Description of Artificial Sequence: Synthetic oligonucleotide
  Sense strand starting at position 3287 of SEQ ID NO: 585787
auguuaaguuguccaagau

SEQ ID NO: 667629 - RNA, 19 nt, Artificial Sequence
  Description of Artificial Sequence: Synthetic oligonucleotide
  Antisense strand to SEQ ID NO: 667628
aucuuggacaacuuaacau

SEQ ID NO: 667630 - RNA, 19 nt, Artificial Sequence
  Description of Artificial Sequence: Synthetic oligonucleotide
  Sense strand starting at position 3288 of SEQ ID NO: 585787
uguuaaguuguccaagaug

SEQ ID NO: 667631 - RNA, 19 nt, Artificial Sequence
  Description of Artificial Sequence: Synthetic oligonucleotide
  Antisense strand to SEQ ID NO: 667630
caucuuggacaacuuaaca

SEQ ID NO: 667632 - RNA, 19 nt, Artificial Sequence
  Description of Artificial Sequence: Synthetic oligonucleotide
  Sense strand starting at position 3291 of SEQ ID NO: 585787
uaaguuguccaagaugcaa

SEQ ID NO: 667633 - RNA, 19 nt, Artificial Sequence
  Description of Artificial Sequence: Synthetic oligonucleotide
  Antisense strand to SEQ ID NO: 667632
uugcaucuuggacaacuua

SEQ ID NO: 667634 - RNA, 19 nt, Artificial Sequence
  Description of Artificial Sequence: Synthetic oligonucleotide
  Sense strand starting at position 3408 of SEQ ID NO: 585787
auggaaguguucucuauca

SEQ ID NO: 667635 - RNA, 19 nt, Artificial Sequence
  Description of Artificial Sequence: Synthetic oligonucleotide
  Antisense strand to SEQ ID NO: 667634
ugauagagaacacuuccau

SEQ ID NO: 667636 - RNA, 19 nt, Artificial Sequence
  Description of Artificial Sequence: Synthetic oligonucleotide
  Sense strand starting at position 3410 of SEQ ID NO: 585787
ggaaguguucucuaucaug

SEQ ID NO: 667637 - RNA, 19 nt, Artificial Sequence
  Description of Artificial Sequence: Synthetic oligonucleotide
  Antisense strand to SEQ ID NO: 667636
caugauagagaacacuucc

SEQ ID NO: 667638 - RNA, 19 nt, Artificial Sequence
  Description of Artificial Sequence: Synthetic oligonucleotide
  Sense strand starting at position 3431 of SEQ ID NO: 585787
gaugguggugguuacauaa

SEQ ID NO: 667639 - RNA, 19 nt, Artificial Sequence
  Description of Artificial Sequence: Synthetic oligonucleotide
  Antisense strand to SEQ ID NO: 667638
uuauguaaccaccaccauc

SEQ ID NO: 667640 - RNA, 19 nt, Artificial Sequence
  Description of Artificial Sequence: Synthetic oligonucleotide
  Sense strand starting at position 3616 of SEQ ID NO: 585787
gaauuugaguaauauacag

SEQ ID NO: 667641 - RNA, 19 nt, Artificial Sequence
  Description of Artificial Sequence: Synthetic oligonucleotide
  Antisense strand to SEQ ID NO: 667640
cuguauauuacucaaauuc

SEQ ID NO: 667642 - RNA, 19 nt, Artificial Sequence
  Description of Artificial Sequence: Synthetic oligonucleotide
  Sense strand starting at position 3703 of SEQ ID NO: 585787
caugcauacugguugauau

SEQ ID NO: 667643 - RNA, 19 nt, Artificial Sequence
  Description of Artificial Sequence: Synthetic oligonucleotide
  Antisense strand to SEQ ID NO: 667642
auaucaaccaguaugcaug

SEQ ID NO: 667644 - RNA, 19 nt, Artificial Sequence
  Description of Artificial Sequence: Synthetic oligonucleotide
  Sense strand starting at position 3705 of SEQ ID NO: 585787
ugcauacugguugauauca

SEQ ID NO: 667645 - RNA, 19 nt, Artificial Sequence
  Description of Artificial Sequence: Synthetic oligonucleotide
  Antisense strand to SEQ ID NO: 667644
ugauaucaaccaguaugca

SEQ ID NO: 667646 - RNA, 19 nt, Artificial Sequence
  Description of Artificial Sequence: Synthetic oligonucleotide
  Sense strand starting at position 3714 of SEQ ID NO: 585787
guugauaucauuuggcugu

SEQ ID NO: 667647 - RNA, 19 nt, Artificial Sequence
  Description of Artificial Sequence: Synthetic oligonucleotide
  Antisense strand to SEQ ID NO: 667646
acagccaaaugauaucaac

SEQ ID NO: 667648 - RNA, 19 nt, Artificial Sequence
  Description of Artificial Sequence: Synthetic oligonucleotide
  Sense strand starting at position 3968 of SEQ ID NO: 585787
cucacuaugucuuuauuag

SEQ ID NO: 667649 - RNA, 19 nt, Artificial Sequence
  Description of Artificial Sequence: Synthetic oligonucleotide
  Antisense strand to SEQ ID NO: 667648
cuaauaaagacauagugag

SEQ ID NO: 667650 - RNA, 19 nt, Artificial Sequence
  Description of Artificial Sequence: Synthetic oligonucleotide
  Sense strand starting at position 138 of SEQ ID NO: 585788
ugaaguaaucucugagaac

SEQ ID NO: 667651 - RNA, 19 nt, Artificial Sequence
  Description of Artificial Sequence: Synthetic oligonucleotide
  Antisense strand to SEQ ID NO: 667650
guucucagagauuacuuca

SEQ ID NO: 667652 - RNA, 19 nt, Artificial Sequence
  Description of Artificial Sequence: Synthetic oligonucleotide
  Sense strand starting at position 339 of SEQ ID NO: 585788
ccugcaggucaugauacau

SEQ ID NO: 667653 - RNA, 19 nt, Artificial Sequence
  Description of Artificial Sequence: Synthetic oligonucleotide
  Antisense strand to SEQ ID NO: 667652
auguaucaugaccugcagg

SEQ ID NO: 667654 - RNA, 19 nt, Artificial Sequence
  Description of Artificial Sequence: Synthetic oligonucleotide
  Sense strand starting at position 345 of SEQ ID NO: 585788
ggucaugauacauggucuu

SEQ ID NO: 667655 - RNA, 19 nt, Artificial Sequence
  Description of Artificial Sequence: Synthetic oligonucleotide
  Antisense strand to SEQ ID NO: 667654
aagaccauguaucaugacc

SEQ ID NO: 667656 - RNA, 19 nt, Artificial Sequence
  Description of Artificial Sequence: Synthetic oligonucleotide
  Sense strand starting at position 442 of SEQ ID NO: 585788
augugagucccacauaaac

SEQ ID NO: 667657 - RNA, 19 nt, Artificial Sequence
  Description of Artificial Sequence: Synthetic oligonucleotide
  Antisense strand to SEQ ID NO: 667656
guuuaugugggacucacau

SEQ ID NO: 667658 - RNA, 19 nt, Artificial Sequence
  Description of Artificial Sequence: Synthetic oligonucleotide
  Sense strand starting at position 460 of SEQ ID NO: 585788
cugugacuuuauccugaaa

SEQ ID NO: 667659 - RNA, 19 nt, Artificial Sequence
  Description of Artificial Sequence: Synthetic oligonucleotide
  Antisense strand to SEQ ID NO: 667658
uuucaggauaaagucacag

SEQ ID NO: 667660 - RNA, 19 nt, Artificial Sequence
  Description of Artificial Sequence: Synthetic oligonucleotide
  Sense strand starting at position 476 of SEQ ID NO: 585788
aaagauuagccgggugacu

SEQ ID NO: 667661 - RNA, 19 nt, Artificial Sequence
  Description of Artificial Sequence: Synthetic oligonucleotide
  Antisense strand to SEQ ID NO: 667660
agucacccggcuaaucuuu

SEQ ID NO: 667662 - RNA, 19 nt, Artificial Sequence
  Description of Artificial Sequence: Synthetic oligonucleotide
  Sense strand starting at position 842 of SEQ ID NO: 585788
ccaggaauagcaugugaaa

SEQ ID NO: 667663 - RNA, 19 nt, Artificial Sequence
  Description of Artificial Sequence: Synthetic oligonucleotide
  Antisense strand to SEQ ID NO: 667662
uuucacaugcuauuccugg

SEQ ID NO: 667664 - RNA, 19 nt, Artificial Sequence
  Description of Artificial Sequence: Synthetic oligonucleotide
  Sense strand starting at position 1006 of SEQ ID NO: 585788
ggagucuggcugggaaagu

SEQ ID NO: 667665 - RNA, 19 nt, Artificial Sequence
  Description of Artificial Sequence: Synthetic oligonucleotide
  Antisense strand to SEQ ID NO: 667664
acuuucccagccagacucc

SEQ ID NO: 667666 - RNA, 19 nt, Artificial Sequence
  Description of Artificial Sequence: Synthetic oligonucleotide
  Sense strand starting at position 1421 of SEQ ID NO: 585788
agcaauguuuaggcaauuu

SEQ ID NO: 667667 - RNA, 19 nt, Artificial Sequence
  Description of Artificial Sequence: Synthetic oligonucleotide
  Antisense strand to SEQ ID NO: 667666
aaauugccuaaacauugcu

SEQ ID NO: 667668 - RNA, 19 nt, Artificial Sequence
  Description of Artificial Sequence: Synthetic oligonucleotide
  Sense strand starting at position 1488 of SEQ ID NO: 585788
cauagaaugugacuuuguu

SEQ ID NO: 667669 - RNA, 19 nt, Artificial Sequence
  Description of Artificial Sequence: Synthetic oligonucleotide
  Antisense strand to SEQ ID NO: 667668
aacaaagucacauucuaug

SEQ ID NO: 667670 - RNA, 19 nt, Artificial Sequence
  Description of Artificial Sequence: Synthetic oligonucleotide
  Sense strand starting at position 1492 of SEQ ID NO: 585788
gaaugugacuuuguuauug

SEQ ID NO: 667671 - RNA, 19 nt, Artificial Sequence
  Description of Artificial Sequence: Synthetic oligonucleotide
  Antisense strand to SEQ ID NO: 667670
caauaacaaagucacauuc

SEQ ID NO: 667672 - RNA, 19 nt, Artificial Sequence
  Description of Artificial Sequence: Synthetic oligonucleotide
  Sense strand starting at position 1612 of SEQ ID NO: 585788
ucaggcugcccagaaacau

SEQ ID NO: 667673 - RNA, 19 nt, Artificial Sequence
  Description of Artificial Sequence: Synthetic oligonucleotide
  Antisense strand to SEQ ID NO: 667672
auguuucugggcagccuga

SEQ ID NO: 667674 - RNA, 19 nt, Artificial Sequence
  Description of Artificial Sequence: Synthetic oligonucleotide
  Sense strand starting at position 1874 of SEQ ID NO: 585788
ggagguagagcccaguuau

SEQ ID NO: 667675 - RNA, 19 nt, Artificial Sequence
  Description of Artificial Sequence: Synthetic oligonucleotide
  Antisense strand to SEQ ID NO: 667674
auaacugggcucuaccucc

SEQ ID NO: 667676 - RNA, 19 nt, Artificial Sequence
  Description of Artificial Sequence: Synthetic oligonucleotide
  Sense strand starting at position 1884 of SEQ ID NO: 585788
cccaguuauggcuggaaua

SEQ ID NO: 667677 - RNA, 19 nt, Artificial Sequence
  Description of Artificial Sequence: Synthetic oligonucleotide
  Antisense strand to SEQ ID NO: 667676
uauuccagccauaacuggg

SEQ ID NO: 667678 - RNA, 19 nt, Artificial Sequence
  Description of Artificial Sequence: Synthetic oligonucleotide
  Sense strand starting at position 1885 of SEQ ID NO: 585788
ccaguuauggcuggaauaa

SEQ ID NO: 667679 - RNA, 19 nt, Artificial Sequence
  Description of Artificial Sequence: Synthetic oligonucleotide
  Antisense strand to SEQ ID NO: 667678
uuauuccagccauaacugg

SEQ ID NO: 667680 - RNA, 19 nt, Artificial Sequence
  Description of Artificial Sequence: Synthetic oligonucleotide
  Sense strand starting at position 1969 of SEQ ID NO: 585788
cggcuaucccuguucuguu

SEQ ID NO: 667681 - RNA, 19 nt, Artificial Sequence
  Description of Artificial Sequence: Synthetic oligonucleotide
  Antisense strand to SEQ ID NO: 667680
aacagaacagggauagccg

SEQ ID NO: 667682 - RNA, 19 nt, Artificial Sequence
  Description of Artificial Sequence: Synthetic oligonucleotide
  Sense strand starting at position 2232 of SEQ ID NO: 585788
caugcauuccgggaggaac

SEQ ID NO: 667683 - RNA, 19 nt, Artificial Sequence
  Description of Artificial Sequence: Synthetic oligonucleotide
  Antisense strand to SEQ ID NO: 667682
guuccucccggaaugcaug

SEQ ID NO: 667684 - RNA, 19 nt, Artificial Sequence
  Description of Artificial Sequence: Synthetic oligonucleotide
  Sense strand starting at position 2268 of SEQ ID NO: 585788
ggguucuacgcggaauaga

SEQ ID NO: 667685 - RNA, 19 nt, Artificial Sequence
  Description of Artificial Sequence: Synthetic oligonucleotide
  Antisense strand to SEQ ID NO: 667684
ucuauuccgcguagaaccc

SEQ ID NO: 667686 - RNA, 19 nt, Artificial Sequence
  Description of Artificial Sequence: Synthetic oligonucleotide
  Sense strand starting at position 2297 of SEQ ID NO: 585788
aaccguaugauuugugguu

SEQ ID NO: 667687 - RNA, 19 nt, Artificial Sequence
  Description of Artificial Sequence: Synthetic oligonucleotide
  Antisense strand to SEQ ID NO: 667686
aaccacaaaucauacgguu

SEQ ID NO: 667688 - RNA, 19 nt, Artificial Sequence
  Description of Artificial Sequence: Synthetic oligonucleotide
  Sense strand starting at position 2411 of SEQ ID NO: 585788
agagaaucaaguuguugag

SEQ ID NO: 667689 - RNA, 19 nt, Artificial Sequence
  Description of Artificial Sequence: Synthetic oligonucleotide
  Antisense strand to SEQ ID NO: 667688
cucaacaacuugauucucu

SEQ ID NO: 667690 - RNA, 19 nt, Artificial Sequence
  Description of Artificial Sequence: Synthetic oligonucleotide
  Sense strand starting at position 2664 of SEQ ID NO: 585788
cucuuucuuugguccagau

SEQ ID NO: 667691 - RNA, 19 nt, Artificial Sequence
  Description of Artificial Sequence: Synthetic oligonucleotide
  Antisense strand to SEQ ID NO: 667690
aucuggaccaaagaaagag

SEQ ID NO: 667692 - RNA, 19 nt, Artificial Sequence
  Description of Artificial Sequence: Synthetic oligonucleotide
  Sense strand starting at position 2668 of SEQ ID NO: 585788
uucuuugguccagauaguc

SEQ ID NO: 667693 - RNA, 19 nt, Artificial Sequence
  Description of Artificial Sequence: Synthetic oligonucleotide
  Antisense strand to SEQ ID NO: 667692
gacuaucuggaccaaagaa

SEQ ID NO: 667694 - RNA, 19 nt, Artificial Sequence
  Description of Artificial Sequence: Synthetic oligonucleotide
  Sense strand starting at position 2676 of SEQ ID NO: 585788
uccagauaguccuccuacu

SEQ ID NO: 667695 - RNA, 19 nt, Artificial Sequence
  Description of Artificial Sequence: Synthetic oligonucleotide
  Antisense strand to SEQ ID NO: 667694
aguaggaggacuaucugga

SEQ ID NO: 667696 - RNA, 19 nt, Artificial Sequence
  Description of Artificial Sequence: Synthetic oligonucleotide
  Sense strand starting at position 2785 of SEQ ID NO: 585788
gaucgaguucucugggaga

SEQ ID NO: 667697 - RNA, 19 nt, Artificial Sequence
  Description of Artificial Sequence: Synthetic oligonucleotide
  Antisense strand to SEQ ID NO: 667696
ucucccagagaacucgauc

SEQ ID NO: 667698 - RNA, 19 nt, Artificial Sequence
  Description of Artificial Sequence: Synthetic oligonucleotide
  Sense strand starting at position 2787 of SEQ ID NO: 585788
ucgaguucucugggagaac

SEQ ID NO: 667699 - RNA, 19 nt, Artificial Sequence
  Description of Artificial Sequence: Synthetic oligonucleotide
  Antisense strand to SEQ ID NO: 667698
guucucccagagaacucga

SEQ ID NO: 667700 - RNA, 19 nt, Artificial Sequence
  Description of Artificial Sequence: Synthetic oligonucleotide
  Sense strand starting at position 2798 of SEQ ID NO: 585788
gggagaacuugcuccauau

SEQ ID NO: 667701 - RNA, 19 nt, Artificial Sequence
  Description of Artificial Sequence: Synthetic oligonucleotide
  Antisense strand to SEQ ID NO: 667700
auauggagcaaguucuccc

SEQ ID NO: 667702 - RNA, 19 nt, Artificial Sequence
  Description of Artificial Sequence: Synthetic oligonucleotide
  Sense strand starting at position 2853 of SEQ ID NO: 585788
guucuauugguccagggaa

SEQ ID NO: 667703 - RNA, 19 nt, Artificial Sequence
  Description of Artificial Sequence: Synthetic oligonucleotide
  Antisense strand to SEQ ID NO: 667702
uucccuggaccaauagaac

SEQ ID NO: 667704 - RNA, 19 nt, Artificial Sequence
  Description of Artificial Sequence: Synthetic oligonucleotide
  Sense strand starting at position 2855 of SEQ ID NO: 585788
ucuauugguccagggaauu

SEQ ID NO: 667705 - RNA, 19 nt, Artificial Sequence
  Description of Artificial Sequence: Synthetic oligonucleotide
  Antisense strand to SEQ ID NO: 667704
aauucccuggaccaauaga

SEQ ID NO: 667706 - RNA, 19 nt, Artificial Sequence
  Description of Artificial Sequence: Synthetic oligonucleotide
  Sense strand starting at position 2909 of SEQ ID NO: 585788
gacggcuugauaggagaua

SEQ ID NO: 667707 - RNA, 19 nt, Artificial Sequence
  Description of Artificial Sequence: Synthetic oligonucleotide
  Antisense strand to SEQ ID NO: 667706
uaucuccuaucaagccguc

SEQ ID NO: 667708 - RNA, 19 nt, Artificial Sequence
  Description of Artificial Sequence: Synthetic oligonucleotide
  Sense strand starting at position 3137 of SEQ ID NO: 585788
cacucuauagucugaugga

SEQ ID NO: 667709 - RNA, 19 nt, Artificial Sequence
  Description of Artificial Sequence: Synthetic oligonucleotide
  Antisense strand to SEQ ID NO: 667708
uccaucagacuauagagug

SEQ ID NO: 667710 - RNA, 19 nt, Artificial Sequence
  Description of Artificial Sequence: Synthetic oligonucleotide
  Sense strand starting at position 3427 of SEQ ID NO: 585788
cuaugaagaguuuaaguuc

SEQ ID NO: 667711 - RNA, 19 nt, Artificial Sequence
  Description of Artificial Sequence: Synthetic oligonucleotide
  Antisense strand to SEQ ID NO: 667710
gaacuuaaacucuucauag

SEQ ID NO: 667712 - RNA, 19 nt, Artificial Sequence
  Description of Artificial Sequence: Synthetic oligonucleotide
  Sense strand starting at position 3430 of SEQ ID NO: 585788
ugaagaguuuaaguuccca

SEQ ID NO: 667713 - RNA, 19 nt, Artificial Sequence
  Description of Artificial Sequence: Synthetic oligonucleotide
  Antisense strand to SEQ ID NO: 667712
ugggaacuuaaacucuuca

SEQ ID NO: 667714 - RNA, 19 nt, Artificial Sequence
  Description of Artificial Sequence: Synthetic oligonucleotide
  Sense strand starting at position 3462 of SEQ ID NO: 585788
auuguuugaugcucacaga

SEQ ID NO: 667715 - RNA, 19 nt, Artificial Sequence
  Description of Artificial Sequence: Synthetic oligonucleotide
  Antisense strand to SEQ ID NO: 667714
ucugugagcaucaaacaau

SEQ ID NO: 667716 - RNA, 19 nt, Artificial Sequence
  Description of Artificial Sequence: Synthetic oligonucleotide
  Sense strand starting at position 3463 of SEQ ID NO: 585788
uuguuugaugcucacagaa

SEQ ID NO: 667717 - RNA, 19 nt, Artificial Sequence
  Description of Artificial Sequence: Synthetic oligonucleotide
  Antisense strand to SEQ ID NO: 667716
uucugugagcaucaaacaa

SEQ ID NO: 667718 - RNA, 19 nt, Artificial Sequence
  Description of Artificial Sequence: Synthetic oligonucleotide
  Sense strand starting at position 3654 of SEQ ID NO: 585788
gaugacaaaugaguuuauu

SEQ ID NO: 667719 - RNA, 19 nt, Artificial Sequence
  Description of Artificial Sequence: Synthetic oligonucleotide
  Antisense strand to SEQ ID NO: 667718
aauaaacucauuugucauc

SEQ ID NO: 667720 - RNA, 19 nt, Artificial Sequence
  Description of Artificial Sequence: Synthetic oligonucleotide
  Sense strand starting at position 3687 of SEQ ID NO: 585788
uagacaagucacuggcaau

SEQ ID NO: 667721 - RNA, 19 nt, Artificial Sequence
  Description of Artificial Sequence: Synthetic oligonucleotide
  Antisense strand to SEQ ID NO: 667720
auugccagugacuugucua

SEQ ID NO: 667722 - RNA, 19 nt, Artificial Sequence
  Description of Artificial Sequence: Synthetic oligonucleotide
  Sense strand starting at position 3688 of SEQ ID NO: 585788
agacaagucacuggcaaug

SEQ ID NO: 667723 - RNA, 19 nt, Artificial Sequence
  Description of Artificial Sequence: Synthetic oligonucleotide
  Antisense strand to SEQ ID NO: 667722
cauugccagugacuugucu

SEQ ID NO: 667724 - RNA, 19 nt, Artificial Sequence
  Description of Artificial Sequence: Synthetic oligonucleotide
  Sense strand starting at position 3878 of SEQ ID NO: 585788
ucauuuaucgcaggguuua

SEQ ID NO: 667725 - RNA, 19 nt, Artificial Sequence
  Description of Artificial Sequence: Synthetic oligonucleotide
  Antisense strand to SEQ ID NO: 667724
uaaacccugcgauaaauga

SEQ ID NO: 667726 - RNA, 19 nt, Artificial Sequence
  Description of Artificial Sequence: Synthetic oligonucleotide
  Sense strand starting at position 3879 of SEQ ID NO: 585788
cauuuaucgcaggguuuau

SEQ ID NO: 667727 - RNA, 19 nt, Artificial Sequence
  Description of Artificial Sequence: Synthetic oligonucleotide
  Antisense strand to SEQ ID NO: 667726
auaaacccugcgauaaaug

SEQ ID NO: 667728 - RNA, 19 nt, Artificial Sequence
  Description of Artificial Sequence: Synthetic oligonucleotide
  Sense strand starting at position 3914 of SEQ ID NO: 585788
aggugauaauauucuacac

SEQ ID NO: 667729 - RNA, 19 nt, Artificial Sequence
  Description of Artificial Sequence: Synthetic oligonucleotide
  Antisense strand to SEQ ID NO: 667728
guguagaauauuaucaccu

SEQ ID NO: 667730 - RNA, 19 nt, Artificial Sequence
  Description of Artificial Sequence: Synthetic oligonucleotide
  Sense strand starting at position 30 of SEQ ID NO: 585789
ccuuacaguucuccacaga

SEQ ID NO: 667731 - RNA, 19 nt, Artificial Sequence
  Description of Artificial Sequence: Synthetic oligonucleotide
  Antisense strand to SEQ ID NO: 667730
ucuguggagaacuguaagg

SEQ ID NO: 667732 - RNA, 19 nt, Artificial Sequence
  Description of Artificial Sequence: Synthetic oligonucleotide
  Sense strand starting at position 31 of SEQ ID NO: 585789
cuuacaguucuccacagau

SEQ ID NO: 667733 - RNA, 19 nt, Artificial Sequence
  Description of Artificial Sequence: Synthetic oligonucleotide
  Antisense strand to SEQ ID NO: 667732
aucuguggagaacuguaag

SEQ ID NO: 667734 - RNA, 19 nt, Artificial Sequence
  Description of Artificial Sequence: Synthetic oligonucleotide
  Sense strand starting at position 230 of SEQ ID NO: 585789
accgacuucuacccggaua

SEQ ID NO: 667735 - RNA, 19 nt, Artificial Sequence
  Description of Artificial Sequence: Synthetic oligonucleotide
  Antisense strand to SEQ ID NO: 667734
uauccggguagaagucggu

SEQ ID NO: 667736 - RNA, 19 nt, Artificial Sequence
  Description of Artificial Sequence: Synthetic oligonucleotide
  Sense strand starting at position 232 of SEQ ID NO: 585789
cgacuucuacccggauaau

SEQ ID NO: 667737 - RNA, 19 nt, Artificial Sequence
  Description of Artificial Sequence: Synthetic oligonucleotide
  Antisense strand to SEQ ID NO: 667736
auuauccggguagaagucg

SEQ ID NO: 667738 - RNA, 19 nt, Artificial Sequence
  Description of Artificial Sequence: Synthetic oligonucleotide
  Sense strand starting at position 274 of SEQ ID NO: 585789
ccaauacauuagucaguua

SEQ ID NO: 667739 - RNA, 19 nt, Artificial Sequence
  Description of Artificial Sequence: Synthetic oligonucleotide
  Antisense strand to SEQ ID NO: 667738
uaacugacuaauguauugg

SEQ ID NO: 667740 - RNA, 19 nt, Artificial Sequence
  Description of Artificial Sequence: Synthetic oligonucleotide
  Sense strand starting at position 277 of SEQ ID NO: 585789
auacauuagucaguuaaag

SEQ ID NO: 667741 - RNA, 19 nt, Artificial Sequence
  Description of Artificial Sequence: Synthetic oligonucleotide
  Antisense strand to SEQ ID NO: 667740
cuuuaacugacuaauguau

SEQ ID NO: 667742 - RNA, 19 nt, Artificial Sequence
  Description of Artificial Sequence: Synthetic oligonucleotide
  Sense strand starting at position 326 of SEQ ID NO: 585789
aaggauuguugcucaugga

SEQ ID NO: 667743 - RNA, 19 nt, Artificial Sequence
  Description of Artificial Sequence: Synthetic oligonucleotide
  Antisense strand to SEQ ID NO: 667742
uccaugagcaacaauccuu

SEQ ID NO: 667744 - RNA, 19 nt, Artificial Sequence
  Description of Artificial Sequence: Synthetic oligonucleotide
  Sense strand starting at position 327 of SEQ ID NO: 585789
aggauuguugcucauggag

SEQ ID NO: 667745 - RNA, 19 nt, Artificial Sequence
  Description of Artificial Sequence: Synthetic oligonucleotide
  Antisense strand to SEQ ID NO: 667744
cuccaugagcaacaauccu

SEQ ID NO: 667746 - RNA, 19 nt, Artificial Sequence
  Description of Artificial Sequence: Synthetic oligonucleotide
  Sense strand starting at position 330 of SEQ ID NO: 585789
auuguugcucauggagaaa

SEQ ID NO: 667747 - RNA, 19 nt, Artificial Sequence
  Description of Artificial Sequence: Synthetic oligonucleotide
  Antisense strand to SEQ ID NO: 667746
uuucuccaugagcaacaau

SEQ ID NO: 667748 - RNA, 19 nt, Artificial Sequence
  Description of Artificial Sequence: Synthetic oligonucleotide
  Sense strand starting at position 342 of SEQ ID NO: 585789
ggagaaaggccgugaauuc

SEQ ID NO: 667749 - RNA, 19 nt, Artificial Sequence
  Description of Artificial Sequence: Synthetic oligonucleotide
  Antisense strand to SEQ ID NO: 667748
gaauucacggccuuucucc

SEQ ID NO: 667750 - RNA, 19 nt, Artificial Sequence
  Description of Artificial Sequence: Synthetic oligonucleotide
  Sense strand starting at position 499 of SEQ ID NO: 585789
gauaaacgccgugaugaga

SEQ ID NO: 667751 - RNA, 19 nt, Artificial Sequence
  Description of Artificial Sequence: Synthetic oligonucleotide
  Antisense strand to SEQ ID NO: 667750
ucucaucacggcguuuauc

SEQ ID NO: 667752 - RNA, 19 nt, Artificial Sequence
  Description of Artificial Sequence: Synthetic oligonucleotide
  Sense strand starting at position 558 of SEQ ID NO: 585789
cucaaauccggucaaacuu

SEQ ID NO: 667753 - RNA, 19 nt, Artificial Sequence
  Description of Artificial Sequence: Synthetic oligonucleotide
  Antisense strand to SEQ ID NO: 667752
aaguuugaccggauuugag

SEQ ID NO: 667754 - RNA, 19 nt, Artificial Sequence
  Description of Artificial Sequence: Synthetic oligonucleotide
  Sense strand starting at position 577 of SEQ ID NO: 585789
acuguuugcaugcauagga

SEQ ID NO: 667755 - RNA, 19 nt, Artificial Sequence
  Description of Artificial Sequence: Synthetic oligonucleotide
  Antisense strand to SEQ ID NO: 667754
uccuaugcaugcaaacagu

SEQ ID NO: 667756 - RNA, 19 nt, Artificial Sequence
  Description of Artificial Sequence: Synthetic oligonucleotide
  Sense strand starting at position 590 of SEQ ID NO: 585789
auaggaguuauuggcaauc

SEQ ID NO: 667757 - RNA, 19 nt, Artificial Sequence
  Description of Artificial Sequence: Synthetic oligonucleotide
  Antisense strand to SEQ ID NO: 667756
gauugccaauaacuccuau

SEQ ID NO: 667758 - RNA, 19 nt, Artificial Sequence
  Description of Artificial Sequence: Synthetic oligonucleotide
  Sense strand starting at position 646 of SEQ ID NO: 585789
ucaugaaagcuguggauga

SEQ ID NO: 667759 - RNA, 19 nt, Artificial Sequence
  Description of Artificial Sequence: Synthetic oligonucleotide
  Antisense strand to SEQ ID NO: 667758
ucauccacagcuuucauga

SEQ ID NO: 667760 - RNA, 19 nt, Artificial Sequence
  Description of Artificial Sequence: Synthetic oligonucleotide
  Sense strand starting at position 718 of SEQ ID NO: 585789
acacuaaucugauccggga

SEQ ID NO: 667761 - RNA, 19 nt, Artificial Sequence
  Description of Artificial Sequence: Synthetic oligonucleotide
  Antisense strand to SEQ ID NO: 667760
ucccggaucagauuagugu

SEQ ID NO: 667762 - RNA, 19 nt, Artificial Sequence
  Description of Artificial Sequence: Synthetic oligonucleotide
  Sense strand starting at position 722 of SEQ ID NO: 585789
uaaucugauccgggacuuu

SEQ ID NO: 667763 - RNA, 19 nt, Artificial Sequence
  Description of Artificial Sequence: Synthetic oligonucleotide
  Antisense strand to SEQ ID NO: 667762
aaagucccggaucagauua

SEQ ID NO: 667764 - RNA, 19 nt, Artificial Sequence
  Description of Artificial Sequence: Synthetic oligonucleotide
  Sense strand starting at position 781 of SEQ ID NO: 585789
gcaagauuccugcacucac

SEQ ID NO: 667765 - RNA, 19 nt, Artificial Sequence
  Description of Artificial Sequence: Synthetic oligonucleotide
  Antisense strand to SEQ ID NO: 667764
gugagugcaggaaucuugc

SEQ ID NO: 667766 - RNA, 19 nt, Artificial Sequence
  Description of Artificial Sequence: Synthetic oligonucleotide
  Sense strand starting at position 789 of SEQ ID NO: 585789
ccugcacucaccgaugaga

SEQ ID NO: 667767 - RNA, 19 nt, Artificial Sequence
  Description of Artificial Sequence: Synthetic oligonucleotide
  Antisense strand to SEQ ID NO: 667766
ucucaucggugagugcagg

SEQ ID NO: 667768 - RNA, 19 nt, Artificial Sequence
  Description of Artificial Sequence: Synthetic oligonucleotide
  Sense strand starting at position 791 of SEQ ID NO: 585789
ugcacucaccgaugagaau

SEQ ID NO: 667769 - RNA, 19 nt, Artificial Sequence
  Description of Artificial Sequence: Synthetic oligonucleotide
  Antisense strand to SEQ ID NO: 667768
auucucaucggugagugca

SEQ ID NO: 667770 - RNA, 19 nt, Artificial Sequence
  Description of Artificial Sequence: Synthetic oligonucleotide
  Sense strand starting at position 792 of SEQ ID NO: 585789
gcacucaccgaugagaauu

SEQ ID NO: 667771 - RNA, 19 nt, Artificial Sequence
  Description of Artificial Sequence: Synthetic oligonucleotide
  Antisense strand to SEQ ID NO: 667770
aauucucaucggugagugc

SEQ ID NO: 667772 - RNA, 19 nt, Artificial Sequence
  Description of Artificial Sequence: Synthetic oligonucleotide
  Sense strand starting at position 800 of SEQ ID NO: 585789
cgaugagaauugccaccau

SEQ ID NO: 667773 - RNA, 19 nt, Artificial Sequence
  Description of Artificial Sequence: Synthetic oligonucleotide
  Antisense strand to SEQ ID NO: 667772
augguggcaauucucaucg

SEQ ID NO: 667774 - RNA, 19 nt, Artificial Sequence
  Description of Artificial Sequence: Synthetic oligonucleotide
  Sense strand starting at position 1779 of SEQ ID NO: 585789
ugacguuuccuugaaggag

SEQ ID NO: 667775 - RNA, 19 nt, Artificial Sequence
  Description of Artificial Sequence: Synthetic oligonucleotide
  Antisense strand to SEQ ID NO: 667774
cuccuucaaggaaacguca

SEQ ID NO: 667776 - RNA, 19 nt, Artificial Sequence
  Description of Artificial Sequence: Synthetic oligonucleotide
  Sense strand starting at position 1867 of SEQ ID NO: 585789
ggucgggucgcuuccgaaa

SEQ ID NO: 667777 - RNA, 19 nt, Artificial Sequence
  Description of Artificial Sequence: Synthetic oligonucleotide
  Antisense strand to SEQ ID NO: 667776
uuucggaagcgacccgacc

SEQ ID NO: 667778 - RNA, 19 nt, Artificial Sequence
  Description of Artificial Sequence: Synthetic oligonucleotide
  Sense strand starting at position 2078 of SEQ ID NO: 585789
ugaaguaaucucugagaac

SEQ ID NO: 667779 - RNA, 19 nt, Artificial Sequence
  Description of Artificial Sequence: Synthetic oligonucleotide
  Antisense strand to SEQ ID NO: 667778
guucucagagauuacuuca

SEQ ID NO: 667780 - RNA, 19 nt, Artificial Sequence
  Description of Artificial Sequence: Synthetic oligonucleotide
  Sense strand starting at position 2279 of SEQ ID NO: 585789
ccugcaggucaugauacau

SEQ ID NO: 667781 - RNA, 19 nt, Artificial Sequence
  Description of Artificial Sequence: Synthetic oligonucleotide
  Antisense strand to SEQ ID NO: 667780
auguaucaugaccugcagg

SEQ ID NO: 667782 - RNA, 19 nt, Artificial Sequence
  Description of Artificial Sequence: Synthetic oligonucleotide
  Sense strand starting at position 2285 of SEQ ID NO: 585789
ggucaugauacauggucuu

SEQ ID NO: 667783 - RNA, 19 nt, Artificial Sequence
  Description of Artificial Sequence: Synthetic oligonucleotide
  Antisense strand to SEQ ID NO: 667782
aagaccauguaucaugacc

SEQ ID NO: 667784 - RNA, 19 nt, Artificial Sequence
  Description of Artificial Sequence: Synthetic oligonucleotide
  Sense strand starting at position 2382 of SEQ ID NO: 585789
augugagucccacauaaac

SEQ ID NO: 667785 - RNA, 19 nt, Artificial Sequence
  Description of Artificial Sequence: Synthetic oligonucleotide
  Antisense strand to SEQ ID NO: 667784
guuuaugugggacucacau

SEQ ID NO: 667786 - RNA, 19 nt, Artificial Sequence
  Description of Artificial Sequence: Synthetic oligonucleotide
  Sense strand starting at position 2400 of SEQ ID NO: 585789
cugugacuuuauccugaaa

SEQ ID NO: 667787 - RNA, 19 nt, Artificial Sequence
  Description of Artificial Sequence: Synthetic oligonucleotide
  Antisense strand to SEQ ID NO: 667786
uuucaggauaaagucacag

SEQ ID NO: 667788 - RNA, 19 nt, Artificial Sequence
  Description of Artificial Sequence: Synthetic oligonucleotide
  Sense strand starting at position 2416 of SEQ ID NO: 585789
aaagauuagccgggugacu

SEQ ID NO: 667789 - RNA, 19 nt, Artificial Sequence
  Description of Artificial Sequence: Synthetic oligonucleotide
  Antisense strand to SEQ ID NO: 667788
agucacccggcuaaucuuu

SEQ ID NO: 667790 - RNA, 19 nt, Artificial Sequence
  Description of Artificial Sequence: Synthetic oligonucleotide
  Sense strand starting at position 2782 of SEQ ID NO: 585789
ccaggaauagcaugugaaa

SEQ ID NO: 667791 - RNA, 19 nt, Artificial Sequence
  Description of Artificial Sequence: Synthetic oligonucleotide
  Antisense strand to SEQ ID NO: 667790
uuucacaugcuauuccugg

SEQ ID NO: 667792 - RNA, 19 nt, Artificial Sequence
  Description of Artificial Sequence: Synthetic oligonucleotide
  Sense strand starting at position 2946 of SEQ ID NO: 585789
ggagucuggcugggaaagu

SEQ ID NO: 667793 - RNA, 19 nt, Artificial Sequence
  Description of Artificial Sequence: Synthetic oligonucleotide
  Antisense strand to SEQ ID NO: 667792
acuuucccagccagacucc

SEQ ID NO: 667794 - RNA, 19 nt, Artificial Sequence
  Description of Artificial Sequence: Synthetic oligonucleotide
  Sense strand starting at position 3361 of SEQ ID NO: 585789
agcaauguuuaggcaauuu

SEQ ID NO: 667795 - RNA, 19 nt, Artificial Sequence
  Description of Artificial Sequence: Synthetic oligonucleotide
  Antisense strand to SEQ ID NO: 667794
aaauugccuaaacauugcu

SEQ ID NO: 667796 - RNA, 19 nt, Artificial Sequence
  Description of Artificial Sequence: Synthetic oligonucleotide
  Sense strand starting at position 3428 of SEQ ID NO: 585789
cauagaaugugacuuuguu

SEQ ID NO: 667797 - RNA, 19 nt, Artificial Sequence
  Description of Artificial Sequence: Synthetic oligonucleotide
  Antisense strand to SEQ ID NO: 667796
aacaaagucacauucuaug

SEQ ID NO: 667798 - RNA, 19 nt, Artificial Sequence
  Description of Artificial Sequence: Synthetic oligonucleotide
  Sense strand starting at position 3432 of SEQ ID NO: 585789
gaaugugacuuuguuauug

SEQ ID NO: 667799 - RNA, 19 nt, Artificial Sequence
  Description of Artificial Sequence: Synthetic oligonucleotide
  Antisense strand to SEQ ID NO: 667798
caauaacaaagucacauuc

SEQ ID NO: 667800 - RNA, 19 nt, Artificial Sequence
  Description of Artificial Sequence: Synthetic oligonucleotide
  Sense strand starting at position 3552 of SEQ ID NO: 585789
ucaggcugcccagaaacau

SEQ ID NO: 667801 - RNA, 19 nt, Artificial Sequence
  Description of Artificial Sequence: Synthetic oligonucleotide
  Antisense strand to SEQ ID NO: 667800
auguuucugggcagccuga

SEQ ID NO: 667802 - RNA, 19 nt, Artificial Sequence
  Description of Artificial Sequence: Synthetic oligonucleotide
  Sense strand starting at position 3814 of SEQ ID NO: 585789
ggagguagagcccaguuau

SEQ ID NO: 667803 - RNA, 19 nt, Artificial Sequence
  Description of Artificial Sequence: Synthetic oligonucleotide
  Antisense strand to SEQ ID NO: 667802
auaacugggcucuaccucc

SEQ ID NO: 667804 - RNA, 19 nt, Artificial Sequence
  Description of Artificial Sequence: Synthetic oligonucleotide
  Sense strand starting at position 3824 of SEQ ID NO: 585789
cccaguuauggcuggaaua

SEQ ID NO: 667805 - RNA, 19 nt, Artificial Sequence
  Description of Artificial Sequence: Synthetic oligonucleotide
  Antisense strand to SEQ ID NO: 667804
uauuccagccauaacuggg

SEQ ID NO: 667806 - RNA, 19 nt, Artificial Sequence
  Description of Artificial Sequence: Synthetic oligonucleotide
  Sense strand starting at position 3825 of SEQ ID NO: 585789
ccaguuauggcuggaauaa

SEQ ID NO: 667807 - RNA, 19 nt, Artificial Sequence
  Description of Artificial Sequence: Synthetic oligonucleotide
  Antisense strand to SEQ ID NO: 667806
uuauuccagccauaacugg

SEQ ID NO: 667808 - RNA, 19 nt, Artificial Sequence
  Description of Artificial Sequence: Synthetic oligonucleotide
  Sense strand starting at position 3909 of SEQ ID NO: 585789
cggcuaucccuguucuguu

SEQ ID NO: 667809 - RNA, 19 nt, Artificial Sequence
  Description of Artificial Sequence: Synthetic oligonucleotide
  Antisense strand to SEQ ID NO: 667808
aacagaacagggauagccg

SEQ ID NO: 667810 - RNA, 19 nt, Artificial Sequence
  Description of Artificial Sequence: Synthetic oligonucleotide
  Sense strand starting at position 134 of SEQ ID NO: 585790
ccauuaauguagucuagga

SEQ ID NO: 667811 - RNA, 19 nt, Artificial Sequence
  Description of Artificial Sequence: Synthetic oligonucleotide
  Antisense strand to SEQ ID NO: 667810
uccuagacuacauuaaugg

SEQ ID NO: 667812 - RNA, 19 nt, Artificial Sequence
  Description of Artificial Sequence: Synthetic oligonucleotide
  Sense strand starting at position 138 of SEQ ID NO: 585790
uaauguagucuaggacaaa

SEQ ID NO: 667813 - RNA, 19 nt, Artificial Sequence
  Description of Artificial Sequence: Synthetic oligonucleotide
  Antisense strand to SEQ ID NO: 667812
uuuguccuagacuacauua

SEQ ID NO: 667814 - RNA, 19 nt, Artificial Sequence
  Description of Artificial Sequence: Synthetic oligonucleotide
  Sense strand starting at position 141 of SEQ ID NO: 585790
uguagucuaggacaaagua

SEQ ID NO: 667815 - RNA, 19 nt, Artificial Sequence
  Description of Artificial Sequence: Synthetic oligonucleotide
  Antisense strand to SEQ ID NO: 667814
uacuuuguccuagacuaca

SEQ ID NO: 667816 - RNA, 19 nt, Artificial Sequence
  Description of Artificial Sequence: Synthetic oligonucleotide
  Sense strand starting at position 200 of SEQ ID NO: 585790
aggaaagggugcuucacau

SEQ ID NO: 667817 - RNA, 19 nt, Artificial Sequence
  Description of Artificial Sequence: Synthetic oligonucleotide
  Antisense strand to SEQ ID NO: 667816
augugaagcacccuuuccu

SEQ ID NO: 667818 - RNA, 19 nt, Artificial Sequence
  Description of Artificial Sequence: Synthetic oligonucleotide
  Sense strand starting at position 443 of SEQ ID NO: 585790
ugugucuugcuagaagaac

SEQ ID NO: 667819 - RNA, 19 nt, Artificial Sequence
  Description of Artificial Sequence: Synthetic oligonucleotide
  Antisense strand to SEQ ID NO: 667818
guucuucuagcaagacaca

SEQ ID NO: 667820 - RNA, 19 nt, Artificial Sequence
  Description of Artificial Sequence: Synthetic oligonucleotide
  Sense strand starting at position 602 of SEQ ID NO: 585790
gugaaagucagaugguuua

SEQ ID NO: 667821 - RNA, 19 nt, Artificial Sequence
  Description of Artificial Sequence: Synthetic oligonucleotide
  Antisense strand to SEQ ID NO: 667820
uaaaccaucugacuuucac

SEQ ID NO: 667822 - RNA, 19 nt, Artificial Sequence
  Description of Artificial Sequence: Synthetic oligonucleotide
  Sense strand starting at position 612 of SEQ ID NO: 585790
gaugguuuagcaugaggau

SEQ ID NO: 667823 - RNA, 19 nt, Artificial Sequence
  Description of Artificial Sequence: Synthetic oligonucleotide
  Antisense strand to SEQ ID NO: 667822
auccucaugcuaaaccauc

SEQ ID NO: 667824 - RNA, 19 nt, Artificial Sequence
  Description of Artificial Sequence: Synthetic oligonucleotide
  Sense strand starting at position 613 of SEQ ID NO: 585790
augguuuagcaugaggauu

SEQ ID NO: 667825 - RNA, 19 nt, Artificial Sequence
  Description of Artificial Sequence: Synthetic oligonucleotide
  Antisense strand to SEQ ID NO: 667824
aauccucaugcuaaaccau

SEQ ID NO: 667826 - RNA, 19 nt, Artificial Sequence
  Description of Artificial Sequence: Synthetic oligonucleotide
  Sense strand starting at position 648 of SEQ ID NO: 585790
uugauuugcugagaaggac

SEQ ID NO: 667827 - RNA, 19 nt, Artificial Sequence
  Description of Artificial Sequence: Synthetic oligonucleotide
  Antisense strand to SEQ ID NO: 667826
guccuucucagcaaaucaa

SEQ ID NO: 667828 - RNA, 19 nt, Artificial Sequence
  Description of Artificial Sequence: Synthetic oligonucleotide
  Sense strand starting at position 976 of SEQ ID NO: 585790
cuuguuaugccauaaugaa

SEQ ID NO: 667829 - RNA, 19 nt, Artificial Sequence
  Description of Artificial Sequence: Synthetic oligonucleotide
  Antisense strand to SEQ ID NO: 667828
uucauuauggcauaacaag

SEQ ID NO: 667830 - RNA, 19 nt, Artificial Sequence
  Description of Artificial Sequence: Synthetic oligonucleotide
  Sense strand starting at position 1066 of SEQ ID NO: 585790
ccuuacaguucuccacaga

SEQ ID NO: 667831 - RNA, 19 nt, Artificial Sequence
  Description of Artificial Sequence: Synthetic oligonucleotide
  Antisense strand to SEQ ID NO: 667830
ucuguggagaacuguaagg

SEQ ID NO: 667832 - RNA, 19 nt, Artificial Sequence
  Description of Artificial Sequence: Synthetic oligonucleotide
  Sense strand starting at position 1067 of SEQ ID NO: 585790
cuuacaguucuccacagau

SEQ ID NO: 667833 - RNA, 19 nt, Artificial Sequence
  Description of Artificial Sequence: Synthetic oligonucleotide
  Antisense strand to SEQ ID NO: 667832
aucuguggagaacuguaag

SEQ ID NO: 667834 - RNA, 19 nt, Artificial Sequence
  Description of Artificial Sequence: Synthetic oligonucleotide
  Sense strand starting at position 1310 of SEQ ID NO: 585790
ccaauacauuagucaguua

SEQ ID NO: 667835 - RNA, 19 nt, Artificial Sequence
  Description of Artificial Sequence: Synthetic oligonucleotide
  Antisense strand to SEQ ID NO: 667834
uaacugacuaauguauugg

SEQ ID NO: 667836 - RNA, 19 nt, Artificial Sequence
  Description of Artificial Sequence: Synthetic oligonucleotide
  Sense strand starting at position 1313 of SEQ ID NO: 585790
auacauuagucaguuaaag

SEQ ID NO: 667837 - RNA, 19 nt, Artificial Sequence
  Description of Artificial Sequence: Synthetic oligonucleotide
  Antisense strand to SEQ ID NO: 667836
cuuuaacugacuaauguau

SEQ ID NO: 667838 - RNA, 19 nt, Artificial Sequence
  Description of Artificial Sequence: Synthetic oligonucleotide
  Sense strand starting at position 1362 of SEQ ID NO: 585790
aaggauuguugcucaugga

SEQ ID NO: 667839 - RNA, 19 nt, Artificial Sequence
  Description of Artificial Sequence: Synthetic oligonucleotide
  Antisense strand to SEQ ID NO: 667838
uccaugagcaacaauccuu

SEQ ID NO: 667840 - RNA, 19 nt, Artificial Sequence
  Description of Artificial Sequence: Synthetic oligonucleotide
  Sense strand starting at position 1363 of SEQ ID NO: 585790
aggauuguugcucauggag

SEQ ID NO: 667841 - RNA, 19 nt, Artificial Sequence
  Description of Artificial Sequence: Synthetic oligonucleotide
  Antisense strand to SEQ ID NO: 667840
cuccaugagcaacaauccu

SEQ ID NO: 667842 - RNA, 19 nt, Artificial Sequence
  Description of Artificial Sequence: Synthetic oligonucleotide
  Sense strand starting at position 1366 of SEQ ID NO: 585790
auuguugcucauggagaaa

SEQ ID NO: 667843 - RNA, 19 nt, Artificial Sequence
  Description of Artificial Sequence: Synthetic oligonucleotide
  Antisense strand to SEQ ID NO: 667842
uuucuccaugagcaacaau

SEQ ID NO: 667844 - RNA, 19 nt, Artificial Sequence
  Description of Artificial Sequence: Synthetic oligonucleotide
  Sense strand starting at position 1378 of SEQ ID NO: 585790
ggagaaaggccgugaauuc

SEQ ID NO: 667845 - RNA, 19 nt, Artificial Sequence
  Description of Artificial Sequence: Synthetic oligonucleotide
  Antisense strand to SEQ ID NO: 667844
gaauucacggccuuucucc

SEQ ID NO: 667846 - RNA, 19 nt, Artificial Sequence
  Description of Artificial Sequence: Synthetic oligonucleotide
  Sense strand starting at position 1535 of SEQ ID NO: 585790
gauaaacgccgugaugaga

SEQ ID NO: 667847 - RNA, 19 nt, Artificial Sequence
  Description of Artificial Sequence: Synthetic oligonucleotide
  Antisense strand to SEQ ID NO: 667846
ucucaucacggcguuuauc

SEQ ID NO: 667848 - RNA, 19 nt, Artificial Sequence
  Description of Artificial Sequence: Synthetic oligonucleotide
  Sense strand starting at position 1594 of SEQ ID NO: 585790
cucaaauccggucaaacuu

SEQ ID NO: 667849 - RNA, 19 nt, Artificial Sequence
  Description of Artificial Sequence: Synthetic oligonucleotide
  Antisense strand to SEQ ID NO: 667848
aaguuugaccggauuugag

SEQ ID NO: 667850 - RNA, 19 nt, Artificial Sequence
  Description of Artificial Sequence: Synthetic oligonucleotide
  Sense strand starting at position 1613 of SEQ ID NO: 585790
acuguuugcaugcauagga

SEQ ID NO: 667851 - RNA, 19 nt, Artificial Sequence
  Description of Artificial Sequence: Synthetic oligonucleotide
  Antisense strand to SEQ ID NO: 667850
uccuaugcaugcaaacagu

SEQ ID NO: 667852 - RNA, 19 nt, Artificial Sequence
  Description of Artificial Sequence: Synthetic oligonucleotide
  Sense strand starting at position 1626 of SEQ ID NO: 585790
auaggaguuauuggcaauc

SEQ ID NO: 667853 - RNA, 19 nt, Artificial Sequence
  Description of Artificial Sequence: Synthetic oligonucleotide
  Antisense strand to SEQ ID NO: 667852
gauugccaauaacuccuau

SEQ ID NO: 667854 - RNA, 19 nt, Artificial Sequence
  Description of Artificial Sequence: Synthetic oligonucleotide
  Sense strand starting at position 1682 of SEQ ID NO: 585790
ucaugaaagcuguggauga

SEQ ID NO: 667855 - RNA, 19 nt, Artificial Sequence
  Description of Artificial Sequence: Synthetic oligonucleotide
  Antisense strand to SEQ ID NO: 667854
ucauccacagcuuucauga

SEQ ID NO: 667856 - RNA, 19 nt, Artificial Sequence
  Description of Artificial Sequence: Synthetic oligonucleotide
  Sense strand starting at position 1754 of SEQ ID NO: 585790
acacuaaucugauccggga

SEQ ID NO: 667857 - RNA, 19 nt, Artificial Sequence
  Description of Artificial Sequence: Synthetic oligonucleotide
  Antisense strand to SEQ ID NO: 667856
ucccggaucagauuagugu

SEQ ID NO: 667858 - RNA, 19 nt, Artificial Sequence
  Description of Artificial Sequence: Synthetic oligonucleotide
  Sense strand starting at position 1758 of SEQ ID NO: 585790
uaaucugauccgggacuuu

SEQ ID NO: 667859 - RNA, 19 nt, Artificial Sequence
  Description of Artificial Sequence: Synthetic oligonucleotide
  Antisense strand to SEQ ID NO: 667858
aaagucccggaucagauua

SEQ ID NO: 667860 - RNA, 19 nt, Artificial Sequence
  Description of Artificial Sequence: Synthetic oligonucleotide
  Sense strand starting at position 1817 of SEQ ID NO: 585790
gcaagauuccugcacucac

SEQ ID NO: 667861 - RNA, 19 nt, Artificial Sequence
  Description of Artificial Sequence: Synthetic oligonucleotide
  Antisense strand to SEQ ID NO: 667860
gugagugcaggaaucuugc

SEQ ID NO: 667862 - RNA, 19 nt, Artificial Sequence
  Description of Artificial Sequence: Synthetic oligonucleotide
  Sense strand starting at position 1825 of SEQ ID NO: 585790
ccugcacucaccgaugaga

SEQ ID NO: 667863 - RNA, 19 nt, Artificial Sequence
  Description of Artificial Sequence: Synthetic oligonucleotide
  Antisense strand to SEQ ID NO: 667862
ucucaucggugagugcagg

SEQ ID NO: 667864 - RNA, 19 nt, Artificial Sequence
  Description of Artificial Sequence: Synthetic oligonucleotide
  Sense strand starting at position 1827 of SEQ ID NO: 585790
ugcacucaccgaugagaau

SEQ ID NO: 667865 - RNA, 19 nt, Artificial Sequence
  Description of Artificial Sequence: Synthetic oligonucleotide
  Antisense strand to SEQ ID NO: 667864
auucucaucggugagugca

SEQ ID NO: 667866 - RNA, 19 nt, Artificial Sequence
  Description of Artificial Sequence: Synthetic oligonucleotide
  Sense strand starting at position 1828 of SEQ ID NO: 585790
gcacucaccgaugagaauu

SEQ ID NO: 667867 - RNA, 19 nt, Artificial Sequence
  Description of Artificial Sequence: Synthetic oligonucleotide
  Antisense strand to SEQ ID NO: 667866
aauucucaucggugagugc

SEQ ID NO: 667868 - RNA, 19 nt, Artificial Sequence
  Description of Artificial Sequence: Synthetic oligonucleotide
  Sense strand starting at position 1836 of SEQ ID NO: 585790
cgaugagaauugccaccau

SEQ ID NO: 667869 - RNA, 19 nt, Artificial Sequence
  Description of Artificial Sequence: Synthetic oligonucleotide
  Antisense strand to SEQ ID NO: 667868
augguggcaauucucaucg

SEQ ID NO: 667870 - RNA, 19 nt, Artificial Sequence
  Description of Artificial Sequence: Synthetic oligonucleotide
  Sense strand starting at position 2815 of SEQ ID NO: 585790
ugacguuuccuugaaggag

SEQ ID NO: 667871 - RNA, 19 nt, Artificial Sequence
  Description of Artificial Sequence: Synthetic oligonucleotide
  Antisense strand to SEQ ID NO: 667870
cuccuucaaggaaacguca

SEQ ID NO: 667872 - RNA, 19 nt, Artificial Sequence
  Description of Artificial Sequence: Synthetic oligonucleotide
  Sense strand starting at position 2903 of SEQ ID NO: 585790
ggucgggucgcuuccgaaa

SEQ ID NO: 667873 - RNA, 19 nt, Artificial Sequence
  Description of Artificial Sequence: Synthetic oligonucleotide
  Antisense strand to SEQ ID NO: 667872
uuucggaagcgacccgacc

SEQ ID NO: 667874 - RNA, 19 nt, Artificial Sequence
  Description of Artificial Sequence: Synthetic oligonucleotide
  Sense strand starting at position 3114 of SEQ ID NO: 585790
ugaaguaaucucugagaac

SEQ ID NO: 667875 - RNA, 19 nt, Artificial Sequence
  Description of Artificial Sequence: Synthetic oligonucleotide
  Antisense strand to SEQ ID NO: 667874
guucucagagauuacuuca

SEQ ID NO: 667876 - RNA, 19 nt, Artificial Sequence
  Description of Artificial Sequence: Synthetic oligonucleotide
  Sense strand starting at position 3315 of SEQ ID NO: 585790
ccugcaggucaugauacau

SEQ ID NO: 667877 - RNA, 19 nt, Artificial Sequence
  Description of Artificial Sequence: Synthetic oligonucleotide
  Antisense strand to SEQ ID NO: 667876
auguaucaugaccugcagg

SEQ ID NO: 667878 - RNA, 19 nt, Artificial Sequence
  Description of Artificial Sequence: Synthetic oligonucleotide
  Sense strand starting at position 3321 of SEQ ID NO: 585790
ggucaugauacauggucuu

SEQ ID NO: 667879 - RNA, 19 nt, Artificial Sequence
  Description of Artificial Sequence: Synthetic oligonucleotide
  Antisense strand to SEQ ID NO: 667878
aagaccauguaucaugacc

SEQ ID NO: 667880 - RNA, 19 nt, Artificial Sequence
  Description of Artificial Sequence: Synthetic oligonucleotide
  Sense strand starting at position 3418 of SEQ ID NO: 585790
augugagucccacauaaac

SEQ ID NO: 667881 - RNA, 19 nt, Artificial Sequence
  Description of Artificial Sequence: Synthetic oligonucleotide
  Antisense strand to SEQ ID NO: 667880
guuuaugugggacucacau

SEQ ID NO: 667882 - RNA, 19 nt, Artificial Sequence
  Description of Artificial Sequence: Synthetic oligonucleotide
  Sense strand starting at position 3436 of SEQ ID NO: 585790
cugugacuuuauccugaaa

SEQ ID NO: 667883 - RNA, 19 nt, Artificial Sequence
  Description of Artificial Sequence: Synthetic oligonucleotide
  Antisense strand to SEQ ID NO: 667882
uuucaggauaaagucacag

SEQ ID NO: 667884 - RNA, 19 nt, Artificial Sequence
  Description of Artificial Sequence: Synthetic oligonucleotide
  Sense strand starting at position 3452 of SEQ ID NO: 585790
aaagauuagccgggugacu

SEQ ID NO: 667885 - RNA, 19 nt, Artificial Sequence
  Description of Artificial Sequence: Synthetic oligonucleotide
  Antisense strand to SEQ ID NO: 667884
agucacccggcuaaucuuu

SEQ ID NO: 667886 - RNA, 19 nt, Artificial Sequence
  Description of Artificial Sequence: Synthetic oligonucleotide
  Sense strand starting at position 3818 of SEQ ID NO: 585790
ccaggaauagcaugugaaa

SEQ ID NO: 667887 - RNA, 19 nt, Artificial Sequence
  Description of Artificial Sequence: Synthetic oligonucleotide
  Antisense strand to SEQ ID NO: 667886
uuucacaugcuauuccugg

SEQ ID NO: 667888 - RNA, 19 nt, Artificial Sequence
  Description of Artificial Sequence: Synthetic oligonucleotide
  Sense strand starting at position 3982 of SEQ ID NO: 585790
ggagucuggcugggaaagu

SEQ ID NO: 667889 - RNA, 19 nt, Artificial Sequence
  Description of Artificial Sequence: Synthetic oligonucleotide
  Antisense strand to SEQ ID NO: 667888
acuuucccagccagacucc

SEQ ID NO: 667890 - RNA, 19 nt, Artificial Sequence
  Description of Artificial Sequence: Synthetic oligonucleotide
  Sense strand starting at position 230 of SEQ ID NO: 585791
cuacuaauagaguaagcca

SEQ ID NO: 667891 - RNA, 19 nt, Artificial Sequence
  Description of Artificial Sequence: Synthetic oligonucleotide
  Antisense strand to SEQ ID NO: 667890
uggcuuacucuauuaguag

SEQ ID NO: 667892 - RNA, 19 nt, Artificial Sequence
  Description of Artificial Sequence: Synthetic oligonucleotide
  Sense strand starting at position 268 of SEQ ID NO: 585791
uccgacuugcuccaaagua

SEQ ID NO: 667893 - RNA, 19 nt, Artificial Sequence
  Description of Artificial Sequence: Synthetic oligonucleotide
  Antisense strand to SEQ ID NO: 667892
uacuuuggagcaagucgga

SEQ ID NO: 667894 - RNA, 19 nt, Artificial Sequence
  Description of Artificial Sequence: Synthetic oligonucleotide
  Sense strand starting at position 299 of SEQ ID NO: 585791
ucucuuguggaagggauaa

SEQ ID NO: 667895 - RNA, 19 nt, Artificial Sequence
  Description of Artificial Sequence: Synthetic oligonucleotide
  Antisense strand to SEQ ID NO: 667894
uuaucccuuccacaagaga

SEQ ID NO: 667896 - RNA, 19 nt, Artificial Sequence
  Description of Artificial Sequence: Synthetic oligonucleotide
  Sense strand starting at position 380 of SEQ ID NO: 585791
uggugaaaccaagagcuuu

SEQ ID NO: 667897 - RNA, 19 nt, Artificial Sequence
  Description of Artificial Sequence: Synthetic oligonucleotide
  Antisense strand to SEQ ID NO: 667896
aaagcucuugguuucacca

SEQ ID NO: 667898 - RNA, 19 nt, Artificial Sequence
  Description of Artificial Sequence: Synthetic oligonucleotide
  Sense strand starting at position 399 of SEQ ID NO: 585791
guagcauucuuaguaagga

SEQ ID NO: 667899 - RNA, 19 nt, Artificial Sequence
  Description of Artificial Sequence: Synthetic oligonucleotide
  Antisense strand to SEQ ID NO: 667898
uccuuacuaagaaugcuac

SEQ ID NO: 667900 - RNA, 19 nt, Artificial Sequence
  Description of Artificial Sequence: Synthetic oligonucleotide
  Sense strand starting at position 414 of SEQ ID NO: 585791
aggagugcauuugaacaaa

SEQ ID NO: 667901 - RNA, 19 nt, Artificial Sequence
  Description of Artificial Sequence: Synthetic oligonucleotide
  Antisense strand to SEQ ID NO: 667900
uuuguucaaaugcacuccu

SEQ ID NO: 667902 - RNA, 19 nt, Artificial Sequence
  Description of Artificial Sequence: Synthetic oligonucleotide
  Sense strand starting at position 577 of SEQ ID NO: 585791
acauaaguguaaguuggau

SEQ ID NO: 667903 - RNA, 19 nt, Artificial Sequence
  Description of Artificial Sequence: Synthetic oligonucleotide
  Antisense strand to SEQ ID NO: 667902
auccaacuuacacuuaugu

SEQ ID NO: 667904 - RNA, 19 nt, Artificial Sequence
  Description of Artificial Sequence: Synthetic oligonucleotide
  Sense strand starting at position 639 of SEQ ID NO: 585791
uuguaugaucguguugguu

SEQ ID NO: 667905 - RNA, 19 nt, Artificial Sequence
  Description of Artificial Sequence: Synthetic oligonucleotide
  Antisense strand to SEQ ID NO: 667904
aaccaacacgaucauacaa

SEQ ID NO: 667906 - RNA, 19 nt, Artificial Sequence
  Description of Artificial Sequence: Synthetic oligonucleotide
  Sense strand starting at position 750 of SEQ ID NO: 585791
ggaacaaucugacugagcu

SEQ ID NO: 667907 - RNA, 19 nt, Artificial Sequence
  Description of Artificial Sequence: Synthetic oligonucleotide
  Antisense strand to SEQ ID NO: 667906
agcucagucagauuguucc

SEQ ID NO: 667908 - RNA, 19 nt, Artificial Sequence
  Description of Artificial Sequence: Synthetic oligonucleotide
  Sense strand starting at position 868 of SEQ ID NO: 585791
agcugaacucuugguuaag

SEQ ID NO: 667909 - RNA, 19 nt, Artificial Sequence
  Description of Artificial Sequence: Synthetic oligonucleotide
  Antisense strand to SEQ ID NO: 667908
cuuaaccaagaguucagcu

SEQ ID NO: 667910 - RNA, 19 nt, Artificial Sequence
  Description of Artificial Sequence: Synthetic oligonucleotide
  Sense strand starting at position 870 of SEQ ID NO: 585791
cugaacucuugguuaagga

SEQ ID NO: 667911 - RNA, 19 nt, Artificial Sequence
  Description of Artificial Sequence: Synthetic oligonucleotide
  Antisense strand to SEQ ID NO: 667910
uccuuaaccaagaguucag

SEQ ID NO: 667912 - RNA, 19 nt, Artificial Sequence
  Description of Artificial Sequence: Synthetic oligonucleotide
  Sense strand starting at position 2117 of SEQ ID NO: 585791
cgcgcuucuaucccgaaca

SEQ ID NO: 667913 - RNA, 19 nt, Artificial Sequence
  Description of Artificial Sequence: Synthetic oligonucleotide
  Antisense strand to SEQ ID NO: 667912
uguucgggauagaagcgcg

SEQ ID NO: 667914 - RNA, 19 nt, Artificial Sequence
  Description of Artificial Sequence: Synthetic oligonucleotide
  Sense strand starting at position 2192 of SEQ ID NO: 585791
caaggauccuggcuugaug

SEQ ID NO: 667915 - RNA, 19 nt, Artificial Sequence
  Description of Artificial Sequence: Synthetic oligonucleotide
  Antisense strand to SEQ ID NO: 667914
caucaagccaggauccuug

SEQ ID NO: 667916 - RNA, 19 nt, Artificial Sequence
  Description of Artificial Sequence: Synthetic oligonucleotide
  Sense strand starting at position 2449 of SEQ ID NO: 585791
uccaguagcacuggagauu

SEQ ID NO: 667917 - RNA, 19 nt, Artificial Sequence
  Description of Artificial Sequence: Synthetic oligonucleotide
  Antisense strand to SEQ ID NO: 667916
aaucuccagugcuacugga

SEQ ID NO: 667918 - RNA, 19 nt, Artificial Sequence
  Description of Artificial Sequence: Synthetic oligonucleotide
  Sense strand starting at position 2487 of SEQ ID NO: 585791
ggguaaaugagaggucuuc

SEQ ID NO: 667919 - RNA, 19 nt, Artificial Sequence
  Description of Artificial Sequence: Synthetic oligonucleotide
  Antisense strand to SEQ ID NO: 667918
gaagaccucucauuuaccc

SEQ ID NO: 667920 - RNA, 19 nt, Artificial Sequence
  Description of Artificial Sequence: Synthetic oligonucleotide
  Sense strand starting at position 2755 of SEQ ID NO: 585791
gcaguuucccaggaggaug

SEQ ID NO: 667921 - RNA, 19 nt, Artificial Sequence
  Description of Artificial Sequence: Synthetic oligonucleotide
  Antisense strand to SEQ ID NO: 667920
cauccuccugggaaacugc

SEQ ID NO: 667922 - RNA, 19 nt, Artificial Sequence
  Description of Artificial Sequence: Synthetic oligonucleotide
  Sense strand starting at position 2800 of SEQ ID NO: 585791
uugcuaauaguuuaggaau

SEQ ID NO: 667923 - RNA, 19 nt, Artificial Sequence
  Description of Artificial Sequence: Synthetic oligonucleotide
  Antisense strand to SEQ ID NO: 667922
auuccuaaacuauuagcaa

SEQ ID NO: 667924 - RNA, 19 nt, Artificial Sequence
  Description of Artificial Sequence: Synthetic oligonucleotide
  Sense strand starting at position 2931 of SEQ ID NO: 585791
gggaguuuagcagaggucu

SEQ ID NO: 667925 - RNA, 19 nt, Artificial Sequence
  Description of Artificial Sequence: Synthetic oligonucleotide
  Antisense strand to SEQ ID NO: 667924
agaccucugcuaaacuccc

SEQ ID NO: 667926 - RNA, 19 nt, Artificial Sequence
  Description of Artificial Sequence: Synthetic oligonucleotide
  Sense strand starting at position 2939 of SEQ ID NO: 585791
agcagaggucugggaacaa

SEQ ID NO: 667927 - RNA, 19 nt, Artificial Sequence
  Description of Artificial Sequence: Synthetic oligonucleotide
  Antisense strand to SEQ ID NO: 667926
uuguucccagaccucugcu

SEQ ID NO: 667928 - RNA, 19 nt, Artificial Sequence
  Description of Artificial Sequence: Synthetic oligonucleotide
  Sense strand starting at position 3416 of SEQ ID NO: 585791
cagagccuacucugugaaa

SEQ ID NO: 667929 - RNA, 19 nt, Artificial Sequence
  Description of Artificial Sequence: Synthetic oligonucleotide
  Antisense strand to SEQ ID NO: 667928
uuucacagaguaggcucug

SEQ ID NO: 667930 - RNA, 19 nt, Artificial Sequence
  Description of Artificial Sequence: Synthetic oligonucleotide
  Sense strand starting at position 3418 of SEQ ID NO: 585791
gagccuacucugugaaagg

SEQ ID NO: 667931 - RNA, 19 nt, Artificial Sequence
  Description of Artificial Sequence: Synthetic oligonucleotide
  Antisense strand to SEQ ID NO: 667930
ccuuucacagaguaggcuc

SEQ ID NO: 667932 - RNA, 19 nt, Artificial Sequence
  Description of Artificial Sequence: Synthetic oligonucleotide
  Sense strand starting at position 3460 of SEQ ID NO: 585791
acgagucauuucucuguca

SEQ ID NO: 667933 - RNA, 19 nt, Artificial Sequence
  Description of Artificial Sequence: Synthetic oligonucleotide
  Antisense strand to SEQ ID NO: 667932
ugacagagaaaugacucgu

SEQ ID NO: 667934 - RNA, 19 nt, Artificial Sequence
  Description of Artificial Sequence: Synthetic oligonucleotide
  Sense strand starting at position 3461 of SEQ ID NO: 585791
cgagucauuucucugucag

SEQ ID NO: 667935 - RNA, 19 nt, Artificial Sequence
  Description of Artificial Sequence: Synthetic oligonucleotide
  Antisense strand to SEQ ID NO: 667934
cugacagagaaaugacucg

SEQ ID NO: 667936 - RNA, 19 nt, Artificial Sequence
  Description of Artificial Sequence: Synthetic oligonucleotide
  Sense strand starting at position 3462 of SEQ ID NO: 585791
gagucauuucucugucagc

SEQ ID NO: 667937 - RNA, 19 nt, Artificial Sequence
  Description of Artificial Sequence: Synthetic oligonucleotide
  Antisense strand to SEQ ID NO: 667936
gcugacagagaaaugacuc

SEQ ID NO: 667938 - RNA, 19 nt, Artificial Sequence
  Description of Artificial Sequence: Synthetic oligonucleotide
  Sense strand starting at position 3463 of SEQ ID NO: 585791
agucauuucucugucagca

SEQ ID NO: 667939 - RNA, 19 nt, Artificial Sequence
  Description of Artificial Sequence: Synthetic oligonucleotide
  Antisense strand to SEQ ID NO: 667938
ugcugacagagaaaugacu

SEQ ID NO: 667940 - RNA, 19 nt, Artificial Sequence
  Description of Artificial Sequence: Synthetic oligonucleotide
  Sense strand starting at position 3483 of SEQ ID NO: 585791
agcaccuauugucuaggaa

SEQ ID NO: 667941 - RNA, 19 nt, Artificial Sequence
  Description of Artificial Sequence: Synthetic oligonucleotide
  Antisense strand to SEQ ID NO: 667940
uuccuagacaauaggugcu

SEQ ID NO: 667942 - RNA, 19 nt, Artificial Sequence
  Description of Artificial Sequence: Synthetic oligonucleotide
  Sense strand starting at position 3484 of SEQ ID NO: 585791
gcaccuauugucuaggaaa

SEQ ID NO: 667943 - RNA, 19 nt, Artificial Sequence
  Description of Artificial Sequence: Synthetic oligonucleotide
  Antisense strand to SEQ ID NO: 667942
uuuccuagacaauaggugc

SEQ ID NO: 667944 - RNA, 19 nt, Artificial Sequence
  Description of Artificial Sequence: Synthetic oligonucleotide
  Sense strand starting at position 3486 of SEQ ID NO: 585791
accuauugucuaggaaaga

SEQ ID NO: 667945 - RNA, 19 nt, Artificial Sequence
  Description of Artificial Sequence: Synthetic oligonucleotide
  Antisense strand to SEQ ID NO: 667944
ucuuuccuagacaauaggu

SEQ ID NO: 667946 - RNA, 19 nt, Artificial Sequence
  Description of Artificial Sequence: Synthetic oligonucleotide
  Sense strand starting at position 3584 of SEQ ID NO: 585791
ggccauagaagguacuuua

SEQ ID NO: 667947 - RNA, 19 nt, Artificial Sequence
  Description of Artificial Sequence: Synthetic oligonucleotide
  Antisense strand to SEQ ID NO: 667946
uaaaguaccuucuauggcc

SEQ ID NO: 667948 - RNA, 19 nt, Artificial Sequence
  Description of Artificial Sequence: Synthetic oligonucleotide
  Sense strand starting at position 3595 of SEQ ID NO: 585791
guacuuuaaagaugaguag

SEQ ID NO: 667949 - RNA, 19 nt, Artificial Sequence
  Description of Artificial Sequence: Synthetic oligonucleotide
  Antisense strand to SEQ ID NO: 667948
cuacucaucuuuaaaguac

SEQ ID NO: 667950 - RNA, 19 nt, Artificial Sequence
  Description of Artificial Sequence: Synthetic oligonucleotide
  Sense strand starting at position 3609 of SEQ ID NO: 585791
aguagaauuucugucugca

SEQ ID NO: 667951 - RNA, 19 nt, Artificial Sequence
  Description of Artificial Sequence: Synthetic oligonucleotide
  Antisense strand to SEQ ID NO: 667950
ugcagacagaaauucuacu

SEQ ID NO: 667952 - RNA, 19 nt, Artificial Sequence
  Description of Artificial Sequence: Synthetic oligonucleotide
  Sense strand starting at position 3643 of SEQ ID NO: 585791
gggugagacuauucagggu

SEQ ID NO: 667953 - RNA, 19 nt, Artificial Sequence
  Description of Artificial Sequence: Synthetic oligonucleotide
  Antisense strand to SEQ ID NO: 667952
acccugaauagucucaccc

SEQ ID NO: 667954 - RNA, 19 nt, Artificial Sequence
  Description of Artificial Sequence: Synthetic oligonucleotide
  Sense strand starting at position 3647 of SEQ ID NO: 585791
gagacuauucagggugugu

SEQ ID NO: 667955 - RNA, 19 nt, Artificial Sequence
  Description of Artificial Sequence: Synthetic oligonucleotide
  Antisense strand to SEQ ID NO: 667954
acacacccugaauagucuc

SEQ ID NO: 667956 - RNA, 19 nt, Artificial Sequence
  Description of Artificial Sequence: Synthetic oligonucleotide
  Sense strand starting at position 3649 of SEQ ID NO: 585791
gacuauucaggguguguga

SEQ ID NO: 667957 - RNA, 19 nt, Artificial Sequence
  Description of Artificial Sequence: Synthetic oligonucleotide
  Antisense strand to SEQ ID NO: 667956
ucacacacccugaauaguc

SEQ ID NO: 667958 - RNA, 19 nt, Artificial Sequence
  Description of Artificial Sequence: Synthetic oligonucleotide
  Sense strand starting at position 3765 of SEQ ID NO: 585791
ggacuuucucacuggguua

SEQ ID NO: 667959 - RNA, 19 nt, Artificial Sequence
  Description of Artificial Sequence: Synthetic oligonucleotide
  Antisense strand to SEQ ID NO: 667958
uaacccagugagaaagucc

SEQ ID NO: 667960 - RNA, 19 nt, Artificial Sequence
  Description of Artificial Sequence: Synthetic oligonucleotide
  Sense strand starting at position 3818 of SEQ ID NO: 585791
ucugauccuagagguugua

SEQ ID NO: 667961 - RNA, 19 nt, Artificial Sequence
  Description of Artificial Sequence: Synthetic oligonucleotide
  Antisense strand to SEQ ID NO: 667960
uacaaccucuaggaucaga

SEQ ID NO: 667962 - RNA, 19 nt, Artificial Sequence
  Description of Artificial Sequence: Synthetic oligonucleotide
  Sense strand starting at position 3884 of SEQ ID NO: 585791
acagcuuauugaucuagga

SEQ ID NO: 667963 - RNA, 19 nt, Artificial Sequence
  Description of Artificial Sequence: Synthetic oligonucleotide
  Antisense strand to SEQ ID NO: 667962
uccuagaucaauaagcugu

SEQ ID NO: 667964 - RNA, 19 nt, Artificial Sequence
  Description of Artificial Sequence: Synthetic oligonucleotide
  Sense strand starting at position 3886 of SEQ ID NO: 585791
agcuuauugaucuaggagu

SEQ ID NO: 667965 - RNA, 19 nt, Artificial Sequence
  Description of Artificial Sequence: Synthetic oligonucleotide
  Antisense strand to SEQ ID NO: 667964
acuccuagaucaauaagcu

SEQ ID NO: 667966 - RNA, 19 nt, Artificial Sequence
  Description of Artificial Sequence: Synthetic oligonucleotide
  Sense strand starting at position 3888 of SEQ ID NO: 585791
cuuauugaucuaggaguga

SEQ ID NO: 667967 - RNA, 19 nt, Artificial Sequence
  Description of Artificial Sequence: Synthetic oligonucleotide
  Antisense strand to SEQ ID NO: 667966
ucacuccuagaucaauaag

SEQ ID NO: 667968 - RNA, 19 nt, Artificial Sequence
  Description of Artificial Sequence: Synthetic oligonucleotide
  Sense strand starting at position 3982 of SEQ ID NO: 585791
uugaauuugugacauggaa

SEQ ID NO: 667969 - RNA, 19 nt, Artificial Sequence
  Description of Artificial Sequence: Synthetic oligonucleotide
  Antisense strand to SEQ ID NO: 667968
uuccaugucacaaauucaa

SEQ ID NO: 667970 - RNA, 19 nt, Artificial Sequence
  Description of Artificial Sequence: Synthetic oligonucleotide
  Sense strand starting at position 62 of SEQ ID NO: 585792
cccaaucuucccuggaaag

SEQ ID NO: 667971 - RNA, 19 nt, Artificial Sequence
  Description of Artificial Sequence: Synthetic oligonucleotide
  Antisense strand to SEQ ID NO: 667970
cuuuccagggaagauuggg

SEQ ID NO: 667972 - RNA, 19 nt, Artificial Sequence
  Description of Artificial Sequence: Synthetic oligonucleotide
  Sense strand starting at position 79 of SEQ ID NO: 585792
aggcuuccaugacuagaga

SEQ ID NO: 667973 - RNA, 19 nt, Artificial Sequence
  Description of Artificial Sequence: Synthetic oligonucleotide
  Antisense strand to SEQ ID NO: 667972
ucucuagucauggaagccu

SEQ ID NO: 667974 - RNA, 19 nt, Artificial Sequence
  Description of Artificial Sequence: Synthetic oligonucleotide
  Sense strand starting at position 250 of SEQ ID NO: 585792
ucuaauuccguggauguau

SEQ ID NO: 667975 - RNA, 19 nt, Artificial Sequence
  Description of Artificial Sequence: Synthetic oligonucleotide
  Antisense strand to SEQ ID NO: 667974
auacauccacggaauuaga

SEQ ID NO: 667976 - RNA, 19 nt, Artificial Sequence
  Description of Artificial Sequence: Synthetic oligonucleotide
  Sense strand starting at position 315 of SEQ ID NO: 585792
ggagaagucucucuuaucc

SEQ ID NO: 667977 - RNA, 19 nt, Artificial Sequence
  Description of Artificial Sequence: Synthetic oligonucleotide
  Antisense strand to SEQ ID NO: 667976
ggauaagagagacuucucc

SEQ ID NO: 667978 - RNA, 19 nt, Artificial Sequence
  Description of Artificial Sequence: Synthetic oligonucleotide
  Sense strand starting at position 415 of SEQ ID NO: 585792
ugaacuguaucuuuaacag

SEQ ID NO: 667979 - RNA, 19 nt, Artificial Sequence
  Description of Artificial Sequence: Synthetic oligonucleotide
  Antisense strand to SEQ ID NO: 667978
cuguuaaagauacaguuca

SEQ ID NO: 667980 - RNA, 19 nt, Artificial Sequence
  Description of Artificial Sequence: Synthetic oligonucleotide
  Sense strand starting at position 590 of SEQ ID NO: 585792
augguagaucuggguuuag

SEQ ID NO: 667981 - RNA, 19 nt, Artificial Sequence
  Description of Artificial Sequence: Synthetic oligonucleotide
  Antisense strand to SEQ ID NO: 667980
cuaaacccagaucuaccau

SEQ ID NO: 667982 - RNA, 19 nt, Artificial Sequence
  Description of Artificial Sequence: Synthetic oligonucleotide
  Sense strand starting at position 599 of SEQ ID NO: 585792
cuggguuuaggcuauuaag

SEQ ID NO: 667983 - RNA, 19 nt, Artificial Sequence
  Description of Artificial Sequence: Synthetic oligonucleotide
  Antisense strand to SEQ ID NO: 667982
cuuaauagccuaaacccag

SEQ ID NO: 667984 - RNA, 19 nt, Artificial Sequence
  Description of Artificial Sequence: Synthetic oligonucleotide
  Sense strand starting at position 658 of SEQ ID NO: 585792
uguuguguuauggaaauga

SEQ ID NO: 667985 - RNA, 19 nt, Artificial Sequence
  Description of Artificial Sequence: Synthetic oligonucleotide
  Antisense strand to SEQ ID NO: 667984
ucauuuccauaacacaaca

SEQ ID NO: 667986 - RNA, 19 nt, Artificial Sequence
  Description of Artificial Sequence: Synthetic oligonucleotide
  Sense strand starting at position 707 of SEQ ID NO: 585792
cuuaaugacccaggguuaa

SEQ ID NO: 667987 - RNA, 19 nt, Artificial Sequence
  Description of Artificial Sequence: Synthetic oligonucleotide
  Antisense strand to SEQ ID NO: 667986
uuaacccugggucauuaag

SEQ ID NO: 667988 - RNA, 19 nt, Artificial Sequence
  Description of Artificial Sequence: Synthetic oligonucleotide
  Sense strand starting at position 927 of SEQ ID NO: 585792
cuccuuucggguggacaaa

SEQ ID NO: 667989 - RNA, 19 nt, Artificial Sequence
  Description of Artificial Sequence: Synthetic oligonucleotide
  Antisense strand to SEQ ID NO: 667988
uuuguccacccgaaaggag

SEQ ID NO: 667990 - RNA, 19 nt, Artificial Sequence
  Description of Artificial Sequence: Synthetic oligonucleotide
  Sense strand starting at position 1007 of SEQ ID NO: 585792
guuaacugguccuuuaaag

SEQ ID NO: 667991 - RNA, 19 nt, Artificial Sequence
  Description of Artificial Sequence: Synthetic oligonucleotide
  Antisense strand to SEQ ID NO: 667990
cuuuaaaggaccaguuaac

SEQ ID NO: 667992 - RNA, 19 nt, Artificial Sequence
  Description of Artificial Sequence: Synthetic oligonucleotide
  Sense strand starting at position 1019 of SEQ ID NO: 585792
uuuaaagcucuagaaagug

SEQ ID NO: 667993 - RNA, 19 nt, Artificial Sequence
  Description of Artificial Sequence: Synthetic oligonucleotide
  Antisense strand to SEQ ID NO: 667992
cacuuucuagagcuuuaaa

SEQ ID NO: 667994 - RNA, 19 nt, Artificial Sequence
  Description of Artificial Sequence: Synthetic oligonucleotide
  Sense strand starting at position 1040 of SEQ ID NO: 585792
gguuaucgagcacagacau

SEQ ID NO: 667995 - RNA, 19 nt, Artificial Sequence
  Description of Artificial Sequence: Synthetic oligonucleotide
  Antisense strand to SEQ ID NO: 667994
augucugugcucgauaacc

SEQ ID NO: 667996 - RNA, 19 nt, Artificial Sequence
  Description of Artificial Sequence: Synthetic oligonucleotide
  Sense strand starting at position 1139 of SEQ ID NO: 585792
uagagauaucauggaucgu

SEQ ID NO: 667997 - RNA, 19 nt, Artificial Sequence
  Description of Artificial Sequence: Synthetic oligonucleotide
  Antisense strand to SEQ ID NO: 667996
acgauccaugauaucucua

SEQ ID NO: 667998 - RNA, 19 nt, Artificial Sequence
  Description of Artificial Sequence: Synthetic oligonucleotide
  Sense strand starting at position 1145 of SEQ ID NO: 585792
uaucauggaucguuucuau

SEQ ID NO: 667999 - RNA, 19 nt, Artificial Sequence
  Description of Artificial Sequence: Synthetic oligonucleotide
  Antisense strand to SEQ ID NO: 667998
auagaaacgauccaugaua

SEQ ID NO: 668000 - RNA, 19 nt, Artificial Sequence
  Description of Artificial Sequence: Synthetic oligonucleotide
  Sense strand starting at position 1184 of SEQ ID NO: 585792
acuaaugcccacuggaaua

SEQ ID NO: 668001 - RNA, 19 nt, Artificial Sequence
  Description of Artificial Sequence: Synthetic oligonucleotide
  Antisense strand to SEQ ID NO: 668000
uauuccagugggcauuagu

SEQ ID NO: 668002 - RNA, 19 nt, Artificial Sequence
  Description of Artificial Sequence: Synthetic oligonucleotide
  Sense strand starting at position 1258 of SEQ ID NO: 585792
ccuuaaguuccuuaaguac

SEQ ID NO: 668003 - RNA, 19 nt, Artificial Sequence
  Description of Artificial Sequence: Synthetic oligonucleotide
  Antisense strand to SEQ ID NO: 668002
guacuuaaggaacuuaagg

SEQ ID NO: 668004 - RNA, 19 nt, Artificial Sequence
  Description of Artificial Sequence: Synthetic oligonucleotide
  Sense strand starting at position 1301 of SEQ ID NO: 585792
ggauuucuaccucgugcua

SEQ ID NO: 668005 - RNA, 19 nt, Artificial Sequence
  Description of Artificial Sequence: Synthetic oligonucleotide
  Antisense strand to SEQ ID NO: 668004
uagcacgagguagaaaucc

SEQ ID NO: 668006 - RNA, 19 nt, Artificial Sequence
  Description of Artificial Sequence: Synthetic oligonucleotide
  Sense strand starting at position 1349 of SEQ ID NO: 585792
gcuuccuggucauuauuua

SEQ ID NO: 668007 - RNA, 19 nt, Artificial Sequence
  Description of Artificial Sequence: Synthetic oligonucleotide
  Antisense strand to SEQ ID NO: 668006
uaaauaaugaccaggaagc

SEQ ID NO: 668008 - RNA, 19 nt, Artificial Sequence
  Description of Artificial Sequence: Synthetic oligonucleotide
  Sense strand starting at position 1372 of SEQ ID NO: 585792
aucauuauacagugacuau

SEQ ID NO: 668009 - RNA, 19 nt, Artificial Sequence
  Description of Artificial Sequence: Synthetic oligonucleotide
  Antisense strand to SEQ ID NO: 668008
auagucacuguauaaugau

SEQ ID NO: 668010 - RNA, 19 nt, Artificial Sequence
  Description of Artificial Sequence: Synthetic oligonucleotide
  Sense strand starting at position 1455 of SEQ ID NO: 585792
gucaaagagugguucugaa

SEQ ID NO: 668011 - RNA, 19 nt, Artificial Sequence
  Description of Artificial Sequence: Synthetic oligonucleotide
  Antisense strand to SEQ ID NO: 668010
uucagaaccacucuuugac

SEQ ID NO: 668012 - RNA, 19 nt, Artificial Sequence
  Description of Artificial Sequence: Synthetic oligonucleotide
  Sense strand starting at position 1468 of SEQ ID NO: 585792
ucugaauucgaauguaauu

SEQ ID NO: 668013 - RNA, 19 nt, Artificial Sequence
  Description of Artificial Sequence: Synthetic oligonucleotide
  Antisense strand to SEQ ID NO: 668012
aauuacauucgaauucaga

SEQ ID NO: 668014 - RNA, 19 nt, Artificial Sequence
  Description of Artificial Sequence: Synthetic oligonucleotide
  Sense strand starting at position 1506 of SEQ ID NO: 585792
cggagaacuuugaguggga

SEQ ID NO: 668015 - RNA, 19 nt, Artificial Sequence
  Description of Artificial Sequence: Synthetic oligonucleotide
  Antisense strand to SEQ ID NO: 668014
ucccacucaaaguucuccg

SEQ ID NO: 668016 - RNA, 19 nt, Artificial Sequence
  Description of Artificial Sequence: Synthetic oligonucleotide
  Sense strand starting at position 1510 of SEQ ID NO: 585792
gaacuuugagugggacuga

SEQ ID NO: 668017 - RNA, 19 nt, Artificial Sequence
  Description of Artificial Sequence: Synthetic oligonucleotide
  Antisense strand to SEQ ID NO: 668016
ucagucccacucaaaguuc

SEQ ID NO: 668018 - RNA, 19 nt, Artificial Sequence
  Description of Artificial Sequence: Synthetic oligonucleotide
  Sense strand starting at position 1769 of SEQ ID NO: 585792
guguguuggacgcucgaga

SEQ ID NO: 668019 - RNA, 19 nt, Artificial Sequence
  Description of Artificial Sequence: Synthetic oligonucleotide
  Antisense strand to SEQ ID NO: 668018
ucucgagcguccaacacac

SEQ ID NO: 668020 - RNA, 19 nt, Artificial Sequence
  Description of Artificial Sequence: Synthetic oligonucleotide
  Sense strand starting at position 2721 of SEQ ID NO: 585792
cgaggcagagauugaguaa

SEQ ID NO: 668021 - RNA, 19 nt, Artificial Sequence
  Description of Artificial Sequence: Synthetic oligonucleotide
  Antisense strand to SEQ ID NO: 668020
uuacucaaucucugccucg

SEQ ID NO: 668022 - RNA, 19 nt, Artificial Sequence
  Description of Artificial Sequence: Synthetic oligonucleotide
  Sense strand starting at position 2840 of SEQ ID NO: 585792
ccacuaaguagguacgaau

SEQ ID NO: 668023 - RNA, 19 nt, Artificial Sequence
  Description of Artificial Sequence: Synthetic oligonucleotide
  Antisense strand to SEQ ID NO: 668022
auucguaccuacuuagugg

SEQ ID NO: 668024 - RNA, 19 nt, Artificial Sequence
  Description of Artificial Sequence: Synthetic oligonucleotide
  Sense strand starting at position 3038 of SEQ ID NO: 585792
gggucaggagccugugaaa

SEQ ID NO: 668025 - RNA, 19 nt, Artificial Sequence
  Description of Artificial Sequence: Synthetic oligonucleotide
  Antisense strand to SEQ ID NO: 668024
uuucacaggcuccugaccc

SEQ ID NO: 668026 - RNA, 19 nt, Artificial Sequence
  Description of Artificial Sequence: Synthetic oligonucleotide
  Sense strand starting at position 3076 of SEQ ID NO: 585792
gggacucaguacuuaguua

SEQ ID NO: 668027 - RNA, 19 nt, Artificial Sequence
  Description of Artificial Sequence: Synthetic oligonucleotide
  Antisense strand to SEQ ID NO: 668026
uaacuaaguacugaguccc

SEQ ID NO: 668028 - RNA, 19 nt, Artificial Sequence
  Description of Artificial Sequence: Synthetic oligonucleotide
  Sense strand starting at position 3088 of SEQ ID NO: 585792
uuaguuagugaguaccuaa

SEQ ID NO: 668029 - RNA, 19 nt, Artificial Sequence
  Description of Artificial Sequence: Synthetic oligonucleotide
  Antisense strand to SEQ ID NO: 668028
uuagguacucacuaacuaa

SEQ ID NO: 668030 - RNA, 19 nt, Artificial Sequence
  Description of Artificial Sequence: Synthetic oligonucleotide
  Sense strand starting at position 3091 of SEQ ID NO: 585792
guuagugaguaccuaauag

SEQ ID NO: 668031 - RNA, 19 nt, Artificial Sequence
  Description of Artificial Sequence: Synthetic oligonucleotide
  Antisense strand to SEQ ID NO: 668030
cuauuagguacucacuaac

SEQ ID NO: 668032 - RNA, 19 nt, Artificial Sequence
  Description of Artificial Sequence: Synthetic oligonucleotide
  Sense strand starting at position 3135 of SEQ ID NO: 585792
uggguugugugaccacaga

SEQ ID NO: 668033 - RNA, 19 nt, Artificial Sequence
  Description of Artificial Sequence: Synthetic oligonucleotide
  Antisense strand to SEQ ID NO: 668032
ucuguggucacacaaccca

SEQ ID NO: 668034 - RNA, 19 nt, Artificial Sequence
  Description of Artificial Sequence: Synthetic oligonucleotide
  Sense strand starting at position 3160 of SEQ ID NO: 585792
ugaacuaaguucuugucca

SEQ ID NO: 668035 - RNA, 19 nt, Artificial Sequence
  Description of Artificial Sequence: Synthetic oligonucleotide
  Antisense strand to SEQ ID NO: 668034
uggacaagaacuuaguuca

SEQ ID NO: 668036 - RNA, 19 nt, Artificial Sequence
  Description of Artificial Sequence: Synthetic oligonucleotide
  Sense strand starting at position 3165 of SEQ ID NO: 585792
uaaguucuuguccaaguga

SEQ ID NO: 668037 - RNA, 19 nt, Artificial Sequence
  Description of Artificial Sequence: Synthetic oligonucleotide
  Antisense strand to SEQ ID NO: 668036
ucacuuggacaagaacuua

SEQ ID NO: 668038 - RNA, 19 nt, Artificial Sequence
  Description of Artificial Sequence: Synthetic oligonucleotide
  Sense strand starting at position 3178 of SEQ ID NO: 585792
aagugaauaucgguuguag

SEQ ID NO: 668039 - RNA, 19 nt, Artificial Sequence
  Description of Artificial Sequence: Synthetic oligonucleotide
  Antisense strand to SEQ ID NO: 668038
cuacaaccgauauucacuu

SEQ ID NO: 668040 - RNA, 19 nt, Artificial Sequence
  Description of Artificial Sequence: Synthetic oligonucleotide
  Sense strand starting at position 3195 of SEQ ID NO: 585792
aguuguguuagacagucca

SEQ ID NO: 668041 - RNA, 19 nt, Artificial Sequence
  Description of Artificial Sequence: Synthetic oligonucleotide
  Antisense strand to SEQ ID NO: 668040
uggacugucuaacacaacu

SEQ ID NO: 668042 - RNA, 19 nt, Artificial Sequence
  Description of Artificial Sequence: Synthetic oligonucleotide
  Sense strand starting at position 3310 of SEQ ID NO: 585792
uuguacuuugcagauaaua

SEQ ID NO: 668043 - RNA, 19 nt, Artificial Sequence
  Description of Artificial Sequence: Synthetic oligonucleotide
  Antisense strand to SEQ ID NO: 668042
uauuaucugcaaaguacaa

SEQ ID NO: 668044 - RNA, 19 nt, Artificial Sequence
  Description of Artificial Sequence: Synthetic oligonucleotide
  Sense strand starting at position 3429 of SEQ ID NO: 585792
ggugaucuaugauuaguua

SEQ ID NO: 668045 - RNA, 19 nt, Artificial Sequence
  Description of Artificial Sequence: Synthetic oligonucleotide
  Antisense strand to SEQ ID NO: 668044
uaacuaaucauagaucacc

SEQ ID NO: 668046 - RNA, 19 nt, Artificial Sequence
  Description of Artificial Sequence: Synthetic oligonucleotide
  Sense strand starting at position 3430 of SEQ ID NO: 585792
gugaucuaugauuaguuau

SEQ ID NO: 668047 - RNA, 19 nt, Artificial Sequence
  Description of Artificial Sequence: Synthetic oligonucleotide
  Antisense strand to SEQ ID NO: 668046
auaacuaaucauagaucac

SEQ ID NO: 668048 - RNA, 19 nt, Artificial Sequence
  Description of Artificial Sequence: Synthetic oligonucleotide
  Sense strand starting at position 3699 of SEQ ID NO: 585792
gaaggaauuuagugaggaa

SEQ ID NO: 668049 - RNA, 19 nt, Artificial Sequence
  Description of Artificial Sequence: Synthetic oligonucleotide
  Antisense strand to SEQ ID NO: 668048
uuccucacuaaauuccuuc

SEQ ID NO: 668050 - RNA, 19 nt, Artificial Sequence
  Description of Artificial Sequence: Synthetic oligonucleotide
  Sense strand starting at position 41 of SEQ ID NO: 585793
aauagaaggcaguguggua

SEQ ID NO: 668051 - RNA, 19 nt, Artificial Sequence
  Description of Artificial Sequence: Synthetic oligonucleotide
  Antisense strand to SEQ ID NO: 668050
uaccacacugccuucuauu

SEQ ID NO: 668052 - RNA, 19 nt, Artificial Sequence
  Description of Artificial Sequence: Synthetic oligonucleotide
  Sense strand starting at position 92 of SEQ ID NO: 585793
acaguuugaacgggaaaug

SEQ ID NO: 668053 - RNA, 19 nt, Artificial Sequence
  Description of Artificial Sequence: Synthetic oligonucleotide
  Antisense strand to SEQ ID NO: 668052
cauuucccguucaaacugu

SEQ ID NO: 668054 - RNA, 19 nt, Artificial Sequence
  Description of Artificial Sequence: Synthetic oligonucleotide
  Sense strand starting at position 93 of SEQ ID NO: 585793
caguuugaacgggaaaugu

SEQ ID NO: 668055 - RNA, 19 nt, Artificial Sequence
  Description of Artificial Sequence: Synthetic oligonucleotide
  Antisense strand to SEQ ID NO: 668054
acauuucccguucaaacug

SEQ ID NO: 668056 - RNA, 19 nt, Artificial Sequence
  Description of Artificial Sequence: Synthetic oligonucleotide
  Sense strand starting at position 224 of SEQ ID NO: 585793
cacaguuuccagggucaga

SEQ ID NO: 668057 - RNA, 19 nt, Artificial Sequence
  Description of Artificial Sequence: Synthetic oligonucleotide
  Antisense strand to SEQ ID NO: 668056
ucugacccuggaaacugug

SEQ ID NO: 668058 - RNA, 19 nt, Artificial Sequence
  Description of Artificial Sequence: Synthetic oligonucleotide
  Sense strand starting at position 288 of SEQ ID NO: 585793
ucacuuguaguuugaaggu

SEQ ID NO: 668059 - RNA, 19 nt, Artificial Sequence
  Description of Artificial Sequence: Synthetic oligonucleotide
  Antisense strand to SEQ ID NO: 668058
accuucaaacuacaaguga

SEQ ID NO: 668060 - RNA, 19 nt, Artificial Sequence
  Description of Artificial Sequence: Synthetic oligonucleotide
  Sense strand starting at position 294 of SEQ ID NO: 585793
guaguuugaagguagaacu

SEQ ID NO: 668061 - RNA, 19 nt, Artificial Sequence
  Description of Artificial Sequence: Synthetic oligonucleotide
  Antisense strand to SEQ ID NO: 668060
aguucuaccuucaaacuac

SEQ ID NO: 668062 - RNA, 19 nt, Artificial Sequence
  Description of Artificial Sequence: Synthetic oligonucleotide
  Sense strand starting at position 413 of SEQ ID NO: 585793
uuaugucaugaucaagcaa

SEQ ID NO: 668063 - RNA, 19 nt, Artificial Sequence
  Description of Artificial Sequence: Synthetic oligonucleotide
  Antisense strand to SEQ ID NO: 668062
uugcuugaucaugacauaa

SEQ ID NO: 668064 - RNA, 19 nt, Artificial Sequence
  Description of Artificial Sequence: Synthetic oligonucleotide
  Sense strand starting at position 594 of SEQ ID NO: 585793
guuuguuugcuuguucagu

SEQ ID NO: 668065 - RNA, 19 nt, Artificial Sequence
  Description of Artificial Sequence: Synthetic oligonucleotide
  Antisense strand to SEQ ID NO: 668064
acugaacaagcaaacaaac

SEQ ID NO: 668066 - RNA, 19 nt, Artificial Sequence
  Description of Artificial Sequence: Synthetic oligonucleotide
  Sense strand starting at position 680 of SEQ ID NO: 585793
cuguuugcauuauuugaau

SEQ ID NO: 668067 - RNA, 19 nt, Artificial Sequence
  Description of Artificial Sequence: Synthetic oligonucleotide
  Antisense strand to SEQ ID NO: 668066
auucaaauaaugcaaacag

SEQ ID NO: 668068 - RNA, 19 nt, Artificial Sequence
  Description of Artificial Sequence: Synthetic oligonucleotide
  Sense strand starting at position 744 of SEQ ID NO: 585793
guaaguauaaaugguugua

SEQ ID NO: 668069 - RNA, 19 nt, Artificial Sequence
  Description of Artificial Sequence: Synthetic oligonucleotide
  Antisense strand to SEQ ID NO: 668068
uacaaccauuuauacuuac

SEQ ID NO: 668070 - RNA, 19 nt, Artificial Sequence
  Description of Artificial Sequence: Synthetic oligonucleotide
  Sense strand starting at position 761 of SEQ ID NO: 585793
uauauaggacaguguucua

SEQ ID NO: 668071 - RNA, 19 nt, Artificial Sequence
  Description of Artificial Sequence: Synthetic oligonucleotide
  Antisense strand to SEQ ID NO: 668070
uagaacacuguccuauaua

SEQ ID NO: 668072 - RNA, 19 nt, Artificial Sequence
  Description of Artificial Sequence: Synthetic oligonucleotide
  Sense strand starting at position 764 of SEQ ID NO: 585793
auaggacaguguucuauga

SEQ ID NO: 668073 - RNA, 19 nt, Artificial Sequence
  Description of Artificial Sequence: Synthetic oligonucleotide
  Antisense strand to SEQ ID NO: 668072
ucauagaacacuguccuau

SEQ ID NO: 668074 - RNA, 19 nt, Artificial Sequence
  Description of Artificial Sequence: Synthetic oligonucleotide
  Sense strand starting at position 768 of SEQ ID NO: 585793
gacaguguucuaugaaagc

SEQ ID NO: 668075 - RNA, 19 nt, Artificial Sequence
  Description of Artificial Sequence: Synthetic oligonucleotide
  Antisense strand to SEQ ID NO: 668074
gcuuucauagaacacuguc

SEQ ID NO: 668076 - RNA, 19 nt, Artificial Sequence
  Description of Artificial Sequence: Synthetic oligonucleotide
  Sense strand starting at position 862 of SEQ ID NO: 585793
acuucuaggccuuauaaga

SEQ ID NO: 668077 - RNA, 19 nt, Artificial Sequence
  Description of Artificial Sequence: Synthetic oligonucleotide
  Antisense strand to SEQ ID NO: 668076
ucuuauaaggccuagaagu

SEQ ID NO: 668078 - RNA, 19 nt, Artificial Sequence
  Description of Artificial Sequence: Synthetic oligonucleotide
  Sense strand starting at position 967 of SEQ ID NO: 585793
uuaggacuagccuauuauc

SEQ ID NO: 668079 - RNA, 19 nt, Artificial Sequence
  Description of Artificial Sequence: Synthetic oligonucleotide
  Antisense strand to SEQ ID NO: 668078
gauaauaggcuaguccuaa

SEQ ID NO: 668080 - RNA, 19 nt, Artificial Sequence
  Description of Artificial Sequence: Synthetic oligonucleotide
  Sense strand starting at position 1044 of SEQ ID NO: 585793
aucugcgaaugucuugaaa

SEQ ID NO: 668081 - RNA, 19 nt, Artificial Sequence
  Description of Artificial Sequence: Synthetic oligonucleotide
  Antisense strand to SEQ ID NO: 668080
uuucaagacauucgcagau

SEQ ID NO: 668082 - RNA, 19 nt, Artificial Sequence
  Description of Artificial Sequence: Synthetic oligonucleotide
  Sense strand starting at position 1133 of SEQ ID NO: 585793
gcauguuacucauuugcaa

SEQ ID NO: 668083 - RNA, 19 nt, Artificial Sequence
  Description of Artificial Sequence: Synthetic oligonucleotide
  Antisense strand to SEQ ID NO: 668082
uugcaaaugaguaacaugc

SEQ ID NO: 668084 - RNA, 19 nt, Artificial Sequence
  Description of Artificial Sequence: Synthetic oligonucleotide
  Sense strand starting at position 1296 of SEQ ID NO: 585793
gaaagucauguuuggauua

SEQ ID NO: 668085 - RNA, 19 nt, Artificial Sequence
  Description of Artificial Sequence: Synthetic oligonucleotide
  Antisense strand to SEQ ID NO: 668084
uaauccaaacaugacuuuc

SEQ ID NO: 668086 - RNA, 19 nt, Artificial Sequence
  Description of Artificial Sequence: Synthetic oligonucleotide
  Sense strand starting at position 1301 of SEQ ID NO: 585793
ucauguuuggauuaguagu

SEQ ID NO: 668087 - RNA, 19 nt, Artificial Sequence
  Description of Artificial Sequence: Synthetic oligonucleotide
  Antisense strand to SEQ ID NO: 668086
acuacuaauccaaacauga

SEQ ID NO: 668088 - RNA, 19 nt, Artificial Sequence
  Description of Artificial Sequence: Synthetic oligonucleotide
  Sense strand starting at position 1453 of SEQ ID NO: 585793
uucugaguucagugaggac

SEQ ID NO: 668089 - RNA, 19 nt, Artificial Sequence
  Description of Artificial Sequence: Synthetic oligonucleotide
  Antisense strand to SEQ ID NO: 668088
guccucacugaacucagaa

SEQ ID NO: 668090 - RNA, 19 nt, Artificial Sequence
  Description of Artificial Sequence: Synthetic oligonucleotide
  Sense strand starting at position 1525 of SEQ ID NO: 585793
guaugcauuucucugguca

SEQ ID NO: 668091 - RNA, 19 nt, Artificial Sequence
  Description of Artificial Sequence: Synthetic oligonucleotide
  Antisense strand to SEQ ID NO: 668090
ugaccagagaaaugcauac

SEQ ID NO: 668092 - RNA, 19 nt, Artificial Sequence
  Description of Artificial Sequence: Synthetic oligonucleotide
  Sense strand starting at position 1529 of SEQ ID NO: 585793
gcauuucucuggucacuga

SEQ ID NO: 668093 - RNA, 19 nt, Artificial Sequence
  Description of Artificial Sequence: Synthetic oligonucleotide
  Antisense strand to SEQ ID NO: 668092
ucagugaccagagaaaugc

SEQ ID NO: 668094 - RNA, 19 nt, Artificial Sequence
  Description of Artificial Sequence: Synthetic oligonucleotide
  Sense strand starting at position 1650 of SEQ ID NO: 585793
gcuggucgugagucugauu

SEQ ID NO: 668095 - RNA, 19 nt, Artificial Sequence
  Description of Artificial Sequence: Synthetic oligonucleotide
  Antisense strand to SEQ ID NO: 668094
aaucagacucacgaccagc

SEQ ID NO: 668096 - RNA, 19 nt, Artificial Sequence
  Description of Artificial Sequence: Synthetic oligonucleotide
  Sense strand starting at position 1655 of SEQ ID NO: 585793
ucgugagucugauuaugga

SEQ ID NO: 668097 - RNA, 19 nt, Artificial Sequence
  Description of Artificial Sequence: Synthetic oligonucleotide
  Antisense strand to SEQ ID NO: 668096
uccauaaucagacucacga

SEQ ID NO: 668098 - RNA, 19 nt, Artificial Sequence
  Description of Artificial Sequence: Synthetic oligonucleotide
  Sense strand starting at position 1673 of SEQ ID NO: 585793
augcuuuguccagcugcga

SEQ ID NO: 668099 - RNA, 19 nt, Artificial Sequence
  Description of Artificial Sequence: Synthetic oligonucleotide
  Antisense strand to SEQ ID NO: 668098
ucgcagcuggacaaagcau

SEQ ID NO: 668100 - RNA, 19 nt, Artificial Sequence
  Description of Artificial Sequence: Synthetic oligonucleotide
  Sense strand starting at position 1692 of SEQ ID NO: 585793
ggugauagccgagggcaaa

SEQ ID NO: 668101 - RNA, 19 nt, Artificial Sequence
  Description of Artificial Sequence: Synthetic oligonucleotide
  Antisense strand to SEQ ID NO: 668100
uuugcccucggcuaucacc

SEQ ID NO: 668102 - RNA, 19 nt, Artificial Sequence
  Description of Artificial Sequence: Synthetic oligonucleotide
  Sense strand starting at position 1711 of SEQ ID NO: 585793
ggcaguaauuuagccaguu

SEQ ID NO: 668103 - RNA, 19 nt, Artificial Sequence
  Description of Artificial Sequence: Synthetic oligonucleotide
  Antisense strand to SEQ ID NO: 668102
aacuggcuaaauuacugcc

SEQ ID NO: 668104 - RNA, 19 nt, Artificial Sequence
  Description of Artificial Sequence: Synthetic oligonucleotide
  Sense strand starting at position 1712 of SEQ ID NO: 585793
gcaguaauuuagccaguuc

SEQ ID NO: 668105 - RNA, 19 nt, Artificial Sequence
  Description of Artificial Sequence: Synthetic oligonucleotide
  Antisense strand to SEQ ID NO: 668104
gaacuggcuaaauuacugc

SEQ ID NO: 668106 - RNA, 19 nt, Artificial Sequence
  Description of Artificial Sequence: Synthetic oligonucleotide
  Sense strand starting at position 1915 of SEQ ID NO: 585793
gcugaaguauuugcaccaa

SEQ ID NO: 668107 - RNA, 19 nt, Artificial Sequence
  Description of Artificial Sequence: Synthetic oligonucleotide
  Antisense strand to SEQ ID NO: 668106
uuggugcaaauacuucagc

SEQ ID NO: 668108 - RNA, 19 nt, Artificial Sequence
  Description of Artificial Sequence: Synthetic oligonucleotide
  Sense strand starting at position 1999 of SEQ ID NO: 585793
cgggaugcaguauaggaaa

SEQ ID NO: 668109 - RNA, 19 nt, Artificial Sequence
  Description of Artificial Sequence: Synthetic oligonucleotide
  Antisense strand to SEQ ID NO: 668108
uuuccuauacugcaucccg

SEQ ID NO: 668110 - RNA, 19 nt, Artificial Sequence
  Description of Artificial Sequence: Synthetic oligonucleotide
  Sense strand starting at position 2069 of SEQ ID NO: 585793
ggucguucaggguaucaaa

SEQ ID NO: 668111 - RNA, 19 nt, Artificial Sequence
  Description of Artificial Sequence: Synthetic oligonucleotide
  Antisense strand to SEQ ID NO: 668110
uuugauacccugaacgacc

SEQ ID NO: 668112 - RNA, 19 nt, Artificial Sequence
  Description of Artificial Sequence: Synthetic oligonucleotide
  Sense strand starting at position 2160 of SEQ ID NO: 585793
acauaauaaucccugacgu

SEQ ID NO: 668113 - RNA, 19 nt, Artificial Sequence
  Description of Artificial Sequence: Synthetic oligonucleotide
  Antisense strand to SEQ ID NO: 668112
acgucagggauuauuaugu

SEQ ID NO: 668114 - RNA, 19 nt, Artificial Sequence
  Description of Artificial Sequence: Synthetic oligonucleotide
  Sense strand starting at position 2162 of SEQ ID NO: 585793
auaauaaucccugacguuu

SEQ ID NO: 668115 - RNA, 19 nt, Artificial Sequence
  Description of Artificial Sequence: Synthetic oligonucleotide
  Antisense strand to SEQ ID NO: 668114
aaacgucagggauuauuau

SEQ ID NO: 668116 - RNA, 19 nt, Artificial Sequence
  Description of Artificial Sequence: Synthetic oligonucleotide
  Sense strand starting at position 2186 of SEQ ID NO: 585793
ucagucucgcggcauuuaa

SEQ ID NO: 668117 - RNA, 19 nt, Artificial Sequence
  Description of Artificial Sequence: Synthetic oligonucleotide
  Antisense strand to SEQ ID NO: 668116
uuaaaugccgcgagacuga

SEQ ID NO: 668118 - RNA, 19 nt, Artificial Sequence
  Description of Artificial Sequence: Synthetic oligonucleotide
  Sense strand starting at position 2388 of SEQ ID NO: 585793
uuuaaagaaacggguaaau

SEQ ID NO: 668119 - RNA, 19 nt, Artificial Sequence
  Description of Artificial Sequence: Synthetic oligonucleotide
  Antisense strand to SEQ ID NO: 668118
auuuacccguuucuuuaaa

SEQ ID NO: 668120 - RNA, 19 nt, Artificial Sequence
  Description of Artificial Sequence: Synthetic oligonucleotide
  Sense strand starting at position 2478 of SEQ ID NO: 585793
cugggaaguugcccaaaca

SEQ ID NO: 668121 - RNA, 19 nt, Artificial Sequence
  Description of Artificial Sequence: Synthetic oligonucleotide
  Antisense strand to SEQ ID NO: 668120
uguuugggcaacuucccag

SEQ ID NO: 668122 - RNA, 19 nt, Artificial Sequence
  Description of Artificial Sequence: Synthetic oligonucleotide
  Sense strand starting at position 2670 of SEQ ID NO: 585793
ucuuuaacuugggucucaa

SEQ ID NO: 668123 - RNA, 19 nt, Artificial Sequence
  Description of Artificial Sequence: Synthetic oligonucleotide
  Antisense strand to SEQ ID NO: 668122
uugagacccaaguuaaaga

SEQ ID NO: 668124 - RNA, 19 nt, Artificial Sequence
  Description of Artificial Sequence: Synthetic oligonucleotide
  Sense strand starting at position 3126 of SEQ ID NO: 585793
caagcuuugggacgaguga

SEQ ID NO: 668125 - RNA, 19 nt, Artificial Sequence
  Description of Artificial Sequence: Synthetic oligonucleotide
  Antisense strand to SEQ ID NO: 668124
ucacucgucccaaagcuug

SEQ ID NO: 668126 - RNA, 19 nt, Artificial Sequence
  Description of Artificial Sequence: Synthetic oligonucleotide
  Sense strand starting at position 3363 of SEQ ID NO: 585793
ggccaauagggcugaguga

SEQ ID NO: 668127 - RNA, 19 nt, Artificial Sequence
  Description of Artificial Sequence: Synthetic oligonucleotide
  Antisense strand to SEQ ID NO: 668126
ucacucagcccuauuggcc

SEQ ID NO: 668128 - RNA, 19 nt, Artificial Sequence
  Description of Artificial Sequence: Synthetic oligonucleotide
  Sense strand starting at position 3972 of SEQ ID NO: 585793
uagaaugauugauauagag

SEQ ID NO: 668129 - RNA, 19 nt, Artificial Sequence
  Description of Artificial Sequence: Synthetic oligonucleotide
  Antisense strand to SEQ ID NO: 668128
cucuauaucaaucauucua

SEQ ID NO: 668130 - RNA, 19 nt, Artificial Sequence
  Description of Artificial Sequence: Synthetic oligonucleotide
  Sense strand starting at position 25 of SEQ ID NO: 585794
aacgaauaacccgguuaaa

SEQ ID NO: 668131 - RNA, 19 nt, Artificial Sequence
  Description of Artificial Sequence: Synthetic oligonucleotide
  Antisense strand to SEQ ID NO: 668130
uuuaaccggguuauucguu

SEQ ID NO: 668132 - RNA, 19 nt, Artificial Sequence
  Description of Artificial Sequence: Synthetic oligonucleotide
  Sense strand starting at position 167 of SEQ ID NO: 585794
ccaccucacgcuuguuaga

SEQ ID NO: 668133 - RNA, 19 nt, Artificial Sequence
  Description of Artificial Sequence: Synthetic oligonucleotide
  Antisense strand to SEQ ID NO: 668132
ucuaacaagcgugaggugg

SEQ ID NO: 668134 - RNA, 19 nt, Artificial Sequence
  Description of Artificial Sequence: Synthetic oligonucleotide
  Sense strand starting at position 169 of SEQ ID NO: 585794
accucacgcuuguuagaau

SEQ ID NO: 668135 - RNA, 19 nt, Artificial Sequence
  Description of Artificial Sequence: Synthetic oligonucleotide
  Antisense strand to SEQ ID NO: 668134
auucuaacaagcgugaggu

SEQ ID NO: 668136 - RNA, 19 nt, Artificial Sequence
  Description of Artificial Sequence: Synthetic oligonucleotide
  Sense strand starting at position 176 of SEQ ID NO: 585794
gcuuguuagaauggcuauu

SEQ ID NO: 668137 - RNA, 19 nt, Artificial Sequence
  Description of Artificial Sequence: Synthetic oligonucleotide
  Antisense strand to SEQ ID NO: 668136
aauagccauucuaacaagc

SEQ ID NO: 668138 - RNA, 19 nt, Artificial Sequence
  Description of Artificial Sequence: Synthetic oligonucleotide
  Sense strand starting at position 251 of SEQ ID NO: 585794
gguacacuguugguggaau

SEQ ID NO: 668139 - RNA, 19 nt, Artificial Sequence
  Description of Artificial Sequence: Synthetic oligonucleotide
  Antisense strand to SEQ ID NO: 668138
auuccaccaacaguguacc

SEQ ID NO: 668140 - RNA, 19 nt, Artificial Sequence
  Description of Artificial Sequence: Synthetic oligonucleotide
  Sense strand starting at position 405 of SEQ ID NO: 585794
cugcauuccuguguuguuu

SEQ ID NO: 668141 - RNA, 19 nt, Artificial Sequence
  Description of Artificial Sequence: Synthetic oligonucleotide
  Antisense strand to SEQ ID NO: 668140
aaacaacacaggaaugcag

SEQ ID NO: 668142 - RNA, 19 nt, Artificial Sequence
  Description of Artificial Sequence: Synthetic oligonucleotide
  Sense strand starting at position 543 of SEQ ID NO: 585794
gcaauucugucauuugcaa

SEQ ID NO: 668143 - RNA, 19 nt, Artificial Sequence
  Description of Artificial Sequence: Synthetic oligonucleotide
  Antisense strand to SEQ ID NO: 668142
uugcaaaugacagaauugc

SEQ ID NO: 668144 - RNA, 19 nt, Artificial Sequence
  Description of Artificial Sequence: Synthetic oligonucleotide
  Sense strand starting at position 728 of SEQ ID NO: 585794
gggagggauguuggucaaa

SEQ ID NO: 668145 - RNA, 19 nt, Artificial Sequence
  Description of Artificial Sequence: Synthetic oligonucleotide
  Antisense strand to SEQ ID NO: 668144
uuugaccaacaucccuccc

SEQ ID NO: 668146 - RNA, 19 nt, Artificial Sequence
  Description of Artificial Sequence: Synthetic oligonucleotide
  Sense strand starting at position 809 of SEQ ID NO: 585794
accauaguugaugauguau

SEQ ID NO: 668147 - RNA, 19 nt, Artificial Sequence
  Description of Artificial Sequence: Synthetic oligonucleotide
  Antisense strand to SEQ ID NO: 668146
auacaucaucaacuauggu

SEQ ID NO: 668148 - RNA, 19 nt, Artificial Sequence
  Description of Artificial Sequence: Synthetic oligonucleotide
  Sense strand starting at position 826 of SEQ ID NO: 585794
auuguauauuuccaggaga

SEQ ID NO: 668149 - RNA, 19 nt, Artificial Sequence
  Description of Artificial Sequence: Synthetic oligonucleotide
  Antisense strand to SEQ ID NO: 668148
ucuccuggaaauauacaau

SEQ ID NO: 668150 - RNA, 19 nt, Artificial Sequence
  Description of Artificial Sequence: Synthetic oligonucleotide
  Sense strand starting at position 1050 of SEQ ID NO: 585794
uguacaggcucccaauaaa

SEQ ID NO: 668151 - RNA, 19 nt, Artificial Sequence
  Description of Artificial Sequence: Synthetic oligonucleotide
  Antisense strand to SEQ ID NO: 668150
uuuauugggagccuguaca

SEQ ID NO: 668152 - RNA, 19 nt, Artificial Sequence
  Description of Artificial Sequence: Synthetic oligonucleotide
  Sense strand starting at position 2319 of SEQ ID NO: 585794
cgccguggucuucuuuaua

SEQ ID NO: 668153 - RNA, 19 nt, Artificial Sequence
  Description of Artificial Sequence: Synthetic oligonucleotide
  Antisense strand to SEQ ID NO: 668152
uauaaagaagaccacggcg

SEQ ID NO: 668154 - RNA, 19 nt, Artificial Sequence
  Description of Artificial Sequence: Synthetic oligonucleotide
  Sense strand starting at position 2322 of SEQ ID NO: 585794
cguggucuucuuuauaauu

SEQ ID NO: 668155 - RNA, 19 nt, Artificial Sequence
  Description of Artificial Sequence: Synthetic oligonucleotide
  Antisense strand to SEQ ID NO: 668154
aauuauaaagaagaccacg

SEQ ID NO: 668156 - RNA, 19 nt, Artificial Sequence
  Description of Artificial Sequence: Synthetic oligonucleotide
  Sense strand starting at position 2341 of SEQ ID NO: 585794
gaaggauugucucucuguu

SEQ ID NO: 668157 - RNA, 19 nt, Artificial Sequence
  Description of Artificial Sequence: Synthetic oligonucleotide
  Antisense strand to SEQ ID NO: 668156
aacagagagacaauccuuc

SEQ ID NO: 668158 - RNA, 19 nt, Artificial Sequence
  Description of Artificial Sequence: Synthetic oligonucleotide
  Sense strand starting at position 2396 of SEQ ID NO: 585794
agugacuugcuucgacuuu

SEQ ID NO: 668159 - RNA, 19 nt, Artificial Sequence
  Description of Artificial Sequence: Synthetic oligonucleotide
  Antisense strand to SEQ ID NO: 668158
aaagucgaagcaagucacu

SEQ ID NO: 668160 - RNA, 19 nt, Artificial Sequence
  Description of Artificial Sequence: Synthetic oligonucleotide
  Sense strand starting at position 2768 of SEQ ID NO: 585794
cgggcaugucaguggacua

SEQ ID NO: 668161 - RNA, 19 nt, Artificial Sequence
  Description of Artificial Sequence: Synthetic oligonucleotide
  Antisense strand to SEQ ID NO: 668160
uaguccacugacaugcccg

SEQ ID NO: 668162 - RNA, 19 nt, Artificial Sequence
  Description of Artificial Sequence: Synthetic oligonucleotide
  Sense strand starting at position 2792 of SEQ ID NO: 585794
ggaaguaaguggucugaga

SEQ ID NO: 668163 - RNA, 19 nt, Artificial Sequence
  Description of Artificial Sequence: Synthetic oligonucleotide
  Antisense strand to SEQ ID NO: 668162
ucucagaccacuuacuucc

SEQ ID NO: 668164 - RNA, 19 nt, Artificial Sequence
  Description of Artificial Sequence: Synthetic oligonucleotide
  Sense strand starting at position 2794 of SEQ ID NO: 585794
aaguaaguggucugagaac

SEQ ID NO: 668165 - RNA, 19 nt, Artificial Sequence
  Description of Artificial Sequence: Synthetic oligonucleotide
  Antisense strand to SEQ ID NO: 668164
guucucagaccacuuacuu

SEQ ID NO: 668166 - RNA, 19 nt, Artificial Sequence
  Description of Artificial Sequence: Synthetic oligonucleotide
  Sense strand starting at position 2870 of SEQ ID NO: 585794
cccacaguuuggcuggaaa

SEQ ID NO: 668167 - RNA, 19 nt, Artificial Sequence
  Description of Artificial Sequence: Synthetic oligonucleotide
  Antisense strand to SEQ ID NO: 668166
uuuccagccaaacuguggg

SEQ ID NO: 668168 - RNA, 19 nt, Artificial Sequence
  Description of Artificial Sequence: Synthetic oligonucleotide
  Sense strand starting at position 2872 of SEQ ID NO: 585794
cacaguuuggcuggaaauu

SEQ ID NO: 668169 - RNA, 19 nt, Artificial Sequence
  Description of Artificial Sequence: Synthetic oligonucleotide
  Antisense strand to SEQ ID NO: 668168
aauuuccagccaaacugug

SEQ ID NO: 668170 - RNA, 19 nt, Artificial Sequence
  Description of Artificial Sequence: Synthetic oligonucleotide
  Sense strand starting at position 2873 of SEQ ID NO: 585794
acaguuuggcuggaaauuc

SEQ ID NO: 668171 - RNA, 19 nt, Artificial Sequence
  Description of Artificial Sequence: Synthetic oligonucleotide
  Antisense strand to SEQ ID NO: 668170
gaauuuccagccaaacugu

SEQ ID NO: 668172 - RNA, 19 nt, Artificial Sequence
  Description of Artificial Sequence: Synthetic oligonucleotide
  Sense strand starting at position 2911 of SEQ ID NO: 585794
cucauuccugcagguguua

SEQ ID NO: 668173 - RNA, 19 nt, Artificial Sequence
  Description of Artificial Sequence: Synthetic oligonucleotide
  Antisense strand to SEQ ID NO: 668172
uaacaccugcaggaaugag

SEQ ID NO: 668174 - RNA, 19 nt, Artificial Sequence
  Description of Artificial Sequence: Synthetic oligonucleotide
  Sense strand starting at position 2922 of SEQ ID NO: 585794
agguguuaccagcaacuca

SEQ ID NO: 668175 - RNA, 19 nt, Artificial Sequence
  Description of Artificial Sequence: Synthetic oligonucleotide
  Antisense strand to SEQ ID NO: 668174
ugaguugcugguaacaccu

SEQ ID NO: 668176 - RNA, 19 nt, Artificial Sequence
  Description of Artificial Sequence: Synthetic oligonucleotide
  Sense strand starting at position 2942 of SEQ ID NO: 585794
agguuuauggaguaacgaa

SEQ ID NO: 668177 - RNA, 19 nt, Artificial Sequence
  Description of Artificial Sequence: Synthetic oligonucleotide
  Antisense strand to SEQ ID NO: 668176
uucguuacuccauaaaccu

SEQ ID NO: 668178 - RNA, 19 nt, Artificial Sequence
  Description of Artificial Sequence: Synthetic oligonucleotide
  Sense strand starting at position 3511 of SEQ ID NO: 585794
cugauagugcauuguauga

SEQ ID NO: 668179 - RNA, 19 nt, Artificial Sequence
  Description of Artificial Sequence: Synthetic oligonucleotide
  Antisense strand to SEQ ID NO: 668178
ucauacaaugcacuaucag

SEQ ID NO: 668180 - RNA, 19 nt, Artificial Sequence
  Description of Artificial Sequence: Synthetic oligonucleotide
  Sense strand starting at position 3549 of SEQ ID NO: 585794
gcaccugugcgucuagagu

SEQ ID NO: 668181 - RNA, 19 nt, Artificial Sequence
  Description of Artificial Sequence: Synthetic oligonucleotide
  Antisense strand to SEQ ID NO: 668180
acucuagacgcacaggugc

SEQ ID NO: 668182 - RNA, 19 nt, Artificial Sequence
  Description of Artificial Sequence: Synthetic oligonucleotide
  Sense strand starting at position 3563 of SEQ ID NO: 585794
agaguuccucccggcauau

SEQ ID NO: 668183 - RNA, 19 nt, Artificial Sequence
  Description of Artificial Sequence: Synthetic oligonucleotide
  Antisense strand to SEQ ID NO: 668182
auaugccgggaggaacucu

SEQ ID NO: 668184 - RNA, 19 nt, Artificial Sequence
  Description of Artificial Sequence: Synthetic oligonucleotide
  Sense strand starting at position 3572 of SEQ ID NO: 585794
cccggcauaugcuugcaua

SEQ ID NO: 668185 - RNA, 19 nt, Artificial Sequence
  Description of Artificial Sequence: Synthetic oligonucleotide
  Antisense strand to SEQ ID NO: 668184
uaugcaagcauaugccggg

SEQ ID NO: 668186 - RNA, 19 nt, Artificial Sequence
  Description of Artificial Sequence: Synthetic oligonucleotide
  Sense strand starting at position 3630 of SEQ ID NO: 585794
uucccaaagcucuggaaga

SEQ ID NO: 668187 - RNA, 19 nt, Artificial Sequence
  Description of Artificial Sequence: Synthetic oligonucleotide
  Antisense strand to SEQ ID NO: 668186
ucuuccagagcuuugggaa

SEQ ID NO: 668188 - RNA, 19 nt, Artificial Sequence
  Description of Artificial Sequence: Synthetic oligonucleotide
  Sense strand starting at position 3631 of SEQ ID NO: 585794
ucccaaagcucuggaagaa

SEQ ID NO: 668189 - RNA, 19 nt, Artificial Sequence
  Description of Artificial Sequence: Synthetic oligonucleotide
  Antisense strand to SEQ ID NO: 668188
uucuuccagagcuuuggga

SEQ ID NO: 668190 - RNA, 19 nt, Artificial Sequence
  Description of Artificial Sequence: Synthetic oligonucleotide
  Sense strand starting at position 3663 of SEQ ID NO: 585794
gugaaaguuuacuccuucu

SEQ ID NO: 668191 - RNA, 19 nt, Artificial Sequence
  Description of Artificial Sequence: Synthetic oligonucleotide
  Antisense strand to SEQ ID NO: 668190
agaaggaguaaacuuucac

SEQ ID NO: 668192 - RNA, 19 nt, Artificial Sequence
  Description of Artificial Sequence: Synthetic oligonucleotide
  Sense strand starting at position 3680 of SEQ ID NO: 585794
cucuauuccuggccaggaa

SEQ ID NO: 668193 - RNA, 19 nt, Artificial Sequence
  Description of Artificial Sequence: Synthetic oligonucleotide
  Antisense strand to SEQ ID NO: 668192
uuccuggccaggaauagag

SEQ ID NO: 668194 - RNA, 19 nt, Artificial Sequence
  Description of Artificial Sequence: Synthetic oligonucleotide
  Sense strand starting at position 3681 of SEQ ID NO: 585794
ucuauuccuggccaggaau

SEQ ID NO: 668195 - RNA, 19 nt, Artificial Sequence
  Description of Artificial Sequence: Synthetic oligonucleotide
  Antisense strand to SEQ ID NO: 668194
auuccuggccaggaauaga

SEQ ID NO: 668196 - RNA, 19 nt, Artificial Sequence
  Description of Artificial Sequence: Synthetic oligonucleotide
  Sense strand starting at position 3726 of SEQ ID NO: 585794
uggugugcuuucuuugcaa

SEQ ID NO: 668197 - RNA, 19 nt, Artificial Sequence
  Description of Artificial Sequence: Synthetic oligonucleotide
  Antisense strand to SEQ ID NO: 668196
uugcaaagaaagcacacca

SEQ ID NO: 668198 - RNA, 19 nt, Artificial Sequence
  Description of Artificial Sequence: Synthetic oligonucleotide
  Sense strand starting at position 3849 of SEQ ID NO: 585794
accaauucucguuaaagug

SEQ ID NO: 668199 - RNA, 19 nt, Artificial Sequence
  Description of Artificial Sequence: Synthetic oligonucleotide
  Antisense strand to SEQ ID NO: 668198
cacuuuaacgagaauuggu

SEQ ID NO: 668200 - RNA, 19 nt, Artificial Sequence
  Description of Artificial Sequence: Synthetic oligonucleotide
  Sense strand starting at position 3856 of SEQ ID NO: 585794
cucguuaaaguguauucca

SEQ ID NO: 668201 - RNA, 19 nt, Artificial Sequence
  Description of Artificial Sequence: Synthetic oligonucleotide
  Antisense strand to SEQ ID NO: 668200
uggaauacacuuuaacgag

SEQ ID NO: 668202 - RNA, 19 nt, Artificial Sequence
  Description of Artificial Sequence: Synthetic oligonucleotide
  Sense strand starting at position 3859 of SEQ ID NO: 585794
guuaaaguguauuccauuu

SEQ ID NO: 668203 - RNA, 19 nt, Artificial Sequence
  Description of Artificial Sequence: Synthetic oligonucleotide
  Antisense strand to SEQ ID NO: 668202
aaauggaauacacuuuaac

SEQ ID NO: 668204 - RNA, 19 nt, Artificial Sequence
  Description of Artificial Sequence: Synthetic oligonucleotide
  Sense strand starting at position 3894 of SEQ ID NO: 585794
uugaccauuguguguuaau

SEQ ID NO: 668205 - RNA, 19 nt, Artificial Sequence
  Description of Artificial Sequence: Synthetic oligonucleotide
  Antisense strand to SEQ ID NO: 668204
auuaacacacaauggucaa

SEQ ID NO: 668206 - RNA, 19 nt, Artificial Sequence
  Description of Artificial Sequence: Synthetic oligonucleotide
  Sense strand starting at position 3895 of SEQ ID NO: 585794
ugaccauuguguguuaauc

SEQ ID NO: 668207 - RNA, 19 nt, Artificial Sequence
  Description of Artificial Sequence: Synthetic oligonucleotide
  Antisense strand to SEQ ID NO: 668206
gauuaacacacaaugguca

SEQ ID NO: 668208 - RNA, 19 nt, Artificial Sequence
  Description of Artificial Sequence: Synthetic oligonucleotide
  Sense strand starting at position 3938 of SEQ ID NO: 585794
cagugccaguuauugcaaa

SEQ ID NO: 668209 - RNA, 19 nt, Artificial Sequence
  Description of Artificial Sequence: Synthetic oligonucleotide
  Antisense strand to SEQ ID NO: 668208
uuugcaauaacuggcacug

SEQ ID NO: 668210 - RNA, 19 nt, Artificial Sequence
  Description of Artificial Sequence: Synthetic oligonucleotide
  Sense strand starting at position 123 of SEQ ID NO: 585795
aacgaauaacccgguuaaa

SEQ ID NO: 668211 - RNA, 19 nt, Artificial Sequence
  Description of Artificial Sequence: Synthetic oligonucleotide
  Antisense strand to SEQ ID NO: 668210
uuuaaccggguuauucguu

SEQ ID NO: 668212 - RNA, 19 nt, Artificial Sequence
  Description of Artificial Sequence: Synthetic oligonucleotide
  Sense strand starting at position 265 of SEQ ID NO: 585795
ccaccucacgcuuguuaga

SEQ ID NO: 668213 - RNA, 19 nt, Artificial Sequence
  Description of Artificial Sequence: Synthetic oligonucleotide
  Antisense strand to SEQ ID NO: 668212
ucuaacaagcgugaggugg

SEQ ID NO: 668214 - RNA, 19 nt, Artificial Sequence
  Description of Artificial Sequence: Synthetic oligonucleotide
  Sense strand starting at position 267 of SEQ ID NO: 585795
accucacgcuuguuagaau

SEQ ID NO: 668215 - RNA, 19 nt, Artificial Sequence
  Description of Artificial Sequence: Synthetic oligonucleotide
  Antisense strand to SEQ ID NO: 668214
auucuaacaagcgugaggu

SEQ ID NO: 668216 - RNA, 19 nt, Artificial Sequence
  Description of Artificial Sequence: Synthetic oligonucleotide
  Sense strand starting at position 274 of SEQ ID NO: 585795
gcuuguuagaauggcuauu

SEQ ID NO: 668217 - RNA, 19 nt, Artificial Sequence
  Description of Artificial Sequence: Synthetic oligonucleotide
  Antisense strand to SEQ ID NO: 668216
aauagccauucuaacaagc

SEQ ID NO: 668218 - RNA, 19 nt, Artificial Sequence
  Description of Artificial Sequence: Synthetic oligonucleotide
  Sense strand starting at position 349 of SEQ ID NO: 585795
gguacacuguugguggaau

SEQ ID NO: 668219 - RNA, 19 nt, Artificial Sequence
  Description of Artificial Sequence: Synthetic oligonucleotide
  Antisense strand to SEQ ID NO: 668218
auuccaccaacaguguacc

SEQ ID NO: 668220 - RNA, 19 nt, Artificial Sequence
  Description of Artificial Sequence: Synthetic oligonucleotide
  Sense strand starting at position 503 of SEQ ID NO: 585795
cugcauuccuguguuguuu

SEQ ID NO: 668221 - RNA, 19 nt, Artificial Sequence
  Description of Artificial Sequence: Synthetic oligonucleotide
  Antisense strand to SEQ ID NO: 668220
aaacaacacaggaaugcag

SEQ ID NO: 668222 - RNA, 19 nt, Artificial Sequence
  Description of Artificial Sequence: Synthetic oligonucleotide
  Sense strand starting at position 641 of SEQ ID NO: 585795
gcaauucugucauuugcaa

SEQ ID NO: 668223 - RNA, 19 nt, Artificial Sequence
  Description of Artificial Sequence: Synthetic oligonucleotide
  Antisense strand to SEQ ID NO: 668222
uugcaaaugacagaauugc

SEQ ID NO: 668224 - RNA, 19 nt, Artificial Sequence
  Description of Artificial Sequence: Synthetic oligonucleotide
  Sense strand starting at position 826 of SEQ ID NO: 585795
gggagggauguuggucaaa

SEQ ID NO: 668225 - RNA, 19 nt, Artificial Sequence
  Description of Artificial Sequence: Synthetic oligonucleotide
  Antisense strand to SEQ ID NO: 668224
uuugaccaacaucccuccc

SEQ ID NO: 668226 - RNA, 19 nt, Artificial Sequence
  Description of Artificial Sequence: Synthetic oligonucleotide
  Sense strand starting at position 907 of SEQ ID NO: 585795
accauaguugaugauguau

SEQ ID NO: 668227 - RNA, 19 nt, Artificial Sequence
  Description of Artificial Sequence: Synthetic oligonucleotide
  Antisense strand to SEQ ID NO: 668226
auacaucaucaacuauggu

SEQ ID NO: 668228 - RNA, 19 nt, Artificial Sequence
  Description of Artificial Sequence: Synthetic oligonucleotide
  Sense strand starting at position 924 of SEQ ID NO: 585795
auuguauauuuccaggaga

SEQ ID NO: 668229 - RNA, 19 nt, Artificial Sequence
  Description of Artificial Sequence: Synthetic oligonucleotide
  Antisense strand to SEQ ID NO: 668228
ucuccuggaaauauacaau

SEQ ID NO: 668230 - RNA, 19 nt, Artificial Sequence
  Description of Artificial Sequence: Synthetic oligonucleotide
  Sense strand starting at position 1148 of SEQ ID NO: 585795
uguacaggcucccaauaaa

SEQ ID NO: 668231 - RNA, 19 nt, Artificial Sequence
  Description of Artificial Sequence: Synthetic oligonucleotide
  Antisense strand to SEQ ID NO: 668230
uuuauugggagccuguaca

SEQ ID NO: 668232 - RNA, 19 nt, Artificial Sequence
  Description of Artificial Sequence: Synthetic oligonucleotide
  Sense strand starting at position 2417 of SEQ ID NO: 585795
cgccguggucuucuuuaua

SEQ ID NO: 668233 - RNA, 19 nt, Artificial Sequence
  Description of Artificial Sequence: Synthetic oligonucleotide
  Antisense strand to SEQ ID NO: 668232
uauaaagaagaccacggcg

SEQ ID NO: 668234 - RNA, 19 nt, Artificial Sequence
  Description of Artificial Sequence: Synthetic oligonucleotide
  Sense strand starting at position 2420 of SEQ ID NO: 585795
cguggucuucuuuauaauu

SEQ ID NO: 668235 - RNA, 19 nt, Artificial Sequence
  Description of Artificial Sequence: Synthetic oligonucleotide
  Antisense strand to SEQ ID NO: 668234
aauuauaaagaagaccacg

SEQ ID NO: 668236 - RNA, 19 nt, Artificial Sequence
  Description of Artificial Sequence: Synthetic oligonucleotide
  Sense strand starting at position 2422 of SEQ ID NO: 585795
uggucuucuuuauaauuga

SEQ ID NO: 668237 - RNA, 19 nt, Artificial Sequence
  Description of Artificial Sequence: Synthetic oligonucleotide
  Antisense strand to SEQ ID NO: 668236
ucaauuauaaagaagacca

SEQ ID NO: 668238 - RNA, 19 nt, Artificial Sequence
  Description of Artificial Sequence: Synthetic oligonucleotide
  Sense strand starting at position 2439 of SEQ ID NO: 585795
gaaggauugucucucuguu

SEQ ID NO: 668239 - RNA, 19 nt, Artificial Sequence
  Description of Artificial Sequence: Synthetic oligonucleotide
  Antisense strand to SEQ ID NO: 668238
aacagagagacaauccuuc

SEQ ID NO: 668240 - RNA, 19 nt, Artificial Sequence
  Description of Artificial Sequence: Synthetic oligonucleotide
  Sense strand starting at position 2494 of SEQ ID NO: 585795
agugacuugcuucgacuuu

SEQ ID NO: 668241 - RNA, 19 nt, Artificial Sequence
  Description of Artificial Sequence: Synthetic oligonucleotide
  Antisense strand to SEQ ID NO: 668240
aaagucgaagcaagucacu

SEQ ID NO: 668242 - RNA, 19 nt, Artificial Sequence
  Description of Artificial Sequence: Synthetic oligonucleotide
  Sense strand starting at position 2866 of SEQ ID NO: 585795
cgggcaugucaguggacua

SEQ ID NO: 668243 - RNA, 19 nt, Artificial Sequence
  Description of Artificial Sequence: Synthetic oligonucleotide
  Antisense strand to SEQ ID NO: 668242
uaguccacugacaugcccg

SEQ ID NO: 668244 - RNA, 19 nt, Artificial Sequence
  Description of Artificial Sequence: Synthetic oligonucleotide
  Sense strand starting at position 2890 of SEQ ID NO: 585795
ggaaguaaguggucugaga

SEQ ID NO: 668245 - RNA, 19 nt, Artificial Sequence
  Description of Artificial Sequence: Synthetic oligonucleotide
  Antisense strand to SEQ ID NO: 668244
ucucagaccacuuacuucc

SEQ ID NO: 668246 - RNA, 19 nt, Artificial Sequence
  Description of Artificial Sequence: Synthetic oligonucleotide
  Sense strand starting at position 2892 of SEQ ID NO: 585795
aaguaaguggucugagaac

SEQ ID NO: 668247 - RNA, 19 nt, Artificial Sequence
  Description of Artificial Sequence: Synthetic oligonucleotide
  Antisense strand to SEQ ID NO: 668246
guucucagaccacuuacuu

SEQ ID NO: 668248 - RNA, 19 nt, Artificial Sequence
  Description of Artificial Sequence: Synthetic oligonucleotide
  Sense strand starting at position 2968 of SEQ ID NO: 585795
cccacaguuuggcuggaaa

SEQ ID NO: 668249 - RNA, 19 nt, Artificial Sequence
  Description of Artificial Sequence: Synthetic oligonucleotide
  Antisense strand to SEQ ID NO: 668248
uuuccagccaaacuguggg

SEQ ID NO: 668250 - RNA, 19 nt, Artificial Sequence
  Description of Artificial Sequence: Synthetic oligonucleotide
  Sense strand starting at position 2970 of SEQ ID NO: 585795
cacaguuuggcuggaaauu

SEQ ID NO: 668251 - RNA, 19 nt, Artificial Sequence
  Description of Artificial Sequence: Synthetic oligonucleotide
  Antisense strand to SEQ ID NO: 668250
aauuuccagccaaacugug

SEQ ID NO: 668252 - RNA, 19 nt, Artificial Sequence
  Description of Artificial Sequence: Synthetic oligonucleotide
  Sense strand starting at position 2971 of SEQ ID NO: 585795
acaguuuggcuggaaauuc

SEQ ID NO: 668253 - RNA, 19 nt, Artificial Sequence
  Description of Artificial Sequence: Synthetic oligonucleotide
  Antisense strand to SEQ ID NO: 668252
gaauuuccagccaaacugu

SEQ ID NO: 668254 - RNA, 19 nt, Artificial Sequence
  Description of Artificial Sequence: Synthetic oligonucleotide
  Sense strand starting at position 3009 of SEQ ID NO: 585795
cucauuccugcagguguua

SEQ ID NO: 668255 - RNA, 19 nt, Artificial Sequence
  Description of Artificial Sequence: Synthetic oligonucleotide
  Antisense strand to SEQ ID NO: 668254
uaacaccugcaggaaugag

SEQ ID NO: 668256 - RNA, 19 nt, Artificial Sequence
  Description of Artificial Sequence: Synthetic oligonucleotide
  Sense strand starting at position 3020 of SEQ ID NO: 585795
agguguuaccagcaacuca

SEQ ID NO: 668257 - RNA, 19 nt, Artificial Sequence
  Description of Artificial Sequence: Synthetic oligonucleotide
  Antisense strand to SEQ ID NO: 668256
ugaguugcugguaacaccu

SEQ ID NO: 668258 - RNA, 19 nt, Artificial Sequence
  Description of Artificial Sequence: Synthetic oligonucleotide
  Sense strand starting at position 3040 of SEQ ID NO: 585795
agguuuauggaguaacgaa

SEQ ID NO: 668259 - RNA, 19 nt, Artificial Sequence
  Description of Artificial Sequence: Synthetic oligonucleotide
  Antisense strand to SEQ ID NO: 668258
uucguuacuccauaaaccu

SEQ ID NO: 668260 - RNA, 19 nt, Artificial Sequence
  Description of Artificial Sequence: Synthetic oligonucleotide
  Sense strand starting at position 3101 of SEQ ID NO: 585795
cguguauggugcuuauucu

SEQ ID NO: 668261 - RNA, 19 nt, Artificial Sequence
  Description of Artificial Sequence: Synthetic oligonucleotide
  Antisense strand to SEQ ID NO: 668260
agaauaagcaccauacacg

SEQ ID NO: 668262 - RNA, 19 nt, Artificial Sequence
  Description of Artificial Sequence: Synthetic oligonucleotide
  Sense strand starting at position 3609 of SEQ ID NO: 585795
cugauagugcauuguauga

SEQ ID NO: 668263 - RNA, 19 nt, Artificial Sequence
  Description of Artificial Sequence: Synthetic oligonucleotide
  Antisense strand to SEQ ID NO: 668262
ucauacaaugcacuaucag

SEQ ID NO: 668264 - RNA, 19 nt, Artificial Sequence
  Description of Artificial Sequence: Synthetic oligonucleotide
  Sense strand starting at position 3647 of SEQ ID NO: 585795
gcaccugugcgucuagagu

SEQ ID NO: 668265 - RNA, 19 nt, Artificial Sequence
  Description of Artificial Sequence: Synthetic oligonucleotide
  Antisense strand to SEQ ID NO: 668264
acucuagacgcacaggugc

SEQ ID NO: 668266 - RNA, 19 nt, Artificial Sequence
  Description of Artificial Sequence: Synthetic oligonucleotide
  Sense strand starting at position 3661 of SEQ ID NO: 585795
agaguuccucccggcauau

SEQ ID NO: 668267 - RNA, 19 nt, Artificial Sequence
  Description of Artificial Sequence: Synthetic oligonucleotide
  Antisense strand to SEQ ID NO: 668266
auaugccgggaggaacucu

SEQ ID NO: 668268 - RNA, 19 nt, Artificial Sequence
  Description of Artificial Sequence: Synthetic oligonucleotide
  Sense strand starting at position 3670 of SEQ ID NO: 585795
cccggcauaugcuugcaua

SEQ ID NO: 668269 - RNA, 19 nt, Artificial Sequence
  Description of Artificial Sequence: Synthetic oligonucleotide
  Antisense strand to SEQ ID NO: 668268
uaugcaagcauaugccggg

SEQ ID NO: 668270 - RNA, 19 nt, Artificial Sequence
  Description of Artificial Sequence: Synthetic oligonucleotide
  Sense strand starting at position 3728 of SEQ ID NO: 585795
uucccaaagcucuggaaga

SEQ ID NO: 668271 - RNA, 19 nt, Artificial Sequence
  Description of Artificial Sequence: Synthetic oligonucleotide
  Antisense strand to SEQ ID NO: 668270
ucuuccagagcuuugggaa

SEQ ID NO: 668272 - RNA, 19 nt, Artificial Sequence
  Description of Artificial Sequence: Synthetic oligonucleotide
  Sense strand starting at position 3729 of SEQ ID NO: 585795
ucccaaagcucuggaagaa

SEQ ID NO: 668273 - RNA, 19 nt, Artificial Sequence
  Description of Artificial Sequence: Synthetic oligonucleotide
  Antisense strand to SEQ ID NO: 668272
uucuuccagagcuuuggga

SEQ ID NO: 668274 - RNA, 19 nt, Artificial Sequence
  Description of Artificial Sequence: Synthetic oligonucleotide
  Sense strand starting at position 3761 of SEQ ID NO: 585795
gugaaaguuuacuccuucu

SEQ ID NO: 668275 - RNA, 19 nt, Artificial Sequence
  Description of Artificial Sequence: Synthetic oligonucleotide
  Antisense strand to SEQ ID NO: 668274
agaaggaguaaacuuucac

SEQ ID NO: 668276 - RNA, 19 nt, Artificial Sequence
  Description of Artificial Sequence: Synthetic oligonucleotide
  Sense strand starting at position 3778 of SEQ ID NO: 585795
cucuauuccuggccaggaa

SEQ ID NO: 668277 - RNA, 19 nt, Artificial Sequence
  Description of Artificial Sequence: Synthetic oligonucleotide
  Antisense strand to SEQ ID NO: 668276
uuccuggccaggaauagag

SEQ ID NO: 668278 - RNA, 19 nt, Artificial Sequence
  Description of Artificial Sequence: Synthetic oligonucleotide
  Sense strand starting at position 3779 of SEQ ID NO: 585795
ucuauuccuggccaggaau

SEQ ID NO: 668279 - RNA, 19 nt, Artificial Sequence
  Description of Artificial Sequence: Synthetic oligonucleotide
  Antisense strand to SEQ ID NO: 668278
auuccuggccaggaauaga

SEQ ID NO: 668280 - RNA, 19 nt, Artificial Sequence
  Description of Artificial Sequence: Synthetic oligonucleotide
  Sense strand starting at position 3824 of SEQ ID NO: 585795
uggugugcuuucuuugcaa

SEQ ID NO: 668281 - RNA, 19 nt, Artificial Sequence
  Description of Artificial Sequence: Synthetic oligonucleotide
  Antisense strand to SEQ ID NO: 668280
uugcaaagaaagcacacca

SEQ ID NO: 668282 - RNA, 19 nt, Artificial Sequence
  Description of Artificial Sequence: Synthetic oligonucleotide
  Sense strand starting at position 3826 of SEQ ID NO: 585795
gugugcuuucuuugcaacu

SEQ ID NO: 668283 - RNA, 19 nt, Artificial Sequence
  Description of Artificial Sequence: Synthetic oligonucleotide
  Antisense strand to SEQ ID NO: 668282
aguugcaaagaaagcacac

SEQ ID NO: 668284 - RNA, 19 nt, Artificial Sequence
  Description of Artificial Sequence: Synthetic oligonucleotide
  Sense strand starting at position 3947 of SEQ ID NO: 585795
accaauucucguuaaagug

SEQ ID NO: 668285 - RNA, 19 nt, Artificial Sequence
  Description of Artificial Sequence: Synthetic oligonucleotide
  Antisense strand to SEQ ID NO: 668284
cacuuuaacgagaauuggu

SEQ ID NO: 668286 - RNA, 19 nt, Artificial Sequence
  Description of Artificial Sequence: Synthetic oligonucleotide
  Sense strand starting at position 3954 of SEQ ID NO: 585795
cucguuaaaguguauucca

SEQ ID NO: 668287 - RNA, 19 nt, Artificial Sequence
  Description of Artificial Sequence: Synthetic oligonucleotide
  Antisense strand to SEQ ID NO: 668286
uggaauacacuuuaacgag

SEQ ID NO: 668288 - RNA, 19 nt, Artificial Sequence
  Description of Artificial Sequence: Synthetic oligonucleotide
  Sense strand starting at position 3957 of SEQ ID NO: 585795
guuaaaguguauuccauuu

SEQ ID NO: 668289 - RNA, 19 nt, Artificial Sequence
  Description of Artificial Sequence: Synthetic oligonucleotide
  Antisense strand to SEQ ID NO: 668288
aaauggaauacacuuuaac

SEQ ID NO: 668290 - RNA, 19 nt, Artificial Sequence
  Description of Artificial Sequence: Synthetic oligonucleotide
  Sense strand starting at position 172 of SEQ ID NO: 585796
ggaugaggguaauacgaga

SEQ ID NO: 668291 - RNA, 19 nt, Artificial Sequence
  Description of Artificial Sequence: Synthetic oligonucleotide
  Antisense strand to SEQ ID NO: 668290
ucucguauuacccucaucc

SEQ ID NO: 668292 - RNA, 19 nt, Artificial Sequence
  Description of Artificial Sequence: Synthetic oligonucleotide
  Sense strand starting at position 858 of SEQ ID NO: 585796
gaugaugggacuuguguuc

SEQ ID NO: 668293 - RNA, 19 nt, Artificial Sequence
  Description of Artificial Sequence: Synthetic oligonucleotide
  Antisense strand to SEQ ID NO: 668292
gaacacaagucccaucauc

SEQ ID NO: 668294 - RNA, 19 nt, Artificial Sequence
  Description of Artificial Sequence: Synthetic oligonucleotide
  Sense strand starting at position 863 of SEQ ID NO: 585796
ugggacuuguguucagauc

SEQ ID NO: 668295 - RNA, 19 nt, Artificial Sequence
  Description of Artificial Sequence: Synthetic oligonucleotide
  Antisense strand to SEQ ID NO: 668294
gaucugaacacaaguccca

SEQ ID NO: 668296 - RNA, 19 nt, Artificial Sequence
  Description of Artificial Sequence: Synthetic oligonucleotide
  Sense strand starting at position 864 of SEQ ID NO: 585796
gggacuuguguucagauca

SEQ ID NO: 668297 - RNA, 19 nt, Artificial Sequence
  Description of Artificial Sequence: Synthetic oligonucleotide
  Antisense strand to SEQ ID NO: 668296
ugaucugaacacaaguccc

SEQ ID NO: 668298 - RNA, 19 nt, Artificial Sequence
  Description of Artificial Sequence: Synthetic oligonucleotide
  Sense strand starting at position 880 of SEQ ID NO: 585796
ucagaaauggcagaugugu

SEQ ID NO: 668299 - RNA, 19 nt, Artificial Sequence
  Description of Artificial Sequence: Synthetic oligonucleotide
  Antisense strand to SEQ ID NO: 668298
acacaucugccauuucuga

SEQ ID NO: 668300 - RNA, 19 nt, Artificial Sequence
  Description of Artificial Sequence: Synthetic oligonucleotide
  Sense strand starting at position 882 of SEQ ID NO: 585796
agaaauggcagauguguca

SEQ ID NO: 668301 - RNA, 19 nt, Artificial Sequence
  Description of Artificial Sequence: Synthetic oligonucleotide
  Antisense strand to SEQ ID NO: 668300
ugacacaucugccauuucu

SEQ ID NO: 668302 - RNA, 19 nt, Artificial Sequence
  Description of Artificial Sequence: Synthetic oligonucleotide
  Sense strand starting at position 1016 of SEQ ID NO: 585796
cucccuggcuaaucaugaa

SEQ ID NO: 668303 - RNA, 19 nt, Artificial Sequence
  Description of Artificial Sequence: Synthetic oligonucleotide
  Antisense strand to SEQ ID NO: 668302
uucaugauuagccagggag

SEQ ID NO: 668304 - RNA, 19 nt, Artificial Sequence
  Description of Artificial Sequence: Synthetic oligonucleotide
  Sense strand starting at position 1132 of SEQ ID NO: 585796
gugcccuggugcuuggaua

SEQ ID NO: 668305 - RNA, 19 nt, Artificial Sequence
  Description of Artificial Sequence: Synthetic oligonucleotide
  Antisense strand to SEQ ID NO: 668304
uauccaagcaccagggcac

SEQ ID NO: 668306 - RNA, 19 nt, Artificial Sequence
  Description of Artificial Sequence: Synthetic oligonucleotide
  Sense strand starting at position 1259 of SEQ ID NO: 585796
gcuguaaucuguccagcac

SEQ ID NO: 668307 - RNA, 19 nt, Artificial Sequence
  Description of Artificial Sequence: Synthetic oligonucleotide
  Antisense strand to SEQ ID NO: 668306
gugcuggacagauuacagc

SEQ ID NO: 668308 - RNA, 19 nt, Artificial Sequence
  Description of Artificial Sequence: Synthetic oligonucleotide
  Sense strand starting at position 1316 of SEQ ID NO: 585796
gaacaagguuaagcuagau

SEQ ID NO: 668309 - RNA, 19 nt, Artificial Sequence
  Description of Artificial Sequence: Synthetic oligonucleotide
  Antisense strand to SEQ ID NO: 668308
aucuagcuuaaccuuguuc

SEQ ID NO: 668310 - RNA, 19 nt, Artificial Sequence
  Description of Artificial Sequence: Synthetic oligonucleotide
  Sense strand starting at position 1320 of SEQ ID NO: 585796
aagguuaagcuagauccua

SEQ ID NO: 668311 - RNA, 19 nt, Artificial Sequence
  Description of Artificial Sequence: Synthetic oligonucleotide
  Antisense strand to SEQ ID NO: 668310
uaggaucuagcuuaaccuu

SEQ ID NO: 668312 - RNA, 19 nt, Artificial Sequence
  Description of Artificial Sequence: Synthetic oligonucleotide
  Sense strand starting at position 1352 of SEQ ID NO: 585796
gaaggagguuuggacucaa

SEQ ID NO: 668313 - RNA, 19 nt, Artificial Sequence
  Description of Artificial Sequence: Synthetic oligonucleotide
  Antisense strand to SEQ ID NO: 668312
uugaguccaaaccuccuuc

SEQ ID NO: 668314 - RNA, 19 nt, Artificial Sequence
  Description of Artificial Sequence: Synthetic oligonucleotide
  Sense strand starting at position 1363 of SEQ ID NO: 585796
ggacucaaugcgggucaaa

SEQ ID NO: 668315 - RNA, 19 nt, Artificial Sequence
  Description of Artificial Sequence: Synthetic oligonucleotide
  Antisense strand to SEQ ID NO: 668314
uuugacccgcauugagucc

SEQ ID NO: 668316 - RNA, 19 nt, Artificial Sequence
  Description of Artificial Sequence: Synthetic oligonucleotide
  Sense strand starting at position 2143 of SEQ ID NO: 585796
gucugugaucccuggagac

SEQ ID NO: 668317 - RNA, 19 nt, Artificial Sequence
  Description of Artificial Sequence: Synthetic oligonucleotide
  Antisense strand to SEQ ID NO: 668316
gucuccagggaucacagac

SEQ ID NO: 668318 - RNA, 19 nt, Artificial Sequence
  Description of Artificial Sequence: Synthetic oligonucleotide
  Sense strand starting at position 2303 of SEQ ID NO: 585796
gggugguaacaguggagaa

SEQ ID NO: 668319 - RNA, 19 nt, Artificial Sequence
  Description of Artificial Sequence: Synthetic oligonucleotide
  Antisense strand to SEQ ID NO: 668318
uucuccacuguuaccaccc

SEQ ID NO: 668320 - RNA, 19 nt, Artificial Sequence
  Description of Artificial Sequence: Synthetic oligonucleotide
  Sense strand starting at position 2304 of SEQ ID NO: 585796
ggugguaacaguggagaaa

SEQ ID NO: 668321 - RNA, 19 nt, Artificial Sequence
  Description of Artificial Sequence: Synthetic oligonucleotide
  Antisense strand to SEQ ID NO: 668320
uuucuccacuguuaccacc

SEQ ID NO: 668322 - RNA, 19 nt, Artificial Sequence
  Description of Artificial Sequence: Synthetic oligonucleotide
  Sense strand starting at position 2319 of SEQ ID NO: 585796
gaaagaugucuugggcccu

SEQ ID NO: 668323 - RNA, 19 nt, Artificial Sequence
  Description of Artificial Sequence: Synthetic oligonucleotide
  Antisense strand to SEQ ID NO: 668322
agggcccaagacaucuuuc

SEQ ID NO: 668324 - RNA, 19 nt, Artificial Sequence
  Description of Artificial Sequence: Synthetic oligonucleotide
  Sense strand starting at position 2617 of SEQ ID NO: 585796
gcaauuugccauggauugu

SEQ ID NO: 668325 - RNA, 19 nt, Artificial Sequence
  Description of Artificial Sequence: Synthetic oligonucleotide
  Antisense strand to SEQ ID NO: 668324
acaauccauggcaaauugc

SEQ ID NO: 668326 - RNA, 19 nt, Artificial Sequence
  Description of Artificial Sequence: Synthetic oligonucleotide
  Sense strand starting at position 2660 of SEQ ID NO: 585796
ccgcuuaagagcugaugau

SEQ ID NO: 668327 - RNA, 19 nt, Artificial Sequence
  Description of Artificial Sequence: Synthetic oligonucleotide
  Antisense strand to SEQ ID NO: 668326
aucaucagcucuuaagcgg

SEQ ID NO: 668328 - RNA, 19 nt, Artificial Sequence
  Description of Artificial Sequence: Synthetic oligonucleotide
  Sense strand starting at position 2661 of SEQ ID NO: 585796
cgcuuaagagcugaugauc

SEQ ID NO: 668329 - RNA, 19 nt, Artificial Sequence
  Description of Artificial Sequence: Synthetic oligonucleotide
  Antisense strand to SEQ ID NO: 668328
gaucaucagcucuuaagcg

SEQ ID NO: 668330 - RNA, 19 nt, Artificial Sequence
  Description of Artificial Sequence: Synthetic oligonucleotide
  Sense strand starting at position 2698 of SEQ ID NO: 585796
aguucuauccaguguuaua

SEQ ID NO: 668331 - RNA, 19 nt, Artificial Sequence
  Description of Artificial Sequence: Synthetic oligonucleotide
  Antisense strand to SEQ ID NO: 668330
uauaacacuggauagaacu

SEQ ID NO: 668332 - RNA, 19 nt, Artificial Sequence
  Description of Artificial Sequence: Synthetic oligonucleotide
  Sense strand starting at position 2727 of SEQ ID NO: 585796
ucagauacucaguguugaa

SEQ ID NO: 668333 - RNA, 19 nt, Artificial Sequence
  Description of Artificial Sequence: Synthetic oligonucleotide
  Antisense strand to SEQ ID NO: 668332
uucaacacugaguaucuga

SEQ ID NO: 668334 - RNA, 19 nt, Artificial Sequence
  Description of Artificial Sequence: Synthetic oligonucleotide
  Sense strand starting at position 2731 of SEQ ID NO: 585796
auacucaguguugaagcua

SEQ ID NO: 668335 - RNA, 19 nt, Artificial Sequence
  Description of Artificial Sequence: Synthetic oligonucleotide
  Antisense strand to SEQ ID NO: 668334
uagcuucaacacugaguau

SEQ ID NO: 668336 - RNA, 19 nt, Artificial Sequence
  Description of Artificial Sequence: Synthetic oligonucleotide
  Sense strand starting at position 2861 of SEQ ID NO: 585796
gucuuauuguuucuucuuu

SEQ ID NO: 668337 - RNA, 19 nt, Artificial Sequence
  Description of Artificial Sequence: Synthetic oligonucleotide
  Antisense strand to SEQ ID NO: 668336
aaagaagaaacaauaagac

SEQ ID NO: 668338 - RNA, 19 nt, Artificial Sequence
  Description of Artificial Sequence: Synthetic oligonucleotide
  Sense strand starting at position 2954 of SEQ ID NO: 585796
uuguaauggucucucaaca

SEQ ID NO: 668339 - RNA, 19 nt, Artificial Sequence
  Description of Artificial Sequence: Synthetic oligonucleotide
  Antisense strand to SEQ ID NO: 668338
uguugagagaccauuacaa

SEQ ID NO: 668340 - RNA, 19 nt, Artificial Sequence
  Description of Artificial Sequence: Synthetic oligonucleotide
  Sense strand starting at position 3116 of SEQ ID NO: 585796
ggcagccuugucuaguaaa

SEQ ID NO: 668341 - RNA, 19 nt, Artificial Sequence
  Description of Artificial Sequence: Synthetic oligonucleotide
  Antisense strand to SEQ ID NO: 668340
uuuacuagacaaggcugcc

SEQ ID NO: 668342 - RNA, 19 nt, Artificial Sequence
  Description of Artificial Sequence: Synthetic oligonucleotide
  Sense strand starting at position 3233 of SEQ ID NO: 585796
cucuguguugugcagagau

SEQ ID NO: 668343 - RNA, 19 nt, Artificial Sequence
  Description of Artificial Sequence: Synthetic oligonucleotide
  Antisense strand to SEQ ID NO: 668342
aucucugcacaacacagag

SEQ ID NO: 668344 - RNA, 19 nt, Artificial Sequence
  Description of Artificial Sequence: Synthetic oligonucleotide
  Sense strand starting at position 3235 of SEQ ID NO: 585796
cuguguugugcagagauac

SEQ ID NO: 668345 - RNA, 19 nt, Artificial Sequence
  Description of Artificial Sequence: Synthetic oligonucleotide
  Antisense strand to SEQ ID NO: 668344
guaucucugcacaacacag

SEQ ID NO: 668346 - RNA, 19 nt, Artificial Sequence
  Description of Artificial Sequence: Synthetic oligonucleotide
  Sense strand starting at position 3336 of SEQ ID NO: 585796
uuguauugcuaacucaaug

SEQ ID NO: 668347 - RNA, 19 nt, Artificial Sequence
  Description of Artificial Sequence: Synthetic oligonucleotide
  Antisense strand to SEQ ID NO: 668346
cauugaguuagcaauacaa

SEQ ID NO: 668348 - RNA, 19 nt, Artificial Sequence
  Description of Artificial Sequence: Synthetic oligonucleotide
  Sense strand starting at position 3468 of SEQ ID NO: 585796
ggaugaagcuuccaggaaa

SEQ ID NO: 668349 - RNA, 19 nt, Artificial Sequence
  Description of Artificial Sequence: Synthetic oligonucleotide
  Antisense strand to SEQ ID NO: 668348
uuuccuggaagcuucaucc

SEQ ID NO: 668350 - RNA, 19 nt, Artificial Sequence
  Description of Artificial Sequence: Synthetic oligonucleotide
  Sense strand starting at position 3513 of SEQ ID NO: 585796
gcuuauauccuaggauucu

SEQ ID NO: 668351 - RNA, 19 nt, Artificial Sequence
  Description of Artificial Sequence: Synthetic oligonucleotide
  Antisense strand to SEQ ID NO: 668350
agaauccuaggauauaagc

SEQ ID NO: 668352 - RNA, 19 nt, Artificial Sequence
  Description of Artificial Sequence: Synthetic oligonucleotide
  Sense strand starting at position 3522 of SEQ ID NO: 585796
cuaggauucuaguccauga

SEQ ID NO: 668353 - RNA, 19 nt, Artificial Sequence
  Description of Artificial Sequence: Synthetic oligonucleotide
  Antisense strand to SEQ ID NO: 668352
ucauggacuagaauccuag

SEQ ID NO: 668354 - RNA, 19 nt, Artificial Sequence
  Description of Artificial Sequence: Synthetic oligonucleotide
  Sense strand starting at position 3526 of SEQ ID NO: 585796
gauucuaguccaugauuga

SEQ ID NO: 668355 - RNA, 19 nt, Artificial Sequence
  Description of Artificial Sequence: Synthetic oligonucleotide
  Antisense strand to SEQ ID NO: 668354
ucaaucauggacuagaauc

SEQ ID NO: 668356 - RNA, 19 nt, Artificial Sequence
  Description of Artificial Sequence: Synthetic oligonucleotide
  Sense strand starting at position 3529 of SEQ ID NO: 585796
ucuaguccaugauugaguu

SEQ ID NO: 668357 - RNA, 19 nt, Artificial Sequence
  Description of Artificial Sequence: Synthetic oligonucleotide
  Antisense strand to SEQ ID NO: 668356
aacucaaucauggacuaga

SEQ ID NO: 668358 - RNA, 19 nt, Artificial Sequence
  Description of Artificial Sequence: Synthetic oligonucleotide
  Sense strand starting at position 3530 of SEQ ID NO: 585796
cuaguccaugauugaguua

SEQ ID NO: 668359 - RNA, 19 nt, Artificial Sequence
  Description of Artificial Sequence: Synthetic oligonucleotide
  Antisense strand to SEQ ID NO: 668358
uaacucaaucauggacuag

SEQ ID NO: 668360 - RNA, 19 nt, Artificial Sequence
  Description of Artificial Sequence: Synthetic oligonucleotide
  Sense strand starting at position 3594 of SEQ ID NO: 585796
uuccgugguuugguuagau

SEQ ID NO: 668361 - RNA, 19 nt, Artificial Sequence
  Description of Artificial Sequence: Synthetic oligonucleotide
  Antisense strand to SEQ ID NO: 668360
aucuaaccaaaccacggaa

SEQ ID NO: 668362 - RNA, 19 nt, Artificial Sequence
  Description of Artificial Sequence: Synthetic oligonucleotide
  Sense strand starting at position 3597 of SEQ ID NO: 585796
cgugguuugguuagauuag

SEQ ID NO: 668363 - RNA, 19 nt, Artificial Sequence
  Description of Artificial Sequence: Synthetic oligonucleotide
  Antisense strand to SEQ ID NO: 668362
cuaaucuaaccaaaccacg

SEQ ID NO: 668364 - RNA, 19 nt, Artificial Sequence
  Description of Artificial Sequence: Synthetic oligonucleotide
  Sense strand starting at position 3603 of SEQ ID NO: 585796
uugguuagauuaggaauuu

SEQ ID NO: 668365 - RNA, 19 nt, Artificial Sequence
  Description of Artificial Sequence: Synthetic oligonucleotide
  Antisense strand to SEQ ID NO: 668364
aaauuccuaaucuaaccaa

SEQ ID NO: 668366 - RNA, 19 nt, Artificial Sequence
  Description of Artificial Sequence: Synthetic oligonucleotide
  Sense strand starting at position 3799 of SEQ ID NO: 585796
aggcauugcuggcucugaa

SEQ ID NO: 668367 - RNA, 19 nt, Artificial Sequence
  Description of Artificial Sequence: Synthetic oligonucleotide
  Antisense strand to SEQ ID NO: 668366
uucagagccagcaaugccu

SEQ ID NO: 668368 - RNA, 19 nt, Artificial Sequence
  Description of Artificial Sequence: Synthetic oligonucleotide
  Sense strand starting at position 3854 of SEQ ID NO: 585796
ugucaaacgcugugaguga

SEQ ID NO: 668369 - RNA, 19 nt, Artificial Sequence
  Description of Artificial Sequence: Synthetic oligonucleotide
  Antisense strand to SEQ ID NO: 668368
ucacucacagcguuugaca

SEQ ID NO: 668370 - RNA, 19 nt, Artificial Sequence
  Description of Artificial Sequence: Synthetic oligonucleotide
  Sense strand starting at position 79 of SEQ ID NO: 585797
caugcauaacgagagugua

SEQ ID NO: 668371 - RNA, 19 nt, Artificial Sequence
  Description of Artificial Sequence: Synthetic oligonucleotide
  Antisense strand to SEQ ID NO: 668370
uacacucucguuaugcaug

SEQ ID NO: 668372 - RNA, 19 nt, Artificial Sequence
  Description of Artificial Sequence: Synthetic oligonucleotide
  Sense strand starting at position 116 of SEQ ID NO: 585797
cauuguuuagaaugaguuu

SEQ ID NO: 668373 - RNA, 19 nt, Artificial Sequence
  Description of Artificial Sequence: Synthetic oligonucleotide
  Antisense strand to SEQ ID NO: 668372
aaacucauucuaaacaaug

SEQ ID NO: 668374 - RNA, 19 nt, Artificial Sequence
  Description of Artificial Sequence: Synthetic oligonucleotide
  Sense strand starting at position 119 of SEQ ID NO: 585797
uguuuagaaugaguuugga

SEQ ID NO: 668375 - RNA, 19 nt, Artificial Sequence
  Description of Artificial Sequence: Synthetic oligonucleotide
  Antisense strand to SEQ ID NO: 668374
uccaaacucauucuaaaca

SEQ ID NO: 668376 - RNA, 19 nt, Artificial Sequence
  Description of Artificial Sequence: Synthetic oligonucleotide
  Sense strand starting at position 128 of SEQ ID NO: 585797
ugaguuuggaagcaaucua

SEQ ID NO: 668377 - RNA, 19 nt, Artificial Sequence
  Description of Artificial Sequence: Synthetic oligonucleotide
  Antisense strand to SEQ ID NO: 668376
uagauugcuuccaaacuca

SEQ ID NO: 668378 - RNA, 19 nt, Artificial Sequence
  Description of Artificial Sequence: Synthetic oligonucleotide
  Sense strand starting at position 149 of SEQ ID NO: 585797
ugcccaucagagggagaau

SEQ ID NO: 668379 - RNA, 19 nt, Artificial Sequence
  Description of Artificial Sequence: Synthetic oligonucleotide
  Antisense strand to SEQ ID NO: 668378
auucucccucugaugggca

SEQ ID NO: 668380 - RNA, 19 nt, Artificial Sequence
  Description of Artificial Sequence: Synthetic oligonucleotide
  Sense strand starting at position 215 of SEQ ID NO: 585797
uggaaagaauuugaguuau

SEQ ID NO: 668381 - RNA, 19 nt, Artificial Sequence
  Description of Artificial Sequence: Synthetic oligonucleotide
  Antisense strand to SEQ ID NO: 668380
auaacucaaauucuuucca

SEQ ID NO: 668382 - RNA, 19 nt, Artificial Sequence
  Description of Artificial Sequence: Synthetic oligonucleotide
  Sense strand starting at position 244 of SEQ ID NO: 585797
ugagguauuauguggauaa

SEQ ID NO: 668383 - RNA, 19 nt, Artificial Sequence
  Description of Artificial Sequence: Synthetic oligonucleotide
  Antisense strand to SEQ ID NO: 668382
uuauccacauaauaccuca

SEQ ID NO: 668384 - RNA, 19 nt, Artificial Sequence
  Description of Artificial Sequence: Synthetic oligonucleotide
  Sense strand starting at position 246 of SEQ ID NO: 585797
agguauuauguggauaagu

SEQ ID NO: 668385 - RNA, 19 nt, Artificial Sequence
  Description of Artificial Sequence: Synthetic oligonucleotide
  Antisense strand to SEQ ID NO: 668384
acuuauccacauaauaccu

SEQ ID NO: 668386 - RNA, 19 nt, Artificial Sequence
  Description of Artificial Sequence: Synthetic oligonucleotide
  Sense strand starting at position 248 of SEQ ID NO: 585797
guauuauguggauaaguca

SEQ ID NO: 668387 - RNA, 19 nt, Artificial Sequence
  Description of Artificial Sequence: Synthetic oligonucleotide
  Antisense strand to SEQ ID NO: 668386
ugacuuauccacauaauac

SEQ ID NO: 668388 - RNA, 19 nt, Artificial Sequence
  Description of Artificial Sequence: Synthetic oligonucleotide
  Sense strand starting at position 291 of SEQ ID NO: 585797
aaguaaguugcagaaugau

SEQ ID NO: 668389 - RNA, 19 nt, Artificial Sequence
  Description of Artificial Sequence: Synthetic oligonucleotide
  Antisense strand to SEQ ID NO: 668388
aucauucugcaacuuacuu

SEQ ID NO: 668390 - RNA, 19 nt, Artificial Sequence
  Description of Artificial Sequence: Synthetic oligonucleotide
  Sense strand starting at position 294 of SEQ ID NO: 585797
uaaguugcagaaugauaca

SEQ ID NO: 668391 - RNA, 19 nt, Artificial Sequence
  Description of Artificial Sequence: Synthetic oligonucleotide
  Antisense strand to SEQ ID NO: 668390
uguaucauucugcaacuua

SEQ ID NO: 668392 - RNA, 19 nt, Artificial Sequence
  Description of Artificial Sequence: Synthetic oligonucleotide
  Sense strand starting at position 547 of SEQ ID NO: 585797
cuugaagucaguugauaug

SEQ ID NO: 668393 - RNA, 19 nt, Artificial Sequence
  Description of Artificial Sequence: Synthetic oligonucleotide
  Antisense strand to SEQ ID NO: 668392
cauaucaacugacuucaag

SEQ ID NO: 668394 - RNA, 19 nt, Artificial Sequence
  Description of Artificial Sequence: Synthetic oligonucleotide
  Sense strand starting at position 643 of SEQ ID NO: 585797
gcucaccuugcaggauaaa

SEQ ID NO: 668395 - RNA, 19 nt, Artificial Sequence
  Description of Artificial Sequence: Synthetic oligonucleotide
  Antisense strand to SEQ ID NO: 668394
uuuauccugcaaggugagc

SEQ ID NO: 668396 - RNA, 19 nt, Artificial Sequence
  Description of Artificial Sequence: Synthetic oligonucleotide
  Sense strand starting at position 980 of SEQ ID NO: 585797
gugaccuucguacaaaucu

SEQ ID NO: 668397 - RNA, 19 nt, Artificial Sequence
  Description of Artificial Sequence: Synthetic oligonucleotide
  Antisense strand to SEQ ID NO: 668396
agauuuguacgaaggucac

SEQ ID NO: 668398 - RNA, 19 nt, Artificial Sequence
  Description of Artificial Sequence: Synthetic oligonucleotide
  Sense strand starting at position 1225 of SEQ ID NO: 585797
ggacgaucucggcaaguaa

SEQ ID NO: 668399 - RNA, 19 nt, Artificial Sequence
  Description of Artificial Sequence: Synthetic oligonucleotide
  Antisense strand to SEQ ID NO: 668398
uuacuugccgagaucgucc

SEQ ID NO: 668400 - RNA, 19 nt, Artificial Sequence
  Description of Artificial Sequence: Synthetic oligonucleotide
  Sense strand starting at position 2419 of SEQ ID NO: 585797
acacuaacauugucucgau

SEQ ID NO: 668401 - RNA, 19 nt, Artificial Sequence
  Description of Artificial Sequence: Synthetic oligonucleotide
  Antisense strand to SEQ ID NO: 668400
aucgagacaauguuagugu

SEQ ID NO: 668402 - RNA, 19 nt, Artificial Sequence
  Description of Artificial Sequence: Synthetic oligonucleotide
  Sense strand starting at position 2805 of SEQ ID NO: 585797
agaagaguaaccugcuaug

SEQ ID NO: 668403 - RNA, 19 nt, Artificial Sequence
  Description of Artificial Sequence: Synthetic oligonucleotide
  Antisense strand to SEQ ID NO: 668402
cauagcagguuacucuucu

SEQ ID NO: 668404 - RNA, 19 nt, Artificial Sequence
  Description of Artificial Sequence: Synthetic oligonucleotide
  Sense strand starting at position 2822 of SEQ ID NO: 585797
ugcaauauugaggaugcuu

SEQ ID NO: 668405 - RNA, 19 nt, Artificial Sequence
  Description of Artificial Sequence: Synthetic oligonucleotide
  Antisense strand to SEQ ID NO: 668404
aagcauccucaauauugca

SEQ ID NO: 668406 - RNA, 19 nt, Artificial Sequence
  Description of Artificial Sequence: Synthetic oligonucleotide
  Sense strand starting at position 2926 of SEQ ID NO: 585797
cacagaugagugcgauuga

SEQ ID NO: 668407 - RNA, 19 nt, Artificial Sequence
  Description of Artificial Sequence: Synthetic oligonucleotide
  Antisense strand to SEQ ID NO: 668406
ucaaucgcacucaucugug

SEQ ID NO: 668408 - RNA, 19 nt, Artificial Sequence
  Description of Artificial Sequence: Synthetic oligonucleotide
  Sense strand starting at position 2935 of SEQ ID NO: 585797
gugcgauugaucucguuuc

SEQ ID NO: 668409 - RNA, 19 nt, Artificial Sequence
  Description of Artificial Sequence: Synthetic oligonucleotide
  Antisense strand to SEQ ID NO: 668408
gaaacgagaucaaucgcac

SEQ ID NO: 668410 - RNA, 19 nt, Artificial Sequence
  Description of Artificial Sequence: Synthetic oligonucleotide
  Sense strand starting at position 2965 of SEQ ID NO: 585797
aguugauaaacugguagga

SEQ ID NO: 668411 - RNA, 19 nt, Artificial Sequence
  Description of Artificial Sequence: Synthetic oligonucleotide
  Antisense strand to SEQ ID NO: 668410
uccuaccaguuuaucaacu

SEQ ID NO: 668412 - RNA, 19 nt, Artificial Sequence
  Description of Artificial Sequence: Synthetic oligonucleotide
  Sense strand starting at position 3012 of SEQ ID NO: 585797
cucagaugauguguuauaa

SEQ ID NO: 668413 - RNA, 19 nt, Artificial Sequence
  Description of Artificial Sequence: Synthetic oligonucleotide
  Antisense strand to SEQ ID NO: 668412
uuauaacacaucaucugag

SEQ ID NO: 668414 - RNA, 19 nt, Artificial Sequence
  Description of Artificial Sequence: Synthetic oligonucleotide
  Sense strand starting at position 3051 of SEQ ID NO: 585797
augagauagucccuuaaau

SEQ ID NO: 668415 - RNA, 19 nt, Artificial Sequence
  Description of Artificial Sequence: Synthetic oligonucleotide
  Antisense strand to SEQ ID NO: 668414
auuuaagggacuaucucau

SEQ ID NO: 668416 - RNA, 19 nt, Artificial Sequence
  Description of Artificial Sequence: Synthetic oligonucleotide
  Sense strand starting at position 3138 of SEQ ID NO: 585797
cgacuucagugggucaaga

SEQ ID NO: 668417 - RNA, 19 nt, Artificial Sequence
  Description of Artificial Sequence: Synthetic oligonucleotide
  Antisense strand to SEQ ID NO: 668416
ucuugacccacugaagucg

SEQ ID NO: 668418 - RNA, 19 nt, Artificial Sequence
  Description of Artificial Sequence: Synthetic oligonucleotide
  Sense strand starting at position 3245 of SEQ ID NO: 585797
uguaaucugccuuagaaau

SEQ ID NO: 668419 - RNA, 19 nt, Artificial Sequence
  Description of Artificial Sequence: Synthetic oligonucleotide
  Antisense strand to SEQ ID NO: 668418
auuucuaaggcagauuaca

SEQ ID NO: 668420 - RNA, 19 nt, Artificial Sequence
  Description of Artificial Sequence: Synthetic oligonucleotide
  Sense strand starting at position 3331 of SEQ ID NO: 585797
cccaguauuguuggaaaua

SEQ ID NO: 668421 - RNA, 19 nt, Artificial Sequence
  Description of Artificial Sequence: Synthetic oligonucleotide
  Antisense strand to SEQ ID NO: 668420
uauuuccaacaauacuggg

SEQ ID NO: 668422 - RNA, 19 nt, Artificial Sequence
  Description of Artificial Sequence: Synthetic oligonucleotide
  Sense strand starting at position 3365 of SEQ ID NO: 585797
uauaauguacauugguaga

SEQ ID NO: 668423 - RNA, 19 nt, Artificial Sequence
  Description of Artificial Sequence: Synthetic oligonucleotide
  Antisense strand to SEQ ID NO: 668422
ucuaccaauguacauuaua

SEQ ID NO: 668424 - RNA, 19 nt, Artificial Sequence
  Description of Artificial Sequence: Synthetic oligonucleotide
  Sense strand starting at position 3446 of SEQ ID NO: 585797
cuuugaaaguuguccacaa

SEQ ID NO: 668425 - RNA, 19 nt, Artificial Sequence
  Description of Artificial Sequence: Synthetic oligonucleotide
  Antisense strand to SEQ ID NO: 668424
uuguggacaacuuucaaag

SEQ ID NO: 668426 - RNA, 19 nt, Artificial Sequence
  Description of Artificial Sequence: Synthetic oligonucleotide
  Sense strand starting at position 3447 of SEQ ID NO: 585797
uuugaaaguuguccacaac

SEQ ID NO: 668427 - RNA, 19 nt, Artificial Sequence
  Description of Artificial Sequence: Synthetic oligonucleotide
  Antisense strand to SEQ ID NO: 668426
guuguggacaacuuucaaa

SEQ ID NO: 668428 - RNA, 19 nt, Artificial Sequence
  Description of Artificial Sequence: Synthetic oligonucleotide
  Sense strand starting at position 3448 of SEQ ID NO: 585797
uugaaaguuguccacaaca

SEQ ID NO: 668429 - RNA, 19 nt, Artificial Sequence
  Description of Artificial Sequence: Synthetic oligonucleotide
  Antisense strand to SEQ ID NO: 668428
uguuguggacaacuuucaa

SEQ ID NO: 668430 - RNA, 19 nt, Artificial Sequence
  Description of Artificial Sequence: Synthetic oligonucleotide
  Sense strand starting at position 3453 of SEQ ID NO: 585797
aguuguccacaacauauua

SEQ ID NO: 668431 - RNA, 19 nt, Artificial Sequence
  Description of Artificial Sequence: Synthetic oligonucleotide
  Antisense strand to SEQ ID NO: 668430
uaauauguuguggacaacu

SEQ ID NO: 668432 - RNA, 19 nt, Artificial Sequence
  Description of Artificial Sequence: Synthetic oligonucleotide
  Sense strand starting at position 3526 of SEQ ID NO: 585797
auguaagaauuauccacga

SEQ ID NO: 668433 - RNA, 19 nt, Artificial Sequence
  Description of Artificial Sequence: Synthetic oligonucleotide
  Antisense strand to SEQ ID NO: 668432
ucguggauaauucuuacau

SEQ ID NO: 668434 - RNA, 19 nt, Artificial Sequence
  Description of Artificial Sequence: Synthetic oligonucleotide
  Sense strand starting at position 3528 of SEQ ID NO: 585797
guaagaauuauccacgagu

SEQ ID NO: 668435 - RNA, 19 nt, Artificial Sequence
  Description of Artificial Sequence: Synthetic oligonucleotide
  Antisense strand to SEQ ID NO: 668434
acucguggauaauucuuac

SEQ ID NO: 668436 - RNA, 19 nt, Artificial Sequence
  Description of Artificial Sequence: Synthetic oligonucleotide
  Sense strand starting at position 3530 of SEQ ID NO: 585797
aagaauuauccacgaguca

SEQ ID NO: 668437 - RNA, 19 nt, Artificial Sequence
  Description of Artificial Sequence: Synthetic oligonucleotide
  Antisense strand to SEQ ID NO: 668436
ugacucguggauaauucuu

SEQ ID NO: 668438 - RNA, 19 nt, Artificial Sequence
  Description of Artificial Sequence: Synthetic oligonucleotide
  Sense strand starting at position 3542 of SEQ ID NO: 585797
cgagucaguacugauguaa

SEQ ID NO: 668439 - RNA, 19 nt, Artificial Sequence
  Description of Artificial Sequence: Synthetic oligonucleotide
  Antisense strand to SEQ ID NO: 668438
uuacaucaguacugacucg

SEQ ID NO: 668440 - RNA, 19 nt, Artificial Sequence
  Description of Artificial Sequence: Synthetic oligonucleotide
  Sense strand starting at position 3643 of SEQ ID NO: 585797
cccucauggaggugaagua

SEQ ID NO: 668441 - RNA, 19 nt, Artificial Sequence
  Description of Artificial Sequence: Synthetic oligonucleotide
  Antisense strand to SEQ ID NO: 668440
uacuucaccuccaugaggg

SEQ ID NO: 668442 - RNA, 19 nt, Artificial Sequence
  Description of Artificial Sequence: Synthetic oligonucleotide
  Sense strand starting at position 3653 of SEQ ID NO: 585797
ggugaaguacaaugguuua

SEQ ID NO: 668443 - RNA, 19 nt, Artificial Sequence
  Description of Artificial Sequence: Synthetic oligonucleotide
  Antisense strand to SEQ ID NO: 668442
uaaaccauuguacuucacc

SEQ ID NO: 668444 - RNA, 19 nt, Artificial Sequence
  Description of Artificial Sequence: Synthetic oligonucleotide
  Sense strand starting at position 3682 of SEQ ID NO: 585797
guggguaugcguaguaacu

SEQ ID NO: 668445 - RNA, 19 nt, Artificial Sequence
  Description of Artificial Sequence: Synthetic oligonucleotide
  Antisense strand to SEQ ID NO: 668444
aguuacuacgcauacccac

SEQ ID NO: 668446 - RNA, 19 nt, Artificial Sequence
  Description of Artificial Sequence: Synthetic oligonucleotide
  Sense strand starting at position 3692 of SEQ ID NO: 585797
guaguaacuuucuuccaaa

SEQ ID NO: 668447 - RNA, 19 nt, Artificial Sequence
  Description of Artificial Sequence: Synthetic oligonucleotide
  Antisense strand to SEQ ID NO: 668446
uuuggaagaaaguuacuac

SEQ ID NO: 668448 - RNA, 19 nt, Artificial Sequence
  Description of Artificial Sequence: Synthetic oligonucleotide
  Sense strand starting at position 3802 of SEQ ID NO: 585797
cccgauaugaugugaugaa

SEQ ID NO: 668449 - RNA, 19 nt, Artificial Sequence
  Description of Artificial Sequence: Synthetic oligonucleotide
  Antisense strand to SEQ ID NO: 668448
uucaucacaucauaucggg

SEQ ID NO: 668450 - RNA, 19 nt, Artificial Sequence
  Description of Artificial Sequence: Synthetic oligonucleotide
  Sense strand starting at position 96 of SEQ ID NO: 585798
gcuguugauguccaagaau

SEQ ID NO: 668451 - RNA, 19 nt, Artificial Sequence
  Description of Artificial Sequence: Synthetic oligonucleotide
  Antisense strand to SEQ ID NO: 668450
auucuuggacaucaacagc

SEQ ID NO: 668452 - RNA, 19 nt, Artificial Sequence
  Description of Artificial Sequence: Synthetic oligonucleotide
  Sense strand starting at position 99 of SEQ ID NO: 585798
guugauguccaagaaugca

SEQ ID NO: 668453 - RNA, 19 nt, Artificial Sequence
  Description of Artificial Sequence: Synthetic oligonucleotide
  Antisense strand to SEQ ID NO: 668452
ugcauucuuggacaucaac

SEQ ID NO: 668454 - RNA, 19 nt, Artificial Sequence
  Description of Artificial Sequence: Synthetic oligonucleotide
  Sense strand starting at position 166 of SEQ ID NO: 585798
ucucuuucucuuggagaug

SEQ ID NO: 668455 - RNA, 19 nt, Artificial Sequence
  Description of Artificial Sequence: Synthetic oligonucleotide
  Antisense strand to SEQ ID NO: 668454
caucuccaagagaaagaga

SEQ ID NO: 668456 - RNA, 19 nt, Artificial Sequence
  Description of Artificial Sequence: Synthetic oligonucleotide
  Sense strand starting at position 260 of SEQ ID NO: 585798
aguguaagccaccagagua

SEQ ID NO: 668457 - RNA, 19 nt, Artificial Sequence
  Description of Artificial Sequence: Synthetic oligonucleotide
  Antisense strand to SEQ ID NO: 668456
uacucugguggcuuacacu

SEQ ID NO: 668458 - RNA, 19 nt, Artificial Sequence
  Description of Artificial Sequence: Synthetic oligonucleotide
  Sense strand starting at position 268 of SEQ ID NO: 585798
ccaccagaguauguagaau

SEQ ID NO: 668459 - RNA, 19 nt, Artificial Sequence
  Description of Artificial Sequence: Synthetic oligonucleotide
  Antisense strand to SEQ ID NO: 668458
auucuacauacucuggugg

SEQ ID NO: 668460 - RNA, 19 nt, Artificial Sequence
  Description of Artificial Sequence: Synthetic oligonucleotide
  Sense strand starting at position 474 of SEQ ID NO: 585798
gaggcaaccgguuauccau

SEQ ID NO: 668461 - RNA, 19 nt, Artificial Sequence
  Description of Artificial Sequence: Synthetic oligonucleotide
  Antisense strand to SEQ ID NO: 668460
auggauaaccgguugccuc

SEQ ID NO: 668462 - RNA, 19 nt, Artificial Sequence
  Description of Artificial Sequence: Synthetic oligonucleotide
  Sense strand starting at position 576 of SEQ ID NO: 585798
gcauaauguagagaggcaa

SEQ ID NO: 668463 - RNA, 19 nt, Artificial Sequence
  Description of Artificial Sequence: Synthetic oligonucleotide
  Antisense strand to SEQ ID NO: 668462
uugccucucuacauuaugc

SEQ ID NO: 668464 - RNA, 19 nt, Artificial Sequence
  Description of Artificial Sequence: Synthetic oligonucleotide
  Sense strand starting at position 643 of SEQ ID NO: 585798
aggauaacuugcuccauca

SEQ ID NO: 668465 - RNA, 19 nt, Artificial Sequence
  Description of Artificial Sequence: Synthetic oligonucleotide
  Antisense strand to SEQ ID NO: 668464
ugauggagcaaguuauccu

SEQ ID NO: 668466 - RNA, 19 nt, Artificial Sequence
  Description of Artificial Sequence: Synthetic oligonucleotide
  Sense strand starting at position 796 of SEQ ID NO: 585798
auucuaaauccgugauaau

SEQ ID NO: 668467 - RNA, 19 nt, Artificial Sequence
  Description of Artificial Sequence: Synthetic oligonucleotide
  Antisense strand to SEQ ID NO: 668466
auuaucacggauuuagaau

SEQ ID NO: 668468 - RNA, 19 nt, Artificial Sequence
  Description of Artificial Sequence: Synthetic oligonucleotide
  Sense strand starting at position 797 of SEQ ID NO: 585798
uucuaaauccgugauaaua

SEQ ID NO: 668469 - RNA, 19 nt, Artificial Sequence
  Description of Artificial Sequence: Synthetic oligonucleotide
  Antisense strand to SEQ ID NO: 668468
uauuaucacggauuuagaa

SEQ ID NO: 668470 - RNA, 19 nt, Artificial Sequence
  Description of Artificial Sequence: Synthetic oligonucleotide
  Sense strand starting at position 855 of SEQ ID NO: 585798
agaccugcccuguaaggaa

SEQ ID NO: 668471 - RNA, 19 nt, Artificial Sequence
  Description of Artificial Sequence: Synthetic oligonucleotide
  Antisense strand to SEQ ID NO: 668470
uuccuuacagggcaggucu

SEQ ID NO: 668472 - RNA, 19 nt, Artificial Sequence
  Description of Artificial Sequence: Synthetic oligonucleotide
  Sense strand starting at position 894 of SEQ ID NO: 585798
gcagaaggagauugcuaua

SEQ ID NO: 668473 - RNA, 19 nt, Artificial Sequence
  Description of Artificial Sequence: Synthetic oligonucleotide
  Antisense strand to SEQ ID NO: 668472
uauagcaaucuccuucugc

SEQ ID NO: 668474 - RNA, 19 nt, Artificial Sequence
  Description of Artificial Sequence: Synthetic oligonucleotide
  Sense strand starting at position 904 of SEQ ID NO: 585798
auugcuauaggucagaaac

SEQ ID NO: 668475 - RNA, 19 nt, Artificial Sequence
  Description of Artificial Sequence: Synthetic oligonucleotide
  Antisense strand to SEQ ID NO: 668474
guuucugaccuauagcaau

SEQ ID NO: 668476 - RNA, 19 nt, Artificial Sequence
  Description of Artificial Sequence: Synthetic oligonucleotide
  Sense strand starting at position 918 of SEQ ID NO: 585798
gaaacucggcaguaugaaa

SEQ ID NO: 668477 - RNA, 19 nt, Artificial Sequence
  Description of Artificial Sequence: Synthetic oligonucleotide
  Antisense strand to SEQ ID NO: 668476
uuucauacugccgaguuuc

SEQ ID NO: 668478 - RNA, 19 nt, Artificial Sequence
  Description of Artificial Sequence: Synthetic oligonucleotide
  Sense strand starting at position 1002 of SEQ ID NO: 585798
cuuaauagagcuggaagau

SEQ ID NO: 668479 - RNA, 19 nt, Artificial Sequence
  Description of Artificial Sequence: Synthetic oligonucleotide
  Antisense strand to SEQ ID NO: 668478
aucuuccagcucuauuaag

SEQ ID NO: 668480 - RNA, 19 nt, Artificial Sequence
  Description of Artificial Sequence: Synthetic oligonucleotide
  Sense strand starting at position 1014 of SEQ ID NO: 585798
ggaagauacuaucugcuua

SEQ ID NO: 668481 - RNA, 19 nt, Artificial Sequence
  Description of Artificial Sequence: Synthetic oligonucleotide
  Antisense strand to SEQ ID NO: 668480
uaagcagauaguaucuucc

SEQ ID NO: 668482 - RNA, 19 nt, Artificial Sequence
  Description of Artificial Sequence: Synthetic oligonucleotide
  Sense strand starting at position 1099 of SEQ ID NO: 585798
ucaguuuccguggauagag

SEQ ID NO: 668483 - RNA, 19 nt, Artificial Sequence
  Description of Artificial Sequence: Synthetic oligonucleotide
  Antisense strand to SEQ ID NO: 668482
cucuauccacggaaacuga

SEQ ID NO: 668484 - RNA, 19 nt, Artificial Sequence
  Description of Artificial Sequence: Synthetic oligonucleotide
  Sense strand starting at position 1143 of SEQ ID NO: 585798
caggaagcucaguggagaa

SEQ ID NO: 668485 - RNA, 19 nt, Artificial Sequence
  Description of Artificial Sequence: Synthetic oligonucleotide
  Antisense strand to SEQ ID NO: 668484
uucuccacugagcuuccug

SEQ ID NO: 668486 - RNA, 19 nt, Artificial Sequence
  Description of Artificial Sequence: Synthetic oligonucleotide
  Sense strand starting at position 1847 of SEQ ID NO: 585798
auaauaucuuugccaggga

SEQ ID NO: 668487 - RNA, 19 nt, Artificial Sequence
  Description of Artificial Sequence: Synthetic oligonucleotide
  Antisense strand to SEQ ID NO: 668486
ucccuggcaaagauauuau

SEQ ID NO: 668488 - RNA, 19 nt, Artificial Sequence
  Description of Artificial Sequence: Synthetic oligonucleotide
  Sense strand starting at position 1850 of SEQ ID NO: 585798
auaucuuugccagggaaug

SEQ ID NO: 668489 - RNA, 19 nt, Artificial Sequence
  Description of Artificial Sequence: Synthetic oligonucleotide
  Antisense strand to SEQ ID NO: 668488
cauucccuggcaaagauau

SEQ ID NO: 668490 - RNA, 19 nt, Artificial Sequence
  Description of Artificial Sequence: Synthetic oligonucleotide
  Sense strand starting at position 1888 of SEQ ID NO: 585798
ggaaucaacugauugcuca

SEQ ID NO: 668491 - RNA, 19 nt, Artificial Sequence
  Description of Artificial Sequence: Synthetic oligonucleotide
  Antisense strand to SEQ ID NO: 668490
ugagcaaucaguugauucc

SEQ ID NO: 668492 - RNA, 19 nt, Artificial Sequence
  Description of Artificial Sequence: Synthetic oligonucleotide
  Sense strand starting at position 1927 of SEQ ID NO: 585798
agacuaaccugauucggga

SEQ ID NO: 668493 - RNA, 19 nt, Artificial Sequence
  Description of Artificial Sequence: Synthetic oligonucleotide
  Antisense strand to SEQ ID NO: 668492
ucccgaaucagguuagucu

SEQ ID NO: 668494 - RNA, 19 nt, Artificial Sequence
  Description of Artificial Sequence: Synthetic oligonucleotide
  Sense strand starting at position 1956 of SEQ ID NO: 585798
auuucuucuuccgcuguga

SEQ ID NO: 668495 - RNA, 19 nt, Artificial Sequence
  Description of Artificial Sequence: Synthetic oligonucleotide
  Antisense strand to SEQ ID NO: 668494
ucacagcggaagaagaaau

SEQ ID NO: 668496 - RNA, 19 nt, Artificial Sequence
  Description of Artificial Sequence: Synthetic oligonucleotide
  Sense strand starting at position 2260 of SEQ ID NO: 585798
agauuucucuauuaaggau

SEQ ID NO: 668497 - RNA, 19 nt, Artificial Sequence
  Description of Artificial Sequence: Synthetic oligonucleotide
  Antisense strand to SEQ ID NO: 668496
auccuuaauagagaaaucu

SEQ ID NO: 668498 - RNA, 19 nt, Artificial Sequence
  Description of Artificial Sequence: Synthetic oligonucleotide
  Sense strand starting at position 2272 of SEQ ID NO: 585798
uaaggauggcucugaguau

SEQ ID NO: 668499 - RNA, 19 nt, Artificial Sequence
  Description of Artificial Sequence: Synthetic oligonucleotide
  Antisense strand to SEQ ID NO: 668498
auacucagagccauccuua

SEQ ID NO: 668500 - RNA, 19 nt, Artificial Sequence
  Description of Artificial Sequence: Synthetic oligonucleotide
  Sense strand starting at position 2297 of SEQ ID NO: 585798
cuguucucacaggaauguu

SEQ ID NO: 668501 - RNA, 19 nt, Artificial Sequence
  Description of Artificial Sequence: Synthetic oligonucleotide
  Antisense strand to SEQ ID NO: 668500
aacauuccugugagaacag

SEQ ID NO: 668502 - RNA, 19 nt, Artificial Sequence
  Description of Artificial Sequence: Synthetic oligonucleotide
  Sense strand starting at position 2623 of SEQ ID NO: 585798
ugguuauagcaauauccag

SEQ ID NO: 668503 - RNA, 19 nt, Artificial Sequence
  Description of Artificial Sequence: Synthetic oligonucleotide
  Antisense strand to SEQ ID NO: 668502
cuggauauugcuauaacca

SEQ ID NO: 668504 - RNA, 19 nt, Artificial Sequence
  Description of Artificial Sequence: Synthetic oligonucleotide
  Sense strand starting at position 2803 of SEQ ID NO: 585798
cccagcuaauugguagaga

SEQ ID NO: 668505 - RNA, 19 nt, Artificial Sequence
  Description of Artificial Sequence: Synthetic oligonucleotide
  Antisense strand to SEQ ID NO: 668504
ucucuaccaauuagcuggg

SEQ ID NO: 668506 - RNA, 19 nt, Artificial Sequence
  Description of Artificial Sequence: Synthetic oligonucleotide
  Sense strand starting at position 2889 of SEQ ID NO: 585798
cucccaaguguuggaauga

SEQ ID NO: 668507 - RNA, 19 nt, Artificial Sequence
  Description of Artificial Sequence: Synthetic oligonucleotide
  Antisense strand to SEQ ID NO: 668506
ucauuccaacacuugggag

SEQ ID NO: 668508 - RNA, 19 nt, Artificial Sequence
  Description of Artificial Sequence: Synthetic oligonucleotide
  Sense strand starting at position 2947 of SEQ ID NO: 585798
cuuagaacucuuugaaggu

SEQ ID NO: 668509 - RNA, 19 nt, Artificial Sequence
  Description of Artificial Sequence: Synthetic oligonucleotide
  Antisense strand to SEQ ID NO: 668508
accuucaaagaguucuaag

SEQ ID NO: 668510 - RNA, 19 nt, Artificial Sequence
  Description of Artificial Sequence: Synthetic oligonucleotide
  Sense strand starting at position 2956 of SEQ ID NO: 585798
cuuugaagguaaucuacua

SEQ ID NO: 668511 - RNA, 19 nt, Artificial Sequence
  Description of Artificial Sequence: Synthetic oligonucleotide
  Antisense strand to SEQ ID NO: 668510
uaguagauuaccuucaaag

SEQ ID NO: 668512 - RNA, 19 nt, Artificial Sequence
  Description of Artificial Sequence: Synthetic oligonucleotide
  Sense strand starting at position 3083 of SEQ ID NO: 585798
auuaaauguuuggcacaua

SEQ ID NO: 668513 - RNA, 19 nt, Artificial Sequence
  Description of Artificial Sequence: Synthetic oligonucleotide
  Antisense strand to SEQ ID NO: 668512
uaugugccaaacauuuaau

SEQ ID NO: 668514 - RNA, 19 nt, Artificial Sequence
  Description of Artificial Sequence: Synthetic oligonucleotide
  Sense strand starting at position 3086 of SEQ ID NO: 585798
aaauguuuggcacauagca

SEQ ID NO: 668515 - RNA, 19 nt, Artificial Sequence
  Description of Artificial Sequence: Synthetic oligonucleotide
  Antisense strand to SEQ ID NO: 668514
ugcuaugugccaaacauuu

SEQ ID NO: 668516 - RNA, 19 nt, Artificial Sequence
  Description of Artificial Sequence: Synthetic oligonucleotide
  Sense strand starting at position 3166 of SEQ ID NO: 585798
cccuuugcccaggagacuu

SEQ ID NO: 668517 - RNA, 19 nt, Artificial Sequence
  Description of Artificial Sequence: Synthetic oligonucleotide
  Antisense strand to SEQ ID NO: 668516
aagucuccugggcaaaggg

SEQ ID NO: 668518 - RNA, 19 nt, Artificial Sequence
  Description of Artificial Sequence: Synthetic oligonucleotide
  Sense strand starting at position 3401 of SEQ ID NO: 585798
cccaguucuggauacugau

SEQ ID NO: 668519 - RNA, 19 nt, Artificial Sequence
  Description of Artificial Sequence: Synthetic oligonucleotide
  Antisense strand to SEQ ID NO: 668518
aucaguauccagaacuggg

SEQ ID NO: 668520 - RNA, 19 nt, Artificial Sequence
  Description of Artificial Sequence: Synthetic oligonucleotide
  Sense strand starting at position 3428 of SEQ ID NO: 585798
ggagaaccaucuuucuguu

SEQ ID NO: 668521 - RNA, 19 nt, Artificial Sequence
  Description of Artificial Sequence: Synthetic oligonucleotide
  Antisense strand to SEQ ID NO: 668520
aacagaaagaugguucucc

SEQ ID NO: 668522 - RNA, 19 nt, Artificial Sequence
  Description of Artificial Sequence: Synthetic oligonucleotide
  Sense strand starting at position 3547 of SEQ ID NO: 585798
uauggaaauguuuaagcau

SEQ ID NO: 668523 - RNA, 19 nt, Artificial Sequence
  Description of Artificial Sequence: Synthetic oligonucleotide
  Antisense strand to SEQ ID NO: 668522
augcuuaaacauuuccaua

SEQ ID NO: 668524 - RNA, 19 nt, Artificial Sequence
  Description of Artificial Sequence: Synthetic oligonucleotide
  Sense strand starting at position 3581 of SEQ ID NO: 585798
aguuuaagauaacugugua

SEQ ID NO: 668525 - RNA, 19 nt, Artificial Sequence
  Description of Artificial Sequence: Synthetic oligonucleotide
  Antisense strand to SEQ ID NO: 668524
uacacaguuaucuuaaacu

SEQ ID NO: 668526 - RNA, 19 nt, Artificial Sequence
  Description of Artificial Sequence: Synthetic oligonucleotide
  Sense strand starting at position 3584 of SEQ ID NO: 585798
uuaagauaacuguguacau

SEQ ID NO: 668527 - RNA, 19 nt, Artificial Sequence
  Description of Artificial Sequence: Synthetic oligonucleotide
  Antisense strand to SEQ ID NO: 668526
auguacacaguuaucuuaa

SEQ ID NO: 668528 - RNA, 19 nt, Artificial Sequence
  Description of Artificial Sequence: Synthetic oligonucleotide
  Sense strand starting at position 3957 of SEQ ID NO: 585798
gcugucaugucucuuauuu

SEQ ID NO: 668529 - RNA, 19 nt, Artificial Sequence
  Description of Artificial Sequence: Synthetic oligonucleotide
  Antisense strand to SEQ ID NO: 668528
aaauaagagacaugacagc

SEQ ID NO: 668530 - RNA, 19 nt, Artificial Sequence
  Description of Artificial Sequence: Synthetic oligonucleotide
  Sense strand starting at position 3 of SEQ ID NO: 585799
uagcguaaugaacagaaau

SEQ ID NO: 668531 - RNA, 19 nt, Artificial Sequence
  Description of Artificial Sequence: Synthetic oligonucleotide
  Antisense strand to SEQ ID NO: 668530
auuucuguucauuacgcua

SEQ ID NO: 668532 - RNA, 19 nt, Artificial Sequence
  Description of Artificial Sequence: Synthetic oligonucleotide
  Sense strand starting at position 5 of SEQ ID NO: 585799
gcguaaugaacagaaaucu

SEQ ID NO: 668533 - RNA, 19 nt, Artificial Sequence
  Description of Artificial Sequence: Synthetic oligonucleotide
  Antisense strand to SEQ ID NO: 668532
agauuucuguucauuacgc

SEQ ID NO: 668534 - RNA, 19 nt, Artificial Sequence
  Description of Artificial Sequence: Synthetic oligonucleotide
  Sense strand starting at position 217 of SEQ ID NO: 585799
gggaucuuauaaccaagua

SEQ ID NO: 668535 - RNA, 19 nt, Artificial Sequence
  Description of Artificial Sequence: Synthetic oligonucleotide
  Antisense strand to SEQ ID NO: 668534
uacuugguuauaagauccc

SEQ ID NO: 668536 - RNA, 19 nt, Artificial Sequence
  Description of Artificial Sequence: Synthetic oligonucleotide
  Sense strand starting at position 237 of SEQ ID NO: 585799
agcaaauauggccaucuuu

SEQ ID NO: 668537 - RNA, 19 nt, Artificial Sequence
  Description of Artificial Sequence: Synthetic oligonucleotide
  Antisense strand to SEQ ID NO: 668536
aaagauggccauauuugcu

SEQ ID NO: 668538 - RNA, 19 nt, Artificial Sequence
  Description of Artificial Sequence: Synthetic oligonucleotide
  Sense strand starting at position 350 of SEQ ID NO: 585799
ggcagagccagucacauaa

SEQ ID NO: 668539 - RNA, 19 nt, Artificial Sequence
  Description of Artificial Sequence: Synthetic oligonucleotide
  Antisense strand to SEQ ID NO: 668538
uuaugugacuggcucugcc

SEQ ID NO: 668540 - RNA, 19 nt, Artificial Sequence
  Description of Artificial Sequence: Synthetic oligonucleotide
  Sense strand starting at position 436 of SEQ ID NO: 585799
uaucacaaagcuugagagu

SEQ ID NO: 668541 - RNA, 19 nt, Artificial Sequence
  Description of Artificial Sequence: Synthetic oligonucleotide
  Antisense strand to SEQ ID NO: 668540
acucucaagcuuugugaua

SEQ ID NO: 668542 - RNA, 19 nt, Artificial Sequence
  Description of Artificial Sequence: Synthetic oligonucleotide
  Sense strand starting at position 437 of SEQ ID NO: 585799
aucacaaagcuugagaguu

SEQ ID NO: 668543 - RNA, 19 nt, Artificial Sequence
  Description of Artificial Sequence: Synthetic oligonucleotide
  Antisense strand to SEQ ID NO: 668542
aacucucaagcuuugugau

SEQ ID NO: 668544 - RNA, 19 nt, Artificial Sequence
  Description of Artificial Sequence: Synthetic oligonucleotide
  Sense strand starting at position 548 of SEQ ID NO: 585799
cgacuaauucccuagugua

SEQ ID NO: 668545 - RNA, 19 nt, Artificial Sequence
  Description of Artificial Sequence: Synthetic oligonucleotide
  Antisense strand to SEQ ID NO: 668544
uacacuagggaauuagucg

SEQ ID NO: 668546 - RNA, 19 nt, Artificial Sequence
  Description of Artificial Sequence: Synthetic oligonucleotide
  Sense strand starting at position 563 of SEQ ID NO: 585799
uguaaugucuacuuggaaa

SEQ ID NO: 668547 - RNA, 19 nt, Artificial Sequence
  Description of Artificial Sequence: Synthetic oligonucleotide
  Antisense strand to SEQ ID NO: 668546
uuuccaaguagacauuaca

SEQ ID NO: 668548 - RNA, 19 nt, Artificial Sequence
  Description of Artificial Sequence: Synthetic oligonucleotide
  Sense strand starting at position 565 of SEQ ID NO: 585799
uaaugucuacuuggaaaug

SEQ ID NO: 668549 - RNA, 19 nt, Artificial Sequence
  Description of Artificial Sequence: Synthetic oligonucleotide
  Antisense strand to SEQ ID NO: 668548
cauuuccaaguagacauua

SEQ ID NO: 668550 - RNA, 19 nt, Artificial Sequence
  Description of Artificial Sequence: Synthetic oligonucleotide
  Sense strand starting at position 1079 of SEQ ID NO: 585799
gguucccaugugcaugaua

SEQ ID NO: 668551 - RNA, 19 nt, Artificial Sequence
  Description of Artificial Sequence: Synthetic oligonucleotide
  Antisense strand to SEQ ID NO: 668550
uaucaugcacaugggaacc

SEQ ID NO: 668552 - RNA, 19 nt, Artificial Sequence
  Description of Artificial Sequence: Synthetic oligonucleotide
  Sense strand starting at position 1082 of SEQ ID NO: 585799
ucccaugugcaugauagau

SEQ ID NO: 668553 - RNA, 19 nt, Artificial Sequence
  Description of Artificial Sequence: Synthetic oligonucleotide
  Antisense strand to SEQ ID NO: 668552
aucuaucaugcacauggga

SEQ ID NO: 668554 - RNA, 19 nt, Artificial Sequence
  Description of Artificial Sequence: Synthetic oligonucleotide
  Sense strand starting at position 1222 of SEQ ID NO: 585799
agagugguggucugggaaa

SEQ ID NO: 668555 - RNA, 19 nt, Artificial Sequence
  Description of Artificial Sequence: Synthetic oligonucleotide
  Antisense strand to SEQ ID NO: 668554
uuucccagaccaccacucu

SEQ ID NO: 668556 - RNA, 19 nt, Artificial Sequence
  Description of Artificial Sequence: Synthetic oligonucleotide
  Sense strand starting at position 1224 of SEQ ID NO: 585799
agugguggucugggaaaua

SEQ ID NO: 668557 - RNA, 19 nt, Artificial Sequence
  Description of Artificial Sequence: Synthetic oligonucleotide
  Antisense strand to SEQ ID NO: 668556
uauuucccagaccaccacu

SEQ ID NO: 668558 - RNA, 19 nt, Artificial Sequence
  Description of Artificial Sequence: Synthetic oligonucleotide
  Sense strand starting at position 1321 of SEQ ID NO: 585799
cauacauagguugguuuaa

SEQ ID NO: 668559 - RNA, 19 nt, Artificial Sequence
  Description of Artificial Sequence: Synthetic oligonucleotide
  Antisense strand to SEQ ID NO: 668558
uuaaaccaaccuauguaug

SEQ ID NO: 668560 - RNA, 19 nt, Artificial Sequence
  Description of Artificial Sequence: Synthetic oligonucleotide
  Sense strand starting at position 1322 of SEQ ID NO: 585799
auacauagguugguuuaaa

SEQ ID NO: 668561 - RNA, 19 nt, Artificial Sequence
  Description of Artificial Sequence: Synthetic oligonucleotide
  Antisense strand to SEQ ID NO: 668560
uuuaaaccaaccuauguau

SEQ ID NO: 668562 - RNA, 19 nt, Artificial Sequence
  Description of Artificial Sequence: Synthetic oligonucleotide
  Sense strand starting at position 1693 of SEQ ID NO: 585799
uugcuuauuuggcuuaauu

SEQ ID NO: 668563 - RNA, 19 nt, Artificial Sequence
  Description of Artificial Sequence: Synthetic oligonucleotide
  Antisense strand to SEQ ID NO: 668562
aauuaagccaaauaagcaa

SEQ ID NO: 668564 - RNA, 19 nt, Artificial Sequence
  Description of Artificial Sequence: Synthetic oligonucleotide
  Sense strand starting at position 1775 of SEQ ID NO: 585799
aauguuacacugggaguau

SEQ ID NO: 668565 - RNA, 19 nt, Artificial Sequence
  Description of Artificial Sequence: Synthetic oligonucleotide
  Antisense strand to SEQ ID NO: 668564
auacucccaguguaacauu

SEQ ID NO: 668566 - RNA, 19 nt, Artificial Sequence
  Description of Artificial Sequence: Synthetic oligonucleotide
  Sense strand starting at position 1784 of SEQ ID NO: 585799
cugggaguaucuuuacgaa

SEQ ID NO: 668567 - RNA, 19 nt, Artificial Sequence
  Description of Artificial Sequence: Synthetic oligonucleotide
  Antisense strand to SEQ ID NO: 668566
uucguaaagauacucccag

SEQ ID NO: 668568 - RNA, 19 nt, Artificial Sequence
  Description of Artificial Sequence: Synthetic oligonucleotide
  Sense strand starting at position 1805 of SEQ ID NO: 585799
gucagugugaugcagagau

SEQ ID NO: 668569 - RNA, 19 nt, Artificial Sequence
  Description of Artificial Sequence: Synthetic oligonucleotide
  Antisense strand to SEQ ID NO: 668568
aucucugcaucacacugac

SEQ ID NO: 668570 - RNA, 19 nt, Artificial Sequence
  Description of Artificial Sequence: Synthetic oligonucleotide
  Sense strand starting at position 1807 of SEQ ID NO: 585799
cagugugaugcagagaugu

SEQ ID NO: 668571 - RNA, 19 nt, Artificial Sequence
  Description of Artificial Sequence: Synthetic oligonucleotide
  Antisense strand to SEQ ID NO: 668570
acaucucugcaucacacug

SEQ ID NO: 668572 - RNA, 19 nt, Artificial Sequence
  Description of Artificial Sequence: Synthetic oligonucleotide
  Sense strand starting at position 1813 of SEQ ID NO: 585799
gaugcagagauguguaaau

SEQ ID NO: 668573 - RNA, 19 nt, Artificial Sequence
  Description of Artificial Sequence: Synthetic oligonucleotide
  Antisense strand to SEQ ID NO: 668572
auuuacacaucucugcauc

SEQ ID NO: 668574 - RNA, 19 nt, Artificial Sequence
  Description of Artificial Sequence: Synthetic oligonucleotide
  Sense strand starting at position 2140 of SEQ ID NO: 585799
ugguuacaggauuguuaaa

SEQ ID NO: 668575 - RNA, 19 nt, Artificial Sequence
  Description of Artificial Sequence: Synthetic oligonucleotide
  Antisense strand to SEQ ID NO: 668574
uuuaacaauccuguaacca

SEQ ID NO: 668576 - RNA, 19 nt, Artificial Sequence
  Description of Artificial Sequence: Synthetic oligonucleotide
  Sense strand starting at position 2158 of SEQ ID NO: 585799
aaggaaaucuggcuguaag

SEQ ID NO: 668577 - RNA, 19 nt, Artificial Sequence
  Description of Artificial Sequence: Synthetic oligonucleotide
  Antisense strand to SEQ ID NO: 668576
cuuacagccagauuuccuu

SEQ ID NO: 668578 - RNA, 19 nt, Artificial Sequence
  Description of Artificial Sequence: Synthetic oligonucleotide
  Sense strand starting at position 2161 of SEQ ID NO: 585799
gaaaucuggcuguaaguuc

SEQ ID NO: 668579 - RNA, 19 nt, Artificial Sequence
  Description of Artificial Sequence: Synthetic oligonucleotide
  Antisense strand to SEQ ID NO: 668578
gaacuuacagccagauuuc

SEQ ID NO: 668580 - RNA, 19 nt, Artificial Sequence
  Description of Artificial Sequence: Synthetic oligonucleotide
  Sense strand starting at position 2187 of SEQ ID NO: 585799
gugaccuagagcuagucau

SEQ ID NO: 668581 - RNA, 19 nt, Artificial Sequence
  Description of Artificial Sequence: Synthetic oligonucleotide
  Antisense strand to SEQ ID NO: 668580
augacuagcucuaggucac

SEQ ID NO: 668582 - RNA, 19 nt, Artificial Sequence
  Description of Artificial Sequence: Synthetic oligonucleotide
  Sense strand starting at position 2246 of SEQ ID NO: 585799
agauaaggcuccuuucuua

SEQ ID NO: 668583 - RNA, 19 nt, Artificial Sequence
  Description of Artificial Sequence: Synthetic oligonucleotide
  Antisense strand to SEQ ID NO: 668582
uaagaaaggagccuuaucu

SEQ ID NO: 668584 - RNA, 19 nt, Artificial Sequence
  Description of Artificial Sequence: Synthetic oligonucleotide
  Sense strand starting at position 2327 of SEQ ID NO: 585799
gaaggugaagagugguauu

SEQ ID NO: 668585 - RNA, 19 nt, Artificial Sequence
  Description of Artificial Sequence: Synthetic oligonucleotide
  Antisense strand to SEQ ID NO: 668584
aauaccacucuucaccuuc

SEQ ID NO: 668586 - RNA, 19 nt, Artificial Sequence
  Description of Artificial Sequence: Synthetic oligonucleotide
  Sense strand starting at position 2576 of SEQ ID NO: 585799
acuugcuuggacugacaaa

SEQ ID NO: 668587 - RNA, 19 nt, Artificial Sequence
  Description of Artificial Sequence: Synthetic oligonucleotide
  Antisense strand to SEQ ID NO: 668586
uuugucaguccaagcaagu

SEQ ID NO: 668588 - RNA, 19 nt, Artificial Sequence
  Description of Artificial Sequence: Synthetic oligonucleotide
  Sense strand starting at position 2976 of SEQ ID NO: 585799
ucagguguucgagaucauc

SEQ ID NO: 668589 - RNA, 19 nt, Artificial Sequence
  Description of Artificial Sequence: Synthetic oligonucleotide
  Antisense strand to SEQ ID NO: 668588
gaugaucucgaacaccuga

SEQ ID NO: 668590 - RNA, 19 nt, Artificial Sequence
  Description of Artificial Sequence: Synthetic oligonucleotide
  Sense strand starting at position 3271 of SEQ ID NO: 585799
aagacuuguccguacuuua

SEQ ID NO: 668591 - RNA, 19 nt, Artificial Sequence
  Description of Artificial Sequence: Synthetic oligonucleotide
  Antisense strand to SEQ ID NO: 668590
uaaaguacggacaagucuu

SEQ ID NO: 668592 - RNA, 19 nt, Artificial Sequence
  Description of Artificial Sequence: Synthetic oligonucleotide
  Sense strand starting at position 3276 of SEQ ID NO: 585799
uuguccguacuuuaaagau

SEQ ID NO: 668593 - RNA, 19 nt, Artificial Sequence
  Description of Artificial Sequence: Synthetic oligonucleotide
  Antisense strand to SEQ ID NO: 668592
aucuuuaaaguacggacaa

SEQ ID NO: 668594 - RNA, 19 nt, Artificial Sequence
  Description of Artificial Sequence: Synthetic oligonucleotide
  Sense strand starting at position 3316 of SEQ ID NO: 585799
gaugaaggauuauaaagaa

SEQ ID NO: 668595 - RNA, 19 nt, Artificial Sequence
  Description of Artificial Sequence: Synthetic oligonucleotide
  Antisense strand to SEQ ID NO: 668594
uucuuuauaauccuucauc

SEQ ID NO: 668596 - RNA, 19 nt, Artificial Sequence
  Description of Artificial Sequence: Synthetic oligonucleotide
  Sense strand starting at position 3374 of SEQ ID NO: 585799
aguauuacucaugacugca

SEQ ID NO: 668597 - RNA, 19 nt, Artificial Sequence
  Description of Artificial Sequence: Synthetic oligonucleotide
  Antisense strand to SEQ ID NO: 668596
ugcagucaugaguaauacu

SEQ ID NO: 668598 - RNA, 19 nt, Artificial Sequence
  Description of Artificial Sequence: Synthetic oligonucleotide
  Sense strand starting at position 3447 of SEQ ID NO: 585799
gauuauugugauggaagcu

SEQ ID NO: 668599 - RNA, 19 nt, Artificial Sequence
  Description of Artificial Sequence: Synthetic oligonucleotide
  Antisense strand to SEQ ID NO: 668598
agcuuccaucacaauaauc

SEQ ID NO: 668600 - RNA, 19 nt, Artificial Sequence
  Description of Artificial Sequence: Synthetic oligonucleotide
  Sense strand starting at position 3448 of SEQ ID NO: 585799
auuauugugauggaagcua

SEQ ID NO: 668601 - RNA, 19 nt, Artificial Sequence
  Description of Artificial Sequence: Synthetic oligonucleotide
  Antisense strand to SEQ ID NO: 668600
uagcuuccaucacaauaau

SEQ ID NO: 668602 - RNA, 19 nt, Artificial Sequence
  Description of Artificial Sequence: Synthetic oligonucleotide
  Sense strand starting at position 3790 of SEQ ID NO: 585799
ggaauaguaucucuccauc

SEQ ID NO: 668603 - RNA, 19 nt, Artificial Sequence
  Description of Artificial Sequence: Synthetic oligonucleotide
  Antisense strand to SEQ ID NO: 668602
gauggagagauacuauucc

SEQ ID NO: 668604 - RNA, 19 nt, Artificial Sequence
  Description of Artificial Sequence: Synthetic oligonucleotide
  Sense strand starting at position 3916 of SEQ ID NO: 585799
aggacagauacugguuguu

SEQ ID NO: 668605 - RNA, 19 nt, Artificial Sequence
  Description of Artificial Sequence: Synthetic oligonucleotide
  Antisense strand to SEQ ID NO: 668604
aacaaccaguaucuguccu

SEQ ID NO: 668606 - RNA, 19 nt, Artificial Sequence
  Description of Artificial Sequence: Synthetic oligonucleotide
  Sense strand starting at position 3929 of SEQ ID NO: 585799
guuguugcucugccuuaga

SEQ ID NO: 668607 - RNA, 19 nt, Artificial Sequence
  Description of Artificial Sequence: Synthetic oligonucleotide
  Antisense strand to SEQ ID NO: 668606
ucuaaggcagagcaacaac

SEQ ID NO: 668608 - RNA, 19 nt, Artificial Sequence
  Description of Artificial Sequence: Synthetic oligonucleotide
  Sense strand starting at position 3962 of SEQ ID NO: 585799
ugcuaacaucuggauauca

SEQ ID NO: 668609 - RNA, 19 nt, Artificial Sequence
  Description of Artificial Sequence: Synthetic oligonucleotide
  Antisense strand to SEQ ID NO: 668608
ugauauccagauguuagca

SEQ ID NO: 668610 - RNA, 19 nt, Artificial Sequence
  Description of Artificial Sequence: Synthetic oligonucleotide
  Sense strand starting at position 6 of SEQ ID NO: 585800
caugguugauauguacuua

SEQ ID NO: 668611 - RNA, 19 nt, Artificial Sequence
  Description of Artificial Sequence: Synthetic oligonucleotide
  Antisense strand to SEQ ID NO: 668610
uaaguacauaucaaccaug

SEQ ID NO: 668612 - RNA, 19 nt, Artificial Sequence
  Description of Artificial Sequence: Synthetic oligonucleotide
  Sense strand starting at position 10 of SEQ ID NO: 585800
guugauauguacuuagaga

SEQ ID NO: 668613 - RNA, 19 nt, Artificial Sequence
  Description of Artificial Sequence: Synthetic oligonucleotide
  Antisense strand to SEQ ID NO: 668612
ucucuaaguacauaucaac

SEQ ID NO: 668614 - RNA, 19 nt, Artificial Sequence
  Description of Artificial Sequence: Synthetic oligonucleotide
  Sense strand starting at position 214 of SEQ ID NO: 585800
gacacaguauagguugaau

SEQ ID NO: 668615 - RNA, 19 nt, Artificial Sequence
  Description of Artificial Sequence: Synthetic oligonucleotide
  Antisense strand to SEQ ID NO: 668614
auucaaccuauacuguguc

SEQ ID NO: 668616 - RNA, 19 nt, Artificial Sequence
  Description of Artificial Sequence: Synthetic oligonucleotide
  Sense strand starting at position 262 of SEQ ID NO: 585800
augguauacgcauaagcaa

SEQ ID NO: 668617 - RNA, 19 nt, Artificial Sequence
  Description of Artificial Sequence: Synthetic oligonucleotide
  Antisense strand to SEQ ID NO: 668616
uugcuuaugcguauaccau

SEQ ID NO: 668618 - RNA, 19 nt, Artificial Sequence
  Description of Artificial Sequence: Synthetic oligonucleotide
  Sense strand starting at position 325 of SEQ ID NO: 585800
uauuauaauggucguuaga

SEQ ID NO: 668619 - RNA, 19 nt, Artificial Sequence
  Description of Artificial Sequence: Synthetic oligonucleotide
  Antisense strand to SEQ ID NO: 668618
ucuaacgaccauuauaaua

SEQ ID NO: 668620 - RNA, 19 nt, Artificial Sequence
  Description of Artificial Sequence: Synthetic oligonucleotide
  Sense strand starting at position 328 of SEQ ID NO: 585800
uauaauggucguuagauug

SEQ ID NO: 668621 - RNA, 19 nt, Artificial Sequence
  Description of Artificial Sequence: Synthetic oligonucleotide
  Antisense strand to SEQ ID NO: 668620
caaucuaacgaccauuaua

SEQ ID NO: 668622 - RNA, 19 nt, Artificial Sequence
  Description of Artificial Sequence: Synthetic oligonucleotide
  Sense strand starting at position 407 of SEQ ID NO: 585800
guuuacucagaguaaaugu

SEQ ID NO: 668623 - RNA, 19 nt, Artificial Sequence
  Description of Artificial Sequence: Synthetic oligonucleotide
  Antisense strand to SEQ ID NO: 668622
acauuuacucugaguaaac

SEQ ID NO: 668624 - RNA, 19 nt, Artificial Sequence
  Description of Artificial Sequence: Synthetic oligonucleotide
  Sense strand starting at position 450 of SEQ ID NO: 585800
ccugcagugggaggauauu

SEQ ID NO: 668625 - RNA, 19 nt, Artificial Sequence
  Description of Artificial Sequence: Synthetic oligonucleotide
  Antisense strand to SEQ ID NO: 668624
aauauccucccacugcagg

SEQ ID NO: 668626 - RNA, 19 nt, Artificial Sequence
  Description of Artificial Sequence: Synthetic oligonucleotide
  Sense strand starting at position 501 of SEQ ID NO: 585800
uugaguaaaccagguaaag

SEQ ID NO: 668627 - RNA, 19 nt, Artificial Sequence
  Description of Artificial Sequence: Synthetic oligonucleotide
  Antisense strand to SEQ ID NO: 668626
cuuuaccugguuuacucaa

SEQ ID NO: 668628 - RNA, 19 nt, Artificial Sequence
  Description of Artificial Sequence: Synthetic oligonucleotide
  Sense strand starting at position 814 of SEQ ID NO: 585800
ggauucuucuggccuggaa

SEQ ID NO: 668629 - RNA, 19 nt, Artificial Sequence
  Description of Artificial Sequence: Synthetic oligonucleotide
  Antisense strand to SEQ ID NO: 668628
uuccaggccagaagaaucc

SEQ ID NO: 668630 - RNA, 19 nt, Artificial Sequence
  Description of Artificial Sequence: Synthetic oligonucleotide
  Sense strand starting at position 918 of SEQ ID NO: 585800
cugccuaucuuucugagaa

SEQ ID NO: 668631 - RNA, 19 nt, Artificial Sequence
  Description of Artificial Sequence: Synthetic oligonucleotide
  Antisense strand to SEQ ID NO: 668630
uucucagaaagauaggcag

SEQ ID NO: 668632 - RNA, 19 nt, Artificial Sequence
  Description of Artificial Sequence: Synthetic oligonucleotide
  Sense strand starting at position 934 of SEQ ID NO: 585800
gaaauuggugcugaccaca

SEQ ID NO: 668633 - RNA, 19 nt, Artificial Sequence
  Description of Artificial Sequence: Synthetic oligonucleotide
  Antisense strand to SEQ ID NO: 668632
uguggucagcaccaauuuc

SEQ ID NO: 668634 - RNA, 19 nt, Artificial Sequence
  Description of Artificial Sequence: Synthetic oligonucleotide
  Sense strand starting at position 1000 of SEQ ID NO: 585800
aggugaucucuacaagcgu

SEQ ID NO: 668635 - RNA, 19 nt, Artificial Sequence
  Description of Artificial Sequence: Synthetic oligonucleotide
  Antisense strand to SEQ ID NO: 668634
acgcuuguagagaucaccu

SEQ ID NO: 668636 - RNA, 19 nt, Artificial Sequence
  Description of Artificial Sequence: Synthetic oligonucleotide
  Sense strand starting at position 1006 of SEQ ID NO: 585800
ucucuacaagcguacaauu

SEQ ID NO: 668637 - RNA, 19 nt, Artificial Sequence
  Description of Artificial Sequence: Synthetic oligonucleotide
  Antisense strand to SEQ ID NO: 668636
aauuguacgcuuguagaga

SEQ ID NO: 668638 - RNA, 19 nt, Artificial Sequence
  Description of Artificial Sequence: Synthetic oligonucleotide
  Sense strand starting at position 1044 of SEQ ID NO: 585800
ucauaacuuuggucauguu

SEQ ID NO: 668639 - RNA, 19 nt, Artificial Sequence
  Description of Artificial Sequence: Synthetic oligonucleotide
  Antisense strand to SEQ ID NO: 668638
aacaugaccaaaguuauga

SEQ ID NO: 668640 - RNA, 19 nt, Artificial Sequence
  Description of Artificial Sequence: Synthetic oligonucleotide
  Sense strand starting at position 1466 of SEQ ID NO: 585800
acacaaaucuugucaguuc

SEQ ID NO: 668641 - RNA, 19 nt, Artificial Sequence
  Description of Artificial Sequence: Synthetic oligonucleotide
  Antisense strand to SEQ ID NO: 668640
gaacugacaagauuugugu

SEQ ID NO: 668642 - RNA, 19 nt, Artificial Sequence
  Description of Artificial Sequence: Synthetic oligonucleotide
  Sense strand starting at position 1477 of SEQ ID NO: 585800
gucaguucugaucaguauu

SEQ ID NO: 668643 - RNA, 19 nt, Artificial Sequence
  Description of Artificial Sequence: Synthetic oligonucleotide
  Antisense strand to SEQ ID NO: 668642
aauacugaucagaacugac

SEQ ID NO: 668644 - RNA, 19 nt, Artificial Sequence
  Description of Artificial Sequence: Synthetic oligonucleotide
  Sense strand starting at position 1548 of SEQ ID NO: 585800
cacagcguccuuggagaaa

SEQ ID NO: 668645 - RNA, 19 nt, Artificial Sequence
  Description of Artificial Sequence: Synthetic oligonucleotide
  Antisense strand to SEQ ID NO: 668644
uuucuccaaggacgcugug

SEQ ID NO: 668646 - RNA, 19 nt, Artificial Sequence
  Description of Artificial Sequence: Synthetic oligonucleotide
  Sense strand starting at position 1551 of SEQ ID NO: 585800
agcguccuuggagaaauga

SEQ ID NO: 668647 - RNA, 19 nt, Artificial Sequence
  Description of Artificial Sequence: Synthetic oligonucleotide
  Antisense strand to SEQ ID NO: 668646
ucauuucuccaaggacgcu

SEQ ID NO: 668648 - RNA, 19 nt, Artificial Sequence
  Description of Artificial Sequence: Synthetic oligonucleotide
  Sense strand starting at position 1759 of SEQ ID NO: 585800
gaccuuugguaaguuagua

SEQ ID NO: 668649 - RNA, 19 nt, Artificial Sequence
  Description of Artificial Sequence: Synthetic oligonucleotide
  Antisense strand to SEQ ID NO: 668648
uacuaacuuaccaaagguc

SEQ ID NO: 668650 - RNA, 19 nt, Artificial Sequence
  Description of Artificial Sequence: Synthetic oligonucleotide
  Sense strand starting at position 2025 of SEQ ID NO: 585800
ucaaguucucacuguuaga

SEQ ID NO: 668651 - RNA, 19 nt, Artificial Sequence
  Description of Artificial Sequence: Synthetic oligonucleotide
  Antisense strand to SEQ ID NO: 668650
ucuaacagugagaacuuga

SEQ ID NO: 668652 - RNA, 19 nt, Artificial Sequence
  Description of Artificial Sequence: Synthetic oligonucleotide
  Sense strand starting at position 2075 of SEQ ID NO: 585800
cuuugaacugugcauacaa

SEQ ID NO: 668653 - RNA, 19 nt, Artificial Sequence
  Description of Artificial Sequence: Synthetic oligonucleotide
  Antisense strand to SEQ ID NO: 668652
uuguaugcacaguucaaag

SEQ ID NO: 668654 - RNA, 19 nt, Artificial Sequence
  Description of Artificial Sequence: Synthetic oligonucleotide
  Sense strand starting at position 2163 of SEQ ID NO: 585800
gaaaucagugauggaguca

SEQ ID NO: 668655 - RNA, 19 nt, Artificial Sequence
  Description of Artificial Sequence: Synthetic oligonucleotide
  Antisense strand to SEQ ID NO: 668654
ugacuccaucacugauuuc

SEQ ID NO: 668656 - RNA, 19 nt, Artificial Sequence
  Description of Artificial Sequence: Synthetic oligonucleotide
  Sense strand starting at position 2242 of SEQ ID NO: 585800
auuggcuuccgcuuuagua

SEQ ID NO: 668657 - RNA, 19 nt, Artificial Sequence
  Description of Artificial Sequence: Synthetic oligonucleotide
  Antisense strand to SEQ ID NO: 668656
uacuaaagcggaagccaau

SEQ ID NO: 668658 - RNA, 19 nt, Artificial Sequence
  Description of Artificial Sequence: Synthetic oligonucleotide
  Sense strand starting at position 2243 of SEQ ID NO: 585800
uuggcuuccgcuuuaguaa

SEQ ID NO: 668659 - RNA, 19 nt, Artificial Sequence
  Description of Artificial Sequence: Synthetic oligonucleotide
  Antisense strand to SEQ ID NO: 668658
uuacuaaagcggaagccaa

SEQ ID NO: 668660 - RNA, 19 nt, Artificial Sequence
  Description of Artificial Sequence: Synthetic oligonucleotide
  Sense strand starting at position 2252 of SEQ ID NO: 585800
gcuuuaguaaagcaaggau

SEQ ID NO: 668661 - RNA, 19 nt, Artificial Sequence
  Description of Artificial Sequence: Synthetic oligonucleotide
  Antisense strand to SEQ ID NO: 668660
auccuugcuuuacuaaagc

SEQ ID NO: 668662 - RNA, 19 nt, Artificial Sequence
  Description of Artificial Sequence: Synthetic oligonucleotide
  Sense strand starting at position 2259 of SEQ ID NO: 585800
uaaagcaaggauuguguua

SEQ ID NO: 668663 - RNA, 19 nt, Artificial Sequence
  Description of Artificial Sequence: Synthetic oligonucleotide
  Antisense strand to SEQ ID NO: 668662
uaacacaauccuugcuuua

SEQ ID NO: 668664 - RNA, 19 nt, Artificial Sequence
  Description of Artificial Sequence: Synthetic oligonucleotide
  Sense strand starting at position 2323 of SEQ ID NO: 585800
gguaguagcuccucaauaa

SEQ ID NO: 668665 - RNA, 19 nt, Artificial Sequence
  Description of Artificial Sequence: Synthetic oligonucleotide
  Antisense strand to SEQ ID NO: 668664
uuauugaggagcuacuacc

SEQ ID NO: 668666 - RNA, 19 nt, Artificial Sequence
  Description of Artificial Sequence: Synthetic oligonucleotide
  Sense strand starting at position 2324 of SEQ ID NO: 585800
guaguagcuccucaauaaa

SEQ ID NO: 668667 - RNA, 19 nt, Artificial Sequence
  Description of Artificial Sequence: Synthetic oligonucleotide
  Antisense strand to SEQ ID NO: 668666
uuuauugaggagcuacuac

SEQ ID NO: 668668 - RNA, 19 nt, Artificial Sequence
  Description of Artificial Sequence: Synthetic oligonucleotide
  Sense strand starting at position 2369 of SEQ ID NO: 585800
ucaguuaagucagcuagau

SEQ ID NO: 668669 - RNA, 19 nt, Artificial Sequence
  Description of Artificial Sequence: Synthetic oligonucleotide
  Antisense strand to SEQ ID NO: 668668
aucuagcugacuuaacuga

SEQ ID NO: 668670 - RNA, 19 nt, Artificial Sequence
  Description of Artificial Sequence: Synthetic oligonucleotide
  Sense strand starting at position 2413 of SEQ ID NO: 585800
gccuaaugaaugugaacug

SEQ ID NO: 668671 - RNA, 19 nt, Artificial Sequence
  Description of Artificial Sequence: Synthetic oligonucleotide
  Antisense strand to SEQ ID NO: 668670
caguucacauucauuaggc

SEQ ID NO: 668672 - RNA, 19 nt, Artificial Sequence
  Description of Artificial Sequence: Synthetic oligonucleotide
  Sense strand starting at position 2418 of SEQ ID NO: 585800
augaaugugaacugugacu

SEQ ID NO: 668673 - RNA, 19 nt, Artificial Sequence
  Description of Artificial Sequence: Synthetic oligonucleotide
  Antisense strand to SEQ ID NO: 668672
agucacaguucacauucau

SEQ ID NO: 668674 - RNA, 19 nt, Artificial Sequence
  Description of Artificial Sequence: Synthetic oligonucleotide
  Sense strand starting at position 2656 of SEQ ID NO: 585800
agacuuccuuaauugaguu

SEQ ID NO: 668675 - RNA, 19 nt, Artificial Sequence
  Description of Artificial Sequence: Synthetic oligonucleotide
  Antisense strand to SEQ ID NO: 668674
aacucaauuaaggaagucu

SEQ ID NO: 668676 - RNA, 19 nt, Artificial Sequence
  Description of Artificial Sequence: Synthetic oligonucleotide
  Sense strand starting at position 2719 of SEQ ID NO: 585800
ggaguaggcuuauccuacu

SEQ ID NO: 668677 - RNA, 19 nt, Artificial Sequence
  Description of Artificial Sequence: Synthetic oligonucleotide
  Antisense strand to SEQ ID NO: 668676
aguaggauaagccuacucc

SEQ ID NO: 668678 - RNA, 19 nt, Artificial Sequence
  Description of Artificial Sequence: Synthetic oligonucleotide
  Sense strand starting at position 2741 of SEQ ID NO: 585800
cuccucagaucucuguauu

SEQ ID NO: 668679 - RNA, 19 nt, Artificial Sequence
  Description of Artificial Sequence: Synthetic oligonucleotide
  Antisense strand to SEQ ID NO: 668678
aauacagagaucugaggag

SEQ ID NO: 668680 - RNA, 19 nt, Artificial Sequence
  Description of Artificial Sequence: Synthetic oligonucleotide
  Sense strand starting at position 3012 of SEQ ID NO: 585800
guguaacaucuugaaguau

SEQ ID NO: 668681 - RNA, 19 nt, Artificial Sequence
  Description of Artificial Sequence: Synthetic oligonucleotide
  Antisense strand to SEQ ID NO: 668680
auacuucaagauguuacac

SEQ ID NO: 668682 - RNA, 19 nt, Artificial Sequence
  Description of Artificial Sequence: Synthetic oligonucleotide
  Sense strand starting at position 3327 of SEQ ID NO: 585800
uuaucaugugccugauaag

SEQ ID NO: 668683 - RNA, 19 nt, Artificial Sequence
  Description of Artificial Sequence: Synthetic oligonucleotide
  Antisense strand to SEQ ID NO: 668682
cuuaucaggcacaugauaa

SEQ ID NO: 668684 - RNA, 19 nt, Artificial Sequence
  Description of Artificial Sequence: Synthetic oligonucleotide
  Sense strand starting at position 3745 of SEQ ID NO: 585800
aggagaacuuucuuggcuu

SEQ ID NO: 668685 - RNA, 19 nt, Artificial Sequence
  Description of Artificial Sequence: Synthetic oligonucleotide
  Antisense strand to SEQ ID NO: 668684
aagccaagaaaguucuccu

SEQ ID NO: 668686 - RNA, 19 nt, Artificial Sequence
  Description of Artificial Sequence: Synthetic oligonucleotide
  Sense strand starting at position 3748 of SEQ ID NO: 585800
agaacuuucuuggcuuaau

SEQ ID NO: 668687 - RNA, 19 nt, Artificial Sequence
  Description of Artificial Sequence: Synthetic oligonucleotide
  Antisense strand to SEQ ID NO: 668686
auuaagccaagaaaguucu

SEQ ID NO: 668688 - RNA, 19 nt, Artificial Sequence
  Description of Artificial Sequence: Synthetic oligonucleotide
  Sense strand starting at position 3891 of SEQ ID NO: 585800
gaaagaguggccgaaagua

SEQ ID NO: 668689 - RNA, 19 nt, Artificial Sequence
  Description of Artificial Sequence: Synthetic oligonucleotide
  Antisense strand to SEQ ID NO: 668688
uacuuucggccacucuuuc

SEQ ID NO: 668690 - RNA, 19 nt, Artificial Sequence
  Description of Artificial Sequence: Synthetic oligonucleotide
  Sense strand starting at position 34 of SEQ ID NO: 585801
caguaaugucaugauggua

SEQ ID NO: 668691 - RNA, 19 nt, Artificial Sequence
  Description of Artificial Sequence: Synthetic oligonucleotide
  Antisense strand to SEQ ID NO: 668690
uaccaucaugacauuacug

SEQ ID NO: 668692 - RNA, 19 nt, Artificial Sequence
  Description of Artificial Sequence: Synthetic oligonucleotide
  Sense strand starting at position 440 of SEQ ID NO: 585801
ugaccucuucugcaaagca

SEQ ID NO: 668693 - RNA, 19 nt, Artificial Sequence
  Description of Artificial Sequence: Synthetic oligonucleotide
  Antisense strand to SEQ ID NO: 668692
ugcuuugcagaagagguca

SEQ ID NO: 668694 - RNA, 19 nt, Artificial Sequence
  Description of Artificial Sequence: Synthetic oligonucleotide
  Sense strand starting at position 1066 of SEQ ID NO: 585801
cugguuaucugggucagaa

SEQ ID NO: 668695 - RNA, 19 nt, Artificial Sequence
  Description of Artificial Sequence: Synthetic oligonucleotide
  Antisense strand to SEQ ID NO: 668694
uucugacccagauaaccag

SEQ ID NO: 668696 - RNA, 19 nt, Artificial Sequence
  Description of Artificial Sequence: Synthetic oligonucleotide
  Sense strand starting at position 1068 of SEQ ID NO: 585801
gguuaucugggucagaaac

SEQ ID NO: 668697 - RNA, 19 nt, Artificial Sequence
  Description of Artificial Sequence: Synthetic oligonucleotide
  Antisense strand to SEQ ID NO: 668696
guuucugacccagauaacc

SEQ ID NO: 668698 - RNA, 19 nt, Artificial Sequence
  Description of Artificial Sequence: Synthetic oligonucleotide
  Sense strand starting at position 1103 of SEQ ID NO: 585801
agaaguuucugguccaaag

SEQ ID NO: 668699 - RNA, 19 nt, Artificial Sequence
  Description of Artificial Sequence: Synthetic oligonucleotide
  Antisense strand to SEQ ID NO: 668698
cuuuggaccagaaacuucu

SEQ ID NO: 668700 - RNA, 19 nt, Artificial Sequence
  Description of Artificial Sequence: Synthetic oligonucleotide
  Sense strand starting at position 1159 of SEQ ID NO: 585801
aguagagaugguuaguuua

SEQ ID NO: 668701 - RNA, 19 nt, Artificial Sequence
  Description of Artificial Sequence: Synthetic oligonucleotide
  Antisense strand to SEQ ID NO: 668700
uaaacuaaccaucucuacu

SEQ ID NO: 668702 - RNA, 19 nt, Artificial Sequence
  Description of Artificial Sequence: Synthetic oligonucleotide
  Sense strand starting at position 1161 of SEQ ID NO: 585801
uagagaugguuaguuuaaa

SEQ ID NO: 668703 - RNA, 19 nt, Artificial Sequence
  Description of Artificial Sequence: Synthetic oligonucleotide
  Antisense strand to SEQ ID NO: 668702
uuuaaacuaaccaucucua

SEQ ID NO: 668704 - RNA, 19 nt, Artificial Sequence
  Description of Artificial Sequence: Synthetic oligonucleotide
  Sense strand starting at position 1162 of SEQ ID NO: 585801
agagaugguuaguuuaaag

SEQ ID NO: 668705 - RNA, 19 nt, Artificial Sequence
  Description of Artificial Sequence: Synthetic oligonucleotide
  Antisense strand to SEQ ID NO: 668704
cuuuaaacuaaccaucucu

SEQ ID NO: 668706 - RNA, 19 nt, Artificial Sequence
  Description of Artificial Sequence: Synthetic oligonucleotide
  Sense strand starting at position 1463 of SEQ ID NO: 585801
uagccauugguauaauaga

SEQ ID NO: 668707 - RNA, 19 nt, Artificial Sequence
  Description of Artificial Sequence: Synthetic oligonucleotide
  Antisense strand to SEQ ID NO: 668706
ucuauuauaccaauggcua

SEQ ID NO: 668708 - RNA, 19 nt, Artificial Sequence
  Description of Artificial Sequence: Synthetic oligonucleotide
  Sense strand starting at position 1576 of SEQ ID NO: 585801
ccaguugguaaaugaaaga

SEQ ID NO: 668709 - RNA, 19 nt, Artificial Sequence
  Description of Artificial Sequence: Synthetic oligonucleotide
  Antisense strand to SEQ ID NO: 668708
ucuuucauuuaccaacugg

SEQ ID NO: 668710 - RNA, 19 nt, Artificial Sequence
  Description of Artificial Sequence: Synthetic oligonucleotide
  Sense strand starting at position 1668 of SEQ ID NO: 585801
uuggaauuaucuuccauag

SEQ ID NO: 668711 - RNA, 19 nt, Artificial Sequence
  Description of Artificial Sequence: Synthetic oligonucleotide
  Antisense strand to SEQ ID NO: 668710
cuauggaagauaauuccaa

SEQ ID NO: 668712 - RNA, 19 nt, Artificial Sequence
  Description of Artificial Sequence: Synthetic oligonucleotide
  Sense strand starting at position 1717 of SEQ ID NO: 585801
gcauauggaugaucagaua

SEQ ID NO: 668713 - RNA, 19 nt, Artificial Sequence
  Description of Artificial Sequence: Synthetic oligonucleotide
  Antisense strand to SEQ ID NO: 668712
uaucugaucauccauaugc

SEQ ID NO: 668714 - RNA, 19 nt, Artificial Sequence
  Description of Artificial Sequence: Synthetic oligonucleotide
  Sense strand starting at position 1859 of SEQ ID NO: 585801
uguccauugcuauacagaa

SEQ ID NO: 668715 - RNA, 19 nt, Artificial Sequence
  Description of Artificial Sequence: Synthetic oligonucleotide
  Antisense strand to SEQ ID NO: 668714
uucuguauagcaauggaca

SEQ ID NO: 668716 - RNA, 19 nt, Artificial Sequence
  Description of Artificial Sequence: Synthetic oligonucleotide
  Sense strand starting at position 1911 of SEQ ID NO: 585801
agaagugacuuaccgacuu

SEQ ID NO: 668717 - RNA, 19 nt, Artificial Sequence
  Description of Artificial Sequence: Synthetic oligonucleotide
  Antisense strand to SEQ ID NO: 668716
aagucgguaagucacuucu

SEQ ID NO: 668718 - RNA, 19 nt, Artificial Sequence
  Description of Artificial Sequence: Synthetic oligonucleotide
  Sense strand starting at position 1925 of SEQ ID NO: 585801
gacuuaaugucuguggaag

SEQ ID NO: 668719 - RNA, 19 nt, Artificial Sequence
  Description of Artificial Sequence: Synthetic oligonucleotide
  Antisense strand to SEQ ID NO: 668718
cuuccacagacauuaaguc

SEQ ID NO: 668720 - RNA, 19 nt, Artificial Sequence
  Description of Artificial Sequence: Synthetic oligonucleotide
  Sense strand starting at position 1926 of SEQ ID NO: 585801
acuuaaugucuguggaagg

SEQ ID NO: 668721 - RNA, 19 nt, Artificial Sequence
  Description of Artificial Sequence: Synthetic oligonucleotide
  Antisense strand to SEQ ID NO: 668720
ccuuccacagacauuaagu

SEQ ID NO: 668722 - RNA, 19 nt, Artificial Sequence
  Description of Artificial Sequence: Synthetic oligonucleotide
  Sense strand starting at position 2005 of SEQ ID NO: 585801
agaugaggauucuuugcca

SEQ ID NO: 668723 - RNA, 19 nt, Artificial Sequence
  Description of Artificial Sequence: Synthetic oligonucleotide
  Antisense strand to SEQ ID NO: 668722
uggcaaagaauccucaucu

SEQ ID NO: 668724 - RNA, 19 nt, Artificial Sequence
  Description of Artificial Sequence: Synthetic oligonucleotide
  Sense strand starting at position 2095 of SEQ ID NO: 585801
ccaaauaggcuuugaagaa

SEQ ID NO: 668725 - RNA, 19 nt, Artificial Sequence
  Description of Artificial Sequence: Synthetic oligonucleotide
  Antisense strand to SEQ ID NO: 668724
uucuucaaagccuauuugg

SEQ ID NO: 668726 - RNA, 19 nt, Artificial Sequence
  Description of Artificial Sequence: Synthetic oligonucleotide
  Sense strand starting at position 2099 of SEQ ID NO: 585801
auaggcuuugaagaagcau

SEQ ID NO: 668727 - RNA, 19 nt, Artificial Sequence
  Description of Artificial Sequence: Synthetic oligonucleotide
  Antisense strand to SEQ ID NO: 668726
augcuucuucaaagccuau

SEQ ID NO: 668728 - RNA, 19 nt, Artificial Sequence
  Description of Artificial Sequence: Synthetic oligonucleotide
  Sense strand starting at position 2424 of SEQ ID NO: 585801
guaauauuauggguaaacu

SEQ ID NO: 668729 - RNA, 19 nt, Artificial Sequence
  Description of Artificial Sequence: Synthetic oligonucleotide
  Antisense strand to SEQ ID NO: 668728
aguuuacccauaauauuac

SEQ ID NO: 668730 - RNA, 19 nt, Artificial Sequence
  Description of Artificial Sequence: Synthetic oligonucleotide
  Sense strand starting at position 2522 of SEQ ID NO: 585801
acaagccuggcauaaauau

SEQ ID NO: 668731 - RNA, 19 nt, Artificial Sequence
  Description of Artificial Sequence: Synthetic oligonucleotide
  Antisense strand to SEQ ID NO: 668730
auauuuaugccaggcuugu

SEQ ID NO: 668732 - RNA, 19 nt, Artificial Sequence
  Description of Artificial Sequence: Synthetic oligonucleotide
  Sense strand starting at position 2647 of SEQ ID NO: 585801
guagcauuuaugggccauu

SEQ ID NO: 668733 - RNA, 19 nt, Artificial Sequence
  Description of Artificial Sequence: Synthetic oligonucleotide
  Antisense strand to SEQ ID NO: 668732
aauggcccauaaaugcuac

SEQ ID NO: 668734 - RNA, 19 nt, Artificial Sequence
  Description of Artificial Sequence: Synthetic oligonucleotide
  Sense strand starting at position 2707 of SEQ ID NO: 585801
ccuacaugugcacagugaa

SEQ ID NO: 668735 - RNA, 19 nt, Artificial Sequence
  Description of Artificial Sequence: Synthetic oligonucleotide
  Antisense strand to SEQ ID NO: 668734
uucacugugcacauguagg

SEQ ID NO: 668736 - RNA, 19 nt, Artificial Sequence
  Description of Artificial Sequence: Synthetic oligonucleotide
  Sense strand starting at position 2793 of SEQ ID NO: 585801
acugcuuuccaagaaugug

SEQ ID NO: 668737 - RNA, 19 nt, Artificial Sequence
  Description of Artificial Sequence: Synthetic oligonucleotide
  Antisense strand to SEQ ID NO: 668736
cacauucuuggaaagcagu

SEQ ID NO: 668738 - RNA, 19 nt, Artificial Sequence
  Description of Artificial Sequence: Synthetic oligonucleotide
  Sense strand starting at position 2802 of SEQ ID NO: 585801
caagaauguguauaguucu

SEQ ID NO: 668739 - RNA, 19 nt, Artificial Sequence
  Description of Artificial Sequence: Synthetic oligonucleotide
  Antisense strand to SEQ ID NO: 668738
agaacuauacacauucuug

SEQ ID NO: 668740 - RNA, 19 nt, Artificial Sequence
  Description of Artificial Sequence: Synthetic oligonucleotide
  Sense strand starting at position 2924 of SEQ ID NO: 585801
ucuuuauaugagcauuaga

SEQ ID NO: 668741 - RNA, 19 nt, Artificial Sequence
  Description of Artificial Sequence: Synthetic oligonucleotide
  Antisense strand to SEQ ID NO: 668740
ucuaaugcucauauaaaga

SEQ ID NO: 668742 - RNA, 19 nt, Artificial Sequence
  Description of Artificial Sequence: Synthetic oligonucleotide
  Sense strand starting at position 2927 of SEQ ID NO: 585801
uuauaugagcauuagaguc

SEQ ID NO: 668743 - RNA, 19 nt, Artificial Sequence
  Description of Artificial Sequence: Synthetic oligonucleotide
  Antisense strand to SEQ ID NO: 668742
gacucuaaugcucauauaa

SEQ ID NO: 668744 - RNA, 19 nt, Artificial Sequence
  Description of Artificial Sequence: Synthetic oligonucleotide
  Sense strand starting at position 2939 of SEQ ID NO: 585801
uagagucagccauggaaau

SEQ ID NO: 668745 - RNA, 19 nt, Artificial Sequence
  Description of Artificial Sequence: Synthetic oligonucleotide
  Antisense strand to SEQ ID NO: 668744
auuuccauggcugacucua

SEQ ID NO: 668746 - RNA, 19 nt, Artificial Sequence
  Description of Artificial Sequence: Synthetic oligonucleotide
  Sense strand starting at position 2940 of SEQ ID NO: 585801
agagucagccauggaaauu

SEQ ID NO: 668747 - RNA, 19 nt, Artificial Sequence
  Description of Artificial Sequence: Synthetic oligonucleotide
  Antisense strand to SEQ ID NO: 668746
aauuuccauggcugacucu

SEQ ID NO: 668748 - RNA, 19 nt, Artificial Sequence
  Description of Artificial Sequence: Synthetic oligonucleotide
  Sense strand starting at position 3034 of SEQ ID NO: 585801
acuuuauggcccugaggag

SEQ ID NO: 668749 - RNA, 19 nt, Artificial Sequence
  Description of Artificial Sequence: Synthetic oligonucleotide
  Antisense strand to SEQ ID NO: 668748
cuccucagggccauaaagu

SEQ ID NO: 668750 - RNA, 19 nt, Artificial Sequence
  Description of Artificial Sequence: Synthetic oligonucleotide
  Sense strand starting at position 3035 of SEQ ID NO: 585801
cuuuauggcccugaggaga

SEQ ID NO: 668751 - RNA, 19 nt, Artificial Sequence
  Description of Artificial Sequence: Synthetic oligonucleotide
  Antisense strand to SEQ ID NO: 668750
ucuccucagggccauaaag

SEQ ID NO: 668752 - RNA, 19 nt, Artificial Sequence
  Description of Artificial Sequence: Synthetic oligonucleotide
  Sense strand starting at position 3059 of SEQ ID NO: 585801
uuuagauucuaaguuugac

SEQ ID NO: 668753 - RNA, 19 nt, Artificial Sequence
  Description of Artificial Sequence: Synthetic oligonucleotide
  Antisense strand to SEQ ID NO: 668752
gucaaacuuagaaucuaaa

SEQ ID NO: 668754 - RNA, 19 nt, Artificial Sequence
  Description of Artificial Sequence: Synthetic oligonucleotide
  Sense strand starting at position 3097 of SEQ ID NO: 585801
uguauugugagaggagagu

SEQ ID NO: 668755 - RNA, 19 nt, Artificial Sequence
  Description of Artificial Sequence: Synthetic oligonucleotide
  Antisense strand to SEQ ID NO: 668754
acucuccucucacaauaca

SEQ ID NO: 668756 - RNA, 19 nt, Artificial Sequence
  Description of Artificial Sequence: Synthetic oligonucleotide
  Sense strand starting at position 3152 of SEQ ID NO: 585801
ggagccuggcaguauauau

SEQ ID NO: 668757 - RNA, 19 nt, Artificial Sequence
  Description of Artificial Sequence: Synthetic oligonucleotide
  Antisense strand to SEQ ID NO: 668756
auauauacugccaggcucc

SEQ ID NO: 668758 - RNA, 19 nt, Artificial Sequence
  Description of Artificial Sequence: Synthetic oligonucleotide
  Sense strand starting at position 3209 of SEQ ID NO: 585801
gggagucagagcuaccauu

SEQ ID NO: 668759 - RNA, 19 nt, Artificial Sequence
  Description of Artificial Sequence: Synthetic oligonucleotide
  Antisense strand to SEQ ID NO: 668758
aaugguagcucugacuccc

SEQ ID NO: 668760 - RNA, 19 nt, Artificial Sequence
  Description of Artificial Sequence: Synthetic oligonucleotide
  Sense strand starting at position 3416 of SEQ ID NO: 585801
ugagucauuucugaaggac

SEQ ID NO: 668761 - RNA, 19 nt, Artificial Sequence
  Description of Artificial Sequence: Synthetic oligonucleotide
  Antisense strand to SEQ ID NO: 668760
guccuucagaaaugacuca

SEQ ID NO: 668762 - RNA, 19 nt, Artificial Sequence
  Description of Artificial Sequence: Synthetic oligonucleotide
  Sense strand starting at position 3489 of SEQ ID NO: 585801
uguuucugacccugaauua

SEQ ID NO: 668763 - RNA, 19 nt, Artificial Sequence
  Description of Artificial Sequence: Synthetic oligonucleotide
  Antisense strand to SEQ ID NO: 668762
uaauucagggucagaaaca

SEQ ID NO: 668764 - RNA, 19 nt, Artificial Sequence
  Description of Artificial Sequence: Synthetic oligonucleotide
  Sense strand starting at position 3490 of SEQ ID NO: 585801
guuucugacccugaauuau

SEQ ID NO: 668765 - RNA, 19 nt, Artificial Sequence
  Description of Artificial Sequence: Synthetic oligonucleotide
  Antisense strand to SEQ ID NO: 668764
auaauucagggucagaaac

SEQ ID NO: 668766 - RNA, 19 nt, Artificial Sequence
  Description of Artificial Sequence: Synthetic oligonucleotide
  Sense strand starting at position 3589 of SEQ ID NO: 585801
uugguuugacuugguagaa

SEQ ID NO: 668767 - RNA, 19 nt, Artificial Sequence
  Description of Artificial Sequence: Synthetic oligonucleotide
  Antisense strand to SEQ ID NO: 668766
uucuaccaagucaaaccaa

SEQ ID NO: 668768 - RNA, 19 nt, Artificial Sequence
  Description of Artificial Sequence: Synthetic oligonucleotide
  Sense strand starting at position 3590 of SEQ ID NO: 585801
ugguuugacuugguagaaa

SEQ ID NO: 668769 - RNA, 19 nt, Artificial Sequence
  Description of Artificial Sequence: Synthetic oligonucleotide
  Antisense strand to SEQ ID NO: 668768
uuucuaccaagucaaacca

SEQ ID NO: 668770 - RNA, 19 nt, Artificial Sequence
  Description of Artificial Sequence: Synthetic oligonucleotide
  Sense strand starting at position 20 of SEQ ID NO: 585802
agaaaucaauugccaguuu

SEQ ID NO: 668771 - RNA, 19 nt, Artificial Sequence
  Description of Artificial Sequence: Synthetic oligonucleotide
  Antisense strand to SEQ ID NO: 668770
aaacuggcaauugauuucu

SEQ ID NO: 668772 - RNA, 19 nt, Artificial Sequence
  Description of Artificial Sequence: Synthetic oligonucleotide
  Sense strand starting at position 152 of SEQ ID NO: 585802
acaguacaccugcgagaaa

SEQ ID NO: 668773 - RNA, 19 nt, Artificial Sequence
  Description of Artificial Sequence: Synthetic oligonucleotide
  Antisense strand to SEQ ID NO: 668772
uuucucgcagguguacugu

SEQ ID NO: 668774 - RNA, 19 nt, Artificial Sequence
  Description of Artificial Sequence: Synthetic oligonucleotide
  Sense strand starting at position 155 of SEQ ID NO: 585802
guacaccugcgagaaaguu

SEQ ID NO: 668775 - RNA, 19 nt, Artificial Sequence
  Description of Artificial Sequence: Synthetic oligonucleotide
  Antisense strand to SEQ ID NO: 668774
aacuuucucgcagguguac

SEQ ID NO: 668776 - RNA, 19 nt, Artificial Sequence
  Description of Artificial Sequence: Synthetic oligonucleotide
  Sense strand starting at position 208 of SEQ ID NO: 585802
guaagaaugccacauggua

SEQ ID NO: 668777 - RNA, 19 nt, Artificial Sequence
  Description of Artificial Sequence: Synthetic oligonucleotide
  Antisense strand to SEQ ID NO: 668776
uaccauguggcauucuuac

SEQ ID NO: 668778 - RNA, 19 nt, Artificial Sequence
  Description of Artificial Sequence: Synthetic oligonucleotide
  Sense strand starting at position 374 of SEQ ID NO: 585802
agcgcugagcaagaacaau

SEQ ID NO: 668779 - RNA, 19 nt, Artificial Sequence
  Description of Artificial Sequence: Synthetic oligonucleotide
  Antisense strand to SEQ ID NO: 668778
auuguucuugcucagcgcu

SEQ ID NO: 668780 - RNA, 19 nt, Artificial Sequence
  Description of Artificial Sequence: Synthetic oligonucleotide
  Sense strand starting at position 462 of SEQ ID NO: 585802
agugaaugaggagguuaau

SEQ ID NO: 668781 - RNA, 19 nt, Artificial Sequence
  Description of Artificial Sequence: Synthetic oligonucleotide
  Antisense strand to SEQ ID NO: 668780
auuaaccuccucauucacu

SEQ ID NO: 668782 - RNA, 19 nt, Artificial Sequence
  Description of Artificial Sequence: Synthetic oligonucleotide
  Sense strand starting at position 473 of SEQ ID NO: 585802
agguuaaugguaggagaug

SEQ ID NO: 668783 - RNA, 19 nt, Artificial Sequence
  Description of Artificial Sequence: Synthetic oligonucleotide
  Antisense strand to SEQ ID NO: 668782
caucuccuaccauuaaccu

SEQ ID NO: 668784 - RNA, 19 nt, Artificial Sequence
  Description of Artificial Sequence: Synthetic oligonucleotide
  Sense strand starting at position 613 of SEQ ID NO: 585802
ggacaagauugagaaccaa

SEQ ID NO: 668785 - RNA, 19 nt, Artificial Sequence
  Description of Artificial Sequence: Synthetic oligonucleotide
  Antisense strand to SEQ ID NO: 668784
uugguucucaaucuugucc

SEQ ID NO: 668786 - RNA, 19 nt, Artificial Sequence
  Description of Artificial Sequence: Synthetic oligonucleotide
  Sense strand starting at position 664 of SEQ ID NO: 585802
acaaguguugaugguggau

SEQ ID NO: 668787 - RNA, 19 nt, Artificial Sequence
  Description of Artificial Sequence: Synthetic oligonucleotide
  Antisense strand to SEQ ID NO: 668786
auccaccaucaacacuugu

SEQ ID NO: 668788 - RNA, 19 nt, Artificial Sequence
  Description of Artificial Sequence: Synthetic oligonucleotide
  Sense strand starting at position 806 of SEQ ID NO: 585802
gacuuacggcuugagcaaa

SEQ ID NO: 668789 - RNA, 19 nt, Artificial Sequence
  Description of Artificial Sequence: Synthetic oligonucleotide
  Antisense strand to SEQ ID NO: 668788
uuugcucaagccguaaguc

SEQ ID NO: 668790 - RNA, 19 nt, Artificial Sequence
  Description of Artificial Sequence: Synthetic oligonucleotide
  Sense strand starting at position 948 of SEQ ID NO: 585802
ggaagauugacagguaagu

SEQ ID NO: 668791 - RNA, 19 nt, Artificial Sequence
  Description of Artificial Sequence: Synthetic oligonucleotide
  Antisense strand to SEQ ID NO: 668790
acuuaccugucaaucuucc

SEQ ID NO: 668792 - RNA, 19 nt, Artificial Sequence
  Description of Artificial Sequence: Synthetic oligonucleotide
  Sense strand starting at position 976 of SEQ ID NO: 585802
gugaguccauagcuaagaa

SEQ ID NO: 668793 - RNA, 19 nt, Artificial Sequence
  Description of Artificial Sequence: Synthetic oligonucleotide
  Antisense strand to SEQ ID NO: 668792
uucuuagcuauggacucac

SEQ ID NO: 668794 - RNA, 19 nt, Artificial Sequence
  Description of Artificial Sequence: Synthetic oligonucleotide
  Sense strand starting at position 999 of SEQ ID NO: 585802
agggccuuuguagaaauau

SEQ ID NO: 668795 - RNA, 19 nt, Artificial Sequence
  Description of Artificial Sequence: Synthetic oligonucleotide
  Antisense strand to SEQ ID NO: 668794
auauuucuacaaaggcccu

SEQ ID NO: 668796 - RNA, 19 nt, Artificial Sequence
  Description of Artificial Sequence: Synthetic oligonucleotide
  Sense strand starting at position 1013 of SEQ ID NO: 585802
aauauaaaugugugaguca

SEQ ID NO: 668797 - RNA, 19 nt, Artificial Sequence
  Description of Artificial Sequence: Synthetic oligonucleotide
  Antisense strand to SEQ ID NO: 668796
ugacucacacauuuauauu

SEQ ID NO: 668798 - RNA, 19 nt, Artificial Sequence
  Description of Artificial Sequence: Synthetic oligonucleotide
  Sense strand starting at position 1016 of SEQ ID NO: 585802
auaaaugugugagucauca

SEQ ID NO: 668799 - RNA, 19 nt, Artificial Sequence
  Description of Artificial Sequence: Synthetic oligonucleotide
  Antisense strand to SEQ ID NO: 668798
ugaugacucacacauuuau

SEQ ID NO: 668800 - RNA, 19 nt, Artificial Sequence
  Description of Artificial Sequence: Synthetic oligonucleotide
  Sense strand starting at position 1027 of SEQ ID NO: 585802
agucaucagccuuaucuau

SEQ ID NO: 668801 - RNA, 19 nt, Artificial Sequence
  Description of Artificial Sequence: Synthetic oligonucleotide
  Antisense strand to SEQ ID NO: 668800
auagauaaggcugaugacu

SEQ ID NO: 668802 - RNA, 19 nt, Artificial Sequence
  Description of Artificial Sequence: Synthetic oligonucleotide
  Sense strand starting at position 1186 of SEQ ID NO: 585802
uaguuaucaguccacugua

SEQ ID NO: 668803 - RNA, 19 nt, Artificial Sequence
  Description of Artificial Sequence: Synthetic oligonucleotide
  Antisense strand to SEQ ID NO: 668802
uacaguggacugauaacua

SEQ ID NO: 668804 - RNA, 19 nt, Artificial Sequence
  Description of Artificial Sequence: Synthetic oligonucleotide
  Sense strand starting at position 1189 of SEQ ID NO: 585802
uuaucaguccacuguagaa

SEQ ID NO: 668805 - RNA, 19 nt, Artificial Sequence
  Description of Artificial Sequence: Synthetic oligonucleotide
  Antisense strand to SEQ ID NO: 668804
uucuacaguggacugauaa

SEQ ID NO: 668806 - RNA, 19 nt, Artificial Sequence
  Description of Artificial Sequence: Synthetic oligonucleotide
  Sense strand starting at position 1408 of SEQ ID NO: 585802
ucccauaaauucgcuggaa

SEQ ID NO: 668807 - RNA, 19 nt, Artificial Sequence
  Description of Artificial Sequence: Synthetic oligonucleotide
  Antisense strand to SEQ ID NO: 668806
uuccagcgaauuuauggga

SEQ ID NO: 668808 - RNA, 19 nt, Artificial Sequence
  Description of Artificial Sequence: Synthetic oligonucleotide
  Sense strand starting at position 1409 of SEQ ID NO: 585802
cccauaaauucgcuggaac

SEQ ID NO: 668809 - RNA, 19 nt, Artificial Sequence
  Description of Artificial Sequence: Synthetic oligonucleotide
  Antisense strand to SEQ ID NO: 668808
guuccagcgaauuuauggg

SEQ ID NO: 668810 - RNA, 19 nt, Artificial Sequence
  Description of Artificial Sequence: Synthetic oligonucleotide
  Sense strand starting at position 1412 of SEQ ID NO: 585802
auaaauucgcuggaaccaa

SEQ ID NO: 668811 - RNA, 19 nt, Artificial Sequence
  Description of Artificial Sequence: Synthetic oligonucleotide
  Antisense strand to SEQ ID NO: 668810
uugguuccagcgaauuuau

SEQ ID NO: 668812 - RNA, 19 nt, Artificial Sequence
  Description of Artificial Sequence: Synthetic oligonucleotide
  Sense strand starting at position 1500 of SEQ ID NO: 585802
uggcauuuauugucucacu

SEQ ID NO: 668813 - RNA, 19 nt, Artificial Sequence
  Description of Artificial Sequence: Synthetic oligonucleotide
  Antisense strand to SEQ ID NO: 668812
agugagacaauaaaugcca

SEQ ID NO: 668814 - RNA, 19 nt, Artificial Sequence
  Description of Artificial Sequence: Synthetic oligonucleotide
  Sense strand starting at position 1515 of SEQ ID NO: 585802
cacuguggauuugaucaau

SEQ ID NO: 668815 - RNA, 19 nt, Artificial Sequence
  Description of Artificial Sequence: Synthetic oligonucleotide
  Antisense strand to SEQ ID NO: 668814
auugaucaaauccacagug

SEQ ID NO: 668816 - RNA, 19 nt, Artificial Sequence
  Description of Artificial Sequence: Synthetic oligonucleotide
  Sense strand starting at position 1985 of SEQ ID NO: 585802
cuaauucugggagguaaau

SEQ ID NO: 668817 - RNA, 19 nt, Artificial Sequence
  Description of Artificial Sequence: Synthetic oligonucleotide
  Antisense strand to SEQ ID NO: 668816
auuuaccucccagaauuag

SEQ ID NO: 668818 - RNA, 19 nt, Artificial Sequence
  Description of Artificial Sequence: Synthetic oligonucleotide
  Sense strand starting at position 2028 of SEQ ID NO: 585802
auguuaccagcuuggagaa

SEQ ID NO: 668819 - RNA, 19 nt, Artificial Sequence
  Description of Artificial Sequence: Synthetic oligonucleotide
  Antisense strand to SEQ ID NO: 668818
uucuccaagcugguaacau

SEQ ID NO: 668820 - RNA, 19 nt, Artificial Sequence
  Description of Artificial Sequence: Synthetic oligonucleotide
  Sense strand starting at position 2029 of SEQ ID NO: 585802
uguuaccagcuuggagaau

SEQ ID NO: 668821 - RNA, 19 nt, Artificial Sequence
  Description of Artificial Sequence: Synthetic oligonucleotide
  Antisense strand to SEQ ID NO: 668820
auucuccaagcugguaaca

SEQ ID NO: 668822 - RNA, 19 nt, Artificial Sequence
  Description of Artificial Sequence: Synthetic oligonucleotide
  Sense strand starting at position 2373 of SEQ ID NO: 585802
uuuggucgacuugagugau

SEQ ID NO: 668823 - RNA, 19 nt, Artificial Sequence
  Description of Artificial Sequence: Synthetic oligonucleotide
  Antisense strand to SEQ ID NO: 668822
aucacucaagucgaccaaa

SEQ ID NO: 668824 - RNA, 19 nt, Artificial Sequence
  Description of Artificial Sequence: Synthetic oligonucleotide
  Sense strand starting at position 2421 of SEQ ID NO: 585802
cacaaaggccauugaguuu

SEQ ID NO: 668825 - RNA, 19 nt, Artificial Sequence
  Description of Artificial Sequence: Synthetic oligonucleotide
  Antisense strand to SEQ ID NO: 668824
aaacucaauggccuuugug

SEQ ID NO: 668826 - RNA, 19 nt, Artificial Sequence
  Description of Artificial Sequence: Synthetic oligonucleotide
  Sense strand starting at position 2640 of SEQ ID NO: 585802
gacagauuccaccacucgu

SEQ ID NO: 668827 - RNA, 19 nt, Artificial Sequence
  Description of Artificial Sequence: Synthetic oligonucleotide
  Antisense strand to SEQ ID NO: 668826
acgagugguggaaucuguc

SEQ ID NO: 668828 - RNA, 19 nt, Artificial Sequence
  Description of Artificial Sequence: Synthetic oligonucleotide
  Sense strand starting at position 2774 of SEQ ID NO: 585802
uguugauaugccuaagacu

SEQ ID NO: 668829 - RNA, 19 nt, Artificial Sequence
  Description of Artificial Sequence: Synthetic oligonucleotide
  Antisense strand to SEQ ID NO: 668828
agucuuaggcauaucaaca

SEQ ID NO: 668830 - RNA, 19 nt, Artificial Sequence
  Description of Artificial Sequence: Synthetic oligonucleotide
  Sense strand starting at position 2785 of SEQ ID NO: 585802
cuaagacucuguccuugaa

SEQ ID NO: 668831 - RNA, 19 nt, Artificial Sequence
  Description of Artificial Sequence: Synthetic oligonucleotide
  Antisense strand to SEQ ID NO: 668830
uucaaggacagagucuuag

SEQ ID NO: 668832 - RNA, 19 nt, Artificial Sequence
  Description of Artificial Sequence: Synthetic oligonucleotide
  Sense strand starting at position 2788 of SEQ ID NO: 585802
agacucuguccuugaacuu

SEQ ID NO: 668833 - RNA, 19 nt, Artificial Sequence
  Description of Artificial Sequence: Synthetic oligonucleotide
  Antisense strand to SEQ ID NO: 668832
aaguucaaggacagagucu

SEQ ID NO: 668834 - RNA, 19 nt, Artificial Sequence
  Description of Artificial Sequence: Synthetic oligonucleotide
  Sense strand starting at position 2904 of SEQ ID NO: 585802
auccaucucuccuugagua

SEQ ID NO: 668835 - RNA, 19 nt, Artificial Sequence
  Description of Artificial Sequence: Synthetic oligonucleotide
  Antisense strand to SEQ ID NO: 668834
uacucaaggagagauggau

SEQ ID NO: 668836 - RNA, 19 nt, Artificial Sequence
  Description of Artificial Sequence: Synthetic oligonucleotide
  Sense strand starting at position 2916 of SEQ ID NO: 585802
uugaguacccauuagguau

SEQ ID NO: 668837 - RNA, 19 nt, Artificial Sequence
  Description of Artificial Sequence: Synthetic oligonucleotide
  Antisense strand to SEQ ID NO: 668836
auaccuaauggguacucaa

SEQ ID NO: 668838 - RNA, 19 nt, Artificial Sequence
  Description of Artificial Sequence: Synthetic oligonucleotide
  Sense strand starting at position 3087 of SEQ ID NO: 585802
ccaacaguauguucuauca

SEQ ID NO: 668839 - RNA, 19 nt, Artificial Sequence
  Description of Artificial Sequence: Synthetic oligonucleotide
  Antisense strand to SEQ ID NO: 668838
ugauagaacauacuguugg

SEQ ID NO: 668840 - RNA, 19 nt, Artificial Sequence
  Description of Artificial Sequence: Synthetic oligonucleotide
  Sense strand starting at position 3161 of SEQ ID NO: 585802
aucuaucaccaggguaaau

SEQ ID NO: 668841 - RNA, 19 nt, Artificial Sequence
  Description of Artificial Sequence: Synthetic oligonucleotide
  Antisense strand to SEQ ID NO: 668840
auuuacccuggugauagau

SEQ ID NO: 668842 - RNA, 19 nt, Artificial Sequence
  Description of Artificial Sequence: Synthetic oligonucleotide
  Sense strand starting at position 3260 of SEQ ID NO: 585802
uguacauaugaucauguua

SEQ ID NO: 668843 - RNA, 19 nt, Artificial Sequence
  Description of Artificial Sequence: Synthetic oligonucleotide
  Antisense strand to SEQ ID NO: 668842
uaacaugaucauauguaca

SEQ ID NO: 668844 - RNA, 19 nt, Artificial Sequence
  Description of Artificial Sequence: Synthetic oligonucleotide
  Sense strand starting at position 3528 of SEQ ID NO: 585802
uuaccaauguuguuagaaa

SEQ ID NO: 668845 - RNA, 19 nt, Artificial Sequence
  Description of Artificial Sequence: Synthetic oligonucleotide
  Antisense strand to SEQ ID NO: 668844
uuucuaacaacauugguaa

SEQ ID NO: 668846 - RNA, 19 nt, Artificial Sequence
  Description of Artificial Sequence: Synthetic oligonucleotide
  Sense strand starting at position 3580 of SEQ ID NO: 585802
ccucuaauauggucuugau

SEQ ID NO: 668847 - RNA, 19 nt, Artificial Sequence
  Description of Artificial Sequence: Synthetic oligonucleotide
  Antisense strand to SEQ ID NO: 668846
aucaagaccauauuagagg

SEQ ID NO: 668848 - RNA, 19 nt, Artificial Sequence
  Description of Artificial Sequence: Synthetic oligonucleotide
  Sense strand starting at position 3622 of SEQ ID NO: 585802
gcauauuugugucuuaguu

SEQ ID NO: 668849 - RNA, 19 nt, Artificial Sequence
  Description of Artificial Sequence: Synthetic oligonucleotide
  Antisense strand to SEQ ID NO: 668848
aacuaagacacaaauaugc

SEQ ID NO: 668850 - RNA, 19 nt, Artificial Sequence
  Description of Artificial Sequence: Synthetic oligonucleotide
  Sense strand starting at position 197 of SEQ ID NO: 585803
gggccaguaccauaagauc

SEQ ID NO: 668851 - RNA, 19 nt, Artificial Sequence
  Description of Artificial Sequence: Synthetic oligonucleotide
  Antisense strand to SEQ ID NO: 668850
gaucuuaugguacuggccc

SEQ ID NO: 668852 - RNA, 19 nt, Artificial Sequence
  Description of Artificial Sequence: Synthetic oligonucleotide
  Sense strand starting at position 475 of SEQ ID NO: 585803
uguuuaacauuugugcuaa

SEQ ID NO: 668853 - RNA, 19 nt, Artificial Sequence
  Description of Artificial Sequence: Synthetic oligonucleotide
  Antisense strand to SEQ ID NO: 668852
uuagcacaaauguuaaaca

SEQ ID NO: 668854 - RNA, 19 nt, Artificial Sequence
  Description of Artificial Sequence: Synthetic oligonucleotide
  Sense strand starting at position 532 of SEQ ID NO: 585803
auguaauaaucucuggcaa

SEQ ID NO: 668855 - RNA, 19 nt, Artificial Sequence
  Description of Artificial Sequence: Synthetic oligonucleotide
  Antisense strand to SEQ ID NO: 668854
uugccagagauuauuacau

SEQ ID NO: 668856 - RNA, 19 nt, Artificial Sequence
  Description of Artificial Sequence: Synthetic oligonucleotide
  Sense strand starting at position 533 of SEQ ID NO: 585803
uguaauaaucucuggcaaa

SEQ ID NO: 668857 - RNA, 19 nt, Artificial Sequence
  Description of Artificial Sequence: Synthetic oligonucleotide
  Antisense strand to SEQ ID NO: 668856
uuugccagagauuauuaca

SEQ ID NO: 668858 - RNA, 19 nt, Artificial Sequence
  Description of Artificial Sequence: Synthetic oligonucleotide
  Sense strand starting at position 698 of SEQ ID NO: 585803
acaguuuguguugacuaaa

SEQ ID NO: 668859 - RNA, 19 nt, Artificial Sequence
  Description of Artificial Sequence: Synthetic oligonucleotide
  Antisense strand to SEQ ID NO: 668858
uuuagucaacacaaacugu

SEQ ID NO: 668860 - RNA, 19 nt, Artificial Sequence
  Description of Artificial Sequence: Synthetic oligonucleotide
  Sense strand starting at position 810 of SEQ ID NO: 585803
acaauucuggguuagccaa

SEQ ID NO: 668861 - RNA, 19 nt, Artificial Sequence
  Description of Artificial Sequence: Synthetic oligonucleotide
  Antisense strand to SEQ ID NO: 668860
uuggcuaacccagaauugu

SEQ ID NO: 668862 - RNA, 19 nt, Artificial Sequence
  Description of Artificial Sequence: Synthetic oligonucleotide
  Sense strand starting at position 857 of SEQ ID NO: 585803
acgcacagaucuuugaaac

SEQ ID NO: 668863 - RNA, 19 nt, Artificial Sequence
  Description of Artificial Sequence: Synthetic oligonucleotide
  Antisense strand to SEQ ID NO: 668862
guuucaaagaucugugcgu

SEQ ID NO: 668864 - RNA, 19 nt, Artificial Sequence
  Description of Artificial Sequence: Synthetic oligonucleotide
  Sense strand starting at position 858 of SEQ ID NO: 585803
cgcacagaucuuugaaacu

SEQ ID NO: 668865 - RNA, 19 nt, Artificial Sequence
  Description of Artificial Sequence: Synthetic oligonucleotide
  Antisense strand to SEQ ID NO: 668864
aguuucaaagaucugugcg

SEQ ID NO: 668866 - RNA, 19 nt, Artificial Sequence
  Description of Artificial Sequence: Synthetic oligonucleotide
  Sense strand starting at position 892 of SEQ ID NO: 585803
acugauuuguucuuuaguu

SEQ ID NO: 668867 - RNA, 19 nt, Artificial Sequence
  Description of Artificial Sequence: Synthetic oligonucleotide
  Antisense strand to SEQ ID NO: 668866
aacuaaagaacaaaucagu

SEQ ID NO: 668868 - RNA, 19 nt, Artificial Sequence
  Description of Artificial Sequence: Synthetic oligonucleotide
  Sense strand starting at position 893 of SEQ ID NO: 585803
cugauuuguucuuuaguuu

SEQ ID NO: 668869 - RNA, 19 nt, Artificial Sequence
  Description of Artificial Sequence: Synthetic oligonucleotide
  Antisense strand to SEQ ID NO: 668868
aaacuaaagaacaaaucag

SEQ ID NO: 668870 - RNA, 19 nt, Artificial Sequence
  Description of Artificial Sequence: Synthetic oligonucleotide
  Sense strand starting at position 1018 of SEQ ID NO: 585803
uuccaagaccuuuggcaaa

SEQ ID NO: 668871 - RNA, 19 nt, Artificial Sequence
  Description of Artificial Sequence: Synthetic oligonucleotide
  Antisense strand to SEQ ID NO: 668870
uuugccaaaggucuuggaa

SEQ ID NO: 668872 - RNA, 19 nt, Artificial Sequence
  Description of Artificial Sequence: Synthetic oligonucleotide
  Sense strand starting at position 1020 of SEQ ID NO: 585803
ccaagaccuuuggcaaauu

SEQ ID NO: 668873 - RNA, 19 nt, Artificial Sequence
  Description of Artificial Sequence: Synthetic oligonucleotide
  Antisense strand to SEQ ID NO: 668872
aauuugccaaaggucuugg

SEQ ID NO: 668874 - RNA, 19 nt, Artificial Sequence
  Description of Artificial Sequence: Synthetic oligonucleotide
  Sense strand starting at position 1029 of SEQ ID NO: 585803
uuggcaaauuacuuuagaa

SEQ ID NO: 668875 - RNA, 19 nt, Artificial Sequence
  Description of Artificial Sequence: Synthetic oligonucleotide
  Antisense strand to SEQ ID NO: 668874
uucuaaaguaauuugccaa

SEQ ID NO: 668876 - RNA, 19 nt, Artificial Sequence
  Description of Artificial Sequence: Synthetic oligonucleotide
  Sense strand starting at position 1146 of SEQ ID NO: 585803
gcacaaugucaagauauca

SEQ ID NO: 668877 - RNA, 19 nt, Artificial Sequence
  Description of Artificial Sequence: Synthetic oligonucleotide
  Antisense strand to SEQ ID NO: 668876
ugauaucuugacauugugc

SEQ ID NO: 668878 - RNA, 19 nt, Artificial Sequence
  Description of Artificial Sequence: Synthetic oligonucleotide
  Sense strand starting at position 1156 of SEQ ID NO: 585803
aagauaucagcuggguuau

SEQ ID NO: 668879 - RNA, 19 nt, Artificial Sequence
  Description of Artificial Sequence: Synthetic oligonucleotide
  Antisense strand to SEQ ID NO: 668878
auaacccagcugauaucuu

SEQ ID NO: 668880 - RNA, 19 nt, Artificial Sequence
  Description of Artificial Sequence: Synthetic oligonucleotide
  Sense strand starting at position 1157 of SEQ ID NO: 585803
agauaucagcuggguuaua

SEQ ID NO: 668881 - RNA, 19 nt, Artificial Sequence
  Description of Artificial Sequence: Synthetic oligonucleotide
  Antisense strand to SEQ ID NO: 668880
uauaacccagcugauaucu

SEQ ID NO: 668882 - RNA, 19 nt, Artificial Sequence
  Description of Artificial Sequence: Synthetic oligonucleotide
  Sense strand starting at position 1393 of SEQ ID NO: 585803
ugaugauucucucccaguu

SEQ ID NO: 668883 - RNA, 19 nt, Artificial Sequence
  Description of Artificial Sequence: Synthetic oligonucleotide
  Antisense strand to SEQ ID NO: 668882
aacugggagagaaucauca

SEQ ID NO: 668884 - RNA, 19 nt, Artificial Sequence
  Description of Artificial Sequence: Synthetic oligonucleotide
  Sense strand starting at position 2360 of SEQ ID NO: 585803
gcuuguuagcggucaguug

SEQ ID NO: 668885 - RNA, 19 nt, Artificial Sequence
  Description of Artificial Sequence: Synthetic oligonucleotide
  Antisense strand to SEQ ID NO: 668884
caacugaccgcuaacaagc

SEQ ID NO: 668886 - RNA, 19 nt, Artificial Sequence
  Description of Artificial Sequence: Synthetic oligonucleotide
  Sense strand starting at position 2423 of SEQ ID NO: 585803
cggcauauuuaccucguga

SEQ ID NO: 668887 - RNA, 19 nt, Artificial Sequence
  Description of Artificial Sequence: Synthetic oligonucleotide
  Antisense strand to SEQ ID NO: 668886
ucacgagguaaauaugccg

SEQ ID NO: 668888 - RNA, 19 nt, Artificial Sequence
  Description of Artificial Sequence: Synthetic oligonucleotide
  Sense strand starting at position 2425 of SEQ ID NO: 585803
gcauauuuaccucgugacu

SEQ ID NO: 668889 - RNA, 19 nt, Artificial Sequence
  Description of Artificial Sequence: Synthetic oligonucleotide
  Antisense strand to SEQ ID NO: 668888
agucacgagguaaauaugc

SEQ ID NO: 668890 - RNA, 19 nt, Artificial Sequence
  Description of Artificial Sequence: Synthetic oligonucleotide
  Sense strand starting at position 2890 of SEQ ID NO: 585803
uauggaauccucugaugua

SEQ ID NO: 668891 - RNA, 19 nt, Artificial Sequence
  Description of Artificial Sequence: Synthetic oligonucleotide
  Antisense strand to SEQ ID NO: 668890
uacaucagaggauuccaua

SEQ ID NO: 668892 - RNA, 19 nt, Artificial Sequence
  Description of Artificial Sequence: Synthetic oligonucleotide
  Sense strand starting at position 2906 of SEQ ID NO: 585803
guaugugugcaugcuuuau

SEQ ID NO: 668893 - RNA, 19 nt, Artificial Sequence
  Description of Artificial Sequence: Synthetic oligonucleotide
  Antisense strand to SEQ ID NO: 668892
auaaagcaugcacacauac

SEQ ID NO: 668894 - RNA, 19 nt, Artificial Sequence
  Description of Artificial Sequence: Synthetic oligonucleotide
  Sense strand starting at position 2916 of SEQ ID NO: 585803
augcuuuaucuccacgaua

SEQ ID NO: 668895 - RNA, 19 nt, Artificial Sequence
  Description of Artificial Sequence: Synthetic oligonucleotide
  Antisense strand to SEQ ID NO: 668894
uaucguggagauaaagcau

SEQ ID NO: 668896 - RNA, 19 nt, Artificial Sequence
  Description of Artificial Sequence: Synthetic oligonucleotide
  Sense strand starting at position 2929 of SEQ ID NO: 585803
acgauagaauuuggauaga

SEQ ID NO: 668897 - RNA, 19 nt, Artificial Sequence
  Description of Artificial Sequence: Synthetic oligonucleotide
  Antisense strand to SEQ ID NO: 668896
ucuauccaaauucuaucgu

SEQ ID NO: 668898 - RNA, 19 nt, Artificial Sequence
  Description of Artificial Sequence: Synthetic oligonucleotide
  Sense strand starting at position 3011 of SEQ ID NO: 585803
agaucuggauccgccaaua

SEQ ID NO: 668899 - RNA, 19 nt, Artificial Sequence
  Description of Artificial Sequence: Synthetic oligonucleotide
  Antisense strand to SEQ ID NO: 668898
uauuggcggauccagaucu

SEQ ID NO: 668900 - RNA, 19 nt, Artificial Sequence
  Description of Artificial Sequence: Synthetic oligonucleotide
  Sense strand starting at position 3075 of SEQ ID NO: 585803
gagaguuugguguagacag

SEQ ID NO: 668901 - RNA, 19 nt, Artificial Sequence
  Description of Artificial Sequence: Synthetic oligonucleotide
  Antisense strand to SEQ ID NO: 668900
cugucuacaccaaacucuc

SEQ ID NO: 668902 - RNA, 19 nt, Artificial Sequence
  Description of Artificial Sequence: Synthetic oligonucleotide
  Sense strand starting at position 3141 of SEQ ID NO: 585803
ugagguucacgugagaaca

SEQ ID NO: 668903 - RNA, 19 nt, Artificial Sequence
  Description of Artificial Sequence: Synthetic oligonucleotide
  Antisense strand to SEQ ID NO: 668902
uguucucacgugaaccuca

SEQ ID NO: 668904 - RNA, 19 nt, Artificial Sequence
  Description of Artificial Sequence: Synthetic oligonucleotide
  Sense strand starting at position 3165 of SEQ ID NO: 585803
gaggguccuuuaccuagaa

SEQ ID NO: 668905 - RNA, 19 nt, Artificial Sequence
  Description of Artificial Sequence: Synthetic oligonucleotide
  Antisense strand to SEQ ID NO: 668904
uucuagguaaaggacccuc

SEQ ID NO: 668906 - RNA, 19 nt, Artificial Sequence
  Description of Artificial Sequence: Synthetic oligonucleotide
  Sense strand starting at position 3272 of SEQ ID NO: 585803
guuucugaguuacugaauu

SEQ ID NO: 668907 - RNA, 19 nt, Artificial Sequence
  Description of Artificial Sequence: Synthetic oligonucleotide
  Antisense strand to SEQ ID NO: 668906
aauucaguaacucagaaac

SEQ ID NO: 668908 - RNA, 19 nt, Artificial Sequence
  Description of Artificial Sequence: Synthetic oligonucleotide
  Sense strand starting at position 3280 of SEQ ID NO: 585803
guuacugaauuaccaugua

SEQ ID NO: 668909 - RNA, 19 nt, Artificial Sequence
  Description of Artificial Sequence: Synthetic oligonucleotide
  Antisense strand to SEQ ID NO: 668908
uacaugguaauucaguaac

SEQ ID NO: 668910 - RNA, 19 nt, Artificial Sequence
  Description of Artificial Sequence: Synthetic oligonucleotide
  Sense strand starting at position 3283 of SEQ ID NO: 585803
acugaauuaccauguagau

SEQ ID NO: 668911 - RNA, 19 nt, Artificial Sequence
  Description of Artificial Sequence: Synthetic oligonucleotide
  Antisense strand to SEQ ID NO: 668910
aucuacaugguaauucagu

SEQ ID NO: 668912 - RNA, 19 nt, Artificial Sequence
  Description of Artificial Sequence: Synthetic oligonucleotide
  Sense strand starting at position 3309 of SEQ ID NO: 585803
cucucuaaggguuguagaa

SEQ ID NO: 668913 - RNA, 19 nt, Artificial Sequence
  Description of Artificial Sequence: Synthetic oligonucleotide
  Antisense strand to SEQ ID NO: 668912
uucuacaacccuuagagag

SEQ ID NO: 668914 - RNA, 19 nt, Artificial Sequence
  Description of Artificial Sequence: Synthetic oligonucleotide
  Sense strand starting at position 3441 of SEQ ID NO: 585803
uugucuuuggaugagguua

SEQ ID NO: 668915 - RNA, 19 nt, Artificial Sequence
  Description of Artificial Sequence: Synthetic oligonucleotide
  Antisense strand to SEQ ID NO: 668914
uaaccucauccaaagacaa

SEQ ID NO: 668916 - RNA, 19 nt, Artificial Sequence
  Description of Artificial Sequence: Synthetic oligonucleotide
  Sense strand starting at position 3468 of SEQ ID NO: 585803
aucauugaacucuggguaa

SEQ ID NO: 668917 - RNA, 19 nt, Artificial Sequence
  Description of Artificial Sequence: Synthetic oligonucleotide
  Antisense strand to SEQ ID NO: 668916
uuacccagaguucaaugau

SEQ ID NO: 668918 - RNA, 19 nt, Artificial Sequence
  Description of Artificial Sequence: Synthetic oligonucleotide
  Sense strand starting at position 3470 of SEQ ID NO: 585803
cauugaacucuggguaaag

SEQ ID NO: 668919 - RNA, 19 nt, Artificial Sequence
  Description of Artificial Sequence: Synthetic oligonucleotide
  Antisense strand to SEQ ID NO: 668918
cuuuacccagaguucaaug

SEQ ID NO: 668920 - RNA, 19 nt, Artificial Sequence
  Description of Artificial Sequence: Synthetic oligonucleotide
  Sense strand starting at position 3589 of SEQ ID NO: 585803
agacuucuccagcagagug

SEQ ID NO: 668921 - RNA, 19 nt, Artificial Sequence
  Description of Artificial Sequence: Synthetic oligonucleotide
  Antisense strand to SEQ ID NO: 668920
cacucugcuggagaagucu

SEQ ID NO: 668922 - RNA, 19 nt, Artificial Sequence
  Description of Artificial Sequence: Synthetic oligonucleotide
  Sense strand starting at position 3803 of SEQ ID NO: 585803
ccagaugaccaagguuaua

SEQ ID NO: 668923 - RNA, 19 nt, Artificial Sequence
  Description of Artificial Sequence: Synthetic oligonucleotide
  Antisense strand to SEQ ID NO: 668922
uauaaccuuggucaucugg

SEQ ID NO: 668924 - RNA, 19 nt, Artificial Sequence
  Description of Artificial Sequence: Synthetic oligonucleotide
  Sense strand starting at position 3824 of SEQ ID NO: 585803
uaacuugggccagggaaua

SEQ ID NO: 668925 - RNA, 19 nt, Artificial Sequence
  Description of Artificial Sequence: Synthetic oligonucleotide
  Antisense strand to SEQ ID NO: 668924
uauucccuggcccaaguua

SEQ ID NO: 668926 - RNA, 19 nt, Artificial Sequence
  Description of Artificial Sequence: Synthetic oligonucleotide
  Sense strand starting at position 3835 of SEQ ID NO: 585803
agggaauauaguugcaaca

SEQ ID NO: 668927 - RNA, 19 nt, Artificial Sequence
  Description of Artificial Sequence: Synthetic oligonucleotide
  Antisense strand to SEQ ID NO: 668926
uguugcaacuauauucccu

SEQ ID NO: 668928 - RNA, 19 nt, Artificial Sequence
  Description of Artificial Sequence: Synthetic oligonucleotide
  Sense strand starting at position 3947 of SEQ ID NO: 585803
gugaguucuccauacccuu

SEQ ID NO: 668929 - RNA, 19 nt, Artificial Sequence
  Description of Artificial Sequence: Synthetic oligonucleotide
  Antisense strand to SEQ ID NO: 668928
aaggguauggagaacucac

SEQ ID NO: 668930 - RNA, 19 nt, Artificial Sequence
  Description of Artificial Sequence: Synthetic oligonucleotide
  Sense strand starting at position 107 of SEQ ID NO: 585804
cagacuacaugguaagaaa

SEQ ID NO: 668931 - RNA, 19 nt, Artificial Sequence
  Description of Artificial Sequence: Synthetic oligonucleotide
  Antisense strand to SEQ ID NO: 668930
uuucuuaccauguagucug

SEQ ID NO: 668932 - RNA, 19 nt, Artificial Sequence
  Description of Artificial Sequence: Synthetic oligonucleotide
  Sense strand starting at position 228 of SEQ ID NO: 585804
uauucuauuggcuggaguu

SEQ ID NO: 668933 - RNA, 19 nt, Artificial Sequence
  Description of Artificial Sequence: Synthetic oligonucleotide
  Antisense strand to SEQ ID NO: 668932
aacuccagccaauagaaua

SEQ ID NO: 668934 - RNA, 19 nt, Artificial Sequence
  Description of Artificial Sequence: Synthetic oligonucleotide
  Sense strand starting at position 238 of SEQ ID NO: 585804
gcuggaguucuauacacca

SEQ ID NO: 668935 - RNA, 19 nt, Artificial Sequence
  Description of Artificial Sequence: Synthetic oligonucleotide
  Antisense strand to SEQ ID NO: 668934
ugguguauagaacuccagc

SEQ ID NO: 668936 - RNA, 19 nt, Artificial Sequence
  Description of Artificial Sequence: Synthetic oligonucleotide
  Sense strand starting at position 492 of SEQ ID NO: 585804
gcacuuccugcaggaucau

SEQ ID NO: 668937 - RNA, 19 nt, Artificial Sequence
  Description of Artificial Sequence: Synthetic oligonucleotide
  Antisense strand to SEQ ID NO: 668936
augauccugcaggaagugc

SEQ ID NO: 668938 - RNA, 19 nt, Artificial Sequence
  Description of Artificial Sequence: Synthetic oligonucleotide
  Sense strand starting at position 549 of SEQ ID NO: 585804
ugagacuacugauuaaagu

SEQ ID NO: 668939 - RNA, 19 nt, Artificial Sequence
  Description of Artificial Sequence: Synthetic oligonucleotide
  Antisense strand to SEQ ID NO: 668938
acuuuaaucaguagucuca

SEQ ID NO: 668940 - RNA, 19 nt, Artificial Sequence
  Description of Artificial Sequence: Synthetic oligonucleotide
  Sense strand starting at position 1041 of SEQ ID NO: 585804
aaagauuucuaaggcagua

SEQ ID NO: 668941 - RNA, 19 nt, Artificial Sequence
  Description of Artificial Sequence: Synthetic oligonucleotide
  Antisense strand to SEQ ID NO: 668940
uacugccuuagaaaucuuu

SEQ ID NO: 668942 - RNA, 19 nt, Artificial Sequence
  Description of Artificial Sequence: Synthetic oligonucleotide
  Sense strand starting at position 1046 of SEQ ID NO: 585804
uuucuaaggcaguauugaa

SEQ ID NO: 668943 - RNA, 19 nt, Artificial Sequence
  Description of Artificial Sequence: Synthetic oligonucleotide
  Antisense strand to SEQ ID NO: 668942
uucaauacugccuuagaaa

SEQ ID NO: 668944 - RNA, 19 nt, Artificial Sequence
  Description of Artificial Sequence: Synthetic oligonucleotide
  Sense strand starting at position 1064 of SEQ ID NO: 585804
agucaaaugaaguguaagu

SEQ ID NO: 668945 - RNA, 19 nt, Artificial Sequence
  Description of Artificial Sequence: Synthetic oligonucleotide
  Antisense strand to SEQ ID NO: 668944
acuuacacuucauuugacu

SEQ ID NO: 668946 - RNA, 19 nt, Artificial Sequence
  Description of Artificial Sequence: Synthetic oligonucleotide
  Sense strand starting at position 1121 of SEQ ID NO: 585804
uauuuacagcgguaugcuu

SEQ ID NO: 668947 - RNA, 19 nt, Artificial Sequence
  Description of Artificial Sequence: Synthetic oligonucleotide
  Antisense strand to SEQ ID NO: 668946
aagcauaccgcuguaaaua

SEQ ID NO: 668948 - RNA, 19 nt, Artificial Sequence
  Description of Artificial Sequence: Synthetic oligonucleotide
  Sense strand starting at position 1234 of SEQ ID NO: 585804
gggcuaaauugucauuuaa

SEQ ID NO: 668949 - RNA, 19 nt, Artificial Sequence
  Description of Artificial Sequence: Synthetic oligonucleotide
  Antisense strand to SEQ ID NO: 668948
uuaaaugacaauuuagccc

SEQ ID NO: 668950 - RNA, 19 nt, Artificial Sequence
  Description of Artificial Sequence: Synthetic oligonucleotide
  Sense strand starting at position 1258 of SEQ ID NO: 585804
cgaaaucaauuacugaguu

SEQ ID NO: 668951 - RNA, 19 nt, Artificial Sequence
  Description of Artificial Sequence: Synthetic oligonucleotide
  Antisense strand to SEQ ID NO: 668950
aacucaguaauugauuucg

SEQ ID NO: 668952 - RNA, 19 nt, Artificial Sequence
  Description of Artificial Sequence: Synthetic oligonucleotide
  Sense strand starting at position 1424 of SEQ ID NO: 585804
ucuuacgaaucuuuguaaa

SEQ ID NO: 668953 - RNA, 19 nt, Artificial Sequence
  Description of Artificial Sequence: Synthetic oligonucleotide
  Antisense strand to SEQ ID NO: 668952
uuuacaaagauucguaaga

SEQ ID NO: 668954 - RNA, 19 nt, Artificial Sequence
  Description of Artificial Sequence: Synthetic oligonucleotide
  Sense strand starting at position 1443 of SEQ ID NO: 585804
auguuuguaguagaugaga

SEQ ID NO: 668955 - RNA, 19 nt, Artificial Sequence
  Description of Artificial Sequence: Synthetic oligonucleotide
  Antisense strand to SEQ ID NO: 668954
ucucaucuacuacaaacau

SEQ ID NO: 668956 - RNA, 19 nt, Artificial Sequence
  Description of Artificial Sequence: Synthetic oligonucleotide
  Sense strand starting at position 1445 of SEQ ID NO: 585804
guuuguaguagaugagaaa

SEQ ID NO: 668957 - RNA, 19 nt, Artificial Sequence
  Description of Artificial Sequence: Synthetic oligonucleotide
  Antisense strand to SEQ ID NO: 668956
uuucucaucuacuacaaac

SEQ ID NO: 668958 - RNA, 19 nt, Artificial Sequence
  Description of Artificial Sequence: Synthetic oligonucleotide
  Sense strand starting at position 1501 of SEQ ID NO: 585804
guacuugaaagguaacguu

SEQ ID NO: 668959 - RNA, 19 nt, Artificial Sequence
  Description of Artificial Sequence: Synthetic oligonucleotide
  Antisense strand to SEQ ID NO: 668958
aacguuaccuuucaaguac

SEQ ID NO: 668960 - RNA, 19 nt, Artificial Sequence
  Description of Artificial Sequence: Synthetic oligonucleotide
  Sense strand starting at position 1527 of SEQ ID NO: 585804
ugccuaauggcauacuuau

SEQ ID NO: 668961 - RNA, 19 nt, Artificial Sequence
  Description of Artificial Sequence: Synthetic oligonucleotide
  Antisense strand to SEQ ID NO: 668960
auaaguaugccauuaggca

SEQ ID NO: 668962 - RNA, 19 nt, Artificial Sequence
  Description of Artificial Sequence: Synthetic oligonucleotide
  Sense strand starting at position 1576 of SEQ ID NO: 585804
agcagagguauagguuaga

SEQ ID NO: 668963 - RNA, 19 nt, Artificial Sequence
  Description of Artificial Sequence: Synthetic oligonucleotide
  Antisense strand to SEQ ID NO: 668962
ucuaaccuauaccucugcu

SEQ ID NO: 668964 - RNA, 19 nt, Artificial Sequence
  Description of Artificial Sequence: Synthetic oligonucleotide
  Sense strand starting at position 1597 of SEQ ID NO: 585804
gucauuagaaaccgugaca

SEQ ID NO: 668965 - RNA, 19 nt, Artificial Sequence
  Description of Artificial Sequence: Synthetic oligonucleotide
  Antisense strand to SEQ ID NO: 668964
ugucacgguuucuaaugac

SEQ ID NO: 668966 - RNA, 19 nt, Artificial Sequence
  Description of Artificial Sequence: Synthetic oligonucleotide
  Sense strand starting at position 1695 of SEQ ID NO: 585804
uuccaaucucucggaaaca

SEQ ID NO: 668967 - RNA, 19 nt, Artificial Sequence
  Description of Artificial Sequence: Synthetic oligonucleotide
  Antisense strand to SEQ ID NO: 668966
uguuuccgagagauuggaa

SEQ ID NO: 668968 - RNA, 19 nt, Artificial Sequence
  Description of Artificial Sequence: Synthetic oligonucleotide
  Sense strand starting at position 2189 of SEQ ID NO: 585804
gucuauauuccauacagcu

SEQ ID NO: 668969 - RNA, 19 nt, Artificial Sequence
  Description of Artificial Sequence: Synthetic oligonucleotide
  Antisense strand to SEQ ID NO: 668968
agcuguauggaauauagac

SEQ ID NO: 668970 - RNA, 19 nt, Artificial Sequence
  Description of Artificial Sequence: Synthetic oligonucleotide
  Sense strand starting at position 2237 of SEQ ID NO: 585804
auuuauuccuacgaaacga

SEQ ID NO: 668971 - RNA, 19 nt, Artificial Sequence
  Description of Artificial Sequence: Synthetic oligonucleotide
  Antisense strand to SEQ ID NO: 668970
ucguuucguaggaauaaau

SEQ ID NO: 668972 - RNA, 19 nt, Artificial Sequence
  Description of Artificial Sequence: Synthetic oligonucleotide
  Sense strand starting at position 2377 of SEQ ID NO: 585804
gguaaaugcgguaguguuc

SEQ ID NO: 668973 - RNA, 19 nt, Artificial Sequence
  Description of Artificial Sequence: Synthetic oligonucleotide
  Antisense strand to SEQ ID NO: 668972
gaacacuaccgcauuuacc

SEQ ID NO: 668974 - RNA, 19 nt, Artificial Sequence
  Description of Artificial Sequence: Synthetic oligonucleotide
  Sense strand starting at position 2389 of SEQ ID NO: 585804
aguguucguaauuacugaa

SEQ ID NO: 668975 - RNA, 19 nt, Artificial Sequence
  Description of Artificial Sequence: Synthetic oligonucleotide
  Antisense strand to SEQ ID NO: 668974
uucaguaauuacgaacacu

SEQ ID NO: 668976 - RNA, 19 nt, Artificial Sequence
  Description of Artificial Sequence: Synthetic oligonucleotide
  Sense strand starting at position 2431 of SEQ ID NO: 585804
ugaauuaaccuaugugaag

SEQ ID NO: 668977 - RNA, 19 nt, Artificial Sequence
  Description of Artificial Sequence: Synthetic oligonucleotide
  Antisense strand to SEQ ID NO: 668976
cuucacauagguuaauuca

SEQ ID NO: 668978 - RNA, 19 nt, Artificial Sequence
  Description of Artificial Sequence: Synthetic oligonucleotide
  Sense strand starting at position 2483 of SEQ ID NO: 585804
aaugaauaucgaggaagca

SEQ ID NO: 668979 - RNA, 19 nt, Artificial Sequence
  Description of Artificial Sequence: Synthetic oligonucleotide
  Antisense strand to SEQ ID NO: 668978
ugcuuccucgauauucauu

SEQ ID NO: 668980 - RNA, 19 nt, Artificial Sequence
  Description of Artificial Sequence: Synthetic oligonucleotide
  Sense strand starting at position 2649 of SEQ ID NO: 585804
gugagcauuggcgauaaag

SEQ ID NO: 668981 - RNA, 19 nt, Artificial Sequence
  Description of Artificial Sequence: Synthetic oligonucleotide
  Antisense strand to SEQ ID NO: 668980
cuuuaucgccaaugcucac

SEQ ID NO: 668982 - RNA, 19 nt, Artificial Sequence
  Description of Artificial Sequence: Synthetic oligonucleotide
  Sense strand starting at position 2651 of SEQ ID NO: 585804
gagcauuggcgauaaagug

SEQ ID NO: 668983 - RNA, 19 nt, Artificial Sequence
  Description of Artificial Sequence: Synthetic oligonucleotide
  Antisense strand to SEQ ID NO: 668982
cacuuuaucgccaaugcuc

SEQ ID NO: 668984 - RNA, 19 nt, Artificial Sequence
  Description of Artificial Sequence: Synthetic oligonucleotide
  Sense strand starting at position 2764 of SEQ ID NO: 585804
uauuuacuauuugggaagu

SEQ ID NO: 668985 - RNA, 19 nt, Artificial Sequence
  Description of Artificial Sequence: Synthetic oligonucleotide
  Antisense strand to SEQ ID NO: 668984
acuucccaaauaguaaaua

SEQ ID NO: 668986 - RNA, 19 nt, Artificial Sequence
  Description of Artificial Sequence: Synthetic oligonucleotide
  Sense strand starting at position 2766 of SEQ ID NO: 585804
uuuacuauuugggaagugu

SEQ ID NO: 668987 - RNA, 19 nt, Artificial Sequence
  Description of Artificial Sequence: Synthetic oligonucleotide
  Antisense strand to SEQ ID NO: 668986
acacuucccaaauaguaaa

SEQ ID NO: 668988 - RNA, 19 nt, Artificial Sequence
  Description of Artificial Sequence: Synthetic oligonucleotide
  Sense strand starting at position 2780 of SEQ ID NO: 585804
aguguuaaagcucgaggac

SEQ ID NO: 668989 - RNA, 19 nt, Artificial Sequence
  Description of Artificial Sequence: Synthetic oligonucleotide
  Antisense strand to SEQ ID NO: 668988
guccucgagcuuuaacacu

SEQ ID NO: 668990 - RNA, 19 nt, Artificial Sequence
  Description of Artificial Sequence: Synthetic oligonucleotide
  Sense strand starting at position 2781 of SEQ ID NO: 585804
guguuaaagcucgaggacu

SEQ ID NO: 668991 - RNA, 19 nt, Artificial Sequence
  Description of Artificial Sequence: Synthetic oligonucleotide
  Antisense strand to SEQ ID NO: 668990
aguccucgagcuuuaacac

SEQ ID NO: 668992 - RNA, 19 nt, Artificial Sequence
  Description of Artificial Sequence: Synthetic oligonucleotide
  Sense strand starting at position 3061 of SEQ ID NO: 585804
agcuuuaucgacugagaau

SEQ ID NO: 668993 - RNA, 19 nt, Artificial Sequence
  Description of Artificial Sequence: Synthetic oligonucleotide
  Antisense strand to SEQ ID NO: 668992
auucucagucgauaaagcu

SEQ ID NO: 668994 - RNA, 19 nt, Artificial Sequence
  Description of Artificial Sequence: Synthetic oligonucleotide
  Sense strand starting at position 3062 of SEQ ID NO: 585804
gcuuuaucgacugagaauc

SEQ ID NO: 668995 - RNA, 19 nt, Artificial Sequence
  Description of Artificial Sequence: Synthetic oligonucleotide
  Antisense strand to SEQ ID NO: 668994
gauucucagucgauaaagc

SEQ ID NO: 668996 - RNA, 19 nt, Artificial Sequence
  Description of Artificial Sequence: Synthetic oligonucleotide
  Sense strand starting at position 3116 of SEQ ID NO: 585804
cacaguauggcugauagua

SEQ ID NO: 668997 - RNA, 19 nt, Artificial Sequence
  Description of Artificial Sequence: Synthetic oligonucleotide
  Antisense strand to SEQ ID NO: 668996
uacuaucagccauacugug

SEQ ID NO: 668998 - RNA, 19 nt, Artificial Sequence
  Description of Artificial Sequence: Synthetic oligonucleotide
  Sense strand starting at position 3272 of SEQ ID NO: 585804
ugugccaggcauuaugaau

SEQ ID NO: 668999 - RNA, 19 nt, Artificial Sequence
  Description of Artificial Sequence: Synthetic oligonucleotide
  Antisense strand to SEQ ID NO: 668998
auucauaaugccuggcaca

SEQ ID NO: 669000 - RNA, 19 nt, Artificial Sequence
  Description of Artificial Sequence: Synthetic oligonucleotide
  Sense strand starting at position 3447 of SEQ ID NO: 585804
uccugaggaagugauguua

SEQ ID NO: 669001 - RNA, 19 nt, Artificial Sequence
  Description of Artificial Sequence: Synthetic oligonucleotide
  Antisense strand to SEQ ID NO: 669000
uaacaucacuuccucagga

SEQ ID NO: 669002 - RNA, 19 nt, Artificial Sequence
  Description of Artificial Sequence: Synthetic oligonucleotide
  Sense strand starting at position 3455 of SEQ ID NO: 585804
aagugauguuaccuugguu

SEQ ID NO: 669003 - RNA, 19 nt, Artificial Sequence
  Description of Artificial Sequence: Synthetic oligonucleotide
  Antisense strand to SEQ ID NO: 669002
aaccaagguaacaucacuu

SEQ ID NO: 669004 - RNA, 19 nt, Artificial Sequence
  Description of Artificial Sequence: Synthetic oligonucleotide
  Sense strand starting at position 3458 of SEQ ID NO: 585804
ugauguuaccuugguucuu

SEQ ID NO: 669005 - RNA, 19 nt, Artificial Sequence
  Description of Artificial Sequence: Synthetic oligonucleotide
  Antisense strand to SEQ ID NO: 669004
aagaaccaagguaacauca

SEQ ID NO: 669006 - RNA, 19 nt, Artificial Sequence
  Description of Artificial Sequence: Synthetic oligonucleotide
  Sense strand starting at position 3471 of SEQ ID NO: 585804
guucuugaagguuauguaa

SEQ ID NO: 669007 - RNA, 19 nt, Artificial Sequence
  Description of Artificial Sequence: Synthetic oligonucleotide
  Antisense strand to SEQ ID NO: 669006
uuacauaaccuucaagaac

SEQ ID NO: 669008 - RNA, 19 nt, Artificial Sequence
  Description of Artificial Sequence: Synthetic oligonucleotide
  Sense strand starting at position 3802 of SEQ ID NO: 585804
gcaaguuguaaaggagaac

SEQ ID NO: 669009 - RNA, 19 nt, Artificial Sequence
  Description of Artificial Sequence: Synthetic oligonucleotide
  Antisense strand to SEQ ID NO: 669008
guucuccuuuacaacuugc

SEQ ID NO: 669010 - RNA, 19 nt, Artificial Sequence
  Description of Artificial Sequence: Synthetic oligonucleotide
  Sense strand starting at position 99 of SEQ ID NO: 585805
gccagaauagagggaguau

SEQ ID NO: 669011 - RNA, 19 nt, Artificial Sequence
  Description of Artificial Sequence: Synthetic oligonucleotide
  Antisense strand to SEQ ID NO: 669010
auacucccucuauucuggc

SEQ ID NO: 669012 - RNA, 19 nt, Artificial Sequence
  Description of Artificial Sequence: Synthetic oligonucleotide
  Sense strand starting at position 229 of SEQ ID NO: 585805
cuagauucccagugggaau

SEQ ID NO: 669013 - RNA, 19 nt, Artificial Sequence
  Description of Artificial Sequence: Synthetic oligonucleotide
  Antisense strand to SEQ ID NO: 669012
auucccacugggaaucuag

SEQ ID NO: 669014 - RNA, 19 nt, Artificial Sequence
  Description of Artificial Sequence: Synthetic oligonucleotide
  Sense strand starting at position 246 of SEQ ID NO: 585805
augucagaugguuggagau

SEQ ID NO: 669015 - RNA, 19 nt, Artificial Sequence
  Description of Artificial Sequence: Synthetic oligonucleotide
  Antisense strand to SEQ ID NO: 669014
aucuccaaccaucugacau

SEQ ID NO: 669016 - RNA, 19 nt, Artificial Sequence
  Description of Artificial Sequence: Synthetic oligonucleotide
  Sense strand starting at position 291 of SEQ ID NO: 585805
ucauccauuguuggaggau

SEQ ID NO: 669017 - RNA, 19 nt, Artificial Sequence
  Description of Artificial Sequence: Synthetic oligonucleotide
  Antisense strand to SEQ ID NO: 669016
auccuccaacaauggauga

SEQ ID NO: 669018 - RNA, 19 nt, Artificial Sequence
  Description of Artificial Sequence: Synthetic oligonucleotide
  Sense strand starting at position 303 of SEQ ID NO: 585805
ggaggaugccuuggagaca

SEQ ID NO: 669019 - RNA, 19 nt, Artificial Sequence
  Description of Artificial Sequence: Synthetic oligonucleotide
  Antisense strand to SEQ ID NO: 669018
ugucuccaaggcauccucc

SEQ ID NO: 669020 - RNA, 19 nt, Artificial Sequence
  Description of Artificial Sequence: Synthetic oligonucleotide
  Sense strand starting at position 614 of SEQ ID NO: 585805
acgccacugcucguuacua

SEQ ID NO: 669021 - RNA, 19 nt, Artificial Sequence
  Description of Artificial Sequence: Synthetic oligonucleotide
  Antisense strand to SEQ ID NO: 669020
uaguaacgagcaguggcgu

SEQ ID NO: 669022 - RNA, 19 nt, Artificial Sequence
  Description of Artificial Sequence: Synthetic oligonucleotide
  Sense strand starting at position 870 of SEQ ID NO: 585805
uuuggauuugcucagugcu

SEQ ID NO: 669023 - RNA, 19 nt, Artificial Sequence
  Description of Artificial Sequence: Synthetic oligonucleotide
  Antisense strand to SEQ ID NO: 669022
agcacugagcaaauccaaa

SEQ ID NO: 669024 - RNA, 19 nt, Artificial Sequence
  Description of Artificial Sequence: Synthetic oligonucleotide
  Sense strand starting at position 872 of SEQ ID NO: 585805
uggauuugcucagugcuuu

SEQ ID NO: 669025 - RNA, 19 nt, Artificial Sequence
  Description of Artificial Sequence: Synthetic oligonucleotide
  Antisense strand to SEQ ID NO: 669024
aaagcacugagcaaaucca

SEQ ID NO: 669026 - RNA, 19 nt, Artificial Sequence
  Description of Artificial Sequence: Synthetic oligonucleotide
  Sense strand starting at position 873 of SEQ ID NO: 585805
ggauuugcucagugcuuuc

SEQ ID NO: 669027 - RNA, 19 nt, Artificial Sequence
  Description of Artificial Sequence: Synthetic oligonucleotide
  Antisense strand to SEQ ID NO: 669026
gaaagcacugagcaaaucc

SEQ ID NO: 669028 - RNA, 19 nt, Artificial Sequence
  Description of Artificial Sequence: Synthetic oligonucleotide
  Sense strand starting at position 986 of SEQ ID NO: 585805
cccagugaugcucagcuaa

SEQ ID NO: 669029 - RNA, 19 nt, Artificial Sequence
  Description of Artificial Sequence: Synthetic oligonucleotide
  Antisense strand to SEQ ID NO: 669028
uuagcugagcaucacuggg

SEQ ID NO: 669030 - RNA, 19 nt, Artificial Sequence
  Description of Artificial Sequence: Synthetic oligonucleotide
  Sense strand starting at position 1084 of SEQ ID NO: 585805
gaggucaaucgucaucacu

SEQ ID NO: 669031 - RNA, 19 nt, Artificial Sequence
  Description of Artificial Sequence: Synthetic oligonucleotide
  Antisense strand to SEQ ID NO: 669030
agugaugacgauugaccuc

SEQ ID NO: 669032 - RNA, 19 nt, Artificial Sequence
  Description of Artificial Sequence: Synthetic oligonucleotide
  Sense strand starting at position 1162 of SEQ ID NO: 585805
uugauaguucugggagaag

SEQ ID NO: 669033 - RNA, 19 nt, Artificial Sequence
  Description of Artificial Sequence: Synthetic oligonucleotide
  Antisense strand to SEQ ID NO: 669032
cuucucccagaacuaucaa

SEQ ID NO: 669034 - RNA, 19 nt, Artificial Sequence
  Description of Artificial Sequence: Synthetic oligonucleotide
  Sense strand starting at position 1303 of SEQ ID NO: 585805
agaguuugugguggauuaa

SEQ ID NO: 669035 - RNA, 19 nt, Artificial Sequence
  Description of Artificial Sequence: Synthetic oligonucleotide
  Antisense strand to SEQ ID NO: 669034
uuaauccaccacaaacucu

SEQ ID NO: 669036 - RNA, 19 nt, Artificial Sequence
  Description of Artificial Sequence: Synthetic oligonucleotide
  Sense strand starting at position 1304 of SEQ ID NO: 585805
gaguuugugguggauuaaa

SEQ ID NO: 669037 - RNA, 19 nt, Artificial Sequence
  Description of Artificial Sequence: Synthetic oligonucleotide
  Antisense strand to SEQ ID NO: 669036
uuuaauccaccacaaacuc

SEQ ID NO: 669038 - RNA, 19 nt, Artificial Sequence
  Description of Artificial Sequence: Synthetic oligonucleotide
  Sense strand starting at position 1427 of SEQ ID NO: 585805
ggauuugcuuuauauuucu

SEQ ID NO: 669039 - RNA, 19 nt, Artificial Sequence
  Description of Artificial Sequence: Synthetic oligonucleotide
  Antisense strand to SEQ ID NO: 669038
agaaauauaaagcaaaucc

SEQ ID NO: 669040 - RNA, 19 nt, Artificial Sequence
  Description of Artificial Sequence: Synthetic oligonucleotide
  Sense strand starting at position 1433 of SEQ ID NO: 585805
gcuuuauauuucucccugu

SEQ ID NO: 669041 - RNA, 19 nt, Artificial Sequence
  Description of Artificial Sequence: Synthetic oligonucleotide
  Antisense strand to SEQ ID NO: 669040
acagggagaaauauaaagc

SEQ ID NO: 669042 - RNA, 19 nt, Artificial Sequence
  Description of Artificial Sequence: Synthetic oligonucleotide
  Sense strand starting at position 2014 of SEQ ID NO: 585805
gugugaaacaucuggaagg

SEQ ID NO: 669043 - RNA, 19 nt, Artificial Sequence
  Description of Artificial Sequence: Synthetic oligonucleotide
  Antisense strand to SEQ ID NO: 669042
ccuuccagauguuucacac

SEQ ID NO: 669044 - RNA, 19 nt, Artificial Sequence
  Description of Artificial Sequence: Synthetic oligonucleotide
  Sense strand starting at position 2094 of SEQ ID NO: 585805
guggccaucugaucaaauc

SEQ ID NO: 669045 - RNA, 19 nt, Artificial Sequence
  Description of Artificial Sequence: Synthetic oligonucleotide
  Antisense strand to SEQ ID NO: 669044
gauuugaucagauggccac

SEQ ID NO: 669046 - RNA, 19 nt, Artificial Sequence
  Description of Artificial Sequence: Synthetic oligonucleotide
  Sense strand starting at position 2141 of SEQ ID NO: 585805
gggucuaagcccgaagaga

SEQ ID NO: 669047 - RNA, 19 nt, Artificial Sequence
  Description of Artificial Sequence: Synthetic oligonucleotide
  Antisense strand to SEQ ID NO: 669046
ucucuucgggcuuagaccc

SEQ ID NO: 669048 - RNA, 19 nt, Artificial Sequence
  Description of Artificial Sequence: Synthetic oligonucleotide
  Sense strand starting at position 2150 of SEQ ID NO: 585805
cccgaagagaauugaaguu

SEQ ID NO: 669049 - RNA, 19 nt, Artificial Sequence
  Description of Artificial Sequence: Synthetic oligonucleotide
  Antisense strand to SEQ ID NO: 669048
aacuucaauucucuucggg

SEQ ID NO: 669050 - RNA, 19 nt, Artificial Sequence
  Description of Artificial Sequence: Synthetic oligonucleotide
  Sense strand starting at position 2262 of SEQ ID NO: 585805
ucuagaugugaugguauga

SEQ ID NO: 669051 - RNA, 19 nt, Artificial Sequence
  Description of Artificial Sequence: Synthetic oligonucleotide
  Antisense strand to SEQ ID NO: 669050
ucauaccaucacaucuaga

SEQ ID NO: 669052 - RNA, 19 nt, Artificial Sequence
  Description of Artificial Sequence: Synthetic oligonucleotide
  Sense strand starting at position 2309 of SEQ ID NO: 585805
agauacuguauucggcuaa

SEQ ID NO: 669053 - RNA, 19 nt, Artificial Sequence
  Description of Artificial Sequence: Synthetic oligonucleotide
  Antisense strand to SEQ ID NO: 669052
uuagccgaauacaguaucu

SEQ ID NO: 669054 - RNA, 19 nt, Artificial Sequence
  Description of Artificial Sequence: Synthetic oligonucleotide
  Sense strand starting at position 2313 of SEQ ID NO: 585805
acuguauucggcuaauuag

SEQ ID NO: 669055 - RNA, 19 nt, Artificial Sequence
  Description of Artificial Sequence: Synthetic oligonucleotide
  Antisense strand to SEQ ID NO: 669054
cuaauuagccgaauacagu

SEQ ID NO: 669056 - RNA, 19 nt, Artificial Sequence
  Description of Artificial Sequence: Synthetic oligonucleotide
  Sense strand starting at position 2324 of SEQ ID NO: 585805
cuaauuaguucugugauac

SEQ ID NO: 669057 - RNA, 19 nt, Artificial Sequence
  Description of Artificial Sequence: Synthetic oligonucleotide
  Antisense strand to SEQ ID NO: 669056
guaucacagaacuaauuag

SEQ ID NO: 669058 - RNA, 19 nt, Artificial Sequence
  Description of Artificial Sequence: Synthetic oligonucleotide
  Sense strand starting at position 2746 of SEQ ID NO: 585805
gucagaaacuagguugacu

SEQ ID NO: 669059 - RNA, 19 nt, Artificial Sequence
  Description of Artificial Sequence: Synthetic oligonucleotide
  Antisense strand to SEQ ID NO: 669058
agucaaccuaguuucugac

SEQ ID NO: 669060 - RNA, 19 nt, Artificial Sequence
  Description of Artificial Sequence: Synthetic oligonucleotide
  Sense strand starting at position 2852 of SEQ ID NO: 585805
gcuggaaauaguuagaccu

SEQ ID NO: 669061 - RNA, 19 nt, Artificial Sequence
  Description of Artificial Sequence: Synthetic oligonucleotide
  Antisense strand to SEQ ID NO: 669060
aggucuaacuauuuccagc

SEQ ID NO: 669062 - RNA, 19 nt, Artificial Sequence
  Description of Artificial Sequence: Synthetic oligonucleotide
  Sense strand starting at position 3155 of SEQ ID NO: 585805
aaaggaauccuguguguaa

SEQ ID NO: 669063 - RNA, 19 nt, Artificial Sequence
  Description of Artificial Sequence: Synthetic oligonucleotide
  Antisense strand to SEQ ID NO: 669062
uuacacacaggauuccuuu

SEQ ID NO: 669064 - RNA, 19 nt, Artificial Sequence
  Description of Artificial Sequence: Synthetic oligonucleotide
  Sense strand starting at position 3156 of SEQ ID NO: 585805
aaggaauccuguguguaaa

SEQ ID NO: 669065 - RNA, 19 nt, Artificial Sequence
  Description of Artificial Sequence: Synthetic oligonucleotide
  Antisense strand to SEQ ID NO: 669064
uuuacacacaggauuccuu

SEQ ID NO: 669066 - RNA, 19 nt, Artificial Sequence
  Description of Artificial Sequence: Synthetic oligonucleotide
  Sense strand starting at position 3157 of SEQ ID NO: 585805
aggaauccuguguguaaac

SEQ ID NO: 669067 - RNA, 19 nt, Artificial Sequence
  Description of Artificial Sequence: Synthetic oligonucleotide
  Antisense strand to SEQ ID NO: 669066
guuuacacacaggauuccu

SEQ ID NO: 669068 - RNA, 19 nt, Artificial Sequence
  Description of Artificial Sequence: Synthetic oligonucleotide
  Sense strand starting at position 3158 of SEQ ID NO: 585805
ggaauccuguguguaaaca

SEQ ID NO: 669069 - RNA, 19 nt, Artificial Sequence
  Description of Artificial Sequence: Synthetic oligonucleotide
  Antisense strand to SEQ ID NO: 669068
uguuuacacacaggauucc

SEQ ID NO: 669070 - RNA, 19 nt, Artificial Sequence
  Description of Artificial Sequence: Synthetic oligonucleotide
  Sense strand starting at position 3159 of SEQ ID NO: 585805
gaauccuguguguaaacau

SEQ ID NO: 669071 - RNA, 19 nt, Artificial Sequence
  Description of Artificial Sequence: Synthetic oligonucleotide
  Antisense strand to SEQ ID NO: 669070
auguuuacacacaggauuc

SEQ ID NO: 669072 - RNA, 19 nt, Artificial Sequence
  Description of Artificial Sequence: Synthetic oligonucleotide
  Sense strand starting at position 3465 of SEQ ID NO: 585805
uuucuuugugaauaagcua

SEQ ID NO: 669073 - RNA, 19 nt, Artificial Sequence
  Description of Artificial Sequence: Synthetic oligonucleotide
  Antisense strand to SEQ ID NO: 669072
uagcuuauucacaaagaaa

SEQ ID NO: 669074 - RNA, 19 nt, Artificial Sequence
  Description of Artificial Sequence: Synthetic oligonucleotide
  Sense strand starting at position 3710 of SEQ ID NO: 585805
aaaguuggauaauaagaga

SEQ ID NO: 669075 - RNA, 19 nt, Artificial Sequence
  Description of Artificial Sequence: Synthetic oligonucleotide
  Antisense strand to SEQ ID NO: 669074
ucucuuauuauccaacuuu

SEQ ID NO: 669076 - RNA, 19 nt, Artificial Sequence
  Description of Artificial Sequence: Synthetic oligonucleotide
  Sense strand starting at position 3747 of SEQ ID NO: 585805
aaaggagugcgaugguuaa

SEQ ID NO: 669077 - RNA, 19 nt, Artificial Sequence
  Description of Artificial Sequence: Synthetic oligonucleotide
  Antisense strand to SEQ ID NO: 669076
uuaaccaucgcacuccuuu

SEQ ID NO: 669078 - RNA, 19 nt, Artificial Sequence
  Description of Artificial Sequence: Synthetic oligonucleotide
  Sense strand starting at position 3765 of SEQ ID NO: 585805
aaaguuagauuguuuggaa

SEQ ID NO: 669079 - RNA, 19 nt, Artificial Sequence
  Description of Artificial Sequence: Synthetic oligonucleotide
  Antisense strand to SEQ ID NO: 669078
uuccaaacaaucuaacuuu

SEQ ID NO: 669080 - RNA, 19 nt, Artificial Sequence
  Description of Artificial Sequence: Synthetic oligonucleotide
  Sense strand starting at position 3766 of SEQ ID NO: 585805
aaguuagauuguuuggaaa

SEQ ID NO: 669081 - RNA, 19 nt, Artificial Sequence
  Description of Artificial Sequence: Synthetic oligonucleotide
  Antisense strand to SEQ ID NO: 669080
uuuccaaacaaucuaacuu

SEQ ID NO: 669082 - RNA, 19 nt, Artificial Sequence
  Description of Artificial Sequence: Synthetic oligonucleotide
  Sense strand starting at position 3797 of SEQ ID NO: 585805
cucuuagugacugaagguu

SEQ ID NO: 669083 - RNA, 19 nt, Artificial Sequence
  Description of Artificial Sequence: Synthetic oligonucleotide
  Antisense strand to SEQ ID NO: 669082
aaccuucagucacuaagag

SEQ ID NO: 669084 - RNA, 19 nt, Artificial Sequence
  Description of Artificial Sequence: Synthetic oligonucleotide
  Sense strand starting at position 3956 of SEQ ID NO: 585805
agagguaaacaggguuauu

SEQ ID NO: 669085 - RNA, 19 nt, Artificial Sequence
  Description of Artificial Sequence: Synthetic oligonucleotide
  Antisense strand to SEQ ID NO: 669084
aauaacccuguuuaccucu

SEQ ID NO: 669086 - RNA, 19 nt, Artificial Sequence
  Description of Artificial Sequence: Synthetic oligonucleotide
  Sense strand starting at position 3966 of SEQ ID NO: 585805
aggguuauuugacaaguuu

SEQ ID NO: 669087 - RNA, 19 nt, Artificial Sequence
  Description of Artificial Sequence: Synthetic oligonucleotide
  Antisense strand to SEQ ID NO: 669086
aaacuugucaaauaacccu

SEQ ID NO: 669088 - RNA, 19 nt, Artificial Sequence
  Description of Artificial Sequence: Synthetic oligonucleotide
  Sense strand starting at position 3975 of SEQ ID NO: 585805
ugacaaguuuaguuacaua

SEQ ID NO: 669089 - RNA, 19 nt, Artificial Sequence
  Description of Artificial Sequence: Synthetic oligonucleotide
  Antisense strand to SEQ ID NO: 669088
uauguaacuaaacuuguca

SEQ ID NO: 669090 - RNA, 19 nt, Artificial Sequence
  Description of Artificial Sequence: Synthetic oligonucleotide
  Sense strand starting at position 156 of SEQ ID NO: 585806
gcaguuacuggagaggcau

SEQ ID NO: 669091 - RNA, 19 nt, Artificial Sequence
  Description of Artificial Sequence: Synthetic oligonucleotide
  Antisense strand to SEQ ID NO: 669090
augccucuccaguaacugc

SEQ ID NO: 669092 - RNA, 19 nt, Artificial Sequence
  Description of Artificial Sequence: Synthetic oligonucleotide
  Sense strand starting at position 170 of SEQ ID NO: 585806
ggcauaaacuuccauuuga

SEQ ID NO: 669093 - RNA, 19 nt, Artificial Sequence
  Description of Artificial Sequence: Synthetic oligonucleotide
  Antisense strand to SEQ ID NO: 669092
ucaaauggaaguuuaugcc

SEQ ID NO: 669094 - RNA, 19 nt, Artificial Sequence
  Description of Artificial Sequence: Synthetic oligonucleotide
  Sense strand starting at position 177 of SEQ ID NO: 585806
acuuccauuugaggaaucu

SEQ ID NO: 669095 - RNA, 19 nt, Artificial Sequence
  Description of Artificial Sequence: Synthetic oligonucleotide
  Antisense strand to SEQ ID NO: 669094
agauuccucaaauggaagu

SEQ ID NO: 669096 - RNA, 19 nt, Artificial Sequence
  Description of Artificial Sequence: Synthetic oligonucleotide
  Sense strand starting at position 186 of SEQ ID NO: 585806
ugaggaaucuguuugauug

SEQ ID NO: 669097 - RNA, 19 nt, Artificial Sequence
  Description of Artificial Sequence: Synthetic oligonucleotide
  Antisense strand to SEQ ID NO: 669096
caaucaaacagauuccuca

SEQ ID NO: 669098 - RNA, 19 nt, Artificial Sequence
  Description of Artificial Sequence: Synthetic oligonucleotide
  Sense strand starting at position 187 of SEQ ID NO: 585806
gaggaaucuguuugauugg

SEQ ID NO: 669099 - RNA, 19 nt, Artificial Sequence
  Description of Artificial Sequence: Synthetic oligonucleotide
  Antisense strand to SEQ ID NO: 669098
ccaaucaaacagauuccuc

SEQ ID NO: 669100 - RNA, 19 nt, Artificial Sequence
  Description of Artificial Sequence: Synthetic oligonucleotide
  Sense strand starting at position 190 of SEQ ID NO: 585806
gaaucuguuugauugggca

SEQ ID NO: 669101 - RNA, 19 nt, Artificial Sequence
  Description of Artificial Sequence: Synthetic oligonucleotide
  Antisense strand to SEQ ID NO: 669100
ugcccaaucaaacagauuc

SEQ ID NO: 669102 - RNA, 19 nt, Artificial Sequence
  Description of Artificial Sequence: Synthetic oligonucleotide
  Sense strand starting at position 203 of SEQ ID NO: 585806
ugggcacuuuagucaaaca

SEQ ID NO: 669103 - RNA, 19 nt, Artificial Sequence
  Description of Artificial Sequence: Synthetic oligonucleotide
  Antisense strand to SEQ ID NO: 669102
uguuugacuaaagugccca

SEQ ID NO: 669104 - RNA, 19 nt, Artificial Sequence
  Description of Artificial Sequence: Synthetic oligonucleotide
  Sense strand starting at position 283 of SEQ ID NO: 585806
ccaccuaccucauugaguu

SEQ ID NO: 669105 - RNA, 19 nt, Artificial Sequence
  Description of Artificial Sequence: Synthetic oligonucleotide
  Antisense strand to SEQ ID NO: 669104
aacucaaugagguaggugg

SEQ ID NO: 669106 - RNA, 19 nt, Artificial Sequence
  Description of Artificial Sequence: Synthetic oligonucleotide
  Sense strand starting at position 420 of SEQ ID NO: 585806
ugcucaagaccguauaguu

SEQ ID NO: 669107 - RNA, 19 nt, Artificial Sequence
  Description of Artificial Sequence: Synthetic oligonucleotide
  Antisense strand to SEQ ID NO: 669106
aacuauacggucuugagca

SEQ ID NO: 669108 - RNA, 19 nt, Artificial Sequence
  Description of Artificial Sequence: Synthetic oligonucleotide
  Sense strand starting at position 511 of SEQ ID NO: 585806
cugcuuccagaaggaugaa

SEQ ID NO: 669109 - RNA, 19 nt, Artificial Sequence
  Description of Artificial Sequence: Synthetic oligonucleotide
  Antisense strand to SEQ ID NO: 669108
uucauccuucuggaagcag

SEQ ID NO: 669110 - RNA, 19 nt, Artificial Sequence
  Description of Artificial Sequence: Synthetic oligonucleotide
  Sense strand starting at position 585 of SEQ ID NO: 585806
ucaggagugcaucaugguu

SEQ ID NO: 669111 - RNA, 19 nt, Artificial Sequence
  Description of Artificial Sequence: Synthetic oligonucleotide
  Antisense strand to SEQ ID NO: 669110
aaccaugaugcacuccuga

SEQ ID NO: 669112 - RNA, 19 nt, Artificial Sequence
  Description of Artificial Sequence: Synthetic oligonucleotide
  Sense strand starting at position 660 of SEQ ID NO: 585806
aguauuagauuugugcuua

SEQ ID NO: 669113 - RNA, 19 nt, Artificial Sequence
  Description of Artificial Sequence: Synthetic oligonucleotide
  Antisense strand to SEQ ID NO: 669112
uaagcacaaaucuaauacu

SEQ ID NO: 669114 - RNA, 19 nt, Artificial Sequence
  Description of Artificial Sequence: Synthetic oligonucleotide
  Sense strand starting at position 664 of SEQ ID NO: 585806
uuagauuugugcuuaggca

SEQ ID NO: 669115 - RNA, 19 nt, Artificial Sequence
  Description of Artificial Sequence: Synthetic oligonucleotide
  Antisense strand to SEQ ID NO: 669114
ugccuaagcacaaaucuaa

SEQ ID NO: 669116 - RNA, 19 nt, Artificial Sequence
  Description of Artificial Sequence: Synthetic oligonucleotide
  Sense strand starting at position 729 of SEQ ID NO: 585806
cuuauaaggcuguagugaa

SEQ ID NO: 669117 - RNA, 19 nt, Artificial Sequence
  Description of Artificial Sequence: Synthetic oligonucleotide
  Antisense strand to SEQ ID NO: 669116
uucacuacagccuuauaag

SEQ ID NO: 669118 - RNA, 19 nt, Artificial Sequence
  Description of Artificial Sequence: Synthetic oligonucleotide
  Sense strand starting at position 1128 of SEQ ID NO: 585806
aggagcucuguccaugagu

SEQ ID NO: 669119 - RNA, 19 nt, Artificial Sequence
  Description of Artificial Sequence: Synthetic oligonucleotide
  Antisense strand to SEQ ID NO: 669118
acucauggacagagcuccu

SEQ ID NO: 669120 - RNA, 19 nt, Artificial Sequence
  Description of Artificial Sequence: Synthetic oligonucleotide
  Sense strand starting at position 1130 of SEQ ID NO: 585806
gagcucuguccaugaguga

SEQ ID NO: 669121 - RNA, 19 nt, Artificial Sequence
  Description of Artificial Sequence: Synthetic oligonucleotide
  Antisense strand to SEQ ID NO: 669120
ucacucauggacagagcuc

SEQ ID NO: 669122 - RNA, 19 nt, Artificial Sequence
  Description of Artificial Sequence: Synthetic oligonucleotide
  Sense strand starting at position 1131 of SEQ ID NO: 585806
agcucuguccaugagugaa

SEQ ID NO: 669123 - RNA, 19 nt, Artificial Sequence
  Description of Artificial Sequence: Synthetic oligonucleotide
  Antisense strand to SEQ ID NO: 669122
uucacucauggacagagcu

SEQ ID NO: 669124 - RNA, 19 nt, Artificial Sequence
  Description of Artificial Sequence: Synthetic oligonucleotide
  Sense strand starting at position 1200 of SEQ ID NO: 585806
aggguguacggagguuaaa

SEQ ID NO: 669125 - RNA, 19 nt, Artificial Sequence
  Description of Artificial Sequence: Synthetic oligonucleotide
  Antisense strand to SEQ ID NO: 669124
uuuaaccuccguacacccu

SEQ ID NO: 669126 - RNA, 19 nt, Artificial Sequence
  Description of Artificial Sequence: Synthetic oligonucleotide
  Sense strand starting at position 1327 of SEQ ID NO: 585806
aaugaagaacuauguguaa

SEQ ID NO: 669127 - RNA, 19 nt, Artificial Sequence
  Description of Artificial Sequence: Synthetic oligonucleotide
  Antisense strand to SEQ ID NO: 669126
uuacacauaguucuucauu

SEQ ID NO: 669128 - RNA, 19 nt, Artificial Sequence
  Description of Artificial Sequence: Synthetic oligonucleotide
  Sense strand starting at position 2295 of SEQ ID NO: 585806
aaaguugucgcugagagag

SEQ ID NO: 669129 - RNA, 19 nt, Artificial Sequence
  Description of Artificial Sequence: Synthetic oligonucleotide
  Antisense strand to SEQ ID NO: 669128
cucucucagcgacaacuuu

SEQ ID NO: 669130 - RNA, 19 nt, Artificial Sequence
  Description of Artificial Sequence: Synthetic oligonucleotide
  Sense strand starting at position 2389 of SEQ ID NO: 585806
ucagaaacauggcucucaa

SEQ ID NO: 669131 - RNA, 19 nt, Artificial Sequence
  Description of Artificial Sequence: Synthetic oligonucleotide
  Antisense strand to SEQ ID NO: 669130
uugagagccauguuucuga

SEQ ID NO: 669132 - RNA, 19 nt, Artificial Sequence
  Description of Artificial Sequence: Synthetic oligonucleotide
  Sense strand starting at position 2428 of SEQ ID NO: 585806
acugcagaacuugguuuaa

SEQ ID NO: 669133 - RNA, 19 nt, Artificial Sequence
  Description of Artificial Sequence: Synthetic oligonucleotide
  Antisense strand to SEQ ID NO: 669132
uuaaaccaaguucugcagu

SEQ ID NO: 669134 - RNA, 19 nt, Artificial Sequence
  Description of Artificial Sequence: Synthetic oligonucleotide
  Sense strand starting at position 2917 of SEQ ID NO: 585806
gagacuccaucccugauga

SEQ ID NO: 669135 - RNA, 19 nt, Artificial Sequence
  Description of Artificial Sequence: Synthetic oligonucleotide
  Antisense strand to SEQ ID NO: 669134
ucaucagggauggagucuc

SEQ ID NO: 669136 - RNA, 19 nt, Artificial Sequence
  Description of Artificial Sequence: Synthetic oligonucleotide
  Sense strand starting at position 2918 of SEQ ID NO: 585806
agacuccaucccugaugau

SEQ ID NO: 669137 - RNA, 19 nt, Artificial Sequence
  Description of Artificial Sequence: Synthetic oligonucleotide
  Antisense strand to SEQ ID NO: 669136
aucaucagggauggagucu

SEQ ID NO: 669138 - RNA, 19 nt, Artificial Sequence
  Description of Artificial Sequence: Synthetic oligonucleotide
  Sense strand starting at position 3191 of SEQ ID NO: 585806
ccaggaugauuucgauuuc

SEQ ID NO: 669139 - RNA, 19 nt, Artificial Sequence
  Description of Artificial Sequence: Synthetic oligonucleotide
  Antisense strand to SEQ ID NO: 669138
gaaaucgaaaucauccugg

SEQ ID NO: 669140 - RNA, 19 nt, Artificial Sequence
  Description of Artificial Sequence: Synthetic oligonucleotide
  Sense strand starting at position 3301 of SEQ ID NO: 585806
ggguuuggcccauagccaa

SEQ ID NO: 669141 - RNA, 19 nt, Artificial Sequence
  Description of Artificial Sequence: Synthetic oligonucleotide
  Antisense strand to SEQ ID NO: 669140
uuggcuaugggccaaaccc

SEQ ID NO: 669142 - RNA, 19 nt, Artificial Sequence
  Description of Artificial Sequence: Synthetic oligonucleotide
  Sense strand starting at position 3330 of SEQ ID NO: 585806
gggugaccuuccuucugga

SEQ ID NO: 669143 - RNA, 19 nt, Artificial Sequence
  Description of Artificial Sequence: Synthetic oligonucleotide
  Antisense strand to SEQ ID NO: 669142
uccagaaggaaggucaccc

SEQ ID NO: 669144 - RNA, 19 nt, Artificial Sequence
  Description of Artificial Sequence: Synthetic oligonucleotide
  Sense strand starting at position 3351 of SEQ ID NO: 585806
guaucaagugaaugaacuu

SEQ ID NO: 669145 - RNA, 19 nt, Artificial Sequence
  Description of Artificial Sequence: Synthetic oligonucleotide
  Antisense strand to SEQ ID NO: 669144
aaguucauucacuugauac

SEQ ID NO: 669146 - RNA, 19 nt, Artificial Sequence
  Description of Artificial Sequence: Synthetic oligonucleotide
  Sense strand starting at position 3425 of SEQ ID NO: 585806
cgacuauauccacagugag

SEQ ID NO: 669147 - RNA, 19 nt, Artificial Sequence
  Description of Artificial Sequence: Synthetic oligonucleotide
  Antisense strand to SEQ ID NO: 669146
cucacuguggauauagucg

SEQ ID NO: 669148 - RNA, 19 nt, Artificial Sequence
  Description of Artificial Sequence: Synthetic oligonucleotide
  Sense strand starting at position 3428 of SEQ ID NO: 585806
cuauauccacagugagagu

SEQ ID NO: 669149 - RNA, 19 nt, Artificial Sequence
  Description of Artificial Sequence: Synthetic oligonucleotide
  Antisense strand to SEQ ID NO: 669148
acucucacuguggauauag

SEQ ID NO: 669150 - RNA, 19 nt, Artificial Sequence
  Description of Artificial Sequence: Synthetic oligonucleotide
  Sense strand starting at position 3511 of SEQ ID NO: 585806
gccacuaaaccuugaguuc

SEQ ID NO: 669151 - RNA, 19 nt, Artificial Sequence
  Description of Artificial Sequence: Synthetic oligonucleotide
  Antisense strand to SEQ ID NO: 669150
gaacucaagguuuaguggc

SEQ ID NO: 669152 - RNA, 19 nt, Artificial Sequence
  Description of Artificial Sequence: Synthetic oligonucleotide
  Sense strand starting at position 3518 of SEQ ID NO: 585806
aaccuugaguuccuagaga

SEQ ID NO: 669153 - RNA, 19 nt, Artificial Sequence
  Description of Artificial Sequence: Synthetic oligonucleotide
  Antisense strand to SEQ ID NO: 669152
ucucuaggaacucaagguu

SEQ ID NO: 669154 - RNA, 19 nt, Artificial Sequence
  Description of Artificial Sequence: Synthetic oligonucleotide
  Sense strand starting at position 3568 of SEQ ID NO: 585806
gccucaguuccauagcaaa

SEQ ID NO: 669155 - RNA, 19 nt, Artificial Sequence
  Description of Artificial Sequence: Synthetic oligonucleotide
  Antisense strand to SEQ ID NO: 669154
uuugcuauggaacugaggc

SEQ ID NO: 669156 - RNA, 19 nt, Artificial Sequence
  Description of Artificial Sequence: Synthetic oligonucleotide
  Sense strand starting at position 3634 of SEQ ID NO: 585806
ccuaucgcuuucucagaga

SEQ ID NO: 669157 - RNA, 19 nt, Artificial Sequence
  Description of Artificial Sequence: Synthetic oligonucleotide
  Antisense strand to SEQ ID NO: 669156
ucucugagaaagcgauagg

SEQ ID NO: 669158 - RNA, 19 nt, Artificial Sequence
  Description of Artificial Sequence: Synthetic oligonucleotide
  Sense strand starting at position 3673 of SEQ ID NO: 585806
agggcagagcucuaccaga

SEQ ID NO: 669159 - RNA, 19 nt, Artificial Sequence
  Description of Artificial Sequence: Synthetic oligonucleotide
  Antisense strand to SEQ ID NO: 669158
ucugguagagcucugcccu

SEQ ID NO: 669160 - RNA, 19 nt, Artificial Sequence
  Description of Artificial Sequence: Synthetic oligonucleotide
  Sense strand starting at position 3678 of SEQ ID NO: 585806
agagcucuaccagagcaga

SEQ ID NO: 669161 - RNA, 19 nt, Artificial Sequence
  Description of Artificial Sequence: Synthetic oligonucleotide
  Antisense strand to SEQ ID NO: 669160
ucugcucugguagagcucu

SEQ ID NO: 669162 - RNA, 19 nt, Artificial Sequence
  Description of Artificial Sequence: Synthetic oligonucleotide
  Sense strand starting at position 3698 of SEQ ID NO: 585806
caucaagagugggucugau

SEQ ID NO: 669163 - RNA, 19 nt, Artificial Sequence
  Description of Artificial Sequence: Synthetic oligonucleotide
  Antisense strand to SEQ ID NO: 669162
aucagacccacucuugaug

SEQ ID NO: 669164 - RNA, 19 nt, Artificial Sequence
  Description of Artificial Sequence: Synthetic oligonucleotide
  Sense strand starting at position 3780 of SEQ ID NO: 585806
aggagaacucccuguagac

SEQ ID NO: 669165 - RNA, 19 nt, Artificial Sequence
  Description of Artificial Sequence: Synthetic oligonucleotide
  Antisense strand to SEQ ID NO: 669164
gucuacagggaguucuccu

SEQ ID NO: 669166 - RNA, 19 nt, Artificial Sequence
  Description of Artificial Sequence: Synthetic oligonucleotide
  Sense strand starting at position 3825 of SEQ ID NO: 585806
gcaaacuuguacuugaaua

SEQ ID NO: 669167 - RNA, 19 nt, Artificial Sequence
  Description of Artificial Sequence: Synthetic oligonucleotide
  Antisense strand to SEQ ID NO: 669166
uauucaaguacaaguuugc

SEQ ID NO: 669168 - RNA, 19 nt, Artificial Sequence
  Description of Artificial Sequence: Synthetic oligonucleotide
  Sense strand starting at position 3895 of SEQ ID NO: 585806
ugucacagagccuacaaua

SEQ ID NO: 669169 - RNA, 19 nt, Artificial Sequence
  Description of Artificial Sequence: Synthetic oligonucleotide
  Antisense strand to SEQ ID NO: 669168
uauuguaggcucugugaca

SEQ ID NO: 669170 - RNA, 19 nt, Artificial Sequence
  Description of Artificial Sequence: Synthetic oligonucleotide
  Sense strand starting at position 207 of SEQ ID NO: 585807
uuggcuaaaucagcugaaa

SEQ ID NO: 669171 - RNA, 19 nt, Artificial Sequence
  Description of Artificial Sequence: Synthetic oligonucleotide
  Antisense strand to SEQ ID NO: 669170
uuucagcugauuuagccaa

SEQ ID NO: 669172 - RNA, 19 nt, Artificial Sequence
  Description of Artificial Sequence: Synthetic oligonucleotide
  Sense strand starting at position 219 of SEQ ID NO: 585807
gcugaaacuggguaauuac

SEQ ID NO: 669173 - RNA, 19 nt, Artificial Sequence
  Description of Artificial Sequence: Synthetic oligonucleotide
  Antisense strand to SEQ ID NO: 669172
guaauuacccaguuucagc

SEQ ID NO: 669174 - RNA, 19 nt, Artificial Sequence
  Description of Artificial Sequence: Synthetic oligonucleotide
  Sense strand starting at position 222 of SEQ ID NO: 585807
gaaacuggguaauuacuua

SEQ ID NO: 669175 - RNA, 19 nt, Artificial Sequence
  Description of Artificial Sequence: Synthetic oligonucleotide
  Antisense strand to SEQ ID NO: 669174
uaaguaauuacccaguuuc

SEQ ID NO: 669176 - RNA, 19 nt, Artificial Sequence
  Description of Artificial Sequence: Synthetic oligonucleotide
  Sense strand starting at position 226 of SEQ ID NO: 585807
cuggguaauuacuuauaga

SEQ ID NO: 669177 - RNA, 19 nt, Artificial Sequence
  Description of Artificial Sequence: Synthetic oligonucleotide
  Antisense strand to SEQ ID NO: 669176
ucuauaaguaauuacccag

SEQ ID NO: 669178 - RNA, 19 nt, Artificial Sequence
  Description of Artificial Sequence: Synthetic oligonucleotide
  Sense strand starting at position 285 of SEQ ID NO: 585807
auagguguguggacgugau

SEQ ID NO: 669179 - RNA, 19 nt, Artificial Sequence
  Description of Artificial Sequence: Synthetic oligonucleotide
  Antisense strand to SEQ ID NO: 669178
aucacguccacacaccuau

SEQ ID NO: 669180 - RNA, 19 nt, Artificial Sequence
  Description of Artificial Sequence: Synthetic oligonucleotide
  Sense strand starting at position 289 of SEQ ID NO: 585807
guguguggacgugauacaa

SEQ ID NO: 669181 - RNA, 19 nt, Artificial Sequence
  Description of Artificial Sequence: Synthetic oligonucleotide
  Antisense strand to SEQ ID NO: 669180
uuguaucacguccacacac

SEQ ID NO: 669182 - RNA, 19 nt, Artificial Sequence
  Description of Artificial Sequence: Synthetic oligonucleotide
  Sense strand starting at position 390 of SEQ ID NO: 585807
ugcugcauuugcucuuauu

SEQ ID NO: 669183 - RNA, 19 nt, Artificial Sequence
  Description of Artificial Sequence: Synthetic oligonucleotide
  Antisense strand to SEQ ID NO: 669182
aauaagagcaaaugcagca

SEQ ID NO: 669184 - RNA, 19 nt, Artificial Sequence
  Description of Artificial Sequence: Synthetic oligonucleotide
  Sense strand starting at position 399 of SEQ ID NO: 585807
ugcucuuauuuggaauaag

SEQ ID NO: 669185 - RNA, 19 nt, Artificial Sequence
  Description of Artificial Sequence: Synthetic oligonucleotide
  Antisense strand to SEQ ID NO: 669184
cuuauuccaaauaagagca

SEQ ID NO: 669186 - RNA, 19 nt, Artificial Sequence
  Description of Artificial Sequence: Synthetic oligonucleotide
  Sense strand starting at position 538 of SEQ ID NO: 585807
uuuccucaucucuguagga

SEQ ID NO: 669187 - RNA, 19 nt, Artificial Sequence
  Description of Artificial Sequence: Synthetic oligonucleotide
  Antisense strand to SEQ ID NO: 669186
uccuacagagaugaggaaa

SEQ ID NO: 669188 - RNA, 19 nt, Artificial Sequence
  Description of Artificial Sequence: Synthetic oligonucleotide
  Sense strand starting at position 539 of SEQ ID NO: 585807
uuccucaucucuguaggaa

SEQ ID NO: 669189 - RNA, 19 nt, Artificial Sequence
  Description of Artificial Sequence: Synthetic oligonucleotide
  Antisense strand to SEQ ID NO: 669188
uuccuacagagaugaggaa

SEQ ID NO: 669190 - RNA, 19 nt, Artificial Sequence
  Description of Artificial Sequence: Synthetic oligonucleotide
  Sense strand starting at position 540 of SEQ ID NO: 585807
uccucaucucuguaggaag

SEQ ID NO: 669191 - RNA, 19 nt, Artificial Sequence
  Description of Artificial Sequence: Synthetic oligonucleotide
  Antisense strand to SEQ ID NO: 669190
cuuccuacagagaugagga

SEQ ID NO: 669192 - RNA, 19 nt, Artificial Sequence
  Description of Artificial Sequence: Synthetic oligonucleotide
  Sense strand starting at position 556 of SEQ ID NO: 585807
aagcaaugagauuggccau

SEQ ID NO: 669193 - RNA, 19 nt, Artificial Sequence
  Description of Artificial Sequence: Synthetic oligonucleotide
  Antisense strand to SEQ ID NO: 669192
auggccaaucucauugcuu

SEQ ID NO: 669194 - RNA, 19 nt, Artificial Sequence
  Description of Artificial Sequence: Synthetic oligonucleotide
  Sense strand starting at position 562 of SEQ ID NO: 585807
ugagauuggccaugugaga

SEQ ID NO: 669195 - RNA, 19 nt, Artificial Sequence
  Description of Artificial Sequence: Synthetic oligonucleotide
  Antisense strand to SEQ ID NO: 669194
ucucacauggccaaucuca

SEQ ID NO: 669196 - RNA, 19 nt, Artificial Sequence
  Description of Artificial Sequence: Synthetic oligonucleotide
  Sense strand starting at position 891 of SEQ ID NO: 585807
auaauagugccauagcaug

SEQ ID NO: 669197 - RNA, 19 nt, Artificial Sequence
  Description of Artificial Sequence: Synthetic oligonucleotide
  Antisense strand to SEQ ID NO: 669196
caugcuauggcacuauuau

SEQ ID NO: 669198 - RNA, 19 nt, Artificial Sequence
  Description of Artificial Sequence: Synthetic oligonucleotide
  Sense strand starting at position 1160 of SEQ ID NO: 585807
uuccuuauugcugggacau

SEQ ID NO: 669199 - RNA, 19 nt, Artificial Sequence
  Description of Artificial Sequence: Synthetic oligonucleotide
  Antisense strand to SEQ ID NO: 669198
augucccagcaauaaggaa

SEQ ID NO: 669200 - RNA, 19 nt, Artificial Sequence
  Description of Artificial Sequence: Synthetic oligonucleotide
  Sense strand starting at position 1161 of SEQ ID NO: 585807
uccuuauugcugggacaug

SEQ ID NO: 669201 - RNA, 19 nt, Artificial Sequence
  Description of Artificial Sequence: Synthetic oligonucleotide
  Antisense strand to SEQ ID NO: 669200
caugucccagcaauaagga

SEQ ID NO: 669202 - RNA, 19 nt, Artificial Sequence
  Description of Artificial Sequence: Synthetic oligonucleotide
  Sense strand starting at position 1227 of SEQ ID NO: 585807
uccaguuauucuccagaca

SEQ ID NO: 669203 - RNA, 19 nt, Artificial Sequence
  Description of Artificial Sequence: Synthetic oligonucleotide
  Antisense strand to SEQ ID NO: 669202
ugucuggagaauaacugga

SEQ ID NO: 669204 - RNA, 19 nt, Artificial Sequence
  Description of Artificial Sequence: Synthetic oligonucleotide
  Sense strand starting at position 1260 of SEQ ID NO: 585807
uguucucauuuggaaacua

SEQ ID NO: 669205 - RNA, 19 nt, Artificial Sequence
  Description of Artificial Sequence: Synthetic oligonucleotide
  Antisense strand to SEQ ID NO: 669204
uaguuuccaaaugagaaca

SEQ ID NO: 669206 - RNA, 19 nt, Artificial Sequence
  Description of Artificial Sequence: Synthetic oligonucleotide
  Sense strand starting at position 1932 of SEQ ID NO: 585807
aguuuaccucugcaaguga

SEQ ID NO: 669207 - RNA, 19 nt, Artificial Sequence
  Description of Artificial Sequence: Synthetic oligonucleotide
  Antisense strand to SEQ ID NO: 669206
ucacuugcagagguaaacu

SEQ ID NO: 669208 - RNA, 19 nt, Artificial Sequence
  Description of Artificial Sequence: Synthetic oligonucleotide
  Sense strand starting at position 2062 of SEQ ID NO: 585807
gaugccugucguguuuauu

SEQ ID NO: 669209 - RNA, 19 nt, Artificial Sequence
  Description of Artificial Sequence: Synthetic oligonucleotide
  Antisense strand to SEQ ID NO: 669208
aauaaacacgacaggcauc

SEQ ID NO: 669210 - RNA, 19 nt, Artificial Sequence
  Description of Artificial Sequence: Synthetic oligonucleotide
  Sense strand starting at position 2063 of SEQ ID NO: 585807
augccugucguguuuauua

SEQ ID NO: 669211 - RNA, 19 nt, Artificial Sequence
  Description of Artificial Sequence: Synthetic oligonucleotide
  Antisense strand to SEQ ID NO: 669210
uaauaaacacgacaggcau

SEQ ID NO: 669212 - RNA, 19 nt, Artificial Sequence
  Description of Artificial Sequence: Synthetic oligonucleotide
  Sense strand starting at position 2165 of SEQ ID NO: 585807
agugcuggcccauaucaca

SEQ ID NO: 669213 - RNA, 19 nt, Artificial Sequence
  Description of Artificial Sequence: Synthetic oligonucleotide
  Antisense strand to SEQ ID NO: 669212
ugugauaugggccagcacu

SEQ ID NO: 669214 - RNA, 19 nt, Artificial Sequence
  Description of Artificial Sequence: Synthetic oligonucleotide
  Sense strand starting at position 2332 of SEQ ID NO: 585807
ucagaacccugguccagau

SEQ ID NO: 669215 - RNA, 19 nt, Artificial Sequence
  Description of Artificial Sequence: Synthetic oligonucleotide
  Antisense strand to SEQ ID NO: 669214
aucuggaccaggguucuga

SEQ ID NO: 669216 - RNA, 19 nt, Artificial Sequence
  Description of Artificial Sequence: Synthetic oligonucleotide
  Sense strand starting at position 2378 of SEQ ID NO: 585807
gggcucauucuccaaccaa

SEQ ID NO: 669217 - RNA, 19 nt, Artificial Sequence
  Description of Artificial Sequence: Synthetic oligonucleotide
  Antisense strand to SEQ ID NO: 669216
uugguuggagaaugagccc

SEQ ID NO: 669218 - RNA, 19 nt, Artificial Sequence
  Description of Artificial Sequence: Synthetic oligonucleotide
  Sense strand starting at position 2472 of SEQ ID NO: 585807
aaguguuugcuccaaucug

SEQ ID NO: 669219 - RNA, 19 nt, Artificial Sequence
  Description of Artificial Sequence: Synthetic oligonucleotide
  Antisense strand to SEQ ID NO: 669218
cagauuggagcaaacacuu

SEQ ID NO: 669220 - RNA, 19 nt, Artificial Sequence
  Description of Artificial Sequence: Synthetic oligonucleotide
  Sense strand starting at position 2553 of SEQ ID NO: 585807
aguguuuacgucgcagaca

SEQ ID NO: 669221 - RNA, 19 nt, Artificial Sequence
  Description of Artificial Sequence: Synthetic oligonucleotide
  Antisense strand to SEQ ID NO: 669220
ugucugcgacguaaacacu

SEQ ID NO: 669222 - RNA, 19 nt, Artificial Sequence
  Description of Artificial Sequence: Synthetic oligonucleotide
  Sense strand starting at position 2878 of SEQ ID NO: 585807
aacagugggccguaaagaa

SEQ ID NO: 669223 - RNA, 19 nt, Artificial Sequence
  Description of Artificial Sequence: Synthetic oligonucleotide
  Antisense strand to SEQ ID NO: 669222
uucuuuacggcccacuguu

SEQ ID NO: 669224 - RNA, 19 nt, Artificial Sequence
  Description of Artificial Sequence: Synthetic oligonucleotide
  Sense strand starting at position 3186 of SEQ ID NO: 585807
ggccgugagccuuaggaua

SEQ ID NO: 669225 - RNA, 19 nt, Artificial Sequence
  Description of Artificial Sequence: Synthetic oligonucleotide
  Antisense strand to SEQ ID NO: 669224
uauccuaaggcucacggcc

SEQ ID NO: 669226 - RNA, 19 nt, Artificial Sequence
  Description of Artificial Sequence: Synthetic oligonucleotide
  Sense strand starting at position 3249 of SEQ ID NO: 585807
aucucuuuaggaugauguu

SEQ ID NO: 669227 - RNA, 19 nt, Artificial Sequence
  Description of Artificial Sequence: Synthetic oligonucleotide
  Antisense strand to SEQ ID NO: 669226
aacaucauccuaaagagau

SEQ ID NO: 669228 - RNA, 19 nt, Artificial Sequence
  Description of Artificial Sequence: Synthetic oligonucleotide
  Sense strand starting at position 3301 of SEQ ID NO: 585807
gucuuuccugguggacaaa

SEQ ID NO: 669229 - RNA, 19 nt, Artificial Sequence
  Description of Artificial Sequence: Synthetic oligonucleotide
  Antisense strand to SEQ ID NO: 669228
uuuguccaccaggaaagac

SEQ ID NO: 669230 - RNA, 19 nt, Artificial Sequence
  Description of Artificial Sequence: Synthetic oligonucleotide
  Sense strand starting at position 3324 of SEQ ID NO: 585807
uucuuaauacaucgugauc

SEQ ID NO: 669231 - RNA, 19 nt, Artificial Sequence
  Description of Artificial Sequence: Synthetic oligonucleotide
  Antisense strand to SEQ ID NO: 669230
gaucacgauguauuaagaa

SEQ ID NO: 669232 - RNA, 19 nt, Artificial Sequence
  Description of Artificial Sequence: Synthetic oligonucleotide
  Sense strand starting at position 3366 of SEQ ID NO: 585807
gcugacauaucugcaaacu

SEQ ID NO: 669233 - RNA, 19 nt, Artificial Sequence
  Description of Artificial Sequence: Synthetic oligonucleotide
  Antisense strand to SEQ ID NO: 669232
aguuugcagauaugucagc

SEQ ID NO: 669234 - RNA, 19 nt, Artificial Sequence
  Description of Artificial Sequence: Synthetic oligonucleotide
  Sense strand starting at position 3390 of SEQ ID NO: 585807
ccagaaaguuaacccgauu

SEQ ID NO: 669235 - RNA, 19 nt, Artificial Sequence
  Description of Artificial Sequence: Synthetic oligonucleotide
  Antisense strand to SEQ ID NO: 669234
aaucggguuaacuuucugg

SEQ ID NO: 669236 - RNA, 19 nt, Artificial Sequence
  Description of Artificial Sequence: Synthetic oligonucleotide
  Sense strand starting at position 3435 of SEQ ID NO: 585807
auagucagcagguguaaua

SEQ ID NO: 669237 - RNA, 19 nt, Artificial Sequence
  Description of Artificial Sequence: Synthetic oligonucleotide
  Antisense strand to SEQ ID NO: 669236
uauuacaccugcugacuau

SEQ ID NO: 669238 - RNA, 19 nt, Artificial Sequence
  Description of Artificial Sequence: Synthetic oligonucleotide
  Sense strand starting at position 3746 of SEQ ID NO: 585807
ccgucaaagagcuguagga

SEQ ID NO: 669239 - RNA, 19 nt, Artificial Sequence
  Description of Artificial Sequence: Synthetic oligonucleotide
  Antisense strand to SEQ ID NO: 669238
uccuacagcucuuugacgg

SEQ ID NO: 669240 - RNA, 19 nt, Artificial Sequence
  Description of Artificial Sequence: Synthetic oligonucleotide
  Sense strand starting at position 3765 of SEQ ID NO: 585807
gggcgaguuaaagaguuaa

SEQ ID NO: 669241 - RNA, 19 nt, Artificial Sequence
  Description of Artificial Sequence: Synthetic oligonucleotide
  Antisense strand to SEQ ID NO: 669240
uuaacucuuuaacucgccc

SEQ ID NO: 669242 - RNA, 19 nt, Artificial Sequence
  Description of Artificial Sequence: Synthetic oligonucleotide
  Sense strand starting at position 3786 of SEQ ID NO: 585807
agugacagagguugucaaa

SEQ ID NO: 669243 - RNA, 19 nt, Artificial Sequence
  Description of Artificial Sequence: Synthetic oligonucleotide
  Antisense strand to SEQ ID NO: 669242
uuugacaaccucugucacu

SEQ ID NO: 669244 - RNA, 19 nt, Artificial Sequence
  Description of Artificial Sequence: Synthetic oligonucleotide
  Sense strand starting at position 3796 of SEQ ID NO: 585807
guugucaaacuuuacucua

SEQ ID NO: 669245 - RNA, 19 nt, Artificial Sequence
  Description of Artificial Sequence: Synthetic oligonucleotide
  Antisense strand to SEQ ID NO: 669244
uagaguaaaguuugacaac

SEQ ID NO: 669246 - RNA, 19 nt, Artificial Sequence
  Description of Artificial Sequence: Synthetic oligonucleotide
  Sense strand starting at position 3877 of SEQ ID NO: 585807
ggguuugacucacuuaaca

SEQ ID NO: 669247 - RNA, 19 nt, Artificial Sequence
  Description of Artificial Sequence: Synthetic oligonucleotide
  Antisense strand to SEQ ID NO: 669246
uguuaagugagucaaaccc

SEQ ID NO: 669248 - RNA, 19 nt, Artificial Sequence
  Description of Artificial Sequence: Synthetic oligonucleotide
  Sense strand starting at position 3979 of SEQ ID NO: 585807
guugaaauuugcuacaaau

SEQ ID NO: 669249 - RNA, 19 nt, Artificial Sequence
  Description of Artificial Sequence: Synthetic oligonucleotide
  Antisense strand to SEQ ID NO: 669248
auuuguagcaaauuucaac

SEQ ID NO: 669250 - RNA, 19 nt, Artificial Sequence
  Description of Artificial Sequence: Synthetic oligonucleotide
  Sense strand starting at position 19 of SEQ ID NO: 585808
ugcucagggcucuguaaag

SEQ ID NO: 669251 - RNA, 19 nt, Artificial Sequence
  Description of Artificial Sequence: Synthetic oligonucleotide
  Antisense strand to SEQ ID NO: 669250
cuuuacagagcccugagca

SEQ ID NO: 669252 - RNA, 19 nt, Artificial Sequence
  Description of Artificial Sequence: Synthetic oligonucleotide
  Sense strand starting at position 33 of SEQ ID NO: 585808
uaaagcuguucccugggaa

SEQ ID NO: 669253 - RNA, 19 nt, Artificial Sequence
  Description of Artificial Sequence: Synthetic oligonucleotide
  Antisense strand to SEQ ID NO: 669252
uucccagggaacagcuuua

SEQ ID NO: 669254 - RNA, 19 nt, Artificial Sequence
  Description of Artificial Sequence: Synthetic oligonucleotide
  Sense strand starting at position 34 of SEQ ID NO: 585808
aaagcuguucccugggaaa

SEQ ID NO: 669255 - RNA, 19 nt, Artificial Sequence
  Description of Artificial Sequence: Synthetic oligonucleotide
  Antisense strand to SEQ ID NO: 669254
uuucccagggaacagcuuu

SEQ ID NO: 669256 - RNA, 19 nt, Artificial Sequence
  Description of Artificial Sequence: Synthetic oligonucleotide
  Sense strand starting at position 134 of SEQ ID NO: 585808
agaaguuacugagaaacaa

SEQ ID NO: 669257 - RNA, 19 nt, Artificial Sequence
  Description of Artificial Sequence: Synthetic oligonucleotide
  Antisense strand to SEQ ID NO: 669256
uuguuucucaguaacuucu

SEQ ID NO: 669258 - RNA, 19 nt, Artificial Sequence
  Description of Artificial Sequence: Synthetic oligonucleotide
  Sense strand starting at position 287 of SEQ ID NO: 585808
aagaaauguuuggaaagca

SEQ ID NO: 669259 - RNA, 19 nt, Artificial Sequence
  Description of Artificial Sequence: Synthetic oligonucleotide
  Antisense strand to SEQ ID NO: 669258
ugcuuuccaaacauuucuu

SEQ ID NO: 669260 - RNA, 19 nt, Artificial Sequence
  Description of Artificial Sequence: Synthetic oligonucleotide
  Sense strand starting at position 356 of SEQ ID NO: 585808
uguguuggugacuguccaa

SEQ ID NO: 669261 - RNA, 19 nt, Artificial Sequence
  Description of Artificial Sequence: Synthetic oligonucleotide
  Antisense strand to SEQ ID NO: 669260
uuggacagucaccaacaca

SEQ ID NO: 669262 - RNA, 19 nt, Artificial Sequence
  Description of Artificial Sequence: Synthetic oligonucleotide
  Sense strand starting at position 382 of SEQ ID NO: 585808
uuccaagaucccuggguga

SEQ ID NO: 669263 - RNA, 19 nt, Artificial Sequence
  Description of Artificial Sequence: Synthetic oligonucleotide
  Antisense strand to SEQ ID NO: 669262
ucacccagggaucuuggaa

SEQ ID NO: 669264 - RNA, 19 nt, Artificial Sequence
  Description of Artificial Sequence: Synthetic oligonucleotide
  Sense strand starting at position 384 of SEQ ID NO: 585808
ccaagaucccugggugauc

SEQ ID NO: 669265 - RNA, 19 nt, Artificial Sequence
  Description of Artificial Sequence: Synthetic oligonucleotide
  Antisense strand to SEQ ID NO: 669264
gaucacccagggaucuugg

SEQ ID NO: 669266 - RNA, 19 nt, Artificial Sequence
  Description of Artificial Sequence: Synthetic oligonucleotide
  Sense strand starting at position 393 of SEQ ID NO: 585808
cugggugaucuggagcuaa

SEQ ID NO: 669267 - RNA, 19 nt, Artificial Sequence
  Description of Artificial Sequence: Synthetic oligonucleotide
  Antisense strand to SEQ ID NO: 669266
uuagcuccagaucacccag

SEQ ID NO: 669268 - RNA, 19 nt, Artificial Sequence
  Description of Artificial Sequence: Synthetic oligonucleotide
  Sense strand starting at position 397 of SEQ ID NO: 585808
gugaucuggagcuaauauc

SEQ ID NO: 669269 - RNA, 19 nt, Artificial Sequence
  Description of Artificial Sequence: Synthetic oligonucleotide
  Antisense strand to SEQ ID NO: 669268
gauauuagcuccagaucac

SEQ ID NO: 669270 - RNA, 19 nt, Artificial Sequence
  Description of Artificial Sequence: Synthetic oligonucleotide
  Sense strand starting at position 425 of SEQ ID NO: 585808
guuuaauuauuccuagaag

SEQ ID NO: 669271 - RNA, 19 nt, Artificial Sequence
  Description of Artificial Sequence: Synthetic oligonucleotide
  Antisense strand to SEQ ID NO: 669270
cuucuaggaauaauuaaac

SEQ ID NO: 669272 - RNA, 19 nt, Artificial Sequence
  Description of Artificial Sequence: Synthetic oligonucleotide
  Sense strand starting at position 454 of SEQ ID NO: 585808
ggagguauguuccugcuaa

SEQ ID NO: 669273 - RNA, 19 nt, Artificial Sequence
  Description of Artificial Sequence: Synthetic oligonucleotide
  Antisense strand to SEQ ID NO: 669272
uuagcaggaacauaccucc

SEQ ID NO: 669274 - RNA, 19 nt, Artificial Sequence
  Description of Artificial Sequence: Synthetic oligonucleotide
  Sense strand starting at position 503 of SEQ ID NO: 585808
gaguuacauccugagucuc

SEQ ID NO: 669275 - RNA, 19 nt, Artificial Sequence
  Description of Artificial Sequence: Synthetic oligonucleotide
  Antisense strand to SEQ ID NO: 669274
gagacucaggauguaacuc

SEQ ID NO: 669276 - RNA, 19 nt, Artificial Sequence
  Description of Artificial Sequence: Synthetic oligonucleotide
  Sense strand starting at position 557 of SEQ ID NO: 585808
gugguuaaaucaucaauac

SEQ ID NO: 669277 - RNA, 19 nt, Artificial Sequence
  Description of Artificial Sequence: Synthetic oligonucleotide
  Antisense strand to SEQ ID NO: 669276
guauugaugauuuaaccac

SEQ ID NO: 669278 - RNA, 19 nt, Artificial Sequence
  Description of Artificial Sequence: Synthetic oligonucleotide
  Sense strand starting at position 781 of SEQ ID NO: 585808
gagagaugcugaccucugu

SEQ ID NO: 669279 - RNA, 19 nt, Artificial Sequence
  Description of Artificial Sequence: Synthetic oligonucleotide
  Antisense strand to SEQ ID NO: 669278
acagaggucagcaucucuc

SEQ ID NO: 669280 - RNA, 19 nt, Artificial Sequence
  Description of Artificial Sequence: Synthetic oligonucleotide
  Sense strand starting at position 807 of SEQ ID NO: 585808
guugcuugaccagggauca

SEQ ID NO: 669281 - RNA, 19 nt, Artificial Sequence
  Description of Artificial Sequence: Synthetic oligonucleotide
  Antisense strand to SEQ ID NO: 669280
ugaucccuggucaagcaac

SEQ ID NO: 669282 - RNA, 19 nt, Artificial Sequence
  Description of Artificial Sequence: Synthetic oligonucleotide
  Sense strand starting at position 901 of SEQ ID NO: 585808
auagcuucugaguguccua

SEQ ID NO: 669283 - RNA, 19 nt, Artificial Sequence
  Description of Artificial Sequence: Synthetic oligonucleotide
  Antisense strand to SEQ ID NO: 669282
uaggacacucagaagcuau

SEQ ID NO: 669284 - RNA, 19 nt, Artificial Sequence
  Description of Artificial Sequence: Synthetic oligonucleotide
  Sense strand starting at position 1121 of SEQ ID NO: 585808
cucucacagcaaugguuua

SEQ ID NO: 669285 - RNA, 19 nt, Artificial Sequence
  Description of Artificial Sequence: Synthetic oligonucleotide
  Antisense strand to SEQ ID NO: 669284
uaaaccauugcugugagag

SEQ ID NO: 669286 - RNA, 19 nt, Artificial Sequence
  Description of Artificial Sequence: Synthetic oligonucleotide
  Sense strand starting at position 1189 of SEQ ID NO: 585808
acaaauaggucccugucaa

SEQ ID NO: 669287 - RNA, 19 nt, Artificial Sequence
  Description of Artificial Sequence: Synthetic oligonucleotide
  Antisense strand to SEQ ID NO: 669286
uugacagggaccuauuugu

SEQ ID NO: 669288 - RNA, 19 nt, Artificial Sequence
  Description of Artificial Sequence: Synthetic oligonucleotide
  Sense strand starting at position 1216 of SEQ ID NO: 585808
ucacuuguguggagggaga

SEQ ID NO: 669289 - RNA, 19 nt, Artificial Sequence
  Description of Artificial Sequence: Synthetic oligonucleotide
  Antisense strand to SEQ ID NO: 669288
ucucccuccacacaaguga

SEQ ID NO: 669290 - RNA, 19 nt, Artificial Sequence
  Description of Artificial Sequence: Synthetic oligonucleotide
  Sense strand starting at position 1232 of SEQ ID NO: 585808
agaucugcucaucaauagu

SEQ ID NO: 669291 - RNA, 19 nt, Artificial Sequence
  Description of Artificial Sequence: Synthetic oligonucleotide
  Antisense strand to SEQ ID NO: 669290
acuauugaugagcagaucu

SEQ ID NO: 669292 - RNA, 19 nt, Artificial Sequence
  Description of Artificial Sequence: Synthetic oligonucleotide
  Sense strand starting at position 1289 of SEQ ID NO: 585808
agauuaagguuucuacaau

SEQ ID NO: 669293 - RNA, 19 nt, Artificial Sequence
  Description of Artificial Sequence: Synthetic oligonucleotide
  Antisense strand to SEQ ID NO: 669292
auuguagaaaccuuaaucu

SEQ ID NO: 669294 - RNA, 19 nt, Artificial Sequence
  Description of Artificial Sequence: Synthetic oligonucleotide
  Sense strand starting at position 1539 of SEQ ID NO: 585808
ggcauaaacucagauuucu

SEQ ID NO: 669295 - RNA, 19 nt, Artificial Sequence
  Description of Artificial Sequence: Synthetic oligonucleotide
  Antisense strand to SEQ ID NO: 669294
agaaaucugaguuuaugcc

SEQ ID NO: 669296 - RNA, 19 nt, Artificial Sequence
  Description of Artificial Sequence: Synthetic oligonucleotide
  Sense strand starting at position 1561 of SEQ ID NO: 585808
cugagaacuccaggaggca

SEQ ID NO: 669297 - RNA, 19 nt, Artificial Sequence
  Description of Artificial Sequence: Synthetic oligonucleotide
  Antisense strand to SEQ ID NO: 669296
ugccuccuggaguucucag

SEQ ID NO: 669298 - RNA, 19 nt, Artificial Sequence
  Description of Artificial Sequence: Synthetic oligonucleotide
  Sense strand starting at position 1913 of SEQ ID NO: 585808
gugcuucucagacgacuca

SEQ ID NO: 669299 - RNA, 19 nt, Artificial Sequence
  Description of Artificial Sequence: Synthetic oligonucleotide
  Antisense strand to SEQ ID NO: 669298
ugagucgucugagaagcac

SEQ ID NO: 669300 - RNA, 19 nt, Artificial Sequence
  Description of Artificial Sequence: Synthetic oligonucleotide
  Sense strand starting at position 2084 of SEQ ID NO: 585808
gcauucuaccauugaggaa

SEQ ID NO: 669301 - RNA, 19 nt, Artificial Sequence
  Description of Artificial Sequence: Synthetic oligonucleotide
  Antisense strand to SEQ ID NO: 669300
uuccucaaugguagaaugc

SEQ ID NO: 669302 - RNA, 19 nt, Artificial Sequence
  Description of Artificial Sequence: Synthetic oligonucleotide
  Sense strand starting at position 2109 of SEQ ID NO: 585808
gcaguaaugcucugggaga

SEQ ID NO: 669303 - RNA, 19 nt, Artificial Sequence
  Description of Artificial Sequence: Synthetic oligonucleotide
  Antisense strand to SEQ ID NO: 669302
ucucccagagcauuacugc

SEQ ID NO: 669304 - RNA, 19 nt, Artificial Sequence
  Description of Artificial Sequence: Synthetic oligonucleotide
  Sense strand starting at position 2111 of SEQ ID NO: 585808
aguaaugcucugggagaga

SEQ ID NO: 669305 - RNA, 19 nt, Artificial Sequence
  Description of Artificial Sequence: Synthetic oligonucleotide
  Antisense strand to SEQ ID NO: 669304
ucucucccagagcauuacu

SEQ ID NO: 669306 - RNA, 19 nt, Artificial Sequence
  Description of Artificial Sequence: Synthetic oligonucleotide
  Sense strand starting at position 2535 of SEQ ID NO: 585808
ugguguuaaccucauaaag

SEQ ID NO: 669307 - RNA, 19 nt, Artificial Sequence
  Description of Artificial Sequence: Synthetic oligonucleotide
  Antisense strand to SEQ ID NO: 669306
cuuuaugagguuaacacca

SEQ ID NO: 669308 - RNA, 19 nt, Artificial Sequence
  Description of Artificial Sequence: Synthetic oligonucleotide
  Sense strand starting at position 2604 of SEQ ID NO: 585808
cagugagggcuuggauaag

SEQ ID NO: 669309 - RNA, 19 nt, Artificial Sequence
  Description of Artificial Sequence: Synthetic oligonucleotide
  Antisense strand to SEQ ID NO: 669308
cuuauccaagcccucacug

SEQ ID NO: 669310 - RNA, 19 nt, Artificial Sequence
  Description of Artificial Sequence: Synthetic oligonucleotide
  Sense strand starting at position 2720 of SEQ ID NO: 585808
aguggaauagcaugagcaa

SEQ ID NO: 669311 - RNA, 19 nt, Artificial Sequence
  Description of Artificial Sequence: Synthetic oligonucleotide
  Antisense strand to SEQ ID NO: 669310
uugcucaugcuauuccacu

SEQ ID NO: 669312 - RNA, 19 nt, Artificial Sequence
  Description of Artificial Sequence: Synthetic oligonucleotide
  Sense strand starting at position 2761 of SEQ ID NO: 585808
cgggcugggaacuauuaau

SEQ ID NO: 669313 - RNA, 19 nt, Artificial Sequence
  Description of Artificial Sequence: Synthetic oligonucleotide
  Antisense strand to SEQ ID NO: 669312
auuaauaguucccagcccg

SEQ ID NO: 669314 - RNA, 19 nt, Artificial Sequence
  Description of Artificial Sequence: Synthetic oligonucleotide
  Sense strand starting at position 2910 of SEQ ID NO: 585808
aagugaugugggcagguuu

SEQ ID NO: 669315 - RNA, 19 nt, Artificial Sequence
  Description of Artificial Sequence: Synthetic oligonucleotide
  Antisense strand to SEQ ID NO: 669314
aaaccugcccacaucacuu

SEQ ID NO: 669316 - RNA, 19 nt, Artificial Sequence
  Description of Artificial Sequence: Synthetic oligonucleotide
  Sense strand starting at position 3036 of SEQ ID NO: 585808
agagguguucugcggaagu

SEQ ID NO: 669317 - RNA, 19 nt, Artificial Sequence
  Description of Artificial Sequence: Synthetic oligonucleotide
  Antisense strand to SEQ ID NO: 669316
acuuccgcagaacaccucu

SEQ ID NO: 669318 - RNA, 19 nt, Artificial Sequence
  Description of Artificial Sequence: Synthetic oligonucleotide
  Sense strand starting at position 3073 of SEQ ID NO: 585808
agcugaacuguccagaaac

SEQ ID NO: 669319 - RNA, 19 nt, Artificial Sequence
  Description of Artificial Sequence: Synthetic oligonucleotide
  Antisense strand to SEQ ID NO: 669318
guuucuggacaguucagcu

SEQ ID NO: 669320 - RNA, 19 nt, Artificial Sequence
  Description of Artificial Sequence: Synthetic oligonucleotide
  Sense strand starting at position 3470 of SEQ ID NO: 585808
guggaaacuuaauuagcau

SEQ ID NO: 669321 - RNA, 19 nt, Artificial Sequence
  Description of Artificial Sequence: Synthetic oligonucleotide
  Antisense strand to SEQ ID NO: 669320
augcuaauuaaguuuccac

SEQ ID NO: 669322 - RNA, 19 nt, Artificial Sequence
  Description of Artificial Sequence: Synthetic oligonucleotide
  Sense strand starting at position 3596 of SEQ ID NO: 585808
cugagcuuccaguaggacu

SEQ ID NO: 669323 - RNA, 19 nt, Artificial Sequence
  Description of Artificial Sequence: Synthetic oligonucleotide
  Antisense strand to SEQ ID NO: 669322
aguccuacuggaagcucag

SEQ ID NO: 669324 - RNA, 19 nt, Artificial Sequence
  Description of Artificial Sequence: Synthetic oligonucleotide
  Sense strand starting at position 3671 of SEQ ID NO: 585808
ggcccaguuuccuccagaa

SEQ ID NO: 669325 - RNA, 19 nt, Artificial Sequence
  Description of Artificial Sequence: Synthetic oligonucleotide
  Antisense strand to SEQ ID NO: 669324
uucuggaggaaacugggcc

SEQ ID NO: 669326 - RNA, 19 nt, Artificial Sequence
  Description of Artificial Sequence: Synthetic oligonucleotide
  Sense strand starting at position 3877 of SEQ ID NO: 585808
cugguaucucccgagagug

SEQ ID NO: 669327 - RNA, 19 nt, Artificial Sequence
  Description of Artificial Sequence: Synthetic oligonucleotide
  Antisense strand to SEQ ID NO: 669326
cacucucgggagauaccag

SEQ ID NO: 669328 - RNA, 19 nt, Artificial Sequence
  Description of Artificial Sequence: Synthetic oligonucleotide
  Sense strand starting at position 3918 of SEQ ID NO: 585808
gggaguuaucagcaucuuc

SEQ ID NO: 669329 - RNA, 19 nt, Artificial Sequence
  Description of Artificial Sequence: Synthetic oligonucleotide
  Antisense strand to SEQ ID NO: 669328
gaagaugcugauaacuccc

SEQ ID NO: 669330 - RNA, 19 nt, Artificial Sequence
  Description of Artificial Sequence: Synthetic oligonucleotide
  Sense strand starting at position 21 of SEQ ID NO: 585809
aauauugcccuccgugaag

SEQ ID NO: 669331 - RNA, 19 nt, Artificial Sequence
  Description of Artificial Sequence: Synthetic oligonucleotide
  Antisense strand to SEQ ID NO: 669330
cuucacggagggcaauauu

SEQ ID NO: 669332 - RNA, 19 nt, Artificial Sequence
  Description of Artificial Sequence: Synthetic oligonucleotide
  Sense strand starting at position 178 of SEQ ID NO: 585809
gagcauuucuggccagguu

SEQ ID NO: 669333 - RNA, 19 nt, Artificial Sequence
  Description of Artificial Sequence: Synthetic oligonucleotide
  Antisense strand to SEQ ID NO: 669332
aaccuggccagaaaugcuc

SEQ ID NO: 669334 - RNA, 19 nt, Artificial Sequence
  Description of Artificial Sequence: Synthetic oligonucleotide
  Sense strand starting at position 212 of SEQ ID NO: 585809
caaugauuaugaugaugua

SEQ ID NO: 669335 - RNA, 19 nt, Artificial Sequence
  Description of Artificial Sequence: Synthetic oligonucleotide
  Antisense strand to SEQ ID NO: 669334
uacaucaucauaaucauug

SEQ ID NO: 669336 - RNA, 19 nt, Artificial Sequence
  Description of Artificial Sequence: Synthetic oligonucleotide
  Sense strand starting at position 215 of SEQ ID NO: 585809
ugauuaugaugauguaaga

SEQ ID NO: 669337 - RNA, 19 nt, Artificial Sequence
  Description of Artificial Sequence: Synthetic oligonucleotide
  Antisense strand to SEQ ID NO: 669336
ucuuacaucaucauaauca

SEQ ID NO: 669338 - RNA, 19 nt, Artificial Sequence
  Description of Artificial Sequence: Synthetic oligonucleotide
  Sense strand starting at position 225 of SEQ ID NO: 585809
gauguaagaguuuaucuua

SEQ ID NO: 669339 - RNA, 19 nt, Artificial Sequence
  Description of Artificial Sequence: Synthetic oligonucleotide
  Antisense strand to SEQ ID NO: 669338
uaagauaaacucuuacauc

SEQ ID NO: 669340 - RNA, 19 nt, Artificial Sequence
  Description of Artificial Sequence: Synthetic oligonucleotide
  Sense strand starting at position 228 of SEQ ID NO: 585809
guaagaguuuaucuuacac

SEQ ID NO: 669341 - RNA, 19 nt, Artificial Sequence
  Description of Artificial Sequence: Synthetic oligonucleotide
  Antisense strand to SEQ ID NO: 669340
guguaagauaaacucuuac

SEQ ID NO: 669342 - RNA, 19 nt, Artificial Sequence
  Description of Artificial Sequence: Synthetic oligonucleotide
  Sense strand starting at position 459 of SEQ ID NO: 585809
augucuugauaucucuuau

SEQ ID NO: 669343 - RNA, 19 nt, Artificial Sequence
  Description of Artificial Sequence: Synthetic oligonucleotide
  Antisense strand to SEQ ID NO: 669342
auaagagauaucaagacau

SEQ ID NO: 669344 - RNA, 19 nt, Artificial Sequence
  Description of Artificial Sequence: Synthetic oligonucleotide
  Sense strand starting at position 508 of SEQ ID NO: 585809
ggcauugaguguccaccau

SEQ ID NO: 669345 - RNA, 19 nt, Artificial Sequence
  Description of Artificial Sequence: Synthetic oligonucleotide
  Antisense strand to SEQ ID NO: 669344
augguggacacucaaugcc

SEQ ID NO: 669346 - RNA, 19 nt, Artificial Sequence
  Description of Artificial Sequence: Synthetic oligonucleotide
  Sense strand starting at position 592 of SEQ ID NO: 585809
gcaauaccucugcaaggga

SEQ ID NO: 669347 - RNA, 19 nt, Artificial Sequence
  Description of Artificial Sequence: Synthetic oligonucleotide
  Antisense strand to SEQ ID NO: 669346
ucccuugcagagguauugc

SEQ ID NO: 669348 - RNA, 19 nt, Artificial Sequence
  Description of Artificial Sequence: Synthetic oligonucleotide
  Sense strand starting at position 607 of SEQ ID NO: 585809
gggagcuuuagcuacagga

SEQ ID NO: 669349 - RNA, 19 nt, Artificial Sequence
  Description of Artificial Sequence: Synthetic oligonucleotide
  Antisense strand to SEQ ID NO: 669348
uccuguagcuaaagcuccc

SEQ ID NO: 669350 - RNA, 19 nt, Artificial Sequence
  Description of Artificial Sequence: Synthetic oligonucleotide
  Sense strand starting at position 609 of SEQ ID NO: 585809
gagcuuuagcuacaggacu

SEQ ID NO: 669351 - RNA, 19 nt, Artificial Sequence
  Description of Artificial Sequence: Synthetic oligonucleotide
  Antisense strand to SEQ ID NO: 669350
aguccuguagcuaaagcuc

SEQ ID NO: 669352 - RNA, 19 nt, Artificial Sequence
  Description of Artificial Sequence: Synthetic oligonucleotide
  Sense strand starting at position 632 of SEQ ID NO: 585809
ggacaaggugcauguuuca

SEQ ID NO: 669353 - RNA, 19 nt, Artificial Sequence
  Description of Artificial Sequence: Synthetic oligonucleotide
  Antisense strand to SEQ ID NO: 669352
ugaaacaugcaccuugucc

SEQ ID NO: 669354 - RNA, 19 nt, Artificial Sequence
  Description of Artificial Sequence: Synthetic oligonucleotide
  Sense strand starting at position 745 of SEQ ID NO: 585809
gcguccuuccuauacugua

SEQ ID NO: 669355 - RNA, 19 nt, Artificial Sequence
  Description of Artificial Sequence: Synthetic oligonucleotide
  Antisense strand to SEQ ID NO: 669354
uacaguauaggaaggacgc

SEQ ID NO: 669356 - RNA, 19 nt, Artificial Sequence
  Description of Artificial Sequence: Synthetic oligonucleotide
  Sense strand starting at position 750 of SEQ ID NO: 585809
cuuccuauacuguagugau

SEQ ID NO: 669357 - RNA, 19 nt, Artificial Sequence
  Description of Artificial Sequence: Synthetic oligonucleotide
  Antisense strand to SEQ ID NO: 669356
aucacuacaguauaggaag

SEQ ID NO: 669358 - RNA, 19 nt, Artificial Sequence
  Description of Artificial Sequence: Synthetic oligonucleotide
  Sense strand starting at position 760 of SEQ ID NO: 585809
uguagugauguuuacugaa

SEQ ID NO: 669359 - RNA, 19 nt, Artificial Sequence
  Description of Artificial Sequence: Synthetic oligonucleotide
  Antisense strand to SEQ ID NO: 669358
uucaguaaacaucacuaca

SEQ ID NO: 669360 - RNA, 19 nt, Artificial Sequence
  Description of Artificial Sequence: Synthetic oligonucleotide
  Sense strand starting at position 762 of SEQ ID NO: 585809
uagugauguuuacugaagu

SEQ ID NO: 669361 - RNA, 19 nt, Artificial Sequence
  Description of Artificial Sequence: Synthetic oligonucleotide
  Antisense strand to SEQ ID NO: 669360
acuucaguaaacaucacua

SEQ ID NO: 669362 - RNA, 19 nt, Artificial Sequence
  Description of Artificial Sequence: Synthetic oligonucleotide
  Sense strand starting at position 895 of SEQ ID NO: 585809
gcucuccaguucuuuagua

SEQ ID NO: 669363 - RNA, 19 nt, Artificial Sequence
  Description of Artificial Sequence: Synthetic oligonucleotide
  Antisense strand to SEQ ID NO: 669362
uacuaaagaacuggagagc

SEQ ID NO: 669364 - RNA, 19 nt, Artificial Sequence
  Description of Artificial Sequence: Synthetic oligonucleotide
  Sense strand starting at position 911 of SEQ ID NO: 585809
guaggcuuuaccuguguca

SEQ ID NO: 669365 - RNA, 19 nt, Artificial Sequence
  Description of Artificial Sequence: Synthetic oligonucleotide
  Antisense strand to SEQ ID NO: 669364
ugacacagguaaagccuac

SEQ ID NO: 669366 - RNA, 19 nt, Artificial Sequence
  Description of Artificial Sequence: Synthetic oligonucleotide
  Sense strand starting at position 913 of SEQ ID NO: 585809
aggcuuuaccugugucaaa

SEQ ID NO: 669367 - RNA, 19 nt, Artificial Sequence
  Description of Artificial Sequence: Synthetic oligonucleotide
  Antisense strand to SEQ ID NO: 669366
uuugacacagguaaagccu

SEQ ID NO: 669368 - RNA, 19 nt, Artificial Sequence
  Description of Artificial Sequence: Synthetic oligonucleotide
  Sense strand starting at position 949 of SEQ ID NO: 585809
agacuauugcuuuguggga

SEQ ID NO: 669369 - RNA, 19 nt, Artificial Sequence
  Description of Artificial Sequence: Synthetic oligonucleotide
  Antisense strand to SEQ ID NO: 669368
ucccacaaagcaauagucu

SEQ ID NO: 669370 - RNA, 19 nt, Artificial Sequence
  Description of Artificial Sequence: Synthetic oligonucleotide
  Sense strand starting at position 1128 of SEQ ID NO: 585809
acaggaguuugggugcaaa

SEQ ID NO: 669371 - RNA, 19 nt, Artificial Sequence
  Description of Artificial Sequence: Synthetic oligonucleotide
  Antisense strand to SEQ ID NO: 669370
uuugcacccaaacuccugu

SEQ ID NO: 669372 - RNA, 19 nt, Artificial Sequence
  Description of Artificial Sequence: Synthetic oligonucleotide
  Sense strand starting at position 1131 of SEQ ID NO: 585809
ggaguuugggugcaaacua

SEQ ID NO: 669373 - RNA, 19 nt, Artificial Sequence
  Description of Artificial Sequence: Synthetic oligonucleotide
  Antisense strand to SEQ ID NO: 669372
uaguuugcacccaaacucc

SEQ ID NO: 669374 - RNA, 19 nt, Artificial Sequence
  Description of Artificial Sequence: Synthetic oligonucleotide
  Sense strand starting at position 1136 of SEQ ID NO: 585809
uugggugcaaacuaguaaa

SEQ ID NO: 669375 - RNA, 19 nt, Artificial Sequence
  Description of Artificial Sequence: Synthetic oligonucleotide
  Antisense strand to SEQ ID NO: 669374
uuuacuaguuugcacccaa

SEQ ID NO: 669376 - RNA, 19 nt, Artificial Sequence
  Description of Artificial Sequence: Synthetic oligonucleotide
  Sense strand starting at position 1178 of SEQ ID NO: 585809
caaguaaaggcaugugguu

SEQ ID NO: 669377 - RNA, 19 nt, Artificial Sequence
  Description of Artificial Sequence: Synthetic oligonucleotide
  Antisense strand to SEQ ID NO: 669376
aaccacaugccuuuacuug

SEQ ID NO: 669378 - RNA, 19 nt, Artificial Sequence
  Description of Artificial Sequence: Synthetic oligonucleotide
  Sense strand starting at position 1211 of SEQ ID NO: 585809
agauuaagccaaugcggaa

SEQ ID NO: 669379 - RNA, 19 nt, Artificial Sequence
  Description of Artificial Sequence: Synthetic oligonucleotide
  Antisense strand to SEQ ID NO: 669378
uuccgcauuggcuuaaucu

SEQ ID NO: 669380 - RNA, 19 nt, Artificial Sequence
  Description of Artificial Sequence: Synthetic oligonucleotide
  Sense strand starting at position 1700 of SEQ ID NO: 585809
gcacgagggucuucugaua

SEQ ID NO: 669381 - RNA, 19 nt, Artificial Sequence
  Description of Artificial Sequence: Synthetic oligonucleotide
  Antisense strand to SEQ ID NO: 669380
uaucagaagacccucgugc

SEQ ID NO: 669382 - RNA, 19 nt, Artificial Sequence
  Description of Artificial Sequence: Synthetic oligonucleotide
  Sense strand starting at position 1758 of SEQ ID NO: 585809
gucauaguccagcaacaag

SEQ ID NO: 669383 - RNA, 19 nt, Artificial Sequence
  Description of Artificial Sequence: Synthetic oligonucleotide
  Antisense strand to SEQ ID NO: 669382
cuuguugcuggacuaugac

SEQ ID NO: 669384 - RNA, 19 nt, Artificial Sequence
  Description of Artificial Sequence: Synthetic oligonucleotide
  Sense strand starting at position 2434 of SEQ ID NO: 585809
cgcuguauuucuccgacuu

SEQ ID NO: 669385 - RNA, 19 nt, Artificial Sequence
  Description of Artificial Sequence: Synthetic oligonucleotide
  Antisense strand to SEQ ID NO: 669384
aagucggagaaauacagcg

SEQ ID NO: 669386 - RNA, 19 nt, Artificial Sequence
  Description of Artificial Sequence: Synthetic oligonucleotide
  Sense strand starting at position 2435 of SEQ ID NO: 585809
gcuguauuucuccgacuuc

SEQ ID NO: 669387 - RNA, 19 nt, Artificial Sequence
  Description of Artificial Sequence: Synthetic oligonucleotide
  Antisense strand to SEQ ID NO: 669386
gaagucggagaaauacagc

SEQ ID NO: 669388 - RNA, 19 nt, Artificial Sequence
  Description of Artificial Sequence: Synthetic oligonucleotide
  Sense strand starting at position 3251 of SEQ ID NO: 585809
caguauaaacgugauggca

SEQ ID NO: 669389 - RNA, 19 nt, Artificial Sequence
  Description of Artificial Sequence: Synthetic oligonucleotide
  Antisense strand to SEQ ID NO: 669388
ugccaucacguuuauacug

SEQ ID NO: 669390 - RNA, 19 nt, Artificial Sequence
  Description of Artificial Sequence: Synthetic oligonucleotide
  Sense strand starting at position 3397 of SEQ ID NO: 585809
cagccagcgcuguauaaau

SEQ ID NO: 669391 - RNA, 19 nt, Artificial Sequence
  Description of Artificial Sequence: Synthetic oligonucleotide
  Antisense strand to SEQ ID NO: 669390
auuuauacagcgcuggcug

SEQ ID NO: 669392 - RNA, 19 nt, Artificial Sequence
  Description of Artificial Sequence: Synthetic oligonucleotide
  Sense strand starting at position 3399 of SEQ ID NO: 585809
gccagcgcuguauaaauaa

SEQ ID NO: 669393 - RNA, 19 nt, Artificial Sequence
  Description of Artificial Sequence: Synthetic oligonucleotide
  Antisense strand to SEQ ID NO: 669392
uuauuuauacagcgcuggc

SEQ ID NO: 669394 - RNA, 19 nt, Artificial Sequence
  Description of Artificial Sequence: Synthetic oligonucleotide
  Sense strand starting at position 3428 of SEQ ID NO: 585809
gcggcaaacggcuacauua

SEQ ID NO: 669395 - RNA, 19 nt, Artificial Sequence
  Description of Artificial Sequence: Synthetic oligonucleotide
  Antisense strand to SEQ ID NO: 669394
uaauguagccguuugccgc

SEQ ID NO: 669396 - RNA, 19 nt, Artificial Sequence
  Description of Artificial Sequence: Synthetic oligonucleotide
  Sense strand starting at position 3483 of SEQ ID NO: 585809
agaauuauccggcaccuuu

SEQ ID NO: 669397 - RNA, 19 nt, Artificial Sequence
  Description of Artificial Sequence: Synthetic oligonucleotide
  Antisense strand to SEQ ID NO: 669396
aaaggugccggauaauucu

SEQ ID NO: 669398 - RNA, 19 nt, Artificial Sequence
  Description of Artificial Sequence: Synthetic oligonucleotide
  Sense strand starting at position 3541 of SEQ ID NO: 585809
ugagaaguuuauuaaugga

SEQ ID NO: 669399 - RNA, 19 nt, Artificial Sequence
  Description of Artificial Sequence: Synthetic oligonucleotide
  Antisense strand to SEQ ID NO: 669398
uccauuaauaaacuucuca

SEQ ID NO: 669400 - RNA, 19 nt, Artificial Sequence
  Description of Artificial Sequence: Synthetic oligonucleotide
  Sense strand starting at position 3557 of SEQ ID NO: 585809
ggaagucuuaaauggagca

SEQ ID NO: 669401 - RNA, 19 nt, Artificial Sequence
  Description of Artificial Sequence: Synthetic oligonucleotide
  Antisense strand to SEQ ID NO: 669400
ugcuccauuuaagacuucc

SEQ ID NO: 669402 - RNA, 19 nt, Artificial Sequence
  Description of Artificial Sequence: Synthetic oligonucleotide
  Sense strand starting at position 3700 of SEQ ID NO: 585809
ugcacaauuuaguggaaua

SEQ ID NO: 669403 - RNA, 19 nt, Artificial Sequence
  Description of Artificial Sequence: Synthetic oligonucleotide
  Antisense strand to SEQ ID NO: 669402
uauuccacuaaauugugca

SEQ ID NO: 669404 - RNA, 19 nt, Artificial Sequence
  Description of Artificial Sequence: Synthetic oligonucleotide
  Sense strand starting at position 3748 of SEQ ID NO: 585809
gcaacauguguuuacugca

SEQ ID NO: 669405 - RNA, 19 nt, Artificial Sequence
  Description of Artificial Sequence: Synthetic oligonucleotide
  Antisense strand to SEQ ID NO: 669404
ugcaguaaacacauguugc

SEQ ID NO: 669406 - RNA, 19 nt, Artificial Sequence
  Description of Artificial Sequence: Synthetic oligonucleotide
  Sense strand starting at position 3792 of SEQ ID NO: 585809
agaacuauuucugaaggcu

SEQ ID NO: 669407 - RNA, 19 nt, Artificial Sequence
  Description of Artificial Sequence: Synthetic oligonucleotide
  Antisense strand to SEQ ID NO: 669406
agccuucagaaauaguucu

SEQ ID NO: 669408 - RNA, 19 nt, Artificial Sequence
  Description of Artificial Sequence: Synthetic oligonucleotide
  Sense strand starting at position 3919 of SEQ ID NO: 585809
acaccagaccgcugagaaa

SEQ ID NO: 669409 - RNA, 19 nt, Artificial Sequence
  Description of Artificial Sequence: Synthetic oligonucleotide
  Antisense strand to SEQ ID NO: 669408
uuucucagcggucuggugu

SEQ ID NO: 669410 - RNA, 19 nt, Artificial Sequence
  Description of Artificial Sequence: Synthetic oligonucleotide
  Sense strand starting at position 42 of SEQ ID NO: 585810
gguuuauccugagaucacu

SEQ ID NO: 669411 - RNA, 19 nt, Artificial Sequence
  Description of Artificial Sequence: Synthetic oligonucleotide
  Antisense strand to SEQ ID NO: 669410
agugaucucaggauaaacc

SEQ ID NO: 669412 - RNA, 19 nt, Artificial Sequence
  Description of Artificial Sequence: Synthetic oligonucleotide
  Sense strand starting at position 51 of SEQ ID NO: 585810
ugagaucacucagcauaga

SEQ ID NO: 669413 - RNA, 19 nt, Artificial Sequence
  Description of Artificial Sequence: Synthetic oligonucleotide
  Antisense strand to SEQ ID NO: 669412
ucuaugcugagugaucuca

SEQ ID NO: 669414 - RNA, 19 nt, Artificial Sequence
  Description of Artificial Sequence: Synthetic oligonucleotide
  Sense strand starting at position 90 of SEQ ID NO: 585810
acuugcauguggcauuaua

SEQ ID NO: 669415 - RNA, 19 nt, Artificial Sequence
  Description of Artificial Sequence: Synthetic oligonucleotide
  Antisense strand to SEQ ID NO: 669414
uauaaugccacaugcaagu

SEQ ID NO: 669416 - RNA, 19 nt, Artificial Sequence
  Description of Artificial Sequence: Synthetic oligonucleotide
  Sense strand starting at position 212 of SEQ ID NO: 585810
cacggcguuacagaaagau

SEQ ID NO: 669417 - RNA, 19 nt, Artificial Sequence
  Description of Artificial Sequence: Synthetic oligonucleotide
  Antisense strand to SEQ ID NO: 669416
aucuuucuguaacgccgug

SEQ ID NO: 669418 - RNA, 19 nt, Artificial Sequence
  Description of Artificial Sequence: Synthetic oligonucleotide
  Sense strand starting at position 376 of SEQ ID NO: 585810
gcgagauaagcucaccaga

SEQ ID NO: 669419 - RNA, 19 nt, Artificial Sequence
  Description of Artificial Sequence: Synthetic oligonucleotide
  Antisense strand to SEQ ID NO: 669418
ucuggugagcuuaucucgc

SEQ ID NO: 669420 - RNA, 19 nt, Artificial Sequence
  Description of Artificial Sequence: Synthetic oligonucleotide
  Sense strand starting at position 546 of SEQ ID NO: 585810
uaacuuaagcugugauugu

SEQ ID NO: 669421 - RNA, 19 nt, Artificial Sequence
  Description of Artificial Sequence: Synthetic oligonucleotide
  Antisense strand to SEQ ID NO: 669420
acaaucacagcuuaaguua

SEQ ID NO: 669422 - RNA, 19 nt, Artificial Sequence
  Description of Artificial Sequence: Synthetic oligonucleotide
  Sense strand starting at position 547 of SEQ ID NO: 585810
aacuuaagcugugauugua

SEQ ID NO: 669423 - RNA, 19 nt, Artificial Sequence
  Description of Artificial Sequence: Synthetic oligonucleotide
  Antisense strand to SEQ ID NO: 669422
uacaaucacagcuuaaguu

SEQ ID NO: 669424 - RNA, 19 nt, Artificial Sequence
  Description of Artificial Sequence: Synthetic oligonucleotide
  Sense strand starting at position 556 of SEQ ID NO: 585810
ugugauuguagacaaagcu

SEQ ID NO: 669425 - RNA, 19 nt, Artificial Sequence
  Description of Artificial Sequence: Synthetic oligonucleotide
  Antisense strand to SEQ ID NO: 669424
agcuuugucuacaaucaca

SEQ ID NO: 669426 - RNA, 19 nt, Artificial Sequence
  Description of Artificial Sequence: Synthetic oligonucleotide
  Sense strand starting at position 563 of SEQ ID NO: 585810
guagacaaagcucaguaaa

SEQ ID NO: 669427 - RNA, 19 nt, Artificial Sequence
  Description of Artificial Sequence: Synthetic oligonucleotide
  Antisense strand to SEQ ID NO: 669426
uuuacugagcuuugucuac

SEQ ID NO: 669428 - RNA, 19 nt, Artificial Sequence
  Description of Artificial Sequence: Synthetic oligonucleotide
  Sense strand starting at position 614 of SEQ ID NO: 585810
ggccguuucugaguuccga

SEQ ID NO: 669429 - RNA, 19 nt, Artificial Sequence
  Description of Artificial Sequence: Synthetic oligonucleotide
  Antisense strand to SEQ ID NO: 669428
ucggaacucagaaacggcc

SEQ ID NO: 669430 - RNA, 19 nt, Artificial Sequence
  Description of Artificial Sequence: Synthetic oligonucleotide
  Sense strand starting at position 615 of SEQ ID NO: 585810
gccguuucugaguuccgau

SEQ ID NO: 669431 - RNA, 19 nt, Artificial Sequence
  Description of Artificial Sequence: Synthetic oligonucleotide
  Antisense strand to SEQ ID NO: 669430
aucggaacucagaaacggc

SEQ ID NO: 669432 - RNA, 19 nt, Artificial Sequence
  Description of Artificial Sequence: Synthetic oligonucleotide
  Sense strand starting at position 622 of SEQ ID NO: 585810
cugaguuccgauuauuaca

SEQ ID NO: 669433 - RNA, 19 nt, Artificial Sequence
  Description of Artificial Sequence: Synthetic oligonucleotide
  Antisense strand to SEQ ID NO: 669432
uguaauaaucggaacucag

SEQ ID NO: 669434 - RNA, 19 nt, Artificial Sequence
  Description of Artificial Sequence: Synthetic oligonucleotide
  Sense strand starting at position 624 of SEQ ID NO: 585810
gaguuccgauuauuacaaa

SEQ ID NO: 669435 - RNA, 19 nt, Artificial Sequence
  Description of Artificial Sequence: Synthetic oligonucleotide
  Antisense strand to SEQ ID NO: 669434
uuuguaauaaucggaacuc

SEQ ID NO: 669436 - RNA, 19 nt, Artificial Sequence
  Description of Artificial Sequence: Synthetic oligonucleotide
  Sense strand starting at position 643 of SEQ ID NO: 585810
gugacucugcucuauaucu

SEQ ID NO: 669437 - RNA, 19 nt, Artificial Sequence
  Description of Artificial Sequence: Synthetic oligonucleotide
  Antisense strand to SEQ ID NO: 669436
agauauagagcagagucac

SEQ ID NO: 669438 - RNA, 19 nt, Artificial Sequence
  Description of Artificial Sequence: Synthetic oligonucleotide
  Sense strand starting at position 651 of SEQ ID NO: 585810
gcucuauaucuggaccuca

SEQ ID NO: 669439 - RNA, 19 nt, Artificial Sequence
  Description of Artificial Sequence: Synthetic oligonucleotide
  Antisense strand to SEQ ID NO: 669438
ugagguccagauauagagc

SEQ ID NO: 669440 - RNA, 19 nt, Artificial Sequence
  Description of Artificial Sequence: Synthetic oligonucleotide
  Sense strand starting at position 803 of SEQ ID NO: 585810
gcagccuccgccuguaaau

SEQ ID NO: 669441 - RNA, 19 nt, Artificial Sequence
  Description of Artificial Sequence: Synthetic oligonucleotide
  Antisense strand to SEQ ID NO: 669440
auuuacaggcggaggcugc

SEQ ID NO: 669442 - RNA, 19 nt, Artificial Sequence
  Description of Artificial Sequence: Synthetic oligonucleotide
  Sense strand starting at position 978 of SEQ ID NO: 585810
ccgggaaagccucgaccuu

SEQ ID NO: 669443 - RNA, 19 nt, Artificial Sequence
  Description of Artificial Sequence: Synthetic oligonucleotide
  Antisense strand to SEQ ID NO: 669442
aaggucgaggcuuucccgg

SEQ ID NO: 669444 - RNA, 19 nt, Artificial Sequence
  Description of Artificial Sequence: Synthetic oligonucleotide
  Sense strand starting at position 979 of SEQ ID NO: 585810
cgggaaagccucgaccuuu

SEQ ID NO: 669445 - RNA, 19 nt, Artificial Sequence
  Description of Artificial Sequence: Synthetic oligonucleotide
  Antisense strand to SEQ ID NO: 669444
aaaggucgaggcuuucccg

SEQ ID NO: 669446 - RNA, 19 nt, Artificial Sequence
  Description of Artificial Sequence: Synthetic oligonucleotide
  Sense strand starting at position 1215 of SEQ ID NO: 585810
gucuuugacuccugagcag

SEQ ID NO: 669447 - RNA, 19 nt, Artificial Sequence
  Description of Artificial Sequence: Synthetic oligonucleotide
  Antisense strand to SEQ ID NO: 669446
cugcucaggagucaaagac

SEQ ID NO: 669448 - RNA, 19 nt, Artificial Sequence
  Description of Artificial Sequence: Synthetic oligonucleotide
  Sense strand starting at position 1251 of SEQ ID NO: 585810
acaacucggcuucgaagaa

SEQ ID NO: 669449 - RNA, 19 nt, Artificial Sequence
  Description of Artificial Sequence: Synthetic oligonucleotide
  Antisense strand to SEQ ID NO: 669448
uucuucgaagccgaguugu

SEQ ID NO: 669450 - RNA, 19 nt, Artificial Sequence
  Description of Artificial Sequence: Synthetic oligonucleotide
  Sense strand starting at position 1252 of SEQ ID NO: 585810
caacucggcuucgaagaaa

SEQ ID NO: 669451 - RNA, 19 nt, Artificial Sequence
  Description of Artificial Sequence: Synthetic oligonucleotide
  Antisense strand to SEQ ID NO: 669450
uuucuucgaagccgaguug

SEQ ID NO: 669452 - RNA, 19 nt, Artificial Sequence
  Description of Artificial Sequence: Synthetic oligonucleotide
  Sense strand starting at position 1255 of SEQ ID NO: 585810
cucggcuucgaagaaaguu

SEQ ID NO: 669453 - RNA, 19 nt, Artificial Sequence
  Description of Artificial Sequence: Synthetic oligonucleotide
  Antisense strand to SEQ ID NO: 669452
aacuuucuucgaagccgag

SEQ ID NO: 669454 - RNA, 19 nt, Artificial Sequence
  Description of Artificial Sequence: Synthetic oligonucleotide
  Sense strand starting at position 1290 of SEQ ID NO: 585810
accaaaguaucugugcauu

SEQ ID NO: 669455 - RNA, 19 nt, Artificial Sequence
  Description of Artificial Sequence: Synthetic oligonucleotide
  Antisense strand to SEQ ID NO: 669454
aaugcacagauacuuuggu

SEQ ID NO: 669456 - RNA, 19 nt, Artificial Sequence
  Description of Artificial Sequence: Synthetic oligonucleotide
  Sense strand starting at position 1296 of SEQ ID NO: 585810
guaucugugcauuaacuca

SEQ ID NO: 669457 - RNA, 19 nt, Artificial Sequence
  Description of Artificial Sequence: Synthetic oligonucleotide
  Antisense strand to SEQ ID NO: 669456
ugaguuaaugcacagauac

SEQ ID NO: 669458 - RNA, 19 nt, Artificial Sequence
  Description of Artificial Sequence: Synthetic oligonucleotide
  Sense strand starting at position 2630 of SEQ ID NO: 585810
agagcuacaacuugggauu

SEQ ID NO: 669459 - RNA, 19 nt, Artificial Sequence
  Description of Artificial Sequence: Synthetic oligonucleotide
  Antisense strand to SEQ ID NO: 669458
aaucccaaguuguagcucu

SEQ ID NO: 669460 - RNA, 19 nt, Artificial Sequence
  Description of Artificial Sequence: Synthetic oligonucleotide
  Sense strand starting at position 2633 of SEQ ID NO: 585810
gcuacaacuugggauuuga

SEQ ID NO: 669461 - RNA, 19 nt, Artificial Sequence
  Description of Artificial Sequence: Synthetic oligonucleotide
  Antisense strand to SEQ ID NO: 669460
ucaaaucccaaguuguagc

SEQ ID NO: 669462 - RNA, 19 nt, Artificial Sequence
  Description of Artificial Sequence: Synthetic oligonucleotide
  Sense strand starting at position 2821 of SEQ ID NO: 585810
guuggugguugguuugaau

SEQ ID NO: 669463 - RNA, 19 nt, Artificial Sequence
  Description of Artificial Sequence: Synthetic oligonucleotide
  Antisense strand to SEQ ID NO: 669462
auucaaaccaaccaccaac

SEQ ID NO: 669464 - RNA, 19 nt, Artificial Sequence
  Description of Artificial Sequence: Synthetic oligonucleotide
  Sense strand starting at position 2856 of SEQ ID NO: 585810
acuuauugcgccugccaau

SEQ ID NO: 669465 - RNA, 19 nt, Artificial Sequence
  Description of Artificial Sequence: Synthetic oligonucleotide
  Antisense strand to SEQ ID NO: 669464
auuggcaggcgcaauaagu

SEQ ID NO: 669466 - RNA, 19 nt, Artificial Sequence
  Description of Artificial Sequence: Synthetic oligonucleotide
  Sense strand starting at position 3037 of SEQ ID NO: 585810
gguuccuccuccggaacaa

SEQ ID NO: 669467 - RNA, 19 nt, Artificial Sequence
  Description of Artificial Sequence: Synthetic oligonucleotide
  Antisense strand to SEQ ID NO: 669466
uuguuccggaggaggaacc

SEQ ID NO: 669468 - RNA, 19 nt, Artificial Sequence
  Description of Artificial Sequence: Synthetic oligonucleotide
  Sense strand starting at position 3335 of SEQ ID NO: 585810
agaagcagucucuguguca

SEQ ID NO: 669469 - RNA, 19 nt, Artificial Sequence
  Description of Artificial Sequence: Synthetic oligonucleotide
  Antisense strand to SEQ ID NO: 669468
ugacacagagacugcuucu

SEQ ID NO: 669470 - RNA, 19 nt, Artificial Sequence
  Description of Artificial Sequence: Synthetic oligonucleotide
  Sense strand starting at position 3336 of SEQ ID NO: 585810
gaagcagucucugugucau

SEQ ID NO: 669471 - RNA, 19 nt, Artificial Sequence
  Description of Artificial Sequence: Synthetic oligonucleotide
  Antisense strand to SEQ ID NO: 669470
augacacagagacugcuuc

SEQ ID NO: 669472 - RNA, 19 nt, Artificial Sequence
  Description of Artificial Sequence: Synthetic oligonucleotide
  Sense strand starting at position 3339 of SEQ ID NO: 585810
gcagucucugugucaucuu

SEQ ID NO: 669473 - RNA, 19 nt, Artificial Sequence
  Description of Artificial Sequence: Synthetic oligonucleotide
  Antisense strand to SEQ ID NO: 669472
aagaugacacagagacugc

SEQ ID NO: 669474 - RNA, 19 nt, Artificial Sequence
  Description of Artificial Sequence: Synthetic oligonucleotide
  Sense strand starting at position 3461 of SEQ ID NO: 585810
cccucacuugucuguguaa

SEQ ID NO: 669475 - RNA, 19 nt, Artificial Sequence
  Description of Artificial Sequence: Synthetic oligonucleotide
  Antisense strand to SEQ ID NO: 669474
uuacacagacaagugaggg

SEQ ID NO: 669476 - RNA, 19 nt, Artificial Sequence
  Description of Artificial Sequence: Synthetic oligonucleotide
  Sense strand starting at position 3462 of SEQ ID NO: 585810
ccucacuugucuguguaaa

SEQ ID NO: 669477 - RNA, 19 nt, Artificial Sequence
  Description of Artificial Sequence: Synthetic oligonucleotide
  Antisense strand to SEQ ID NO: 669476
uuuacacagacaagugagg

SEQ ID NO: 669478 - RNA, 19 nt, Artificial Sequence
  Description of Artificial Sequence: Synthetic oligonucleotide
  Sense strand starting at position 3501 of SEQ ID NO: 585810
acuguucuaccuuguugau

SEQ ID NO: 669479 - RNA, 19 nt, Artificial Sequence
  Description of Artificial Sequence: Synthetic oligonucleotide
  Antisense strand to SEQ ID NO: 669478
aucaacaagguagaacagu

SEQ ID NO: 669480 - RNA, 19 nt, Artificial Sequence
  Description of Artificial Sequence: Synthetic oligonucleotide
  Sense strand starting at position 3625 of SEQ ID NO: 585810
uggguuuccucacucagua

SEQ ID NO: 669481 - RNA, 19 nt, Artificial Sequence
  Description of Artificial Sequence: Synthetic oligonucleotide
  Antisense strand to SEQ ID NO: 669480
uacugagugaggaaaccca

SEQ ID NO: 669482 - RNA, 19 nt, Artificial Sequence
  Description of Artificial Sequence: Synthetic oligonucleotide
  Sense strand starting at position 3813 of SEQ ID NO: 585810
ugccucuugucagugaauu

SEQ ID NO: 669483 - RNA, 19 nt, Artificial Sequence
  Description of Artificial Sequence: Synthetic oligonucleotide
  Antisense strand to SEQ ID NO: 669482
aauucacugacaagaggca

SEQ ID NO: 669484 - RNA, 19 nt, Artificial Sequence
  Description of Artificial Sequence: Synthetic oligonucleotide
  Sense strand starting at position 3814 of SEQ ID NO: 585810
gccucuugucagugaauuu

SEQ ID NO: 669485 - RNA, 19 nt, Artificial Sequence
  Description of Artificial Sequence: Synthetic oligonucleotide
  Antisense strand to SEQ ID NO: 669484
aaauucacugacaagaggc

SEQ ID NO: 669486 - RNA, 19 nt, Artificial Sequence
  Description of Artificial Sequence: Synthetic oligonucleotide
  Sense strand starting at position 3900 of SEQ ID NO: 585810
cugcuuugucuccaaagca

SEQ ID NO: 669487 - RNA, 19 nt, Artificial Sequence
  Description of Artificial Sequence: Synthetic oligonucleotide
  Antisense strand to SEQ ID NO: 669486
ugcuuuggagacaaagcag

SEQ ID NO: 669488 - RNA, 19 nt, Artificial Sequence
  Description of Artificial Sequence: Synthetic oligonucleotide
  Sense strand starting at position 3928 of SEQ ID NO: 585810
accauauauugucauagau

SEQ ID NO: 669489 - RNA, 19 nt, Artificial Sequence
  Description of Artificial Sequence: Synthetic oligonucleotide
  Antisense strand to SEQ ID NO: 669488
aucuaugacaauauauggu

SEQ ID NO: 669490 - RNA, 19 nt, Artificial Sequence
  Description of Artificial Sequence: Synthetic oligonucleotide
  Sense strand starting at position 653 of SEQ ID NO: 585811
gggucaguucccuguggaa

SEQ ID NO: 669491 - RNA, 19 nt, Artificial Sequence
  Description of Artificial Sequence: Synthetic oligonucleotide
  Antisense strand to SEQ ID NO: 669490
uuccacagggaacugaccc

SEQ ID NO: 669492 - RNA, 19 nt, Artificial Sequence
  Description of Artificial Sequence: Synthetic oligonucleotide
  Sense strand starting at position 687 of SEQ ID NO: 585811
uagguagacuaggcucaua

SEQ ID NO: 669493 - RNA, 19 nt, Artificial Sequence
  Description of Artificial Sequence: Synthetic oligonucleotide
  Antisense strand to SEQ ID NO: 669492
uaugagccuagucuaccua

SEQ ID NO: 669494 - RNA, 19 nt, Artificial Sequence
  Description of Artificial Sequence: Synthetic oligonucleotide
  Sense strand starting at position 709 of SEQ ID NO: 585811
cagcuagugggagaaaguu

SEQ ID NO: 669495 - RNA, 19 nt, Artificial Sequence
  Description of Artificial Sequence: Synthetic oligonucleotide
  Antisense strand to SEQ ID NO: 669494
aacuuucucccacuagcug

SEQ ID NO: 669496 - RNA, 19 nt, Artificial Sequence
  Description of Artificial Sequence: Synthetic oligonucleotide
  Sense strand starting at position 764 of SEQ ID NO: 585811
ccaccugucggacagauau

SEQ ID NO: 669497 - RNA, 19 nt, Artificial Sequence
  Description of Artificial Sequence: Synthetic oligonucleotide
  Antisense strand to SEQ ID NO: 669496
auaucuguccgacaggugg

SEQ ID NO: 669498 - RNA, 19 nt, Artificial Sequence
  Description of Artificial Sequence: Synthetic oligonucleotide
  Sense strand starting at position 1190 of SEQ ID NO: 585811
aaagaaggccucuauuguu

SEQ ID NO: 669499 - RNA, 19 nt, Artificial Sequence
  Description of Artificial Sequence: Synthetic oligonucleotide
  Antisense strand to SEQ ID NO: 669498
aacaauagaggccuucuuu

SEQ ID NO: 669500 - RNA, 19 nt, Artificial Sequence
  Description of Artificial Sequence: Synthetic oligonucleotide
  Sense strand starting at position 1223 of SEQ ID NO: 585811
ugcagaaauugccuucuca

SEQ ID NO: 669501 - RNA, 19 nt, Artificial Sequence
  Description of Artificial Sequence: Synthetic oligonucleotide
  Antisense strand to SEQ ID NO: 669500
ugagaaggcaauuucugca

SEQ ID NO: 669502 - RNA, 19 nt, Artificial Sequence
  Description of Artificial Sequence: Synthetic oligonucleotide
  Sense strand starting at position 1312 of SEQ ID NO: 585811
ugauaacaguucuugugua

SEQ ID NO: 669503 - RNA, 19 nt, Artificial Sequence
  Description of Artificial Sequence: Synthetic oligonucleotide
  Antisense strand to SEQ ID NO: 669502
uacacaagaacuguuauca

SEQ ID NO: 669504 - RNA, 19 nt, Artificial Sequence
  Description of Artificial Sequence: Synthetic oligonucleotide
  Sense strand starting at position 1316 of SEQ ID NO: 585811
aacaguucuuguguaggau

SEQ ID NO: 669505 - RNA, 19 nt, Artificial Sequence
  Description of Artificial Sequence: Synthetic oligonucleotide
  Antisense strand to SEQ ID NO: 669504
auccuacacaagaacuguu

SEQ ID NO: 669506 - RNA, 19 nt, Artificial Sequence
  Description of Artificial Sequence: Synthetic oligonucleotide
  Sense strand starting at position 1317 of SEQ ID NO: 585811
acaguucuuguguaggauc

SEQ ID NO: 669507 - RNA, 19 nt, Artificial Sequence
  Description of Artificial Sequence: Synthetic oligonucleotide
  Antisense strand to SEQ ID NO: 669506
gauccuacacaagaacugu

SEQ ID NO: 669508 - RNA, 19 nt, Artificial Sequence
  Description of Artificial Sequence: Synthetic oligonucleotide
  Sense strand starting at position 1382 of SEQ ID NO: 585811
ccaucuacagauugguaaa

SEQ ID NO: 669509 - RNA, 19 nt, Artificial Sequence
  Description of Artificial Sequence: Synthetic oligonucleotide
  Antisense strand to SEQ ID NO: 669508
uuuaccaaucuguagaugg

SEQ ID NO: 669510 - RNA, 19 nt, Artificial Sequence
  Description of Artificial Sequence: Synthetic oligonucleotide
  Sense strand starting at position 1487 of SEQ ID NO: 585811
ucucaacuucugggcuuaa

SEQ ID NO: 669511 - RNA, 19 nt, Artificial Sequence
  Description of Artificial Sequence: Synthetic oligonucleotide
  Antisense strand to SEQ ID NO: 669510
uuaagcccagaaguugaga

SEQ ID NO: 669512 - RNA, 19 nt, Artificial Sequence
  Description of Artificial Sequence: Synthetic oligonucleotide
  Sense strand starting at position 1502 of SEQ ID NO: 585811
uuaaguaccucaguugcaa

SEQ ID NO: 669513 - RNA, 19 nt, Artificial Sequence
  Description of Artificial Sequence: Synthetic oligonucleotide
  Antisense strand to SEQ ID NO: 669512
uugcaacugagguacuuaa

SEQ ID NO: 669514 - RNA, 19 nt, Artificial Sequence
  Description of Artificial Sequence: Synthetic oligonucleotide
  Sense strand starting at position 2162 of SEQ ID NO: 585811
gggcuuacccauuaguguu

SEQ ID NO: 669515 - RNA, 19 nt, Artificial Sequence
  Description of Artificial Sequence: Synthetic oligonucleotide
  Antisense strand to SEQ ID NO: 669514
aacacuaauggguaagccc

SEQ ID NO: 669516 - RNA, 19 nt, Artificial Sequence
  Description of Artificial Sequence: Synthetic oligonucleotide
  Sense strand starting at position 2499 of SEQ ID NO: 585811
cugugaucacaccgggcaa

SEQ ID NO: 669517 - RNA, 19 nt, Artificial Sequence
  Description of Artificial Sequence: Synthetic oligonucleotide
  Antisense strand to SEQ ID NO: 669516
uugcccggugugaucacag

SEQ ID NO: 669518 - RNA, 19 nt, Artificial Sequence
  Description of Artificial Sequence: Synthetic oligonucleotide
  Sense strand starting at position 2517 of SEQ ID NO: 585811
acuugaugucucugaggau

SEQ ID NO: 669519 - RNA, 19 nt, Artificial Sequence
  Description of Artificial Sequence: Synthetic oligonucleotide
  Antisense strand to SEQ ID NO: 669518
auccucagagacaucaagu

SEQ ID NO: 669520 - RNA, 19 nt, Artificial Sequence
  Description of Artificial Sequence: Synthetic oligonucleotide
  Sense strand starting at position 2680 of SEQ ID NO: 585811
accugcaaugccuaagauu

SEQ ID NO: 669521 - RNA, 19 nt, Artificial Sequence
  Description of Artificial Sequence: Synthetic oligonucleotide
  Antisense strand to SEQ ID NO: 669520
aaucuuaggcauugcaggu

SEQ ID NO: 669522 - RNA, 19 nt, Artificial Sequence
  Description of Artificial Sequence: Synthetic oligonucleotide
  Sense strand starting at position 2729 of SEQ ID NO: 585811
gggaguuaccaaggucuug

SEQ ID NO: 669523 - RNA, 19 nt, Artificial Sequence
  Description of Artificial Sequence: Synthetic oligonucleotide
  Antisense strand to SEQ ID NO: 669522
caagaccuugguaacuccc

SEQ ID NO: 669524 - RNA, 19 nt, Artificial Sequence
  Description of Artificial Sequence: Synthetic oligonucleotide
  Sense strand starting at position 2842 of SEQ ID NO: 585811
accagcaaugucugguuua

SEQ ID NO: 669525 - RNA, 19 nt, Artificial Sequence
  Description of Artificial Sequence: Synthetic oligonucleotide
  Antisense strand to SEQ ID NO: 669524
uaaaccagacauugcuggu

SEQ ID NO: 669526 - RNA, 19 nt, Artificial Sequence
  Description of Artificial Sequence: Synthetic oligonucleotide
  Sense strand starting at position 2855 of SEQ ID NO: 585811
gguuuauucucaucugauu

SEQ ID NO: 669527 - RNA, 19 nt, Artificial Sequence
  Description of Artificial Sequence: Synthetic oligonucleotide
  Antisense strand to SEQ ID NO: 669526
aaucagaugagaauaaacc

SEQ ID NO: 669528 - RNA, 19 nt, Artificial Sequence
  Description of Artificial Sequence: Synthetic oligonucleotide
  Sense strand starting at position 2890 of SEQ ID NO: 585811
ggcagacccacugguuuaa

SEQ ID NO: 669529 - RNA, 19 nt, Artificial Sequence
  Description of Artificial Sequence: Synthetic oligonucleotide
  Antisense strand to SEQ ID NO: 669528
uuaaaccagugggucugcc

SEQ ID NO: 669530 - RNA, 19 nt, Artificial Sequence
  Description of Artificial Sequence: Synthetic oligonucleotide
  Sense strand starting at position 3091 of SEQ ID NO: 585811
cugagaaagcgcugggaaa

SEQ ID NO: 669531 - RNA, 19 nt, Artificial Sequence
  Description of Artificial Sequence: Synthetic oligonucleotide
  Antisense strand to SEQ ID NO: 669530
uuucccagcgcuuucucag

SEQ ID NO: 669532 - RNA, 19 nt, Artificial Sequence
  Description of Artificial Sequence: Synthetic oligonucleotide
  Sense strand starting at position 3111 of SEQ ID NO: 585811
gagcuaaaucgauggcaug

SEQ ID NO: 669533 - RNA, 19 nt, Artificial Sequence
  Description of Artificial Sequence: Synthetic oligonucleotide
  Antisense strand to SEQ ID NO: 669532
caugccaucgauuuagcuc

SEQ ID NO: 669534 - RNA, 19 nt, Artificial Sequence
  Description of Artificial Sequence: Synthetic oligonucleotide
  Sense strand starting at position 3122 of SEQ ID NO: 585811
auggcauggcguguguuaa

SEQ ID NO: 669535 - RNA, 19 nt, Artificial Sequence
  Description of Artificial Sequence: Synthetic oligonucleotide
  Antisense strand to SEQ ID NO: 669534
uuaacacacgccaugccau

SEQ ID NO: 669536 - RNA, 19 nt, Artificial Sequence
  Description of Artificial Sequence: Synthetic oligonucleotide
  Sense strand starting at position 3202 of SEQ ID NO: 585811
gggugacaaugagaagaaa

SEQ ID NO: 669537 - RNA, 19 nt, Artificial Sequence
  Description of Artificial Sequence: Synthetic oligonucleotide
  Antisense strand to SEQ ID NO: 669536
uuucuucucauugucaccc

SEQ ID NO: 669538 - RNA, 19 nt, Artificial Sequence
  Description of Artificial Sequence: Synthetic oligonucleotide
  Sense strand starting at position 3213 of SEQ ID NO: 585811
agaagaaauguuugagucu

SEQ ID NO: 669539 - RNA, 19 nt, Artificial Sequence
  Description of Artificial Sequence: Synthetic oligonucleotide
  Antisense strand to SEQ ID NO: 669538
agacucaaacauuucuucu

SEQ ID NO: 669540 - RNA, 19 nt, Artificial Sequence
  Description of Artificial Sequence: Synthetic oligonucleotide
  Sense strand starting at position 3216 of SEQ ID NO: 585811
agaaauguuugagucucua

SEQ ID NO: 669541 - RNA, 19 nt, Artificial Sequence
  Description of Artificial Sequence: Synthetic oligonucleotide
  Antisense strand to SEQ ID NO: 669540
uagagacucaaacauuucu

SEQ ID NO: 669542 - RNA, 19 nt, Artificial Sequence
  Description of Artificial Sequence: Synthetic oligonucleotide
  Sense strand starting at position 3244 of SEQ ID NO: 585811
cgccauucuagaggguaca

SEQ ID NO: 669543 - RNA, 19 nt, Artificial Sequence
  Description of Artificial Sequence: Synthetic oligonucleotide
  Antisense strand to SEQ ID NO: 669542
uguacccucuagaauggcg

SEQ ID NO: 669544 - RNA, 19 nt, Artificial Sequence
  Description of Artificial Sequence: Synthetic oligonucleotide
  Sense strand starting at position 3245 of SEQ ID NO: 585811
gccauucuagaggguacau

SEQ ID NO: 669545 - RNA, 19 nt, Artificial Sequence
  Description of Artificial Sequence: Synthetic oligonucleotide
  Antisense strand to SEQ ID NO: 669544
auguacccucuagaauggc

SEQ ID NO: 669546 - RNA, 19 nt, Artificial Sequence
  Description of Artificial Sequence: Synthetic oligonucleotide
  Sense strand starting at position 3295 of SEQ ID NO: 585811
gagcuuacaggaggguuaa

SEQ ID NO: 669547 - RNA, 19 nt, Artificial Sequence
  Description of Artificial Sequence: Synthetic oligonucleotide
  Antisense strand to SEQ ID NO: 669546
uuaacccuccuguaagcuc

SEQ ID NO: 669548 - RNA, 19 nt, Artificial Sequence
  Description of Artificial Sequence: Synthetic oligonucleotide
  Sense strand starting at position 3296 of SEQ ID NO: 585811
agcuuacaggaggguuaaa

SEQ ID NO: 669549 - RNA, 19 nt, Artificial Sequence
  Description of Artificial Sequence: Synthetic oligonucleotide
  Antisense strand to SEQ ID NO: 669548
uuuaacccuccuguaagcu

SEQ ID NO: 669550 - RNA, 19 nt, Artificial Sequence
  Description of Artificial Sequence: Synthetic oligonucleotide
  Sense strand starting at position 3404 of SEQ ID NO: 585811
agggucacaucccuguuua

SEQ ID NO: 669551 - RNA, 19 nt, Artificial Sequence
  Description of Artificial Sequence: Synthetic oligonucleotide
  Antisense strand to SEQ ID NO: 669550
uaaacagggaugugacccu

SEQ ID NO: 669552 - RNA, 19 nt, Artificial Sequence
  Description of Artificial Sequence: Synthetic oligonucleotide
  Sense strand starting at position 3405 of SEQ ID NO: 585811
gggucacaucccuguuuaa

SEQ ID NO: 669553 - RNA, 19 nt, Artificial Sequence
  Description of Artificial Sequence: Synthetic oligonucleotide
  Antisense strand to SEQ ID NO: 669552
uuaaacagggaugugaccc

SEQ ID NO: 669554 - RNA, 19 nt, Artificial Sequence
  Description of Artificial Sequence: Synthetic oligonucleotide
  Sense strand starting at position 3453 of SEQ ID NO: 585811
gggaaagucuagcuccuua

SEQ ID NO: 669555 - RNA, 19 nt, Artificial Sequence
  Description of Artificial Sequence: Synthetic oligonucleotide
  Antisense strand to SEQ ID NO: 669554
uaaggagcuagacuuuccc

SEQ ID NO: 669556 - RNA, 19 nt, Artificial Sequence
  Description of Artificial Sequence: Synthetic oligonucleotide
  Sense strand starting at position 3470 of SEQ ID NO: 585811
uagcuuggcccuuaugacu

SEQ ID NO: 669557 - RNA, 19 nt, Artificial Sequence
  Description of Artificial Sequence: Synthetic oligonucleotide
  Antisense strand to SEQ ID NO: 669556
agucauaagggccaagcua

SEQ ID NO: 669558 - RNA, 19 nt, Artificial Sequence
  Description of Artificial Sequence: Synthetic oligonucleotide
  Sense strand starting at position 3479 of SEQ ID NO: 585811
ccuuaugacuucccuagga

SEQ ID NO: 669559 - RNA, 19 nt, Artificial Sequence
  Description of Artificial Sequence: Synthetic oligonucleotide
  Antisense strand to SEQ ID NO: 669558
uccuagggaagucauaagg

SEQ ID NO: 669560 - RNA, 19 nt, Artificial Sequence
  Description of Artificial Sequence: Synthetic oligonucleotide
  Sense strand starting at position 3644 of SEQ ID NO: 585811
gcccaaaccucccugaaga

SEQ ID NO: 669561 - RNA, 19 nt, Artificial Sequence
  Description of Artificial Sequence: Synthetic oligonucleotide
  Antisense strand to SEQ ID NO: 669560
ucuucagggagguuugggc

SEQ ID NO: 669562 - RNA, 19 nt, Artificial Sequence
  Description of Artificial Sequence: Synthetic oligonucleotide
  Sense strand starting at position 3722 of SEQ ID NO: 585811
guugguuccucccucauuu

SEQ ID NO: 669563 - RNA, 19 nt, Artificial Sequence
  Description of Artificial Sequence: Synthetic oligonucleotide
  Antisense strand to SEQ ID NO: 669562
aaaugagggaggaaccaac

SEQ ID NO: 669564 - RNA, 19 nt, Artificial Sequence
  Description of Artificial Sequence: Synthetic oligonucleotide
  Sense strand starting at position 3798 of SEQ ID NO: 585811
gcuccugagagguaaguuu

SEQ ID NO: 669565 - RNA, 19 nt, Artificial Sequence
  Description of Artificial Sequence: Synthetic oligonucleotide
  Antisense strand to SEQ ID NO: 669564
aaacuuaccucucaggagc

SEQ ID NO: 669566 - RNA, 19 nt, Artificial Sequence
  Description of Artificial Sequence: Synthetic oligonucleotide
  Sense strand starting at position 3847 of SEQ ID NO: 585811
guggcuccacaggguaaua

SEQ ID NO: 669567 - RNA, 19 nt, Artificial Sequence
  Description of Artificial Sequence: Synthetic oligonucleotide
  Antisense strand to SEQ ID NO: 669566
uauuacccuguggagccac

SEQ ID NO: 669568 - RNA, 19 nt, Artificial Sequence
  Description of Artificial Sequence: Synthetic oligonucleotide
  Sense strand starting at position 3857 of SEQ ID NO: 585811
aggguaauacucugaaguu

SEQ ID NO: 669569 - RNA, 19 nt, Artificial Sequence
  Description of Artificial Sequence: Synthetic oligonucleotide
  Antisense strand to SEQ ID NO: 669568
aacuucagaguauuacccu

SEQ ID NO: 669570 - RNA, 19 nt, Artificial Sequence
  Description of Artificial Sequence: Synthetic oligonucleotide
  Sense strand starting at position 75 of SEQ ID NO: 585812
ggaagugaauauuaaaucu

SEQ ID NO: 669571 - RNA, 19 nt, Artificial Sequence
  Description of Artificial Sequence: Synthetic oligonucleotide
  Antisense strand to SEQ ID NO: 669570
agauuuaauauucacuucc

SEQ ID NO: 669572 - RNA, 19 nt, Artificial Sequence
  Description of Artificial Sequence: Synthetic oligonucleotide
  Sense strand starting at position 114 of SEQ ID NO: 585812
guuaguaucuugcugacag

SEQ ID NO: 669573 - RNA, 19 nt, Artificial Sequence
  Description of Artificial Sequence: Synthetic oligonucleotide
  Antisense strand to SEQ ID NO: 669572
cugucagcaagauacuaac

SEQ ID NO: 669574 - RNA, 19 nt, Artificial Sequence
  Description of Artificial Sequence: Synthetic oligonucleotide
  Sense strand starting at position 116 of SEQ ID NO: 585812
uaguaucuugcugacaguu

SEQ ID NO: 669575 - RNA, 19 nt, Artificial Sequence
  Description of Artificial Sequence: Synthetic oligonucleotide
  Antisense strand to SEQ ID NO: 669574
aacugucagcaagauacua

SEQ ID NO: 669576 - RNA, 19 nt, Artificial Sequence
  Description of Artificial Sequence: Synthetic oligonucleotide
  Sense strand starting at position 125 of SEQ ID NO: 585812
gcugacaguuucccuagaa

SEQ ID NO: 669577 - RNA, 19 nt, Artificial Sequence
  Description of Artificial Sequence: Synthetic oligonucleotide
  Antisense strand to SEQ ID NO: 669576
uucuagggaaacugucagc

SEQ ID NO: 669578 - RNA, 19 nt, Artificial Sequence
  Description of Artificial Sequence: Synthetic oligonucleotide
  Sense strand starting at position 126 of SEQ ID NO: 585812
cugacaguuucccuagaac

SEQ ID NO: 669579 - RNA, 19 nt, Artificial Sequence
  Description of Artificial Sequence: Synthetic oligonucleotide
  Antisense strand to SEQ ID NO: 669578
guucuagggaaacugucag

SEQ ID NO: 669580 - RNA, 19 nt, Artificial Sequence
  Description of Artificial Sequence: Synthetic oligonucleotide
  Sense strand starting at position 290 of SEQ ID NO: 585812
ccugaagugguuuguacuu

SEQ ID NO: 669581 - RNA, 19 nt, Artificial Sequence
  Description of Artificial Sequence: Synthetic oligonucleotide
  Antisense strand to SEQ ID NO: 669580
aaguacaaaccacuucagg

SEQ ID NO: 669582 - RNA, 19 nt, Artificial Sequence
  Description of Artificial Sequence: Synthetic oligonucleotide
  Sense strand starting at position 605 of SEQ ID NO: 585812
cuggcuaugcuagaauuaa

SEQ ID NO: 669583 - RNA, 19 nt, Artificial Sequence
  Description of Artificial Sequence: Synthetic oligonucleotide
  Antisense strand to SEQ ID NO: 669582
uuaauucuagcauagccag

SEQ ID NO: 669584 - RNA, 19 nt, Artificial Sequence
  Description of Artificial Sequence: Synthetic oligonucleotide
  Sense strand starting at position 663 of SEQ ID NO: 585812
augauaacgcaucagaacu

SEQ ID NO: 669585 - RNA, 19 nt, Artificial Sequence
  Description of Artificial Sequence: Synthetic oligonucleotide
  Antisense strand to SEQ ID NO: 669584
aguucugaugcguuaucau

SEQ ID NO: 669586 - RNA, 19 nt, Artificial Sequence
  Description of Artificial Sequence: Synthetic oligonucleotide
  Sense strand starting at position 714 of SEQ ID NO: 585812
auguaaggguaaucuuaaa

SEQ ID NO: 669587 - RNA, 19 nt, Artificial Sequence
  Description of Artificial Sequence: Synthetic oligonucleotide
  Antisense strand to SEQ ID NO: 669586
uuuaagauuacccuuacau

SEQ ID NO: 669588 - RNA, 19 nt, Artificial Sequence
  Description of Artificial Sequence: Synthetic oligonucleotide
  Sense strand starting at position 871 of SEQ ID NO: 585812
agauguaacugcucuucua

SEQ ID NO: 669589 - RNA, 19 nt, Artificial Sequence
  Description of Artificial Sequence: Synthetic oligonucleotide
  Antisense strand to SEQ ID NO: 669588
uagaagagcaguuacaucu

SEQ ID NO: 669590 - RNA, 19 nt, Artificial Sequence
  Description of Artificial Sequence: Synthetic oligonucleotide
  Sense strand starting at position 976 of SEQ ID NO: 585812
aggucagaacugggucuuu

SEQ ID NO: 669591 - RNA, 19 nt, Artificial Sequence
  Description of Artificial Sequence: Synthetic oligonucleotide
  Antisense strand to SEQ ID NO: 669590
aaagacccaguucugaccu

SEQ ID NO: 669592 - RNA, 19 nt, Artificial Sequence
  Description of Artificial Sequence: Synthetic oligonucleotide
  Sense strand starting at position 1015 of SEQ ID NO: 585812
ccugguauuguaggaauua

SEQ ID NO: 669593 - RNA, 19 nt, Artificial Sequence
  Description of Artificial Sequence: Synthetic oligonucleotide
  Antisense strand to SEQ ID NO: 669592
uaauuccuacaauaccagg

SEQ ID NO: 669594 - RNA, 19 nt, Artificial Sequence
  Description of Artificial Sequence: Synthetic oligonucleotide
  Sense strand starting at position 1060 of SEQ ID NO: 585812
cugccuuggguuuagcaau

SEQ ID NO: 669595 - RNA, 19 nt, Artificial Sequence
  Description of Artificial Sequence: Synthetic oligonucleotide
  Antisense strand to SEQ ID NO: 669594
auugcuaaacccaaggcag

SEQ ID NO: 669596 - RNA, 19 nt, Artificial Sequence
  Description of Artificial Sequence: Synthetic oligonucleotide
  Sense strand starting at position 1095 of SEQ ID NO: 585812
cucagaauccugcaaggua

SEQ ID NO: 669597 - RNA, 19 nt, Artificial Sequence
  Description of Artificial Sequence: Synthetic oligonucleotide
  Antisense strand to SEQ ID NO: 669596
uaccuugcaggauucugag

SEQ ID NO: 669598 - RNA, 19 nt, Artificial Sequence
  Description of Artificial Sequence: Synthetic oligonucleotide
  Sense strand starting at position 1160 of SEQ ID NO: 585812
cugugaguggcagguuaau

SEQ ID NO: 669599 - RNA, 19 nt, Artificial Sequence
  Description of Artificial Sequence: Synthetic oligonucleotide
  Antisense strand to SEQ ID NO: 669598
auuaaccugccacucacag

SEQ ID NO: 669600 - RNA, 19 nt, Artificial Sequence
  Description of Artificial Sequence: Synthetic oligonucleotide
  Sense strand starting at position 1349 of SEQ ID NO: 585812
gcucgcgaagcuucuuaaa

SEQ ID NO: 669601 - RNA, 19 nt, Artificial Sequence
  Description of Artificial Sequence: Synthetic oligonucleotide
  Antisense strand to SEQ ID NO: 669600
uuuaagaagcuucgcgagc

SEQ ID NO: 669602 - RNA, 19 nt, Artificial Sequence
  Description of Artificial Sequence: Synthetic oligonucleotide
  Sense strand starting at position 2399 of SEQ ID NO: 585812
gcggaagaauuugcguaga

SEQ ID NO: 669603 - RNA, 19 nt, Artificial Sequence
  Description of Artificial Sequence: Synthetic oligonucleotide
  Antisense strand to SEQ ID NO: 669602
ucuacgcaaauucuuccgc

SEQ ID NO: 669604 - RNA, 19 nt, Artificial Sequence
  Description of Artificial Sequence: Synthetic oligonucleotide
  Sense strand starting at position 2438 of SEQ ID NO: 585812
gauuccuuggauuggaguu

SEQ ID NO: 669605 - RNA, 19 nt, Artificial Sequence
  Description of Artificial Sequence: Synthetic oligonucleotide
  Antisense strand to SEQ ID NO: 669604
aacuccaauccaaggaauc

SEQ ID NO: 669606 - RNA, 19 nt, Artificial Sequence
  Description of Artificial Sequence: Synthetic oligonucleotide
  Sense strand starting at position 2457 of SEQ ID NO: 585812
ggauuugaguuugggaaag

SEQ ID NO: 669607 - RNA, 19 nt, Artificial Sequence
  Description of Artificial Sequence: Synthetic oligonucleotide
  Antisense strand to SEQ ID NO: 669606
cuuucccaaacucaaaucc

SEQ ID NO: 669608 - RNA, 19 nt, Artificial Sequence
  Description of Artificial Sequence: Synthetic oligonucleotide
  Sense strand starting at position 2785 of SEQ ID NO: 585812
uccaaauguguauguguua

SEQ ID NO: 669609 - RNA, 19 nt, Artificial Sequence
  Description of Artificial Sequence: Synthetic oligonucleotide
  Antisense strand to SEQ ID NO: 669608
uaacacauacacauuugga

SEQ ID NO: 669610 - RNA, 19 nt, Artificial Sequence
  Description of Artificial Sequence: Synthetic oligonucleotide
  Sense strand starting at position 2786 of SEQ ID NO: 585812
ccaaauguguauguguuaa

SEQ ID NO: 669611 - RNA, 19 nt, Artificial Sequence
  Description of Artificial Sequence: Synthetic oligonucleotide
  Antisense strand to SEQ ID NO: 669610
uuaacacauacacauuugg

SEQ ID NO: 669612 - RNA, 19 nt, Artificial Sequence
  Description of Artificial Sequence: Synthetic oligonucleotide
  Sense strand starting at position 2788 of SEQ ID NO: 585812
aaauguguauguguuaagu

SEQ ID NO: 669613 - RNA, 19 nt, Artificial Sequence
  Description of Artificial Sequence: Synthetic oligonucleotide
  Antisense strand to SEQ ID NO: 669612
acuuaacacauacacauuu

SEQ ID NO: 669614 - RNA, 19 nt, Artificial Sequence
  Description of Artificial Sequence: Synthetic oligonucleotide
  Sense strand starting at position 2865 of SEQ ID NO: 585812
aguaauucguauccaaauu

SEQ ID NO: 669615 - RNA, 19 nt, Artificial Sequence
  Description of Artificial Sequence: Synthetic oligonucleotide
  Antisense strand to SEQ ID NO: 669614
aauuuggauacgaauuacu

SEQ ID NO: 669616 - RNA, 19 nt, Artificial Sequence
  Description of Artificial Sequence: Synthetic oligonucleotide
  Sense strand starting at position 2918 of SEQ ID NO: 585812
cacaguugguccguacaca

SEQ ID NO: 669617 - RNA, 19 nt, Artificial Sequence
  Description of Artificial Sequence: Synthetic oligonucleotide
  Antisense strand to SEQ ID NO: 669616
uguguacggaccaacugug

SEQ ID NO: 669618 - RNA, 19 nt, Artificial Sequence
  Description of Artificial Sequence: Synthetic oligonucleotide
  Sense strand starting at position 2919 of SEQ ID NO: 585812
acaguugguccguacacaa

SEQ ID NO: 669619 - RNA, 19 nt, Artificial Sequence
  Description of Artificial Sequence: Synthetic oligonucleotide
  Antisense strand to SEQ ID NO: 669618
uuguguacggaccaacugu

SEQ ID NO: 669620 - RNA, 19 nt, Artificial Sequence
  Description of Artificial Sequence: Synthetic oligonucleotide
  Sense strand starting at position 2962 of SEQ ID NO: 585812
gacguuguuauuugaugau

SEQ ID NO: 669621 - RNA, 19 nt, Artificial Sequence
  Description of Artificial Sequence: Synthetic oligonucleotide
  Antisense strand to SEQ ID NO: 669620
aucaucaaauaacaacguc

SEQ ID NO: 669622 - RNA, 19 nt, Artificial Sequence
  Description of Artificial Sequence: Synthetic oligonucleotide
  Sense strand starting at position 3060 of SEQ ID NO: 585812
uuaaaugucugagcacuuu

SEQ ID NO: 669623 - RNA, 19 nt, Artificial Sequence
  Description of Artificial Sequence: Synthetic oligonucleotide
  Antisense strand to SEQ ID NO: 669622
aaagugcucagacauuuaa

SEQ ID NO: 669624 - RNA, 19 nt, Artificial Sequence
  Description of Artificial Sequence: Synthetic oligonucleotide
  Sense strand starting at position 3066 of SEQ ID NO: 585812
gucugagcacuuuaaggaa

SEQ ID NO: 669625 - RNA, 19 nt, Artificial Sequence
  Description of Artificial Sequence: Synthetic oligonucleotide
  Antisense strand to SEQ ID NO: 669624
uuccuuaaagugcucagac

SEQ ID NO: 669626 - RNA, 19 nt, Artificial Sequence
  Description of Artificial Sequence: Synthetic oligonucleotide
  Sense strand starting at position 3195 of SEQ ID NO: 585812
auaauacuuucugugguga

SEQ ID NO: 669627 - RNA, 19 nt, Artificial Sequence
  Description of Artificial Sequence: Synthetic oligonucleotide
  Antisense strand to SEQ ID NO: 669626
ucaccacagaaaguauuau

SEQ ID NO: 669628 - RNA, 19 nt, Artificial Sequence
  Description of Artificial Sequence: Synthetic oligonucleotide
  Sense strand starting at position 3515 of SEQ ID NO: 585812
gugaaugacuuuccuguac

SEQ ID NO: 669629 - RNA, 19 nt, Artificial Sequence
  Description of Artificial Sequence: Synthetic oligonucleotide
  Antisense strand to SEQ ID NO: 669628
guacaggaaagucauucac

SEQ ID NO: 669630 - RNA, 19 nt, Artificial Sequence
  Description of Artificial Sequence: Synthetic oligonucleotide
  Sense strand starting at position 3519 of SEQ ID NO: 585812
augacuuuccuguaccaug

SEQ ID NO: 669631 - RNA, 19 nt, Artificial Sequence
  Description of Artificial Sequence: Synthetic oligonucleotide
  Antisense strand to SEQ ID NO: 669630
caugguacaggaaagucau

SEQ ID NO: 669632 - RNA, 19 nt, Artificial Sequence
  Description of Artificial Sequence: Synthetic oligonucleotide
  Sense strand starting at position 3602 of SEQ ID NO: 585812
aucucaauaguuggguuua

SEQ ID NO: 669633 - RNA, 19 nt, Artificial Sequence
  Description of Artificial Sequence: Synthetic oligonucleotide
  Antisense strand to SEQ ID NO: 669632
uaaacccaacuauugagau

SEQ ID NO: 669634 - RNA, 19 nt, Artificial Sequence
  Description of Artificial Sequence: Synthetic oligonucleotide
  Sense strand starting at position 3604 of SEQ ID NO: 585812
cucaauaguuggguuuaua

SEQ ID NO: 669635 - RNA, 19 nt, Artificial Sequence
  Description of Artificial Sequence: Synthetic oligonucleotide
  Antisense strand to SEQ ID NO: 669634
uauaaacccaacuauugag

SEQ ID NO: 669636 - RNA, 19 nt, Artificial Sequence
  Description of Artificial Sequence: Synthetic oligonucleotide
  Sense strand starting at position 3661 of SEQ ID NO: 585812
gugaacauucuugcguguu

SEQ ID NO: 669637 - RNA, 19 nt, Artificial Sequence
  Description of Artificial Sequence: Synthetic oligonucleotide
  Antisense strand to SEQ ID NO: 669636
aacacgcaagaauguucac

SEQ ID NO: 669638 - RNA, 19 nt, Artificial Sequence
  Description of Artificial Sequence: Synthetic oligonucleotide
  Sense strand starting at position 3715 of SEQ ID NO: 585812
gcaauuaucugauuguuua

SEQ ID NO: 669639 - RNA, 19 nt, Artificial Sequence
  Description of Artificial Sequence: Synthetic oligonucleotide
  Antisense strand to SEQ ID NO: 669638
uaaacaaucagauaauugc

SEQ ID NO: 669640 - RNA, 19 nt, Artificial Sequence
  Description of Artificial Sequence: Synthetic oligonucleotide
  Sense strand starting at position 3719 of SEQ ID NO: 585812
uuaucugauuguuuacuca

SEQ ID NO: 669641 - RNA, 19 nt, Artificial Sequence
  Description of Artificial Sequence: Synthetic oligonucleotide
  Antisense strand to SEQ ID NO: 669640
ugaguaaacaaucagauaa

SEQ ID NO: 669642 - RNA, 19 nt, Artificial Sequence
  Description of Artificial Sequence: Synthetic oligonucleotide
  Sense strand starting at position 3722 of SEQ ID NO: 585812
ucugauuguuuacucagaa

SEQ ID NO: 669643 - RNA, 19 nt, Artificial Sequence
  Description of Artificial Sequence: Synthetic oligonucleotide
  Antisense strand to SEQ ID NO: 669642
uucugaguaaacaaucaga

SEQ ID NO: 669644 - RNA, 19 nt, Artificial Sequence
  Description of Artificial Sequence: Synthetic oligonucleotide
  Sense strand starting at position 3723 of SEQ ID NO: 585812
cugauuguuuacucagaau

SEQ ID NO: 669645 - RNA, 19 nt, Artificial Sequence
  Description of Artificial Sequence: Synthetic oligonucleotide
  Antisense strand to SEQ ID NO: 669644
auucugaguaaacaaucag

SEQ ID NO: 669646 - RNA, 19 nt, Artificial Sequence
  Description of Artificial Sequence: Synthetic oligonucleotide
  Sense strand starting at position 3847 of SEQ ID NO: 585812
uuccauugacuguaugcaa

SEQ ID NO: 669647 - RNA, 19 nt, Artificial Sequence
  Description of Artificial Sequence: Synthetic oligonucleotide
  Antisense strand to SEQ ID NO: 669646
uugcauacagucaauggaa

SEQ ID NO: 669648 - RNA, 19 nt, Artificial Sequence
  Description of Artificial Sequence: Synthetic oligonucleotide
  Sense strand starting at position 3876 of SEQ ID NO: 585812
ucucaaauccugggccaua

SEQ ID NO: 669649 - RNA, 19 nt, Artificial Sequence
  Description of Artificial Sequence: Synthetic oligonucleotide
  Antisense strand to SEQ ID NO: 669648
uauggcccaggauuugaga

SEQ ID NO: 669650 - RNA, 19 nt, Artificial Sequence
  Description of Artificial Sequence: Synthetic oligonucleotide
  Sense strand starting at position 129 of SEQ ID NO: 585813
gguggaaaguugucuuuaa

SEQ ID NO: 669651 - RNA, 19 nt, Artificial Sequence
  Description of Artificial Sequence: Synthetic oligonucleotide
  Antisense strand to SEQ ID NO: 669650
uuaaagacaacuuuccacc

SEQ ID NO: 669652 - RNA, 19 nt, Artificial Sequence
  Description of Artificial Sequence: Synthetic oligonucleotide
  Sense strand starting at position 130 of SEQ ID NO: 585813
guggaaaguugucuuuaag

SEQ ID NO: 669653 - RNA, 19 nt, Artificial Sequence
  Description of Artificial Sequence: Synthetic oligonucleotide
  Antisense strand to SEQ ID NO: 669652
cuuaaagacaacuuuccac

SEQ ID NO: 669654 - RNA, 19 nt, Artificial Sequence
  Description of Artificial Sequence: Synthetic oligonucleotide
  Sense strand starting at position 154 of SEQ ID NO: 585813
ccaucaaaugucuggcuaa

SEQ ID NO: 669655 - RNA, 19 nt, Artificial Sequence
  Description of Artificial Sequence: Synthetic oligonucleotide
  Antisense strand to SEQ ID NO: 669654
uuagccagacauuugaugg

SEQ ID NO: 669656 - RNA, 19 nt, Artificial Sequence
  Description of Artificial Sequence: Synthetic oligonucleotide
  Sense strand starting at position 157 of SEQ ID NO: 585813
ucaaaugucuggcuaacag

SEQ ID NO: 669657 - RNA, 19 nt, Artificial Sequence
  Description of Artificial Sequence: Synthetic oligonucleotide
  Antisense strand to SEQ ID NO: 669656
cuguuagccagacauuuga

SEQ ID NO: 669658 - RNA, 19 nt, Artificial Sequence
  Description of Artificial Sequence: Synthetic oligonucleotide
  Sense strand starting at position 299 of SEQ ID NO: 585813
gcaggacacuucccaagaa

SEQ ID NO: 669659 - RNA, 19 nt, Artificial Sequence
  Description of Artificial Sequence: Synthetic oligonucleotide
  Antisense strand to SEQ ID NO: 669658
uucuugggaaguguccugc

SEQ ID NO: 669660 - RNA, 19 nt, Artificial Sequence
  Description of Artificial Sequence: Synthetic oligonucleotide
  Sense strand starting at position 406 of SEQ ID NO: 585813
uuaagaagcuguccagacu

SEQ ID NO: 669661 - RNA, 19 nt, Artificial Sequence
  Description of Artificial Sequence: Synthetic oligonucleotide
  Antisense strand to SEQ ID NO: 669660
agucuggacagcuucuuaa

SEQ ID NO: 669662 - RNA, 19 nt, Artificial Sequence
  Description of Artificial Sequence: Synthetic oligonucleotide
  Sense strand starting at position 453 of SEQ ID NO: 585813
aggucuugcuagguagaaa

SEQ ID NO: 669663 - RNA, 19 nt, Artificial Sequence
  Description of Artificial Sequence: Synthetic oligonucleotide
  Antisense strand to SEQ ID NO: 669662
uuucuaccuagcaagaccu

SEQ ID NO: 669664 - RNA, 19 nt, Artificial Sequence
  Description of Artificial Sequence: Synthetic oligonucleotide
  Sense strand starting at position 880 of SEQ ID NO: 585813
gcaugauggcgugccugua

SEQ ID NO: 669665 - RNA, 19 nt, Artificial Sequence
  Description of Artificial Sequence: Synthetic oligonucleotide
  Antisense strand to SEQ ID NO: 669664
uacaggcacgccaucaugc

SEQ ID NO: 669666 - RNA, 19 nt, Artificial Sequence
  Description of Artificial Sequence: Synthetic oligonucleotide
  Sense strand starting at position 1353 of SEQ ID NO: 585813
ugacuaguaagaugacagu

SEQ ID NO: 669667 - RNA, 19 nt, Artificial Sequence
  Description of Artificial Sequence: Synthetic oligonucleotide
  Antisense strand to SEQ ID NO: 669666
acugucaucuuacuaguca

SEQ ID NO: 669668 - RNA, 19 nt, Artificial Sequence
  Description of Artificial Sequence: Synthetic oligonucleotide
  Sense strand starting at position 1421 of SEQ ID NO: 585813
augcaauguggauagagua

SEQ ID NO: 669669 - RNA, 19 nt, Artificial Sequence
  Description of Artificial Sequence: Synthetic oligonucleotide
  Antisense strand to SEQ ID NO: 669668
uacucuauccacauugcau

SEQ ID NO: 669670 - RNA, 19 nt, Artificial Sequence
  Description of Artificial Sequence: Synthetic oligonucleotide
  Sense strand starting at position 1453 of SEQ ID NO: 585813
gagagaugcucauuauugg

SEQ ID NO: 669671 - RNA, 19 nt, Artificial Sequence
  Description of Artificial Sequence: Synthetic oligonucleotide
  Antisense strand to SEQ ID NO: 669670
ccaauaaugagcaucucuc

SEQ ID NO: 669672 - RNA, 19 nt, Artificial Sequence
  Description of Artificial Sequence: Synthetic oligonucleotide
  Sense strand starting at position 1515 of SEQ ID NO: 585813
aacggcauuugacaugaaa

SEQ ID NO: 669673 - RNA, 19 nt, Artificial Sequence
  Description of Artificial Sequence: Synthetic oligonucleotide
  Antisense strand to SEQ ID NO: 669672
uuucaugucaaaugccguu

SEQ ID NO: 669674 - RNA, 19 nt, Artificial Sequence
  Description of Artificial Sequence: Synthetic oligonucleotide
  Sense strand starting at position 2234 of SEQ ID NO: 585813
uugguaaaccuguauacca

SEQ ID NO: 669675 - RNA, 19 nt, Artificial Sequence
  Description of Artificial Sequence: Synthetic oligonucleotide
  Antisense strand to SEQ ID NO: 669674
ugguauacagguuuaccaa

SEQ ID NO: 669676 - RNA, 19 nt, Artificial Sequence
  Description of Artificial Sequence: Synthetic oligonucleotide
  Sense strand starting at position 2374 of SEQ ID NO: 585813
cacuaacgucuccggaaga

SEQ ID NO: 669677 - RNA, 19 nt, Artificial Sequence
  Description of Artificial Sequence: Synthetic oligonucleotide
  Antisense strand to SEQ ID NO: 669676
ucuuccggagacguuagug

SEQ ID NO: 669678 - RNA, 19 nt, Artificial Sequence
  Description of Artificial Sequence: Synthetic oligonucleotide
  Sense strand starting at position 2644 of SEQ ID NO: 585813
acacuuguuuguuugauga

SEQ ID NO: 669679 - RNA, 19 nt, Artificial Sequence
  Description of Artificial Sequence: Synthetic oligonucleotide
  Antisense strand to SEQ ID NO: 669678
ucaucaaacaaacaagugu

SEQ ID NO: 669680 - RNA, 19 nt, Artificial Sequence
  Description of Artificial Sequence: Synthetic oligonucleotide
  Sense strand starting at position 2655 of SEQ ID NO: 585813
uuugaugacuguguuaaug

SEQ ID NO: 669681 - RNA, 19 nt, Artificial Sequence
  Description of Artificial Sequence: Synthetic oligonucleotide
  Antisense strand to SEQ ID NO: 669680
cauuaacacagucaucaaa

SEQ ID NO: 669682 - RNA, 19 nt, Artificial Sequence
  Description of Artificial Sequence: Synthetic oligonucleotide
  Sense strand starting at position 2664 of SEQ ID NO: 585813
uguguuaaugucuaccuua

SEQ ID NO: 669683 - RNA, 19 nt, Artificial Sequence
  Description of Artificial Sequence: Synthetic oligonucleotide
  Antisense strand to SEQ ID NO: 669682
uaagguagacauuaacaca

SEQ ID NO: 669684 - RNA, 19 nt, Artificial Sequence
  Description of Artificial Sequence: Synthetic oligonucleotide
  Sense strand starting at position 2667 of SEQ ID NO: 585813
guuaaugucuaccuuauaa

SEQ ID NO: 669685 - RNA, 19 nt, Artificial Sequence
  Description of Artificial Sequence: Synthetic oligonucleotide
  Antisense strand to SEQ ID NO: 669684
uuauaagguagacauuaac

SEQ ID NO: 669686 - RNA, 19 nt, Artificial Sequence
  Description of Artificial Sequence: Synthetic oligonucleotide
  Sense strand starting at position 3189 of SEQ ID NO: 585813
uuuggaacauucucaagca

SEQ ID NO: 669687 - RNA, 19 nt, Artificial Sequence
  Description of Artificial Sequence: Synthetic oligonucleotide
  Antisense strand to SEQ ID NO: 669686
ugcuugagaauguuccaaa

SEQ ID NO: 669688 - RNA, 19 nt, Artificial Sequence
  Description of Artificial Sequence: Synthetic oligonucleotide
  Sense strand starting at position 3227 of SEQ ID NO: 585813
agaauuccagccuaagcua

SEQ ID NO: 669689 - RNA, 19 nt, Artificial Sequence
  Description of Artificial Sequence: Synthetic oligonucleotide
  Antisense strand to SEQ ID NO: 669688
uagcuuaggcuggaauucu

SEQ ID NO: 669690 - RNA, 19 nt, Artificial Sequence
  Description of Artificial Sequence: Synthetic oligonucleotide
  Sense strand starting at position 3341 of SEQ ID NO: 585813
acuugaaaucauggucacu

SEQ ID NO: 669691 - RNA, 19 nt, Artificial Sequence
  Description of Artificial Sequence: Synthetic oligonucleotide
  Antisense strand to SEQ ID NO: 669690
agugaccaugauuucaagu

SEQ ID NO: 669692 - RNA, 19 nt, Artificial Sequence
  Description of Artificial Sequence: Synthetic oligonucleotide
  Sense strand starting at position 3343 of SEQ ID NO: 585813
uugaaaucauggucacugu

SEQ ID NO: 669693 - RNA, 19 nt, Artificial Sequence
  Description of Artificial Sequence: Synthetic oligonucleotide
  Antisense strand to SEQ ID NO: 669692
acagugaccaugauuucaa

SEQ ID NO: 669694 - RNA, 19 nt, Artificial Sequence
  Description of Artificial Sequence: Synthetic oligonucleotide
  Sense strand starting at position 3344 of SEQ ID NO: 585813
ugaaaucauggucacuguu

SEQ ID NO: 669695 - RNA, 19 nt, Artificial Sequence
  Description of Artificial Sequence: Synthetic oligonucleotide
  Antisense strand to SEQ ID NO: 669694
aacagugaccaugauuuca

SEQ ID NO: 669696 - RNA, 19 nt, Artificial Sequence
  Description of Artificial Sequence: Synthetic oligonucleotide
  Sense strand starting at position 3404 of SEQ ID NO: 585813
ucuagacauugugcuagau

SEQ ID NO: 669697 - RNA, 19 nt, Artificial Sequence
  Description of Artificial Sequence: Synthetic oligonucleotide
  Antisense strand to SEQ ID NO: 669696
aucuagcacaaugucuaga

SEQ ID NO: 669698 - RNA, 19 nt, Artificial Sequence
  Description of Artificial Sequence: Synthetic oligonucleotide
  Sense strand starting at position 3414 of SEQ ID NO: 585813
gugcuagauguugggacaa

SEQ ID NO: 669699 - RNA, 19 nt, Artificial Sequence
  Description of Artificial Sequence: Synthetic oligonucleotide
  Antisense strand to SEQ ID NO: 669698
uugucccaacaucuagcac

SEQ ID NO: 669700 - RNA, 19 nt, Artificial Sequence
  Description of Artificial Sequence: Synthetic oligonucleotide
  Sense strand starting at position 3426 of SEQ ID NO: 585813
gggacaagauaugcaaagu

SEQ ID NO: 669701 - RNA, 19 nt, Artificial Sequence
  Description of Artificial Sequence: Synthetic oligonucleotide
  Antisense strand to SEQ ID NO: 669700
acuuugcauaucuuguccc

SEQ ID NO: 669702 - RNA, 19 nt, Artificial Sequence
  Description of Artificial Sequence: Synthetic oligonucleotide
  Sense strand starting at position 3452 of SEQ ID NO: 585813
cuccaagguguguaugaca

SEQ ID NO: 669703 - RNA, 19 nt, Artificial Sequence
  Description of Artificial Sequence: Synthetic oligonucleotide
  Antisense strand to SEQ ID NO: 669702
ugucauacacaccuuggag

SEQ ID NO: 669704 - RNA, 19 nt, Artificial Sequence
  Description of Artificial Sequence: Synthetic oligonucleotide
  Sense strand starting at position 3508 of SEQ ID NO: 585813
cuggcuuggaucuaguuau

SEQ ID NO: 669705 - RNA, 19 nt, Artificial Sequence
  Description of Artificial Sequence: Synthetic oligonucleotide
  Antisense strand to SEQ ID NO: 669704
auaacuagauccaagccag

SEQ ID NO: 669706 - RNA, 19 nt, Artificial Sequence
  Description of Artificial Sequence: Synthetic oligonucleotide
  Sense strand starting at position 3579 of SEQ ID NO: 585813
uguaacaagcuuuagcaua

SEQ ID NO: 669707 - RNA, 19 nt, Artificial Sequence
  Description of Artificial Sequence: Synthetic oligonucleotide
  Antisense strand to SEQ ID NO: 669706
uaugcuaaagcuuguuaca

SEQ ID NO: 669708 - RNA, 19 nt, Artificial Sequence
  Description of Artificial Sequence: Synthetic oligonucleotide
  Sense strand starting at position 3595 of SEQ ID NO: 585813
auaggcauagguugauaau

SEQ ID NO: 669709 - RNA, 19 nt, Artificial Sequence
  Description of Artificial Sequence: Synthetic oligonucleotide
  Antisense strand to SEQ ID NO: 669708
auuaucaaccuaugccuau

SEQ ID NO: 669710 - RNA, 19 nt, Artificial Sequence
  Description of Artificial Sequence: Synthetic oligonucleotide
  Sense strand starting at position 3602 of SEQ ID NO: 585813
uagguugauaauggaugua

SEQ ID NO: 669711 - RNA, 19 nt, Artificial Sequence
  Description of Artificial Sequence: Synthetic oligonucleotide
  Antisense strand to SEQ ID NO: 669710
uacauccauuaucaaccua

SEQ ID NO: 669712 - RNA, 19 nt, Artificial Sequence
  Description of Artificial Sequence: Synthetic oligonucleotide
  Sense strand starting at position 3650 of SEQ ID NO: 585813
acauuuaucuuguuugguu

SEQ ID NO: 669713 - RNA, 19 nt, Artificial Sequence
  Description of Artificial Sequence: Synthetic oligonucleotide
  Antisense strand to SEQ ID NO: 669712
aaccaaacaagauaaaugu

SEQ ID NO: 669714 - RNA, 19 nt, Artificial Sequence
  Description of Artificial Sequence: Synthetic oligonucleotide
  Sense strand starting at position 3737 of SEQ ID NO: 585813
caggaaaggucaguugacu

SEQ ID NO: 669715 - RNA, 19 nt, Artificial Sequence
  Description of Artificial Sequence: Synthetic oligonucleotide
  Antisense strand to SEQ ID NO: 669714
agucaacugaccuuuccug

SEQ ID NO: 669716 - RNA, 19 nt, Artificial Sequence
  Description of Artificial Sequence: Synthetic oligonucleotide
  Sense strand starting at position 3748 of SEQ ID NO: 585813
aguugacuugccuaaauuc

SEQ ID NO: 669717 - RNA, 19 nt, Artificial Sequence
  Description of Artificial Sequence: Synthetic oligonucleotide
  Antisense strand to SEQ ID NO: 669716
gaauuuaggcaagucaacu

SEQ ID NO: 669718 - RNA, 19 nt, Artificial Sequence
  Description of Artificial Sequence: Synthetic oligonucleotide
  Sense strand starting at position 3757 of SEQ ID NO: 585813
gccuaaauucgaugagacu

SEQ ID NO: 669719 - RNA, 19 nt, Artificial Sequence
  Description of Artificial Sequence: Synthetic oligonucleotide
  Antisense strand to SEQ ID NO: 669718
agucucaucgaauuuaggc

SEQ ID NO: 669720 - RNA, 19 nt, Artificial Sequence
  Description of Artificial Sequence: Synthetic oligonucleotide
  Sense strand starting at position 3838 of SEQ ID NO: 585813
ggcucuucaggauaggagu

SEQ ID NO: 669721 - RNA, 19 nt, Artificial Sequence
  Description of Artificial Sequence: Synthetic oligonucleotide
  Antisense strand to SEQ ID NO: 669720
acuccuauccugaagagcc

SEQ ID NO: 669722 - RNA, 19 nt, Artificial Sequence
  Description of Artificial Sequence: Synthetic oligonucleotide
  Sense strand starting at position 3885 of SEQ ID NO: 585813
uuuaaaugcuucucaaagg

SEQ ID NO: 669723 - RNA, 19 nt, Artificial Sequence
  Description of Artificial Sequence: Synthetic oligonucleotide
  Antisense strand to SEQ ID NO: 669722
ccuuugagaagcauuuaaa

SEQ ID NO: 669724 - RNA, 19 nt, Artificial Sequence
  Description of Artificial Sequence: Synthetic oligonucleotide
  Sense strand starting at position 3890 of SEQ ID NO: 585813
augcuucucaaagggagau

SEQ ID NO: 669725 - RNA, 19 nt, Artificial Sequence
  Description of Artificial Sequence: Synthetic oligonucleotide
  Antisense strand to SEQ ID NO: 669724
aucucccuuugagaagcau

SEQ ID NO: 669726 - RNA, 19 nt, Artificial Sequence
  Description of Artificial Sequence: Synthetic oligonucleotide
  Sense strand starting at position 3891 of SEQ ID NO: 585813
ugcuucucaaagggagaua

SEQ ID NO: 669727 - RNA, 19 nt, Artificial Sequence
  Description of Artificial Sequence: Synthetic oligonucleotide
  Antisense strand to SEQ ID NO: 669726
uaucucccuuugagaagca

SEQ ID NO: 669728 - RNA, 19 nt, Artificial Sequence
  Description of Artificial Sequence: Synthetic oligonucleotide
  Sense strand starting at position 3955 of SEQ ID NO: 585813
augcaugcucuugaucaag

SEQ ID NO: 669729 - RNA, 19 nt, Artificial Sequence
  Description of Artificial Sequence: Synthetic oligonucleotide
  Antisense strand to SEQ ID NO: 669728
cuugaucaagagcaugcau

SEQ ID NO: 669730 - RNA, 19 nt, Artificial Sequence
  Description of Artificial Sequence: Synthetic oligonucleotide
  Sense strand starting at position 21 of SEQ ID NO: 585814
gguggaaaguugucuuuaa

SEQ ID NO: 669731 - RNA, 19 nt, Artificial Sequence
  Description of Artificial Sequence: Synthetic oligonucleotide
  Antisense strand to SEQ ID NO: 669730
uuaaagacaacuuuccacc

SEQ ID NO: 669732 - RNA, 19 nt, Artificial Sequence
  Description of Artificial Sequence: Synthetic oligonucleotide
  Sense strand starting at position 22 of SEQ ID NO: 585814
guggaaaguugucuuuaag

SEQ ID NO: 669733 - RNA, 19 nt, Artificial Sequence
  Description of Artificial Sequence: Synthetic oligonucleotide
  Antisense strand to SEQ ID NO: 669732
cuuaaagacaacuuuccac

SEQ ID NO: 669734 - RNA, 19 nt, Artificial Sequence
  Description of Artificial Sequence: Synthetic oligonucleotide
  Sense strand starting at position 46 of SEQ ID NO: 585814
ccaucaaaugucuggcuaa

SEQ ID NO: 669735 - RNA, 19 nt, Artificial Sequence
  Description of Artificial Sequence: Synthetic oligonucleotide
  Antisense strand to SEQ ID NO: 669734
uuagccagacauuugaugg

SEQ ID NO: 669736 - RNA, 19 nt, Artificial Sequence
  Description of Artificial Sequence: Synthetic oligonucleotide
  Sense strand starting at position 49 of SEQ ID NO: 585814
ucaaaugucuggcuaacag

SEQ ID NO: 669737 - RNA, 19 nt, Artificial Sequence
  Description of Artificial Sequence: Synthetic oligonucleotide
  Antisense strand to SEQ ID NO: 669736
cuguuagccagacauuuga

SEQ ID NO: 669738 - RNA, 19 nt, Artificial Sequence
  Description of Artificial Sequence: Synthetic oligonucleotide
  Sense strand starting at position 191 of SEQ ID NO: 585814
gcaggacacuucccaagaa

SEQ ID NO: 669739 - RNA, 19 nt, Artificial Sequence
  Description of Artificial Sequence: Synthetic oligonucleotide
  Antisense strand to SEQ ID NO: 669738
uucuugggaaguguccugc

SEQ ID NO: 669740 - RNA, 19 nt, Artificial Sequence
  Description of Artificial Sequence: Synthetic oligonucleotide
  Sense strand starting at position 298 of SEQ ID NO: 585814
uuaagaagcuguccagacu

SEQ ID NO: 669741 - RNA, 19 nt, Artificial Sequence
  Description of Artificial Sequence: Synthetic oligonucleotide
  Antisense strand to SEQ ID NO: 669740
agucuggacagcuucuuaa

SEQ ID NO: 669742 - RNA, 19 nt, Artificial Sequence
  Description of Artificial Sequence: Synthetic oligonucleotide
  Sense strand starting at position 345 of SEQ ID NO: 585814
aggucuugcuagguagaaa

SEQ ID NO: 669743 - RNA, 19 nt, Artificial Sequence
  Description of Artificial Sequence: Synthetic oligonucleotide
  Antisense strand to SEQ ID NO: 669742
uuucuaccuagcaagaccu

SEQ ID NO: 669744 - RNA, 19 nt, Artificial Sequence
  Description of Artificial Sequence: Synthetic oligonucleotide
  Sense strand starting at position 772 of SEQ ID NO: 585814
gcaugauggcgugccugua

SEQ ID NO: 669745 - RNA, 19 nt, Artificial Sequence
  Description of Artificial Sequence: Synthetic oligonucleotide
  Antisense strand to SEQ ID NO: 669744
uacaggcacgccaucaugc

SEQ ID NO: 669746 - RNA, 19 nt, Artificial Sequence
  Description of Artificial Sequence: Synthetic oligonucleotide
  Sense strand starting at position 1245 of SEQ ID NO: 585814
ugacuaguaagaugacagu

SEQ ID NO: 669747 - RNA, 19 nt, Artificial Sequence
  Description of Artificial Sequence: Synthetic oligonucleotide
  Antisense strand to SEQ ID NO: 669746
acugucaucuuacuaguca

SEQ ID NO: 669748 - RNA, 19 nt, Artificial Sequence
  Description of Artificial Sequence: Synthetic oligonucleotide
  Sense strand starting at position 1313 of SEQ ID NO: 585814
augcaauguggauagagua

SEQ ID NO: 669749 - RNA, 19 nt, Artificial Sequence
  Description of Artificial Sequence: Synthetic oligonucleotide
  Antisense strand to SEQ ID NO: 669748
uacucuauccacauugcau

SEQ ID NO: 669750 - RNA, 19 nt, Artificial Sequence
  Description of Artificial Sequence: Synthetic oligonucleotide
  Sense strand starting at position 1345 of SEQ ID NO: 585814
gagagaugcucauuauugg

SEQ ID NO: 669751 - RNA, 19 nt, Artificial Sequence
  Description of Artificial Sequence: Synthetic oligonucleotide
  Antisense strand to SEQ ID NO: 669750
ccaauaaugagcaucucuc

SEQ ID NO: 669752 - RNA, 19 nt, Artificial Sequence
  Description of Artificial Sequence: Synthetic oligonucleotide
  Sense strand starting at position 1407 of SEQ ID NO: 585814
aacggcauuugacaugaaa

SEQ ID NO: 669753 - RNA, 19 nt, Artificial Sequence
  Description of Artificial Sequence: Synthetic oligonucleotide
  Antisense strand to SEQ ID NO: 669752
uuucaugucaaaugccguu

SEQ ID NO: 669754 - RNA, 19 nt, Artificial Sequence
  Description of Artificial Sequence: Synthetic oligonucleotide
  Sense strand starting at position 2126 of SEQ ID NO: 585814
uugguaaaccuguauacca

SEQ ID NO: 669755 - RNA, 19 nt, Artificial Sequence
  Description of Artificial Sequence: Synthetic oligonucleotide
  Antisense strand to SEQ ID NO: 669754
ugguauacagguuuaccaa

SEQ ID NO: 669756 - RNA, 19 nt, Artificial Sequence
  Description of Artificial Sequence: Synthetic oligonucleotide
  Sense strand starting at position 2547 of SEQ ID NO: 585814
uuugaugacuguguuaaug

SEQ ID NO: 669757 - RNA, 19 nt, Artificial Sequence
  Description of Artificial Sequence: Synthetic oligonucleotide
  Antisense strand to SEQ ID NO: 669756
cauuaacacagucaucaaa

SEQ ID NO: 669758 - RNA, 19 nt, Artificial Sequence
  Description of Artificial Sequence: Synthetic oligonucleotide
  Sense strand starting at position 2559 of SEQ ID NO: 585814
guuaaugucuaccuuauaa

SEQ ID NO: 669759 - RNA, 19 nt, Artificial Sequence
  Description of Artificial Sequence: Synthetic oligonucleotide
  Antisense strand to SEQ ID NO: 669758
uuauaagguagacauuaac

SEQ ID NO: 669760 - RNA, 19 nt, Artificial Sequence
  Description of Artificial Sequence: Synthetic oligonucleotide
  Sense strand starting at position 3081 of SEQ ID NO: 585814
uuuggaacauucucaagca

SEQ ID NO: 669761 - RNA, 19 nt, Artificial Sequence
  Description of Artificial Sequence: Synthetic oligonucleotide
  Antisense strand to SEQ ID NO: 669760
ugcuugagaauguuccaaa

SEQ ID NO: 669762 - RNA, 19 nt, Artificial Sequence
  Description of Artificial Sequence: Synthetic oligonucleotide
  Sense strand starting at position 3119 of SEQ ID NO: 585814
agaauuccagccuaagcua

SEQ ID NO: 669763 - RNA, 19 nt, Artificial Sequence
  Description of Artificial Sequence: Synthetic oligonucleotide
  Antisense strand to SEQ ID NO: 669762
uagcuuaggcuggaauucu

SEQ ID NO: 669764 - RNA, 19 nt, Artificial Sequence
  Description of Artificial Sequence: Synthetic oligonucleotide
  Sense strand starting at position 3233 of SEQ ID NO: 585814
acuugaaaucauggucacu

SEQ ID NO: 669765 - RNA, 19 nt, Artificial Sequence
  Description of Artificial Sequence: Synthetic oligonucleotide
  Antisense strand to SEQ ID NO: 669764
agugaccaugauuucaagu

SEQ ID NO: 669766 - RNA, 19 nt, Artificial Sequence
  Description of Artificial Sequence: Synthetic oligonucleotide
  Sense strand starting at position 3235 of SEQ ID NO: 585814
uugaaaucauggucacugu

SEQ ID NO: 669767 - RNA, 19 nt, Artificial Sequence
  Description of Artificial Sequence: Synthetic oligonucleotide
  Antisense strand to SEQ ID NO: 669766
acagugaccaugauuucaa

SEQ ID NO: 669768 - RNA, 19 nt, Artificial Sequence
  Description of Artificial Sequence: Synthetic oligonucleotide
  Sense strand starting at position 3236 of SEQ ID NO: 585814
ugaaaucauggucacuguu

SEQ ID NO: 669769 - RNA, 19 nt, Artificial Sequence
  Description of Artificial Sequence: Synthetic oligonucleotide
  Antisense strand to SEQ ID NO: 669768
aacagugaccaugauuuca

SEQ ID NO: 669770 - RNA, 19 nt, Artificial Sequence
  Description of Artificial Sequence: Synthetic oligonucleotide
  Sense strand starting at position 3296 of SEQ ID NO: 585814
ucuagacauugugcuagau

SEQ ID NO: 669771 - RNA, 19 nt, Artificial Sequence
  Description of Artificial Sequence: Synthetic oligonucleotide
  Antisense strand to SEQ ID NO: 669770
aucuagcacaaugucuaga

SEQ ID NO: 669772 - RNA, 19 nt, Artificial Sequence
  Description of Artificial Sequence: Synthetic oligonucleotide
  Sense strand starting at position 3318 of SEQ ID NO: 585814
gggacaagauaugcaaagu

SEQ ID NO: 669773 - RNA, 19 nt, Artificial Sequence
  Description of Artificial Sequence: Synthetic oligonucleotide
  Antisense strand to SEQ ID NO: 669772
acuuugcauaucuuguccc

SEQ ID NO: 669774 - RNA, 19 nt, Artificial Sequence
  Description of Artificial Sequence: Synthetic oligonucleotide
  Sense strand starting at position 3344 of SEQ ID NO: 585814
cuccaagguguguaugaca

SEQ ID NO: 669775 - RNA, 19 nt, Artificial Sequence
  Description of Artificial Sequence: Synthetic oligonucleotide
  Antisense strand to SEQ ID NO: 669774
ugucauacacaccuuggag

SEQ ID NO: 669776 - RNA, 19 nt, Artificial Sequence
  Description of Artificial Sequence: Synthetic oligonucleotide
  Sense strand starting at position 3400 of SEQ ID NO: 585814
cuggcuuggaucuaguuau

SEQ ID NO: 669777 - RNA, 19 nt, Artificial Sequence
  Description of Artificial Sequence: Synthetic oligonucleotide
  Antisense strand to SEQ ID NO: 669776
auaacuagauccaagccag

SEQ ID NO: 669778 - RNA, 19 nt, Artificial Sequence
  Description of Artificial Sequence: Synthetic oligonucleotide
  Sense strand starting at position 3471 of SEQ ID NO: 585814
uguaacaagcuuuagcaua

SEQ ID NO: 669779 - RNA, 19 nt, Artificial Sequence
  Description of Artificial Sequence: Synthetic oligonucleotide
  Antisense strand to SEQ ID NO: 669778
uaugcuaaagcuuguuaca

SEQ ID NO: 669780 - RNA, 19 nt, Artificial Sequence
  Description of Artificial Sequence: Synthetic oligonucleotide
  Sense strand starting at position 3487 of SEQ ID NO: 585814
auaggcauagguugauaau

SEQ ID NO: 669781 - RNA, 19 nt, Artificial Sequence
  Description of Artificial Sequence: Synthetic oligonucleotide
  Antisense strand to SEQ ID NO: 669780
auuaucaaccuaugccuau

SEQ ID NO: 669782 - RNA, 19 nt, Artificial Sequence
  Description of Artificial Sequence: Synthetic oligonucleotide
  Sense strand starting at position 3494 of SEQ ID NO: 585814
uagguugauaauggaugua

SEQ ID NO: 669783 - RNA, 19 nt, Artificial Sequence
  Description of Artificial Sequence: Synthetic oligonucleotide
  Antisense strand to SEQ ID NO: 669782
uacauccauuaucaaccua

SEQ ID NO: 669784 - RNA, 19 nt, Artificial Sequence
  Description of Artificial Sequence: Synthetic oligonucleotide
  Sense strand starting at position 3542 of SEQ ID NO: 585814
acauuuaucuuguuugguu

SEQ ID NO: 669785 - RNA, 19 nt, Artificial Sequence
  Description of Artificial Sequence: Synthetic oligonucleotide
  Antisense strand to SEQ ID NO: 669784
aaccaaacaagauaaaugu

SEQ ID NO: 669786 - RNA, 19 nt, Artificial Sequence
  Description of Artificial Sequence: Synthetic oligonucleotide
  Sense strand starting at position 3629 of SEQ ID NO: 585814
caggaaaggucaguugacu

SEQ ID NO: 669787 - RNA, 19 nt, Artificial Sequence
  Description of Artificial Sequence: Synthetic oligonucleotide
  Antisense strand to SEQ ID NO: 669786
agucaacugaccuuuccug

SEQ ID NO: 669788 - RNA, 19 nt, Artificial Sequence
  Description of Artificial Sequence: Synthetic oligonucleotide
  Sense strand starting at position 3640 of SEQ ID NO: 585814
aguugacuugccuaaauuc

SEQ ID NO: 669789 - RNA, 19 nt, Artificial Sequence
  Description of Artificial Sequence: Synthetic oligonucleotide
  Antisense strand to SEQ ID NO: 669788
gaauuuaggcaagucaacu

SEQ ID NO: 669790 - RNA, 19 nt, Artificial Sequence
  Description of Artificial Sequence: Synthetic oligonucleotide
  Sense strand starting at position 3649 of SEQ ID NO: 585814
gccuaaauucgaugagacu

SEQ ID NO: 669791 - RNA, 19 nt, Artificial Sequence
  Description of Artificial Sequence: Synthetic oligonucleotide
  Antisense strand to SEQ ID NO: 669790
agucucaucgaauuuaggc

SEQ ID NO: 669792 - RNA, 19 nt, Artificial Sequence
  Description of Artificial Sequence: Synthetic oligonucleotide
  Sense strand starting at position 3730 of SEQ ID NO: 585814
ggcucuucaggauaggagu

SEQ ID NO: 669793 - RNA, 19 nt, Artificial Sequence
  Description of Artificial Sequence: Synthetic oligonucleotide
  Antisense strand to SEQ ID NO: 669792
acuccuauccugaagagcc

SEQ ID NO: 669794 - RNA, 19 nt, Artificial Sequence
  Description of Artificial Sequence: Synthetic oligonucleotide
  Sense strand starting at position 3777 of SEQ ID NO: 585814
uuuaaaugcuucucaaagg

SEQ ID NO: 669795 - RNA, 19 nt, Artificial Sequence
  Description of Artificial Sequence: Synthetic oligonucleotide
  Antisense strand to SEQ ID NO: 669794
ccuuugagaagcauuuaaa

SEQ ID NO: 669796 - RNA, 19 nt, Artificial Sequence
  Description of Artificial Sequence: Synthetic oligonucleotide
  Sense strand starting at position 3782 of SEQ ID NO: 585814
augcuucucaaagggagau

SEQ ID NO: 669797 - RNA, 19 nt, Artificial Sequence
  Description of Artificial Sequence: Synthetic oligonucleotide
  Antisense strand to SEQ ID NO: 669796
aucucccuuugagaagcau

SEQ ID NO: 669798 - RNA, 19 nt, Artificial Sequence
  Description of Artificial Sequence: Synthetic oligonucleotide
  Sense strand starting at position 3783 of SEQ ID NO: 585814
ugcuucucaaagggagaua

SEQ ID NO: 669799 - RNA, 19 nt, Artificial Sequence
  Description of Artificial Sequence: Synthetic oligonucleotide
  Antisense strand to SEQ ID NO: 669798
uaucucccuuugagaagca

SEQ ID NO: 669800 - RNA, 19 nt, Artificial Sequence
  Description of Artificial Sequence: Synthetic oligonucleotide
  Sense strand starting at position 3847 of SEQ ID NO: 585814
augcaugcucuugaucaag

SEQ ID NO: 669801 - RNA, 19 nt, Artificial Sequence
  Description of Artificial Sequence: Synthetic oligonucleotide
  Antisense strand to SEQ ID NO: 669800
cuugaucaagagcaugcau

SEQ ID NO: 669802 - RNA, 19 nt, Artificial Sequence
  Description of Artificial Sequence: Synthetic oligonucleotide
  Sense strand starting at position 3895 of SEQ ID NO: 585814
cugugaguucugggaacuu

SEQ ID NO: 669803 - RNA, 19 nt, Artificial Sequence
  Description of Artificial Sequence: Synthetic oligonucleotide
  Antisense strand to SEQ ID NO: 669802
aaguucccagaacucacag

SEQ ID NO: 669804 - RNA, 19 nt, Artificial Sequence
  Description of Artificial Sequence: Synthetic oligonucleotide
  Sense strand starting at position 3918 of SEQ ID NO: 585814
cuuaaacucccagggugau

SEQ ID NO: 669805 - RNA, 19 nt, Artificial Sequence
  Description of Artificial Sequence: Synthetic oligonucleotide
  Antisense strand to SEQ ID NO: 669804
aucacccugggaguuuaag

SEQ ID NO: 669806 - RNA, 19 nt, Artificial Sequence
  Description of Artificial Sequence: Synthetic oligonucleotide
  Sense strand starting at position 3947 of SEQ ID NO: 585814
guaaguuuaacugggagag

SEQ ID NO: 669807 - RNA, 19 nt, Artificial Sequence
  Description of Artificial Sequence: Synthetic oligonucleotide
  Antisense strand to SEQ ID NO: 669806
cucucccaguuaaacuuac

SEQ ID NO: 669808 - RNA, 19 nt, Artificial Sequence
  Description of Artificial Sequence: Synthetic oligonucleotide
  Sense strand starting at position 3948 of SEQ ID NO: 585814
uaaguuuaacugggagagu

SEQ ID NO: 669809 - RNA, 19 nt, Artificial Sequence
  Description of Artificial Sequence: Synthetic oligonucleotide
  Antisense strand to SEQ ID NO: 669808
acucucccaguuaaacuua

SEQ ID NO: 669810 - RNA, 19 nt, Artificial Sequence
  Description of Artificial Sequence: Synthetic oligonucleotide
  Sense strand starting at position 157 of SEQ ID NO: 585815
gguggaaaguugucuuuaa

SEQ ID NO: 669811 - RNA, 19 nt, Artificial Sequence
  Description of Artificial Sequence: Synthetic oligonucleotide
  Antisense strand to SEQ ID NO: 669810
uuaaagacaacuuuccacc

SEQ ID NO: 669812 - RNA, 19 nt, Artificial Sequence
  Description of Artificial Sequence: Synthetic oligonucleotide
  Sense strand starting at position 158 of SEQ ID NO: 585815
guggaaaguugucuuuaag

SEQ ID NO: 669813 - RNA, 19 nt, Artificial Sequence
  Description of Artificial Sequence: Synthetic oligonucleotide
  Antisense strand to SEQ ID NO: 669812
cuuaaagacaacuuuccac

SEQ ID NO: 669814 - RNA, 19 nt, Artificial Sequence
  Description of Artificial Sequence: Synthetic oligonucleotide
  Sense strand starting at position 182 of SEQ ID NO: 585815
ccaucaaaugucuggcuaa

SEQ ID NO: 669815 - RNA, 19 nt, Artificial Sequence
  Description of Artificial Sequence: Synthetic oligonucleotide
  Antisense strand to SEQ ID NO: 669814
uuagccagacauuugaugg

SEQ ID NO: 669816 - RNA, 19 nt, Artificial Sequence
  Description of Artificial Sequence: Synthetic oligonucleotide
  Sense strand starting at position 185 of SEQ ID NO: 585815
ucaaaugucuggcuaacag

SEQ ID NO: 669817 - RNA, 19 nt, Artificial Sequence
  Description of Artificial Sequence: Synthetic oligonucleotide
  Antisense strand to SEQ ID NO: 669816
cuguuagccagacauuuga

SEQ ID NO: 669818 - RNA, 19 nt, Artificial Sequence
  Description of Artificial Sequence: Synthetic oligonucleotide
  Sense strand starting at position 327 of SEQ ID NO: 585815
gcaggacacuucccaagaa

SEQ ID NO: 669819 - RNA, 19 nt, Artificial Sequence
  Description of Artificial Sequence: Synthetic oligonucleotide
  Antisense strand to SEQ ID NO: 669818
uucuugggaaguguccugc

SEQ ID NO: 669820 - RNA, 19 nt, Artificial Sequence
  Description of Artificial Sequence: Synthetic oligonucleotide
  Sense strand starting at position 434 of SEQ ID NO: 585815
uuaagaagcuguccagacu

SEQ ID NO: 669821 - RNA, 19 nt, Artificial Sequence
  Description of Artificial Sequence: Synthetic oligonucleotide
  Antisense strand to SEQ ID NO: 669820
agucuggacagcuucuuaa

SEQ ID NO: 669822 - RNA, 19 nt, Artificial Sequence
  Description of Artificial Sequence: Synthetic oligonucleotide
  Sense strand starting at position 481 of SEQ ID NO: 585815
aggucuugcuagguagaaa

SEQ ID NO: 669823 - RNA, 19 nt, Artificial Sequence
  Description of Artificial Sequence: Synthetic oligonucleotide
  Antisense strand to SEQ ID NO: 669822
uuucuaccuagcaagaccu

SEQ ID NO: 669824 - RNA, 19 nt, Artificial Sequence
  Description of Artificial Sequence: Synthetic oligonucleotide
  Sense strand starting at position 908 of SEQ ID NO: 585815
gcaugauggcgugccugua

SEQ ID NO: 669825 - RNA, 19 nt, Artificial Sequence
  Description of Artificial Sequence: Synthetic oligonucleotide
  Antisense strand to SEQ ID NO: 669824
uacaggcacgccaucaugc

SEQ ID NO: 669826 - RNA, 19 nt, Artificial Sequence
  Description of Artificial Sequence: Synthetic oligonucleotide
  Sense strand starting at position 1381 of SEQ ID NO: 585815
ugacuaguaagaugacagu

SEQ ID NO: 669827 - RNA, 19 nt, Artificial Sequence
  Description of Artificial Sequence: Synthetic oligonucleotide
  Antisense strand to SEQ ID NO: 669826
acugucaucuuacuaguca

SEQ ID NO: 669828 - RNA, 19 nt, Artificial Sequence
  Description of Artificial Sequence: Synthetic oligonucleotide
  Sense strand starting at position 1449 of SEQ ID NO: 585815
augcaauguggauagagua

SEQ ID NO: 669829 - RNA, 19 nt, Artificial Sequence
  Description of Artificial Sequence: Synthetic oligonucleotide
  Antisense strand to SEQ ID NO: 669828
uacucuauccacauugcau

SEQ ID NO: 669830 - RNA, 19 nt, Artificial Sequence
  Description of Artificial Sequence: Synthetic oligonucleotide
  Sense strand starting at position 1481 of SEQ ID NO: 585815
gagagaugcucauuauugg

SEQ ID NO: 669831 - RNA, 19 nt, Artificial Sequence
  Description of Artificial Sequence: Synthetic oligonucleotide
  Antisense strand to SEQ ID NO: 669830
ccaauaaugagcaucucuc

SEQ ID NO: 669832 - RNA, 19 nt, Artificial Sequence
  Description of Artificial Sequence: Synthetic oligonucleotide
  Sense strand starting at position 1543 of SEQ ID NO: 585815
aacggcauuugacaugaaa

SEQ ID NO: 669833 - RNA, 19 nt, Artificial Sequence
  Description of Artificial Sequence: Synthetic oligonucleotide
  Antisense strand to SEQ ID NO: 669832
uuucaugucaaaugccguu

SEQ ID NO: 669834 - RNA, 19 nt, Artificial Sequence
  Description of Artificial Sequence: Synthetic oligonucleotide
  Sense strand starting at position 2262 of SEQ ID NO: 585815
uugguaaaccuguauacca

SEQ ID NO: 669835 - RNA, 19 nt, Artificial Sequence
  Description of Artificial Sequence: Synthetic oligonucleotide
  Antisense strand to SEQ ID NO: 669834
ugguauacagguuuaccaa

SEQ ID NO: 669836 - RNA, 19 nt, Artificial Sequence
  Description of Artificial Sequence: Synthetic oligonucleotide
  Sense strand starting at position 2402 of SEQ ID NO: 585815
cacuaacgucuccggaaga

SEQ ID NO: 669837 - RNA, 19 nt, Artificial Sequence
  Description of Artificial Sequence: Synthetic oligonucleotide
  Antisense strand to SEQ ID NO: 669836
ucuuccggagacguuagug

SEQ ID NO: 669838 - RNA, 19 nt, Artificial Sequence
  Description of Artificial Sequence: Synthetic oligonucleotide
  Sense strand starting at position 2672 of SEQ ID NO: 585815
acacuuguuuguuugauga

SEQ ID NO: 669839 - RNA, 19 nt, Artificial Sequence
  Description of Artificial Sequence: Synthetic oligonucleotide
  Antisense strand to SEQ ID NO: 669838
ucaucaaacaaacaagugu

SEQ ID NO: 669840 - RNA, 19 nt, Artificial Sequence
  Description of Artificial Sequence: Synthetic oligonucleotide
  Sense strand starting at position 2683 of SEQ ID NO: 585815
uuugaugacuguguuaaug

SEQ ID NO: 669841 - RNA, 19 nt, Artificial Sequence
  Description of Artificial Sequence: Synthetic oligonucleotide
  Antisense strand to SEQ ID NO: 669840
cauuaacacagucaucaaa

SEQ ID NO: 669842 - RNA, 19 nt, Artificial Sequence
  Description of Artificial Sequence: Synthetic oligonucleotide
  Sense strand starting at position 2692 of SEQ ID NO: 585815
uguguuaaugucuaccuua

SEQ ID NO: 669843 - RNA, 19 nt, Artificial Sequence
  Description of Artificial Sequence: Synthetic oligonucleotide
  Antisense strand to SEQ ID NO: 669842
uaagguagacauuaacaca

SEQ ID NO: 669844 - RNA, 19 nt, Artificial Sequence
  Description of Artificial Sequence: Synthetic oligonucleotide
  Sense strand starting at position 2695 of SEQ ID NO: 585815
guuaaugucuaccuuauaa

SEQ ID NO: 669845 - RNA, 19 nt, Artificial Sequence
  Description of Artificial Sequence: Synthetic oligonucleotide
  Antisense strand to SEQ ID NO: 669844
uuauaagguagacauuaac

SEQ ID NO: 669846 - RNA, 19 nt, Artificial Sequence
  Description of Artificial Sequence: Synthetic oligonucleotide
  Sense strand starting at position 3217 of SEQ ID NO: 585815
uuuggaacauucucaagca

SEQ ID NO: 669847 - RNA, 19 nt, Artificial Sequence
  Description of Artificial Sequence: Synthetic oligonucleotide
  Antisense strand to SEQ ID NO: 669846
ugcuugagaauguuccaaa

SEQ ID NO: 669848 - RNA, 19 nt, Artificial Sequence
  Description of Artificial Sequence: Synthetic oligonucleotide
  Sense strand starting at position 3255 of SEQ ID NO: 585815
agaauuccagccuaagcua

SEQ ID NO: 669849 - RNA, 19 nt, Artificial Sequence
  Description of Artificial Sequence: Synthetic oligonucleotide
  Antisense strand to SEQ ID NO: 669848
uagcuuaggcuggaauucu

SEQ ID NO: 669850 - RNA, 19 nt, Artificial Sequence
  Description of Artificial Sequence: Synthetic oligonucleotide
  Sense strand starting at position 3369 of SEQ ID NO: 585815
acuugaaaucauggucacu

SEQ ID NO: 669851 - RNA, 19 nt, Artificial Sequence
  Description of Artificial Sequence: Synthetic oligonucleotide
  Antisense strand to SEQ ID NO: 669850
agugaccaugauuucaagu

SEQ ID NO: 669852 - RNA, 19 nt, Artificial Sequence
  Description of Artificial Sequence: Synthetic oligonucleotide
  Sense strand starting at position 3371 of SEQ ID NO: 585815
uugaaaucauggucacugu

SEQ ID NO: 669853 - RNA, 19 nt, Artificial Sequence
  Description of Artificial Sequence: Synthetic oligonucleotide
  Antisense strand to SEQ ID NO: 669852
acagugaccaugauuucaa

SEQ ID NO: 669854 - RNA, 19 nt, Artificial Sequence
  Description of Artificial Sequence: Synthetic oligonucleotide
  Sense strand starting at position 3372 of SEQ ID NO: 585815
ugaaaucauggucacuguu

SEQ ID NO: 669855 - RNA, 19 nt, Artificial Sequence
  Description of Artificial Sequence: Synthetic oligonucleotide
  Antisense strand to SEQ ID NO: 669854
aacagugaccaugauuuca

SEQ ID NO: 669856 - RNA, 19 nt, Artificial Sequence
  Description of Artificial Sequence: Synthetic oligonucleotide
  Sense strand starting at position 3432 of SEQ ID NO: 585815
ucuagacauugugcuagau

SEQ ID NO: 669857 - RNA, 19 nt, Artificial Sequence
  Description of Artificial Sequence: Synthetic oligonucleotide
  Antisense strand to SEQ ID NO: 669856
aucuagcacaaugucuaga

SEQ ID NO: 669858 - RNA, 19 nt, Artificial Sequence
  Description of Artificial Sequence: Synthetic oligonucleotide
  Sense strand starting at position 3442 of SEQ ID NO: 585815
gugcuagauguugggacaa

SEQ ID NO: 669859 - RNA, 19 nt, Artificial Sequence
  Description of Artificial Sequence: Synthetic oligonucleotide
  Antisense strand to SEQ ID NO: 669858
uugucccaacaucuagcac

SEQ ID NO: 669860 - RNA, 19 nt, Artificial Sequence
  Description of Artificial Sequence: Synthetic oligonucleotide
  Sense strand starting at position 3454 of SEQ ID NO: 585815
gggacaagauaugcaaagu

SEQ ID NO: 669861 - RNA, 19 nt, Artificial Sequence
  Description of Artificial Sequence: Synthetic oligonucleotide
  Antisense strand to SEQ ID NO: 669860
acuuugcauaucuuguccc

SEQ ID NO: 669862 - RNA, 19 nt, Artificial Sequence
  Description of Artificial Sequence: Synthetic oligonucleotide
  Sense strand starting at position 3480 of SEQ ID NO: 585815
cuccaagguguguaugaca

SEQ ID NO: 669863 - RNA, 19 nt, Artificial Sequence
  Description of Artificial Sequence: Synthetic oligonucleotide
  Antisense strand to SEQ ID NO: 669862
ugucauacacaccuuggag

SEQ ID NO: 669864 - RNA, 19 nt, Artificial Sequence
  Description of Artificial Sequence: Synthetic oligonucleotide
  Sense strand starting at position 3536 of SEQ ID NO: 585815
cuggcuuggaucuaguuau

SEQ ID NO: 669865 - RNA, 19 nt, Artificial Sequence
  Description of Artificial Sequence: Synthetic oligonucleotide
  Antisense strand to SEQ ID NO: 669864
auaacuagauccaagccag

SEQ ID NO: 669866 - RNA, 19 nt, Artificial Sequence
  Description of Artificial Sequence: Synthetic oligonucleotide
  Sense strand starting at position 3607 of SEQ ID NO: 585815
uguaacaagcuuuagcaua

SEQ ID NO: 669867 - RNA, 19 nt, Artificial Sequence
  Description of Artificial Sequence: Synthetic oligonucleotide
  Antisense strand to SEQ ID NO: 669866
uaugcuaaagcuuguuaca

SEQ ID NO: 669868 - RNA, 19 nt, Artificial Sequence
  Description of Artificial Sequence: Synthetic oligonucleotide
  Sense strand starting at position 3623 of SEQ ID NO: 585815
auaggcauagguugauaau

SEQ ID NO: 669869 - RNA, 19 nt, Artificial Sequence
  Description of Artificial Sequence: Synthetic oligonucleotide
  Antisense strand to SEQ ID NO: 669868
auuaucaaccuaugccuau

SEQ ID NO: 669870 - RNA, 19 nt, Artificial Sequence
  Description of Artificial Sequence: Synthetic oligonucleotide
  Sense strand starting at position 3630 of SEQ ID NO: 585815
uagguugauaauggaugua

SEQ ID NO: 669871 - RNA, 19 nt, Artificial Sequence
  Description of Artificial Sequence: Synthetic oligonucleotide
  Antisense strand to SEQ ID NO: 669870
uacauccauuaucaaccua

SEQ ID NO: 669872 - RNA, 19 nt, Artificial Sequence
  Description of Artificial Sequence: Synthetic oligonucleotide
  Sense strand starting at position 3678 of SEQ ID NO: 585815
acauuuaucuuguuugguu

SEQ ID NO: 669873 - RNA, 19 nt, Artificial Sequence
  Description of Artificial Sequence: Synthetic oligonucleotide
  Antisense strand to SEQ ID NO: 669872
aaccaaacaagauaaaugu

SEQ ID NO: 669874 - RNA, 19 nt, Artificial Sequence
  Description of Artificial Sequence: Synthetic oligonucleotide
  Sense strand starting at position 3765 of SEQ ID NO: 585815
caggaaaggucaguugacu

SEQ ID NO: 669875 - RNA, 19 nt, Artificial Sequence
  Description of Artificial Sequence: Synthetic oligonucleotide
  Antisense strand to SEQ ID NO: 669874
agucaacugaccuuuccug

SEQ ID NO: 669876 - RNA, 19 nt, Artificial Sequence
  Description of Artificial Sequence: Synthetic oligonucleotide
  Sense strand starting at position 3776 of SEQ ID NO: 585815
aguugacuugccuaaauuc

SEQ ID NO: 669877 - RNA, 19 nt, Artificial Sequence
  Description of Artificial Sequence: Synthetic oligonucleotide
  Antisense strand to SEQ ID NO: 669876
gaauuuaggcaagucaacu

SEQ ID NO: 669878 - RNA, 19 nt, Artificial Sequence
  Description of Artificial Sequence: Synthetic oligonucleotide
  Sense strand starting at position 3785 of SEQ ID NO: 585815
gccuaaauucgaugagacu

SEQ ID NO: 669879 - RNA, 19 nt, Artificial Sequence
  Description of Artificial Sequence: Synthetic oligonucleotide
  Antisense strand to SEQ ID NO: 669878
agucucaucgaauuuaggc

SEQ ID NO: 669880 - RNA, 19 nt, Artificial Sequence
  Description of Artificial Sequence: Synthetic oligonucleotide
  Sense strand starting at position 3866 of SEQ ID NO: 585815
ggcucuucaggauaggagu

SEQ ID NO: 669881 - RNA, 19 nt, Artificial Sequence
  Description of Artificial Sequence: Synthetic oligonucleotide
  Antisense strand to SEQ ID NO: 669880
acuccuauccugaagagcc

SEQ ID NO: 669882 - RNA, 19 nt, Artificial Sequence
  Description of Artificial Sequence: Synthetic oligonucleotide
  Sense strand starting at position 3913 of SEQ ID NO: 585815
uuuaaaugcuucucaaagg

SEQ ID NO: 669883 - RNA, 19 nt, Artificial Sequence
  Description of Artificial Sequence: Synthetic oligonucleotide
  Antisense strand to SEQ ID NO: 669882
ccuuugagaagcauuuaaa

SEQ ID NO: 669884 - RNA, 19 nt, Artificial Sequence
  Description of Artificial Sequence: Synthetic oligonucleotide
  Sense strand starting at position 3918 of SEQ ID NO: 585815
augcuucucaaagggagau

SEQ ID NO: 669885 - RNA, 19 nt, Artificial Sequence
  Description of Artificial Sequence: Synthetic oligonucleotide
  Antisense strand to SEQ ID NO: 669884
aucucccuuugagaagcau

SEQ ID NO: 669886 - RNA, 19 nt, Artificial Sequence
  Description of Artificial Sequence: Synthetic oligonucleotide
  Sense strand starting at position 3919 of SEQ ID NO: 585815
ugcuucucaaagggagaua

SEQ ID NO: 669887 - RNA, 19 nt, Artificial Sequence
  Description of Artificial Sequence: Synthetic oligonucleotide
  Antisense strand to SEQ ID NO: 669886
uaucucccuuugagaagca

SEQ ID NO: 669888 - RNA, 19 nt, Artificial Sequence
  Description of Artificial Sequence: Synthetic oligonucleotide
  Sense strand starting at position 3983 of SEQ ID NO: 585815
augcaugcucuugaucaag

SEQ ID NO: 669889 - RNA, 19 nt, Artificial Sequence
  Description of Artificial Sequence: Synthetic oligonucleotide
  Antisense strand to SEQ ID NO: 669888
cuugaucaagagcaugcau

SEQ ID NO: 669890 - RNA, 19 nt, Artificial Sequence
  Description of Artificial Sequence: Synthetic oligonucleotide
  Sense strand starting at position 113 of SEQ ID NO: 585816
ucauguguguuugcuggaa

SEQ ID NO: 669891 - RNA, 19 nt, Artificial Sequence
  Description of Artificial Sequence: Synthetic oligonucleotide
  Antisense strand to SEQ ID NO: 669890
uuccagcaaacacacauga

SEQ ID NO: 669892 - RNA, 19 nt, Artificial Sequence
  Description of Artificial Sequence: Synthetic oligonucleotide
  Sense strand starting at position 117 of SEQ ID NO: 585816
guguguuugcuggaagugu

SEQ ID NO: 669893 - RNA, 19 nt, Artificial Sequence
  Description of Artificial Sequence: Synthetic oligonucleotide
  Antisense strand to SEQ ID NO: 669892
acacuuccagcaaacacac

SEQ ID NO: 669894 - RNA, 19 nt, Artificial Sequence
  Description of Artificial Sequence: Synthetic oligonucleotide
  Sense strand starting at position 119 of SEQ ID NO: 585816
guguuugcuggaagugugu

SEQ ID NO: 669895 - RNA, 19 nt, Artificial Sequence
  Description of Artificial Sequence: Synthetic oligonucleotide
  Antisense strand to SEQ ID NO: 669894
acacacuuccagcaaacac

SEQ ID NO: 669896 - RNA, 19 nt, Artificial Sequence
  Description of Artificial Sequence: Synthetic oligonucleotide
  Sense strand starting at position 125 of SEQ ID NO: 585816
gcuggaaguguguuugcuu

SEQ ID NO: 669897 - RNA, 19 nt, Artificial Sequence
  Description of Artificial Sequence: Synthetic oligonucleotide
  Antisense strand to SEQ ID NO: 669896
aagcaaacacacuuccagc

SEQ ID NO: 669898 - RNA, 19 nt, Artificial Sequence
  Description of Artificial Sequence: Synthetic oligonucleotide
  Sense strand starting at position 177 of SEQ ID NO: 585816
gacugucuguguucucagu

SEQ ID NO: 669899 - RNA, 19 nt, Artificial Sequence
  Description of Artificial Sequence: Synthetic oligonucleotide
  Antisense strand to SEQ ID NO: 669898
acugagaacacagacaguc

SEQ ID NO: 669900 - RNA, 19 nt, Artificial Sequence
  Description of Artificial Sequence: Synthetic oligonucleotide
  Sense strand starting at position 183 of SEQ ID NO: 585816
cuguguucucaguuguguu

SEQ ID NO: 669901 - RNA, 19 nt, Artificial Sequence
  Description of Artificial Sequence: Synthetic oligonucleotide
  Antisense strand to SEQ ID NO: 669900
aacacaacugagaacacag

SEQ ID NO: 669902 - RNA, 19 nt, Artificial Sequence
  Description of Artificial Sequence: Synthetic oligonucleotide
  Sense strand starting at position 195 of SEQ ID NO: 585816
uuguguuugugacuguauc

SEQ ID NO: 669903 - RNA, 19 nt, Artificial Sequence
  Description of Artificial Sequence: Synthetic oligonucleotide
  Antisense strand to SEQ ID NO: 669902
gauacagucacaaacacaa

SEQ ID NO: 669904 - RNA, 19 nt, Artificial Sequence
  Description of Artificial Sequence: Synthetic oligonucleotide
  Sense strand starting at position 212 of SEQ ID NO: 585816
ucuccauggccuugugaca

SEQ ID NO: 669905 - RNA, 19 nt, Artificial Sequence
  Description of Artificial Sequence: Synthetic oligonucleotide
  Antisense strand to SEQ ID NO: 669904
ugucacaaggccauggaga

SEQ ID NO: 669906 - RNA, 19 nt, Artificial Sequence
  Description of Artificial Sequence: Synthetic oligonucleotide
  Sense strand starting at position 1184 of SEQ ID NO: 585816
gccugugguccuggcauuu

SEQ ID NO: 669907 - RNA, 19 nt, Artificial Sequence
  Description of Artificial Sequence: Synthetic oligonucleotide
  Antisense strand to SEQ ID NO: 669906
aaaugccaggaccacaggc

SEQ ID NO: 669908 - RNA, 19 nt, Artificial Sequence
  Description of Artificial Sequence: Synthetic oligonucleotide
  Sense strand starting at position 1438 of SEQ ID NO: 585816
gcuggucuucuaggcuaau

SEQ ID NO: 669909 - RNA, 19 nt, Artificial Sequence
  Description of Artificial Sequence: Synthetic oligonucleotide
  Antisense strand to SEQ ID NO: 669908
auuagccuagaagaccagc

SEQ ID NO: 669910 - RNA, 19 nt, Artificial Sequence
  Description of Artificial Sequence: Synthetic oligonucleotide
  Sense strand starting at position 1439 of SEQ ID NO: 585816
cuggucuucuaggcuaauu

SEQ ID NO: 669911 - RNA, 19 nt, Artificial Sequence
  Description of Artificial Sequence: Synthetic oligonucleotide
  Antisense strand to SEQ ID NO: 669910
aauuagccuagaagaccag

SEQ ID NO: 669912 - RNA, 19 nt, Artificial Sequence
  Description of Artificial Sequence: Synthetic oligonucleotide
  Sense strand starting at position 1478 of SEQ ID NO: 585816
cccuauguuccugggacau

SEQ ID NO: 669913 - RNA, 19 nt, Artificial Sequence
  Description of Artificial Sequence: Synthetic oligonucleotide
  Antisense strand to SEQ ID NO: 669912
augucccaggaacauaggg

SEQ ID NO: 669914 - RNA, 19 nt, Artificial Sequence
  Description of Artificial Sequence: Synthetic oligonucleotide
  Sense strand starting at position 2241 of SEQ ID NO: 585816
gggcucacuucuuucccaa

SEQ ID NO: 669915 - RNA, 19 nt, Artificial Sequence
  Description of Artificial Sequence: Synthetic oligonucleotide
  Antisense strand to SEQ ID NO: 669914
uugggaaagaagugagccc

SEQ ID NO: 669916 - RNA, 19 nt, Artificial Sequence
  Description of Artificial Sequence: Synthetic oligonucleotide
  Sense strand starting at position 2367 of SEQ ID NO: 585816
agaggauuauugccuggga

SEQ ID NO: 669917 - RNA, 19 nt, Artificial Sequence
  Description of Artificial Sequence: Synthetic oligonucleotide
  Antisense strand to SEQ ID NO: 669916
ucccaggcaauaauccucu

SEQ ID NO: 669918 - RNA, 19 nt, Artificial Sequence
  Description of Artificial Sequence: Synthetic oligonucleotide
  Sense strand starting at position 2368 of SEQ ID NO: 585816
gaggauuauugccugggaa

SEQ ID NO: 669919 - RNA, 19 nt, Artificial Sequence
  Description of Artificial Sequence: Synthetic oligonucleotide
  Antisense strand to SEQ ID NO: 669918
uucccaggcaauaauccuc

SEQ ID NO: 669920 - RNA, 19 nt, Artificial Sequence
  Description of Artificial Sequence: Synthetic oligonucleotide
  Sense strand starting at position 2369 of SEQ ID NO: 585816
aggauuauugccugggaac

SEQ ID NO: 669921 - RNA, 19 nt, Artificial Sequence
  Description of Artificial Sequence: Synthetic oligonucleotide
  Antisense strand to SEQ ID NO: 669920
guucccaggcaauaauccu

SEQ ID NO: 669922 - RNA, 19 nt, Artificial Sequence
  Description of Artificial Sequence: Synthetic oligonucleotide
  Sense strand starting at position 2370 of SEQ ID NO: 585816
ggauuauugccugggaaca

SEQ ID NO: 669923 - RNA, 19 nt, Artificial Sequence
  Description of Artificial Sequence: Synthetic oligonucleotide
  Antisense strand to SEQ ID NO: 669922
uguucccaggcaauaaucc

SEQ ID NO: 669924 - RNA, 19 nt, Artificial Sequence
  Description of Artificial Sequence: Synthetic oligonucleotide
  Sense strand starting at position 2371 of SEQ ID NO: 585816
gauuauugccugggaacaa

SEQ ID NO: 669925 - RNA, 19 nt, Artificial Sequence
  Description of Artificial Sequence: Synthetic oligonucleotide
  Antisense strand to SEQ ID NO: 669924
uuguucccaggcaauaauc

SEQ ID NO: 669926 - RNA, 19 nt, Artificial Sequence
  Description of Artificial Sequence: Synthetic oligonucleotide
  Sense strand starting at position 2414 of SEQ ID NO: 585816
augcaaaugugucuaacuc

SEQ ID NO: 669927 - RNA, 19 nt, Artificial Sequence
  Description of Artificial Sequence: Synthetic oligonucleotide
  Antisense strand to SEQ ID NO: 669926
gaguuagacacauuugcau

SEQ ID NO: 669928 - RNA, 19 nt, Artificial Sequence
  Description of Artificial Sequence: Synthetic oligonucleotide
  Sense strand starting at position 2415 of SEQ ID NO: 585816
ugcaaaugugucuaacucu

SEQ ID NO: 669929 - RNA, 19 nt, Artificial Sequence
  Description of Artificial Sequence: Synthetic oligonucleotide
  Antisense strand to SEQ ID NO: 669928
agaguuagacacauuugca

SEQ ID NO: 669930 - RNA, 19 nt, Artificial Sequence
  Description of Artificial Sequence: Synthetic oligonucleotide
  Sense strand starting at position 2737 of SEQ ID NO: 585816
uucuaacuguguuuccuua

SEQ ID NO: 669931 - RNA, 19 nt, Artificial Sequence
  Description of Artificial Sequence: Synthetic oligonucleotide
  Antisense strand to SEQ ID NO: 669930
uaaggaaacacaguuagaa

SEQ ID NO: 669932 - RNA, 19 nt, Artificial Sequence
  Description of Artificial Sequence: Synthetic oligonucleotide
  Sense strand starting at position 2984 of SEQ ID NO: 585816
ucaaacucgcuggaggaua

SEQ ID NO: 669933 - RNA, 19 nt, Artificial Sequence
  Description of Artificial Sequence: Synthetic oligonucleotide
  Antisense strand to SEQ ID NO: 669932
uauccuccagcgaguuuga

SEQ ID NO: 669934 - RNA, 19 nt, Artificial Sequence
  Description of Artificial Sequence: Synthetic oligonucleotide
  Sense strand starting at position 3028 of SEQ ID NO: 585816
aggcaaacuuccuccuaga

SEQ ID NO: 669935 - RNA, 19 nt, Artificial Sequence
  Description of Artificial Sequence: Synthetic oligonucleotide
  Antisense strand to SEQ ID NO: 669934
ucuaggaggaaguuugccu

SEQ ID NO: 669936 - RNA, 19 nt, Artificial Sequence
  Description of Artificial Sequence: Synthetic oligonucleotide
  Sense strand starting at position 3064 of SEQ ID NO: 585816
ugggucacagugugacaua

SEQ ID NO: 669937 - RNA, 19 nt, Artificial Sequence
  Description of Artificial Sequence: Synthetic oligonucleotide
  Antisense strand to SEQ ID NO: 669936
uaugucacacugugaccca

SEQ ID NO: 669938 - RNA, 19 nt, Artificial Sequence
  Description of Artificial Sequence: Synthetic oligonucleotide
  Sense strand starting at position 3073 of SEQ ID NO: 585816
gugugacauacugaccgaa

SEQ ID NO: 669939 - RNA, 19 nt, Artificial Sequence
  Description of Artificial Sequence: Synthetic oligonucleotide
  Antisense strand to SEQ ID NO: 669938
uucggucaguaugucacac

SEQ ID NO: 669940 - RNA, 19 nt, Artificial Sequence
  Description of Artificial Sequence: Synthetic oligonucleotide
  Sense strand starting at position 3075 of SEQ ID NO: 585816
gugacauacugaccgaaac

SEQ ID NO: 669941 - RNA, 19 nt, Artificial Sequence
  Description of Artificial Sequence: Synthetic oligonucleotide
  Antisense strand to SEQ ID NO: 669940
guuucggucaguaugucac

SEQ ID NO: 669942 - RNA, 19 nt, Artificial Sequence
  Description of Artificial Sequence: Synthetic oligonucleotide
  Sense strand starting at position 3076 of SEQ ID NO: 585816
ugacauacugaccgaaacu

SEQ ID NO: 669943 - RNA, 19 nt, Artificial Sequence
  Description of Artificial Sequence: Synthetic oligonucleotide
  Antisense strand to SEQ ID NO: 669942
aguuucggucaguauguca

SEQ ID NO: 669944 - RNA, 19 nt, Artificial Sequence
  Description of Artificial Sequence: Synthetic oligonucleotide
  Sense strand starting at position 3234 of SEQ ID NO: 585816
agcagcagucugggugauu

SEQ ID NO: 669945 - RNA, 19 nt, Artificial Sequence
  Description of Artificial Sequence: Synthetic oligonucleotide
  Antisense strand to SEQ ID NO: 669944
aaucacccagacugcugcu

SEQ ID NO: 669946 - RNA, 19 nt, Artificial Sequence
  Description of Artificial Sequence: Synthetic oligonucleotide
  Sense strand starting at position 3235 of SEQ ID NO: 585816
gcagcagucugggugauua

SEQ ID NO: 669947 - RNA, 19 nt, Artificial Sequence
  Description of Artificial Sequence: Synthetic oligonucleotide
  Antisense strand to SEQ ID NO: 669946
uaaucacccagacugcugc

SEQ ID NO: 669948 - RNA, 19 nt, Artificial Sequence
  Description of Artificial Sequence: Synthetic oligonucleotide
  Sense strand starting at position 3237 of SEQ ID NO: 585816
agcagucugggugauuaga

SEQ ID NO: 669949 - RNA, 19 nt, Artificial Sequence
  Description of Artificial Sequence: Synthetic oligonucleotide
  Antisense strand to SEQ ID NO: 669948
ucuaaucacccagacugcu

SEQ ID NO: 669950 - RNA, 19 nt, Artificial Sequence
  Description of Artificial Sequence: Synthetic oligonucleotide
  Sense strand starting at position 3239 of SEQ ID NO: 585816
cagucugggugauuagacu

SEQ ID NO: 669951 - RNA, 19 nt, Artificial Sequence
  Description of Artificial Sequence: Synthetic oligonucleotide
  Antisense strand to SEQ ID NO: 669950
agucuaaucacccagacug

SEQ ID NO: 669952 - RNA, 19 nt, Artificial Sequence
  Description of Artificial Sequence: Synthetic oligonucleotide
  Sense strand starting at position 3367 of SEQ ID NO: 585816
agguccugagucuggaaga

SEQ ID NO: 669953 - RNA, 19 nt, Artificial Sequence
  Description of Artificial Sequence: Synthetic oligonucleotide
  Antisense strand to SEQ ID NO: 669952
ucuuccagacucaggaccu

SEQ ID NO: 669954 - RNA, 19 nt, Artificial Sequence
  Description of Artificial Sequence: Synthetic oligonucleotide
  Sense strand starting at position 3420 of SEQ ID NO: 585816
ugucacuugucccucaguu

SEQ ID NO: 669955 - RNA, 19 nt, Artificial Sequence
  Description of Artificial Sequence: Synthetic oligonucleotide
  Antisense strand to SEQ ID NO: 669954
aacugagggacaagugaca

SEQ ID NO: 669956 - RNA, 19 nt, Artificial Sequence
  Description of Artificial Sequence: Synthetic oligonucleotide
  Sense strand starting at position 3422 of SEQ ID NO: 585816
ucacuugucccucaguuaa

SEQ ID NO: 669957 - RNA, 19 nt, Artificial Sequence
  Description of Artificial Sequence: Synthetic oligonucleotide
  Antisense strand to SEQ ID NO: 669956
uuaacugagggacaaguga

SEQ ID NO: 669958 - RNA, 19 nt, Artificial Sequence
  Description of Artificial Sequence: Synthetic oligonucleotide
  Sense strand starting at position 3515 of SEQ ID NO: 585816
gccagaggugauuaggagu

SEQ ID NO: 669959 - RNA, 19 nt, Artificial Sequence
  Description of Artificial Sequence: Synthetic oligonucleotide
  Antisense strand to SEQ ID NO: 669958
acuccuaaucaccucuggc

SEQ ID NO: 669960 - RNA, 19 nt, Artificial Sequence
  Description of Artificial Sequence: Synthetic oligonucleotide
  Sense strand starting at position 3521 of SEQ ID NO: 585816
ggugauuaggaguggucuu

SEQ ID NO: 669961 - RNA, 19 nt, Artificial Sequence
  Description of Artificial Sequence: Synthetic oligonucleotide
  Antisense strand to SEQ ID NO: 669960
aagaccacuccuaaucacc

SEQ ID NO: 669962 - RNA, 19 nt, Artificial Sequence
  Description of Artificial Sequence: Synthetic oligonucleotide
  Sense strand starting at position 3522 of SEQ ID NO: 585816
gugauuaggaguggucuuu

SEQ ID NO: 669963 - RNA, 19 nt, Artificial Sequence
  Description of Artificial Sequence: Synthetic oligonucleotide
  Antisense strand to SEQ ID NO: 669962
aaagaccacuccuaaucac

SEQ ID NO: 669964 - RNA, 19 nt, Artificial Sequence
  Description of Artificial Sequence: Synthetic oligonucleotide
  Sense strand starting at position 3610 of SEQ ID NO: 585816
agacauuucuguugggagu

SEQ ID NO: 669965 - RNA, 19 nt, Artificial Sequence
  Description of Artificial Sequence: Synthetic oligonucleotide
  Antisense strand to SEQ ID NO: 669964
acucccaacagaaaugucu

SEQ ID NO: 669966 - RNA, 19 nt, Artificial Sequence
  Description of Artificial Sequence: Synthetic oligonucleotide
  Sense strand starting at position 3632 of SEQ ID NO: 585816
gaggcaugucuguggcaga

SEQ ID NO: 669967 - RNA, 19 nt, Artificial Sequence
  Description of Artificial Sequence: Synthetic oligonucleotide
  Antisense strand to SEQ ID NO: 669966
ucugccacagacaugccuc

SEQ ID NO: 669968 - RNA, 19 nt, Artificial Sequence
  Description of Artificial Sequence: Synthetic oligonucleotide
  Sense strand starting at position 3850 of SEQ ID NO: 585816
gagugucgcuggcugagaa

SEQ ID NO: 669969 - RNA, 19 nt, Artificial Sequence
  Description of Artificial Sequence: Synthetic oligonucleotide
  Antisense strand to SEQ ID NO: 669968
uucucagccagcgacacuc

SEQ ID NO: 669970 - RNA, 19 nt, Artificial Sequence
  Description of Artificial Sequence: Synthetic oligonucleotide
  Sense strand starting at position 366 of SEQ ID NO: 585817
aggcaagauuccuggcagu

SEQ ID NO: 669971 - RNA, 19 nt, Artificial Sequence
  Description of Artificial Sequence: Synthetic oligonucleotide
  Antisense strand to SEQ ID NO: 669970
acugccaggaaucuugccu

SEQ ID NO: 669972 - RNA, 19 nt, Artificial Sequence
  Description of Artificial Sequence: Synthetic oligonucleotide
  Sense strand starting at position 369 of SEQ ID NO: 585817
caagauuccuggcaguuaa

SEQ ID NO: 669973 - RNA, 19 nt, Artificial Sequence
  Description of Artificial Sequence: Synthetic oligonucleotide
  Antisense strand to SEQ ID NO: 669972
uuaacugccaggaaucuug

SEQ ID NO: 669974 - RNA, 19 nt, Artificial Sequence
  Description of Artificial Sequence: Synthetic oligonucleotide
  Sense strand starting at position 429 of SEQ ID NO: 585817
gagaauagcuccuguucuc

SEQ ID NO: 669975 - RNA, 19 nt, Artificial Sequence
  Description of Artificial Sequence: Synthetic oligonucleotide
  Antisense strand to SEQ ID NO: 669974
gagaacaggagcuauucuc

SEQ ID NO: 669976 - RNA, 19 nt, Artificial Sequence
  Description of Artificial Sequence: Synthetic oligonucleotide
  Sense strand starting at position 438 of SEQ ID NO: 585817
uccuguucuccuggguaaa

SEQ ID NO: 669977 - RNA, 19 nt, Artificial Sequence
  Description of Artificial Sequence: Synthetic oligonucleotide
  Antisense strand to SEQ ID NO: 669976
uuuacccaggagaacagga

SEQ ID NO: 669978 - RNA, 19 nt, Artificial Sequence
  Description of Artificial Sequence: Synthetic oligonucleotide
  Sense strand starting at position 458 of SEQ ID NO: 585817
cuggcuuaggcuuagagaa

SEQ ID NO: 669979 - RNA, 19 nt, Artificial Sequence
  Description of Artificial Sequence: Synthetic oligonucleotide
  Antisense strand to SEQ ID NO: 669978
uucucuaagccuaagccag

SEQ ID NO: 669980 - RNA, 19 nt, Artificial Sequence
  Description of Artificial Sequence: Synthetic oligonucleotide
  Sense strand starting at position 460 of SEQ ID NO: 585817
ggcuuaggcuuagagaaga

SEQ ID NO: 669981 - RNA, 19 nt, Artificial Sequence
  Description of Artificial Sequence: Synthetic oligonucleotide
  Antisense strand to SEQ ID NO: 669980
ucuucucuaagccuaagcc

SEQ ID NO: 669982 - RNA, 19 nt, Artificial Sequence
  Description of Artificial Sequence: Synthetic oligonucleotide
  Sense strand starting at position 543 of SEQ ID NO: 585817
accagucuugggcacaauu

SEQ ID NO: 669983 - RNA, 19 nt, Artificial Sequence
  Description of Artificial Sequence: Synthetic oligonucleotide
  Antisense strand to SEQ ID NO: 669982
aauugugcccaagacuggu

SEQ ID NO: 669984 - RNA, 19 nt, Artificial Sequence
  Description of Artificial Sequence: Synthetic oligonucleotide
  Sense strand starting at position 906 of SEQ ID NO: 585817
gguugagucacuugccuga

SEQ ID NO: 669985 - RNA, 19 nt, Artificial Sequence
  Description of Artificial Sequence: Synthetic oligonucleotide
  Antisense strand to SEQ ID NO: 669984
ucaggcaagugacucaacc

SEQ ID NO: 669986 - RNA, 19 nt, Artificial Sequence
  Description of Artificial Sequence: Synthetic oligonucleotide
  Sense strand starting at position 909 of SEQ ID NO: 585817
ugagucacuugccugaagu

SEQ ID NO: 669987 - RNA, 19 nt, Artificial Sequence
  Description of Artificial Sequence: Synthetic oligonucleotide
  Antisense strand to SEQ ID NO: 669986
acuucaggcaagugacuca

SEQ ID NO: 669988 - RNA, 19 nt, Artificial Sequence
  Description of Artificial Sequence: Synthetic oligonucleotide
  Sense strand starting at position 910 of SEQ ID NO: 585817
gagucacuugccugaaguc

SEQ ID NO: 669989 - RNA, 19 nt, Artificial Sequence
  Description of Artificial Sequence: Synthetic oligonucleotide
  Antisense strand to SEQ ID NO: 669988
gacuucaggcaagugacuc

SEQ ID NO: 669990 - RNA, 19 nt, Artificial Sequence
  Description of Artificial Sequence: Synthetic oligonucleotide
  Sense strand starting at position 911 of SEQ ID NO: 585817
agucacuugccugaaguca

SEQ ID NO: 669991 - RNA, 19 nt, Artificial Sequence
  Description of Artificial Sequence: Synthetic oligonucleotide
  Antisense strand to SEQ ID NO: 669990
ugacuucaggcaagugacu

SEQ ID NO: 669992 - RNA, 19 nt, Artificial Sequence
  Description of Artificial Sequence: Synthetic oligonucleotide
  Sense strand starting at position 1012 of SEQ ID NO: 585817
cucaguuagcccuguagac

SEQ ID NO: 669993 - RNA, 19 nt, Artificial Sequence
  Description of Artificial Sequence: Synthetic oligonucleotide
  Antisense strand to SEQ ID NO: 669992
gucuacagggcuaacugag

SEQ ID NO: 669994 - RNA, 19 nt, Artificial Sequence
  Description of Artificial Sequence: Synthetic oligonucleotide
  Sense strand starting at position 1290 of SEQ ID NO: 585817
gcucucuccugguaagcaa

SEQ ID NO: 669995 - RNA, 19 nt, Artificial Sequence
  Description of Artificial Sequence: Synthetic oligonucleotide
  Antisense strand to SEQ ID NO: 669994
uugcuuaccaggagagagc

SEQ ID NO: 669996 - RNA, 19 nt, Artificial Sequence
  Description of Artificial Sequence: Synthetic oligonucleotide
  Sense strand starting at position 1312 of SEQ ID NO: 585817
cgaggacuguuugucuuca

SEQ ID NO: 669997 - RNA, 19 nt, Artificial Sequence
  Description of Artificial Sequence: Synthetic oligonucleotide
  Antisense strand to SEQ ID NO: 669996
ugaagacaaacaguccucg

SEQ ID NO: 669998 - RNA, 19 nt, Artificial Sequence
  Description of Artificial Sequence: Synthetic oligonucleotide
  Sense strand starting at position 1395 of SEQ ID NO: 585817
auacgaguuuagccaguaa

SEQ ID NO: 669999 - RNA, 19 nt, Artificial Sequence
  Description of Artificial Sequence: Synthetic oligonucleotide
  Antisense strand to SEQ ID NO: 669998
uuacuggcuaaacucguau

SEQ ID NO: 670000 - RNA, 19 nt, Artificial Sequence
  Description of Artificial Sequence: Synthetic oligonucleotide
  Sense strand starting at position 2095 of SEQ ID NO: 585817
ucguguuauugcgguagau

SEQ ID NO: 670001 - RNA, 19 nt, Artificial Sequence
  Description of Artificial Sequence: Synthetic oligonucleotide
  Antisense strand to SEQ ID NO: 670000
aucuaccgcaauaacacga

SEQ ID NO: 670002 - RNA, 19 nt, Artificial Sequence
  Description of Artificial Sequence: Synthetic oligonucleotide
  Sense strand starting at position 2096 of SEQ ID NO: 585817
cguguuauugcgguagaua

SEQ ID NO: 670003 - RNA, 19 nt, Artificial Sequence
  Description of Artificial Sequence: Synthetic oligonucleotide
  Antisense strand to SEQ ID NO: 670002
uaucuaccgcaauaacacg

SEQ ID NO: 670004 - RNA, 19 nt, Artificial Sequence
  Description of Artificial Sequence: Synthetic oligonucleotide
  Sense strand starting at position 2097 of SEQ ID NO: 585817
guguuauugcgguagauag

SEQ ID NO: 670005 - RNA, 19 nt, Artificial Sequence
  Description of Artificial Sequence: Synthetic oligonucleotide
  Antisense strand to SEQ ID NO: 670004
cuaucuaccgcaauaacac

SEQ ID NO: 670006 - RNA, 19 nt, Artificial Sequence
  Description of Artificial Sequence: Synthetic oligonucleotide
  Sense strand starting at position 2099 of SEQ ID NO: 585817
guuauugcgguagauagga

SEQ ID NO: 670007 - RNA, 19 nt, Artificial Sequence
  Description of Artificial Sequence: Synthetic oligonucleotide
  Antisense strand to SEQ ID NO: 670006
uccuaucuaccgcaauaac

SEQ ID NO: 670008 - RNA, 19 nt, Artificial Sequence
  Description of Artificial Sequence: Synthetic oligonucleotide
  Sense strand starting at position 2698 of SEQ ID NO: 585817
agccuuauauccucaguga

SEQ ID NO: 670009 - RNA, 19 nt, Artificial Sequence
  Description of Artificial Sequence: Synthetic oligonucleotide
  Antisense strand to SEQ ID NO: 670008
ucacugaggauauaaggcu

SEQ ID NO: 670010 - RNA, 19 nt, Artificial Sequence
  Description of Artificial Sequence: Synthetic oligonucleotide
  Sense strand starting at position 2699 of SEQ ID NO: 585817
gccuuauauccucagugaa

SEQ ID NO: 670011 - RNA, 19 nt, Artificial Sequence
  Description of Artificial Sequence: Synthetic oligonucleotide
  Antisense strand to SEQ ID NO: 670010
uucacugaggauauaaggc

SEQ ID NO: 670012 - RNA, 19 nt, Artificial Sequence
  Description of Artificial Sequence: Synthetic oligonucleotide
  Sense strand starting at position 2712 of SEQ ID NO: 585817
agugaauccuauuguccca

SEQ ID NO: 670013 - RNA, 19 nt, Artificial Sequence
  Description of Artificial Sequence: Synthetic oligonucleotide
  Antisense strand to SEQ ID NO: 670012
ugggacaauaggauucacu

SEQ ID NO: 670014 - RNA, 19 nt, Artificial Sequence
  Description of Artificial Sequence: Synthetic oligonucleotide
  Sense strand starting at position 2717 of SEQ ID NO: 585817
auccuauugucccagccau

SEQ ID NO: 670015 - RNA, 19 nt, Artificial Sequence
  Description of Artificial Sequence: Synthetic oligonucleotide
  Antisense strand to SEQ ID NO: 670014
auggcugggacaauaggau

SEQ ID NO: 670016 - RNA, 19 nt, Artificial Sequence
  Description of Artificial Sequence: Synthetic oligonucleotide
  Sense strand starting at position 2743 of SEQ ID NO: 585817
ggcggaagccuugcugagu

SEQ ID NO: 670017 - RNA, 19 nt, Artificial Sequence
  Description of Artificial Sequence: Synthetic oligonucleotide
  Antisense strand to SEQ ID NO: 670016
acucagcaaggcuuccgcc

SEQ ID NO: 670018 - RNA, 19 nt, Artificial Sequence
  Description of Artificial Sequence: Synthetic oligonucleotide
  Sense strand starting at position 2744 of SEQ ID NO: 585817
gcggaagccuugcugagua

SEQ ID NO: 670019 - RNA, 19 nt, Artificial Sequence
  Description of Artificial Sequence: Synthetic oligonucleotide
  Antisense strand to SEQ ID NO: 670018
uacucagcaaggcuuccgc

SEQ ID NO: 670020 - RNA, 19 nt, Artificial Sequence
  Description of Artificial Sequence: Synthetic oligonucleotide
  Sense strand starting at position 2846 of SEQ ID NO: 585817
cucucuuuggucgggcaau

SEQ ID NO: 670021 - RNA, 19 nt, Artificial Sequence
  Description of Artificial Sequence: Synthetic oligonucleotide
  Antisense strand to SEQ ID NO: 670020
auugcccgaccaaagagag

SEQ ID NO: 670022 - RNA, 19 nt, Artificial Sequence
  Description of Artificial Sequence: Synthetic oligonucleotide
  Sense strand starting at position 2847 of SEQ ID NO: 585817
ucucuuuggucgggcaaua

SEQ ID NO: 670023 - RNA, 19 nt, Artificial Sequence
  Description of Artificial Sequence: Synthetic oligonucleotide
  Antisense strand to SEQ ID NO: 670022
uauugcccgaccaaagaga

SEQ ID NO: 670024 - RNA, 19 nt, Artificial Sequence
  Description of Artificial Sequence: Synthetic oligonucleotide
  Sense strand starting at position 2901 of SEQ ID NO: 585817
agcaguacucagugcuaga

SEQ ID NO: 670025 - RNA, 19 nt, Artificial Sequence
  Description of Artificial Sequence: Synthetic oligonucleotide
  Antisense strand to SEQ ID NO: 670024
ucuagcacugaguacugcu

SEQ ID NO: 670026 - RNA, 19 nt, Artificial Sequence
  Description of Artificial Sequence: Synthetic oligonucleotide
  Sense strand starting at position 2904 of SEQ ID NO: 585817
aguacucagugcuagagga

SEQ ID NO: 670027 - RNA, 19 nt, Artificial Sequence
  Description of Artificial Sequence: Synthetic oligonucleotide
  Antisense strand to SEQ ID NO: 670026
uccucuagcacugaguacu

SEQ ID NO: 670028 - RNA, 19 nt, Artificial Sequence
  Description of Artificial Sequence: Synthetic oligonucleotide
  Sense strand starting at position 2908 of SEQ ID NO: 585817
cucagugcuagaggaugau

SEQ ID NO: 670029 - RNA, 19 nt, Artificial Sequence
  Description of Artificial Sequence: Synthetic oligonucleotide
  Antisense strand to SEQ ID NO: 670028
aucauccucuagcacugag

SEQ ID NO: 670030 - RNA, 19 nt, Artificial Sequence
  Description of Artificial Sequence: Synthetic oligonucleotide
  Sense strand starting at position 2917 of SEQ ID NO: 585817
agaggaugauccuaaggcu

SEQ ID NO: 670031 - RNA, 19 nt, Artificial Sequence
  Description of Artificial Sequence: Synthetic oligonucleotide
  Antisense strand to SEQ ID NO: 670030
agccuuaggaucauccucu

SEQ ID NO: 670032 - RNA, 19 nt, Artificial Sequence
  Description of Artificial Sequence: Synthetic oligonucleotide
  Sense strand starting at position 2920 of SEQ ID NO: 585817
ggaugauccuaaggcugga

SEQ ID NO: 670033 - RNA, 19 nt, Artificial Sequence
  Description of Artificial Sequence: Synthetic oligonucleotide
  Antisense strand to SEQ ID NO: 670032
uccagccuuaggaucaucc

SEQ ID NO: 670034 - RNA, 19 nt, Artificial Sequence
  Description of Artificial Sequence: Synthetic oligonucleotide
  Sense strand starting at position 2934 of SEQ ID NO: 585817
cuggaaagguccugaggag

SEQ ID NO: 670035 - RNA, 19 nt, Artificial Sequence
  Description of Artificial Sequence: Synthetic oligonucleotide
  Antisense strand to SEQ ID NO: 670034
cuccucaggaccuuuccag

SEQ ID NO: 670036 - RNA, 19 nt, Artificial Sequence
  Description of Artificial Sequence: Synthetic oligonucleotide
  Sense strand starting at position 3038 of SEQ ID NO: 585817
ggcaguaccucacaucaua

SEQ ID NO: 670037 - RNA, 19 nt, Artificial Sequence
  Description of Artificial Sequence: Synthetic oligonucleotide
  Antisense strand to SEQ ID NO: 670036
uaugaugugagguacugcc

SEQ ID NO: 670038 - RNA, 19 nt, Artificial Sequence
  Description of Artificial Sequence: Synthetic oligonucleotide
  Sense strand starting at position 3483 of SEQ ID NO: 585817
agggcuaguggucagaaga

SEQ ID NO: 670039 - RNA, 19 nt, Artificial Sequence
  Description of Artificial Sequence: Synthetic oligonucleotide
  Antisense strand to SEQ ID NO: 670038
ucuucugaccacuagcccu

SEQ ID NO: 670040 - RNA, 19 nt, Artificial Sequence
  Description of Artificial Sequence: Synthetic oligonucleotide
  Sense strand starting at position 3533 of SEQ ID NO: 585817
ggcugcaguuguguacaga

SEQ ID NO: 670041 - RNA, 19 nt, Artificial Sequence
  Description of Artificial Sequence: Synthetic oligonucleotide
  Antisense strand to SEQ ID NO: 670040
ucuguacacaacugcagcc

SEQ ID NO: 670042 - RNA, 19 nt, Artificial Sequence
  Description of Artificial Sequence: Synthetic oligonucleotide
  Sense strand starting at position 3675 of SEQ ID NO: 585817
ggcuguuauuguuggagag

SEQ ID NO: 670043 - RNA, 19 nt, Artificial Sequence
  Description of Artificial Sequence: Synthetic oligonucleotide
  Antisense strand to SEQ ID NO: 670042
cucuccaacaauaacagcc

SEQ ID NO: 670044 - RNA, 19 nt, Artificial Sequence
  Description of Artificial Sequence: Synthetic oligonucleotide
  Sense strand starting at position 3676 of SEQ ID NO: 585817
gcuguuauuguuggagaga

SEQ ID NO: 670045 - RNA, 19 nt, Artificial Sequence
  Description of Artificial Sequence: Synthetic oligonucleotide
  Antisense strand to SEQ ID NO: 670044
ucucuccaacaauaacagc

SEQ ID NO: 670046 - RNA, 19 nt, Artificial Sequence
  Description of Artificial Sequence: Synthetic oligonucleotide
  Sense strand starting at position 3677 of SEQ ID NO: 585817
cuguuauuguuggagagaa

SEQ ID NO: 670047 - RNA, 19 nt, Artificial Sequence
  Description of Artificial Sequence: Synthetic oligonucleotide
  Antisense strand to SEQ ID NO: 670046
uucucuccaacaauaacag

SEQ ID NO: 670048 - RNA, 19 nt, Artificial Sequence
  Description of Artificial Sequence: Synthetic oligonucleotide
  Sense strand starting at position 3679 of SEQ ID NO: 585817
guuauuguuggagagaagu

SEQ ID NO: 670049 - RNA, 19 nt, Artificial Sequence
  Description of Artificial Sequence: Synthetic oligonucleotide
  Antisense strand to SEQ ID NO: 670048
acuucucuccaacaauaac

SEQ ID NO: 670050 - RNA, 19 nt, Artificial Sequence
  Description of Artificial Sequence: Synthetic oligonucleotide
  Sense strand starting at position 8 of SEQ ID NO: 585818
ggugaauaaucauauuuac

SEQ ID NO: 670051 - RNA, 19 nt, Artificial Sequence
  Description of Artificial Sequence: Synthetic oligonucleotide
  Antisense strand to SEQ ID NO: 670050
guaaauaugauuauucacc

SEQ ID NO: 670052 - RNA, 19 nt, Artificial Sequence
  Description of Artificial Sequence: Synthetic oligonucleotide
  Sense strand starting at position 80 of SEQ ID NO: 585818
agccucaggucucagauuu

SEQ ID NO: 670053 - RNA, 19 nt, Artificial Sequence
  Description of Artificial Sequence: Synthetic oligonucleotide
  Antisense strand to SEQ ID NO: 670052
aaaucugagaccugaggcu

SEQ ID NO: 670054 - RNA, 19 nt, Artificial Sequence
  Description of Artificial Sequence: Synthetic oligonucleotide
  Sense strand starting at position 488 of SEQ ID NO: 585818
aggcaagauuccuggcagu

SEQ ID NO: 670055 - RNA, 19 nt, Artificial Sequence
  Description of Artificial Sequence: Synthetic oligonucleotide
  Antisense strand to SEQ ID NO: 670054
acugccaggaaucuugccu

SEQ ID NO: 670056 - RNA, 19 nt, Artificial Sequence
  Description of Artificial Sequence: Synthetic oligonucleotide
  Sense strand starting at position 491 of SEQ ID NO: 585818
caagauuccuggcaguuaa

SEQ ID NO: 670057 - RNA, 19 nt, Artificial Sequence
  Description of Artificial Sequence: Synthetic oligonucleotide
  Antisense strand to SEQ ID NO: 670056
uuaacugccaggaaucuug

SEQ ID NO: 670058 - RNA, 19 nt, Artificial Sequence
  Description of Artificial Sequence: Synthetic oligonucleotide
  Sense strand starting at position 551 of SEQ ID NO: 585818
gagaauagcuccuguucuc

SEQ ID NO: 670059 - RNA, 19 nt, Artificial Sequence
  Description of Artificial Sequence: Synthetic oligonucleotide
  Antisense strand to SEQ ID NO: 670058
gagaacaggagcuauucuc

SEQ ID NO: 670060 - RNA, 19 nt, Artificial Sequence
  Description of Artificial Sequence: Synthetic oligonucleotide
  Sense strand starting at position 560 of SEQ ID NO: 585818
uccuguucuccuggguaaa

SEQ ID NO: 670061 - RNA, 19 nt, Artificial Sequence
  Description of Artificial Sequence: Synthetic oligonucleotide
  Antisense strand to SEQ ID NO: 670060
uuuacccaggagaacagga

SEQ ID NO: 670062 - RNA, 19 nt, Artificial Sequence
  Description of Artificial Sequence: Synthetic oligonucleotide
  Sense strand starting at position 580 of SEQ ID NO: 585818
cuggcuuaggcuuagagaa

SEQ ID NO: 670063 - RNA, 19 nt, Artificial Sequence
  Description of Artificial Sequence: Synthetic oligonucleotide
  Antisense strand to SEQ ID NO: 670062
uucucuaagccuaagccag

SEQ ID NO: 670064 - RNA, 19 nt, Artificial Sequence
  Description of Artificial Sequence: Synthetic oligonucleotide
  Sense strand starting at position 582 of SEQ ID NO: 585818
ggcuuaggcuuagagaaga

SEQ ID NO: 670065 - RNA, 19 nt, Artificial Sequence
  Description of Artificial Sequence: Synthetic oligonucleotide
  Antisense strand to SEQ ID NO: 670064
ucuucucuaagccuaagcc

SEQ ID NO: 670066 - RNA, 19 nt, Artificial Sequence
  Description of Artificial Sequence: Synthetic oligonucleotide
  Sense strand starting at position 665 of SEQ ID NO: 585818
accagucuugggcacaauu

SEQ ID NO: 670067 - RNA, 19 nt, Artificial Sequence
  Description of Artificial Sequence: Synthetic oligonucleotide
  Antisense strand to SEQ ID NO: 670066
aauugugcccaagacuggu

SEQ ID NO: 670068 - RNA, 19 nt, Artificial Sequence
  Description of Artificial Sequence: Synthetic oligonucleotide
  Sense strand starting at position 1028 of SEQ ID NO: 585818
gguugagucacuugccuga

SEQ ID NO: 670069 - RNA, 19 nt, Artificial Sequence
  Description of Artificial Sequence: Synthetic oligonucleotide
  Antisense strand to SEQ ID NO: 670068
ucaggcaagugacucaacc

SEQ ID NO: 670070 - RNA, 19 nt, Artificial Sequence
  Description of Artificial Sequence: Synthetic oligonucleotide
  Sense strand starting at position 1031 of SEQ ID NO: 585818
ugagucacuugccugaagu

SEQ ID NO: 670071 - RNA, 19 nt, Artificial Sequence
  Description of Artificial Sequence: Synthetic oligonucleotide
  Antisense strand to SEQ ID NO: 670070
acuucaggcaagugacuca

SEQ ID NO: 670072 - RNA, 19 nt, Artificial Sequence
  Description of Artificial Sequence: Synthetic oligonucleotide
  Sense strand starting at position 1032 of SEQ ID NO: 585818
gagucacuugccugaaguc

SEQ ID NO: 670073 - RNA, 19 nt, Artificial Sequence
  Description of Artificial Sequence: Synthetic oligonucleotide
  Antisense strand to SEQ ID NO: 670072
gacuucaggcaagugacuc

SEQ ID NO: 670074 - RNA, 19 nt, Artificial Sequence
  Description of Artificial Sequence: Synthetic oligonucleotide
  Sense strand starting at position 1033 of SEQ ID NO: 585818
agucacuugccugaaguca

SEQ ID NO: 670075 - RNA, 19 nt, Artificial Sequence
  Description of Artificial Sequence: Synthetic oligonucleotide
  Antisense strand to SEQ ID NO: 670074
ugacuucaggcaagugacu

SEQ ID NO: 670076 - RNA, 19 nt, Artificial Sequence
  Description of Artificial Sequence: Synthetic oligonucleotide
  Sense strand starting at position 1134 of SEQ ID NO: 585818
cucaguuagcccuguagac

SEQ ID NO: 670077 - RNA, 19 nt, Artificial Sequence
  Description of Artificial Sequence: Synthetic oligonucleotide
  Antisense strand to SEQ ID NO: 670076
gucuacagggcuaacugag

SEQ ID NO: 670078 - RNA, 19 nt, Artificial Sequence
  Description of Artificial Sequence: Synthetic oligonucleotide
  Sense strand starting at position 1412 of SEQ ID NO: 585818
gcucucuccugguaagcaa

SEQ ID NO: 670079 - RNA, 19 nt, Artificial Sequence
  Description of Artificial Sequence: Synthetic oligonucleotide
  Antisense strand to SEQ ID NO: 670078
uugcuuaccaggagagagc

SEQ ID NO: 670080 - RNA, 19 nt, Artificial Sequence
  Description of Artificial Sequence: Synthetic oligonucleotide
  Sense strand starting at position 1434 of SEQ ID NO: 585818
cgaggacuguuugucuuca

SEQ ID NO: 670081 - RNA, 19 nt, Artificial Sequence
  Description of Artificial Sequence: Synthetic oligonucleotide
  Antisense strand to SEQ ID NO: 670080
ugaagacaaacaguccucg

SEQ ID NO: 670082 - RNA, 19 nt, Artificial Sequence
  Description of Artificial Sequence: Synthetic oligonucleotide
  Sense strand starting at position 1517 of SEQ ID NO: 585818
auacgaguuuagccaguaa

SEQ ID NO: 670083 - RNA, 19 nt, Artificial Sequence
  Description of Artificial Sequence: Synthetic oligonucleotide
  Antisense strand to SEQ ID NO: 670082
uuacuggcuaaacucguau

SEQ ID NO: 670084 - RNA, 19 nt, Artificial Sequence
  Description of Artificial Sequence: Synthetic oligonucleotide
  Sense strand starting at position 2218 of SEQ ID NO: 585818
cguguuauugcgguagaua

SEQ ID NO: 670085 - RNA, 19 nt, Artificial Sequence
  Description of Artificial Sequence: Synthetic oligonucleotide
  Antisense strand to SEQ ID NO: 670084
uaucuaccgcaauaacacg

SEQ ID NO: 670086 - RNA, 19 nt, Artificial Sequence
  Description of Artificial Sequence: Synthetic oligonucleotide
  Sense strand starting at position 2219 of SEQ ID NO: 585818
guguuauugcgguagauag

SEQ ID NO: 670087 - RNA, 19 nt, Artificial Sequence
  Description of Artificial Sequence: Synthetic oligonucleotide
  Antisense strand to SEQ ID NO: 670086
cuaucuaccgcaauaacac

SEQ ID NO: 670088 - RNA, 19 nt, Artificial Sequence
  Description of Artificial Sequence: Synthetic oligonucleotide
  Sense strand starting at position 2221 of SEQ ID NO: 585818
guuauugcgguagauagga

SEQ ID NO: 670089 - RNA, 19 nt, Artificial Sequence
  Description of Artificial Sequence: Synthetic oligonucleotide
  Antisense strand to SEQ ID NO: 670088
uccuaucuaccgcaauaac

SEQ ID NO: 670090 - RNA, 19 nt, Artificial Sequence
  Description of Artificial Sequence: Synthetic oligonucleotide
  Sense strand starting at position 2820 of SEQ ID NO: 585818
agccuuauauccucaguga

SEQ ID NO: 670091 - RNA, 19 nt, Artificial Sequence
  Description of Artificial Sequence: Synthetic oligonucleotide
  Antisense strand to SEQ ID NO: 670090
ucacugaggauauaaggcu

SEQ ID NO: 670092 - RNA, 19 nt, Artificial Sequence
  Description of Artificial Sequence: Synthetic oligonucleotide
  Sense strand starting at position 2821 of SEQ ID NO: 585818
gccuuauauccucagugaa

SEQ ID NO: 670093 - RNA, 19 nt, Artificial Sequence
  Description of Artificial Sequence: Synthetic oligonucleotide
  Antisense strand to SEQ ID NO: 670092
uucacugaggauauaaggc

SEQ ID NO: 670094 - RNA, 19 nt, Artificial Sequence
  Description of Artificial Sequence: Synthetic oligonucleotide
  Sense strand starting at position 2834 of SEQ ID NO: 585818
agugaauccuauuguccca

SEQ ID NO: 670095 - RNA, 19 nt, Artificial Sequence
  Description of Artificial Sequence: Synthetic oligonucleotide
  Antisense strand to SEQ ID NO: 670094
ugggacaauaggauucacu

SEQ ID NO: 670096 - RNA, 19 nt, Artificial Sequence
  Description of Artificial Sequence: Synthetic oligonucleotide
  Sense strand starting at position 2839 of SEQ ID NO: 585818
auccuauugucccagccau

SEQ ID NO: 670097 - RNA, 19 nt, Artificial Sequence
  Description of Artificial Sequence: Synthetic oligonucleotide
  Antisense strand to SEQ ID NO: 670096
auggcugggacaauaggau

SEQ ID NO: 670098 - RNA, 19 nt, Artificial Sequence
  Description of Artificial Sequence: Synthetic oligonucleotide
  Sense strand starting at position 2865 of SEQ ID NO: 585818
ggcggaagccuugcugagu

SEQ ID NO: 670099 - RNA, 19 nt, Artificial Sequence
  Description of Artificial Sequence: Synthetic oligonucleotide
  Antisense strand to SEQ ID NO: 670098
acucagcaaggcuuccgcc

SEQ ID NO: 670100 - RNA, 19 nt, Artificial Sequence
  Description of Artificial Sequence: Synthetic oligonucleotide
  Sense strand starting at position 2866 of SEQ ID NO: 585818
gcggaagccuugcugagua

SEQ ID NO: 670101 - RNA, 19 nt, Artificial Sequence
  Description of Artificial Sequence: Synthetic oligonucleotide
  Antisense strand to SEQ ID NO: 670100
uacucagcaaggcuuccgc

SEQ ID NO: 670102 - RNA, 19 nt, Artificial Sequence
  Description of Artificial Sequence: Synthetic oligonucleotide
  Sense strand starting at position 2968 of SEQ ID NO: 585818
cucucuuuggucgggcaau

SEQ ID NO: 670103 - RNA, 19 nt, Artificial Sequence
  Description of Artificial Sequence: Synthetic oligonucleotide
  Antisense strand to SEQ ID NO: 670102
auugcccgaccaaagagag

SEQ ID NO: 670104 - RNA, 19 nt, Artificial Sequence
  Description of Artificial Sequence: Synthetic oligonucleotide
  Sense strand starting at position 3023 of SEQ ID NO: 585818
agcaguacucagugcuaga

SEQ ID NO: 670105 - RNA, 19 nt, Artificial Sequence
  Description of Artificial Sequence: Synthetic oligonucleotide
  Antisense strand to SEQ ID NO: 670104
ucuagcacugaguacugcu

SEQ ID NO: 670106 - RNA, 19 nt, Artificial Sequence
  Description of Artificial Sequence: Synthetic oligonucleotide
  Sense strand starting at position 3026 of SEQ ID NO: 585818
aguacucagugcuagagga

SEQ ID NO: 670107 - RNA, 19 nt, Artificial Sequence
  Description of Artificial Sequence: Synthetic oligonucleotide
  Antisense strand to SEQ ID NO: 670106
uccucuagcacugaguacu

SEQ ID NO: 670108 - RNA, 19 nt, Artificial Sequence
  Description of Artificial Sequence: Synthetic oligonucleotide
  Sense strand starting at position 3030 of SEQ ID NO: 585818
cucagugcuagaggaugau

SEQ ID NO: 670109 - RNA, 19 nt, Artificial Sequence
  Description of Artificial Sequence: Synthetic oligonucleotide
  Antisense strand to SEQ ID NO: 670108
aucauccucuagcacugag

SEQ ID NO: 670110 - RNA, 19 nt, Artificial Sequence
  Description of Artificial Sequence: Synthetic oligonucleotide
  Sense strand starting at position 3039 of SEQ ID NO: 585818
agaggaugauccuaaggcu

SEQ ID NO: 670111 - RNA, 19 nt, Artificial Sequence
  Description of Artificial Sequence: Synthetic oligonucleotide
  Antisense strand to SEQ ID NO: 670110
agccuuaggaucauccucu

SEQ ID NO: 670112 - RNA, 19 nt, Artificial Sequence
  Description of Artificial Sequence: Synthetic oligonucleotide
  Sense strand starting at position 3042 of SEQ ID NO: 585818
ggaugauccuaaggcugga

SEQ ID NO: 670113 - RNA, 19 nt, Artificial Sequence
  Description of Artificial Sequence: Synthetic oligonucleotide
  Antisense strand to SEQ ID NO: 670112
uccagccuuaggaucaucc

SEQ ID NO: 670114 - RNA, 19 nt, Artificial Sequence
  Description of Artificial Sequence: Synthetic oligonucleotide
  Sense strand starting at position 3056 of SEQ ID NO: 585818
cuggaaagguccugaggag

SEQ ID NO: 670115 - RNA, 19 nt, Artificial Sequence
  Description of Artificial Sequence: Synthetic oligonucleotide
  Antisense strand to SEQ ID NO: 670114
cuccucaggaccuuuccag

SEQ ID NO: 670116 - RNA, 19 nt, Artificial Sequence
  Description of Artificial Sequence: Synthetic oligonucleotide
  Sense strand starting at position 3160 of SEQ ID NO: 585818
ggcaguaccucacaucaua

SEQ ID NO: 670117 - RNA, 19 nt, Artificial Sequence
  Description of Artificial Sequence: Synthetic oligonucleotide
  Antisense strand to SEQ ID NO: 670116
uaugaugugagguacugcc

SEQ ID NO: 670118 - RNA, 19 nt, Artificial Sequence
  Description of Artificial Sequence: Synthetic oligonucleotide
  Sense strand starting at position 3605 of SEQ ID NO: 585818
agggcuaguggucagaaga

SEQ ID NO: 670119 - RNA, 19 nt, Artificial Sequence
  Description of Artificial Sequence: Synthetic oligonucleotide
  Antisense strand to SEQ ID NO: 670118
ucuucugaccacuagcccu

SEQ ID NO: 670120 - RNA, 19 nt, Artificial Sequence
  Description of Artificial Sequence: Synthetic oligonucleotide
  Sense strand starting at position 3655 of SEQ ID NO: 585818
ggcugcaguuguguacaga

SEQ ID NO: 670121 - RNA, 19 nt, Artificial Sequence
  Description of Artificial Sequence: Synthetic oligonucleotide
  Antisense strand to SEQ ID NO: 670120
ucuguacacaacugcagcc

SEQ ID NO: 670122 - RNA, 19 nt, Artificial Sequence
  Description of Artificial Sequence: Synthetic oligonucleotide
  Sense strand starting at position 3797 of SEQ ID NO: 585818
ggcuguuauuguuggagag

SEQ ID NO: 670123 - RNA, 19 nt, Artificial Sequence
  Description of Artificial Sequence: Synthetic oligonucleotide
  Antisense strand to SEQ ID NO: 670122
cucuccaacaauaacagcc

SEQ ID NO: 670124 - RNA, 19 nt, Artificial Sequence
  Description of Artificial Sequence: Synthetic oligonucleotide
  Sense strand starting at position 3798 of SEQ ID NO: 585818
gcuguuauuguuggagaga

SEQ ID NO: 670125 - RNA, 19 nt, Artificial Sequence
  Description of Artificial Sequence: Synthetic oligonucleotide
  Antisense strand to SEQ ID NO: 670124
ucucuccaacaauaacagc

SEQ ID NO: 670126 - RNA, 19 nt, Artificial Sequence
  Description of Artificial Sequence: Synthetic oligonucleotide
  Sense strand starting at position 3799 of SEQ ID NO: 585818
cuguuauuguuggagagaa

SEQ ID NO: 670127 - RNA, 19 nt, Artificial Sequence
  Description of Artificial Sequence: Synthetic oligonucleotide
  Antisense strand to SEQ ID NO: 670126
uucucuccaacaauaacag

SEQ ID NO: 670128 - RNA, 19 nt, Artificial Sequence
  Description of Artificial Sequence: Synthetic oligonucleotide
  Sense strand starting at position 3801 of SEQ ID NO: 585818
guuauuguuggagagaagu

SEQ ID NO: 670129 - RNA, 19 nt, Artificial Sequence
  Description of Artificial Sequence: Synthetic oligonucleotide
  Antisense strand to SEQ ID NO: 670128
acuucucuccaacaauaac

SEQ ID NO: 670130 - RNA, 19 nt, Artificial Sequence
  Description of Artificial Sequence: Synthetic oligonucleotide
  Sense strand starting at position 9 of SEQ ID NO: 585819
gugacauuaucacugacug

SEQ ID NO: 670131 - RNA, 19 nt, Artificial Sequence
  Description of Artificial Sequence: Synthetic oligonucleotide
  Antisense strand to SEQ ID NO: 670130
cagucagugauaaugucac

SEQ ID NO: 670132 - RNA, 19 nt, Artificial Sequence
  Description of Artificial Sequence: Synthetic oligonucleotide
  Sense strand starting at position 10 of SEQ ID NO: 585819
ugacauuaucacugacugu

SEQ ID NO: 670133 - RNA, 19 nt, Artificial Sequence
  Description of Artificial Sequence: Synthetic oligonucleotide
  Antisense strand to SEQ ID NO: 670132
acagucagugauaauguca

SEQ ID NO: 670134 - RNA, 19 nt, Artificial Sequence
  Description of Artificial Sequence: Synthetic oligonucleotide
  Sense strand starting at position 26 of SEQ ID NO: 585819
uguauuuagugagcccuuu

SEQ ID NO: 670135 - RNA, 19 nt, Artificial Sequence
  Description of Artificial Sequence: Synthetic oligonucleotide
  Antisense strand to SEQ ID NO: 670134
aaagggcucacuaaauaca

SEQ ID NO: 670136 - RNA, 19 nt, Artificial Sequence
  Description of Artificial Sequence: Synthetic oligonucleotide
  Sense strand starting at position 64 of SEQ ID NO: 585819
gcuugcucugcagucuaga

SEQ ID NO: 670137 - RNA, 19 nt, Artificial Sequence
  Description of Artificial Sequence: Synthetic oligonucleotide
  Antisense strand to SEQ ID NO: 670136
ucuagacugcagagcaagc

SEQ ID NO: 670138 - RNA, 19 nt, Artificial Sequence
  Description of Artificial Sequence: Synthetic oligonucleotide
  Sense strand starting at position 172 of SEQ ID NO: 585819
agggaacuugugggccaau

SEQ ID NO: 670139 - RNA, 19 nt, Artificial Sequence
  Description of Artificial Sequence: Synthetic oligonucleotide
  Antisense strand to SEQ ID NO: 670138
auuggcccacaaguucccu

SEQ ID NO: 670140 - RNA, 19 nt, Artificial Sequence
  Description of Artificial Sequence: Synthetic oligonucleotide
  Sense strand starting at position 213 of SEQ ID NO: 585819
aggguacuucugcauagga

SEQ ID NO: 670141 - RNA, 19 nt, Artificial Sequence
  Description of Artificial Sequence: Synthetic oligonucleotide
  Antisense strand to SEQ ID NO: 670140
uccuaugcagaaguacccu

SEQ ID NO: 670142 - RNA, 19 nt, Artificial Sequence
  Description of Artificial Sequence: Synthetic oligonucleotide
  Sense strand starting at position 215 of SEQ ID NO: 585819
gguacuucugcauaggaga

SEQ ID NO: 670143 - RNA, 19 nt, Artificial Sequence
  Description of Artificial Sequence: Synthetic oligonucleotide
  Antisense strand to SEQ ID NO: 670142
ucuccuaugcagaaguacc

SEQ ID NO: 670144 - RNA, 19 nt, Artificial Sequence
  Description of Artificial Sequence: Synthetic oligonucleotide
  Sense strand starting at position 571 of SEQ ID NO: 585819
ggccucauucuugacgaga

SEQ ID NO: 670145 - RNA, 19 nt, Artificial Sequence
  Description of Artificial Sequence: Synthetic oligonucleotide
  Antisense strand to SEQ ID NO: 670144
ucucgucaagaaugaggcc

SEQ ID NO: 670146 - RNA, 19 nt, Artificial Sequence
  Description of Artificial Sequence: Synthetic oligonucleotide
  Sense strand starting at position 574 of SEQ ID NO: 585819
cucauucuugacgagaagu

SEQ ID NO: 670147 - RNA, 19 nt, Artificial Sequence
  Description of Artificial Sequence: Synthetic oligonucleotide
  Antisense strand to SEQ ID NO: 670146
acuucucgucaagaaugag

SEQ ID NO: 670148 - RNA, 19 nt, Artificial Sequence
  Description of Artificial Sequence: Synthetic oligonucleotide
  Sense strand starting at position 576 of SEQ ID NO: 585819
cauucuugacgagaagugu

SEQ ID NO: 670149 - RNA, 19 nt, Artificial Sequence
  Description of Artificial Sequence: Synthetic oligonucleotide
  Antisense strand to SEQ ID NO: 670148
acacuucucgucaagaaug

SEQ ID NO: 670150 - RNA, 19 nt, Artificial Sequence
  Description of Artificial Sequence: Synthetic oligonucleotide
  Sense strand starting at position 580 of SEQ ID NO: 585819
cuugacgagaagugugaaa

SEQ ID NO: 670151 - RNA, 19 nt, Artificial Sequence
  Description of Artificial Sequence: Synthetic oligonucleotide
  Antisense strand to SEQ ID NO: 670150
uuucacacuucucgucaag

SEQ ID NO: 670152 - RNA, 19 nt, Artificial Sequence
  Description of Artificial Sequence: Synthetic oligonucleotide
  Sense strand starting at position 977 of SEQ ID NO: 585819
gggaauuguaaauguggaa

SEQ ID NO: 670153 - RNA, 19 nt, Artificial Sequence
  Description of Artificial Sequence: Synthetic oligonucleotide
  Antisense strand to SEQ ID NO: 670152
uuccacauuuacaauuccc

SEQ ID NO: 670154 - RNA, 19 nt, Artificial Sequence
  Description of Artificial Sequence: Synthetic oligonucleotide
  Sense strand starting at position 981 of SEQ ID NO: 585819
auuguaaauguggaaguga

SEQ ID NO: 670155 - RNA, 19 nt, Artificial Sequence
  Description of Artificial Sequence: Synthetic oligonucleotide
  Antisense strand to SEQ ID NO: 670154
ucacuuccacauuuacaau

SEQ ID NO: 670156 - RNA, 19 nt, Artificial Sequence
  Description of Artificial Sequence: Synthetic oligonucleotide
  Sense strand starting at position 1147 of SEQ ID NO: 585819
cugaauaacgcucaaauuc

SEQ ID NO: 670157 - RNA, 19 nt, Artificial Sequence
  Description of Artificial Sequence: Synthetic oligonucleotide
  Antisense strand to SEQ ID NO: 670156
gaauuugagcguuauucag

SEQ ID NO: 670158 - RNA, 19 nt, Artificial Sequence
  Description of Artificial Sequence: Synthetic oligonucleotide
  Sense strand starting at position 1202 of SEQ ID NO: 585819
uguucucauugauuacaua

SEQ ID NO: 670159 - RNA, 19 nt, Artificial Sequence
  Description of Artificial Sequence: Synthetic oligonucleotide
  Antisense strand to SEQ ID NO: 670158
uauguaaucaaugagaaca

SEQ ID NO: 670160 - RNA, 19 nt, Artificial Sequence
  Description of Artificial Sequence: Synthetic oligonucleotide
  Sense strand starting at position 1452 of SEQ ID NO: 585819
ggauguguaaccuguauuu

SEQ ID NO: 670161 - RNA, 19 nt, Artificial Sequence
  Description of Artificial Sequence: Synthetic oligonucleotide
  Antisense strand to SEQ ID NO: 670160
aaauacagguuacacaucc

SEQ ID NO: 670162 - RNA, 19 nt, Artificial Sequence
  Description of Artificial Sequence: Synthetic oligonucleotide
  Sense strand starting at position 1657 of SEQ ID NO: 585819
gacaguacacucgggagau

SEQ ID NO: 670163 - RNA, 19 nt, Artificial Sequence
  Description of Artificial Sequence: Synthetic oligonucleotide
  Antisense strand to SEQ ID NO: 670162
aucucccgaguguacuguc

SEQ ID NO: 670164 - RNA, 19 nt, Artificial Sequence
  Description of Artificial Sequence: Synthetic oligonucleotide
  Sense strand starting at position 1661 of SEQ ID NO: 585819
guacacucgggagaugagu

SEQ ID NO: 670165 - RNA, 19 nt, Artificial Sequence
  Description of Artificial Sequence: Synthetic oligonucleotide
  Antisense strand to SEQ ID NO: 670164
acucaucucccgaguguac

SEQ ID NO: 670166 - RNA, 19 nt, Artificial Sequence
  Description of Artificial Sequence: Synthetic oligonucleotide
  Sense strand starting at position 1976 of SEQ ID NO: 585819
cuuuguuucuauuuccgaa

SEQ ID NO: 670167 - RNA, 19 nt, Artificial Sequence
  Description of Artificial Sequence: Synthetic oligonucleotide
  Antisense strand to SEQ ID NO: 670166
uucggaaauagaaacaaag

SEQ ID NO: 670168 - RNA, 19 nt, Artificial Sequence
  Description of Artificial Sequence: Synthetic oligonucleotide
  Sense strand starting at position 2126 of SEQ ID NO: 585819
ggaacucagacggaguguu

SEQ ID NO: 670169 - RNA, 19 nt, Artificial Sequence
  Description of Artificial Sequence: Synthetic oligonucleotide
  Antisense strand to SEQ ID NO: 670168
aacacuccgucugaguucc

SEQ ID NO: 670170 - RNA, 19 nt, Artificial Sequence
  Description of Artificial Sequence: Synthetic oligonucleotide
  Sense strand starting at position 2333 of SEQ ID NO: 585819
gcaagacuguuauuccaaa

SEQ ID NO: 670171 - RNA, 19 nt, Artificial Sequence
  Description of Artificial Sequence: Synthetic oligonucleotide
  Antisense strand to SEQ ID NO: 670170
uuuggaauaacagucuugc

SEQ ID NO: 670172 - RNA, 19 nt, Artificial Sequence
  Description of Artificial Sequence: Synthetic oligonucleotide
  Sense strand starting at position 2418 of SEQ ID NO: 585819
uagguaaaggccuauaucu

SEQ ID NO: 670173 - RNA, 19 nt, Artificial Sequence
  Description of Artificial Sequence: Synthetic oligonucleotide
  Antisense strand to SEQ ID NO: 670172
agauauaggccuuuaccua

SEQ ID NO: 670174 - RNA, 19 nt, Artificial Sequence
  Description of Artificial Sequence: Synthetic oligonucleotide
  Sense strand starting at position 2420 of SEQ ID NO: 585819
gguaaaggccuauaucuuu

SEQ ID NO: 670175 - RNA, 19 nt, Artificial Sequence
  Description of Artificial Sequence: Synthetic oligonucleotide
  Antisense strand to SEQ ID NO: 670174
aaagauauaggccuuuacc

SEQ ID NO: 670176 - RNA, 19 nt, Artificial Sequence
  Description of Artificial Sequence: Synthetic oligonucleotide
  Sense strand starting at position 2497 of SEQ ID NO: 585819
ugcacagauucuuuagacu

SEQ ID NO: 670177 - RNA, 19 nt, Artificial Sequence
  Description of Artificial Sequence: Synthetic oligonucleotide
  Antisense strand to SEQ ID NO: 670176
agucuaaagaaucugugca

SEQ ID NO: 670178 - RNA, 19 nt, Artificial Sequence
  Description of Artificial Sequence: Synthetic oligonucleotide
  Sense strand starting at position 2549 of SEQ ID NO: 585819
uuucuuaaugcagaauugu

SEQ ID NO: 670179 - RNA, 19 nt, Artificial Sequence
  Description of Artificial Sequence: Synthetic oligonucleotide
  Antisense strand to SEQ ID NO: 670178
acaauucugcauuaagaaa

SEQ ID NO: 670180 - RNA, 19 nt, Artificial Sequence
  Description of Artificial Sequence: Synthetic oligonucleotide
  Sense strand starting at position 2558 of SEQ ID NO: 585819
gcagaauugucuuuaagag

SEQ ID NO: 670181 - RNA, 19 nt, Artificial Sequence
  Description of Artificial Sequence: Synthetic oligonucleotide
  Antisense strand to SEQ ID NO: 670180
cucuuaaagacaauucugc

SEQ ID NO: 670182 - RNA, 19 nt, Artificial Sequence
  Description of Artificial Sequence: Synthetic oligonucleotide
  Sense strand starting at position 2586 of SEQ ID NO: 585819
cacugaauccucuguuagg

SEQ ID NO: 670183 - RNA, 19 nt, Artificial Sequence
  Description of Artificial Sequence: Synthetic oligonucleotide
  Antisense strand to SEQ ID NO: 670182
ccuaacagaggauucagug

SEQ ID NO: 670184 - RNA, 19 nt, Artificial Sequence
  Description of Artificial Sequence: Synthetic oligonucleotide
  Sense strand starting at position 2627 of SEQ ID NO: 585819
ggaggauacuccucacuca

SEQ ID NO: 670185 - RNA, 19 nt, Artificial Sequence
  Description of Artificial Sequence: Synthetic oligonucleotide
  Antisense strand to SEQ ID NO: 670184
ugagugaggaguauccucc

SEQ ID NO: 670186 - RNA, 19 nt, Artificial Sequence
  Description of Artificial Sequence: Synthetic oligonucleotide
  Sense strand starting at position 2682 of SEQ ID NO: 585819
guggacauguaaucucaaa

SEQ ID NO: 670187 - RNA, 19 nt, Artificial Sequence
  Description of Artificial Sequence: Synthetic oligonucleotide
  Antisense strand to SEQ ID NO: 670186
uuugagauuacauguccac

SEQ ID NO: 670188 - RNA, 19 nt, Artificial Sequence
  Description of Artificial Sequence: Synthetic oligonucleotide
  Sense strand starting at position 2709 of SEQ ID NO: 585819
ggucaugagagaggaucuu

SEQ ID NO: 670189 - RNA, 19 nt, Artificial Sequence
  Description of Artificial Sequence: Synthetic oligonucleotide
  Antisense strand to SEQ ID NO: 670188
aagauccucucucaugacc

SEQ ID NO: 670190 - RNA, 19 nt, Artificial Sequence
  Description of Artificial Sequence: Synthetic oligonucleotide
  Sense strand starting at position 2758 of SEQ ID NO: 585819
gucuuacaggguuaugaca

SEQ ID NO: 670191 - RNA, 19 nt, Artificial Sequence
  Description of Artificial Sequence: Synthetic oligonucleotide
  Antisense strand to SEQ ID NO: 670190
ugucauaacccuguaagac

SEQ ID NO: 670192 - RNA, 19 nt, Artificial Sequence
  Description of Artificial Sequence: Synthetic oligonucleotide
  Sense strand starting at position 2891 of SEQ ID NO: 585819
acuuaugugccagaaauug

SEQ ID NO: 670193 - RNA, 19 nt, Artificial Sequence
  Description of Artificial Sequence: Synthetic oligonucleotide
  Antisense strand to SEQ ID NO: 670192
caauuucuggcacauaagu

SEQ ID NO: 670194 - RNA, 19 nt, Artificial Sequence
  Description of Artificial Sequence: Synthetic oligonucleotide
  Sense strand starting at position 2928 of SEQ ID NO: 585819
agaugaugacuuugaggca

SEQ ID NO: 670195 - RNA, 19 nt, Artificial Sequence
  Description of Artificial Sequence: Synthetic oligonucleotide
  Antisense strand to SEQ ID NO: 670194
ugccucaaagucaucaucu

SEQ ID NO: 670196 - RNA, 19 nt, Artificial Sequence
  Description of Artificial Sequence: Synthetic oligonucleotide
  Sense strand starting at position 3201 of SEQ ID NO: 585819
cuuguauaagcagaagcua

SEQ ID NO: 670197 - RNA, 19 nt, Artificial Sequence
  Description of Artificial Sequence: Synthetic oligonucleotide
  Antisense strand to SEQ ID NO: 670196
uagcuucugcuuauacaag

SEQ ID NO: 670198 - RNA, 19 nt, Artificial Sequence
  Description of Artificial Sequence: Synthetic oligonucleotide
  Sense strand starting at position 3426 of SEQ ID NO: 585819
auggaaguccuccaggcau

SEQ ID NO: 670199 - RNA, 19 nt, Artificial Sequence
  Description of Artificial Sequence: Synthetic oligonucleotide
  Antisense strand to SEQ ID NO: 670198
augccuggaggacuuccau

SEQ ID NO: 670200 - RNA, 19 nt, Artificial Sequence
  Description of Artificial Sequence: Synthetic oligonucleotide
  Sense strand starting at position 3428 of SEQ ID NO: 585819
ggaaguccuccaggcauaa

SEQ ID NO: 670201 - RNA, 19 nt, Artificial Sequence
  Description of Artificial Sequence: Synthetic oligonucleotide
  Antisense strand to SEQ ID NO: 670200
uuaugccuggaggacuucc

SEQ ID NO: 670202 - RNA, 19 nt, Artificial Sequence
  Description of Artificial Sequence: Synthetic oligonucleotide
  Sense strand starting at position 3503 of SEQ ID NO: 585819
cccacuaaagaauguguaa

SEQ ID NO: 670203 - RNA, 19 nt, Artificial Sequence
  Description of Artificial Sequence: Synthetic oligonucleotide
  Antisense strand to SEQ ID NO: 670202
uuacacauucuuuaguggg

SEQ ID NO: 670204 - RNA, 19 nt, Artificial Sequence
  Description of Artificial Sequence: Synthetic oligonucleotide
  Sense strand starting at position 3523 of SEQ ID NO: 585819
gcaaccaugguuugaaaca

SEQ ID NO: 670205 - RNA, 19 nt, Artificial Sequence
  Description of Artificial Sequence: Synthetic oligonucleotide
  Antisense strand to SEQ ID NO: 670204
uguuucaaaccaugguugc

SEQ ID NO: 670206 - RNA, 19 nt, Artificial Sequence
  Description of Artificial Sequence: Synthetic oligonucleotide
  Sense strand starting at position 3610 of SEQ ID NO: 585819
auauguuucccauaaguuc

SEQ ID NO: 670207 - RNA, 19 nt, Artificial Sequence
  Description of Artificial Sequence: Synthetic oligonucleotide
  Antisense strand to SEQ ID NO: 670206
gaacuuaugggaaacauau

SEQ ID NO: 670208 - RNA, 19 nt, Artificial Sequence
  Description of Artificial Sequence: Synthetic oligonucleotide
  Sense strand starting at position 3717 of SEQ ID NO: 585819
cauugcuuuguuucgugau

SEQ ID NO: 670209 - RNA, 19 nt, Artificial Sequence
  Description of Artificial Sequence: Synthetic oligonucleotide
  Antisense strand to SEQ ID NO: 670208
aucacgaaacaaagcaaug

SEQ ID NO: 670210 - RNA, 19 nt, Artificial Sequence
  Description of Artificial Sequence: Synthetic oligonucleotide
  Sense strand starting at position 113 of SEQ ID NO: 585820
aucuaaguggaaggguaau

SEQ ID NO: 670211 - RNA, 19 nt, Artificial Sequence
  Description of Artificial Sequence: Synthetic oligonucleotide
  Antisense strand to SEQ ID NO: 670210
auuacccuuccacuuagau

SEQ ID NO: 670212 - RNA, 19 nt, Artificial Sequence
  Description of Artificial Sequence: Synthetic oligonucleotide
  Sense strand starting at position 157 of SEQ ID NO: 585820
cagauugggcuuugacaug

SEQ ID NO: 670213 - RNA, 19 nt, Artificial Sequence
  Description of Artificial Sequence: Synthetic oligonucleotide
  Antisense strand to SEQ ID NO: 670212
caugucaaagcccaaucug

SEQ ID NO: 670214 - RNA, 19 nt, Artificial Sequence
  Description of Artificial Sequence: Synthetic oligonucleotide
  Sense strand starting at position 162 of SEQ ID NO: 585820
ugggcuuugacauggaaua

SEQ ID NO: 670215 - RNA, 19 nt, Artificial Sequence
  Description of Artificial Sequence: Synthetic oligonucleotide
  Antisense strand to SEQ ID NO: 670214
uauuccaugucaaagccca

SEQ ID NO: 670216 - RNA, 19 nt, Artificial Sequence
  Description of Artificial Sequence: Synthetic oligonucleotide
  Sense strand starting at position 163 of SEQ ID NO: 585820
gggcuuugacauggaauac

SEQ ID NO: 670217 - RNA, 19 nt, Artificial Sequence
  Description of Artificial Sequence: Synthetic oligonucleotide
  Antisense strand to SEQ ID NO: 670216
guauuccaugucaaagccc

SEQ ID NO: 670218 - RNA, 19 nt, Artificial Sequence
  Description of Artificial Sequence: Synthetic oligonucleotide
  Sense strand starting at position 242 of SEQ ID NO: 585820
gcaguuuaacaucagacca

SEQ ID NO: 670219 - RNA, 19 nt, Artificial Sequence
  Description of Artificial Sequence: Synthetic oligonucleotide
  Antisense strand to SEQ ID NO: 670218
uggucugauguuaaacugc

SEQ ID NO: 670220 - RNA, 19 nt, Artificial Sequence
  Description of Artificial Sequence: Synthetic oligonucleotide
  Sense strand starting at position 579 of SEQ ID NO: 585820
ggacauuauuuguaauacu

SEQ ID NO: 670221 - RNA, 19 nt, Artificial Sequence
  Description of Artificial Sequence: Synthetic oligonucleotide
  Antisense strand to SEQ ID NO: 670220
aguauuacaaauaaugucc

SEQ ID NO: 670222 - RNA, 19 nt, Artificial Sequence
  Description of Artificial Sequence: Synthetic oligonucleotide
  Sense strand starting at position 604 of SEQ ID NO: 585820
cuuagaaauucuguaaguc

SEQ ID NO: 670223 - RNA, 19 nt, Artificial Sequence
  Description of Artificial Sequence: Synthetic oligonucleotide
  Antisense strand to SEQ ID NO: 670222
gacuuacagaauuucuaag

SEQ ID NO: 670224 - RNA, 19 nt, Artificial Sequence
  Description of Artificial Sequence: Synthetic oligonucleotide
  Sense strand starting at position 614 of SEQ ID NO: 585820
cuguaagucccagauaaau

SEQ ID NO: 670225 - RNA, 19 nt, Artificial Sequence
  Description of Artificial Sequence: Synthetic oligonucleotide
  Antisense strand to SEQ ID NO: 670224
auuuaucugggacuuacag

SEQ ID NO: 670226 - RNA, 19 nt, Artificial Sequence
  Description of Artificial Sequence: Synthetic oligonucleotide
  Sense strand starting at position 625 of SEQ ID NO: 585820
agauaaauccuuuguggau

SEQ ID NO: 670227 - RNA, 19 nt, Artificial Sequence
  Description of Artificial Sequence: Synthetic oligonucleotide
  Antisense strand to SEQ ID NO: 670226
auccacaaaggauuuaucu

SEQ ID NO: 670228 - RNA, 19 nt, Artificial Sequence
  Description of Artificial Sequence: Synthetic oligonucleotide
  Sense strand starting at position 626 of SEQ ID NO: 585820
gauaaauccuuuguggaua

SEQ ID NO: 670229 - RNA, 19 nt, Artificial Sequence
  Description of Artificial Sequence: Synthetic oligonucleotide
  Antisense strand to SEQ ID NO: 670228
uauccacaaaggauuuauc

SEQ ID NO: 670230 - RNA, 19 nt, Artificial Sequence
  Description of Artificial Sequence: Synthetic oligonucleotide
  Sense strand starting at position 847 of SEQ ID NO: 585820
uuuauuuccuguguugcua

SEQ ID NO: 670231 - RNA, 19 nt, Artificial Sequence
  Description of Artificial Sequence: Synthetic oligonucleotide
  Antisense strand to SEQ ID NO: 670230
uagcaacacaggaaauaaa

SEQ ID NO: 670232 - RNA, 19 nt, Artificial Sequence
  Description of Artificial Sequence: Synthetic oligonucleotide
  Sense strand starting at position 885 of SEQ ID NO: 585820
uuggacuuauuugaaauga

SEQ ID NO: 670233 - RNA, 19 nt, Artificial Sequence
  Description of Artificial Sequence: Synthetic oligonucleotide
  Antisense strand to SEQ ID NO: 670232
ucauuucaaauaaguccaa

SEQ ID NO: 670234 - RNA, 19 nt, Artificial Sequence
  Description of Artificial Sequence: Synthetic oligonucleotide
  Sense strand starting at position 1012 of SEQ ID NO: 585820
gcaagaagauauuccuuau

SEQ ID NO: 670235 - RNA, 19 nt, Artificial Sequence
  Description of Artificial Sequence: Synthetic oligonucleotide
  Antisense strand to SEQ ID NO: 670234
auaaggaauaucuucuugc

SEQ ID NO: 670236 - RNA, 19 nt, Artificial Sequence
  Description of Artificial Sequence: Synthetic oligonucleotide
  Sense strand starting at position 1015 of SEQ ID NO: 585820
agaagauauuccuuaugua

SEQ ID NO: 670237 - RNA, 19 nt, Artificial Sequence
  Description of Artificial Sequence: Synthetic oligonucleotide
  Antisense strand to SEQ ID NO: 670236
uacauaaggaauaucuucu

SEQ ID NO: 670238 - RNA, 19 nt, Artificial Sequence
  Description of Artificial Sequence: Synthetic oligonucleotide
  Sense strand starting at position 1062 of SEQ ID NO: 585820
ccaagugcucuauggagga

SEQ ID NO: 670239 - RNA, 19 nt, Artificial Sequence
  Description of Artificial Sequence: Synthetic oligonucleotide
  Antisense strand to SEQ ID NO: 670238
uccuccauagagcacuugg

SEQ ID NO: 670240 - RNA, 19 nt, Artificial Sequence
  Description of Artificial Sequence: Synthetic oligonucleotide
  Sense strand starting at position 1348 of SEQ ID NO: 585820
ggaacuguuaacgacuguu

SEQ ID NO: 670241 - RNA, 19 nt, Artificial Sequence
  Description of Artificial Sequence: Synthetic oligonucleotide
  Antisense strand to SEQ ID NO: 670240
aacagucguuaacaguucc

SEQ ID NO: 670242 - RNA, 19 nt, Artificial Sequence
  Description of Artificial Sequence: Synthetic oligonucleotide
  Sense strand starting at position 2145 of SEQ ID NO: 585820
aggugacaggugugugaaa

SEQ ID NO: 670243 - RNA, 19 nt, Artificial Sequence
  Description of Artificial Sequence: Synthetic oligonucleotide
  Antisense strand to SEQ ID NO: 670242
uuucacacaccugucaccu

SEQ ID NO: 670244 - RNA, 19 nt, Artificial Sequence
  Description of Artificial Sequence: Synthetic oligonucleotide
  Sense strand starting at position 2174 of SEQ ID NO: 585820
gagguaguucuguaaacug

SEQ ID NO: 670245 - RNA, 19 nt, Artificial Sequence
  Description of Artificial Sequence: Synthetic oligonucleotide
  Antisense strand to SEQ ID NO: 670244
caguuuacagaacuaccuc

SEQ ID NO: 670246 - RNA, 19 nt, Artificial Sequence
  Description of Artificial Sequence: Synthetic oligonucleotide
  Sense strand starting at position 2226 of SEQ ID NO: 585820
ggagcguugccgucuggga

SEQ ID NO: 670247 - RNA, 19 nt, Artificial Sequence
  Description of Artificial Sequence: Synthetic oligonucleotide
  Antisense strand to SEQ ID NO: 670246
ucccagacggcaacgcucc

SEQ ID NO: 670248 - RNA, 19 nt, Artificial Sequence
  Description of Artificial Sequence: Synthetic oligonucleotide
  Sense strand starting at position 2227 of SEQ ID NO: 585820
gagcguugccgucugggaa

SEQ ID NO: 670249 - RNA, 19 nt, Artificial Sequence
  Description of Artificial Sequence: Synthetic oligonucleotide
  Antisense strand to SEQ ID NO: 670248
uucccagacggcaacgcuc

SEQ ID NO: 670250 - RNA, 19 nt, Artificial Sequence
  Description of Artificial Sequence: Synthetic oligonucleotide
  Sense strand starting at position 2368 of SEQ ID NO: 585820
gcggcaacauuuguaacuu

SEQ ID NO: 670251 - RNA, 19 nt, Artificial Sequence
  Description of Artificial Sequence: Synthetic oligonucleotide
  Antisense strand to SEQ ID NO: 670250
aaguuacaaauguugccgc

SEQ ID NO: 670252 - RNA, 19 nt, Artificial Sequence
  Description of Artificial Sequence: Synthetic oligonucleotide
  Sense strand starting at position 2415 of SEQ ID NO: 585820
ccuuguguucuagauaagu

SEQ ID NO: 670253 - RNA, 19 nt, Artificial Sequence
  Description of Artificial Sequence: Synthetic oligonucleotide
  Antisense strand to SEQ ID NO: 670252
acuuaucuagaacacaagg

SEQ ID NO: 670254 - RNA, 19 nt, Artificial Sequence
  Description of Artificial Sequence: Synthetic oligonucleotide
  Sense strand starting at position 2417 of SEQ ID NO: 585820
uuguguucuagauaaguua

SEQ ID NO: 670255 - RNA, 19 nt, Artificial Sequence
  Description of Artificial Sequence: Synthetic oligonucleotide
  Antisense strand to SEQ ID NO: 670254
uaacuuaucuagaacacaa

SEQ ID NO: 670256 - RNA, 19 nt, Artificial Sequence
  Description of Artificial Sequence: Synthetic oligonucleotide
  Sense strand starting at position 2461 of SEQ ID NO: 585820
agucuugugccuguuccau

SEQ ID NO: 670257 - RNA, 19 nt, Artificial Sequence
  Description of Artificial Sequence: Synthetic oligonucleotide
  Antisense strand to SEQ ID NO: 670256
auggaacaggcacaagacu

SEQ ID NO: 670258 - RNA, 19 nt, Artificial Sequence
  Description of Artificial Sequence: Synthetic oligonucleotide
  Sense strand starting at position 2496 of SEQ ID NO: 585820
gguuguauuuacccagcca

SEQ ID NO: 670259 - RNA, 19 nt, Artificial Sequence
  Description of Artificial Sequence: Synthetic oligonucleotide
  Antisense strand to SEQ ID NO: 670258
uggcuggguaaauacaacc

SEQ ID NO: 670260 - RNA, 19 nt, Artificial Sequence
  Description of Artificial Sequence: Synthetic oligonucleotide
  Sense strand starting at position 2524 of SEQ ID NO: 585820
acuaaugaucuucgcacaa

SEQ ID NO: 670261 - RNA, 19 nt, Artificial Sequence
  Description of Artificial Sequence: Synthetic oligonucleotide
  Antisense strand to SEQ ID NO: 670260
uugugcgaagaucauuagu

SEQ ID NO: 670262 - RNA, 19 nt, Artificial Sequence
  Description of Artificial Sequence: Synthetic oligonucleotide
  Sense strand starting at position 2528 of SEQ ID NO: 585820
augaucuucgcacaacaaa

SEQ ID NO: 670263 - RNA, 19 nt, Artificial Sequence
  Description of Artificial Sequence: Synthetic oligonucleotide
  Antisense strand to SEQ ID NO: 670262
uuuguugugcgaagaucau

SEQ ID NO: 670264 - RNA, 19 nt, Artificial Sequence
  Description of Artificial Sequence: Synthetic oligonucleotide
  Sense strand starting at position 2916 of SEQ ID NO: 585820
ggauguuaauuagcuauca

SEQ ID NO: 670265 - RNA, 19 nt, Artificial Sequence
  Description of Artificial Sequence: Synthetic oligonucleotide
  Antisense strand to SEQ ID NO: 670264
ugauagcuaauuaacaucc

SEQ ID NO: 670266 - RNA, 19 nt, Artificial Sequence
  Description of Artificial Sequence: Synthetic oligonucleotide
  Sense strand starting at position 2977 of SEQ ID NO: 585820
ucaagauauguggauuggu

SEQ ID NO: 670267 - RNA, 19 nt, Artificial Sequence
  Description of Artificial Sequence: Synthetic oligonucleotide
  Antisense strand to SEQ ID NO: 670266
accaauccacauaucuuga

SEQ ID NO: 670268 - RNA, 19 nt, Artificial Sequence
  Description of Artificial Sequence: Synthetic oligonucleotide
  Sense strand starting at position 2980 of SEQ ID NO: 585820
agauauguggauugguuua

SEQ ID NO: 670269 - RNA, 19 nt, Artificial Sequence
  Description of Artificial Sequence: Synthetic oligonucleotide
  Antisense strand to SEQ ID NO: 670268
uaaaccaauccacauaucu

SEQ ID NO: 670270 - RNA, 19 nt, Artificial Sequence
  Description of Artificial Sequence: Synthetic oligonucleotide
  Sense strand starting at position 2982 of SEQ ID NO: 585820
auauguggauugguuuaaa

SEQ ID NO: 670271 - RNA, 19 nt, Artificial Sequence
  Description of Artificial Sequence: Synthetic oligonucleotide
  Antisense strand to SEQ ID NO: 670270
uuuaaaccaauccacauau

SEQ ID NO: 670272 - RNA, 19 nt, Artificial Sequence
  Description of Artificial Sequence: Synthetic oligonucleotide
  Sense strand starting at position 3124 of SEQ ID NO: 585820
accauugucuuguuaaaua

SEQ ID NO: 670273 - RNA, 19 nt, Artificial Sequence
  Description of Artificial Sequence: Synthetic oligonucleotide
  Antisense strand to SEQ ID NO: 670272
uauuuaacaagacaauggu

SEQ ID NO: 670274 - RNA, 19 nt, Artificial Sequence
  Description of Artificial Sequence: Synthetic oligonucleotide
  Sense strand starting at position 3150 of SEQ ID NO: 585820
agauauaucuggucuguua

SEQ ID NO: 670275 - RNA, 19 nt, Artificial Sequence
  Description of Artificial Sequence: Synthetic oligonucleotide
  Antisense strand to SEQ ID NO: 670274
uaacagaccagauauaucu

SEQ ID NO: 670276 - RNA, 19 nt, Artificial Sequence
  Description of Artificial Sequence: Synthetic oligonucleotide
  Sense strand starting at position 3163 of SEQ ID NO: 585820
cuguuaacauuguuggaac

SEQ ID NO: 670277 - RNA, 19 nt, Artificial Sequence
  Description of Artificial Sequence: Synthetic oligonucleotide
  Antisense strand to SEQ ID NO: 670276
guuccaacaauguuaacag

SEQ ID NO: 670278 - RNA, 19 nt, Artificial Sequence
  Description of Artificial Sequence: Synthetic oligonucleotide
  Sense strand starting at position 3165 of SEQ ID NO: 585820
guuaacauuguuggaacau

SEQ ID NO: 670279 - RNA, 19 nt, Artificial Sequence
  Description of Artificial Sequence: Synthetic oligonucleotide
  Antisense strand to SEQ ID NO: 670278
auguuccaacaauguuaac

SEQ ID NO: 670280 - RNA, 19 nt, Artificial Sequence
  Description of Artificial Sequence: Synthetic oligonucleotide
  Sense strand starting at position 3236 of SEQ ID NO: 585820
cagaguugacuuuguagag

SEQ ID NO: 670281 - RNA, 19 nt, Artificial Sequence
  Description of Artificial Sequence: Synthetic oligonucleotide
  Antisense strand to SEQ ID NO: 670280
cucuacaaagucaacucug

SEQ ID NO: 670282 - RNA, 19 nt, Artificial Sequence
  Description of Artificial Sequence: Synthetic oligonucleotide
  Sense strand starting at position 3316 of SEQ ID NO: 585820
gugugcucacuggugcuaa

SEQ ID NO: 670283 - RNA, 19 nt, Artificial Sequence
  Description of Artificial Sequence: Synthetic oligonucleotide
  Antisense strand to SEQ ID NO: 670282
uuagcaccagugagcacac

SEQ ID NO: 670284 - RNA, 19 nt, Artificial Sequence
  Description of Artificial Sequence: Synthetic oligonucleotide
  Sense strand starting at position 3507 of SEQ ID NO: 585820
gguuuaucuugucccauuu

SEQ ID NO: 670285 - RNA, 19 nt, Artificial Sequence
  Description of Artificial Sequence: Synthetic oligonucleotide
  Antisense strand to SEQ ID NO: 670284
aaaugggacaagauaaacc

SEQ ID NO: 670286 - RNA, 19 nt, Artificial Sequence
  Description of Artificial Sequence: Synthetic oligonucleotide
  Sense strand starting at position 3524 of SEQ ID NO: 585820
uuuggacuaucauuauagu

SEQ ID NO: 670287 - RNA, 19 nt, Artificial Sequence
  Description of Artificial Sequence: Synthetic oligonucleotide
  Antisense strand to SEQ ID NO: 670286
acuauaaugauaguccaaa

SEQ ID NO: 670288 - RNA, 19 nt, Artificial Sequence
  Description of Artificial Sequence: Synthetic oligonucleotide
  Sense strand starting at position 3982 of SEQ ID NO: 585820
auuaaaguggugggucaaa

SEQ ID NO: 670289 - RNA, 19 nt, Artificial Sequence
  Description of Artificial Sequence: Synthetic oligonucleotide
  Antisense strand to SEQ ID NO: 670288
uuugacccaccacuuuaau

SEQ ID NO: 670290 - RNA, 19 nt, Artificial Sequence
  Description of Artificial Sequence: Synthetic oligonucleotide
  Sense strand starting at position 150 of SEQ ID NO: 585821
ucaggauuaugccuaagug

SEQ ID NO: 670291 - RNA, 19 nt, Artificial Sequence
  Description of Artificial Sequence: Synthetic oligonucleotide
  Antisense strand to SEQ ID NO: 670290
cacuuaggcauaauccuga

SEQ ID NO: 670292 - RNA, 19 nt, Artificial Sequence
  Description of Artificial Sequence: Synthetic oligonucleotide
  Sense strand starting at position 151 of SEQ ID NO: 585821
caggauuaugccuaaguga

SEQ ID NO: 670293 - RNA, 19 nt, Artificial Sequence
  Description of Artificial Sequence: Synthetic oligonucleotide
  Antisense strand to SEQ ID NO: 670292
ucacuuaggcauaauccug

SEQ ID NO: 670294 - RNA, 19 nt, Artificial Sequence
  Description of Artificial Sequence: Synthetic oligonucleotide
  Sense strand starting at position 154 of SEQ ID NO: 585821
gauuaugccuaagugauuc

SEQ ID NO: 670295 - RNA, 19 nt, Artificial Sequence
  Description of Artificial Sequence: Synthetic oligonucleotide
  Antisense strand to SEQ ID NO: 670294
gaaucacuuaggcauaauc

SEQ ID NO: 670296 - RNA, 19 nt, Artificial Sequence
  Description of Artificial Sequence: Synthetic oligonucleotide
  Sense strand starting at position 191 of SEQ ID NO: 585821
uuugguuccucuguagaag

SEQ ID NO: 670297 - RNA, 19 nt, Artificial Sequence
  Description of Artificial Sequence: Synthetic oligonucleotide
  Antisense strand to SEQ ID NO: 670296
cuucuacagaggaaccaaa

SEQ ID NO: 670298 - RNA, 19 nt, Artificial Sequence
  Description of Artificial Sequence: Synthetic oligonucleotide
  Sense strand starting at position 192 of SEQ ID NO: 585821
uugguuccucuguagaagu

SEQ ID NO: 670299 - RNA, 19 nt, Artificial Sequence
  Description of Artificial Sequence: Synthetic oligonucleotide
  Antisense strand to SEQ ID NO: 670298
acuucuacagaggaaccaa

SEQ ID NO: 670300 - RNA, 19 nt, Artificial Sequence
  Description of Artificial Sequence: Synthetic oligonucleotide
  Sense strand starting at position 194 of SEQ ID NO: 585821
gguuccucuguagaaguuu

SEQ ID NO: 670301 - RNA, 19 nt, Artificial Sequence
  Description of Artificial Sequence: Synthetic oligonucleotide
  Antisense strand to SEQ ID NO: 670300
aaacuucuacagaggaacc

SEQ ID NO: 670302 - RNA, 19 nt, Artificial Sequence
  Description of Artificial Sequence: Synthetic oligonucleotide
  Sense strand starting at position 232 of SEQ ID NO: 585821
ggauucaccuuguagggaa

SEQ ID NO: 670303 - RNA, 19 nt, Artificial Sequence
  Description of Artificial Sequence: Synthetic oligonucleotide
  Antisense strand to SEQ ID NO: 670302
uucccuacaaggugaaucc

SEQ ID NO: 670304 - RNA, 19 nt, Artificial Sequence
  Description of Artificial Sequence: Synthetic oligonucleotide
  Sense strand starting at position 244 of SEQ ID NO: 585821
uagggaaucaacugugugu

SEQ ID NO: 670305 - RNA, 19 nt, Artificial Sequence
  Description of Artificial Sequence: Synthetic oligonucleotide
  Antisense strand to SEQ ID NO: 670304
acacacaguugauucccua

SEQ ID NO: 670306 - RNA, 19 nt, Artificial Sequence
  Description of Artificial Sequence: Synthetic oligonucleotide
  Sense strand starting at position 291 of SEQ ID NO: 585821
cucagaauuggguaucugu

SEQ ID NO: 670307 - RNA, 19 nt, Artificial Sequence
  Description of Artificial Sequence: Synthetic oligonucleotide
  Antisense strand to SEQ ID NO: 670306
acagauacccaauucugag

SEQ ID NO: 670308 - RNA, 19 nt, Artificial Sequence
  Description of Artificial Sequence: Synthetic oligonucleotide
  Sense strand starting at position 294 of SEQ ID NO: 585821
agaauuggguaucuguagu

SEQ ID NO: 670309 - RNA, 19 nt, Artificial Sequence
  Description of Artificial Sequence: Synthetic oligonucleotide
  Antisense strand to SEQ ID NO: 670308
acuacagauacccaauucu

SEQ ID NO: 670310 - RNA, 19 nt, Artificial Sequence
  Description of Artificial Sequence: Synthetic oligonucleotide
  Sense strand starting at position 433 of SEQ ID NO: 585821
guggguuuacaguauguga

SEQ ID NO: 670311 - RNA, 19 nt, Artificial Sequence
  Description of Artificial Sequence: Synthetic oligonucleotide
  Antisense strand to SEQ ID NO: 670310
ucacauacuguaaacccac

SEQ ID NO: 670312 - RNA, 19 nt, Artificial Sequence
  Description of Artificial Sequence: Synthetic oligonucleotide
  Sense strand starting at position 435 of SEQ ID NO: 585821
ggguuuacaguaugugaga

SEQ ID NO: 670313 - RNA, 19 nt, Artificial Sequence
  Description of Artificial Sequence: Synthetic oligonucleotide
  Antisense strand to SEQ ID NO: 670312
ucucacauacuguaaaccc

SEQ ID NO: 670314 - RNA, 19 nt, Artificial Sequence
  Description of Artificial Sequence: Synthetic oligonucleotide
  Sense strand starting at position 437 of SEQ ID NO: 585821
guuuacaguaugugagaca

SEQ ID NO: 670315 - RNA, 19 nt, Artificial Sequence
  Description of Artificial Sequence: Synthetic oligonucleotide
  Antisense strand to SEQ ID NO: 670314
ugucucacauacuguaaac

SEQ ID NO: 670316 - RNA, 19 nt, Artificial Sequence
  Description of Artificial Sequence: Synthetic oligonucleotide
  Sense strand starting at position 472 of SEQ ID NO: 585821
guauaauaacggcacagua

SEQ ID NO: 670317 - RNA, 19 nt, Artificial Sequence
  Description of Artificial Sequence: Synthetic oligonucleotide
  Antisense strand to SEQ ID NO: 670316
uacugugccguuauuauac

SEQ ID NO: 670318 - RNA, 19 nt, Artificial Sequence
  Description of Artificial Sequence: Synthetic oligonucleotide
  Sense strand starting at position 675 of SEQ ID NO: 585821
ccagcaaagcucugggacu

SEQ ID NO: 670319 - RNA, 19 nt, Artificial Sequence
  Description of Artificial Sequence: Synthetic oligonucleotide
  Antisense strand to SEQ ID NO: 670318
agucccagagcuuugcugg

SEQ ID NO: 670320 - RNA, 19 nt, Artificial Sequence
  Description of Artificial Sequence: Synthetic oligonucleotide
  Sense strand starting at position 681 of SEQ ID NO: 585821
aagcucugggacugguaaa

SEQ ID NO: 670321 - RNA, 19 nt, Artificial Sequence
  Description of Artificial Sequence: Synthetic oligonucleotide
  Antisense strand to SEQ ID NO: 670320
uuuaccagucccagagcuu

SEQ ID NO: 670322 - RNA, 19 nt, Artificial Sequence
  Description of Artificial Sequence: Synthetic oligonucleotide
  Sense strand starting at position 1049 of SEQ ID NO: 585821
uuggacugcuggccaaaua

SEQ ID NO: 670323 - RNA, 19 nt, Artificial Sequence
  Description of Artificial Sequence: Synthetic oligonucleotide
  Antisense strand to SEQ ID NO: 670322
uauuuggccagcaguccaa

SEQ ID NO: 670324 - RNA, 19 nt, Artificial Sequence
  Description of Artificial Sequence: Synthetic oligonucleotide
  Sense strand starting at position 1126 of SEQ ID NO: 585821
aguucuuccgccugaagua

SEQ ID NO: 670325 - RNA, 19 nt, Artificial Sequence
  Description of Artificial Sequence: Synthetic oligonucleotide
  Antisense strand to SEQ ID NO: 670324
uacuucaggcggaagaacu

SEQ ID NO: 670326 - RNA, 19 nt, Artificial Sequence
  Description of Artificial Sequence: Synthetic oligonucleotide
  Sense strand starting at position 1211 of SEQ ID NO: 585821
gaaccauagcuggguccau

SEQ ID NO: 670327 - RNA, 19 nt, Artificial Sequence
  Description of Artificial Sequence: Synthetic oligonucleotide
  Antisense strand to SEQ ID NO: 670326
auggacccagcuaugguuc

SEQ ID NO: 670328 - RNA, 19 nt, Artificial Sequence
  Description of Artificial Sequence: Synthetic oligonucleotide
  Sense strand starting at position 1299 of SEQ ID NO: 585821
gcccaccaucuguaaggaa

SEQ ID NO: 670329 - RNA, 19 nt, Artificial Sequence
  Description of Artificial Sequence: Synthetic oligonucleotide
  Antisense strand to SEQ ID NO: 670328
uuccuuacagauggugggc

SEQ ID NO: 670330 - RNA, 19 nt, Artificial Sequence
  Description of Artificial Sequence: Synthetic oligonucleotide
  Sense strand starting at position 2183 of SEQ ID NO: 585821
agaggucauggugaccauu

SEQ ID NO: 670331 - RNA, 19 nt, Artificial Sequence
  Description of Artificial Sequence: Synthetic oligonucleotide
  Antisense strand to SEQ ID NO: 670330
aauggucaccaugaccucu

SEQ ID NO: 670332 - RNA, 19 nt, Artificial Sequence
  Description of Artificial Sequence: Synthetic oligonucleotide
  Sense strand starting at position 2243 of SEQ ID NO: 585821
cgcuccucuguguuaguuu

SEQ ID NO: 670333 - RNA, 19 nt, Artificial Sequence
  Description of Artificial Sequence: Synthetic oligonucleotide
  Antisense strand to SEQ ID NO: 670332
aaacuaacacagaggagcg

SEQ ID NO: 670334 - RNA, 19 nt, Artificial Sequence
  Description of Artificial Sequence: Synthetic oligonucleotide
  Sense strand starting at position 2281 of SEQ ID NO: 585821
gaaggugucuccuugcuuu

SEQ ID NO: 670335 - RNA, 19 nt, Artificial Sequence
  Description of Artificial Sequence: Synthetic oligonucleotide
  Antisense strand to SEQ ID NO: 670334
aaagcaaggagacaccuuc

SEQ ID NO: 670336 - RNA, 19 nt, Artificial Sequence
  Description of Artificial Sequence: Synthetic oligonucleotide
  Sense strand starting at position 2296 of SEQ ID NO: 585821
cuuuguuggcuggguagua

SEQ ID NO: 670337 - RNA, 19 nt, Artificial Sequence
  Description of Artificial Sequence: Synthetic oligonucleotide
  Antisense strand to SEQ ID NO: 670336
uacuacccagccaacaaag

SEQ ID NO: 670338 - RNA, 19 nt, Artificial Sequence
  Description of Artificial Sequence: Synthetic oligonucleotide
  Sense strand starting at position 2297 of SEQ ID NO: 585821
uuuguuggcuggguaguaa

SEQ ID NO: 670339 - RNA, 19 nt, Artificial Sequence
  Description of Artificial Sequence: Synthetic oligonucleotide
  Antisense strand to SEQ ID NO: 670338
uuacuacccagccaacaaa

SEQ ID NO: 670340 - RNA, 19 nt, Artificial Sequence
  Description of Artificial Sequence: Synthetic oligonucleotide
  Sense strand starting at position 2308 of SEQ ID NO: 585821
gguaguaauucugucccac

SEQ ID NO: 670341 - RNA, 19 nt, Artificial Sequence
  Description of Artificial Sequence: Synthetic oligonucleotide
  Antisense strand to SEQ ID NO: 670340
gugggacagaauuacuacc

SEQ ID NO: 670342 - RNA, 19 nt, Artificial Sequence
  Description of Artificial Sequence: Synthetic oligonucleotide
  Sense strand starting at position 2331 of SEQ ID NO: 585821
caugaucuucgaggcucua

SEQ ID NO: 670343 - RNA, 19 nt, Artificial Sequence
  Description of Artificial Sequence: Synthetic oligonucleotide
  Antisense strand to SEQ ID NO: 670342
uagagccucgaagaucaug

SEQ ID NO: 670344 - RNA, 19 nt, Artificial Sequence
  Description of Artificial Sequence: Synthetic oligonucleotide
  Sense strand starting at position 2477 of SEQ ID NO: 585821
caucccaguugagaugaua

SEQ ID NO: 670345 - RNA, 19 nt, Artificial Sequence
  Description of Artificial Sequence: Synthetic oligonucleotide
  Antisense strand to SEQ ID NO: 670344
uaucaucucaacugggaug

SEQ ID NO: 670346 - RNA, 19 nt, Artificial Sequence
  Description of Artificial Sequence: Synthetic oligonucleotide
  Sense strand starting at position 2489 of SEQ ID NO: 585821
gaugauacuccucaggcga

SEQ ID NO: 670347 - RNA, 19 nt, Artificial Sequence
  Description of Artificial Sequence: Synthetic oligonucleotide
  Antisense strand to SEQ ID NO: 670346
ucgccugaggaguaucauc

SEQ ID NO: 670348 - RNA, 19 nt, Artificial Sequence
  Description of Artificial Sequence: Synthetic oligonucleotide
  Sense strand starting at position 2661 of SEQ ID NO: 585821
cgcuccaaguggucagaga

SEQ ID NO: 670349 - RNA, 19 nt, Artificial Sequence
  Description of Artificial Sequence: Synthetic oligonucleotide
  Antisense strand to SEQ ID NO: 670348
ucucugaccacuuggagcg

SEQ ID NO: 670350 - RNA, 19 nt, Artificial Sequence
  Description of Artificial Sequence: Synthetic oligonucleotide
  Sense strand starting at position 2675 of SEQ ID NO: 585821
agagacugugcugguuuau

SEQ ID NO: 670351 - RNA, 19 nt, Artificial Sequence
  Description of Artificial Sequence: Synthetic oligonucleotide
  Antisense strand to SEQ ID NO: 670350
auaaaccagcacagucucu

SEQ ID NO: 670352 - RNA, 19 nt, Artificial Sequence
  Description of Artificial Sequence: Synthetic oligonucleotide
  Sense strand starting at position 2863 of SEQ ID NO: 585821
gcguguguccucucauucu

SEQ ID NO: 670353 - RNA, 19 nt, Artificial Sequence
  Description of Artificial Sequence: Synthetic oligonucleotide
  Antisense strand to SEQ ID NO: 670352
agaaugagaggacacacgc

SEQ ID NO: 670354 - RNA, 19 nt, Artificial Sequence
  Description of Artificial Sequence: Synthetic oligonucleotide
  Sense strand starting at position 3140 of SEQ ID NO: 585821
agugucauguuacugaaac

SEQ ID NO: 670355 - RNA, 19 nt, Artificial Sequence
  Description of Artificial Sequence: Synthetic oligonucleotide
  Antisense strand to SEQ ID NO: 670354
guuucaguaacaugacacu

SEQ ID NO: 670356 - RNA, 19 nt, Artificial Sequence
  Description of Artificial Sequence: Synthetic oligonucleotide
  Sense strand starting at position 3184 of SEQ ID NO: 585821
gagccuucugugugaaguc

SEQ ID NO: 670357 - RNA, 19 nt, Artificial Sequence
  Description of Artificial Sequence: Synthetic oligonucleotide
  Antisense strand to SEQ ID NO: 670356
gacuucacacagaaggcuc

SEQ ID NO: 670358 - RNA, 19 nt, Artificial Sequence
  Description of Artificial Sequence: Synthetic oligonucleotide
  Sense strand starting at position 3193 of SEQ ID NO: 585821
gugugaagucuuuaaacaa

SEQ ID NO: 670359 - RNA, 19 nt, Artificial Sequence
  Description of Artificial Sequence: Synthetic oligonucleotide
  Antisense strand to SEQ ID NO: 670358
uuguuuaaagacuucacac

SEQ ID NO: 670360 - RNA, 19 nt, Artificial Sequence
  Description of Artificial Sequence: Synthetic oligonucleotide
  Sense strand starting at position 3583 of SEQ ID NO: 585821
gcaguuauggcuccggcuu

SEQ ID NO: 670361 - RNA, 19 nt, Artificial Sequence
  Description of Artificial Sequence: Synthetic oligonucleotide
  Antisense strand to SEQ ID NO: 670360
aagccggagccauaacugc

SEQ ID NO: 670362 - RNA, 19 nt, Artificial Sequence
  Description of Artificial Sequence: Synthetic oligonucleotide
  Sense strand starting at position 3661 of SEQ ID NO: 585821
agcagcaguuucccugaga

SEQ ID NO: 670363 - RNA, 19 nt, Artificial Sequence
  Description of Artificial Sequence: Synthetic oligonucleotide
  Antisense strand to SEQ ID NO: 670362
ucucagggaaacugcugcu

SEQ ID NO: 670364 - RNA, 19 nt, Artificial Sequence
  Description of Artificial Sequence: Synthetic oligonucleotide
  Sense strand starting at position 3662 of SEQ ID NO: 585821
gcagcaguuucccugagau

SEQ ID NO: 670365 - RNA, 19 nt, Artificial Sequence
  Description of Artificial Sequence: Synthetic oligonucleotide
  Antisense strand to SEQ ID NO: 670364
aucucagggaaacugcugc

SEQ ID NO: 670366 - RNA, 19 nt, Artificial Sequence
  Description of Artificial Sequence: Synthetic oligonucleotide
  Sense strand starting at position 3664 of SEQ ID NO: 585821
agcaguuucccugagaucu

SEQ ID NO: 670367 - RNA, 19 nt, Artificial Sequence
  Description of Artificial Sequence: Synthetic oligonucleotide
  Antisense strand to SEQ ID NO: 670366
agaucucagggaaacugcu

SEQ ID NO: 670368 - RNA, 19 nt, Artificial Sequence
  Description of Artificial Sequence: Synthetic oligonucleotide
  Sense strand starting at position 3921 of SEQ ID NO: 585821
cuaagauaaugccagaaua

SEQ ID NO: 670369 - RNA, 19 nt, Artificial Sequence
  Description of Artificial Sequence: Synthetic oligonucleotide
  Antisense strand to SEQ ID NO: 670368
uauucuggcauuaucuuag

SEQ ID NO: 670370 - RNA, 19 nt, Artificial Sequence
  Description of Artificial Sequence: Synthetic oligonucleotide
  Sense strand starting at position 37 of SEQ ID NO: 585822
acuuaagagcuucguauug

SEQ ID NO: 670371 - RNA, 19 nt, Artificial Sequence
  Description of Artificial Sequence: Synthetic oligonucleotide
  Antisense strand to SEQ ID NO: 670370
caauacgaagcucuuaagu

SEQ ID NO: 670372 - RNA, 19 nt, Artificial Sequence
  Description of Artificial Sequence: Synthetic oligonucleotide
  Sense strand starting at position 369 of SEQ ID NO: 585822
ucaggauuaugccuaagug

SEQ ID NO: 670373 - RNA, 19 nt, Artificial Sequence
  Description of Artificial Sequence: Synthetic oligonucleotide
  Antisense strand to SEQ ID NO: 670372
cacuuaggcauaauccuga

SEQ ID NO: 670374 - RNA, 19 nt, Artificial Sequence
  Description of Artificial Sequence: Synthetic oligonucleotide
  Sense strand starting at position 370 of SEQ ID NO: 585822
caggauuaugccuaaguga

SEQ ID NO: 670375 - RNA, 19 nt, Artificial Sequence
  Description of Artificial Sequence: Synthetic oligonucleotide
  Antisense strand to SEQ ID NO: 670374
ucacuuaggcauaauccug

SEQ ID NO: 670376 - RNA, 19 nt, Artificial Sequence
  Description of Artificial Sequence: Synthetic oligonucleotide
  Sense strand starting at position 373 of SEQ ID NO: 585822
gauuaugccuaagugauuc

SEQ ID NO: 670377 - RNA, 19 nt, Artificial Sequence
  Description of Artificial Sequence: Synthetic oligonucleotide
  Antisense strand to SEQ ID NO: 670376
gaaucacuuaggcauaauc

SEQ ID NO: 670378 - RNA, 19 nt, Artificial Sequence
  Description of Artificial Sequence: Synthetic oligonucleotide
  Sense strand starting at position 410 of SEQ ID NO: 585822
uuugguuccucuguagaag

SEQ ID NO: 670379 - RNA, 19 nt, Artificial Sequence
  Description of Artificial Sequence: Synthetic oligonucleotide
  Antisense strand to SEQ ID NO: 670378
cuucuacagaggaaccaaa

SEQ ID NO: 670380 - RNA, 19 nt, Artificial Sequence
  Description of Artificial Sequence: Synthetic oligonucleotide
  Sense strand starting at position 411 of SEQ ID NO: 585822
uugguuccucuguagaagu

SEQ ID NO: 670381 - RNA, 19 nt, Artificial Sequence
  Description of Artificial Sequence: Synthetic oligonucleotide
  Antisense strand to SEQ ID NO: 670380
acuucuacagaggaaccaa

SEQ ID NO: 670382 - RNA, 19 nt, Artificial Sequence
  Description of Artificial Sequence: Synthetic oligonucleotide
  Sense strand starting at position 413 of SEQ ID NO: 585822
gguuccucuguagaaguuu

SEQ ID NO: 670383 - RNA, 19 nt, Artificial Sequence
  Description of Artificial Sequence: Synthetic oligonucleotide
  Antisense strand to SEQ ID NO: 670382
aaacuucuacagaggaacc

SEQ ID NO: 670384 - RNA, 19 nt, Artificial Sequence
  Description of Artificial Sequence: Synthetic oligonucleotide
  Sense strand starting at position 451 of SEQ ID NO: 585822
ggauucaccuuguagggaa

SEQ ID NO: 670385 - RNA, 19 nt, Artificial Sequence
  Description of Artificial Sequence: Synthetic oligonucleotide
  Antisense strand to SEQ ID NO: 670384
uucccuacaaggugaaucc

SEQ ID NO: 670386 - RNA, 19 nt, Artificial Sequence
  Description of Artificial Sequence: Synthetic oligonucleotide
  Sense strand starting at position 463 of SEQ ID NO: 585822
uagggaaucaacugugugu

SEQ ID NO: 670387 - RNA, 19 nt, Artificial Sequence
  Description of Artificial Sequence: Synthetic oligonucleotide
  Antisense strand to SEQ ID NO: 670386
acacacaguugauucccua

SEQ ID NO: 670388 - RNA, 19 nt, Artificial Sequence
  Description of Artificial Sequence: Synthetic oligonucleotide
  Sense strand starting at position 510 of SEQ ID NO: 585822
cucagaauuggguaucugu

SEQ ID NO: 670389 - RNA, 19 nt, Artificial Sequence
  Description of Artificial Sequence: Synthetic oligonucleotide
  Antisense strand to SEQ ID NO: 670388
acagauacccaauucugag

SEQ ID NO: 670390 - RNA, 19 nt, Artificial Sequence
  Description of Artificial Sequence: Synthetic oligonucleotide
  Sense strand starting at position 513 of SEQ ID NO: 585822
agaauuggguaucuguagu

SEQ ID NO: 670391 - RNA, 19 nt, Artificial Sequence
  Description of Artificial Sequence: Synthetic oligonucleotide
  Antisense strand to SEQ ID NO: 670390
acuacagauacccaauucu

SEQ ID NO: 670392 - RNA, 19 nt, Artificial Sequence
  Description of Artificial Sequence: Synthetic oligonucleotide
  Sense strand starting at position 652 of SEQ ID NO: 585822
guggguuuacaguauguga

SEQ ID NO: 670393 - RNA, 19 nt, Artificial Sequence
  Description of Artificial Sequence: Synthetic oligonucleotide
  Antisense strand to SEQ ID NO: 670392
ucacauacuguaaacccac

SEQ ID NO: 670394 - RNA, 19 nt, Artificial Sequence
  Description of Artificial Sequence: Synthetic oligonucleotide
  Sense strand starting at position 654 of SEQ ID NO: 585822
ggguuuacaguaugugaga

SEQ ID NO: 670395 - RNA, 19 nt, Artificial Sequence
  Description of Artificial Sequence: Synthetic oligonucleotide
  Antisense strand to SEQ ID NO: 670394
ucucacauacuguaaaccc

SEQ ID NO: 670396 - RNA, 19 nt, Artificial Sequence
  Description of Artificial Sequence: Synthetic oligonucleotide
  Sense strand starting at position 656 of SEQ ID NO: 585822
guuuacaguaugugagaca

SEQ ID NO: 670397 - RNA, 19 nt, Artificial Sequence
  Description of Artificial Sequence: Synthetic oligonucleotide
  Antisense strand to SEQ ID NO: 670396
ugucucacauacuguaaac

SEQ ID NO: 670398 - RNA, 19 nt, Artificial Sequence
  Description of Artificial Sequence: Synthetic oligonucleotide
  Sense strand starting at position 691 of SEQ ID NO: 585822
guauaauaacggcacagua

SEQ ID NO: 670399 - RNA, 19 nt, Artificial Sequence
  Description of Artificial Sequence: Synthetic oligonucleotide
  Antisense strand to SEQ ID NO: 670398
uacugugccguuauuauac

SEQ ID NO: 670400 - RNA, 19 nt, Artificial Sequence
  Description of Artificial Sequence: Synthetic oligonucleotide
  Sense strand starting at position 894 of SEQ ID NO: 585822
ccagcaaagcucugggacu

SEQ ID NO: 670401 - RNA, 19 nt, Artificial Sequence
  Description of Artificial Sequence: Synthetic oligonucleotide
  Antisense strand to SEQ ID NO: 670400
agucccagagcuuugcugg

SEQ ID NO: 670402 - RNA, 19 nt, Artificial Sequence
  Description of Artificial Sequence: Synthetic oligonucleotide
  Sense strand starting at position 900 of SEQ ID NO: 585822
aagcucugggacugguaaa

SEQ ID NO: 670403 - RNA, 19 nt, Artificial Sequence
  Description of Artificial Sequence: Synthetic oligonucleotide
  Antisense strand to SEQ ID NO: 670402
uuuaccagucccagagcuu

SEQ ID NO: 670404 - RNA, 19 nt, Artificial Sequence
  Description of Artificial Sequence: Synthetic oligonucleotide
  Sense strand starting at position 1268 of SEQ ID NO: 585822
uuggacugcuggccaaaua

SEQ ID NO: 670405 - RNA, 19 nt, Artificial Sequence
  Description of Artificial Sequence: Synthetic oligonucleotide
  Antisense strand to SEQ ID NO: 670404
uauuuggccagcaguccaa

SEQ ID NO: 670406 - RNA, 19 nt, Artificial Sequence
  Description of Artificial Sequence: Synthetic oligonucleotide
  Sense strand starting at position 1345 of SEQ ID NO: 585822
aguucuuccgccugaagua

SEQ ID NO: 670407 - RNA, 19 nt, Artificial Sequence
  Description of Artificial Sequence: Synthetic oligonucleotide
  Antisense strand to SEQ ID NO: 670406
uacuucaggcggaagaacu

SEQ ID NO: 670408 - RNA, 19 nt, Artificial Sequence
  Description of Artificial Sequence: Synthetic oligonucleotide
  Sense strand starting at position 1430 of SEQ ID NO: 585822
gaaccauagcuggguccau

SEQ ID NO: 670409 - RNA, 19 nt, Artificial Sequence
  Description of Artificial Sequence: Synthetic oligonucleotide
  Antisense strand to SEQ ID NO: 670408
auggacccagcuaugguuc

SEQ ID NO: 670410 - RNA, 19 nt, Artificial Sequence
  Description of Artificial Sequence: Synthetic oligonucleotide
  Sense strand starting at position 1518 of SEQ ID NO: 585822
gcccaccaucuguaaggaa

SEQ ID NO: 670411 - RNA, 19 nt, Artificial Sequence
  Description of Artificial Sequence: Synthetic oligonucleotide
  Antisense strand to SEQ ID NO: 670410
uuccuuacagauggugggc

SEQ ID NO: 670412 - RNA, 19 nt, Artificial Sequence
  Description of Artificial Sequence: Synthetic oligonucleotide
  Sense strand starting at position 2402 of SEQ ID NO: 585822
agaggucauggugaccauu

SEQ ID NO: 670413 - RNA, 19 nt, Artificial Sequence
  Description of Artificial Sequence: Synthetic oligonucleotide
  Antisense strand to SEQ ID NO: 670412
aauggucaccaugaccucu

SEQ ID NO: 670414 - RNA, 19 nt, Artificial Sequence
  Description of Artificial Sequence: Synthetic oligonucleotide
  Sense strand starting at position 2462 of SEQ ID NO: 585822
cgcuccucuguguuaguuu

SEQ ID NO: 670415 - RNA, 19 nt, Artificial Sequence
  Description of Artificial Sequence: Synthetic oligonucleotide
  Antisense strand to SEQ ID NO: 670414
aaacuaacacagaggagcg

SEQ ID NO: 670416 - RNA, 19 nt, Artificial Sequence
  Description of Artificial Sequence: Synthetic oligonucleotide
  Sense strand starting at position 2500 of SEQ ID NO: 585822
gaaggugucuccuugcuuu

SEQ ID NO: 670417 - RNA, 19 nt, Artificial Sequence
  Description of Artificial Sequence: Synthetic oligonucleotide
  Antisense strand to SEQ ID NO: 670416
aaagcaaggagacaccuuc

SEQ ID NO: 670418 - RNA, 19 nt, Artificial Sequence
  Description of Artificial Sequence: Synthetic oligonucleotide
  Sense strand starting at position 2515 of SEQ ID NO: 585822
cuuuguuggcuggguagua

SEQ ID NO: 670419 - RNA, 19 nt, Artificial Sequence
  Description of Artificial Sequence: Synthetic oligonucleotide
  Antisense strand to SEQ ID NO: 670418
uacuacccagccaacaaag

SEQ ID NO: 670420 - RNA, 19 nt, Artificial Sequence
  Description of Artificial Sequence: Synthetic oligonucleotide
  Sense strand starting at position 2516 of SEQ ID NO: 585822
uuuguuggcuggguaguaa

SEQ ID NO: 670421 - RNA, 19 nt, Artificial Sequence
  Description of Artificial Sequence: Synthetic oligonucleotide
  Antisense strand to SEQ ID NO: 670420
uuacuacccagccaacaaa

SEQ ID NO: 670422 - RNA, 19 nt, Artificial Sequence
  Description of Artificial Sequence: Synthetic oligonucleotide
  Sense strand starting at position 2527 of SEQ ID NO: 585822
gguaguaauucugucccac

SEQ ID NO: 670423 - RNA, 19 nt, Artificial Sequence
  Description of Artificial Sequence: Synthetic oligonucleotide
  Antisense strand to SEQ ID NO: 670422
gugggacagaauuacuacc

SEQ ID NO: 670424 - RNA, 19 nt, Artificial Sequence
  Description of Artificial Sequence: Synthetic oligonucleotide
  Sense strand starting at position 2550 of SEQ ID NO: 585822
caugaucuucgaggcucua

SEQ ID NO: 670425 - RNA, 19 nt, Artificial Sequence
  Description of Artificial Sequence: Synthetic oligonucleotide
  Antisense strand to SEQ ID NO: 670424
uagagccucgaagaucaug

SEQ ID NO: 670426 - RNA, 19 nt, Artificial Sequence
  Description of Artificial Sequence: Synthetic oligonucleotide
  Sense strand starting at position 2696 of SEQ ID NO: 585822
caucccaguugagaugaua

SEQ ID NO: 670427 - RNA, 19 nt, Artificial Sequence
  Description of Artificial Sequence: Synthetic oligonucleotide
  Antisense strand to SEQ ID NO: 670426
uaucaucucaacugggaug

SEQ ID NO: 670428 - RNA, 19 nt, Artificial Sequence
  Description of Artificial Sequence: Synthetic oligonucleotide
  Sense strand starting at position 2708 of SEQ ID NO: 585822
gaugauacuccucaggcga

SEQ ID NO: 670429 - RNA, 19 nt, Artificial Sequence
  Description of Artificial Sequence: Synthetic oligonucleotide
  Antisense strand to SEQ ID NO: 670428
ucgccugaggaguaucauc

SEQ ID NO: 670430 - RNA, 19 nt, Artificial Sequence
  Description of Artificial Sequence: Synthetic oligonucleotide
  Sense strand starting at position 2880 of SEQ ID NO: 585822
cgcuccaaguggucagaga

SEQ ID NO: 670431 - RNA, 19 nt, Artificial Sequence
  Description of Artificial Sequence: Synthetic oligonucleotide
  Antisense strand to SEQ ID NO: 670430
ucucugaccacuuggagcg

SEQ ID NO: 670432 - RNA, 19 nt, Artificial Sequence
  Description of Artificial Sequence: Synthetic oligonucleotide
  Sense strand starting at position 2894 of SEQ ID NO: 585822
agagacugugcugguuuau

SEQ ID NO: 670433 - RNA, 19 nt, Artificial Sequence
  Description of Artificial Sequence: Synthetic oligonucleotide
  Antisense strand to SEQ ID NO: 670432
auaaaccagcacagucucu

SEQ ID NO: 670434 - RNA, 19 nt, Artificial Sequence
  Description of Artificial Sequence: Synthetic oligonucleotide
  Sense strand starting at position 3082 of SEQ ID NO: 585822
gcguguguccucucauucu

SEQ ID NO: 670435 - RNA, 19 nt, Artificial Sequence
  Description of Artificial Sequence: Synthetic oligonucleotide
  Antisense strand to SEQ ID NO: 670434
agaaugagaggacacacgc

SEQ ID NO: 670436 - RNA, 19 nt, Artificial Sequence
  Description of Artificial Sequence: Synthetic oligonucleotide
  Sense strand starting at position 3359 of SEQ ID NO: 585822
agugucauguuacugaaac

SEQ ID NO: 670437 - RNA, 19 nt, Artificial Sequence
  Description of Artificial Sequence: Synthetic oligonucleotide
  Antisense strand to SEQ ID NO: 670436
guuucaguaacaugacacu

SEQ ID NO: 670438 - RNA, 19 nt, Artificial Sequence
  Description of Artificial Sequence: Synthetic oligonucleotide
  Sense strand starting at position 3403 of SEQ ID NO: 585822
gagccuucugugugaaguc

SEQ ID NO: 670439 - RNA, 19 nt, Artificial Sequence
  Description of Artificial Sequence: Synthetic oligonucleotide
  Antisense strand to SEQ ID NO: 670438
gacuucacacagaaggcuc

SEQ ID NO: 670440 - RNA, 19 nt, Artificial Sequence
  Description of Artificial Sequence: Synthetic oligonucleotide
  Sense strand starting at position 3412 of SEQ ID NO: 585822
gugugaagucuuuaaacaa

SEQ ID NO: 670441 - RNA, 19 nt, Artificial Sequence
  Description of Artificial Sequence: Synthetic oligonucleotide
  Antisense strand to SEQ ID NO: 670440
uuguuuaaagacuucacac

SEQ ID NO: 670442 - RNA, 19 nt, Artificial Sequence
  Description of Artificial Sequence: Synthetic oligonucleotide
  Sense strand starting at position 3802 of SEQ ID NO: 585822
gcaguuauggcuccggcuu

SEQ ID NO: 670443 - RNA, 19 nt, Artificial Sequence
  Description of Artificial Sequence: Synthetic oligonucleotide
  Antisense strand to SEQ ID NO: 670442
aagccggagccauaacugc

SEQ ID NO: 670444 - RNA, 19 nt, Artificial Sequence
  Description of Artificial Sequence: Synthetic oligonucleotide
  Sense strand starting at position 3880 of SEQ ID NO: 585822
agcagcaguuucccugaga

SEQ ID NO: 670445 - RNA, 19 nt, Artificial Sequence
  Description of Artificial Sequence: Synthetic oligonucleotide
  Antisense strand to SEQ ID NO: 670444
ucucagggaaacugcugcu

SEQ ID NO: 670446 - RNA, 19 nt, Artificial Sequence
  Description of Artificial Sequence: Synthetic oligonucleotide
  Sense strand starting at position 3881 of SEQ ID NO: 585822
gcagcaguuucccugagau

SEQ ID NO: 670447 - RNA, 19 nt, Artificial Sequence
  Description of Artificial Sequence: Synthetic oligonucleotide
  Antisense strand to SEQ ID NO: 670446
aucucagggaaacugcugc

SEQ ID NO: 670448 - RNA, 19 nt, Artificial Sequence
  Description of Artificial Sequence: Synthetic oligonucleotide
  Sense strand starting at position 3883 of SEQ ID NO: 585822
agcaguuucccugagaucu

SEQ ID NO: 670449 - RNA, 19 nt, Artificial Sequence
  Description of Artificial Sequence: Synthetic oligonucleotide
  Antisense strand to SEQ ID NO: 670448
agaucucagggaaacugcu

SEQ ID NO: 670450 - RNA, 19 nt, Artificial Sequence
  Description of Artificial Sequence: Synthetic oligonucleotide
  Sense strand starting at position 114 of SEQ ID NO: 585823
guggguuuacaguauguga

SEQ ID NO: 670451 - RNA, 19 nt, Artificial Sequence
  Description of Artificial Sequence: Synthetic oligonucleotide
  Antisense strand to SEQ ID NO: 670450
ucacauacuguaaacccac

SEQ ID NO: 670452 - RNA, 19 nt, Artificial Sequence
  Description of Artificial Sequence: Synthetic oligonucleotide
  Sense strand starting at position 116 of SEQ ID NO: 585823
ggguuuacaguaugugaga

SEQ ID NO: 670453 - RNA, 19 nt, Artificial Sequence
  Description of Artificial Sequence: Synthetic oligonucleotide
  Antisense strand to SEQ ID NO: 670452
ucucacauacuguaaaccc

SEQ ID NO: 670454 - RNA, 19 nt, Artificial Sequence
  Description of Artificial Sequence: Synthetic oligonucleotide
  Sense strand starting at position 118 of SEQ ID NO: 585823
guuuacaguaugugagaca

SEQ ID NO: 670455 - RNA, 19 nt, Artificial Sequence
  Description of Artificial Sequence: Synthetic oligonucleotide
  Antisense strand to SEQ ID NO: 670454
ugucucacauacuguaaac

SEQ ID NO: 670456 - RNA, 19 nt, Artificial Sequence
  Description of Artificial Sequence: Synthetic oligonucleotide
  Sense strand starting at position 153 of SEQ ID NO: 585823
guauaauaacggcacagua

SEQ ID NO: 670457 - RNA, 19 nt, Artificial Sequence
  Description of Artificial Sequence: Synthetic oligonucleotide
  Antisense strand to SEQ ID NO: 670456
uacugugccguuauuauac

SEQ ID NO: 670458 - RNA, 19 nt, Artificial Sequence
  Description of Artificial Sequence: Synthetic oligonucleotide
  Sense strand starting at position 356 of SEQ ID NO: 585823
ccagcaaagcucugggacu

SEQ ID NO: 670459 - RNA, 19 nt, Artificial Sequence
  Description of Artificial Sequence: Synthetic oligonucleotide
  Antisense strand to SEQ ID NO: 670458
agucccagagcuuugcugg

SEQ ID NO: 670460 - RNA, 19 nt, Artificial Sequence
  Description of Artificial Sequence: Synthetic oligonucleotide
  Sense strand starting at position 362 of SEQ ID NO: 585823
aagcucugggacugguaaa

SEQ ID NO: 670461 - RNA, 19 nt, Artificial Sequence
  Description of Artificial Sequence: Synthetic oligonucleotide
  Antisense strand to SEQ ID NO: 670460
uuuaccagucccagagcuu

SEQ ID NO: 670462 - RNA, 19 nt, Artificial Sequence
  Description of Artificial Sequence: Synthetic oligonucleotide
  Sense strand starting at position 730 of SEQ ID NO: 585823
uuggacugcuggccaaaua

SEQ ID NO: 670463 - RNA, 19 nt, Artificial Sequence
  Description of Artificial Sequence: Synthetic oligonucleotide
  Antisense strand to SEQ ID NO: 670462
uauuuggccagcaguccaa

SEQ ID NO: 670464 - RNA, 19 nt, Artificial Sequence
  Description of Artificial Sequence: Synthetic oligonucleotide
  Sense strand starting at position 804 of SEQ ID NO: 585823
gguaguucuuccgccugaa

SEQ ID NO: 670465 - RNA, 19 nt, Artificial Sequence
  Description of Artificial Sequence: Synthetic oligonucleotide
  Antisense strand to SEQ ID NO: 670464
uucaggcggaagaacuacc

SEQ ID NO: 670466 - RNA, 19 nt, Artificial Sequence
  Description of Artificial Sequence: Synthetic oligonucleotide
  Sense strand starting at position 807 of SEQ ID NO: 585823
aguucuuccgccugaagua

SEQ ID NO: 670467 - RNA, 19 nt, Artificial Sequence
  Description of Artificial Sequence: Synthetic oligonucleotide
  Antisense strand to SEQ ID NO: 670466
uacuucaggcggaagaacu

SEQ ID NO: 670468 - RNA, 19 nt, Artificial Sequence
  Description of Artificial Sequence: Synthetic oligonucleotide
  Sense strand starting at position 892 of SEQ ID NO: 585823
gaaccauagcuggguccau

SEQ ID NO: 670469 - RNA, 19 nt, Artificial Sequence
  Description of Artificial Sequence: Synthetic oligonucleotide
  Antisense strand to SEQ ID NO: 670468
auggacccagcuaugguuc

SEQ ID NO: 670470 - RNA, 19 nt, Artificial Sequence
  Description of Artificial Sequence: Synthetic oligonucleotide
  Sense strand starting at position 980 of SEQ ID NO: 585823
gcccaccaucuguaaggaa

SEQ ID NO: 670471 - RNA, 19 nt, Artificial Sequence
  Description of Artificial Sequence: Synthetic oligonucleotide
  Antisense strand to SEQ ID NO: 670470
uuccuuacagauggugggc

SEQ ID NO: 670472 - RNA, 19 nt, Artificial Sequence
  Description of Artificial Sequence: Synthetic oligonucleotide
  Sense strand starting at position 1061 of SEQ ID NO: 585823
ggaguagugcccggagucu

SEQ ID NO: 670473 - RNA, 19 nt, Artificial Sequence
  Description of Artificial Sequence: Synthetic oligonucleotide
  Antisense strand to SEQ ID NO: 670472
agacuccgggcacuacucc

SEQ ID NO: 670474 - RNA, 19 nt, Artificial Sequence
  Description of Artificial Sequence: Synthetic oligonucleotide
  Sense strand starting at position 1864 of SEQ ID NO: 585823
agaggucauggugaccauu

SEQ ID NO: 670475 - RNA, 19 nt, Artificial Sequence
  Description of Artificial Sequence: Synthetic oligonucleotide
  Antisense strand to SEQ ID NO: 670474
aauggucaccaugaccucu

SEQ ID NO: 670476 - RNA, 19 nt, Artificial Sequence
  Description of Artificial Sequence: Synthetic oligonucleotide
  Sense strand starting at position 1924 of SEQ ID NO: 585823
cgcuccucuguguuaguuu

SEQ ID NO: 670477 - RNA, 19 nt, Artificial Sequence
  Description of Artificial Sequence: Synthetic oligonucleotide
  Antisense strand to SEQ ID NO: 670476
aaacuaacacagaggagcg

SEQ ID NO: 670478 - RNA, 19 nt, Artificial Sequence
  Description of Artificial Sequence: Synthetic oligonucleotide
  Sense strand starting at position 1962 of SEQ ID NO: 585823
gaaggugucuccuugcuuu

SEQ ID NO: 670479 - RNA, 19 nt, Artificial Sequence
  Description of Artificial Sequence: Synthetic oligonucleotide
  Antisense strand to SEQ ID NO: 670478
aaagcaaggagacaccuuc

SEQ ID NO: 670480 - RNA, 19 nt, Artificial Sequence
  Description of Artificial Sequence: Synthetic oligonucleotide
  Sense strand starting at position 1977 of SEQ ID NO: 585823
cuuuguuggcuggguagua

SEQ ID NO: 670481 - RNA, 19 nt, Artificial Sequence
  Description of Artificial Sequence: Synthetic oligonucleotide
  Antisense strand to SEQ ID NO: 670480
uacuacccagccaacaaag

SEQ ID NO: 670482 - RNA, 19 nt, Artificial Sequence
  Description of Artificial Sequence: Synthetic oligonucleotide
  Sense strand starting at position 1978 of SEQ ID NO: 585823
uuuguuggcuggguaguaa

SEQ ID NO: 670483 - RNA, 19 nt, Artificial Sequence
  Description of Artificial Sequence: Synthetic oligonucleotide
  Antisense strand to SEQ ID NO: 670482
uuacuacccagccaacaaa

SEQ ID NO: 670484 - RNA, 19 nt, Artificial Sequence
  Description of Artificial Sequence: Synthetic oligonucleotide
  Sense strand starting at position 1989 of SEQ ID NO: 585823
gguaguaauucugucccac

SEQ ID NO: 670485 - RNA, 19 nt, Artificial Sequence
  Description of Artificial Sequence: Synthetic oligonucleotide
  Antisense strand to SEQ ID NO: 670484
gugggacagaauuacuacc

SEQ ID NO: 670486 - RNA, 19 nt, Artificial Sequence
  Description of Artificial Sequence: Synthetic oligonucleotide
  Sense strand starting at position 2012 of SEQ ID NO: 585823
caugaucuucgaggcucua

SEQ ID NO: 670487 - RNA, 19 nt, Artificial Sequence
  Description of Artificial Sequence: Synthetic oligonucleotide
  Antisense strand to SEQ ID NO: 670486
uagagccucgaagaucaug

SEQ ID NO: 670488 - RNA, 19 nt, Artificial Sequence
  Description of Artificial Sequence: Synthetic oligonucleotide
  Sense strand starting at position 2158 of SEQ ID NO: 585823
caucccaguugagaugaua

SEQ ID NO: 670489 - RNA, 19 nt, Artificial Sequence
  Description of Artificial Sequence: Synthetic oligonucleotide
  Antisense strand to SEQ ID NO: 670488
uaucaucucaacugggaug

SEQ ID NO: 670490 - RNA, 19 nt, Artificial Sequence
  Description of Artificial Sequence: Synthetic oligonucleotide
  Sense strand starting at position 2170 of SEQ ID NO: 585823
gaugauacuccucaggcga

SEQ ID NO: 670491 - RNA, 19 nt, Artificial Sequence
  Description of Artificial Sequence: Synthetic oligonucleotide
  Antisense strand to SEQ ID NO: 670490
ucgccugaggaguaucauc

SEQ ID NO: 670492 - RNA, 19 nt, Artificial Sequence
  Description of Artificial Sequence: Synthetic oligonucleotide
  Sense strand starting at position 2287 of SEQ ID NO: 585823
gcaucuuuauuuggauguu

SEQ ID NO: 670493 - RNA, 19 nt, Artificial Sequence
  Description of Artificial Sequence: Synthetic oligonucleotide
  Antisense strand to SEQ ID NO: 670492
aacauccaaauaaagaugc

SEQ ID NO: 670494 - RNA, 19 nt, Artificial Sequence
  Description of Artificial Sequence: Synthetic oligonucleotide
  Sense strand starting at position 2342 of SEQ ID NO: 585823
cgcuccaaguggucagaga

SEQ ID NO: 670495 - RNA, 19 nt, Artificial Sequence
  Description of Artificial Sequence: Synthetic oligonucleotide
  Antisense strand to SEQ ID NO: 670494
ucucugaccacuuggagcg

SEQ ID NO: 670496 - RNA, 19 nt, Artificial Sequence
  Description of Artificial Sequence: Synthetic oligonucleotide
  Sense strand starting at position 2356 of SEQ ID NO: 585823
agagacugugcugguuuau

SEQ ID NO: 670497 - RNA, 19 nt, Artificial Sequence
  Description of Artificial Sequence: Synthetic oligonucleotide
  Antisense strand to SEQ ID NO: 670496
auaaaccagcacagucucu

SEQ ID NO: 670498 - RNA, 19 nt, Artificial Sequence
  Description of Artificial Sequence: Synthetic oligonucleotide
  Sense strand starting at position 2542 of SEQ ID NO: 585823
gggcguguguccucucauu

SEQ ID NO: 670499 - RNA, 19 nt, Artificial Sequence
  Description of Artificial Sequence: Synthetic oligonucleotide
  Antisense strand to SEQ ID NO: 670498
aaugagaggacacacgccc

SEQ ID NO: 670500 - RNA, 19 nt, Artificial Sequence
  Description of Artificial Sequence: Synthetic oligonucleotide
  Sense strand starting at position 2544 of SEQ ID NO: 585823
gcguguguccucucauucu

SEQ ID NO: 670501 - RNA, 19 nt, Artificial Sequence
  Description of Artificial Sequence: Synthetic oligonucleotide
  Antisense strand to SEQ ID NO: 670500
agaaugagaggacacacgc

SEQ ID NO: 670502 - RNA, 19 nt, Artificial Sequence
  Description of Artificial Sequence: Synthetic oligonucleotide
  Sense strand starting at position 2821 of SEQ ID NO: 585823
agugucauguuacugaaac

SEQ ID NO: 670503 - RNA, 19 nt, Artificial Sequence
  Description of Artificial Sequence: Synthetic oligonucleotide
  Antisense strand to SEQ ID NO: 670502
guuucaguaacaugacacu

SEQ ID NO: 670504 - RNA, 19 nt, Artificial Sequence
  Description of Artificial Sequence: Synthetic oligonucleotide
  Sense strand starting at position 2865 of SEQ ID NO: 585823
gagccuucugugugaaguc

SEQ ID NO: 670505 - RNA, 19 nt, Artificial Sequence
  Description of Artificial Sequence: Synthetic oligonucleotide
  Antisense strand to SEQ ID NO: 670504
gacuucacacagaaggcuc

SEQ ID NO: 670506 - RNA, 19 nt, Artificial Sequence
  Description of Artificial Sequence: Synthetic oligonucleotide
  Sense strand starting at position 2874 of SEQ ID NO: 585823
gugugaagucuuuaaacaa

SEQ ID NO: 670507 - RNA, 19 nt, Artificial Sequence
  Description of Artificial Sequence: Synthetic oligonucleotide
  Antisense strand to SEQ ID NO: 670506
uuguuuaaagacuucacac

SEQ ID NO: 670508 - RNA, 19 nt, Artificial Sequence
  Description of Artificial Sequence: Synthetic oligonucleotide
  Sense strand starting at position 2939 of SEQ ID NO: 585823
gguucugcuugcuccuauu

SEQ ID NO: 670509 - RNA, 19 nt, Artificial Sequence
  Description of Artificial Sequence: Synthetic oligonucleotide
  Antisense strand to SEQ ID NO: 670508
aauaggagcaagcagaacc

SEQ ID NO: 670510 - RNA, 19 nt, Artificial Sequence
  Description of Artificial Sequence: Synthetic oligonucleotide
  Sense strand starting at position 3264 of SEQ ID NO: 585823
gcaguuauggcuccggcuu

SEQ ID NO: 670511 - RNA, 19 nt, Artificial Sequence
  Description of Artificial Sequence: Synthetic oligonucleotide
  Antisense strand to SEQ ID NO: 670510
aagccggagccauaacugc

SEQ ID NO: 670512 - RNA, 19 nt, Artificial Sequence
  Description of Artificial Sequence: Synthetic oligonucleotide
  Sense strand starting at position 3342 of SEQ ID NO: 585823
agcagcaguuucccugaga

SEQ ID NO: 670513 - RNA, 19 nt, Artificial Sequence
  Description of Artificial Sequence: Synthetic oligonucleotide
  Antisense strand to SEQ ID NO: 670512
ucucagggaaacugcugcu

SEQ ID NO: 670514 - RNA, 19 nt, Artificial Sequence
  Description of Artificial Sequence: Synthetic oligonucleotide
  Sense strand starting at position 3343 of SEQ ID NO: 585823
gcagcaguuucccugagau

SEQ ID NO: 670515 - RNA, 19 nt, Artificial Sequence
  Description of Artificial Sequence: Synthetic oligonucleotide
  Antisense strand to SEQ ID NO: 670514
aucucagggaaacugcugc

SEQ ID NO: 670516 - RNA, 19 nt, Artificial Sequence
  Description of Artificial Sequence: Synthetic oligonucleotide
  Sense strand starting at position 3345 of SEQ ID NO: 585823
agcaguuucccugagaucu

SEQ ID NO: 670517 - RNA, 19 nt, Artificial Sequence
  Description of Artificial Sequence: Synthetic oligonucleotide
  Antisense strand to SEQ ID NO: 670516
agaucucagggaaacugcu

SEQ ID NO: 670518 - RNA, 19 nt, Artificial Sequence
  Description of Artificial Sequence: Synthetic oligonucleotide
  Sense strand starting at position 3599 of SEQ ID NO: 585823
uuucuaagauaaugccaga

SEQ ID NO: 670519 - RNA, 19 nt, Artificial Sequence
  Description of Artificial Sequence: Synthetic oligonucleotide
  Antisense strand to SEQ ID NO: 670518
ucuggcauuaucuuagaaa

SEQ ID NO: 670520 - RNA, 19 nt, Artificial Sequence
  Description of Artificial Sequence: Synthetic oligonucleotide
  Sense strand starting at position 3602 of SEQ ID NO: 585823
cuaagauaaugccagaaua

SEQ ID NO: 670521 - RNA, 19 nt, Artificial Sequence
  Description of Artificial Sequence: Synthetic oligonucleotide
  Antisense strand to SEQ ID NO: 670520
uauucuggcauuaucuuag

SEQ ID NO: 670522 - RNA, 19 nt, Artificial Sequence
  Description of Artificial Sequence: Synthetic oligonucleotide
  Sense strand starting at position 3663 of SEQ ID NO: 585823
ccuggaguuguuuguuguu

SEQ ID NO: 670523 - RNA, 19 nt, Artificial Sequence
  Description of Artificial Sequence: Synthetic oligonucleotide
  Antisense strand to SEQ ID NO: 670522
aacaacaaacaacuccagg

SEQ ID NO: 670524 - RNA, 19 nt, Artificial Sequence
  Description of Artificial Sequence: Synthetic oligonucleotide
  Sense strand starting at position 3665 of SEQ ID NO: 585823
uggaguuguuuguuguugu

SEQ ID NO: 670525 - RNA, 19 nt, Artificial Sequence
  Description of Artificial Sequence: Synthetic oligonucleotide
  Antisense strand to SEQ ID NO: 670524
acaacaacaaacaacucca

SEQ ID NO: 670526 - RNA, 19 nt, Artificial Sequence
  Description of Artificial Sequence: Synthetic oligonucleotide
  Sense strand starting at position 3708 of SEQ ID NO: 585823
uggguacucgcagaacauu

SEQ ID NO: 670527 - RNA, 19 nt, Artificial Sequence
  Description of Artificial Sequence: Synthetic oligonucleotide
  Antisense strand to SEQ ID NO: 670526
aauguucugcgaguaccca

SEQ ID NO: 670528 - RNA, 19 nt, Artificial Sequence
  Description of Artificial Sequence: Synthetic oligonucleotide
  Sense strand starting at position 3839 of SEQ ID NO: 585823
uuuguaagccuuugcugaa

SEQ ID NO: 670529 - RNA, 19 nt, Artificial Sequence
  Description of Artificial Sequence: Synthetic oligonucleotide
  Antisense strand to SEQ ID NO: 670528
uucagcaaaggcuuacaaa

SEQ ID NO: 670530 - RNA, 19 nt, Artificial Sequence
  Description of Artificial Sequence: Synthetic oligonucleotide
  Sense strand starting at position 16 of SEQ ID NO: 585824
gccauaugugcagaaugaa

SEQ ID NO: 670531 - RNA, 19 nt, Artificial Sequence
  Description of Artificial Sequence: Synthetic oligonucleotide
  Antisense strand to SEQ ID NO: 670530
uucauucugcacauauggc

SEQ ID NO: 670532 - RNA, 19 nt, Artificial Sequence
  Description of Artificial Sequence: Synthetic oligonucleotide
  Sense strand starting at position 19 of SEQ ID NO: 585824
auaugugcagaaugaaauc

SEQ ID NO: 670533 - RNA, 19 nt, Artificial Sequence
  Description of Artificial Sequence: Synthetic oligonucleotide
  Antisense strand to SEQ ID NO: 670532
gauuucauucugcacauau

SEQ ID NO: 670534 - RNA, 19 nt, Artificial Sequence
  Description of Artificial Sequence: Synthetic oligonucleotide
  Sense strand starting at position 359 of SEQ ID NO: 585824
uugugaugcaaggagcaaa

SEQ ID NO: 670535 - RNA, 19 nt, Artificial Sequence
  Description of Artificial Sequence: Synthetic oligonucleotide
  Antisense strand to SEQ ID NO: 670534
uuugcuccuugcaucacaa

SEQ ID NO: 670536 - RNA, 19 nt, Artificial Sequence
  Description of Artificial Sequence: Synthetic oligonucleotide
  Sense strand starting at position 488 of SEQ ID NO: 585824
aaaucacagguguguauaa

SEQ ID NO: 670537 - RNA, 19 nt, Artificial Sequence
  Description of Artificial Sequence: Synthetic oligonucleotide
  Antisense strand to SEQ ID NO: 670536
uuauacacaccugugauuu

SEQ ID NO: 670538 - RNA, 19 nt, Artificial Sequence
  Description of Artificial Sequence: Synthetic oligonucleotide
  Sense strand starting at position 489 of SEQ ID NO: 585824
aaucacagguguguauaau

SEQ ID NO: 670539 - RNA, 19 nt, Artificial Sequence
  Description of Artificial Sequence: Synthetic oligonucleotide
  Antisense strand to SEQ ID NO: 670538
auuauacacaccugugauu

SEQ ID NO: 670540 - RNA, 19 nt, Artificial Sequence
  Description of Artificial Sequence: Synthetic oligonucleotide
  Sense strand starting at position 490 of SEQ ID NO: 585824
aucacagguguguauaauu

SEQ ID NO: 670541 - RNA, 19 nt, Artificial Sequence
  Description of Artificial Sequence: Synthetic oligonucleotide
  Antisense strand to SEQ ID NO: 670540
aauuauacacaccugugau

SEQ ID NO: 670542 - RNA, 19 nt, Artificial Sequence
  Description of Artificial Sequence: Synthetic oligonucleotide
  Sense strand starting at position 618 of SEQ ID NO: 585824
ugauaauguugaguuacaa

SEQ ID NO: 670543 - RNA, 19 nt, Artificial Sequence
  Description of Artificial Sequence: Synthetic oligonucleotide
  Antisense strand to SEQ ID NO: 670542
uuguaacucaacauuauca

SEQ ID NO: 670544 - RNA, 19 nt, Artificial Sequence
  Description of Artificial Sequence: Synthetic oligonucleotide
  Sense strand starting at position 849 of SEQ ID NO: 585824
ggaaucaaucauggccuau

SEQ ID NO: 670545 - RNA, 19 nt, Artificial Sequence
  Description of Artificial Sequence: Synthetic oligonucleotide
  Antisense strand to SEQ ID NO: 670544
auaggccaugauugauucc

SEQ ID NO: 670546 - RNA, 19 nt, Artificial Sequence
  Description of Artificial Sequence: Synthetic oligonucleotide
  Sense strand starting at position 940 of SEQ ID NO: 585824
ggagaaacccugugcuaau

SEQ ID NO: 670547 - RNA, 19 nt, Artificial Sequence
  Description of Artificial Sequence: Synthetic oligonucleotide
  Antisense strand to SEQ ID NO: 670546
auuagcacaggguuucucc

SEQ ID NO: 670548 - RNA, 19 nt, Artificial Sequence
  Description of Artificial Sequence: Synthetic oligonucleotide
  Sense strand starting at position 941 of SEQ ID NO: 585824
gagaaacccugugcuaaug

SEQ ID NO: 670549 - RNA, 19 nt, Artificial Sequence
  Description of Artificial Sequence: Synthetic oligonucleotide
  Antisense strand to SEQ ID NO: 670548
cauuagcacaggguuucuc

SEQ ID NO: 670550 - RNA, 19 nt, Artificial Sequence
  Description of Artificial Sequence: Synthetic oligonucleotide
  Sense strand starting at position 957 of SEQ ID NO: 585824
auguuugaagacuauucuu

SEQ ID NO: 670551 - RNA, 19 nt, Artificial Sequence
  Description of Artificial Sequence: Synthetic oligonucleotide
  Antisense strand to SEQ ID NO: 670550
aagaauagucuucaaacau

SEQ ID NO: 670552 - RNA, 19 nt, Artificial Sequence
  Description of Artificial Sequence: Synthetic oligonucleotide
  Sense strand starting at position 1286 of SEQ ID NO: 585824
agaacuucuaguggaaguu

SEQ ID NO: 670553 - RNA, 19 nt, Artificial Sequence
  Description of Artificial Sequence: Synthetic oligonucleotide
  Antisense strand to SEQ ID NO: 670552
aacuuccacuagaaguucu

SEQ ID NO: 670554 - RNA, 19 nt, Artificial Sequence
  Description of Artificial Sequence: Synthetic oligonucleotide
  Sense strand starting at position 1287 of SEQ ID NO: 585824
gaacuucuaguggaaguuu

SEQ ID NO: 670555 - RNA, 19 nt, Artificial Sequence
  Description of Artificial Sequence: Synthetic oligonucleotide
  Antisense strand to SEQ ID NO: 670554
aaacuuccacuagaaguuc

SEQ ID NO: 670556 - RNA, 19 nt, Artificial Sequence
  Description of Artificial Sequence: Synthetic oligonucleotide
  Sense strand starting at position 1406 of SEQ ID NO: 585824
cgaggaaacaguuaacugu

SEQ ID NO: 670557 - RNA, 19 nt, Artificial Sequence
  Description of Artificial Sequence: Synthetic oligonucleotide
  Antisense strand to SEQ ID NO: 670556
acaguuaacuguuuccucg

SEQ ID NO: 670558 - RNA, 19 nt, Artificial Sequence
  Description of Artificial Sequence: Synthetic oligonucleotide
  Sense strand starting at position 1423 of SEQ ID NO: 585824
guaaauacagucuagaggu

SEQ ID NO: 670559 - RNA, 19 nt, Artificial Sequence
  Description of Artificial Sequence: Synthetic oligonucleotide
  Antisense strand to SEQ ID NO: 670558
accucuagacuguauuuac

SEQ ID NO: 670560 - RNA, 19 nt, Artificial Sequence
  Description of Artificial Sequence: Synthetic oligonucleotide
  Sense strand starting at position 1433 of SEQ ID NO: 585824
ucuagagguauccagguga

SEQ ID NO: 670561 - RNA, 19 nt, Artificial Sequence
  Description of Artificial Sequence: Synthetic oligonucleotide
  Antisense strand to SEQ ID NO: 670560
ucaccuggauaccucuaga

SEQ ID NO: 670562 - RNA, 19 nt, Artificial Sequence
  Description of Artificial Sequence: Synthetic oligonucleotide
  Sense strand starting at position 1437 of SEQ ID NO: 585824
gagguauccaggugacuga

SEQ ID NO: 670563 - RNA, 19 nt, Artificial Sequence
  Description of Artificial Sequence: Synthetic oligonucleotide
  Antisense strand to SEQ ID NO: 670562
ucagucaccuggauaccuc

SEQ ID NO: 670564 - RNA, 19 nt, Artificial Sequence
  Description of Artificial Sequence: Synthetic oligonucleotide
  Sense strand starting at position 1451 of SEQ ID NO: 585824
acugacaguucuccagaga

SEQ ID NO: 670565 - RNA, 19 nt, Artificial Sequence
  Description of Artificial Sequence: Synthetic oligonucleotide
  Antisense strand to SEQ ID NO: 670564
ucucuggagaacugucagu

SEQ ID NO: 670566 - RNA, 19 nt, Artificial Sequence
  Description of Artificial Sequence: Synthetic oligonucleotide
  Sense strand starting at position 1583 of SEQ ID NO: 585824
agaugcuccucccuggaaa

SEQ ID NO: 670567 - RNA, 19 nt, Artificial Sequence
  Description of Artificial Sequence: Synthetic oligonucleotide
  Antisense strand to SEQ ID NO: 670566
uuuccagggaggagcaucu

SEQ ID NO: 670568 - RNA, 19 nt, Artificial Sequence
  Description of Artificial Sequence: Synthetic oligonucleotide
  Sense strand starting at position 1609 of SEQ ID NO: 585824
gccgguuuccgcucuuuca

SEQ ID NO: 670569 - RNA, 19 nt, Artificial Sequence
  Description of Artificial Sequence: Synthetic oligonucleotide
  Antisense strand to SEQ ID NO: 670568
ugaaagagcggaaaccggc

SEQ ID NO: 670570 - RNA, 19 nt, Artificial Sequence
  Description of Artificial Sequence: Synthetic oligonucleotide
  Sense strand starting at position 1679 of SEQ ID NO: 585824
gcuccuucuggaugaggaa

SEQ ID NO: 670571 - RNA, 19 nt, Artificial Sequence
  Description of Artificial Sequence: Synthetic oligonucleotide
  Antisense strand to SEQ ID NO: 670570
uuccucauccagaaggagc

SEQ ID NO: 670572 - RNA, 19 nt, Artificial Sequence
  Description of Artificial Sequence: Synthetic oligonucleotide
  Sense strand starting at position 1786 of SEQ ID NO: 585824
guaugucacccggaagggu

SEQ ID NO: 670573 - RNA, 19 nt, Artificial Sequence
  Description of Artificial Sequence: Synthetic oligonucleotide
  Antisense strand to SEQ ID NO: 670572
acccuuccgggugacauac

SEQ ID NO: 670574 - RNA, 19 nt, Artificial Sequence
  Description of Artificial Sequence: Synthetic oligonucleotide
  Sense strand starting at position 2851 of SEQ ID NO: 585824
gucaguuauggacaacuuu

SEQ ID NO: 670575 - RNA, 19 nt, Artificial Sequence
  Description of Artificial Sequence: Synthetic oligonucleotide
  Antisense strand to SEQ ID NO: 670574
aaaguuguccauaacugac

SEQ ID NO: 670576 - RNA, 19 nt, Artificial Sequence
  Description of Artificial Sequence: Synthetic oligonucleotide
  Sense strand starting at position 2900 of SEQ ID NO: 585824
uagcauuugugucuuguau

SEQ ID NO: 670577 - RNA, 19 nt, Artificial Sequence
  Description of Artificial Sequence: Synthetic oligonucleotide
  Antisense strand to SEQ ID NO: 670576
auacaagacacaaaugcua

SEQ ID NO: 670578 - RNA, 19 nt, Artificial Sequence
  Description of Artificial Sequence: Synthetic oligonucleotide
  Sense strand starting at position 2921 of SEQ ID NO: 585824
ggaucgaggguuuguaaga

SEQ ID NO: 670579 - RNA, 19 nt, Artificial Sequence
  Description of Artificial Sequence: Synthetic oligonucleotide
  Antisense strand to SEQ ID NO: 670578
ucuuacaaacccucgaucc

SEQ ID NO: 670580 - RNA, 19 nt, Artificial Sequence
  Description of Artificial Sequence: Synthetic oligonucleotide
  Sense strand starting at position 2922 of SEQ ID NO: 585824
gaucgaggguuuguaagaa

SEQ ID NO: 670581 - RNA, 19 nt, Artificial Sequence
  Description of Artificial Sequence: Synthetic oligonucleotide
  Antisense strand to SEQ ID NO: 670580
uucuuacaaacccucgauc

SEQ ID NO: 670582 - RNA, 19 nt, Artificial Sequence
  Description of Artificial Sequence: Synthetic oligonucleotide
  Sense strand starting at position 2949 of SEQ ID NO: 585824
accuacuuugguggugaga

SEQ ID NO: 670583 - RNA, 19 nt, Artificial Sequence
  Description of Artificial Sequence: Synthetic oligonucleotide
  Antisense strand to SEQ ID NO: 670582
ucucaccaccaaaguaggu

SEQ ID NO: 670584 - RNA, 19 nt, Artificial Sequence
  Description of Artificial Sequence: Synthetic oligonucleotide
  Sense strand starting at position 3141 of SEQ ID NO: 585824
guacuacuguuagccauuu

SEQ ID NO: 670585 - RNA, 19 nt, Artificial Sequence
  Description of Artificial Sequence: Synthetic oligonucleotide
  Antisense strand to SEQ ID NO: 670584
aaauggcuaacaguaguac

SEQ ID NO: 670586 - RNA, 19 nt, Artificial Sequence
  Description of Artificial Sequence: Synthetic oligonucleotide
  Sense strand starting at position 3186 of SEQ ID NO: 585824
auuaaaugggcauauguau

SEQ ID NO: 670587 - RNA, 19 nt, Artificial Sequence
  Description of Artificial Sequence: Synthetic oligonucleotide
  Antisense strand to SEQ ID NO: 670586
auacauaugcccauuuaau

SEQ ID NO: 670588 - RNA, 19 nt, Artificial Sequence
  Description of Artificial Sequence: Synthetic oligonucleotide
  Sense strand starting at position 3232 of SEQ ID NO: 585824
gcucccuguccugaagaaa

SEQ ID NO: 670589 - RNA, 19 nt, Artificial Sequence
  Description of Artificial Sequence: Synthetic oligonucleotide
  Antisense strand to SEQ ID NO: 670588
uuucuucaggacagggagc

SEQ ID NO: 670590 - RNA, 19 nt, Artificial Sequence
  Description of Artificial Sequence: Synthetic oligonucleotide
  Sense strand starting at position 3296 of SEQ ID NO: 585824
agguacaagagguguuaca

SEQ ID NO: 670591 - RNA, 19 nt, Artificial Sequence
  Description of Artificial Sequence: Synthetic oligonucleotide
  Antisense strand to SEQ ID NO: 670590
uguaacaccucuuguaccu

SEQ ID NO: 670592 - RNA, 19 nt, Artificial Sequence
  Description of Artificial Sequence: Synthetic oligonucleotide
  Sense strand starting at position 3325 of SEQ ID NO: 585824
ugcucaugccuggacaauu

SEQ ID NO: 670593 - RNA, 19 nt, Artificial Sequence
  Description of Artificial Sequence: Synthetic oligonucleotide
  Antisense strand to SEQ ID NO: 670592
aauuguccaggcaugagca

SEQ ID NO: 670594 - RNA, 19 nt, Artificial Sequence
  Description of Artificial Sequence: Synthetic oligonucleotide
  Sense strand starting at position 3606 of SEQ ID NO: 585824
gcuguuguuccuucugcau

SEQ ID NO: 670595 - RNA, 19 nt, Artificial Sequence
  Description of Artificial Sequence: Synthetic oligonucleotide
  Antisense strand to SEQ ID NO: 670594
augcagaaggaacaacagc

SEQ ID NO: 670596 - RNA, 19 nt, Artificial Sequence
  Description of Artificial Sequence: Synthetic oligonucleotide
  Sense strand starting at position 3651 of SEQ ID NO: 585824
agagcuugcuuccucauuu

SEQ ID NO: 670597 - RNA, 19 nt, Artificial Sequence
  Description of Artificial Sequence: Synthetic oligonucleotide
  Antisense strand to SEQ ID NO: 670596
aaaugaggaagcaagcucu

SEQ ID NO: 670598 - RNA, 19 nt, Artificial Sequence
  Description of Artificial Sequence: Synthetic oligonucleotide
  Sense strand starting at position 3710 of SEQ ID NO: 585824
acuaccaugucagugaaau

SEQ ID NO: 670599 - RNA, 19 nt, Artificial Sequence
  Description of Artificial Sequence: Synthetic oligonucleotide
  Antisense strand to SEQ ID NO: 670598
auuucacugacaugguagu

SEQ ID NO: 670600 - RNA, 19 nt, Artificial Sequence
  Description of Artificial Sequence: Synthetic oligonucleotide
  Sense strand starting at position 3711 of SEQ ID NO: 585824
cuaccaugucagugaaaua

SEQ ID NO: 670601 - RNA, 19 nt, Artificial Sequence
  Description of Artificial Sequence: Synthetic oligonucleotide
  Antisense strand to SEQ ID NO: 670600
uauuucacugacaugguag

SEQ ID NO: 670602 - RNA, 19 nt, Artificial Sequence
  Description of Artificial Sequence: Synthetic oligonucleotide
  Sense strand starting at position 3740 of SEQ ID NO: 585824
ucaaaugugaaauguagga

SEQ ID NO: 670603 - RNA, 19 nt, Artificial Sequence
  Description of Artificial Sequence: Synthetic oligonucleotide
  Antisense strand to SEQ ID NO: 670602
uccuacauuucacauuuga

SEQ ID NO: 670604 - RNA, 19 nt, Artificial Sequence
  Description of Artificial Sequence: Synthetic oligonucleotide
  Sense strand starting at position 3761 of SEQ ID NO: 585824
gacuaucuggaguaguacu

SEQ ID NO: 670605 - RNA, 19 nt, Artificial Sequence
  Description of Artificial Sequence: Synthetic oligonucleotide
  Antisense strand to SEQ ID NO: 670604
aguacuacuccagauaguc

SEQ ID NO: 670606 - RNA, 19 nt, Artificial Sequence
  Description of Artificial Sequence: Synthetic oligonucleotide
  Sense strand starting at position 3778 of SEQ ID NO: 585824
cuuauuauagaguaggugu

SEQ ID NO: 670607 - RNA, 19 nt, Artificial Sequence
  Description of Artificial Sequence: Synthetic oligonucleotide
  Antisense strand to SEQ ID NO: 670606
acaccuacucuauaauaag

SEQ ID NO: 670608 - RNA, 19 nt, Artificial Sequence
  Description of Artificial Sequence: Synthetic oligonucleotide
  Sense strand starting at position 3781 of SEQ ID NO: 585824
auuauagaguagguguuua

SEQ ID NO: 670609 - RNA, 19 nt, Artificial Sequence
  Description of Artificial Sequence: Synthetic oligonucleotide
  Antisense strand to SEQ ID NO: 670608
uaaacaccuacucuauaau

SEQ ID NO: 670610 - RNA, 19 nt, Artificial Sequence
  Description of Artificial Sequence: Synthetic oligonucleotide
  Sense strand starting at position 496 of SEQ ID NO: 585825
ccggauuccugagugacag

SEQ ID NO: 670611 - RNA, 19 nt, Artificial Sequence
  Description of Artificial Sequence: Synthetic oligonucleotide
  Antisense strand to SEQ ID NO: 670610
cugucacucaggaauccgg

SEQ ID NO: 670612 - RNA, 19 nt, Artificial Sequence
  Description of Artificial Sequence: Synthetic oligonucleotide
  Sense strand starting at position 497 of SEQ ID NO: 585825
cggauuccugagugacaga

SEQ ID NO: 670613 - RNA, 19 nt, Artificial Sequence
  Description of Artificial Sequence: Synthetic oligonucleotide
  Antisense strand to SEQ ID NO: 670612
ucugucacucaggaauccg

SEQ ID NO: 670614 - RNA, 19 nt, Artificial Sequence
  Description of Artificial Sequence: Synthetic oligonucleotide
  Sense strand starting at position 1054 of SEQ ID NO: 585825
cccaccucucccggagaau

SEQ ID NO: 670615 - RNA, 19 nt, Artificial Sequence
  Description of Artificial Sequence: Synthetic oligonucleotide
  Antisense strand to SEQ ID NO: 670614
auucuccgggagagguggg

SEQ ID NO: 670616 - RNA, 19 nt, Artificial Sequence
  Description of Artificial Sequence: Synthetic oligonucleotide
  Sense strand starting at position 1277 of SEQ ID NO: 585825
uggaagugaggucguugaa

SEQ ID NO: 670617 - RNA, 19 nt, Artificial Sequence
  Description of Artificial Sequence: Synthetic oligonucleotide
  Antisense strand to SEQ ID NO: 670616
uucaacgaccucacuucca

SEQ ID NO: 670618 - RNA, 19 nt, Artificial Sequence
  Description of Artificial Sequence: Synthetic oligonucleotide
  Sense strand starting at position 1280 of SEQ ID NO: 585825
aagugaggucguugaacuc

SEQ ID NO: 670619 - RNA, 19 nt, Artificial Sequence
  Description of Artificial Sequence: Synthetic oligonucleotide
  Antisense strand to SEQ ID NO: 670618
gaguucaacgaccucacuu

SEQ ID NO: 670620 - RNA, 19 nt, Artificial Sequence
  Description of Artificial Sequence: Synthetic oligonucleotide
  Sense strand starting at position 1286 of SEQ ID NO: 585825
ggucguugaacucagugau

SEQ ID NO: 670621 - RNA, 19 nt, Artificial Sequence
  Description of Artificial Sequence: Synthetic oligonucleotide
  Antisense strand to SEQ ID NO: 670620
aucacugaguucaacgacc

SEQ ID NO: 670622 - RNA, 19 nt, Artificial Sequence
  Description of Artificial Sequence: Synthetic oligonucleotide
  Sense strand starting at position 1968 of SEQ ID NO: 585825
gcguucuugcgguuaggca

SEQ ID NO: 670623 - RNA, 19 nt, Artificial Sequence
  Description of Artificial Sequence: Synthetic oligonucleotide
  Antisense strand to SEQ ID NO: 670622
ugccuaaccgcaagaacgc

SEQ ID NO: 670624 - RNA, 19 nt, Artificial Sequence
  Description of Artificial Sequence: Synthetic oligonucleotide
  Sense strand starting at position 2092 of SEQ ID NO: 585825
gaauccuagcgacagcuau

SEQ ID NO: 670625 - RNA, 19 nt, Artificial Sequence
  Description of Artificial Sequence: Synthetic oligonucleotide
  Antisense strand to SEQ ID NO: 670624
auagcugucgcuaggauuc

SEQ ID NO: 670626 - RNA, 19 nt, Artificial Sequence
  Description of Artificial Sequence: Synthetic oligonucleotide
  Sense strand starting at position 2100 of SEQ ID NO: 585825
gcgacagcuauuuguaagu

SEQ ID NO: 670627 - RNA, 19 nt, Artificial Sequence
  Description of Artificial Sequence: Synthetic oligonucleotide
  Antisense strand to SEQ ID NO: 670626
acuuacaaauagcugucgc

SEQ ID NO: 670628 - RNA, 19 nt, Artificial Sequence
  Description of Artificial Sequence: Synthetic oligonucleotide
  Sense strand starting at position 2106 of SEQ ID NO: 585825
gcuauuuguaaguggguga

SEQ ID NO: 670629 - RNA, 19 nt, Artificial Sequence
  Description of Artificial Sequence: Synthetic oligonucleotide
  Antisense strand to SEQ ID NO: 670628
ucacccacuuacaaauagc

SEQ ID NO: 670630 - RNA, 19 nt, Artificial Sequence
  Description of Artificial Sequence: Synthetic oligonucleotide
  Sense strand starting at position 2151 of SEQ ID NO: 585825
cgguuucaccgucagggaa

SEQ ID NO: 670631 - RNA, 19 nt, Artificial Sequence
  Description of Artificial Sequence: Synthetic oligonucleotide
  Antisense strand to SEQ ID NO: 670630
uucccugacggugaaaccg

SEQ ID NO: 670632 - RNA, 19 nt, Artificial Sequence
  Description of Artificial Sequence: Synthetic oligonucleotide
  Sense strand starting at position 2363 of SEQ ID NO: 585825
gaucgagcgccguuuauug

SEQ ID NO: 670633 - RNA, 19 nt, Artificial Sequence
  Description of Artificial Sequence: Synthetic oligonucleotide
  Antisense strand to SEQ ID NO: 670632
caauaaacggcgcucgauc

SEQ ID NO: 670634 - RNA, 19 nt, Artificial Sequence
  Description of Artificial Sequence: Synthetic oligonucleotide
  Sense strand starting at position 2370 of SEQ ID NO: 585825
cgccguuuauuggucgcaa

SEQ ID NO: 670635 - RNA, 19 nt, Artificial Sequence
  Description of Artificial Sequence: Synthetic oligonucleotide
  Antisense strand to SEQ ID NO: 670634
uugcgaccaauaaacggcg

SEQ ID NO: 670636 - RNA, 19 nt, Artificial Sequence
  Description of Artificial Sequence: Synthetic oligonucleotide
  Sense strand starting at position 2371 of SEQ ID NO: 585825
gccguuuauuggucgcaac

SEQ ID NO: 670637 - RNA, 19 nt, Artificial Sequence
  Description of Artificial Sequence: Synthetic oligonucleotide
  Antisense strand to SEQ ID NO: 670636
guugcgaccaauaaacggc

SEQ ID NO: 670638 - RNA, 19 nt, Artificial Sequence
  Description of Artificial Sequence: Synthetic oligonucleotide
  Sense strand starting at position 2372 of SEQ ID NO: 585825
ccguuuauuggucgcaaca

SEQ ID NO: 670639 - RNA, 19 nt, Artificial Sequence
  Description of Artificial Sequence: Synthetic oligonucleotide
  Antisense strand to SEQ ID NO: 670638
uguugcgaccaauaaacgg

SEQ ID NO: 670640 - RNA, 19 nt, Artificial Sequence
  Description of Artificial Sequence: Synthetic oligonucleotide
  Sense strand starting at position 2374 of SEQ ID NO: 585825
guuuauuggucgcaacaag

SEQ ID NO: 670641 - RNA, 19 nt, Artificial Sequence
  Description of Artificial Sequence: Synthetic oligonucleotide
  Antisense strand to SEQ ID NO: 670640
cuuguugcgaccaauaaac

SEQ ID NO: 670642 - RNA, 19 nt, Artificial Sequence
  Description of Artificial Sequence: Synthetic oligonucleotide
  Sense strand starting at position 2982 of SEQ ID NO: 585825
gggaacugaucccagggaa

SEQ ID NO: 670643 - RNA, 19 nt, Artificial Sequence
  Description of Artificial Sequence: Synthetic oligonucleotide
  Antisense strand to SEQ ID NO: 670642
uucccugggaucaguuccc

SEQ ID NO: 670644 - RNA, 19 nt, Artificial Sequence
  Description of Artificial Sequence: Synthetic oligonucleotide
  Sense strand starting at position 3020 of SEQ ID NO: 585825
ucguggguugcuuucggaa

SEQ ID NO: 670645 - RNA, 19 nt, Artificial Sequence
  Description of Artificial Sequence: Synthetic oligonucleotide
  Antisense strand to SEQ ID NO: 670644
uuccgaaagcaacccacga

SEQ ID NO: 670646 - RNA, 19 nt, Artificial Sequence
  Description of Artificial Sequence: Synthetic oligonucleotide
  Sense strand starting at position 3113 of SEQ ID NO: 585825
ggacuugugaacugugugu

SEQ ID NO: 670647 - RNA, 19 nt, Artificial Sequence
  Description of Artificial Sequence: Synthetic oligonucleotide
  Antisense strand to SEQ ID NO: 670646
acacacaguucacaagucc

SEQ ID NO: 670648 - RNA, 19 nt, Artificial Sequence
  Description of Artificial Sequence: Synthetic oligonucleotide
  Sense strand starting at position 3115 of SEQ ID NO: 585825
acuugugaacuguguguuu

SEQ ID NO: 670649 - RNA, 19 nt, Artificial Sequence
  Description of Artificial Sequence: Synthetic oligonucleotide
  Antisense strand to SEQ ID NO: 670648
aaacacacaguucacaagu

SEQ ID NO: 670650 - RNA, 19 nt, Artificial Sequence
  Description of Artificial Sequence: Synthetic oligonucleotide
  Sense strand starting at position 3120 of SEQ ID NO: 585825
ugaacuguguguuuccuau

SEQ ID NO: 670651 - RNA, 19 nt, Artificial Sequence
  Description of Artificial Sequence: Synthetic oligonucleotide
  Antisense strand to SEQ ID NO: 670650
auaggaaacacacaguuca

SEQ ID NO: 670652 - RNA, 19 nt, Artificial Sequence
  Description of Artificial Sequence: Synthetic oligonucleotide
  Sense strand starting at position 3124 of SEQ ID NO: 585825
cuguguguuuccuauauga

SEQ ID NO: 670653 - RNA, 19 nt, Artificial Sequence
  Description of Artificial Sequence: Synthetic oligonucleotide
  Antisense strand to SEQ ID NO: 670652
ucauauaggaaacacacag

SEQ ID NO: 670654 - RNA, 19 nt, Artificial Sequence
  Description of Artificial Sequence: Synthetic oligonucleotide
  Sense strand starting at position 3126 of SEQ ID NO: 585825
guguguuuccuauaugacu

SEQ ID NO: 670655 - RNA, 19 nt, Artificial Sequence
  Description of Artificial Sequence: Synthetic oligonucleotide
  Antisense strand to SEQ ID NO: 670654
agucauauaggaaacacac

SEQ ID NO: 670656 - RNA, 19 nt, Artificial Sequence
  Description of Artificial Sequence: Synthetic oligonucleotide
  Sense strand starting at position 3176 of SEQ ID NO: 585825
ggaguaaggcuucgguaac

SEQ ID NO: 670657 - RNA, 19 nt, Artificial Sequence
  Description of Artificial Sequence: Synthetic oligonucleotide
  Antisense strand to SEQ ID NO: 670656
guuaccgaagccuuacucc

SEQ ID NO: 670658 - RNA, 19 nt, Artificial Sequence
  Description of Artificial Sequence: Synthetic oligonucleotide
  Sense strand starting at position 3177 of SEQ ID NO: 585825
gaguaaggcuucgguaacu

SEQ ID NO: 670659 - RNA, 19 nt, Artificial Sequence
  Description of Artificial Sequence: Synthetic oligonucleotide
  Antisense strand to SEQ ID NO: 670658
aguuaccgaagccuuacuc

SEQ ID NO: 670660 - RNA, 19 nt, Artificial Sequence
  Description of Artificial Sequence: Synthetic oligonucleotide
  Sense strand starting at position 3188 of SEQ ID NO: 585825
cgguaacucuuuguucuga

SEQ ID NO: 670661 - RNA, 19 nt, Artificial Sequence
  Description of Artificial Sequence: Synthetic oligonucleotide
  Antisense strand to SEQ ID NO: 670660
ucagaacaaagaguuaccg

SEQ ID NO: 670662 - RNA, 19 nt, Artificial Sequence
  Description of Artificial Sequence: Synthetic oligonucleotide
  Sense strand starting at position 3189 of SEQ ID NO: 585825
gguaacucuuuguucugaa

SEQ ID NO: 670663 - RNA, 19 nt, Artificial Sequence
  Description of Artificial Sequence: Synthetic oligonucleotide
  Antisense strand to SEQ ID NO: 670662
uucagaacaaagaguuacc

SEQ ID NO: 670664 - RNA, 19 nt, Artificial Sequence
  Description of Artificial Sequence: Synthetic oligonucleotide
  Sense strand starting at position 3190 of SEQ ID NO: 585825
guaacucuuuguucugaau

SEQ ID NO: 670665 - RNA, 19 nt, Artificial Sequence
  Description of Artificial Sequence: Synthetic oligonucleotide
  Antisense strand to SEQ ID NO: 670664
auucagaacaaagaguuac

SEQ ID NO: 670666 - RNA, 19 nt, Artificial Sequence
  Description of Artificial Sequence: Synthetic oligonucleotide
  Sense strand starting at position 3234 of SEQ ID NO: 585825
cggaccuguaguuaaauca

SEQ ID NO: 670667 - RNA, 19 nt, Artificial Sequence
  Description of Artificial Sequence: Synthetic oligonucleotide
  Antisense strand to SEQ ID NO: 670666
ugauuuaacuacagguccg

SEQ ID NO: 670668 - RNA, 19 nt, Artificial Sequence
  Description of Artificial Sequence: Synthetic oligonucleotide
  Sense strand starting at position 3319 of SEQ ID NO: 585825
auuugaaauuuguggccuu

SEQ ID NO: 670669 - RNA, 19 nt, Artificial Sequence
  Description of Artificial Sequence: Synthetic oligonucleotide
  Antisense strand to SEQ ID NO: 670668
aaggccacaaauuucaaau

SEQ ID NO: 670670 - RNA, 19 nt, Artificial Sequence
  Description of Artificial Sequence: Synthetic oligonucleotide
  Sense strand starting at position 3460 of SEQ ID NO: 585825
gcaucacguugccuuaaua

SEQ ID NO: 670671 - RNA, 19 nt, Artificial Sequence
  Description of Artificial Sequence: Synthetic oligonucleotide
  Antisense strand to SEQ ID NO: 670670
uauuaaggcaacgugaugc

SEQ ID NO: 670672 - RNA, 19 nt, Artificial Sequence
  Description of Artificial Sequence: Synthetic oligonucleotide
  Sense strand starting at position 3485 of SEQ ID NO: 585825
auccauuucucucgugguu

SEQ ID NO: 670673 - RNA, 19 nt, Artificial Sequence
  Description of Artificial Sequence: Synthetic oligonucleotide
  Antisense strand to SEQ ID NO: 670672
aaccacgagagaaauggau

SEQ ID NO: 670674 - RNA, 19 nt, Artificial Sequence
  Description of Artificial Sequence: Synthetic oligonucleotide
  Sense strand starting at position 3559 of SEQ ID NO: 585825
aagugcugaagucgugauu

SEQ ID NO: 670675 - RNA, 19 nt, Artificial Sequence
  Description of Artificial Sequence: Synthetic oligonucleotide
  Antisense strand to SEQ ID NO: 670674
aaucacgacuucagcacuu

SEQ ID NO: 670676 - RNA, 19 nt, Artificial Sequence
  Description of Artificial Sequence: Synthetic oligonucleotide
  Sense strand starting at position 3562 of SEQ ID NO: 585825
ugcugaagucgugauuuac

SEQ ID NO: 670677 - RNA, 19 nt, Artificial Sequence
  Description of Artificial Sequence: Synthetic oligonucleotide
  Antisense strand to SEQ ID NO: 670676
guaaaucacgacuucagca

SEQ ID NO: 670678 - RNA, 19 nt, Artificial Sequence
  Description of Artificial Sequence: Synthetic oligonucleotide
  Sense strand starting at position 3674 of SEQ ID NO: 585825
uuuggugagcucuagagag

SEQ ID NO: 670679 - RNA, 19 nt, Artificial Sequence
  Description of Artificial Sequence: Synthetic oligonucleotide
  Antisense strand to SEQ ID NO: 670678
cucucuagagcucaccaaa

SEQ ID NO: 670680 - RNA, 19 nt, Artificial Sequence
  Description of Artificial Sequence: Synthetic oligonucleotide
  Sense strand starting at position 3797 of SEQ ID NO: 585825
gugccaacuuuccaggaau

SEQ ID NO: 670681 - RNA, 19 nt, Artificial Sequence
  Description of Artificial Sequence: Synthetic oligonucleotide
  Antisense strand to SEQ ID NO: 670680
auuccuggaaaguuggcac

SEQ ID NO: 670682 - RNA, 19 nt, Artificial Sequence
  Description of Artificial Sequence: Synthetic oligonucleotide
  Sense strand starting at position 3799 of SEQ ID NO: 585825
gccaacuuuccaggaauag

SEQ ID NO: 670683 - RNA, 19 nt, Artificial Sequence
  Description of Artificial Sequence: Synthetic oligonucleotide
  Antisense strand to SEQ ID NO: 670682
cuauuccuggaaaguuggc

SEQ ID NO: 670684 - RNA, 19 nt, Artificial Sequence
  Description of Artificial Sequence: Synthetic oligonucleotide
  Sense strand starting at position 3817 of SEQ ID NO: 585825
gcuggaaagcauuauacug

SEQ ID NO: 670685 - RNA, 19 nt, Artificial Sequence
  Description of Artificial Sequence: Synthetic oligonucleotide
  Antisense strand to SEQ ID NO: 670684
caguauaaugcuuuccagc

SEQ ID NO: 670686 - RNA, 19 nt, Artificial Sequence
  Description of Artificial Sequence: Synthetic oligonucleotide
  Sense strand starting at position 3975 of SEQ ID NO: 585825
ucaaauuauguguaugugu

SEQ ID NO: 670687 - RNA, 19 nt, Artificial Sequence
  Description of Artificial Sequence: Synthetic oligonucleotide
  Antisense strand to SEQ ID NO: 670686
acacauacacauaauuuga

SEQ ID NO: 670688 - RNA, 19 nt, Artificial Sequence
  Description of Artificial Sequence: Synthetic oligonucleotide
  Sense strand starting at position 13 of SEQ ID NO: 585826
acuccuaccucagugaucu

SEQ ID NO: 670689 - RNA, 19 nt, Artificial Sequence
  Description of Artificial Sequence: Synthetic oligonucleotide
  Antisense strand to SEQ ID NO: 670688
agaucacugagguaggagu

SEQ ID NO: 670690 - RNA, 19 nt, Artificial Sequence
  Description of Artificial Sequence: Synthetic oligonucleotide
  Sense strand starting at position 14 of SEQ ID NO: 585826
cuccuaccucagugaucuu

SEQ ID NO: 670691 - RNA, 19 nt, Artificial Sequence
  Description of Artificial Sequence: Synthetic oligonucleotide
  Antisense strand to SEQ ID NO: 670690
aagaucacugagguaggag

SEQ ID NO: 670692 - RNA, 19 nt, Artificial Sequence
  Description of Artificial Sequence: Synthetic oligonucleotide
  Sense strand starting at position 17 of SEQ ID NO: 585826
cuaccucagugaucuuguu

SEQ ID NO: 670693 - RNA, 19 nt, Artificial Sequence
  Description of Artificial Sequence: Synthetic oligonucleotide
  Antisense strand to SEQ ID NO: 670692
aacaagaucacugagguag

SEQ ID NO: 670694 - RNA, 19 nt, Artificial Sequence
  Description of Artificial Sequence: Synthetic oligonucleotide
  Sense strand starting at position 199 of SEQ ID NO: 585826
agccaaugacaagguaauu

SEQ ID NO: 670695 - RNA, 19 nt, Artificial Sequence
  Description of Artificial Sequence: Synthetic oligonucleotide
  Antisense strand to SEQ ID NO: 670694
aauuaccuugucauuggcu

SEQ ID NO: 670696 - RNA, 19 nt, Artificial Sequence
  Description of Artificial Sequence: Synthetic oligonucleotide
  Sense strand starting at position 283 of SEQ ID NO: 585826
cagcgucuucuugcuuuau

SEQ ID NO: 670697 - RNA, 19 nt, Artificial Sequence
  Description of Artificial Sequence: Synthetic oligonucleotide
  Antisense strand to SEQ ID NO: 670696
auaaagcaagaagacgcug

SEQ ID NO: 670698 - RNA, 19 nt, Artificial Sequence
  Description of Artificial Sequence: Synthetic oligonucleotide
  Sense strand starting at position 322 of SEQ ID NO: 585826
gugguauucucagcuacaa

SEQ ID NO: 670699 - RNA, 19 nt, Artificial Sequence
  Description of Artificial Sequence: Synthetic oligonucleotide
  Antisense strand to SEQ ID NO: 670698
uuguagcugagaauaccac

SEQ ID NO: 670700 - RNA, 19 nt, Artificial Sequence
  Description of Artificial Sequence: Synthetic oligonucleotide
  Sense strand starting at position 384 of SEQ ID NO: 585826
gugaauuucuuucuguuug

SEQ ID NO: 670701 - RNA, 19 nt, Artificial Sequence
  Description of Artificial Sequence: Synthetic oligonucleotide
  Antisense strand to SEQ ID NO: 670700
caaacagaaagaaauucac

SEQ ID NO: 670702 - RNA, 19 nt, Artificial Sequence
  Description of Artificial Sequence: Synthetic oligonucleotide
  Sense strand starting at position 472 of SEQ ID NO: 585826
ucuugaaugguucgggauu

SEQ ID NO: 670703 - RNA, 19 nt, Artificial Sequence
  Description of Artificial Sequence: Synthetic oligonucleotide
  Antisense strand to SEQ ID NO: 670702
aaucccgaaccauucaaga

SEQ ID NO: 670704 - RNA, 19 nt, Artificial Sequence
  Description of Artificial Sequence: Synthetic oligonucleotide
  Sense strand starting at position 599 of SEQ ID NO: 585826
ugugaauucguugggaauc

SEQ ID NO: 670705 - RNA, 19 nt, Artificial Sequence
  Description of Artificial Sequence: Synthetic oligonucleotide
  Antisense strand to SEQ ID NO: 670704
gauucccaacgaauucaca

SEQ ID NO: 670706 - RNA, 19 nt, Artificial Sequence
  Description of Artificial Sequence: Synthetic oligonucleotide
  Sense strand starting at position 2154 of SEQ ID NO: 585826
ccugauuucuccuuguuuc

SEQ ID NO: 670707 - RNA, 19 nt, Artificial Sequence
  Description of Artificial Sequence: Synthetic oligonucleotide
  Antisense strand to SEQ ID NO: 670706
gaaacaaggagaaaucagg

SEQ ID NO: 670708 - RNA, 19 nt, Artificial Sequence
  Description of Artificial Sequence: Synthetic oligonucleotide
  Sense strand starting at position 2514 of SEQ ID NO: 585826
gggaauagauccucccugu

SEQ ID NO: 670709 - RNA, 19 nt, Artificial Sequence
  Description of Artificial Sequence: Synthetic oligonucleotide
  Antisense strand to SEQ ID NO: 670708
acagggaggaucuauuccc

SEQ ID NO: 670710 - RNA, 19 nt, Artificial Sequence
  Description of Artificial Sequence: Synthetic oligonucleotide
  Sense strand starting at position 2517 of SEQ ID NO: 585826
aauagauccucccugugga

SEQ ID NO: 670711 - RNA, 19 nt, Artificial Sequence
  Description of Artificial Sequence: Synthetic oligonucleotide
  Antisense strand to SEQ ID NO: 670710
uccacagggaggaucuauu

SEQ ID NO: 670712 - RNA, 19 nt, Artificial Sequence
  Description of Artificial Sequence: Synthetic oligonucleotide
  Sense strand starting at position 2646 of SEQ ID NO: 585826
cggagaauccuagauguug

SEQ ID NO: 670713 - RNA, 19 nt, Artificial Sequence
  Description of Artificial Sequence: Synthetic oligonucleotide
  Antisense strand to SEQ ID NO: 670712
caacaucuaggauucuccg

SEQ ID NO: 670714 - RNA, 19 nt, Artificial Sequence
  Description of Artificial Sequence: Synthetic oligonucleotide
  Sense strand starting at position 2680 of SEQ ID NO: 585826
ccauaauuggccuggugga

SEQ ID NO: 670715 - RNA, 19 nt, Artificial Sequence
  Description of Artificial Sequence: Synthetic oligonucleotide
  Antisense strand to SEQ ID NO: 670714
uccaccaggccaauuaugg

SEQ ID NO: 670716 - RNA, 19 nt, Artificial Sequence
  Description of Artificial Sequence: Synthetic oligonucleotide
  Sense strand starting at position 2681 of SEQ ID NO: 585826
cauaauuggccugguggaa

SEQ ID NO: 670717 - RNA, 19 nt, Artificial Sequence
  Description of Artificial Sequence: Synthetic oligonucleotide
  Antisense strand to SEQ ID NO: 670716
uuccaccaggccaauuaug

SEQ ID NO: 670718 - RNA, 19 nt, Artificial Sequence
  Description of Artificial Sequence: Synthetic oligonucleotide
  Sense strand starting at position 2789 of SEQ ID NO: 585826
aauguagugcugugaaagg

SEQ ID NO: 670719 - RNA, 19 nt, Artificial Sequence
  Description of Artificial Sequence: Synthetic oligonucleotide
  Antisense strand to SEQ ID NO: 670718
ccuuucacagcacuacauu

SEQ ID NO: 670720 - RNA, 19 nt, Artificial Sequence
  Description of Artificial Sequence: Synthetic oligonucleotide
  Sense strand starting at position 2839 of SEQ ID NO: 585826
ucugaaacuuauccgcaga

SEQ ID NO: 670721 - RNA, 19 nt, Artificial Sequence
  Description of Artificial Sequence: Synthetic oligonucleotide
  Antisense strand to SEQ ID NO: 670720
ucugcggauaaguuucaga

SEQ ID NO: 670722 - RNA, 19 nt, Artificial Sequence
  Description of Artificial Sequence: Synthetic oligonucleotide
  Sense strand starting at position 2841 of SEQ ID NO: 585826
ugaaacuuauccgcagaga

SEQ ID NO: 670723 - RNA, 19 nt, Artificial Sequence
  Description of Artificial Sequence: Synthetic oligonucleotide
  Antisense strand to SEQ ID NO: 670722
ucucugcggauaaguuuca

SEQ ID NO: 670724 - RNA, 19 nt, Artificial Sequence
  Description of Artificial Sequence: Synthetic oligonucleotide
  Sense strand starting at position 2842 of SEQ ID NO: 585826
gaaacuuauccgcagagac

SEQ ID NO: 670725 - RNA, 19 nt, Artificial Sequence
  Description of Artificial Sequence: Synthetic oligonucleotide
  Antisense strand to SEQ ID NO: 670724
gucucugcggauaaguuuc

SEQ ID NO: 670726 - RNA, 19 nt, Artificial Sequence
  Description of Artificial Sequence: Synthetic oligonucleotide
  Sense strand starting at position 2877 of SEQ ID NO: 585826
cugagacauucuucucugu

SEQ ID NO: 670727 - RNA, 19 nt, Artificial Sequence
  Description of Artificial Sequence: Synthetic oligonucleotide
  Antisense strand to SEQ ID NO: 670726
acagagaagaaugucucag

SEQ ID NO: 670728 - RNA, 19 nt, Artificial Sequence
  Description of Artificial Sequence: Synthetic oligonucleotide
  Sense strand starting at position 2880 of SEQ ID NO: 585826
agacauucuucucugugca

SEQ ID NO: 670729 - RNA, 19 nt, Artificial Sequence
  Description of Artificial Sequence: Synthetic oligonucleotide
  Antisense strand to SEQ ID NO: 670728
ugcacagagaagaaugucu

SEQ ID NO: 670730 - RNA, 19 nt, Artificial Sequence
  Description of Artificial Sequence: Synthetic oligonucleotide
  Sense strand starting at position 2933 of SEQ ID NO: 585826
guaagacuuaaaugaggua

SEQ ID NO: 670731 - RNA, 19 nt, Artificial Sequence
  Description of Artificial Sequence: Synthetic oligonucleotide
  Antisense strand to SEQ ID NO: 670730
uaccucauuuaagucuuac

SEQ ID NO: 670732 - RNA, 19 nt, Artificial Sequence
  Description of Artificial Sequence: Synthetic oligonucleotide
  Sense strand starting at position 3006 of SEQ ID NO: 585826
gggaaaguccuguguaucu

SEQ ID NO: 670733 - RNA, 19 nt, Artificial Sequence
  Description of Artificial Sequence: Synthetic oligonucleotide
  Antisense strand to SEQ ID NO: 670732
agauacacaggacuuuccc

SEQ ID NO: 670734 - RNA, 19 nt, Artificial Sequence
  Description of Artificial Sequence: Synthetic oligonucleotide
  Sense strand starting at position 3017 of SEQ ID NO: 585826
guguaucugccacagaaau

SEQ ID NO: 670735 - RNA, 19 nt, Artificial Sequence
  Description of Artificial Sequence: Synthetic oligonucleotide
  Antisense strand to SEQ ID NO: 670734
auuucuguggcagauacac

SEQ ID NO: 670736 - RNA, 19 nt, Artificial Sequence
  Description of Artificial Sequence: Synthetic oligonucleotide
  Sense strand starting at position 3091 of SEQ ID NO: 585826
ccaauugauccggauccca

SEQ ID NO: 670737 - RNA, 19 nt, Artificial Sequence
  Description of Artificial Sequence: Synthetic oligonucleotide
  Antisense strand to SEQ ID NO: 670736
ugggauccggaucaauugg

SEQ ID NO: 670738 - RNA, 19 nt, Artificial Sequence
  Description of Artificial Sequence: Synthetic oligonucleotide
  Sense strand starting at position 3173 of SEQ ID NO: 585826
uagggaucuugccuugaaa

SEQ ID NO: 670739 - RNA, 19 nt, Artificial Sequence
  Description of Artificial Sequence: Synthetic oligonucleotide
  Antisense strand to SEQ ID NO: 670738
uuucaaggcaagaucccua

SEQ ID NO: 670740 - RNA, 19 nt, Artificial Sequence
  Description of Artificial Sequence: Synthetic oligonucleotide
  Sense strand starting at position 3231 of SEQ ID NO: 585826
ggaauugaguaaguuuaac

SEQ ID NO: 670741 - RNA, 19 nt, Artificial Sequence
  Description of Artificial Sequence: Synthetic oligonucleotide
  Antisense strand to SEQ ID NO: 670740
guuaaacuuacucaauucc

SEQ ID NO: 670742 - RNA, 19 nt, Artificial Sequence
  Description of Artificial Sequence: Synthetic oligonucleotide
  Sense strand starting at position 3239 of SEQ ID NO: 585826
guaaguuuaacagguaagu

SEQ ID NO: 670743 - RNA, 19 nt, Artificial Sequence
  Description of Artificial Sequence: Synthetic oligonucleotide
  Antisense strand to SEQ ID NO: 670742
acuuaccuguuaaacuuac

SEQ ID NO: 670744 - RNA, 19 nt, Artificial Sequence
  Description of Artificial Sequence: Synthetic oligonucleotide
  Sense strand starting at position 3275 of SEQ ID NO: 585826
ugcugauaccacuacugaa

SEQ ID NO: 670745 - RNA, 19 nt, Artificial Sequence
  Description of Artificial Sequence: Synthetic oligonucleotide
  Antisense strand to SEQ ID NO: 670744
uucaguagugguaucagca

SEQ ID NO: 670746 - RNA, 19 nt, Artificial Sequence
  Description of Artificial Sequence: Synthetic oligonucleotide
  Sense strand starting at position 3430 of SEQ ID NO: 585826
ggauauaaauaagauggga

SEQ ID NO: 670747 - RNA, 19 nt, Artificial Sequence
  Description of Artificial Sequence: Synthetic oligonucleotide
  Antisense strand to SEQ ID NO: 670746
ucccaucuuauuuauaucc

SEQ ID NO: 670748 - RNA, 19 nt, Artificial Sequence
  Description of Artificial Sequence: Synthetic oligonucleotide
  Sense strand starting at position 3584 of SEQ ID NO: 585826
ccugaaauaucccugaggu

SEQ ID NO: 670749 - RNA, 19 nt, Artificial Sequence
  Description of Artificial Sequence: Synthetic oligonucleotide
  Antisense strand to SEQ ID NO: 670748
accucagggauauuucagg

SEQ ID NO: 670750 - RNA, 19 nt, Artificial Sequence
  Description of Artificial Sequence: Synthetic oligonucleotide
  Sense strand starting at position 3585 of SEQ ID NO: 585826
cugaaauaucccugagguu

SEQ ID NO: 670751 - RNA, 19 nt, Artificial Sequence
  Description of Artificial Sequence: Synthetic oligonucleotide
  Antisense strand to SEQ ID NO: 670750
aaccucagggauauuucag

SEQ ID NO: 670752 - RNA, 19 nt, Artificial Sequence
  Description of Artificial Sequence: Synthetic oligonucleotide
  Sense strand starting at position 3594 of SEQ ID NO: 585826
cccugagguuucuuucuac

SEQ ID NO: 670753 - RNA, 19 nt, Artificial Sequence
  Description of Artificial Sequence: Synthetic oligonucleotide
  Antisense strand to SEQ ID NO: 670752
guagaaagaaaccucaggg

SEQ ID NO: 670754 - RNA, 19 nt, Artificial Sequence
  Description of Artificial Sequence: Synthetic oligonucleotide
  Sense strand starting at position 3597 of SEQ ID NO: 585826
ugagguuucuuucuacaga

SEQ ID NO: 670755 - RNA, 19 nt, Artificial Sequence
  Description of Artificial Sequence: Synthetic oligonucleotide
  Antisense strand to SEQ ID NO: 670754
ucuguagaaagaaaccuca

SEQ ID NO: 670756 - RNA, 19 nt, Artificial Sequence
  Description of Artificial Sequence: Synthetic oligonucleotide
  Sense strand starting at position 3600 of SEQ ID NO: 585826
gguuucuuucuacagaaau

SEQ ID NO: 670757 - RNA, 19 nt, Artificial Sequence
  Description of Artificial Sequence: Synthetic oligonucleotide
  Antisense strand to SEQ ID NO: 670756
auuucuguagaaagaaacc

SEQ ID NO: 670758 - RNA, 19 nt, Artificial Sequence
  Description of Artificial Sequence: Synthetic oligonucleotide
  Sense strand starting at position 3716 of SEQ ID NO: 585826
acaggacacucugaagaau

SEQ ID NO: 670759 - RNA, 19 nt, Artificial Sequence
  Description of Artificial Sequence: Synthetic oligonucleotide
  Antisense strand to SEQ ID NO: 670758
auucuucagaguguccugu

SEQ ID NO: 670760 - RNA, 19 nt, Artificial Sequence
  Description of Artificial Sequence: Synthetic oligonucleotide
  Sense strand starting at position 3817 of SEQ ID NO: 585826
ccgaauguagcagacauga

SEQ ID NO: 670761 - RNA, 19 nt, Artificial Sequence
  Description of Artificial Sequence: Synthetic oligonucleotide
  Antisense strand to SEQ ID NO: 670760
ucaugucugcuacauucgg

SEQ ID NO: 670762 - RNA, 19 nt, Artificial Sequence
  Description of Artificial Sequence: Synthetic oligonucleotide
  Sense strand starting at position 3874 of SEQ ID NO: 585826
guagaagucucucuauuaa

SEQ ID NO: 670763 - RNA, 19 nt, Artificial Sequence
  Description of Artificial Sequence: Synthetic oligonucleotide
  Antisense strand to SEQ ID NO: 670762
uuaauagagagacuucuac

SEQ ID NO: 670764 - RNA, 19 nt, Artificial Sequence
  Description of Artificial Sequence: Synthetic oligonucleotide
  Sense strand starting at position 3914 of SEQ ID NO: 585826
aggugucugccuugaauaa

SEQ ID NO: 670765 - RNA, 19 nt, Artificial Sequence
  Description of Artificial Sequence: Synthetic oligonucleotide
  Antisense strand to SEQ ID NO: 670764
uuauucaaggcagacaccu

SEQ ID NO: 670766 - RNA, 19 nt, Artificial Sequence
  Description of Artificial Sequence: Synthetic oligonucleotide
  Sense strand starting at position 3915 of SEQ ID NO: 585826
ggugucugccuugaauaac

SEQ ID NO: 670767 - RNA, 19 nt, Artificial Sequence
  Description of Artificial Sequence: Synthetic oligonucleotide
  Antisense strand to SEQ ID NO: 670766
guuauucaaggcagacacc

SEQ ID NO: 670768 - RNA, 19 nt, Artificial Sequence
  Description of Artificial Sequence: Synthetic oligonucleotide
  Sense strand starting at position 17 of SEQ ID NO: 585827
cacccaguccuuuaguguu

SEQ ID NO: 670769 - RNA, 19 nt, Artificial Sequence
  Description of Artificial Sequence: Synthetic oligonucleotide
  Antisense strand to SEQ ID NO: 670768
aacacuaaaggacugggug

SEQ ID NO: 670770 - RNA, 19 nt, Artificial Sequence
  Description of Artificial Sequence: Synthetic oligonucleotide
  Sense strand starting at position 25 of SEQ ID NO: 585827
ccuuuaguguuucucagau

SEQ ID NO: 670771 - RNA, 19 nt, Artificial Sequence
  Description of Artificial Sequence: Synthetic oligonucleotide
  Antisense strand to SEQ ID NO: 670770
aucugagaaacacuaaagg

SEQ ID NO: 670772 - RNA, 19 nt, Artificial Sequence
  Description of Artificial Sequence: Synthetic oligonucleotide
  Sense strand starting at position 61 of SEQ ID NO: 585827
gcacauauuccaugugauu

SEQ ID NO: 670773 - RNA, 19 nt, Artificial Sequence
  Description of Artificial Sequence: Synthetic oligonucleotide
  Antisense strand to SEQ ID NO: 670772
aaucacauggaauaugugc

SEQ ID NO: 670774 - RNA, 19 nt, Artificial Sequence
  Description of Artificial Sequence: Synthetic oligonucleotide
  Sense strand starting at position 83 of SEQ ID NO: 585827
gaugaugucccuugcccaa

SEQ ID NO: 670775 - RNA, 19 nt, Artificial Sequence
  Description of Artificial Sequence: Synthetic oligonucleotide
  Antisense strand to SEQ ID NO: 670774
uugggcaagggacaucauc

SEQ ID NO: 670776 - RNA, 19 nt, Artificial Sequence
  Description of Artificial Sequence: Synthetic oligonucleotide
  Sense strand starting at position 85 of SEQ ID NO: 585827
ugaugucccuugcccaaau

SEQ ID NO: 670777 - RNA, 19 nt, Artificial Sequence
  Description of Artificial Sequence: Synthetic oligonucleotide
  Antisense strand to SEQ ID NO: 670776
auuugggcaagggacauca

SEQ ID NO: 670778 - RNA, 19 nt, Artificial Sequence
  Description of Artificial Sequence: Synthetic oligonucleotide
  Sense strand starting at position 257 of SEQ ID NO: 585827
gguagaacgcucugaggga

SEQ ID NO: 670779 - RNA, 19 nt, Artificial Sequence
  Description of Artificial Sequence: Synthetic oligonucleotide
  Antisense strand to SEQ ID NO: 670778
ucccucagagcguucuacc

SEQ ID NO: 670780 - RNA, 19 nt, Artificial Sequence
  Description of Artificial Sequence: Synthetic oligonucleotide
  Sense strand starting at position 261 of SEQ ID NO: 585827
gaacgcucugagggaagaa

SEQ ID NO: 670781 - RNA, 19 nt, Artificial Sequence
  Description of Artificial Sequence: Synthetic oligonucleotide
  Antisense strand to SEQ ID NO: 670780
uucuucccucagagcguuc

SEQ ID NO: 670782 - RNA, 19 nt, Artificial Sequence
  Description of Artificial Sequence: Synthetic oligonucleotide
  Sense strand starting at position 380 of SEQ ID NO: 585827
aaaguuguuccugggcuca

SEQ ID NO: 670783 - RNA, 19 nt, Artificial Sequence
  Description of Artificial Sequence: Synthetic oligonucleotide
  Antisense strand to SEQ ID NO: 670782
ugagcccaggaacaacuuu

SEQ ID NO: 670784 - RNA, 19 nt, Artificial Sequence
  Description of Artificial Sequence: Synthetic oligonucleotide
  Sense strand starting at position 580 of SEQ ID NO: 585827
uugagacauuaagggagau

SEQ ID NO: 670785 - RNA, 19 nt, Artificial Sequence
  Description of Artificial Sequence: Synthetic oligonucleotide
  Antisense strand to SEQ ID NO: 670784
aucucccuuaaugucucaa

SEQ ID NO: 670786 - RNA, 19 nt, Artificial Sequence
  Description of Artificial Sequence: Synthetic oligonucleotide
  Sense strand starting at position 781 of SEQ ID NO: 585827
gagggaauaucugacacaa

SEQ ID NO: 670787 - RNA, 19 nt, Artificial Sequence
  Description of Artificial Sequence: Synthetic oligonucleotide
  Antisense strand to SEQ ID NO: 670786
uugugucagauauucccuc

SEQ ID NO: 670788 - RNA, 19 nt, Artificial Sequence
  Description of Artificial Sequence: Synthetic oligonucleotide
  Sense strand starting at position 783 of SEQ ID NO: 585827
gggaauaucugacacaaug

SEQ ID NO: 670789 - RNA, 19 nt, Artificial Sequence
  Description of Artificial Sequence: Synthetic oligonucleotide
  Antisense strand to SEQ ID NO: 670788
cauugugucagauauuccc

SEQ ID NO: 670790 - RNA, 19 nt, Artificial Sequence
  Description of Artificial Sequence: Synthetic oligonucleotide
  Sense strand starting at position 792 of SEQ ID NO: 585827
ugacacaaugaguguguau

SEQ ID NO: 670791 - RNA, 19 nt, Artificial Sequence
  Description of Artificial Sequence: Synthetic oligonucleotide
  Antisense strand to SEQ ID NO: 670790
auacacacucauuguguca

SEQ ID NO: 670792 - RNA, 19 nt, Artificial Sequence
  Description of Artificial Sequence: Synthetic oligonucleotide
  Sense strand starting at position 822 of SEQ ID NO: 585827
ucgaaaggucagggaucau

SEQ ID NO: 670793 - RNA, 19 nt, Artificial Sequence
  Description of Artificial Sequence: Synthetic oligonucleotide
  Antisense strand to SEQ ID NO: 670792
augaucccugaccuuucga

SEQ ID NO: 670794 - RNA, 19 nt, Artificial Sequence
  Description of Artificial Sequence: Synthetic oligonucleotide
  Sense strand starting at position 872 of SEQ ID NO: 585827
cgaaauagguuagauuuga

SEQ ID NO: 670795 - RNA, 19 nt, Artificial Sequence
  Description of Artificial Sequence: Synthetic oligonucleotide
  Antisense strand to SEQ ID NO: 670794
ucaaaucuaaccuauuucg

SEQ ID NO: 670796 - RNA, 19 nt, Artificial Sequence
  Description of Artificial Sequence: Synthetic oligonucleotide
  Sense strand starting at position 892 of SEQ ID NO: 585827
guagaagucagagguuacu

SEQ ID NO: 670797 - RNA, 19 nt, Artificial Sequence
  Description of Artificial Sequence: Synthetic oligonucleotide
  Antisense strand to SEQ ID NO: 670796
aguaaccucugacuucuac

SEQ ID NO: 670798 - RNA, 19 nt, Artificial Sequence
  Description of Artificial Sequence: Synthetic oligonucleotide
  Sense strand starting at position 898 of SEQ ID NO: 585827
gucagagguuacuuaccaa

SEQ ID NO: 670799 - RNA, 19 nt, Artificial Sequence
  Description of Artificial Sequence: Synthetic oligonucleotide
  Antisense strand to SEQ ID NO: 670798
uugguaaguaaccucugac

SEQ ID NO: 670800 - RNA, 19 nt, Artificial Sequence
  Description of Artificial Sequence: Synthetic oligonucleotide
  Sense strand starting at position 1101 of SEQ ID NO: 585827
ggucaaguacuguggaguu

SEQ ID NO: 670801 - RNA, 19 nt, Artificial Sequence
  Description of Artificial Sequence: Synthetic oligonucleotide
  Antisense strand to SEQ ID NO: 670800
aacuccacaguacuugacc

SEQ ID NO: 670802 - RNA, 19 nt, Artificial Sequence
  Description of Artificial Sequence: Synthetic oligonucleotide
  Sense strand starting at position 2117 of SEQ ID NO: 585827
ucgguuuccaacuagacga

SEQ ID NO: 670803 - RNA, 19 nt, Artificial Sequence
  Description of Artificial Sequence: Synthetic oligonucleotide
  Antisense strand to SEQ ID NO: 670802
ucgucuaguuggaaaccga

SEQ ID NO: 670804 - RNA, 19 nt, Artificial Sequence
  Description of Artificial Sequence: Synthetic oligonucleotide
  Sense strand starting at position 2156 of SEQ ID NO: 585827
agacuucccgucuguacaa

SEQ ID NO: 670805 - RNA, 19 nt, Artificial Sequence
  Description of Artificial Sequence: Synthetic oligonucleotide
  Antisense strand to SEQ ID NO: 670804
uuguacagacgggaagucu

SEQ ID NO: 670806 - RNA, 19 nt, Artificial Sequence
  Description of Artificial Sequence: Synthetic oligonucleotide
  Sense strand starting at position 2157 of SEQ ID NO: 585827
gacuucccgucuguacaaa

SEQ ID NO: 670807 - RNA, 19 nt, Artificial Sequence
  Description of Artificial Sequence: Synthetic oligonucleotide
  Antisense strand to SEQ ID NO: 670806
uuuguacagacgggaaguc

SEQ ID NO: 670808 - RNA, 19 nt, Artificial Sequence
  Description of Artificial Sequence: Synthetic oligonucleotide
  Sense strand starting at position 2183 of SEQ ID NO: 585827
gccacauuggcgcugucau

SEQ ID NO: 670809 - RNA, 19 nt, Artificial Sequence
  Description of Artificial Sequence: Synthetic oligonucleotide
  Antisense strand to SEQ ID NO: 670808
augacagcgccaauguggc

SEQ ID NO: 670810 - RNA, 19 nt, Artificial Sequence
  Description of Artificial Sequence: Synthetic oligonucleotide
  Sense strand starting at position 2246 of SEQ ID NO: 585827
gccagagucuuucucucag

SEQ ID NO: 670811 - RNA, 19 nt, Artificial Sequence
  Description of Artificial Sequence: Synthetic oligonucleotide
  Antisense strand to SEQ ID NO: 670810
cugagagaaagacucuggc

SEQ ID NO: 670812 - RNA, 19 nt, Artificial Sequence
  Description of Artificial Sequence: Synthetic oligonucleotide
  Sense strand starting at position 2290 of SEQ ID NO: 585827
uccgaucaauccuugggaa

SEQ ID NO: 670813 - RNA, 19 nt, Artificial Sequence
  Description of Artificial Sequence: Synthetic oligonucleotide
  Antisense strand to SEQ ID NO: 670812
uucccaaggauugaucgga

SEQ ID NO: 670814 - RNA, 19 nt, Artificial Sequence
  Description of Artificial Sequence: Synthetic oligonucleotide
  Sense strand starting at position 2291 of SEQ ID NO: 585827
ccgaucaauccuugggaau

SEQ ID NO: 670815 - RNA, 19 nt, Artificial Sequence
  Description of Artificial Sequence: Synthetic oligonucleotide
  Antisense strand to SEQ ID NO: 670814
auucccaaggauugaucgg

SEQ ID NO: 670816 - RNA, 19 nt, Artificial Sequence
  Description of Artificial Sequence: Synthetic oligonucleotide
  Sense strand starting at position 2292 of SEQ ID NO: 585827
cgaucaauccuugggaauc

SEQ ID NO: 670817 - RNA, 19 nt, Artificial Sequence
  Description of Artificial Sequence: Synthetic oligonucleotide
  Antisense strand to SEQ ID NO: 670816
gauucccaaggauugaucg

SEQ ID NO: 670818 - RNA, 19 nt, Artificial Sequence
  Description of Artificial Sequence: Synthetic oligonucleotide
  Sense strand starting at position 2614 of SEQ ID NO: 585827
gccagugaccgcuuuaucu

SEQ ID NO: 670819 - RNA, 19 nt, Artificial Sequence
  Description of Artificial Sequence: Synthetic oligonucleotide
  Antisense strand to SEQ ID NO: 670818
agauaaagcggucacuggc

SEQ ID NO: 670820 - RNA, 19 nt, Artificial Sequence
  Description of Artificial Sequence: Synthetic oligonucleotide
  Sense strand starting at position 2826 of SEQ ID NO: 585827
gggcacgauuccucuuaaa

SEQ ID NO: 670821 - RNA, 19 nt, Artificial Sequence
  Description of Artificial Sequence: Synthetic oligonucleotide
  Antisense strand to SEQ ID NO: 670820
uuuaagaggaaucgugccc

SEQ ID NO: 670822 - RNA, 19 nt, Artificial Sequence
  Description of Artificial Sequence: Synthetic oligonucleotide
  Sense strand starting at position 2934 of SEQ ID NO: 585827
uggcuuuacgcugggaaua

SEQ ID NO: 670823 - RNA, 19 nt, Artificial Sequence
  Description of Artificial Sequence: Synthetic oligonucleotide
  Antisense strand to SEQ ID NO: 670822
uauucccagcguaaagcca

SEQ ID NO: 670824 - RNA, 19 nt, Artificial Sequence
  Description of Artificial Sequence: Synthetic oligonucleotide
  Sense strand starting at position 2935 of SEQ ID NO: 585827
ggcuuuacgcugggaauag

SEQ ID NO: 670825 - RNA, 19 nt, Artificial Sequence
  Description of Artificial Sequence: Synthetic oligonucleotide
  Antisense strand to SEQ ID NO: 670824
cuauucccagcguaaagcc

SEQ ID NO: 670826 - RNA, 19 nt, Artificial Sequence
  Description of Artificial Sequence: Synthetic oligonucleotide
  Sense strand starting at position 3008 of SEQ ID NO: 585827
uugggaugaccugguauuc

SEQ ID NO: 670827 - RNA, 19 nt, Artificial Sequence
  Description of Artificial Sequence: Synthetic oligonucleotide
  Antisense strand to SEQ ID NO: 670826
gaauaccaggucaucccaa

SEQ ID NO: 670828 - RNA, 19 nt, Artificial Sequence
  Description of Artificial Sequence: Synthetic oligonucleotide
  Sense strand starting at position 3230 of SEQ ID NO: 585827
guuacacuguuguuugaca

SEQ ID NO: 670829 - RNA, 19 nt, Artificial Sequence
  Description of Artificial Sequence: Synthetic oligonucleotide
  Antisense strand to SEQ ID NO: 670828
ugucaaacaacaguguaac

SEQ ID NO: 670830 - RNA, 19 nt, Artificial Sequence
  Description of Artificial Sequence: Synthetic oligonucleotide
  Sense strand starting at position 3313 of SEQ ID NO: 585827
gaauuaaagucucuaguug

SEQ ID NO: 670831 - RNA, 19 nt, Artificial Sequence
  Description of Artificial Sequence: Synthetic oligonucleotide
  Antisense strand to SEQ ID NO: 670830
caacuagagacuuuaauuc

SEQ ID NO: 670832 - RNA, 19 nt, Artificial Sequence
  Description of Artificial Sequence: Synthetic oligonucleotide
  Sense strand starting at position 3317 of SEQ ID NO: 585827
uaaagucucuaguuggaug

SEQ ID NO: 670833 - RNA, 19 nt, Artificial Sequence
  Description of Artificial Sequence: Synthetic oligonucleotide
  Antisense strand to SEQ ID NO: 670832
cauccaacuagagacuuua

SEQ ID NO: 670834 - RNA, 19 nt, Artificial Sequence
  Description of Artificial Sequence: Synthetic oligonucleotide
  Sense strand starting at position 3322 of SEQ ID NO: 585827
ucucuaguuggauguuuga

SEQ ID NO: 670835 - RNA, 19 nt, Artificial Sequence
  Description of Artificial Sequence: Synthetic oligonucleotide
  Antisense strand to SEQ ID NO: 670834
ucaaacauccaacuagaga

SEQ ID NO: 670836 - RNA, 19 nt, Artificial Sequence
  Description of Artificial Sequence: Synthetic oligonucleotide
  Sense strand starting at position 3325 of SEQ ID NO: 585827
cuaguuggauguuugaaga

SEQ ID NO: 670837 - RNA, 19 nt, Artificial Sequence
  Description of Artificial Sequence: Synthetic oligonucleotide
  Antisense strand to SEQ ID NO: 670836
ucuucaaacauccaacuag

SEQ ID NO: 670838 - RNA, 19 nt, Artificial Sequence
  Description of Artificial Sequence: Synthetic oligonucleotide
  Sense strand starting at position 3380 of SEQ ID NO: 585827
gucugugugccuguacaua

SEQ ID NO: 670839 - RNA, 19 nt, Artificial Sequence
  Description of Artificial Sequence: Synthetic oligonucleotide
  Antisense strand to SEQ ID NO: 670838
uauguacaggcacacagac

SEQ ID NO: 670840 - RNA, 19 nt, Artificial Sequence
  Description of Artificial Sequence: Synthetic oligonucleotide
  Sense strand starting at position 3720 of SEQ ID NO: 585827
ccagauccuugugugaacu

SEQ ID NO: 670841 - RNA, 19 nt, Artificial Sequence
  Description of Artificial Sequence: Synthetic oligonucleotide
  Antisense strand to SEQ ID NO: 670840
aguucacacaaggaucugg

SEQ ID NO: 670842 - RNA, 19 nt, Artificial Sequence
  Description of Artificial Sequence: Synthetic oligonucleotide
  Sense strand starting at position 3721 of SEQ ID NO: 585827
cagauccuugugugaacuu

SEQ ID NO: 670843 - RNA, 19 nt, Artificial Sequence
  Description of Artificial Sequence: Synthetic oligonucleotide
  Antisense strand to SEQ ID NO: 670842
aaguucacacaaggaucug

SEQ ID NO: 670844 - RNA, 19 nt, Artificial Sequence
  Description of Artificial Sequence: Synthetic oligonucleotide
  Sense strand starting at position 3781 of SEQ ID NO: 585827
gccuguggucuuuaugaga

SEQ ID NO: 670845 - RNA, 19 nt, Artificial Sequence
  Description of Artificial Sequence: Synthetic oligonucleotide
  Antisense strand to SEQ ID NO: 670844
ucucauaaagaccacaggc

SEQ ID NO: 670846 - RNA, 19 nt, Artificial Sequence
  Description of Artificial Sequence: Synthetic oligonucleotide
  Sense strand starting at position 3811 of SEQ ID NO: 585827
uccugaggugacugaucuu

SEQ ID NO: 670847 - RNA, 19 nt, Artificial Sequence
  Description of Artificial Sequence: Synthetic oligonucleotide
  Antisense strand to SEQ ID NO: 670846
aagaucagucaccucagga

SEQ ID NO: 670848 - RNA, 19 nt, Artificial Sequence
  Description of Artificial Sequence: Synthetic oligonucleotide
  Sense strand starting at position 29 of SEQ ID NO: 585828
uggcuucccugagggacau

SEQ ID NO: 670849 - RNA, 19 nt, Artificial Sequence
  Description of Artificial Sequence: Synthetic oligonucleotide
  Antisense strand to SEQ ID NO: 670848
augucccucagggaagcca

SEQ ID NO: 670850 - RNA, 19 nt, Artificial Sequence
  Description of Artificial Sequence: Synthetic oligonucleotide
  Sense strand starting at position 266 of SEQ ID NO: 585828
aaggaaggccuuuauaguu

SEQ ID NO: 670851 - RNA, 19 nt, Artificial Sequence
  Description of Artificial Sequence: Synthetic oligonucleotide
  Antisense strand to SEQ ID NO: 670850
aacuauaaaggccuuccuu

SEQ ID NO: 670852 - RNA, 19 nt, Artificial Sequence
  Description of Artificial Sequence: Synthetic oligonucleotide
  Sense strand starting at position 302 of SEQ ID NO: 585828
ggcagucagucugggaaau

SEQ ID NO: 670853 - RNA, 19 nt, Artificial Sequence
  Description of Artificial Sequence: Synthetic oligonucleotide
  Antisense strand to SEQ ID NO: 670852
auuucccagacugacugcc

SEQ ID NO: 670854 - RNA, 19 nt, Artificial Sequence
  Description of Artificial Sequence: Synthetic oligonucleotide
  Sense strand starting at position 303 of SEQ ID NO: 585828
gcagucagucugggaaaug

SEQ ID NO: 670855 - RNA, 19 nt, Artificial Sequence
  Description of Artificial Sequence: Synthetic oligonucleotide
  Antisense strand to SEQ ID NO: 670854
cauuucccagacugacugc

SEQ ID NO: 670856 - RNA, 19 nt, Artificial Sequence
  Description of Artificial Sequence: Synthetic oligonucleotide
  Sense strand starting at position 864 of SEQ ID NO: 585828
cuccauggcucauggacaa

SEQ ID NO: 670857 - RNA, 19 nt, Artificial Sequence
  Description of Artificial Sequence: Synthetic oligonucleotide
  Antisense strand to SEQ ID NO: 670856
uuguccaugagccauggag

SEQ ID NO: 670858 - RNA, 19 nt, Artificial Sequence
  Description of Artificial Sequence: Synthetic oligonucleotide
  Sense strand starting at position 871 of SEQ ID NO: 585828
gcucauggacaaugauuga

SEQ ID NO: 670859 - RNA, 19 nt, Artificial Sequence
  Description of Artificial Sequence: Synthetic oligonucleotide
  Antisense strand to SEQ ID NO: 670858
ucaaucauuguccaugagc

SEQ ID NO: 670860 - RNA, 19 nt, Artificial Sequence
  Description of Artificial Sequence: Synthetic oligonucleotide
  Sense strand starting at position 957 of SEQ ID NO: 585828
ucaagccucuccucgagaa

SEQ ID NO: 670861 - RNA, 19 nt, Artificial Sequence
  Description of Artificial Sequence: Synthetic oligonucleotide
  Antisense strand to SEQ ID NO: 670860
uucucgaggagaggcuuga

SEQ ID NO: 670862 - RNA, 19 nt, Artificial Sequence
  Description of Artificial Sequence: Synthetic oligonucleotide
  Sense strand starting at position 1116 of SEQ ID NO: 585828
cuugcagauucuggaaaca

SEQ ID NO: 670863 - RNA, 19 nt, Artificial Sequence
  Description of Artificial Sequence: Synthetic oligonucleotide
  Antisense strand to SEQ ID NO: 670862
uguuuccagaaucugcaag

SEQ ID NO: 670864 - RNA, 19 nt, Artificial Sequence
  Description of Artificial Sequence: Synthetic oligonucleotide
  Sense strand starting at position 1192 of SEQ ID NO: 585828
gucccuauuccucagagua

SEQ ID NO: 670865 - RNA, 19 nt, Artificial Sequence
  Description of Artificial Sequence: Synthetic oligonucleotide
  Antisense strand to SEQ ID NO: 670864
uacucugaggaauagggac

SEQ ID NO: 670866 - RNA, 19 nt, Artificial Sequence
  Description of Artificial Sequence: Synthetic oligonucleotide
  Sense strand starting at position 1228 of SEQ ID NO: 585828
gcuccuagcuccucacaga

SEQ ID NO: 670867 - RNA, 19 nt, Artificial Sequence
  Description of Artificial Sequence: Synthetic oligonucleotide
  Antisense strand to SEQ ID NO: 670866
ucugugaggagcuaggagc

SEQ ID NO: 670868 - RNA, 19 nt, Artificial Sequence
  Description of Artificial Sequence: Synthetic oligonucleotide
  Sense strand starting at position 1605 of SEQ ID NO: 585828
agaguccaggccugaaaua

SEQ ID NO: 670869 - RNA, 19 nt, Artificial Sequence
  Description of Artificial Sequence: Synthetic oligonucleotide
  Antisense strand to SEQ ID NO: 670868
uauuucaggccuggacucu

SEQ ID NO: 670870 - RNA, 19 nt, Artificial Sequence
  Description of Artificial Sequence: Synthetic oligonucleotide
  Sense strand starting at position 1788 of SEQ ID NO: 585828
acaguacucuccuuaguuc

SEQ ID NO: 670871 - RNA, 19 nt, Artificial Sequence
  Description of Artificial Sequence: Synthetic oligonucleotide
  Antisense strand to SEQ ID NO: 670870
gaacuaaggagaguacugu

SEQ ID NO: 670872 - RNA, 19 nt, Artificial Sequence
  Description of Artificial Sequence: Synthetic oligonucleotide
  Sense strand starting at position 2150 of SEQ ID NO: 585828
ccuggcaugcucugauaag

SEQ ID NO: 670873 - RNA, 19 nt, Artificial Sequence
  Description of Artificial Sequence: Synthetic oligonucleotide
  Antisense strand to SEQ ID NO: 670872
cuuaucagagcaugccagg

SEQ ID NO: 670874 - RNA, 19 nt, Artificial Sequence
  Description of Artificial Sequence: Synthetic oligonucleotide
  Sense strand starting at position 2151 of SEQ ID NO: 585828
cuggcaugcucugauaaga

SEQ ID NO: 670875 - RNA, 19 nt, Artificial Sequence
  Description of Artificial Sequence: Synthetic oligonucleotide
  Antisense strand to SEQ ID NO: 670874
ucuuaucagagcaugccag

SEQ ID NO: 670876 - RNA, 19 nt, Artificial Sequence
  Description of Artificial Sequence: Synthetic oligonucleotide
  Sense strand starting at position 2232 of SEQ ID NO: 585828
agauuaaaguguggaaauu

SEQ ID NO: 670877 - RNA, 19 nt, Artificial Sequence
  Description of Artificial Sequence: Synthetic oligonucleotide
  Antisense strand to SEQ ID NO: 670876
aauuuccacacuuuaaucu

SEQ ID NO: 670878 - RNA, 19 nt, Artificial Sequence
  Description of Artificial Sequence: Synthetic oligonucleotide
  Sense strand starting at position 2544 of SEQ ID NO: 585828
gccugugaaacuggaucuu

SEQ ID NO: 670879 - RNA, 19 nt, Artificial Sequence
  Description of Artificial Sequence: Synthetic oligonucleotide
  Antisense strand to SEQ ID NO: 670878
aagauccaguuucacaggc

SEQ ID NO: 670880 - RNA, 19 nt, Artificial Sequence
  Description of Artificial Sequence: Synthetic oligonucleotide
  Sense strand starting at position 2706 of SEQ ID NO: 585828
aucgcaguuuauuaccaaa

SEQ ID NO: 670881 - RNA, 19 nt, Artificial Sequence
  Description of Artificial Sequence: Synthetic oligonucleotide
  Antisense strand to SEQ ID NO: 670880
uuugguaauaaacugcgau

SEQ ID NO: 670882 - RNA, 19 nt, Artificial Sequence
  Description of Artificial Sequence: Synthetic oligonucleotide
  Sense strand starting at position 2894 of SEQ ID NO: 585828
ugggaucucuggucaggaa

SEQ ID NO: 670883 - RNA, 19 nt, Artificial Sequence
  Description of Artificial Sequence: Synthetic oligonucleotide
  Antisense strand to SEQ ID NO: 670882
uuccugaccagagauccca

SEQ ID NO: 670884 - RNA, 19 nt, Artificial Sequence
  Description of Artificial Sequence: Synthetic oligonucleotide
  Sense strand starting at position 2897 of SEQ ID NO: 585828
gaucucuggucaggaaugu

SEQ ID NO: 670885 - RNA, 19 nt, Artificial Sequence
  Description of Artificial Sequence: Synthetic oligonucleotide
  Antisense strand to SEQ ID NO: 670884
acauuccugaccagagauc

SEQ ID NO: 670886 - RNA, 19 nt, Artificial Sequence
  Description of Artificial Sequence: Synthetic oligonucleotide
  Sense strand starting at position 2903 of SEQ ID NO: 585828
uggucaggaaugugugaaa

SEQ ID NO: 670887 - RNA, 19 nt, Artificial Sequence
  Description of Artificial Sequence: Synthetic oligonucleotide
  Antisense strand to SEQ ID NO: 670886
uuucacacauuccugacca

SEQ ID NO: 670888 - RNA, 19 nt, Artificial Sequence
  Description of Artificial Sequence: Synthetic oligonucleotide
  Sense strand starting at position 3023 of SEQ ID NO: 585828
gggugugguccguucucau

SEQ ID NO: 670889 - RNA, 19 nt, Artificial Sequence
  Description of Artificial Sequence: Synthetic oligonucleotide
  Antisense strand to SEQ ID NO: 670888
augagaacggaccacaccc

SEQ ID NO: 670890 - RNA, 19 nt, Artificial Sequence
  Description of Artificial Sequence: Synthetic oligonucleotide
  Sense strand starting at position 3030 of SEQ ID NO: 585828
guccguucucauguguuga

SEQ ID NO: 670891 - RNA, 19 nt, Artificial Sequence
  Description of Artificial Sequence: Synthetic oligonucleotide
  Antisense strand to SEQ ID NO: 670890
ucaacacaugagaacggac

SEQ ID NO: 670892 - RNA, 19 nt, Artificial Sequence
  Description of Artificial Sequence: Synthetic oligonucleotide
  Sense strand starting at position 3032 of SEQ ID NO: 585828
ccguucucauguguugaca

SEQ ID NO: 670893 - RNA, 19 nt, Artificial Sequence
  Description of Artificial Sequence: Synthetic oligonucleotide
  Antisense strand to SEQ ID NO: 670892
ugucaacacaugagaacgg

SEQ ID NO: 670894 - RNA, 19 nt, Artificial Sequence
  Description of Artificial Sequence: Synthetic oligonucleotide
  Sense strand starting at position 3158 of SEQ ID NO: 585828
gccacauuggcaggugaaa

SEQ ID NO: 670895 - RNA, 19 nt, Artificial Sequence
  Description of Artificial Sequence: Synthetic oligonucleotide
  Antisense strand to SEQ ID NO: 670894
uuucaccugccaauguggc

SEQ ID NO: 670896 - RNA, 19 nt, Artificial Sequence
  Description of Artificial Sequence: Synthetic oligonucleotide
  Sense strand starting at position 3193 of SEQ ID NO: 585828
cccagaagcggucgccaua

SEQ ID NO: 670897 - RNA, 19 nt, Artificial Sequence
  Description of Artificial Sequence: Synthetic oligonucleotide
  Antisense strand to SEQ ID NO: 670896
uauggcgaccgcuucuggg

SEQ ID NO: 670898 - RNA, 19 nt, Artificial Sequence
  Description of Artificial Sequence: Synthetic oligonucleotide
  Sense strand starting at position 3211 of SEQ ID NO: 585828
agucaaaccugucagagga

SEQ ID NO: 670899 - RNA, 19 nt, Artificial Sequence
  Description of Artificial Sequence: Synthetic oligonucleotide
  Antisense strand to SEQ ID NO: 670898
uccucugacagguuugacu

SEQ ID NO: 670900 - RNA, 19 nt, Artificial Sequence
  Description of Artificial Sequence: Synthetic oligonucleotide
  Sense strand starting at position 3213 of SEQ ID NO: 585828
ucaaaccugucagaggaaa

SEQ ID NO: 670901 - RNA, 19 nt, Artificial Sequence
  Description of Artificial Sequence: Synthetic oligonucleotide
  Antisense strand to SEQ ID NO: 670900
uuuccucugacagguuuga

SEQ ID NO: 670902 - RNA, 19 nt, Artificial Sequence
  Description of Artificial Sequence: Synthetic oligonucleotide
  Sense strand starting at position 3350 of SEQ ID NO: 585828
ccuuguauguucuauggac

SEQ ID NO: 670903 - RNA, 19 nt, Artificial Sequence
  Description of Artificial Sequence: Synthetic oligonucleotide
  Antisense strand to SEQ ID NO: 670902
guccauagaacauacaagg

SEQ ID NO: 670904 - RNA, 19 nt, Artificial Sequence
  Description of Artificial Sequence: Synthetic oligonucleotide
  Sense strand starting at position 3352 of SEQ ID NO: 585828
uuguauguucuauggacuu

SEQ ID NO: 670905 - RNA, 19 nt, Artificial Sequence
  Description of Artificial Sequence: Synthetic oligonucleotide
  Antisense strand to SEQ ID NO: 670904
aaguccauagaacauacaa

SEQ ID NO: 670906 - RNA, 19 nt, Artificial Sequence
  Description of Artificial Sequence: Synthetic oligonucleotide
  Sense strand starting at position 3486 of SEQ ID NO: 585828
ggaaauacuuauguacacu

SEQ ID NO: 670907 - RNA, 19 nt, Artificial Sequence
  Description of Artificial Sequence: Synthetic oligonucleotide
  Antisense strand to SEQ ID NO: 670906
aguguacauaaguauuucc

SEQ ID NO: 670908 - RNA, 19 nt, Artificial Sequence
  Description of Artificial Sequence: Synthetic oligonucleotide
  Sense strand starting at position 3502 of SEQ ID NO: 585828
acugaaaucugagaagcuc

SEQ ID NO: 670909 - RNA, 19 nt, Artificial Sequence
  Description of Artificial Sequence: Synthetic oligonucleotide
  Antisense strand to SEQ ID NO: 670908
gagcuucucagauuucagu

SEQ ID NO: 670910 - RNA, 19 nt, Artificial Sequence
  Description of Artificial Sequence: Synthetic oligonucleotide
  Sense strand starting at position 3511 of SEQ ID NO: 585828
ugagaagcucugcacuacu

SEQ ID NO: 670911 - RNA, 19 nt, Artificial Sequence
  Description of Artificial Sequence: Synthetic oligonucleotide
  Antisense strand to SEQ ID NO: 670910
aguagugcagagcuucuca

SEQ ID NO: 670912 - RNA, 19 nt, Artificial Sequence
  Description of Artificial Sequence: Synthetic oligonucleotide
  Sense strand starting at position 3643 of SEQ ID NO: 585828
uccggaugucucgggaacu

SEQ ID NO: 670913 - RNA, 19 nt, Artificial Sequence
  Description of Artificial Sequence: Synthetic oligonucleotide
  Antisense strand to SEQ ID NO: 670912
aguucccgagacauccgga

SEQ ID NO: 670914 - RNA, 19 nt, Artificial Sequence
  Description of Artificial Sequence: Synthetic oligonucleotide
  Sense strand starting at position 3644 of SEQ ID NO: 585828
ccggaugucucgggaacug

SEQ ID NO: 670915 - RNA, 19 nt, Artificial Sequence
  Description of Artificial Sequence: Synthetic oligonucleotide
  Antisense strand to SEQ ID NO: 670914
caguucccgagacauccgg

SEQ ID NO: 670916 - RNA, 19 nt, Artificial Sequence
  Description of Artificial Sequence: Synthetic oligonucleotide
  Sense strand starting at position 3665 of SEQ ID NO: 585828
gaaggcgaugcguggaaau

SEQ ID NO: 670917 - RNA, 19 nt, Artificial Sequence
  Description of Artificial Sequence: Synthetic oligonucleotide
  Antisense strand to SEQ ID NO: 670916
auuuccacgcaucgccuuc

SEQ ID NO: 670918 - RNA, 19 nt, Artificial Sequence
  Description of Artificial Sequence: Synthetic oligonucleotide
  Sense strand starting at position 3675 of SEQ ID NO: 585828
cguggaaaucgcaggucuu

SEQ ID NO: 670919 - RNA, 19 nt, Artificial Sequence
  Description of Artificial Sequence: Synthetic oligonucleotide
  Antisense strand to SEQ ID NO: 670918
aagaccugcgauuuccacg

SEQ ID NO: 670920 - RNA, 19 nt, Artificial Sequence
  Description of Artificial Sequence: Synthetic oligonucleotide
  Sense strand starting at position 3745 of SEQ ID NO: 585828
ugaugaagcggcugauguu

SEQ ID NO: 670921 - RNA, 19 nt, Artificial Sequence
  Description of Artificial Sequence: Synthetic oligonucleotide
  Antisense strand to SEQ ID NO: 670920
aacaucagccgcuucauca

SEQ ID NO: 670922 - RNA, 19 nt, Artificial Sequence
  Description of Artificial Sequence: Synthetic oligonucleotide
  Sense strand starting at position 3754 of SEQ ID NO: 585828
ggcugauguugccauagua

SEQ ID NO: 670923 - RNA, 19 nt, Artificial Sequence
  Description of Artificial Sequence: Synthetic oligonucleotide
  Antisense strand to SEQ ID NO: 670922
uacuauggcaacaucagcc

SEQ ID NO: 670924 - RNA, 19 nt, Artificial Sequence
  Description of Artificial Sequence: Synthetic oligonucleotide
  Sense strand starting at position 3766 of SEQ ID NO: 585828
cauaguaacgggcaucuau

SEQ ID NO: 670925 - RNA, 19 nt, Artificial Sequence
  Description of Artificial Sequence: Synthetic oligonucleotide
  Antisense strand to SEQ ID NO: 670924
auagaugcccguuacuaug

SEQ ID NO: 670926 - RNA, 19 nt, Artificial Sequence
  Description of Artificial Sequence: Synthetic oligonucleotide
  Sense strand starting at position 3974 of SEQ ID NO: 585828
gucuaagucgaagagguaa

SEQ ID NO: 670927 - RNA, 19 nt, Artificial Sequence
  Description of Artificial Sequence: Synthetic oligonucleotide
  Antisense strand to SEQ ID NO: 670926
uuaccucuucgacuuagac

SEQ ID NO: 670928 - RNA, 19 nt, Artificial Sequence
  Description of Artificial Sequence: Synthetic oligonucleotide
  Sense strand starting at position 1 of SEQ ID NO: 585829
cagcaaugguucuuaacgu

SEQ ID NO: 670929 - RNA, 19 nt, Artificial Sequence
  Description of Artificial Sequence: Synthetic oligonucleotide
  Antisense strand to SEQ ID NO: 670928
acguuaagaaccauugcug

SEQ ID NO: 670930 - RNA, 19 nt, Artificial Sequence
  Description of Artificial Sequence: Synthetic oligonucleotide
  Sense strand starting at position 18 of SEQ ID NO: 585829
guggccuggaguugucaga

SEQ ID NO: 670931 - RNA, 19 nt, Artificial Sequence
  Description of Artificial Sequence: Synthetic oligonucleotide
  Antisense strand to SEQ ID NO: 670930
ucugacaacuccaggccac

SEQ ID NO: 670932 - RNA, 19 nt, Artificial Sequence
  Description of Artificial Sequence: Synthetic oligonucleotide
  Sense strand starting at position 440 of SEQ ID NO: 585829
gaugacaucugugcagcuu

SEQ ID NO: 670933 - RNA, 19 nt, Artificial Sequence
  Description of Artificial Sequence: Synthetic oligonucleotide
  Antisense strand to SEQ ID NO: 670932
aagcugcacagaugucauc

SEQ ID NO: 670934 - RNA, 19 nt, Artificial Sequence
  Description of Artificial Sequence: Synthetic oligonucleotide
  Sense strand starting at position 448 of SEQ ID NO: 585829
cugugcagcuucugagaga

SEQ ID NO: 670935 - RNA, 19 nt, Artificial Sequence
  Description of Artificial Sequence: Synthetic oligonucleotide
  Antisense strand to SEQ ID NO: 670934
ucucucagaagcugcacag

SEQ ID NO: 670936 - RNA, 19 nt, Artificial Sequence
  Description of Artificial Sequence: Synthetic oligonucleotide
  Sense strand starting at position 527 of SEQ ID NO: 585829
gguuaaggguuagagaguu

SEQ ID NO: 670937 - RNA, 19 nt, Artificial Sequence
  Description of Artificial Sequence: Synthetic oligonucleotide
  Antisense strand to SEQ ID NO: 670936
aacucucuaacccuuaacc

SEQ ID NO: 670938 - RNA, 19 nt, Artificial Sequence
  Description of Artificial Sequence: Synthetic oligonucleotide
  Sense strand starting at position 533 of SEQ ID NO: 585829
ggguuagagaguuggguga

SEQ ID NO: 670939 - RNA, 19 nt, Artificial Sequence
  Description of Artificial Sequence: Synthetic oligonucleotide
  Antisense strand to SEQ ID NO: 670938
ucacccaacucucuaaccc

SEQ ID NO: 670940 - RNA, 19 nt, Artificial Sequence
  Description of Artificial Sequence: Synthetic oligonucleotide
  Sense strand starting at position 809 of SEQ ID NO: 585829
ggcucacgacuguaauacu

SEQ ID NO: 670941 - RNA, 19 nt, Artificial Sequence
  Description of Artificial Sequence: Synthetic oligonucleotide
  Antisense strand to SEQ ID NO: 670940
aguauuacagucgugagcc

SEQ ID NO: 670942 - RNA, 19 nt, Artificial Sequence
  Description of Artificial Sequence: Synthetic oligonucleotide
  Sense strand starting at position 1059 of SEQ ID NO: 585829
uggguaaacuuucuucuga

SEQ ID NO: 670943 - RNA, 19 nt, Artificial Sequence
  Description of Artificial Sequence: Synthetic oligonucleotide
  Antisense strand to SEQ ID NO: 670942
ucagaagaaaguuuaccca

SEQ ID NO: 670944 - RNA, 19 nt, Artificial Sequence
  Description of Artificial Sequence: Synthetic oligonucleotide
  Sense strand starting at position 1060 of SEQ ID NO: 585829
ggguaaacuuucuucugaa

SEQ ID NO: 670945 - RNA, 19 nt, Artificial Sequence
  Description of Artificial Sequence: Synthetic oligonucleotide
  Antisense strand to SEQ ID NO: 670944
uucagaagaaaguuuaccc

SEQ ID NO: 670946 - RNA, 19 nt, Artificial Sequence
  Description of Artificial Sequence: Synthetic oligonucleotide
  Sense strand starting at position 1121 of SEQ ID NO: 585829
gugaguucucucgcuugug

SEQ ID NO: 670947 - RNA, 19 nt, Artificial Sequence
  Description of Artificial Sequence: Synthetic oligonucleotide
  Antisense strand to SEQ ID NO: 670946
cacaagcgagagaacucac

SEQ ID NO: 670948 - RNA, 19 nt, Artificial Sequence
  Description of Artificial Sequence: Synthetic oligonucleotide
  Sense strand starting at position 1122 of SEQ ID NO: 585829
ugaguucucucgcuuguga

SEQ ID NO: 670949 - RNA, 19 nt, Artificial Sequence
  Description of Artificial Sequence: Synthetic oligonucleotide
  Antisense strand to SEQ ID NO: 670948
ucacaagcgagagaacuca

SEQ ID NO: 670950 - RNA, 19 nt, Artificial Sequence
  Description of Artificial Sequence: Synthetic oligonucleotide
  Sense strand starting at position 1124 of SEQ ID NO: 585829
aguucucucgcuugugaag

SEQ ID NO: 670951 - RNA, 19 nt, Artificial Sequence
  Description of Artificial Sequence: Synthetic oligonucleotide
  Antisense strand to SEQ ID NO: 670950
cuucacaagcgagagaacu

SEQ ID NO: 670952 - RNA, 19 nt, Artificial Sequence
  Description of Artificial Sequence: Synthetic oligonucleotide
  Sense strand starting at position 1135 of SEQ ID NO: 585829
uugugaagccggcacuuaa

SEQ ID NO: 670953 - RNA, 19 nt, Artificial Sequence
  Description of Artificial Sequence: Synthetic oligonucleotide
  Antisense strand to SEQ ID NO: 670952
uuaagugccggcuucacaa

SEQ ID NO: 670954 - RNA, 19 nt, Artificial Sequence
  Description of Artificial Sequence: Synthetic oligonucleotide
  Sense strand starting at position 1144 of SEQ ID NO: 585829
cggcacuuaagucaagaaa

SEQ ID NO: 670955 - RNA, 19 nt, Artificial Sequence
  Description of Artificial Sequence: Synthetic oligonucleotide
  Antisense strand to SEQ ID NO: 670954
uuucuugacuuaagugccg

SEQ ID NO: 670956 - RNA, 19 nt, Artificial Sequence
  Description of Artificial Sequence: Synthetic oligonucleotide
  Sense strand starting at position 1355 of SEQ ID NO: 585829
gagcucaccuguucuugau

SEQ ID NO: 670957 - RNA, 19 nt, Artificial Sequence
  Description of Artificial Sequence: Synthetic oligonucleotide
  Antisense strand to SEQ ID NO: 670956
aucaagaacaggugagcuc

SEQ ID NO: 670958 - RNA, 19 nt, Artificial Sequence
  Description of Artificial Sequence: Synthetic oligonucleotide
  Sense strand starting at position 1404 of SEQ ID NO: 585829
uggcuucccugagggacau

SEQ ID NO: 670959 - RNA, 19 nt, Artificial Sequence
  Description of Artificial Sequence: Synthetic oligonucleotide
  Antisense strand to SEQ ID NO: 670958
augucccucagggaagcca

SEQ ID NO: 670960 - RNA, 19 nt, Artificial Sequence
  Description of Artificial Sequence: Synthetic oligonucleotide
  Sense strand starting at position 1641 of SEQ ID NO: 585829
aaggaaggccuuuauaguu

SEQ ID NO: 670961 - RNA, 19 nt, Artificial Sequence
  Description of Artificial Sequence: Synthetic oligonucleotide
  Antisense strand to SEQ ID NO: 670960
aacuauaaaggccuuccuu

SEQ ID NO: 670962 - RNA, 19 nt, Artificial Sequence
  Description of Artificial Sequence: Synthetic oligonucleotide
  Sense strand starting at position 1677 of SEQ ID NO: 585829
ggcagucagucugggaaau

SEQ ID NO: 670963 - RNA, 19 nt, Artificial Sequence
  Description of Artificial Sequence: Synthetic oligonucleotide
  Antisense strand to SEQ ID NO: 670962
auuucccagacugacugcc

SEQ ID NO: 670964 - RNA, 19 nt, Artificial Sequence
  Description of Artificial Sequence: Synthetic oligonucleotide
  Sense strand starting at position 1678 of SEQ ID NO: 585829
gcagucagucugggaaaug

SEQ ID NO: 670965 - RNA, 19 nt, Artificial Sequence
  Description of Artificial Sequence: Synthetic oligonucleotide
  Antisense strand to SEQ ID NO: 670964
cauuucccagacugacugc

SEQ ID NO: 670966 - RNA, 19 nt, Artificial Sequence
  Description of Artificial Sequence: Synthetic oligonucleotide
  Sense strand starting at position 2239 of SEQ ID NO: 585829
cuccauggcucauggacaa

SEQ ID NO: 670967 - RNA, 19 nt, Artificial Sequence
  Description of Artificial Sequence: Synthetic oligonucleotide
  Antisense strand to SEQ ID NO: 670966
uuguccaugagccauggag

SEQ ID NO: 670968 - RNA, 19 nt, Artificial Sequence
  Description of Artificial Sequence: Synthetic oligonucleotide
  Sense strand starting at position 2246 of SEQ ID NO: 585829
gcucauggacaaugauuga

SEQ ID NO: 670969 - RNA, 19 nt, Artificial Sequence
  Description of Artificial Sequence: Synthetic oligonucleotide
  Antisense strand to SEQ ID NO: 670968
ucaaucauuguccaugagc

SEQ ID NO: 670970 - RNA, 19 nt, Artificial Sequence
  Description of Artificial Sequence: Synthetic oligonucleotide
  Sense strand starting at position 2332 of SEQ ID NO: 585829
ucaagccucuccucgagaa

SEQ ID NO: 670971 - RNA, 19 nt, Artificial Sequence
  Description of Artificial Sequence: Synthetic oligonucleotide
  Antisense strand to SEQ ID NO: 670970
uucucgaggagaggcuuga

SEQ ID NO: 670972 - RNA, 19 nt, Artificial Sequence
  Description of Artificial Sequence: Synthetic oligonucleotide
  Sense strand starting at position 2491 of SEQ ID NO: 585829
cuugcagauucuggaaaca

SEQ ID NO: 670973 - RNA, 19 nt, Artificial Sequence
  Description of Artificial Sequence: Synthetic oligonucleotide
  Antisense strand to SEQ ID NO: 670972
uguuuccagaaucugcaag

SEQ ID NO: 670974 - RNA, 19 nt, Artificial Sequence
  Description of Artificial Sequence: Synthetic oligonucleotide
  Sense strand starting at position 2567 of SEQ ID NO: 585829
gucccuauuccucagagua

SEQ ID NO: 670975 - RNA, 19 nt, Artificial Sequence
  Description of Artificial Sequence: Synthetic oligonucleotide
  Antisense strand to SEQ ID NO: 670974
uacucugaggaauagggac

SEQ ID NO: 670976 - RNA, 19 nt, Artificial Sequence
  Description of Artificial Sequence: Synthetic oligonucleotide
  Sense strand starting at position 2603 of SEQ ID NO: 585829
gcuccuagcuccucacaga

SEQ ID NO: 670977 - RNA, 19 nt, Artificial Sequence
  Description of Artificial Sequence: Synthetic oligonucleotide
  Antisense strand to SEQ ID NO: 670976
ucugugaggagcuaggagc

SEQ ID NO: 670978 - RNA, 19 nt, Artificial Sequence
  Description of Artificial Sequence: Synthetic oligonucleotide
  Sense strand starting at position 2980 of SEQ ID NO: 585829
agaguccaggccugaaaua

SEQ ID NO: 670979 - RNA, 19 nt, Artificial Sequence
  Description of Artificial Sequence: Synthetic oligonucleotide
  Antisense strand to SEQ ID NO: 670978
uauuucaggccuggacucu

SEQ ID NO: 670980 - RNA, 19 nt, Artificial Sequence
  Description of Artificial Sequence: Synthetic oligonucleotide
  Sense strand starting at position 3163 of SEQ ID NO: 585829
acaguacucuccuuaguuc

SEQ ID NO: 670981 - RNA, 19 nt, Artificial Sequence
  Description of Artificial Sequence: Synthetic oligonucleotide
  Antisense strand to SEQ ID NO: 670980
gaacuaaggagaguacugu

SEQ ID NO: 670982 - RNA, 19 nt, Artificial Sequence
  Description of Artificial Sequence: Synthetic oligonucleotide
  Sense strand starting at position 3310 of SEQ ID NO: 585829
ggcucagucuccggaguga

SEQ ID NO: 670983 - RNA, 19 nt, Artificial Sequence
  Description of Artificial Sequence: Synthetic oligonucleotide
  Antisense strand to SEQ ID NO: 670982
ucacuccggagacugagcc

SEQ ID NO: 670984 - RNA, 19 nt, Artificial Sequence
  Description of Artificial Sequence: Synthetic oligonucleotide
  Sense strand starting at position 3525 of SEQ ID NO: 585829
ccuggcaugcucugauaag

SEQ ID NO: 670985 - RNA, 19 nt, Artificial Sequence
  Description of Artificial Sequence: Synthetic oligonucleotide
  Antisense strand to SEQ ID NO: 670984
cuuaucagagcaugccagg

SEQ ID NO: 670986 - RNA, 19 nt, Artificial Sequence
  Description of Artificial Sequence: Synthetic oligonucleotide
  Sense strand starting at position 3526 of SEQ ID NO: 585829
cuggcaugcucugauaaga

SEQ ID NO: 670987 - RNA, 19 nt, Artificial Sequence
  Description of Artificial Sequence: Synthetic oligonucleotide
  Antisense strand to SEQ ID NO: 670986
ucuuaucagagcaugccag

SEQ ID NO: 670988 - RNA, 19 nt, Artificial Sequence
  Description of Artificial Sequence: Synthetic oligonucleotide
  Sense strand starting at position 3549 of SEQ ID NO: 585829
gcuuuauaaucucgccaac

SEQ ID NO: 670989 - RNA, 19 nt, Artificial Sequence
  Description of Artificial Sequence: Synthetic oligonucleotide
  Antisense strand to SEQ ID NO: 670988
guuggcgagauuauaaagc

SEQ ID NO: 670990 - RNA, 19 nt, Artificial Sequence
  Description of Artificial Sequence: Synthetic oligonucleotide
  Sense strand starting at position 3607 of SEQ ID NO: 585829
agauuaaaguguggaaauu

SEQ ID NO: 670991 - RNA, 19 nt, Artificial Sequence
  Description of Artificial Sequence: Synthetic oligonucleotide
  Antisense strand to SEQ ID NO: 670990
aauuuccacacuuuaaucu

SEQ ID NO: 670992 - RNA, 19 nt, Artificial Sequence
  Description of Artificial Sequence: Synthetic oligonucleotide
  Sense strand starting at position 3919 of SEQ ID NO: 585829
gccugugaaacuggaucuu

SEQ ID NO: 670993 - RNA, 19 nt, Artificial Sequence
  Description of Artificial Sequence: Synthetic oligonucleotide
  Antisense strand to SEQ ID NO: 670992
aagauccaguuucacaggc

SEQ ID NO: 670994 - RNA, 19 nt, Artificial Sequence
  Description of Artificial Sequence: Synthetic oligonucleotide
  Sense strand starting at position 341 of SEQ ID NO: 585830
acaguauucccgcaugauu

SEQ ID NO: 670995 - RNA, 19 nt, Artificial Sequence
  Description of Artificial Sequence: Synthetic oligonucleotide
  Antisense strand to SEQ ID NO: 670994
aaucaugcgggaauacugu

SEQ ID NO: 670996 - RNA, 19 nt, Artificial Sequence
  Description of Artificial Sequence: Synthetic oligonucleotide
  Sense strand starting at position 388 of SEQ ID NO: 585830
agugaaguaaccugcugau

SEQ ID NO: 670997 - RNA, 19 nt, Artificial Sequence
  Description of Artificial Sequence: Synthetic oligonucleotide
  Antisense strand to SEQ ID NO: 670996
aucagcagguuacuucacu

SEQ ID NO: 670998 - RNA, 19 nt, Artificial Sequence
  Description of Artificial Sequence: Synthetic oligonucleotide
  Sense strand starting at position 414 of SEQ ID NO: 585830
ggcucagucuagucaaaua

SEQ ID NO: 670999 - RNA, 19 nt, Artificial Sequence
  Description of Artificial Sequence: Synthetic oligonucleotide
  Antisense strand to SEQ ID NO: 670998
uauuugacuagacugagcc

SEQ ID NO: 671000 - RNA, 19 nt, Artificial Sequence
  Description of Artificial Sequence: Synthetic oligonucleotide
  Sense strand starting at position 542 of SEQ ID NO: 585830
aagagacugucuccugcuu

SEQ ID NO: 671001 - RNA, 19 nt, Artificial Sequence
  Description of Artificial Sequence: Synthetic oligonucleotide
  Antisense strand to SEQ ID NO: 671000
aagcaggagacagucucuu

SEQ ID NO: 671002 - RNA, 19 nt, Artificial Sequence
  Description of Artificial Sequence: Synthetic oligonucleotide
  Sense strand starting at position 549 of SEQ ID NO: 585830
ugucuccugcuuuagagaa

SEQ ID NO: 671003 - RNA, 19 nt, Artificial Sequence
  Description of Artificial Sequence: Synthetic oligonucleotide
  Antisense strand to SEQ ID NO: 671002
uucucuaaagcaggagaca

SEQ ID NO: 671004 - RNA, 19 nt, Artificial Sequence
  Description of Artificial Sequence: Synthetic oligonucleotide
  Sense strand starting at position 849 of SEQ ID NO: 585830
acaaaucaguguccacaua

SEQ ID NO: 671005 - RNA, 19 nt, Artificial Sequence
  Description of Artificial Sequence: Synthetic oligonucleotide
  Antisense strand to SEQ ID NO: 671004
uauguggacacugauuugu

SEQ ID NO: 671006 - RNA, 19 nt, Artificial Sequence
  Description of Artificial Sequence: Synthetic oligonucleotide
  Sense strand starting at position 874 of SEQ ID NO: 585830
caaacuagcuggucagaga

SEQ ID NO: 671007 - RNA, 19 nt, Artificial Sequence
  Description of Artificial Sequence: Synthetic oligonucleotide
  Antisense strand to SEQ ID NO: 671006
ucucugaccagcuaguuug

SEQ ID NO: 671008 - RNA, 19 nt, Artificial Sequence
  Description of Artificial Sequence: Synthetic oligonucleotide
  Sense strand starting at position 2331 of SEQ ID NO: 585830
agguuuauucgccugcagu

SEQ ID NO: 671009 - RNA, 19 nt, Artificial Sequence
  Description of Artificial Sequence: Synthetic oligonucleotide
  Antisense strand to SEQ ID NO: 671008
acugcaggcgaauaaaccu

SEQ ID NO: 671010 - RNA, 19 nt, Artificial Sequence
  Description of Artificial Sequence: Synthetic oligonucleotide
  Sense strand starting at position 2333 of SEQ ID NO: 585830
guuuauucgccugcaguuu

SEQ ID NO: 671011 - RNA, 19 nt, Artificial Sequence
  Description of Artificial Sequence: Synthetic oligonucleotide
  Antisense strand to SEQ ID NO: 671010
aaacugcaggcgaauaaac

SEQ ID NO: 671012 - RNA, 19 nt, Artificial Sequence
  Description of Artificial Sequence: Synthetic oligonucleotide
  Sense strand starting at position 2410 of SEQ ID NO: 585830
cgagaaauaaucuaguagu

SEQ ID NO: 671013 - RNA, 19 nt, Artificial Sequence
  Description of Artificial Sequence: Synthetic oligonucleotide
  Antisense strand to SEQ ID NO: 671012
acuacuagauuauuucucg

SEQ ID NO: 671014 - RNA, 19 nt, Artificial Sequence
  Description of Artificial Sequence: Synthetic oligonucleotide
  Sense strand starting at position 2421 of SEQ ID NO: 585830
cuaguagugacauguauua

SEQ ID NO: 671015 - RNA, 19 nt, Artificial Sequence
  Description of Artificial Sequence: Synthetic oligonucleotide
  Antisense strand to SEQ ID NO: 671014
uaauacaugucacuacuag

SEQ ID NO: 671016 - RNA, 19 nt, Artificial Sequence
  Description of Artificial Sequence: Synthetic oligonucleotide
  Sense strand starting at position 2455 of SEQ ID NO: 585830
uugagugauuacucuguua

SEQ ID NO: 671017 - RNA, 19 nt, Artificial Sequence
  Description of Artificial Sequence: Synthetic oligonucleotide
  Antisense strand to SEQ ID NO: 671016
uaacagaguaaucacucaa

SEQ ID NO: 671018 - RNA, 19 nt, Artificial Sequence
  Description of Artificial Sequence: Synthetic oligonucleotide
  Sense strand starting at position 2457 of SEQ ID NO: 585830
gagugauuacucuguuaaa

SEQ ID NO: 671019 - RNA, 19 nt, Artificial Sequence
  Description of Artificial Sequence: Synthetic oligonucleotide
  Antisense strand to SEQ ID NO: 671018
uuuaacagaguaaucacuc

SEQ ID NO: 671020 - RNA, 19 nt, Artificial Sequence
  Description of Artificial Sequence: Synthetic oligonucleotide
  Sense strand starting at position 2512 of SEQ ID NO: 585830
augauauuguuauccucau

SEQ ID NO: 671021 - RNA, 19 nt, Artificial Sequence
  Description of Artificial Sequence: Synthetic oligonucleotide
  Antisense strand to SEQ ID NO: 671020
augaggauaacaauaucau

SEQ ID NO: 671022 - RNA, 19 nt, Artificial Sequence
  Description of Artificial Sequence: Synthetic oligonucleotide
  Sense strand starting at position 2513 of SEQ ID NO: 585830
ugauauuguuauccucauu

SEQ ID NO: 671023 - RNA, 19 nt, Artificial Sequence
  Description of Artificial Sequence: Synthetic oligonucleotide
  Antisense strand to SEQ ID NO: 671022
aaugaggauaacaauauca

SEQ ID NO: 671024 - RNA, 19 nt, Artificial Sequence
  Description of Artificial Sequence: Synthetic oligonucleotide
  Sense strand starting at position 2629 of SEQ ID NO: 585830
ggcuccagagucugaaaga

SEQ ID NO: 671025 - RNA, 19 nt, Artificial Sequence
  Description of Artificial Sequence: Synthetic oligonucleotide
  Antisense strand to SEQ ID NO: 671024
ucuuucagacucuggagcc

SEQ ID NO: 671026 - RNA, 19 nt, Artificial Sequence
  Description of Artificial Sequence: Synthetic oligonucleotide
  Sense strand starting at position 2638 of SEQ ID NO: 585830
gucugaaagaccuggcagu

SEQ ID NO: 671027 - RNA, 19 nt, Artificial Sequence
  Description of Artificial Sequence: Synthetic oligonucleotide
  Antisense strand to SEQ ID NO: 671026
acugccaggucuuucagac

SEQ ID NO: 671028 - RNA, 19 nt, Artificial Sequence
  Description of Artificial Sequence: Synthetic oligonucleotide
  Sense strand starting at position 2639 of SEQ ID NO: 585830
ucugaaagaccuggcagua

SEQ ID NO: 671029 - RNA, 19 nt, Artificial Sequence
  Description of Artificial Sequence: Synthetic oligonucleotide
  Antisense strand to SEQ ID NO: 671028
uacugccaggucuuucaga

SEQ ID NO: 671030 - RNA, 19 nt, Artificial Sequence
  Description of Artificial Sequence: Synthetic oligonucleotide
  Sense strand starting at position 2718 of SEQ ID NO: 585830
acaagaagcuguguaaaua

SEQ ID NO: 671031 - RNA, 19 nt, Artificial Sequence
  Description of Artificial Sequence: Synthetic oligonucleotide
  Antisense strand to SEQ ID NO: 671030
uauuuacacagcuucuugu

SEQ ID NO: 671032 - RNA, 19 nt, Artificial Sequence
  Description of Artificial Sequence: Synthetic oligonucleotide
  Sense strand starting at position 2719 of SEQ ID NO: 585830
caagaagcuguguaaauag

SEQ ID NO: 671033 - RNA, 19 nt, Artificial Sequence
  Description of Artificial Sequence: Synthetic oligonucleotide
  Antisense strand to SEQ ID NO: 671032
cuauuuacacagcuucuug

SEQ ID NO: 671034 - RNA, 19 nt, Artificial Sequence
  Description of Artificial Sequence: Synthetic oligonucleotide
  Sense strand starting at position 2727 of SEQ ID NO: 585830
uguguaaauagugauccuu

SEQ ID NO: 671035 - RNA, 19 nt, Artificial Sequence
  Description of Artificial Sequence: Synthetic oligonucleotide
  Antisense strand to SEQ ID NO: 671034
aaggaucacuauuuacaca

SEQ ID NO: 671036 - RNA, 19 nt, Artificial Sequence
  Description of Artificial Sequence: Synthetic oligonucleotide
  Sense strand starting at position 2729 of SEQ ID NO: 585830
uguaaauagugauccuuaa

SEQ ID NO: 671037 - RNA, 19 nt, Artificial Sequence
  Description of Artificial Sequence: Synthetic oligonucleotide
  Antisense strand to SEQ ID NO: 671036
uuaaggaucacuauuuaca

SEQ ID NO: 671038 - RNA, 19 nt, Artificial Sequence
  Description of Artificial Sequence: Synthetic oligonucleotide
  Sense strand starting at position 2841 of SEQ ID NO: 585830
gaugauuuggcauguugua

SEQ ID NO: 671039 - RNA, 19 nt, Artificial Sequence
  Description of Artificial Sequence: Synthetic oligonucleotide
  Antisense strand to SEQ ID NO: 671038
uacaacaugccaaaucauc

SEQ ID NO: 671040 - RNA, 19 nt, Artificial Sequence
  Description of Artificial Sequence: Synthetic oligonucleotide
  Sense strand starting at position 2960 of SEQ ID NO: 585830
gucuuacacuucuuaguaa

SEQ ID NO: 671041 - RNA, 19 nt, Artificial Sequence
  Description of Artificial Sequence: Synthetic oligonucleotide
  Antisense strand to SEQ ID NO: 671040
uuacuaagaaguguaagac

SEQ ID NO: 671042 - RNA, 19 nt, Artificial Sequence
  Description of Artificial Sequence: Synthetic oligonucleotide
  Sense strand starting at position 3093 of SEQ ID NO: 585830
ugaagaugcucaguaauua

SEQ ID NO: 671043 - RNA, 19 nt, Artificial Sequence
  Description of Artificial Sequence: Synthetic oligonucleotide
  Antisense strand to SEQ ID NO: 671042
uaauuacugagcaucuuca

SEQ ID NO: 671044 - RNA, 19 nt, Artificial Sequence
  Description of Artificial Sequence: Synthetic oligonucleotide
  Sense strand starting at position 3155 of SEQ ID NO: 585830
uagggagauauuggugagu

SEQ ID NO: 671045 - RNA, 19 nt, Artificial Sequence
  Description of Artificial Sequence: Synthetic oligonucleotide
  Antisense strand to SEQ ID NO: 671044
acucaccaauaucucccua

SEQ ID NO: 671046 - RNA, 19 nt, Artificial Sequence
  Description of Artificial Sequence: Synthetic oligonucleotide
  Sense strand starting at position 3160 of SEQ ID NO: 585830
agauauuggugaguuccaa

SEQ ID NO: 671047 - RNA, 19 nt, Artificial Sequence
  Description of Artificial Sequence: Synthetic oligonucleotide
  Antisense strand to SEQ ID NO: 671046
uuggaacucaccaauaucu

SEQ ID NO: 671048 - RNA, 19 nt, Artificial Sequence
  Description of Artificial Sequence: Synthetic oligonucleotide
  Sense strand starting at position 3190 of SEQ ID NO: 585830
aaacauuaugugggaggua

SEQ ID NO: 671049 - RNA, 19 nt, Artificial Sequence
  Description of Artificial Sequence: Synthetic oligonucleotide
  Antisense strand to SEQ ID NO: 671048
uaccucccacauaauguuu

SEQ ID NO: 671050 - RNA, 19 nt, Artificial Sequence
  Description of Artificial Sequence: Synthetic oligonucleotide
  Sense strand starting at position 3193 of SEQ ID NO: 585830
cauuaugugggagguagaa

SEQ ID NO: 671051 - RNA, 19 nt, Artificial Sequence
  Description of Artificial Sequence: Synthetic oligonucleotide
  Antisense strand to SEQ ID NO: 671050
uucuaccucccacauaaug

SEQ ID NO: 671052 - RNA, 19 nt, Artificial Sequence
  Description of Artificial Sequence: Synthetic oligonucleotide
  Sense strand starting at position 3217 of SEQ ID NO: 585830
gagccuuguccugaagaua

SEQ ID NO: 671053 - RNA, 19 nt, Artificial Sequence
  Description of Artificial Sequence: Synthetic oligonucleotide
  Antisense strand to SEQ ID NO: 671052
uaucuucaggacaaggcuc

SEQ ID NO: 671054 - RNA, 19 nt, Artificial Sequence
  Description of Artificial Sequence: Synthetic oligonucleotide
  Sense strand starting at position 3262 of SEQ ID NO: 585830
gggagauauuaagaaagag

SEQ ID NO: 671055 - RNA, 19 nt, Artificial Sequence
  Description of Artificial Sequence: Synthetic oligonucleotide
  Antisense strand to SEQ ID NO: 671054
cucuuucuuaauaucuccc

SEQ ID NO: 671056 - RNA, 19 nt, Artificial Sequence
  Description of Artificial Sequence: Synthetic oligonucleotide
  Sense strand starting at position 3348 of SEQ ID NO: 585830
uugagauaaggcugcauaa

SEQ ID NO: 671057 - RNA, 19 nt, Artificial Sequence
  Description of Artificial Sequence: Synthetic oligonucleotide
  Antisense strand to SEQ ID NO: 671056
uuaugcagccuuaucucaa

SEQ ID NO: 671058 - RNA, 19 nt, Artificial Sequence
  Description of Artificial Sequence: Synthetic oligonucleotide
  Sense strand starting at position 3350 of SEQ ID NO: 585830
gagauaaggcugcauaagu

SEQ ID NO: 671059 - RNA, 19 nt, Artificial Sequence
  Description of Artificial Sequence: Synthetic oligonucleotide
  Antisense strand to SEQ ID NO: 671058
acuuaugcagccuuaucuc

SEQ ID NO: 671060 - RNA, 19 nt, Artificial Sequence
  Description of Artificial Sequence: Synthetic oligonucleotide
  Sense strand starting at position 3412 of SEQ ID NO: 585830
uagucuggccuugaugcaa

SEQ ID NO: 671061 - RNA, 19 nt, Artificial Sequence
  Description of Artificial Sequence: Synthetic oligonucleotide
  Antisense strand to SEQ ID NO: 671060
uugcaucaaggccagacua

SEQ ID NO: 671062 - RNA, 19 nt, Artificial Sequence
  Description of Artificial Sequence: Synthetic oligonucleotide
  Sense strand starting at position 3604 of SEQ ID NO: 585830
uggcgcaugccuguuuaau

SEQ ID NO: 671063 - RNA, 19 nt, Artificial Sequence
  Description of Artificial Sequence: Synthetic oligonucleotide
  Antisense strand to SEQ ID NO: 671062
auuaaacaggcaugcgcca

SEQ ID NO: 671064 - RNA, 19 nt, Artificial Sequence
  Description of Artificial Sequence: Synthetic oligonucleotide
  Sense strand starting at position 3605 of SEQ ID NO: 585830
ggcgcaugccuguuuaauc

SEQ ID NO: 671065 - RNA, 19 nt, Artificial Sequence
  Description of Artificial Sequence: Synthetic oligonucleotide
  Antisense strand to SEQ ID NO: 671064
gauuaaacaggcaugcgcc

SEQ ID NO: 671066 - RNA, 19 nt, Artificial Sequence
  Description of Artificial Sequence: Synthetic oligonucleotide
  Sense strand starting at position 3823 of SEQ ID NO: 585830
ugggaaaguuaguccugca

SEQ ID NO: 671067 - RNA, 19 nt, Artificial Sequence
  Description of Artificial Sequence: Synthetic oligonucleotide
  Antisense strand to SEQ ID NO: 671066
ugcaggacuaacuuuccca

SEQ ID NO: 671068 - RNA, 19 nt, Artificial Sequence
  Description of Artificial Sequence: Synthetic oligonucleotide
  Sense strand starting at position 3828 of SEQ ID NO: 585830
aaguuaguccugcaguaac

SEQ ID NO: 671069 - RNA, 19 nt, Artificial Sequence
  Description of Artificial Sequence: Synthetic oligonucleotide
  Antisense strand to SEQ ID NO: 671068
guuacugcaggacuaacuu

SEQ ID NO: 671070 - RNA, 19 nt, Artificial Sequence
  Description of Artificial Sequence: Synthetic oligonucleotide
  Sense strand starting at position 3838 of SEQ ID NO: 585830
ugcaguaaccaguaaacaa

SEQ ID NO: 671071 - RNA, 19 nt, Artificial Sequence
  Description of Artificial Sequence: Synthetic oligonucleotide
  Antisense strand to SEQ ID NO: 671070
uuguuuacugguuacugca

SEQ ID NO: 671072 - RNA, 19 nt, Artificial Sequence
  Description of Artificial Sequence: Synthetic oligonucleotide
  Sense strand starting at position 3978 of SEQ ID NO: 585830
agcaauguccaguacaaau

SEQ ID NO: 671073 - RNA, 19 nt, Artificial Sequence
  Description of Artificial Sequence: Synthetic oligonucleotide
  Antisense strand to SEQ ID NO: 671072
auuuguacuggacauugcu

SEQ ID NO: 671074 - RNA, 19 nt, Artificial Sequence
  Description of Artificial Sequence: Synthetic oligonucleotide
  Sense strand starting at position 8 of SEQ ID NO: 585831
guaacaagccaagaauucu

SEQ ID NO: 671075 - RNA, 19 nt, Artificial Sequence
  Description of Artificial Sequence: Synthetic oligonucleotide
  Antisense strand to SEQ ID NO: 671074
agaauucuuggcuuguuac

SEQ ID NO: 671076 - RNA, 19 nt, Artificial Sequence
  Description of Artificial Sequence: Synthetic oligonucleotide
  Sense strand starting at position 244 of SEQ ID NO: 585831
uagauuuaguagcaacaag

SEQ ID NO: 671077 - RNA, 19 nt, Artificial Sequence
  Description of Artificial Sequence: Synthetic oligonucleotide
  Antisense strand to SEQ ID NO: 671076
cuuguugcuacuaaaucua

SEQ ID NO: 671078 - RNA, 19 nt, Artificial Sequence
  Description of Artificial Sequence: Synthetic oligonucleotide
  Sense strand starting at position 279 of SEQ ID NO: 585831
uaaauuauacuguggaguu

SEQ ID NO: 671079 - RNA, 19 nt, Artificial Sequence
  Description of Artificial Sequence: Synthetic oligonucleotide
  Antisense strand to SEQ ID NO: 671078
aacuccacaguauaauuua

SEQ ID NO: 671080 - RNA, 19 nt, Artificial Sequence
  Description of Artificial Sequence: Synthetic oligonucleotide
  Sense strand starting at position 317 of SEQ ID NO: 585831
ccuuguacucuugauacca

SEQ ID NO: 671081 - RNA, 19 nt, Artificial Sequence
  Description of Artificial Sequence: Synthetic oligonucleotide
  Antisense strand to SEQ ID NO: 671080
ugguaucaagaguacaagg

SEQ ID NO: 671082 - RNA, 19 nt, Artificial Sequence
  Description of Artificial Sequence: Synthetic oligonucleotide
  Sense strand starting at position 433 of SEQ ID NO: 585831
uacugauuuccguggcaau

SEQ ID NO: 671083 - RNA, 19 nt, Artificial Sequence
  Description of Artificial Sequence: Synthetic oligonucleotide
  Antisense strand to SEQ ID NO: 671082
auugccacggaaaucagua

SEQ ID NO: 671084 - RNA, 19 nt, Artificial Sequence
  Description of Artificial Sequence: Synthetic oligonucleotide
  Sense strand starting at position 434 of SEQ ID NO: 585831
acugauuuccguggcaaua

SEQ ID NO: 671085 - RNA, 19 nt, Artificial Sequence
  Description of Artificial Sequence: Synthetic oligonucleotide
  Antisense strand to SEQ ID NO: 671084
uauugccacggaaaucagu

SEQ ID NO: 671086 - RNA, 19 nt, Artificial Sequence
  Description of Artificial Sequence: Synthetic oligonucleotide
  Sense strand starting at position 697 of SEQ ID NO: 585831
uuaauaaagucuguagaug

SEQ ID NO: 671087 - RNA, 19 nt, Artificial Sequence
  Description of Artificial Sequence: Synthetic oligonucleotide
  Antisense strand to SEQ ID NO: 671086
caucuacagacuuuauuaa

SEQ ID NO: 671088 - RNA, 19 nt, Artificial Sequence
  Description of Artificial Sequence: Synthetic oligonucleotide
  Sense strand starting at position 1100 of SEQ ID NO: 585831
acaguauucccgcaugauu

SEQ ID NO: 671089 - RNA, 19 nt, Artificial Sequence
  Description of Artificial Sequence: Synthetic oligonucleotide
  Antisense strand to SEQ ID NO: 671088
aaucaugcgggaauacugu

SEQ ID NO: 671090 - RNA, 19 nt, Artificial Sequence
  Description of Artificial Sequence: Synthetic oligonucleotide
  Sense strand starting at position 1147 of SEQ ID NO: 585831
agugaaguaaccugcugau

SEQ ID NO: 671091 - RNA, 19 nt, Artificial Sequence
  Description of Artificial Sequence: Synthetic oligonucleotide
  Antisense strand to SEQ ID NO: 671090
aucagcagguuacuucacu

SEQ ID NO: 671092 - RNA, 19 nt, Artificial Sequence
  Description of Artificial Sequence: Synthetic oligonucleotide
  Sense strand starting at position 1173 of SEQ ID NO: 585831
ggcucagucuagucaaaua

SEQ ID NO: 671093 - RNA, 19 nt, Artificial Sequence
  Description of Artificial Sequence: Synthetic oligonucleotide
  Antisense strand to SEQ ID NO: 671092
uauuugacuagacugagcc

SEQ ID NO: 671094 - RNA, 19 nt, Artificial Sequence
  Description of Artificial Sequence: Synthetic oligonucleotide
  Sense strand starting at position 1210 of SEQ ID NO: 585831
gugacucauuuauauagua

SEQ ID NO: 671095 - RNA, 19 nt, Artificial Sequence
  Description of Artificial Sequence: Synthetic oligonucleotide
  Antisense strand to SEQ ID NO: 671094
uacuauauaaaugagucac

SEQ ID NO: 671096 - RNA, 19 nt, Artificial Sequence
  Description of Artificial Sequence: Synthetic oligonucleotide
  Sense strand starting at position 1301 of SEQ ID NO: 585831
aagagacugucuccugcuu

SEQ ID NO: 671097 - RNA, 19 nt, Artificial Sequence
  Description of Artificial Sequence: Synthetic oligonucleotide
  Antisense strand to SEQ ID NO: 671096
aagcaggagacagucucuu

SEQ ID NO: 671098 - RNA, 19 nt, Artificial Sequence
  Description of Artificial Sequence: Synthetic oligonucleotide
  Sense strand starting at position 1308 of SEQ ID NO: 585831
ugucuccugcuuuagagaa

SEQ ID NO: 671099 - RNA, 19 nt, Artificial Sequence
  Description of Artificial Sequence: Synthetic oligonucleotide
  Antisense strand to SEQ ID NO: 671098
uucucuaaagcaggagaca

SEQ ID NO: 671100 - RNA, 19 nt, Artificial Sequence
  Description of Artificial Sequence: Synthetic oligonucleotide
  Sense strand starting at position 1608 of SEQ ID NO: 585831
acaaaucaguguccacaua

SEQ ID NO: 671101 - RNA, 19 nt, Artificial Sequence
  Description of Artificial Sequence: Synthetic oligonucleotide
  Antisense strand to SEQ ID NO: 671100
uauguggacacugauuugu

SEQ ID NO: 671102 - RNA, 19 nt, Artificial Sequence
  Description of Artificial Sequence: Synthetic oligonucleotide
  Sense strand starting at position 1633 of SEQ ID NO: 585831
caaacuagcuggucagaga

SEQ ID NO: 671103 - RNA, 19 nt, Artificial Sequence
  Description of Artificial Sequence: Synthetic oligonucleotide
  Antisense strand to SEQ ID NO: 671102
ucucugaccagcuaguuug

SEQ ID NO: 671104 - RNA, 19 nt, Artificial Sequence
  Description of Artificial Sequence: Synthetic oligonucleotide
  Sense strand starting at position 3079 of SEQ ID NO: 585831
uuacucauucgagguuuau

SEQ ID NO: 671105 - RNA, 19 nt, Artificial Sequence
  Description of Artificial Sequence: Synthetic oligonucleotide
  Antisense strand to SEQ ID NO: 671104
auaaaccucgaaugaguaa

SEQ ID NO: 671106 - RNA, 19 nt, Artificial Sequence
  Description of Artificial Sequence: Synthetic oligonucleotide
  Sense strand starting at position 3090 of SEQ ID NO: 585831
agguuuauucgccugcagu

SEQ ID NO: 671107 - RNA, 19 nt, Artificial Sequence
  Description of Artificial Sequence: Synthetic oligonucleotide
  Antisense strand to SEQ ID NO: 671106
acugcaggcgaauaaaccu

SEQ ID NO: 671108 - RNA, 19 nt, Artificial Sequence
  Description of Artificial Sequence: Synthetic oligonucleotide
  Sense strand starting at position 3092 of SEQ ID NO: 585831
guuuauucgccugcaguuu

SEQ ID NO: 671109 - RNA, 19 nt, Artificial Sequence
  Description of Artificial Sequence: Synthetic oligonucleotide
  Antisense strand to SEQ ID NO: 671108
aaacugcaggcgaauaaac

SEQ ID NO: 671110 - RNA, 19 nt, Artificial Sequence
  Description of Artificial Sequence: Synthetic oligonucleotide
  Sense strand starting at position 3169 of SEQ ID NO: 585831
cgagaaauaaucuaguagu

SEQ ID NO: 671111 - RNA, 19 nt, Artificial Sequence
  Description of Artificial Sequence: Synthetic oligonucleotide
  Antisense strand to SEQ ID NO: 671110
acuacuagauuauuucucg

SEQ ID NO: 671112 - RNA, 19 nt, Artificial Sequence
  Description of Artificial Sequence: Synthetic oligonucleotide
  Sense strand starting at position 3180 of SEQ ID NO: 585831
cuaguagugacauguauua

SEQ ID NO: 671113 - RNA, 19 nt, Artificial Sequence
  Description of Artificial Sequence: Synthetic oligonucleotide
  Antisense strand to SEQ ID NO: 671112
uaauacaugucacuacuag

SEQ ID NO: 671114 - RNA, 19 nt, Artificial Sequence
  Description of Artificial Sequence: Synthetic oligonucleotide
  Sense strand starting at position 3214 of SEQ ID NO: 585831
uugagugauuacucuguua

SEQ ID NO: 671115 - RNA, 19 nt, Artificial Sequence
  Description of Artificial Sequence: Synthetic oligonucleotide
  Antisense strand to SEQ ID NO: 671114
uaacagaguaaucacucaa

SEQ ID NO: 671116 - RNA, 19 nt, Artificial Sequence
  Description of Artificial Sequence: Synthetic oligonucleotide
  Sense strand starting at position 3216 of SEQ ID NO: 585831
gagugauuacucuguuaaa

SEQ ID NO: 671117 - RNA, 19 nt, Artificial Sequence
  Description of Artificial Sequence: Synthetic oligonucleotide
  Antisense strand to SEQ ID NO: 671116
uuuaacagaguaaucacuc

SEQ ID NO: 671118 - RNA, 19 nt, Artificial Sequence
  Description of Artificial Sequence: Synthetic oligonucleotide
  Sense strand starting at position 3271 of SEQ ID NO: 585831
augauauuguuauccucau

SEQ ID NO: 671119 - RNA, 19 nt, Artificial Sequence
  Description of Artificial Sequence: Synthetic oligonucleotide
  Antisense strand to SEQ ID NO: 671118
augaggauaacaauaucau

SEQ ID NO: 671120 - RNA, 19 nt, Artificial Sequence
  Description of Artificial Sequence: Synthetic oligonucleotide
  Sense strand starting at position 3272 of SEQ ID NO: 585831
ugauauuguuauccucauu

SEQ ID NO: 671121 - RNA, 19 nt, Artificial Sequence
  Description of Artificial Sequence: Synthetic oligonucleotide
  Antisense strand to SEQ ID NO: 671120
aaugaggauaacaauauca

SEQ ID NO: 671122 - RNA, 19 nt, Artificial Sequence
  Description of Artificial Sequence: Synthetic oligonucleotide
  Sense strand starting at position 3388 of SEQ ID NO: 585831
ggcuccagagucugaaaga

SEQ ID NO: 671123 - RNA, 19 nt, Artificial Sequence
  Description of Artificial Sequence: Synthetic oligonucleotide
  Antisense strand to SEQ ID NO: 671122
ucuuucagacucuggagcc

SEQ ID NO: 671124 - RNA, 19 nt, Artificial Sequence
  Description of Artificial Sequence: Synthetic oligonucleotide
  Sense strand starting at position 3397 of SEQ ID NO: 585831
gucugaaagaccuggcagu

SEQ ID NO: 671125 - RNA, 19 nt, Artificial Sequence
  Description of Artificial Sequence: Synthetic oligonucleotide
  Antisense strand to SEQ ID NO: 671124
acugccaggucuuucagac

SEQ ID NO: 671126 - RNA, 19 nt, Artificial Sequence
  Description of Artificial Sequence: Synthetic oligonucleotide
  Sense strand starting at position 3398 of SEQ ID NO: 585831
ucugaaagaccuggcagua

SEQ ID NO: 671127 - RNA, 19 nt, Artificial Sequence
  Description of Artificial Sequence: Synthetic oligonucleotide
  Antisense strand to SEQ ID NO: 671126
uacugccaggucuuucaga

SEQ ID NO: 671128 - RNA, 19 nt, Artificial Sequence
  Description of Artificial Sequence: Synthetic oligonucleotide
  Sense strand starting at position 3456 of SEQ ID NO: 585831
guacuaggcggugauacuu

SEQ ID NO: 671129 - RNA, 19 nt, Artificial Sequence
  Description of Artificial Sequence: Synthetic oligonucleotide
  Antisense strand to SEQ ID NO: 671128
aaguaucaccgccuaguac

SEQ ID NO: 671130 - RNA, 19 nt, Artificial Sequence
  Description of Artificial Sequence: Synthetic oligonucleotide
  Sense strand starting at position 3477 of SEQ ID NO: 585831
acaagaagcuguguaaaua

SEQ ID NO: 671131 - RNA, 19 nt, Artificial Sequence
  Description of Artificial Sequence: Synthetic oligonucleotide
  Antisense strand to SEQ ID NO: 671130
uauuuacacagcuucuugu

SEQ ID NO: 671132 - RNA, 19 nt, Artificial Sequence
  Description of Artificial Sequence: Synthetic oligonucleotide
  Sense strand starting at position 3478 of SEQ ID NO: 585831
caagaagcuguguaaauag

SEQ ID NO: 671133 - RNA, 19 nt, Artificial Sequence
  Description of Artificial Sequence: Synthetic oligonucleotide
  Antisense strand to SEQ ID NO: 671132
cuauuuacacagcuucuug

SEQ ID NO: 671134 - RNA, 19 nt, Artificial Sequence
  Description of Artificial Sequence: Synthetic oligonucleotide
  Sense strand starting at position 3486 of SEQ ID NO: 585831
uguguaaauagugauccuu

SEQ ID NO: 671135 - RNA, 19 nt, Artificial Sequence
  Description of Artificial Sequence: Synthetic oligonucleotide
  Antisense strand to SEQ ID NO: 671134
aaggaucacuauuuacaca

SEQ ID NO: 671136 - RNA, 19 nt, Artificial Sequence
  Description of Artificial Sequence: Synthetic oligonucleotide
  Sense strand starting at position 3488 of SEQ ID NO: 585831
uguaaauagugauccuuaa

SEQ ID NO: 671137 - RNA, 19 nt, Artificial Sequence
  Description of Artificial Sequence: Synthetic oligonucleotide
  Antisense strand to SEQ ID NO: 671136
uuaaggaucacuauuuaca

SEQ ID NO: 671138 - RNA, 19 nt, Artificial Sequence
  Description of Artificial Sequence: Synthetic oligonucleotide
  Sense strand starting at position 3600 of SEQ ID NO: 585831
gaugauuuggcauguugua

SEQ ID NO: 671139 - RNA, 19 nt, Artificial Sequence
  Description of Artificial Sequence: Synthetic oligonucleotide
  Antisense strand to SEQ ID NO: 671138
uacaacaugccaaaucauc

SEQ ID NO: 671140 - RNA, 19 nt, Artificial Sequence
  Description of Artificial Sequence: Synthetic oligonucleotide
  Sense strand starting at position 3719 of SEQ ID NO: 585831
gucuuacacuucuuaguaa

SEQ ID NO: 671141 - RNA, 19 nt, Artificial Sequence
  Description of Artificial Sequence: Synthetic oligonucleotide
  Antisense strand to SEQ ID NO: 671140
uuacuaagaaguguaagac

SEQ ID NO: 671142 - RNA, 19 nt, Artificial Sequence
  Description of Artificial Sequence: Synthetic oligonucleotide
  Sense strand starting at position 3852 of SEQ ID NO: 585831
ugaagaugcucaguaauua

SEQ ID NO: 671143 - RNA, 19 nt, Artificial Sequence
  Description of Artificial Sequence: Synthetic oligonucleotide
  Antisense strand to SEQ ID NO: 671142
uaauuacugagcaucuuca

SEQ ID NO: 671144 - RNA, 19 nt, Artificial Sequence
  Description of Artificial Sequence: Synthetic oligonucleotide
  Sense strand starting at position 3914 of SEQ ID NO: 585831
uagggagauauuggugagu

SEQ ID NO: 671145 - RNA, 19 nt, Artificial Sequence
  Description of Artificial Sequence: Synthetic oligonucleotide
  Antisense strand to SEQ ID NO: 671144
acucaccaauaucucccua

SEQ ID NO: 671146 - RNA, 19 nt, Artificial Sequence
  Description of Artificial Sequence: Synthetic oligonucleotide
  Sense strand starting at position 3919 of SEQ ID NO: 585831
agauauuggugaguuccaa

SEQ ID NO: 671147 - RNA, 19 nt, Artificial Sequence
  Description of Artificial Sequence: Synthetic oligonucleotide
  Antisense strand to SEQ ID NO: 671146
uuggaacucaccaauaucu

SEQ ID NO: 671148 - RNA, 19 nt, Artificial Sequence
  Description of Artificial Sequence: Synthetic oligonucleotide
  Sense strand starting at position 3949 of SEQ ID NO: 585831
aaacauuaugugggaggua

SEQ ID NO: 671149 - RNA, 19 nt, Artificial Sequence
  Description of Artificial Sequence: Synthetic oligonucleotide
  Antisense strand to SEQ ID NO: 671148
uaccucccacauaauguuu

SEQ ID NO: 671150 - RNA, 19 nt, Artificial Sequence
  Description of Artificial Sequence: Synthetic oligonucleotide
  Sense strand starting at position 3952 of SEQ ID NO: 585831
cauuaugugggagguagaa

SEQ ID NO: 671151 - RNA, 19 nt, Artificial Sequence
  Description of Artificial Sequence: Synthetic oligonucleotide
  Antisense strand to SEQ ID NO: 671150
uucuaccucccacauaaug

SEQ ID NO: 671152 - RNA, 19 nt, Artificial Sequence
  Description of Artificial Sequence: Synthetic oligonucleotide
  Sense strand starting at position 3976 of SEQ ID NO: 585831
gagccuuguccugaagaua

SEQ ID NO: 671153 - RNA, 19 nt, Artificial Sequence
  Description of Artificial Sequence: Synthetic oligonucleotide
  Antisense strand to SEQ ID NO: 671152
uaucuucaggacaaggcuc

SEQ ID NO: 671154 - RNA, 19 nt, Artificial Sequence
  Description of Artificial Sequence: Synthetic oligonucleotide
  Sense strand starting at position 38 of SEQ ID NO: 585832
agguaaauuuggcaaauau

SEQ ID NO: 671155 - RNA, 19 nt, Artificial Sequence
  Description of Artificial Sequence: Synthetic oligonucleotide
  Antisense strand to SEQ ID NO: 671154
auauuugccaaauuuaccu

SEQ ID NO: 671156 - RNA, 19 nt, Artificial Sequence
  Description of Artificial Sequence: Synthetic oligonucleotide
  Sense strand starting at position 63 of SEQ ID NO: 585832
gaagguaugguagggucua

SEQ ID NO: 671157 - RNA, 19 nt, Artificial Sequence
  Description of Artificial Sequence: Synthetic oligonucleotide
  Antisense strand to SEQ ID NO: 671156
uagacccuaccauaccuuc

SEQ ID NO: 671158 - RNA, 19 nt, Artificial Sequence
  Description of Artificial Sequence: Synthetic oligonucleotide
  Sense strand starting at position 134 of SEQ ID NO: 585832
gguaauaaaugcuuucccu

SEQ ID NO: 671159 - RNA, 19 nt, Artificial Sequence
  Description of Artificial Sequence: Synthetic oligonucleotide
  Antisense strand to SEQ ID NO: 671158
agggaaagcauuuauuacc

SEQ ID NO: 671160 - RNA, 19 nt, Artificial Sequence
  Description of Artificial Sequence: Synthetic oligonucleotide
  Sense strand starting at position 238 of SEQ ID NO: 585832
auauucuucugcuuguuga

SEQ ID NO: 671161 - RNA, 19 nt, Artificial Sequence
  Description of Artificial Sequence: Synthetic oligonucleotide
  Antisense strand to SEQ ID NO: 671160
ucaacaagcagaagaauau

SEQ ID NO: 671162 - RNA, 19 nt, Artificial Sequence
  Description of Artificial Sequence: Synthetic oligonucleotide
  Sense strand starting at position 329 of SEQ ID NO: 585832
aagcuuuaaccugguguua

SEQ ID NO: 671163 - RNA, 19 nt, Artificial Sequence
  Description of Artificial Sequence: Synthetic oligonucleotide
  Antisense strand to SEQ ID NO: 671162
uaacaccagguuaaagcuu

SEQ ID NO: 671164 - RNA, 19 nt, Artificial Sequence
  Description of Artificial Sequence: Synthetic oligonucleotide
  Sense strand starting at position 749 of SEQ ID NO: 585832
cagcgucacuaaguauuaa

SEQ ID NO: 671165 - RNA, 19 nt, Artificial Sequence
  Description of Artificial Sequence: Synthetic oligonucleotide
  Antisense strand to SEQ ID NO: 671164
uuaauacuuagugacgcug

SEQ ID NO: 671166 - RNA, 19 nt, Artificial Sequence
  Description of Artificial Sequence: Synthetic oligonucleotide
  Sense strand starting at position 768 of SEQ ID NO: 585832
uuuguacauuuaucgugua

SEQ ID NO: 671167 - RNA, 19 nt, Artificial Sequence
  Description of Artificial Sequence: Synthetic oligonucleotide
  Antisense strand to SEQ ID NO: 671166
uacacgauaaauguacaaa

SEQ ID NO: 671168 - RNA, 19 nt, Artificial Sequence
  Description of Artificial Sequence: Synthetic oligonucleotide
  Sense strand starting at position 787 of SEQ ID NO: 585832
augaacaagcccuauagua

SEQ ID NO: 671169 - RNA, 19 nt, Artificial Sequence
  Description of Artificial Sequence: Synthetic oligonucleotide
  Antisense strand to SEQ ID NO: 671168
uacuauagggcuuguucau

SEQ ID NO: 671170 - RNA, 19 nt, Artificial Sequence
  Description of Artificial Sequence: Synthetic oligonucleotide
  Sense strand starting at position 797 of SEQ ID NO: 585832
ccuauaguaucuguaugaa

SEQ ID NO: 671171 - RNA, 19 nt, Artificial Sequence
  Description of Artificial Sequence: Synthetic oligonucleotide
  Antisense strand to SEQ ID NO: 671170
uucauacagauacuauagg

SEQ ID NO: 671172 - RNA, 19 nt, Artificial Sequence
  Description of Artificial Sequence: Synthetic oligonucleotide
  Sense strand starting at position 800 of SEQ ID NO: 585832
auaguaucuguaugaauuc

SEQ ID NO: 671173 - RNA, 19 nt, Artificial Sequence
  Description of Artificial Sequence: Synthetic oligonucleotide
  Antisense strand to SEQ ID NO: 671172
gaauucauacagauacuau

SEQ ID NO: 671174 - RNA, 19 nt, Artificial Sequence
  Description of Artificial Sequence: Synthetic oligonucleotide
  Sense strand starting at position 930 of SEQ ID NO: 585832
ugcuaagagaccugugguu

SEQ ID NO: 671175 - RNA, 19 nt, Artificial Sequence
  Description of Artificial Sequence: Synthetic oligonucleotide
  Antisense strand to SEQ ID NO: 671174
aaccacaggucucuuagca

SEQ ID NO: 671176 - RNA, 19 nt, Artificial Sequence
  Description of Artificial Sequence: Synthetic oligonucleotide
  Sense strand starting at position 932 of SEQ ID NO: 585832
cuaagagaccugugguuau

SEQ ID NO: 671177 - RNA, 19 nt, Artificial Sequence
  Description of Artificial Sequence: Synthetic oligonucleotide
  Antisense strand to SEQ ID NO: 671176
auaaccacaggucucuuag

SEQ ID NO: 671178 - RNA, 19 nt, Artificial Sequence
  Description of Artificial Sequence: Synthetic oligonucleotide
  Sense strand starting at position 1051 of SEQ ID NO: 585832
acgcacagcauucgaaaua

SEQ ID NO: 671179 - RNA, 19 nt, Artificial Sequence
  Description of Artificial Sequence: Synthetic oligonucleotide
  Antisense strand to SEQ ID NO: 671178
uauuucgaaugcugugcgu

SEQ ID NO: 671180 - RNA, 19 nt, Artificial Sequence
  Description of Artificial Sequence: Synthetic oligonucleotide
  Sense strand starting at position 1062 of SEQ ID NO: 585832
ucgaaauagcaccauuauu

SEQ ID NO: 671181 - RNA, 19 nt, Artificial Sequence
  Description of Artificial Sequence: Synthetic oligonucleotide
  Antisense strand to SEQ ID NO: 671180
aauaauggugcuauuucga

SEQ ID NO: 671182 - RNA, 19 nt, Artificial Sequence
  Description of Artificial Sequence: Synthetic oligonucleotide
  Sense strand starting at position 1153 of SEQ ID NO: 585832
ccacaucucugcuuggaau

SEQ ID NO: 671183 - RNA, 19 nt, Artificial Sequence
  Description of Artificial Sequence: Synthetic oligonucleotide
  Antisense strand to SEQ ID NO: 671182
auuccaagcagagaugugg

SEQ ID NO: 671184 - RNA, 19 nt, Artificial Sequence
  Description of Artificial Sequence: Synthetic oligonucleotide
  Sense strand starting at position 1161 of SEQ ID NO: 585832
cugcuuggaauugaguuua

SEQ ID NO: 671185 - RNA, 19 nt, Artificial Sequence
  Description of Artificial Sequence: Synthetic oligonucleotide
  Antisense strand to SEQ ID NO: 671184
uaaacucaauuccaagcag

SEQ ID NO: 671186 - RNA, 19 nt, Artificial Sequence
  Description of Artificial Sequence: Synthetic oligonucleotide
  Sense strand starting at position 1173 of SEQ ID NO: 585832
gaguuuaaggcugaacucu

SEQ ID NO: 671187 - RNA, 19 nt, Artificial Sequence
  Description of Artificial Sequence: Synthetic oligonucleotide
  Antisense strand to SEQ ID NO: 671186
agaguucagccuuaaacuc

SEQ ID NO: 671188 - RNA, 19 nt, Artificial Sequence
  Description of Artificial Sequence: Synthetic oligonucleotide
  Sense strand starting at position 1182 of SEQ ID NO: 585832
gcugaacucuaaguaaaca

SEQ ID NO: 671189 - RNA, 19 nt, Artificial Sequence
  Description of Artificial Sequence: Synthetic oligonucleotide
  Antisense strand to SEQ ID NO: 671188
uguuuacuuagaguucagc

SEQ ID NO: 671190 - RNA, 19 nt, Artificial Sequence
  Description of Artificial Sequence: Synthetic oligonucleotide
  Sense strand starting at position 1272 of SEQ ID NO: 585832
aggucagaaucugugcaaa

SEQ ID NO: 671191 - RNA, 19 nt, Artificial Sequence
  Description of Artificial Sequence: Synthetic oligonucleotide
  Antisense strand to SEQ ID NO: 671190
uuugcacagauucugaccu

SEQ ID NO: 671192 - RNA, 19 nt, Artificial Sequence
  Description of Artificial Sequence: Synthetic oligonucleotide
  Sense strand starting at position 1274 of SEQ ID NO: 585832
gucagaaucugugcaaaug

SEQ ID NO: 671193 - RNA, 19 nt, Artificial Sequence
  Description of Artificial Sequence: Synthetic oligonucleotide
  Antisense strand to SEQ ID NO: 671192
cauuugcacagauucugac

SEQ ID NO: 671194 - RNA, 19 nt, Artificial Sequence
  Description of Artificial Sequence: Synthetic oligonucleotide
  Sense strand starting at position 1275 of SEQ ID NO: 585832
ucagaaucugugcaaauga

SEQ ID NO: 671195 - RNA, 19 nt, Artificial Sequence
  Description of Artificial Sequence: Synthetic oligonucleotide
  Antisense strand to SEQ ID NO: 671194
ucauuugcacagauucuga

SEQ ID NO: 671196 - RNA, 19 nt, Artificial Sequence
  Description of Artificial Sequence: Synthetic oligonucleotide
  Sense strand starting at position 1394 of SEQ ID NO: 585832
ggcugaguuucacucagag

SEQ ID NO: 671197 - RNA, 19 nt, Artificial Sequence
  Description of Artificial Sequence: Synthetic oligonucleotide
  Antisense strand to SEQ ID NO: 671196
cucugagugaaacucagcc

SEQ ID NO: 671198 - RNA, 19 nt, Artificial Sequence
  Description of Artificial Sequence: Synthetic oligonucleotide
  Sense strand starting at position 2303 of SEQ ID NO: 585832
cggcguugucucgcaggga

SEQ ID NO: 671199 - RNA, 19 nt, Artificial Sequence
  Description of Artificial Sequence: Synthetic oligonucleotide
  Antisense strand to SEQ ID NO: 671198
ucccugcgagacaacgccg

SEQ ID NO: 671200 - RNA, 19 nt, Artificial Sequence
  Description of Artificial Sequence: Synthetic oligonucleotide
  Sense strand starting at position 2522 of SEQ ID NO: 585832
gccguaaucgaugaaguac

SEQ ID NO: 671201 - RNA, 19 nt, Artificial Sequence
  Description of Artificial Sequence: Synthetic oligonucleotide
  Antisense strand to SEQ ID NO: 671200
guacuucaucgauuacggc

SEQ ID NO: 671202 - RNA, 19 nt, Artificial Sequence
  Description of Artificial Sequence: Synthetic oligonucleotide
  Sense strand starting at position 2609 of SEQ ID NO: 585832
gggcgaagguuggcuauuu

SEQ ID NO: 671203 - RNA, 19 nt, Artificial Sequence
  Description of Artificial Sequence: Synthetic oligonucleotide
  Antisense strand to SEQ ID NO: 671202
aaauagccaaccuucgccc

SEQ ID NO: 671204 - RNA, 19 nt, Artificial Sequence
  Description of Artificial Sequence: Synthetic oligonucleotide
  Sense strand starting at position 2827 of SEQ ID NO: 585832
gagaccaagcuuggagauu

SEQ ID NO: 671205 - RNA, 19 nt, Artificial Sequence
  Description of Artificial Sequence: Synthetic oligonucleotide
  Antisense strand to SEQ ID NO: 671204
aaucuccaagcuuggucuc

SEQ ID NO: 671206 - RNA, 19 nt, Artificial Sequence
  Description of Artificial Sequence: Synthetic oligonucleotide
  Sense strand starting at position 2828 of SEQ ID NO: 585832
agaccaagcuuggagauuu

SEQ ID NO: 671207 - RNA, 19 nt, Artificial Sequence
  Description of Artificial Sequence: Synthetic oligonucleotide
  Antisense strand to SEQ ID NO: 671206
aaaucuccaagcuuggucu

SEQ ID NO: 671208 - RNA, 19 nt, Artificial Sequence
  Description of Artificial Sequence: Synthetic oligonucleotide
  Sense strand starting at position 2856 of SEQ ID NO: 585832
ggcuuacaccucuacgaaa

SEQ ID NO: 671209 - RNA, 19 nt, Artificial Sequence
  Description of Artificial Sequence: Synthetic oligonucleotide
  Antisense strand to SEQ ID NO: 671208
uuucguagagguguaagcc

SEQ ID NO: 671210 - RNA, 19 nt, Artificial Sequence
  Description of Artificial Sequence: Synthetic oligonucleotide
  Sense strand starting at position 2871 of SEQ ID NO: 585832
gaaacaagacacuguagua

SEQ ID NO: 671211 - RNA, 19 nt, Artificial Sequence
  Description of Artificial Sequence: Synthetic oligonucleotide
  Antisense strand to SEQ ID NO: 671210
uacuacagugucuuguuuc

SEQ ID NO: 671212 - RNA, 19 nt, Artificial Sequence
  Description of Artificial Sequence: Synthetic oligonucleotide
  Sense strand starting at position 2928 of SEQ ID NO: 585832
ccacuuccgccagauuaca

SEQ ID NO: 671213 - RNA, 19 nt, Artificial Sequence
  Description of Artificial Sequence: Synthetic oligonucleotide
  Antisense strand to SEQ ID NO: 671212
uguaaucuggcggaagugg

SEQ ID NO: 671214 - RNA, 19 nt, Artificial Sequence
  Description of Artificial Sequence: Synthetic oligonucleotide
  Sense strand starting at position 2982 of SEQ ID NO: 585832
ggguaaaugugucccucuu

SEQ ID NO: 671215 - RNA, 19 nt, Artificial Sequence
  Description of Artificial Sequence: Synthetic oligonucleotide
  Antisense strand to SEQ ID NO: 671214
aagagggacacauuuaccc

SEQ ID NO: 671216 - RNA, 19 nt, Artificial Sequence
  Description of Artificial Sequence: Synthetic oligonucleotide
  Sense strand starting at position 3124 of SEQ ID NO: 585832
gcagcaaucccuugauuua

SEQ ID NO: 671217 - RNA, 19 nt, Artificial Sequence
  Description of Artificial Sequence: Synthetic oligonucleotide
  Antisense strand to SEQ ID NO: 671216
uaaaucaagggauugcugc

SEQ ID NO: 671218 - RNA, 19 nt, Artificial Sequence
  Description of Artificial Sequence: Synthetic oligonucleotide
  Sense strand starting at position 3178 of SEQ ID NO: 585832
ugugaacuguauucccuaa

SEQ ID NO: 671219 - RNA, 19 nt, Artificial Sequence
  Description of Artificial Sequence: Synthetic oligonucleotide
  Antisense strand to SEQ ID NO: 671218
uuagggaauacaguucaca

SEQ ID NO: 671220 - RNA, 19 nt, Artificial Sequence
  Description of Artificial Sequence: Synthetic oligonucleotide
  Sense strand starting at position 3180 of SEQ ID NO: 585832
ugaacuguauucccuaaga

SEQ ID NO: 671221 - RNA, 19 nt, Artificial Sequence
  Description of Artificial Sequence: Synthetic oligonucleotide
  Antisense strand to SEQ ID NO: 671220
ucuuagggaauacaguuca

SEQ ID NO: 671222 - RNA, 19 nt, Artificial Sequence
  Description of Artificial Sequence: Synthetic oligonucleotide
  Sense strand starting at position 3855 of SEQ ID NO: 585832
gccuuuacucaagaugcuu

SEQ ID NO: 671223 - RNA, 19 nt, Artificial Sequence
  Description of Artificial Sequence: Synthetic oligonucleotide
  Antisense strand to SEQ ID NO: 671222
aagcaucuugaguaaaggc

SEQ ID NO: 671224 - RNA, 19 nt, Artificial Sequence
  Description of Artificial Sequence: Synthetic oligonucleotide
  Sense strand starting at position 3937 of SEQ ID NO: 585832
auagcaagacagugugaua

SEQ ID NO: 671225 - RNA, 19 nt, Artificial Sequence
  Description of Artificial Sequence: Synthetic oligonucleotide
  Antisense strand to SEQ ID NO: 671224
uaucacacugucuugcuau

SEQ ID NO: 671226 - RNA, 19 nt, Artificial Sequence
  Description of Artificial Sequence: Synthetic oligonucleotide
  Sense strand starting at position 3946 of SEQ ID NO: 585832
cagugugauaaauguaggu

SEQ ID NO: 671227 - RNA, 19 nt, Artificial Sequence
  Description of Artificial Sequence: Synthetic oligonucleotide
  Antisense strand to SEQ ID NO: 671226
accuacauuuaucacacug

SEQ ID NO: 671228 - RNA, 19 nt, Artificial Sequence
  Description of Artificial Sequence: Synthetic oligonucleotide
  Sense strand starting at position 3948 of SEQ ID NO: 585832
gugugauaaauguaggugu

SEQ ID NO: 671229 - RNA, 19 nt, Artificial Sequence
  Description of Artificial Sequence: Synthetic oligonucleotide
  Antisense strand to SEQ ID NO: 671228
acaccuacauuuaucacac

SEQ ID NO: 671230 - RNA, 19 nt, Artificial Sequence
  Description of Artificial Sequence: Synthetic oligonucleotide
  Sense strand starting at position 3952 of SEQ ID NO: 585832
gauaaauguagguguguua

SEQ ID NO: 671231 - RNA, 19 nt, Artificial Sequence
  Description of Artificial Sequence: Synthetic oligonucleotide
  Antisense strand to SEQ ID NO: 671230
uaacacaccuacauuuauc

SEQ ID NO: 671232 - RNA, 19 nt, Artificial Sequence
  Description of Artificial Sequence: Synthetic oligonucleotide
  Sense strand starting at position 3955 of SEQ ID NO: 585832
aaauguagguguguuauuu

SEQ ID NO: 671233 - RNA, 19 nt, Artificial Sequence
  Description of Artificial Sequence: Synthetic oligonucleotide
  Antisense strand to SEQ ID NO: 671232
aaauaacacaccuacauuu

SEQ ID NO: 671234 - RNA, 19 nt, Artificial Sequence
  Description of Artificial Sequence: Synthetic oligonucleotide
  Sense strand starting at position 694 of SEQ ID NO: 585833
cacuguugguggccuguaa

SEQ ID NO: 671235 - RNA, 19 nt, Artificial Sequence
  Description of Artificial Sequence: Synthetic oligonucleotide
  Antisense strand to SEQ ID NO: 671234
uuacaggccaccaacagug

SEQ ID NO: 671236 - RNA, 19 nt, Artificial Sequence
  Description of Artificial Sequence: Synthetic oligonucleotide
  Sense strand starting at position 715 of SEQ ID NO: 585833
caguacaaccauuguggaa

SEQ ID NO: 671237 - RNA, 19 nt, Artificial Sequence
  Description of Artificial Sequence: Synthetic oligonucleotide
  Antisense strand to SEQ ID NO: 671236
uuccacaaugguuguacug

SEQ ID NO: 671238 - RNA, 19 nt, Artificial Sequence
  Description of Artificial Sequence: Synthetic oligonucleotide
  Sense strand starting at position 1342 of SEQ ID NO: 585833
ccaccucuuggauguagua

SEQ ID NO: 671239 - RNA, 19 nt, Artificial Sequence
  Description of Artificial Sequence: Synthetic oligonucleotide
  Antisense strand to SEQ ID NO: 671238
uacuacauccaagaggugg

SEQ ID NO: 671240 - RNA, 19 nt, Artificial Sequence
  Description of Artificial Sequence: Synthetic oligonucleotide
  Sense strand starting at position 1408 of SEQ ID NO: 585833
cugacaaucugagucucau

SEQ ID NO: 671241 - RNA, 19 nt, Artificial Sequence
  Description of Artificial Sequence: Synthetic oligonucleotide
  Antisense strand to SEQ ID NO: 671240
augagacucagauugucag

SEQ ID NO: 671242 - RNA, 19 nt, Artificial Sequence
  Description of Artificial Sequence: Synthetic oligonucleotide
  Sense strand starting at position 1449 of SEQ ID NO: 585833
acuacuguucggugccgaa

SEQ ID NO: 671243 - RNA, 19 nt, Artificial Sequence
  Description of Artificial Sequence: Synthetic oligonucleotide
  Antisense strand to SEQ ID NO: 671242
uucggcaccgaacaguagu

SEQ ID NO: 671244 - RNA, 19 nt, Artificial Sequence
  Description of Artificial Sequence: Synthetic oligonucleotide
  Sense strand starting at position 1519 of SEQ ID NO: 585833
cguuaaguucuacacauug

SEQ ID NO: 671245 - RNA, 19 nt, Artificial Sequence
  Description of Artificial Sequence: Synthetic oligonucleotide
  Antisense strand to SEQ ID NO: 671244
caauguguagaacuuaacg

SEQ ID NO: 671246 - RNA, 19 nt, Artificial Sequence
  Description of Artificial Sequence: Synthetic oligonucleotide
  Sense strand starting at position 1560 of SEQ ID NO: 585833
gaguguccgcacuaugaca

SEQ ID NO: 671247 - RNA, 19 nt, Artificial Sequence
  Description of Artificial Sequence: Synthetic oligonucleotide
  Antisense strand to SEQ ID NO: 671246
ugucauagugcggacacuc

SEQ ID NO: 671248 - RNA, 19 nt, Artificial Sequence
  Description of Artificial Sequence: Synthetic oligonucleotide
  Sense strand starting at position 1720 of SEQ ID NO: 585833
caaggugaguacgggaaau

SEQ ID NO: 671249 - RNA, 19 nt, Artificial Sequence
  Description of Artificial Sequence: Synthetic oligonucleotide
  Antisense strand to SEQ ID NO: 671248
auuucccguacucaccuug

SEQ ID NO: 671250 - RNA, 19 nt, Artificial Sequence
  Description of Artificial Sequence: Synthetic oligonucleotide
  Sense strand starting at position 1800 of SEQ ID NO: 585833
aggcaaagauuugggcuau

SEQ ID NO: 671251 - RNA, 19 nt, Artificial Sequence
  Description of Artificial Sequence: Synthetic oligonucleotide
  Antisense strand to SEQ ID NO: 671250
auagcccaaaucuuugccu

SEQ ID NO: 671252 - RNA, 19 nt, Artificial Sequence
  Description of Artificial Sequence: Synthetic oligonucleotide
  Sense strand starting at position 1801 of SEQ ID NO: 585833
ggcaaagauuugggcuauc

SEQ ID NO: 671253 - RNA, 19 nt, Artificial Sequence
  Description of Artificial Sequence: Synthetic oligonucleotide
  Antisense strand to SEQ ID NO: 671252
gauagcccaaaucuuugcc

SEQ ID NO: 671254 - RNA, 19 nt, Artificial Sequence
  Description of Artificial Sequence: Synthetic oligonucleotide
  Sense strand starting at position 2246 of SEQ ID NO: 585833
guuccaguucgguguguau

SEQ ID NO: 671255 - RNA, 19 nt, Artificial Sequence
  Description of Artificial Sequence: Synthetic oligonucleotide
  Antisense strand to SEQ ID NO: 671254
auacacaccgaacuggaac

SEQ ID NO: 671256 - RNA, 19 nt, Artificial Sequence
  Description of Artificial Sequence: Synthetic oligonucleotide
  Sense strand starting at position 2255 of SEQ ID NO: 585833
cgguguguauguuuguaua

SEQ ID NO: 671257 - RNA, 19 nt, Artificial Sequence
  Description of Artificial Sequence: Synthetic oligonucleotide
  Antisense strand to SEQ ID NO: 671256
uauacaaacauacacaccg

SEQ ID NO: 671258 - RNA, 19 nt, Artificial Sequence
  Description of Artificial Sequence: Synthetic oligonucleotide
  Sense strand starting at position 2257 of SEQ ID NO: 585833
guguguauguuuguauaaa

SEQ ID NO: 671259 - RNA, 19 nt, Artificial Sequence
  Description of Artificial Sequence: Synthetic oligonucleotide
  Antisense strand to SEQ ID NO: 671258
uuuauacaaacauacacac

SEQ ID NO: 671260 - RNA, 19 nt, Artificial Sequence
  Description of Artificial Sequence: Synthetic oligonucleotide
  Sense strand starting at position 2281 of SEQ ID NO: 585833
ggagacaucuccuagaagu

SEQ ID NO: 671261 - RNA, 19 nt, Artificial Sequence
  Description of Artificial Sequence: Synthetic oligonucleotide
  Antisense strand to SEQ ID NO: 671260
acuucuaggagaugucucc

SEQ ID NO: 671262 - RNA, 19 nt, Artificial Sequence
  Description of Artificial Sequence: Synthetic oligonucleotide
  Sense strand starting at position 2289 of SEQ ID NO: 585833
cuccuagaaguauguuuau

SEQ ID NO: 671263 - RNA, 19 nt, Artificial Sequence
  Description of Artificial Sequence: Synthetic oligonucleotide
  Antisense strand to SEQ ID NO: 671262
auaaacauacuucuaggag

SEQ ID NO: 671264 - RNA, 19 nt, Artificial Sequence
  Description of Artificial Sequence: Synthetic oligonucleotide
  Sense strand starting at position 2318 of SEQ ID NO: 585833
uggaaagcauucugauuug

SEQ ID NO: 671265 - RNA, 19 nt, Artificial Sequence
  Description of Artificial Sequence: Synthetic oligonucleotide
  Antisense strand to SEQ ID NO: 671264
caaaucagaaugcuuucca

SEQ ID NO: 671266 - RNA, 19 nt, Artificial Sequence
  Description of Artificial Sequence: Synthetic oligonucleotide
  Sense strand starting at position 2324 of SEQ ID NO: 585833
gcauucugauuugggaaag

SEQ ID NO: 671267 - RNA, 19 nt, Artificial Sequence
  Description of Artificial Sequence: Synthetic oligonucleotide
  Antisense strand to SEQ ID NO: 671266
cuuucccaaaucagaaugc

SEQ ID NO: 671268 - RNA, 19 nt, Artificial Sequence
  Description of Artificial Sequence: Synthetic oligonucleotide
  Sense strand starting at position 2325 of SEQ ID NO: 585833
cauucugauuugggaaaga

SEQ ID NO: 671269 - RNA, 19 nt, Artificial Sequence
  Description of Artificial Sequence: Synthetic oligonucleotide
  Antisense strand to SEQ ID NO: 671268
ucuuucccaaaucagaaug

SEQ ID NO: 671270 - RNA, 19 nt, Artificial Sequence
  Description of Artificial Sequence: Synthetic oligonucleotide
  Sense strand starting at position 2406 of SEQ ID NO: 585833
auacucugccauuacguua

SEQ ID NO: 671271 - RNA, 19 nt, Artificial Sequence
  Description of Artificial Sequence: Synthetic oligonucleotide
  Antisense strand to SEQ ID NO: 671270
uaacguaauggcagaguau

SEQ ID NO: 671272 - RNA, 19 nt, Artificial Sequence
  Description of Artificial Sequence: Synthetic oligonucleotide
  Sense strand starting at position 2419 of SEQ ID NO: 585833
acguuagggccuugagagu

SEQ ID NO: 671273 - RNA, 19 nt, Artificial Sequence
  Description of Artificial Sequence: Synthetic oligonucleotide
  Antisense strand to SEQ ID NO: 671272
acucucaaggcccuaacgu

SEQ ID NO: 671274 - RNA, 19 nt, Artificial Sequence
  Description of Artificial Sequence: Synthetic oligonucleotide
  Sense strand starting at position 2449 of SEQ ID NO: 585833
gauguaugcaggugcaguu

SEQ ID NO: 671275 - RNA, 19 nt, Artificial Sequence
  Description of Artificial Sequence: Synthetic oligonucleotide
  Antisense strand to SEQ ID NO: 671274
aacugcaccugcauacauc

SEQ ID NO: 671276 - RNA, 19 nt, Artificial Sequence
  Description of Artificial Sequence: Synthetic oligonucleotide
  Sense strand starting at position 2487 of SEQ ID NO: 585833
ggaugcugguuugcacaua

SEQ ID NO: 671277 - RNA, 19 nt, Artificial Sequence
  Description of Artificial Sequence: Synthetic oligonucleotide
  Antisense strand to SEQ ID NO: 671276
uaugugcaaaccagcaucc

SEQ ID NO: 671278 - RNA, 19 nt, Artificial Sequence
  Description of Artificial Sequence: Synthetic oligonucleotide
  Sense strand starting at position 2515 of SEQ ID NO: 585833
uguuuaaguuuguugggau

SEQ ID NO: 671279 - RNA, 19 nt, Artificial Sequence
  Description of Artificial Sequence: Synthetic oligonucleotide
  Antisense strand to SEQ ID NO: 671278
aucccaacaaacuuaaaca

SEQ ID NO: 671280 - RNA, 19 nt, Artificial Sequence
  Description of Artificial Sequence: Synthetic oligonucleotide
  Sense strand starting at position 2622 of SEQ ID NO: 585833
gugagaggucacugaauca

SEQ ID NO: 671281 - RNA, 19 nt, Artificial Sequence
  Description of Artificial Sequence: Synthetic oligonucleotide
  Antisense strand to SEQ ID NO: 671280
ugauucagugaccucucac

SEQ ID NO: 671282 - RNA, 19 nt, Artificial Sequence
  Description of Artificial Sequence: Synthetic oligonucleotide
  Sense strand starting at position 2658 of SEQ ID NO: 585833
uugccauucccaugaugga

SEQ ID NO: 671283 - RNA, 19 nt, Artificial Sequence
  Description of Artificial Sequence: Synthetic oligonucleotide
  Antisense strand to SEQ ID NO: 671282
uccaucaugggaauggcaa

SEQ ID NO: 671284 - RNA, 19 nt, Artificial Sequence
  Description of Artificial Sequence: Synthetic oligonucleotide
  Sense strand starting at position 2675 of SEQ ID NO: 585833
gaguucucagaagauguuu

SEQ ID NO: 671285 - RNA, 19 nt, Artificial Sequence
  Description of Artificial Sequence: Synthetic oligonucleotide
  Antisense strand to SEQ ID NO: 671284
aaacaucuucugagaacuc

SEQ ID NO: 671286 - RNA, 19 nt, Artificial Sequence
  Description of Artificial Sequence: Synthetic oligonucleotide
  Sense strand starting at position 2680 of SEQ ID NO: 585833
cucagaagauguuuguuua

SEQ ID NO: 671287 - RNA, 19 nt, Artificial Sequence
  Description of Artificial Sequence: Synthetic oligonucleotide
  Antisense strand to SEQ ID NO: 671286
uaaacaaacaucuucugag

SEQ ID NO: 671288 - RNA, 19 nt, Artificial Sequence
  Description of Artificial Sequence: Synthetic oligonucleotide
  Sense strand starting at position 2684 of SEQ ID NO: 585833
gaagauguuuguuuauaag

SEQ ID NO: 671289 - RNA, 19 nt, Artificial Sequence
  Description of Artificial Sequence: Synthetic oligonucleotide
  Antisense strand to SEQ ID NO: 671288
cuuauaaacaaacaucuuc

SEQ ID NO: 671290 - RNA, 19 nt, Artificial Sequence
  Description of Artificial Sequence: Synthetic oligonucleotide
  Sense strand starting at position 2693 of SEQ ID NO: 585833
uguuuauaagaguguagca

SEQ ID NO: 671291 - RNA, 19 nt, Artificial Sequence
  Description of Artificial Sequence: Synthetic oligonucleotide
  Antisense strand to SEQ ID NO: 671290
ugcuacacucuuauaaaca

SEQ ID NO: 671292 - RNA, 19 nt, Artificial Sequence
  Description of Artificial Sequence: Synthetic oligonucleotide
  Sense strand starting at position 2757 of SEQ ID NO: 585833
cgguaagacgugcuuguuu

SEQ ID NO: 671293 - RNA, 19 nt, Artificial Sequence
  Description of Artificial Sequence: Synthetic oligonucleotide
  Antisense strand to SEQ ID NO: 671292
aaacaagcacgucuuaccg

SEQ ID NO: 671294 - RNA, 19 nt, Artificial Sequence
  Description of Artificial Sequence: Synthetic oligonucleotide
  Sense strand starting at position 2766 of SEQ ID NO: 585833
gugcuuguuuccucuucca

SEQ ID NO: 671295 - RNA, 19 nt, Artificial Sequence
  Description of Artificial Sequence: Synthetic oligonucleotide
  Antisense strand to SEQ ID NO: 671294
uggaagaggaaacaagcac

SEQ ID NO: 671296 - RNA, 19 nt, Artificial Sequence
  Description of Artificial Sequence: Synthetic oligonucleotide
  Sense strand starting at position 2837 of SEQ ID NO: 585833
guggaacugugagcuaaug

SEQ ID NO: 671297 - RNA, 19 nt, Artificial Sequence
  Description of Artificial Sequence: Synthetic oligonucleotide
  Antisense strand to SEQ ID NO: 671296
cauuagcucacaguuccac

SEQ ID NO: 671298 - RNA, 19 nt, Artificial Sequence
  Description of Artificial Sequence: Synthetic oligonucleotide
  Sense strand starting at position 2897 of SEQ ID NO: 585833
uuucuagcagugugagaag

SEQ ID NO: 671299 - RNA, 19 nt, Artificial Sequence
  Description of Artificial Sequence: Synthetic oligonucleotide
  Antisense strand to SEQ ID NO: 671298
cuucucacacugcuagaaa

SEQ ID NO: 671300 - RNA, 19 nt, Artificial Sequence
  Description of Artificial Sequence: Synthetic oligonucleotide
  Sense strand starting at position 2987 of SEQ ID NO: 585833
cucugucuuggccaaggua

SEQ ID NO: 671301 - RNA, 19 nt, Artificial Sequence
  Description of Artificial Sequence: Synthetic oligonucleotide
  Antisense strand to SEQ ID NO: 671300
uaccuuggccaagacagag

SEQ ID NO: 671302 - RNA, 19 nt, Artificial Sequence
  Description of Artificial Sequence: Synthetic oligonucleotide
  Sense strand starting at position 3189 of SEQ ID NO: 585833
ggaauaacaucacgugaca

SEQ ID NO: 671303 - RNA, 19 nt, Artificial Sequence
  Description of Artificial Sequence: Synthetic oligonucleotide
  Antisense strand to SEQ ID NO: 671302
ugucacgugauguuauucc

SEQ ID NO: 671304 - RNA, 19 nt, Artificial Sequence
  Description of Artificial Sequence: Synthetic oligonucleotide
  Sense strand starting at position 3268 of SEQ ID NO: 585833
uugaaauggccucgcaaag

SEQ ID NO: 671305 - RNA, 19 nt, Artificial Sequence
  Description of Artificial Sequence: Synthetic oligonucleotide
  Antisense strand to SEQ ID NO: 671304
cuuugcgaggccauuucaa

SEQ ID NO: 671306 - RNA, 19 nt, Artificial Sequence
  Description of Artificial Sequence: Synthetic oligonucleotide
  Sense strand starting at position 3280 of SEQ ID NO: 585833
cgcaaagcugucucuuguu

SEQ ID NO: 671307 - RNA, 19 nt, Artificial Sequence
  Description of Artificial Sequence: Synthetic oligonucleotide
  Antisense strand to SEQ ID NO: 671306
aacaagagacagcuuugcg

SEQ ID NO: 671308 - RNA, 19 nt, Artificial Sequence
  Description of Artificial Sequence: Synthetic oligonucleotide
  Sense strand starting at position 3900 of SEQ ID NO: 585833
ugcuuugagaugggccaaa

SEQ ID NO: 671309 - RNA, 19 nt, Artificial Sequence
  Description of Artificial Sequence: Synthetic oligonucleotide
  Antisense strand to SEQ ID NO: 671308
uuuggcccaucucaaagca

SEQ ID NO: 671310 - RNA, 19 nt, Artificial Sequence
  Description of Artificial Sequence: Synthetic oligonucleotide
  Sense strand starting at position 3942 of SEQ ID NO: 585833
gauacaugucuuugccugu

SEQ ID NO: 671311 - RNA, 19 nt, Artificial Sequence
  Description of Artificial Sequence: Synthetic oligonucleotide
  Antisense strand to SEQ ID NO: 671310
acaggcaaagacauguauc

SEQ ID NO: 671312 - RNA, 19 nt, Artificial Sequence
  Description of Artificial Sequence: Synthetic oligonucleotide
  Sense strand starting at position 3943 of SEQ ID NO: 585833
auacaugucuuugccugua

SEQ ID NO: 671313 - RNA, 19 nt, Artificial Sequence
  Description of Artificial Sequence: Synthetic oligonucleotide
  Antisense strand to SEQ ID NO: 671312
uacaggcaaagacauguau

SEQ ID NO: 671314 - RNA, 19 nt, Artificial Sequence
  Description of Artificial Sequence: Synthetic oligonucleotide
  Sense strand starting at position 198 of SEQ ID NO: 585834
cuugauauccaugaggcua

SEQ ID NO: 671315 - RNA, 19 nt, Artificial Sequence
  Description of Artificial Sequence: Synthetic oligonucleotide
  Antisense strand to SEQ ID NO: 671314
uagccucauggauaucaag

SEQ ID NO: 671316 - RNA, 19 nt, Artificial Sequence
  Description of Artificial Sequence: Synthetic oligonucleotide
  Sense strand starting at position 376 of SEQ ID NO: 585834
gugaguguuacggauggga

SEQ ID NO: 671317 - RNA, 19 nt, Artificial Sequence
  Description of Artificial Sequence: Synthetic oligonucleotide
  Antisense strand to SEQ ID NO: 671316
ucccauccguaacacucac

SEQ ID NO: 671318 - RNA, 19 nt, Artificial Sequence
  Description of Artificial Sequence: Synthetic oligonucleotide
  Sense strand starting at position 378 of SEQ ID NO: 585834
gaguguuacggaugggaau

SEQ ID NO: 671319 - RNA, 19 nt, Artificial Sequence
  Description of Artificial Sequence: Synthetic oligonucleotide
  Antisense strand to SEQ ID NO: 671318
auucccauccguaacacuc

SEQ ID NO: 671320 - RNA, 19 nt, Artificial Sequence
  Description of Artificial Sequence: Synthetic oligonucleotide
  Sense strand starting at position 389 of SEQ ID NO: 585834
augggaaucuuugcaacaa

SEQ ID NO: 671321 - RNA, 19 nt, Artificial Sequence
  Description of Artificial Sequence: Synthetic oligonucleotide
  Antisense strand to SEQ ID NO: 671320
uuguugcaaagauucccau

SEQ ID NO: 671322 - RNA, 19 nt, Artificial Sequence
  Description of Artificial Sequence: Synthetic oligonucleotide
  Sense strand starting at position 418 of SEQ ID NO: 585834
cauuucgacuuggaagaca

SEQ ID NO: 671323 - RNA, 19 nt, Artificial Sequence
  Description of Artificial Sequence: Synthetic oligonucleotide
  Antisense strand to SEQ ID NO: 671322
ugucuuccaagucgaaaug

SEQ ID NO: 671324 - RNA, 19 nt, Artificial Sequence
  Description of Artificial Sequence: Synthetic oligonucleotide
  Sense strand starting at position 440 of SEQ ID NO: 585834
aagggaagccaugguuaug

SEQ ID NO: 671325 - RNA, 19 nt, Artificial Sequence
  Description of Artificial Sequence: Synthetic oligonucleotide
  Antisense strand to SEQ ID NO: 671324
cauaaccauggcuucccuu

SEQ ID NO: 671326 - RNA, 19 nt, Artificial Sequence
  Description of Artificial Sequence: Synthetic oligonucleotide
  Sense strand starting at position 610 of SEQ ID NO: 585834
aauauuauagagugaggca

SEQ ID NO: 671327 - RNA, 19 nt, Artificial Sequence
  Description of Artificial Sequence: Synthetic oligonucleotide
  Antisense strand to SEQ ID NO: 671326
ugccucacucuauaauauu

SEQ ID NO: 671328 - RNA, 19 nt, Artificial Sequence
  Description of Artificial Sequence: Synthetic oligonucleotide
  Sense strand starting at position 749 of SEQ ID NO: 585834
cugugucuccuaggauuuc

SEQ ID NO: 671329 - RNA, 19 nt, Artificial Sequence
  Description of Artificial Sequence: Synthetic oligonucleotide
  Antisense strand to SEQ ID NO: 671328
gaaauccuaggagacacag

SEQ ID NO: 671330 - RNA, 19 nt, Artificial Sequence
  Description of Artificial Sequence: Synthetic oligonucleotide
  Sense strand starting at position 834 of SEQ ID NO: 585834
uagcauuagugaucuaaga

SEQ ID NO: 671331 - RNA, 19 nt, Artificial Sequence
  Description of Artificial Sequence: Synthetic oligonucleotide
  Antisense strand to SEQ ID NO: 671330
ucuuagaucacuaaugcua

SEQ ID NO: 671332 - RNA, 19 nt, Artificial Sequence
  Description of Artificial Sequence: Synthetic oligonucleotide
  Sense strand starting at position 965 of SEQ ID NO: 585834
uaagaaauaugacuggucu

SEQ ID NO: 671333 - RNA, 19 nt, Artificial Sequence
  Description of Artificial Sequence: Synthetic oligonucleotide
  Antisense strand to SEQ ID NO: 671332
agaccagucauauuucuua

SEQ ID NO: 671334 - RNA, 19 nt, Artificial Sequence
  Description of Artificial Sequence: Synthetic oligonucleotide
  Sense strand starting at position 966 of SEQ ID NO: 585834
aagaaauaugacuggucuu

SEQ ID NO: 671335 - RNA, 19 nt, Artificial Sequence
  Description of Artificial Sequence: Synthetic oligonucleotide
  Antisense strand to SEQ ID NO: 671334
aagaccagucauauuucuu

SEQ ID NO: 671336 - RNA, 19 nt, Artificial Sequence
  Description of Artificial Sequence: Synthetic oligonucleotide
  Sense strand starting at position 1003 of SEQ ID NO: 585834
aguuauuaaccuugaugau

SEQ ID NO: 671337 - RNA, 19 nt, Artificial Sequence
  Description of Artificial Sequence: Synthetic oligonucleotide
  Antisense strand to SEQ ID NO: 671336
aucaucaagguuaauaacu

SEQ ID NO: 671338 - RNA, 19 nt, Artificial Sequence
  Description of Artificial Sequence: Synthetic oligonucleotide
  Sense strand starting at position 1160 of SEQ ID NO: 585834
cugaguuauuuguuugguu

SEQ ID NO: 671339 - RNA, 19 nt, Artificial Sequence
  Description of Artificial Sequence: Synthetic oligonucleotide
  Antisense strand to SEQ ID NO: 671338
aaccaaacaaauaacucag

SEQ ID NO: 671340 - RNA, 19 nt, Artificial Sequence
  Description of Artificial Sequence: Synthetic oligonucleotide
  Sense strand starting at position 1161 of SEQ ID NO: 585834
ugaguuauuuguuugguuu

SEQ ID NO: 671341 - RNA, 19 nt, Artificial Sequence
  Description of Artificial Sequence: Synthetic oligonucleotide
  Antisense strand to SEQ ID NO: 671340
aaaccaaacaaauaacuca

SEQ ID NO: 671342 - RNA, 19 nt, Artificial Sequence
  Description of Artificial Sequence: Synthetic oligonucleotide
  Sense strand starting at position 1162 of SEQ ID NO: 585834
gaguuauuuguuugguuug

SEQ ID NO: 671343 - RNA, 19 nt, Artificial Sequence
  Description of Artificial Sequence: Synthetic oligonucleotide
  Antisense strand to SEQ ID NO: 671342
caaaccaaacaaauaacuc

SEQ ID NO: 671344 - RNA, 19 nt, Artificial Sequence
  Description of Artificial Sequence: Synthetic oligonucleotide
  Sense strand starting at position 1301 of SEQ ID NO: 585834
ccagaaguucaguggauga

SEQ ID NO: 671345 - RNA, 19 nt, Artificial Sequence
  Description of Artificial Sequence: Synthetic oligonucleotide
  Antisense strand to SEQ ID NO: 671344
ucauccacugaacuucugg

SEQ ID NO: 671346 - RNA, 19 nt, Artificial Sequence
  Description of Artificial Sequence: Synthetic oligonucleotide
  Sense strand starting at position 1429 of SEQ ID NO: 585834
ucacauaugugacucuauu

SEQ ID NO: 671347 - RNA, 19 nt, Artificial Sequence
  Description of Artificial Sequence: Synthetic oligonucleotide
  Antisense strand to SEQ ID NO: 671346
aauagagucacauauguga

SEQ ID NO: 671348 - RNA, 19 nt, Artificial Sequence
  Description of Artificial Sequence: Synthetic oligonucleotide
  Sense strand starting at position 1440 of SEQ ID NO: 585834
acucuauugccuugagaga

SEQ ID NO: 671349 - RNA, 19 nt, Artificial Sequence
  Description of Artificial Sequence: Synthetic oligonucleotide
  Antisense strand to SEQ ID NO: 671348
ucucucaaggcaauagagu

SEQ ID NO: 671350 - RNA, 19 nt, Artificial Sequence
  Description of Artificial Sequence: Synthetic oligonucleotide
  Sense strand starting at position 1441 of SEQ ID NO: 585834
cucuauugccuugagagag

SEQ ID NO: 671351 - RNA, 19 nt, Artificial Sequence
  Description of Artificial Sequence: Synthetic oligonucleotide
  Antisense strand to SEQ ID NO: 671350
cucucucaaggcaauagag

SEQ ID NO: 671352 - RNA, 19 nt, Artificial Sequence
  Description of Artificial Sequence: Synthetic oligonucleotide
  Sense strand starting at position 1577 of SEQ ID NO: 585834
ggaucaaacuuggccaaau

SEQ ID NO: 671353 - RNA, 19 nt, Artificial Sequence
  Description of Artificial Sequence: Synthetic oligonucleotide
  Antisense strand to SEQ ID NO: 671352
auuuggccaaguuugaucc

SEQ ID NO: 671354 - RNA, 19 nt, Artificial Sequence
  Description of Artificial Sequence: Synthetic oligonucleotide
  Sense strand starting at position 1587 of SEQ ID NO: 585834
uggccaaauugaucaagga

SEQ ID NO: 671355 - RNA, 19 nt, Artificial Sequence
  Description of Artificial Sequence: Synthetic oligonucleotide
  Antisense strand to SEQ ID NO: 671354
uccuugaucaauuuggcca

SEQ ID NO: 671356 - RNA, 19 nt, Artificial Sequence
  Description of Artificial Sequence: Synthetic oligonucleotide
  Sense strand starting at position 1989 of SEQ ID NO: 585834
gcaugucucaguggaauuu

SEQ ID NO: 671357 - RNA, 19 nt, Artificial Sequence
  Description of Artificial Sequence: Synthetic oligonucleotide
  Antisense strand to SEQ ID NO: 671356
aaauuccacugagacaugc

SEQ ID NO: 671358 - RNA, 19 nt, Artificial Sequence
  Description of Artificial Sequence: Synthetic oligonucleotide
  Sense strand starting at position 2010 of SEQ ID NO: 585834
uguggacuuugcucuauuu

SEQ ID NO: 671359 - RNA, 19 nt, Artificial Sequence
  Description of Artificial Sequence: Synthetic oligonucleotide
  Antisense strand to SEQ ID NO: 671358
aaauagagcaaaguccaca

SEQ ID NO: 671360 - RNA, 19 nt, Artificial Sequence
  Description of Artificial Sequence: Synthetic oligonucleotide
  Sense strand starting at position 2127 of SEQ ID NO: 585834
cagagauaaguauguaucu

SEQ ID NO: 671361 - RNA, 19 nt, Artificial Sequence
  Description of Artificial Sequence: Synthetic oligonucleotide
  Antisense strand to SEQ ID NO: 671360
agauacauacuuaucucug

SEQ ID NO: 671362 - RNA, 19 nt, Artificial Sequence
  Description of Artificial Sequence: Synthetic oligonucleotide
  Sense strand starting at position 2247 of SEQ ID NO: 585834
uucuauguauucucagaca

SEQ ID NO: 671363 - RNA, 19 nt, Artificial Sequence
  Description of Artificial Sequence: Synthetic oligonucleotide
  Antisense strand to SEQ ID NO: 671362
ugucugagaauacauagaa

SEQ ID NO: 671364 - RNA, 19 nt, Artificial Sequence
  Description of Artificial Sequence: Synthetic oligonucleotide
  Sense strand starting at position 2532 of SEQ ID NO: 585834
gaacuagaugcuggguaua

SEQ ID NO: 671365 - RNA, 19 nt, Artificial Sequence
  Description of Artificial Sequence: Synthetic oligonucleotide
  Antisense strand to SEQ ID NO: 671364
uauacccagcaucuaguuc

SEQ ID NO: 671366 - RNA, 19 nt, Artificial Sequence
  Description of Artificial Sequence: Synthetic oligonucleotide
  Sense strand starting at position 2535 of SEQ ID NO: 585834
cuagaugcuggguauacaa

SEQ ID NO: 671367 - RNA, 19 nt, Artificial Sequence
  Description of Artificial Sequence: Synthetic oligonucleotide
  Antisense strand to SEQ ID NO: 671366
uuguauacccagcaucuag

SEQ ID NO: 671368 - RNA, 19 nt, Artificial Sequence
  Description of Artificial Sequence: Synthetic oligonucleotide
  Sense strand starting at position 2576 of SEQ ID NO: 585834
ggccuuuaagaguggagau

SEQ ID NO: 671369 - RNA, 19 nt, Artificial Sequence
  Description of Artificial Sequence: Synthetic oligonucleotide
  Antisense strand to SEQ ID NO: 671368
aucuccacucuuaaaggcc

SEQ ID NO: 671370 - RNA, 19 nt, Artificial Sequence
  Description of Artificial Sequence: Synthetic oligonucleotide
  Sense strand starting at position 2577 of SEQ ID NO: 585834
gccuuuaagaguggagaua

SEQ ID NO: 671371 - RNA, 19 nt, Artificial Sequence
  Description of Artificial Sequence: Synthetic oligonucleotide
  Antisense strand to SEQ ID NO: 671370
uaucuccacucuuaaaggc

SEQ ID NO: 671372 - RNA, 19 nt, Artificial Sequence
  Description of Artificial Sequence: Synthetic oligonucleotide
  Sense strand starting at position 2794 of SEQ ID NO: 585834
acuccagaguuucugggaa

SEQ ID NO: 671373 - RNA, 19 nt, Artificial Sequence
  Description of Artificial Sequence: Synthetic oligonucleotide
  Antisense strand to SEQ ID NO: 671372
uucccagaaacucuggagu

SEQ ID NO: 671374 - RNA, 19 nt, Artificial Sequence
  Description of Artificial Sequence: Synthetic oligonucleotide
  Sense strand starting at position 2847 of SEQ ID NO: 585834
gacauugacuuguugacua

SEQ ID NO: 671375 - RNA, 19 nt, Artificial Sequence
  Description of Artificial Sequence: Synthetic oligonucleotide
  Antisense strand to SEQ ID NO: 671374
uagucaacaagucaauguc

SEQ ID NO: 671376 - RNA, 19 nt, Artificial Sequence
  Description of Artificial Sequence: Synthetic oligonucleotide
  Sense strand starting at position 2877 of SEQ ID NO: 585834
cauugacugcuuuagugaa

SEQ ID NO: 671377 - RNA, 19 nt, Artificial Sequence
  Description of Artificial Sequence: Synthetic oligonucleotide
  Antisense strand to SEQ ID NO: 671376
uucacuaaagcagucaaug

SEQ ID NO: 671378 - RNA, 19 nt, Artificial Sequence
  Description of Artificial Sequence: Synthetic oligonucleotide
  Sense strand starting at position 3064 of SEQ ID NO: 585834
gcuggaggagucuaucaag

SEQ ID NO: 671379 - RNA, 19 nt, Artificial Sequence
  Description of Artificial Sequence: Synthetic oligonucleotide
  Antisense strand to SEQ ID NO: 671378
cuugauagacuccuccagc

SEQ ID NO: 671380 - RNA, 19 nt, Artificial Sequence
  Description of Artificial Sequence: Synthetic oligonucleotide
  Sense strand starting at position 3217 of SEQ ID NO: 585834
cugcauuccugaucaauga

SEQ ID NO: 671381 - RNA, 19 nt, Artificial Sequence
  Description of Artificial Sequence: Synthetic oligonucleotide
  Antisense strand to SEQ ID NO: 671380
ucauugaucaggaaugcag

SEQ ID NO: 671382 - RNA, 19 nt, Artificial Sequence
  Description of Artificial Sequence: Synthetic oligonucleotide
  Sense strand starting at position 3218 of SEQ ID NO: 585834
ugcauuccugaucaaugaa

SEQ ID NO: 671383 - RNA, 19 nt, Artificial Sequence
  Description of Artificial Sequence: Synthetic oligonucleotide
  Antisense strand to SEQ ID NO: 671382
uucauugaucaggaaugca

SEQ ID NO: 671384 - RNA, 19 nt, Artificial Sequence
  Description of Artificial Sequence: Synthetic oligonucleotide
  Sense strand starting at position 3292 of SEQ ID NO: 585834
cagaauaccugaguuuaag

SEQ ID NO: 671385 - RNA, 19 nt, Artificial Sequence
  Description of Artificial Sequence: Synthetic oligonucleotide
  Antisense strand to SEQ ID NO: 671384
cuuaaacucagguauucug

SEQ ID NO: 671386 - RNA, 19 nt, Artificial Sequence
  Description of Artificial Sequence: Synthetic oligonucleotide
  Sense strand starting at position 3328 of SEQ ID NO: 585834
acguauuucucuucuccca

SEQ ID NO: 671387 - RNA, 19 nt, Artificial Sequence
  Description of Artificial Sequence: Synthetic oligonucleotide
  Antisense strand to SEQ ID NO: 671386
ugggagaagagaaauacgu

SEQ ID NO: 671388 - RNA, 19 nt, Artificial Sequence
  Description of Artificial Sequence: Synthetic oligonucleotide
  Sense strand starting at position 3425 of SEQ ID NO: 585834
guuugaacaggaugcuaau

SEQ ID NO: 671389 - RNA, 19 nt, Artificial Sequence
  Description of Artificial Sequence: Synthetic oligonucleotide
  Antisense strand to SEQ ID NO: 671388
auuagcauccuguucaaac

SEQ ID NO: 671390 - RNA, 19 nt, Artificial Sequence
  Description of Artificial Sequence: Synthetic oligonucleotide
  Sense strand starting at position 3462 of SEQ ID NO: 585834
caaagaaccucugugagca

SEQ ID NO: 671391 - RNA, 19 nt, Artificial Sequence
  Description of Artificial Sequence: Synthetic oligonucleotide
  Antisense strand to SEQ ID NO: 671390
ugcucacagagguucuuug

SEQ ID NO: 671392 - RNA, 19 nt, Artificial Sequence
  Description of Artificial Sequence: Synthetic oligonucleotide
  Sense strand starting at position 3472 of SEQ ID NO: 585834
cugugagcaagugacauua

SEQ ID NO: 671393 - RNA, 19 nt, Artificial Sequence
  Description of Artificial Sequence: Synthetic oligonucleotide
  Antisense strand to SEQ ID NO: 671392
uaaugucacuugcucacag

SEQ ID NO: 671394 - RNA, 19 nt, Artificial Sequence
  Description of Artificial Sequence: Synthetic oligonucleotide
  Sense strand starting at position 31 of SEQ ID NO: 585835
ugcuacaguccuggaagaa

SEQ ID NO: 671395 - RNA, 19 nt, Artificial Sequence
  Description of Artificial Sequence: Synthetic oligonucleotide
  Antisense strand to SEQ ID NO: 671394
uucuuccaggacuguagca

SEQ ID NO: 671396 - RNA, 19 nt, Artificial Sequence
  Description of Artificial Sequence: Synthetic oligonucleotide
  Sense strand starting at position 69 of SEQ ID NO: 585835
gagaauuggccuuaguuuc

SEQ ID NO: 671397 - RNA, 19 nt, Artificial Sequence
  Description of Artificial Sequence: Synthetic oligonucleotide
  Antisense strand to SEQ ID NO: 671396
gaaacuaaggccaauucuc

SEQ ID NO: 671398 - RNA, 19 nt, Artificial Sequence
  Description of Artificial Sequence: Synthetic oligonucleotide
  Sense strand starting at position 95 of SEQ ID NO: 585835
ccucuagugugcuuuaaga

SEQ ID NO: 671399 - RNA, 19 nt, Artificial Sequence
  Description of Artificial Sequence: Synthetic oligonucleotide
  Antisense strand to SEQ ID NO: 671398
ucuuaaagcacacuagagg

SEQ ID NO: 671400 - RNA, 19 nt, Artificial Sequence
  Description of Artificial Sequence: Synthetic oligonucleotide
  Sense strand starting at position 97 of SEQ ID NO: 585835
ucuagugugcuuuaagagu

SEQ ID NO: 671401 - RNA, 19 nt, Artificial Sequence
  Description of Artificial Sequence: Synthetic oligonucleotide
  Antisense strand to SEQ ID NO: 671400
acucuuaaagcacacuaga

SEQ ID NO: 671402 - RNA, 19 nt, Artificial Sequence
  Description of Artificial Sequence: Synthetic oligonucleotide
  Sense strand starting at position 135 of SEQ ID NO: 585835
gaguguauacgugaguaua

SEQ ID NO: 671403 - RNA, 19 nt, Artificial Sequence
  Description of Artificial Sequence: Synthetic oligonucleotide
  Antisense strand to SEQ ID NO: 671402
uauacucacguauacacuc

SEQ ID NO: 671404 - RNA, 19 nt, Artificial Sequence
  Description of Artificial Sequence: Synthetic oligonucleotide
  Sense strand starting at position 169 of SEQ ID NO: 585835
auguacagaugugcauaua

SEQ ID NO: 671405 - RNA, 19 nt, Artificial Sequence
  Description of Artificial Sequence: Synthetic oligonucleotide
  Antisense strand to SEQ ID NO: 671404
uauaugcacaucuguacau

SEQ ID NO: 671406 - RNA, 19 nt, Artificial Sequence
  Description of Artificial Sequence: Synthetic oligonucleotide
  Sense strand starting at position 191 of SEQ ID NO: 585835
gaaugccuccagugaguau

SEQ ID NO: 671407 - RNA, 19 nt, Artificial Sequence
  Description of Artificial Sequence: Synthetic oligonucleotide
  Antisense strand to SEQ ID NO: 671406
auacucacuggaggcauuc

SEQ ID NO: 671408 - RNA, 19 nt, Artificial Sequence
  Description of Artificial Sequence: Synthetic oligonucleotide
  Sense strand starting at position 251 of SEQ ID NO: 585835
aaagccugagugugugaaa

SEQ ID NO: 671409 - RNA, 19 nt, Artificial Sequence
  Description of Artificial Sequence: Synthetic oligonucleotide
  Antisense strand to SEQ ID NO: 671408
uuucacacacucaggcuuu

SEQ ID NO: 671410 - RNA, 19 nt, Artificial Sequence
  Description of Artificial Sequence: Synthetic oligonucleotide
  Sense strand starting at position 294 of SEQ ID NO: 585835
guuucuaaucuacaaguca

SEQ ID NO: 671411 - RNA, 19 nt, Artificial Sequence
  Description of Artificial Sequence: Synthetic oligonucleotide
  Antisense strand to SEQ ID NO: 671410
ugacuuguagauuagaaac

SEQ ID NO: 671412 - RNA, 19 nt, Artificial Sequence
  Description of Artificial Sequence: Synthetic oligonucleotide
  Sense strand starting at position 305 of SEQ ID NO: 585835
acaagucauuugugagaca

SEQ ID NO: 671413 - RNA, 19 nt, Artificial Sequence
  Description of Artificial Sequence: Synthetic oligonucleotide
  Antisense strand to SEQ ID NO: 671412
ugucucacaaaugacuugu

SEQ ID NO: 671414 - RNA, 19 nt, Artificial Sequence
  Description of Artificial Sequence: Synthetic oligonucleotide
  Sense strand starting at position 308 of SEQ ID NO: 585835
agucauuugugagacacaa

SEQ ID NO: 671415 - RNA, 19 nt, Artificial Sequence
  Description of Artificial Sequence: Synthetic oligonucleotide
  Antisense strand to SEQ ID NO: 671414
uugugucucacaaaugacu

SEQ ID NO: 671416 - RNA, 19 nt, Artificial Sequence
  Description of Artificial Sequence: Synthetic oligonucleotide
  Sense strand starting at position 338 of SEQ ID NO: 585835
cgggcugcugcagaagaau

SEQ ID NO: 671417 - RNA, 19 nt, Artificial Sequence
  Description of Artificial Sequence: Synthetic oligonucleotide
  Antisense strand to SEQ ID NO: 671416
auucuucugcagcagcccg

SEQ ID NO: 671418 - RNA, 19 nt, Artificial Sequence
  Description of Artificial Sequence: Synthetic oligonucleotide
  Sense strand starting at position 347 of SEQ ID NO: 585835
gcagaagaauuugagguau

SEQ ID NO: 671419 - RNA, 19 nt, Artificial Sequence
  Description of Artificial Sequence: Synthetic oligonucleotide
  Antisense strand to SEQ ID NO: 671418
auaccucaaauucuucugc

SEQ ID NO: 671420 - RNA, 19 nt, Artificial Sequence
  Description of Artificial Sequence: Synthetic oligonucleotide
  Sense strand starting at position 349 of SEQ ID NO: 585835
agaagaauuugagguauga

SEQ ID NO: 671421 - RNA, 19 nt, Artificial Sequence
  Description of Artificial Sequence: Synthetic oligonucleotide
  Antisense strand to SEQ ID NO: 671420
ucauaccucaaauucuucu

SEQ ID NO: 671422 - RNA, 19 nt, Artificial Sequence
  Description of Artificial Sequence: Synthetic oligonucleotide
  Sense strand starting at position 650 of SEQ ID NO: 585835
cguuucuggcgauugcauu

SEQ ID NO: 671423 - RNA, 19 nt, Artificial Sequence
  Description of Artificial Sequence: Synthetic oligonucleotide
  Antisense strand to SEQ ID NO: 671422
aaugcaaucgccagaaacg

SEQ ID NO: 671424 - RNA, 19 nt, Artificial Sequence
  Description of Artificial Sequence: Synthetic oligonucleotide
  Sense strand starting at position 656 of SEQ ID NO: 585835
uggcgauugcauuaaugau

SEQ ID NO: 671425 - RNA, 19 nt, Artificial Sequence
  Description of Artificial Sequence: Synthetic oligonucleotide
  Antisense strand to SEQ ID NO: 671424
aucauuaaugcaaucgcca

SEQ ID NO: 671426 - RNA, 19 nt, Artificial Sequence
  Description of Artificial Sequence: Synthetic oligonucleotide
  Sense strand starting at position 668 of SEQ ID NO: 585835
uaaugauggguuugcaaac

SEQ ID NO: 671427 - RNA, 19 nt, Artificial Sequence
  Description of Artificial Sequence: Synthetic oligonucleotide
  Antisense strand to SEQ ID NO: 671426
guuugcaaacccaucauua

SEQ ID NO: 671428 - RNA, 19 nt, Artificial Sequence
  Description of Artificial Sequence: Synthetic oligonucleotide
  Sense strand starting at position 836 of SEQ ID NO: 585835
aaggcugucgcauagaagu

SEQ ID NO: 671429 - RNA, 19 nt, Artificial Sequence
  Description of Artificial Sequence: Synthetic oligonucleotide
  Antisense strand to SEQ ID NO: 671428
acuucuaugcgacagccuu

SEQ ID NO: 671430 - RNA, 19 nt, Artificial Sequence
  Description of Artificial Sequence: Synthetic oligonucleotide
  Sense strand starting at position 838 of SEQ ID NO: 585835
ggcugucgcauagaaguua

SEQ ID NO: 671431 - RNA, 19 nt, Artificial Sequence
  Description of Artificial Sequence: Synthetic oligonucleotide
  Antisense strand to SEQ ID NO: 671430
uaacuucuaugcgacagcc

SEQ ID NO: 671432 - RNA, 19 nt, Artificial Sequence
  Description of Artificial Sequence: Synthetic oligonucleotide
  Sense strand starting at position 978 of SEQ ID NO: 585835
caguucuguccugagaagg

SEQ ID NO: 671433 - RNA, 19 nt, Artificial Sequence
  Description of Artificial Sequence: Synthetic oligonucleotide
  Antisense strand to SEQ ID NO: 671432
ccuucucaggacagaacug

SEQ ID NO: 671434 - RNA, 19 nt, Artificial Sequence
  Description of Artificial Sequence: Synthetic oligonucleotide
  Sense strand starting at position 1019 of SEQ ID NO: 585835
cacucaggcccgugaagaa

SEQ ID NO: 671435 - RNA, 19 nt, Artificial Sequence
  Description of Artificial Sequence: Synthetic oligonucleotide
  Antisense strand to SEQ ID NO: 671434
uucuucacgggccugagug

SEQ ID NO: 671436 - RNA, 19 nt, Artificial Sequence
  Description of Artificial Sequence: Synthetic oligonucleotide
  Sense strand starting at position 1029 of SEQ ID NO: 585835
cgugaagaaucaucuguaa

SEQ ID NO: 671437 - RNA, 19 nt, Artificial Sequence
  Description of Artificial Sequence: Synthetic oligonucleotide
  Antisense strand to SEQ ID NO: 671436
uuacagaugauucuucacg

SEQ ID NO: 671438 - RNA, 19 nt, Artificial Sequence
  Description of Artificial Sequence: Synthetic oligonucleotide
  Sense strand starting at position 1077 of SEQ ID NO: 585835
cgagggucucugggagagu

SEQ ID NO: 671439 - RNA, 19 nt, Artificial Sequence
  Description of Artificial Sequence: Synthetic oligonucleotide
  Antisense strand to SEQ ID NO: 671438
acucucccagagacccucg

SEQ ID NO: 671440 - RNA, 19 nt, Artificial Sequence
  Description of Artificial Sequence: Synthetic oligonucleotide
  Sense strand starting at position 1243 of SEQ ID NO: 585835
cugucuuggccuugggaca

SEQ ID NO: 671441 - RNA, 19 nt, Artificial Sequence
  Description of Artificial Sequence: Synthetic oligonucleotide
  Antisense strand to SEQ ID NO: 671440
ugucccaaggccaagacag

SEQ ID NO: 671442 - RNA, 19 nt, Artificial Sequence
  Description of Artificial Sequence: Synthetic oligonucleotide
  Sense strand starting at position 2505 of SEQ ID NO: 585835
cucagaggugcugaaggau

SEQ ID NO: 671443 - RNA, 19 nt, Artificial Sequence
  Description of Artificial Sequence: Synthetic oligonucleotide
  Antisense strand to SEQ ID NO: 671442
auccuucagcaccucugag

SEQ ID NO: 671444 - RNA, 19 nt, Artificial Sequence
  Description of Artificial Sequence: Synthetic oligonucleotide
  Sense strand starting at position 2633 of SEQ ID NO: 585835
gaauuuagguccuaaagau

SEQ ID NO: 671445 - RNA, 19 nt, Artificial Sequence
  Description of Artificial Sequence: Synthetic oligonucleotide
  Antisense strand to SEQ ID NO: 671444
aucuuuaggaccuaaauuc

SEQ ID NO: 671446 - RNA, 19 nt, Artificial Sequence
  Description of Artificial Sequence: Synthetic oligonucleotide
  Sense strand starting at position 2898 of SEQ ID NO: 585835
uuagccuuggcuuauaacu

SEQ ID NO: 671447 - RNA, 19 nt, Artificial Sequence
  Description of Artificial Sequence: Synthetic oligonucleotide
  Antisense strand to SEQ ID NO: 671446
aguuauaagccaaggcuaa

SEQ ID NO: 671448 - RNA, 19 nt, Artificial Sequence
  Description of Artificial Sequence: Synthetic oligonucleotide
  Sense strand starting at position 2985 of SEQ ID NO: 585835
ugaaucaauugacuuguca

SEQ ID NO: 671449 - RNA, 19 nt, Artificial Sequence
  Description of Artificial Sequence: Synthetic oligonucleotide
  Antisense strand to SEQ ID NO: 671448
ugacaagucaauugauuca

SEQ ID NO: 671450 - RNA, 19 nt, Artificial Sequence
  Description of Artificial Sequence: Synthetic oligonucleotide
  Sense strand starting at position 3047 of SEQ ID NO: 585835
gguuucauccgaugucuag

SEQ ID NO: 671451 - RNA, 19 nt, Artificial Sequence
  Description of Artificial Sequence: Synthetic oligonucleotide
  Antisense strand to SEQ ID NO: 671450
cuagacaucggaugaaacc

SEQ ID NO: 671452 - RNA, 19 nt, Artificial Sequence
  Description of Artificial Sequence: Synthetic oligonucleotide
  Sense strand starting at position 3278 of SEQ ID NO: 585835
ggaaucuauuaagcacuua

SEQ ID NO: 671453 - RNA, 19 nt, Artificial Sequence
  Description of Artificial Sequence: Synthetic oligonucleotide
  Antisense strand to SEQ ID NO: 671452
uaagugcuuaauagauucc

SEQ ID NO: 671454 - RNA, 19 nt, Artificial Sequence
  Description of Artificial Sequence: Synthetic oligonucleotide
  Sense strand starting at position 3390 of SEQ ID NO: 585835
agcugcaaaugauuaagua

SEQ ID NO: 671455 - RNA, 19 nt, Artificial Sequence
  Description of Artificial Sequence: Synthetic oligonucleotide
  Antisense strand to SEQ ID NO: 671454
uacuuaaucauuugcagcu

SEQ ID NO: 671456 - RNA, 19 nt, Artificial Sequence
  Description of Artificial Sequence: Synthetic oligonucleotide
  Sense strand starting at position 3391 of SEQ ID NO: 585835
gcugcaaaugauuaaguaa

SEQ ID NO: 671457 - RNA, 19 nt, Artificial Sequence
  Description of Artificial Sequence: Synthetic oligonucleotide
  Antisense strand to SEQ ID NO: 671456
uuacuuaaucauuugcagc

SEQ ID NO: 671458 - RNA, 19 nt, Artificial Sequence
  Description of Artificial Sequence: Synthetic oligonucleotide
  Sense strand starting at position 3412 of SEQ ID NO: 585835
aggaaucacuguuagggaa

SEQ ID NO: 671459 - RNA, 19 nt, Artificial Sequence
  Description of Artificial Sequence: Synthetic oligonucleotide
  Antisense strand to SEQ ID NO: 671458
uucccuaacagugauuccu

SEQ ID NO: 671460 - RNA, 19 nt, Artificial Sequence
  Description of Artificial Sequence: Synthetic oligonucleotide
  Sense strand starting at position 3538 of SEQ ID NO: 585835
aguauuugcuacuaaagaa

SEQ ID NO: 671461 - RNA, 19 nt, Artificial Sequence
  Description of Artificial Sequence: Synthetic oligonucleotide
  Antisense strand to SEQ ID NO: 671460
uucuuuaguagcaaauacu

SEQ ID NO: 671462 - RNA, 19 nt, Artificial Sequence
  Description of Artificial Sequence: Synthetic oligonucleotide
  Sense strand starting at position 3570 of SEQ ID NO: 585835
uuccacuuuguugagagua

SEQ ID NO: 671463 - RNA, 19 nt, Artificial Sequence
  Description of Artificial Sequence: Synthetic oligonucleotide
  Antisense strand to SEQ ID NO: 671462
uacucucaacaaaguggaa

SEQ ID NO: 671464 - RNA, 19 nt, Artificial Sequence
  Description of Artificial Sequence: Synthetic oligonucleotide
  Sense strand starting at position 3582 of SEQ ID NO: 585835
gagaguacugcucgucaga

SEQ ID NO: 671465 - RNA, 19 nt, Artificial Sequence
  Description of Artificial Sequence: Synthetic oligonucleotide
  Antisense strand to SEQ ID NO: 671464
ucugacgagcaguacucuc

SEQ ID NO: 671466 - RNA, 19 nt, Artificial Sequence
  Description of Artificial Sequence: Synthetic oligonucleotide
  Sense strand starting at position 3585 of SEQ ID NO: 585835
aguacugcucgucagaacu

SEQ ID NO: 671467 - RNA, 19 nt, Artificial Sequence
  Description of Artificial Sequence: Synthetic oligonucleotide
  Antisense strand to SEQ ID NO: 671466
aguucugacgagcaguacu

SEQ ID NO: 671468 - RNA, 19 nt, Artificial Sequence
  Description of Artificial Sequence: Synthetic oligonucleotide
  Sense strand starting at position 3716 of SEQ ID NO: 585835
ccaaaugucuuagccagau

SEQ ID NO: 671469 - RNA, 19 nt, Artificial Sequence
  Description of Artificial Sequence: Synthetic oligonucleotide
  Antisense strand to SEQ ID NO: 671468
aucuggcuaagacauuugg

SEQ ID NO: 671470 - RNA, 19 nt, Artificial Sequence
  Description of Artificial Sequence: Synthetic oligonucleotide
  Sense strand starting at position 3892 of SEQ ID NO: 585835
uccagaauccucugggaac

SEQ ID NO: 671471 - RNA, 19 nt, Artificial Sequence
  Description of Artificial Sequence: Synthetic oligonucleotide
  Antisense strand to SEQ ID NO: 671470
guucccagaggauucugga

SEQ ID NO: 671472 - RNA, 19 nt, Artificial Sequence
  Description of Artificial Sequence: Synthetic oligonucleotide
  Sense strand starting at position 3904 of SEQ ID NO: 585835
ugggaacucuaggaagaua

SEQ ID NO: 671473 - RNA, 19 nt, Artificial Sequence
  Description of Artificial Sequence: Synthetic oligonucleotide
  Antisense strand to SEQ ID NO: 671472
uaucuuccuagaguuccca

SEQ ID NO: 671474 - RNA, 19 nt, Artificial Sequence
  Description of Artificial Sequence: Synthetic oligonucleotide
  Sense strand starting at position 244 of SEQ ID NO: 585836
gaaucaagccugugucugu

SEQ ID NO: 671475 - RNA, 19 nt, Artificial Sequence
  Description of Artificial Sequence: Synthetic oligonucleotide
  Antisense strand to SEQ ID NO: 671474
acagacacaggcuugauuc

SEQ ID NO: 671476 - RNA, 19 nt, Artificial Sequence
  Description of Artificial Sequence: Synthetic oligonucleotide
  Sense strand starting at position 266 of SEQ ID NO: 585836
uuggcaugguguuugguau

SEQ ID NO: 671477 - RNA, 19 nt, Artificial Sequence
  Description of Artificial Sequence: Synthetic oligonucleotide
  Antisense strand to SEQ ID NO: 671476
auaccaaacaccaugccaa

SEQ ID NO: 671478 - RNA, 19 nt, Artificial Sequence
  Description of Artificial Sequence: Synthetic oligonucleotide
  Sense strand starting at position 267 of SEQ ID NO: 585836
uggcaugguguuugguaua

SEQ ID NO: 671479 - RNA, 19 nt, Artificial Sequence
  Description of Artificial Sequence: Synthetic oligonucleotide
  Antisense strand to SEQ ID NO: 671478
uauaccaaacaccaugcca

SEQ ID NO: 671480 - RNA, 19 nt, Artificial Sequence
  Description of Artificial Sequence: Synthetic oligonucleotide
  Sense strand starting at position 272 of SEQ ID NO: 585836
ugguguuugguauacaaug

SEQ ID NO: 671481 - RNA, 19 nt, Artificial Sequence
  Description of Artificial Sequence: Synthetic oligonucleotide
  Antisense strand to SEQ ID NO: 671480
cauuguauaccaaacacca

SEQ ID NO: 671482 - RNA, 19 nt, Artificial Sequence
  Description of Artificial Sequence: Synthetic oligonucleotide
  Sense strand starting at position 274 of SEQ ID NO: 585836
guguuugguauacaaugga

SEQ ID NO: 671483 - RNA, 19 nt, Artificial Sequence
  Description of Artificial Sequence: Synthetic oligonucleotide
  Antisense strand to SEQ ID NO: 671482
uccauuguauaccaaacac

SEQ ID NO: 671484 - RNA, 19 nt, Artificial Sequence
  Description of Artificial Sequence: Synthetic oligonucleotide
  Sense strand starting at position 277 of SEQ ID NO: 585836
uuugguauacaauggauaa

SEQ ID NO: 671485 - RNA, 19 nt, Artificial Sequence
  Description of Artificial Sequence: Synthetic oligonucleotide
  Antisense strand to SEQ ID NO: 671484
uuauccauuguauaccaaa

SEQ ID NO: 671486 - RNA, 19 nt, Artificial Sequence
  Description of Artificial Sequence: Synthetic oligonucleotide
  Sense strand starting at position 288 of SEQ ID NO: 585836
auggauaagccuugcccau

SEQ ID NO: 671487 - RNA, 19 nt, Artificial Sequence
  Description of Artificial Sequence: Synthetic oligonucleotide
  Antisense strand to SEQ ID NO: 671486
augggcaaggcuuauccau

SEQ ID NO: 671488 - RNA, 19 nt, Artificial Sequence
  Description of Artificial Sequence: Synthetic oligonucleotide
  Sense strand starting at position 347 of SEQ ID NO: 585836
guaugagagcuagagaagu

SEQ ID NO: 671489 - RNA, 19 nt, Artificial Sequence
  Description of Artificial Sequence: Synthetic oligonucleotide
  Antisense strand to SEQ ID NO: 671488
acuucucuagcucucauac

SEQ ID NO: 671490 - RNA, 19 nt, Artificial Sequence
  Description of Artificial Sequence: Synthetic oligonucleotide
  Sense strand starting at position 642 of SEQ ID NO: 585836
aggucaaaggucugccuua

SEQ ID NO: 671491 - RNA, 19 nt, Artificial Sequence
  Description of Artificial Sequence: Synthetic oligonucleotide
  Antisense strand to SEQ ID NO: 671490
uaaggcagaccuuugaccu

SEQ ID NO: 671492 - RNA, 19 nt, Artificial Sequence
  Description of Artificial Sequence: Synthetic oligonucleotide
  Sense strand starting at position 743 of SEQ ID NO: 585836
gccaaugauuccgcugaaa

SEQ ID NO: 671493 - RNA, 19 nt, Artificial Sequence
  Description of Artificial Sequence: Synthetic oligonucleotide
  Antisense strand to SEQ ID NO: 671492
uuucagcggaaucauuggc

SEQ ID NO: 671494 - RNA, 19 nt, Artificial Sequence
  Description of Artificial Sequence: Synthetic oligonucleotide
  Sense strand starting at position 745 of SEQ ID NO: 585836
caaugauuccgcugaaagc

SEQ ID NO: 671495 - RNA, 19 nt, Artificial Sequence
  Description of Artificial Sequence: Synthetic oligonucleotide
  Antisense strand to SEQ ID NO: 671494
gcuuucagcggaaucauug

SEQ ID NO: 671496 - RNA, 19 nt, Artificial Sequence
  Description of Artificial Sequence: Synthetic oligonucleotide
  Sense strand starting at position 891 of SEQ ID NO: 585836
acagccuuuggaggaguau

SEQ ID NO: 671497 - RNA, 19 nt, Artificial Sequence
  Description of Artificial Sequence: Synthetic oligonucleotide
  Antisense strand to SEQ ID NO: 671496
auacuccuccaaaggcugu

SEQ ID NO: 671498 - RNA, 19 nt, Artificial Sequence
  Description of Artificial Sequence: Synthetic oligonucleotide
  Sense strand starting at position 892 of SEQ ID NO: 585836
cagccuuuggaggaguaua

SEQ ID NO: 671499 - RNA, 19 nt, Artificial Sequence
  Description of Artificial Sequence: Synthetic oligonucleotide
  Antisense strand to SEQ ID NO: 671498
uauacuccuccaaaggcug

SEQ ID NO: 671500 - RNA, 19 nt, Artificial Sequence
  Description of Artificial Sequence: Synthetic oligonucleotide
  Sense strand starting at position 939 of SEQ ID NO: 585836
gcugaagucauaggaccuu

SEQ ID NO: 671501 - RNA, 19 nt, Artificial Sequence
  Description of Artificial Sequence: Synthetic oligonucleotide
  Antisense strand to SEQ ID NO: 671500
aagguccuaugacuucagc

SEQ ID NO: 671502 - RNA, 19 nt, Artificial Sequence
  Description of Artificial Sequence: Synthetic oligonucleotide
  Sense strand starting at position 2746 of SEQ ID NO: 585836
gccgucacugcguuccaau

SEQ ID NO: 671503 - RNA, 19 nt, Artificial Sequence
  Description of Artificial Sequence: Synthetic oligonucleotide
  Antisense strand to SEQ ID NO: 671502
auuggaacgcagugacggc

SEQ ID NO: 671504 - RNA, 19 nt, Artificial Sequence
  Description of Artificial Sequence: Synthetic oligonucleotide
  Sense strand starting at position 2753 of SEQ ID NO: 585836
cugcguuccaaucgaacua

SEQ ID NO: 671505 - RNA, 19 nt, Artificial Sequence
  Description of Artificial Sequence: Synthetic oligonucleotide
  Antisense strand to SEQ ID NO: 671504
uaguucgauuggaacgcag

SEQ ID NO: 671506 - RNA, 19 nt, Artificial Sequence
  Description of Artificial Sequence: Synthetic oligonucleotide
  Sense strand starting at position 2806 of SEQ ID NO: 585836
uguaaacacucagaacgau

SEQ ID NO: 671507 - RNA, 19 nt, Artificial Sequence
  Description of Artificial Sequence: Synthetic oligonucleotide
  Antisense strand to SEQ ID NO: 671506
aucguucugaguguuuaca

SEQ ID NO: 671508 - RNA, 19 nt, Artificial Sequence
  Description of Artificial Sequence: Synthetic oligonucleotide
  Sense strand starting at position 2906 of SEQ ID NO: 585836
ggagaaauguaugaaaugu

SEQ ID NO: 671509 - RNA, 19 nt, Artificial Sequence
  Description of Artificial Sequence: Synthetic oligonucleotide
  Antisense strand to SEQ ID NO: 671508
acauuucauacauuucucc

SEQ ID NO: 671510 - RNA, 19 nt, Artificial Sequence
  Description of Artificial Sequence: Synthetic oligonucleotide
  Sense strand starting at position 2914 of SEQ ID NO: 585836
guaugaaaugucggcaugu

SEQ ID NO: 671511 - RNA, 19 nt, Artificial Sequence
  Description of Artificial Sequence: Synthetic oligonucleotide
  Antisense strand to SEQ ID NO: 671510
acaugccgacauuucauac

SEQ ID NO: 671512 - RNA, 19 nt, Artificial Sequence
  Description of Artificial Sequence: Synthetic oligonucleotide
  Sense strand starting at position 2915 of SEQ ID NO: 585836
uaugaaaugucggcaugua

SEQ ID NO: 671513 - RNA, 19 nt, Artificial Sequence
  Description of Artificial Sequence: Synthetic oligonucleotide
  Antisense strand to SEQ ID NO: 671512
uacaugccgacauuucaua

SEQ ID NO: 671514 - RNA, 19 nt, Artificial Sequence
  Description of Artificial Sequence: Synthetic oligonucleotide
  Sense strand starting at position 2916 of SEQ ID NO: 585836
augaaaugucggcauguag

SEQ ID NO: 671515 - RNA, 19 nt, Artificial Sequence
  Description of Artificial Sequence: Synthetic oligonucleotide
  Antisense strand to SEQ ID NO: 671514
cuacaugccgacauuucau

SEQ ID NO: 671516 - RNA, 19 nt, Artificial Sequence
  Description of Artificial Sequence: Synthetic oligonucleotide
  Sense strand starting at position 2951 of SEQ ID NO: 585836
caggguuugcuccagaaau

SEQ ID NO: 671517 - RNA, 19 nt, Artificial Sequence
  Description of Artificial Sequence: Synthetic oligonucleotide
  Antisense strand to SEQ ID NO: 671516
auuucuggagcaaacccug

SEQ ID NO: 671518 - RNA, 19 nt, Artificial Sequence
  Description of Artificial Sequence: Synthetic oligonucleotide
  Sense strand starting at position 2953 of SEQ ID NO: 585836
ggguuugcuccagaaaugc

SEQ ID NO: 671519 - RNA, 19 nt, Artificial Sequence
  Description of Artificial Sequence: Synthetic oligonucleotide
  Antisense strand to SEQ ID NO: 671518
gcauuucuggagcaaaccc

SEQ ID NO: 671520 - RNA, 19 nt, Artificial Sequence
  Description of Artificial Sequence: Synthetic oligonucleotide
  Sense strand starting at position 2966 of SEQ ID NO: 585836
aaaugcuguccauggcaaa

SEQ ID NO: 671521 - RNA, 19 nt, Artificial Sequence
  Description of Artificial Sequence: Synthetic oligonucleotide
  Antisense strand to SEQ ID NO: 671520
uuugccauggacagcauuu

SEQ ID NO: 671522 - RNA, 19 nt, Artificial Sequence
  Description of Artificial Sequence: Synthetic oligonucleotide
  Sense strand starting at position 3009 of SEQ ID NO: 585836
ccaggaccaugccuuaauu

SEQ ID NO: 671523 - RNA, 19 nt, Artificial Sequence
  Description of Artificial Sequence: Synthetic oligonucleotide
  Antisense strand to SEQ ID NO: 671522
aauuaaggcaugguccugg

SEQ ID NO: 671524 - RNA, 19 nt, Artificial Sequence
  Description of Artificial Sequence: Synthetic oligonucleotide
  Sense strand starting at position 3051 of SEQ ID NO: 585836
ccagcuggauacuugacaa

SEQ ID NO: 671525 - RNA, 19 nt, Artificial Sequence
  Description of Artificial Sequence: Synthetic oligonucleotide
  Antisense strand to SEQ ID NO: 671524
uugucaaguauccagcugg

SEQ ID NO: 671526 - RNA, 19 nt, Artificial Sequence
  Description of Artificial Sequence: Synthetic oligonucleotide
  Sense strand starting at position 3055 of SEQ ID NO: 585836
cuggauacuugacaacaaa

SEQ ID NO: 671527 - RNA, 19 nt, Artificial Sequence
  Description of Artificial Sequence: Synthetic oligonucleotide
  Antisense strand to SEQ ID NO: 671526
uuuguugucaaguauccag

SEQ ID NO: 671528 - RNA, 19 nt, Artificial Sequence
  Description of Artificial Sequence: Synthetic oligonucleotide
  Sense strand starting at position 3087 of SEQ ID NO: 585836
gaagauaucuuggcgcggu

SEQ ID NO: 671529 - RNA, 19 nt, Artificial Sequence
  Description of Artificial Sequence: Synthetic oligonucleotide
  Antisense strand to SEQ ID NO: 671528
accgcgccaagauaucuuc

SEQ ID NO: 671530 - RNA, 19 nt, Artificial Sequence
  Description of Artificial Sequence: Synthetic oligonucleotide
  Sense strand starting at position 3385 of SEQ ID NO: 585836
ugaucagaagucugugaaa

SEQ ID NO: 671531 - RNA, 19 nt, Artificial Sequence
  Description of Artificial Sequence: Synthetic oligonucleotide
  Antisense strand to SEQ ID NO: 671530
uuucacagacuucugauca

SEQ ID NO: 671532 - RNA, 19 nt, Artificial Sequence
  Description of Artificial Sequence: Synthetic oligonucleotide
  Sense strand starting at position 3426 of SEQ ID NO: 585836
uagaaauuguggucugugu

SEQ ID NO: 671533 - RNA, 19 nt, Artificial Sequence
  Description of Artificial Sequence: Synthetic oligonucleotide
  Antisense strand to SEQ ID NO: 671532
acacagaccacaauuucua

SEQ ID NO: 671534 - RNA, 19 nt, Artificial Sequence
  Description of Artificial Sequence: Synthetic oligonucleotide
  Sense strand starting at position 3428 of SEQ ID NO: 585836
gaaauuguggucuguguug

SEQ ID NO: 671535 - RNA, 19 nt, Artificial Sequence
  Description of Artificial Sequence: Synthetic oligonucleotide
  Antisense strand to SEQ ID NO: 671534
caacacagaccacaauuuc

SEQ ID NO: 671536 - RNA, 19 nt, Artificial Sequence
  Description of Artificial Sequence: Synthetic oligonucleotide
  Sense strand starting at position 3483 of SEQ ID NO: 585836
aguuaauggccaugaaguu

SEQ ID NO: 671537 - RNA, 19 nt, Artificial Sequence
  Description of Artificial Sequence: Synthetic oligonucleotide
  Antisense strand to SEQ ID NO: 671536
aacuucauggccauuaacu

SEQ ID NO: 671538 - RNA, 19 nt, Artificial Sequence
  Description of Artificial Sequence: Synthetic oligonucleotide
  Sense strand starting at position 3484 of SEQ ID NO: 585836
guuaauggccaugaaguua

SEQ ID NO: 671539 - RNA, 19 nt, Artificial Sequence
  Description of Artificial Sequence: Synthetic oligonucleotide
  Antisense strand to SEQ ID NO: 671538
uaacuucauggccauuaac

SEQ ID NO: 671540 - RNA, 19 nt, Artificial Sequence
  Description of Artificial Sequence: Synthetic oligonucleotide
  Sense strand starting at position 3628 of SEQ ID NO: 585836
cuguaaaguccagauagua

SEQ ID NO: 671541 - RNA, 19 nt, Artificial Sequence
  Description of Artificial Sequence: Synthetic oligonucleotide
  Antisense strand to SEQ ID NO: 671540
uacuaucuggacuuuacag

SEQ ID NO: 671542 - RNA, 19 nt, Artificial Sequence
  Description of Artificial Sequence: Synthetic oligonucleotide
  Sense strand starting at position 3653 of SEQ ID NO: 585836
uuaggccuucuuggcaaua

SEQ ID NO: 671543 - RNA, 19 nt, Artificial Sequence
  Description of Artificial Sequence: Synthetic oligonucleotide
  Antisense strand to SEQ ID NO: 671542
uauugccaagaaggccuaa

SEQ ID NO: 671544 - RNA, 19 nt, Artificial Sequence
  Description of Artificial Sequence: Synthetic oligonucleotide
  Sense strand starting at position 3729 of SEQ ID NO: 585836
ggaaaugaaugacaguauu

SEQ ID NO: 671545 - RNA, 19 nt, Artificial Sequence
  Description of Artificial Sequence: Synthetic oligonucleotide
  Antisense strand to SEQ ID NO: 671544
aauacugucauucauuucc

SEQ ID NO: 671546 - RNA, 19 nt, Artificial Sequence
  Description of Artificial Sequence: Synthetic oligonucleotide
  Sense strand starting at position 3735 of SEQ ID NO: 585836
gaaugacaguauuccagua

SEQ ID NO: 671547 - RNA, 19 nt, Artificial Sequence
  Description of Artificial Sequence: Synthetic oligonucleotide
  Antisense strand to SEQ ID NO: 671546
uacuggaauacugucauuc

SEQ ID NO: 671548 - RNA, 19 nt, Artificial Sequence
  Description of Artificial Sequence: Synthetic oligonucleotide
  Sense strand starting at position 3737 of SEQ ID NO: 585836
augacaguauuccaguaaa

SEQ ID NO: 671549 - RNA, 19 nt, Artificial Sequence
  Description of Artificial Sequence: Synthetic oligonucleotide
  Antisense strand to SEQ ID NO: 671548
uuuacuggaauacugucau

SEQ ID NO: 671550 - RNA, 19 nt, Artificial Sequence
  Description of Artificial Sequence: Synthetic oligonucleotide
  Sense strand starting at position 3771 of SEQ ID NO: 585836
cgaaauuugacuugcguau

SEQ ID NO: 671551 - RNA, 19 nt, Artificial Sequence
  Description of Artificial Sequence: Synthetic oligonucleotide
  Antisense strand to SEQ ID NO: 671550
auacgcaagucaaauuucg

SEQ ID NO: 671552 - RNA, 19 nt, Artificial Sequence
  Description of Artificial Sequence: Synthetic oligonucleotide
  Sense strand starting at position 3903 of SEQ ID NO: 585836
ucacgaaaucgggaguuca

SEQ ID NO: 671553 - RNA, 19 nt, Artificial Sequence
  Description of Artificial Sequence: Synthetic oligonucleotide
  Antisense strand to SEQ ID NO: 671552
ugaacucccgauuucguga

SEQ ID NO: 671554 - RNA, 19 nt, Artificial Sequence
  Description of Artificial Sequence: Synthetic oligonucleotide
  Sense strand starting at position 12 of SEQ ID NO: 585837
ugugaaacugcugagugaa

SEQ ID NO: 671555 - RNA, 19 nt, Artificial Sequence
  Description of Artificial Sequence: Synthetic oligonucleotide
  Antisense strand to SEQ ID NO: 671554
uucacucagcaguuucaca

SEQ ID NO: 671556 - RNA, 19 nt, Artificial Sequence
  Description of Artificial Sequence: Synthetic oligonucleotide
  Sense strand starting at position 14 of SEQ ID NO: 585837
ugaaacugcugagugaaca

SEQ ID NO: 671557 - RNA, 19 nt, Artificial Sequence
  Description of Artificial Sequence: Synthetic oligonucleotide
  Antisense strand to SEQ ID NO: 671556
uguucacucagcaguuuca

SEQ ID NO: 671558 - RNA, 19 nt, Artificial Sequence
  Description of Artificial Sequence: Synthetic oligonucleotide
  Sense strand starting at position 285 of SEQ ID NO: 585837
acccuaaccggucacauaa

SEQ ID NO: 671559 - RNA, 19 nt, Artificial Sequence
  Description of Artificial Sequence: Synthetic oligonucleotide
  Antisense strand to SEQ ID NO: 671558
uuaugugaccgguuagggu

SEQ ID NO: 671560 - RNA, 19 nt, Artificial Sequence
  Description of Artificial Sequence: Synthetic oligonucleotide
  Sense strand starting at position 364 of SEQ ID NO: 585837
ggaaauuucuuguaaugac

SEQ ID NO: 671561 - RNA, 19 nt, Artificial Sequence
  Description of Artificial Sequence: Synthetic oligonucleotide
  Antisense strand to SEQ ID NO: 671560
gucauuacaagaaauuucc

SEQ ID NO: 671562 - RNA, 19 nt, Artificial Sequence
  Description of Artificial Sequence: Synthetic oligonucleotide
  Sense strand starting at position 371 of SEQ ID NO: 585837
ucuuguaaugacugacauu

SEQ ID NO: 671563 - RNA, 19 nt, Artificial Sequence
  Description of Artificial Sequence: Synthetic oligonucleotide
  Antisense strand to SEQ ID NO: 671562
aaugucagucauuacaaga

SEQ ID NO: 671564 - RNA, 19 nt, Artificial Sequence
  Description of Artificial Sequence: Synthetic oligonucleotide
  Sense strand starting at position 684 of SEQ ID NO: 585837
cucggauggcauuguacaa

SEQ ID NO: 671565 - RNA, 19 nt, Artificial Sequence
  Description of Artificial Sequence: Synthetic oligonucleotide
  Antisense strand to SEQ ID NO: 671564
uuguacaaugccauccgag

SEQ ID NO: 671566 - RNA, 19 nt, Artificial Sequence
  Description of Artificial Sequence: Synthetic oligonucleotide
  Sense strand starting at position 717 of SEQ ID NO: 585837
guaucuauucuggaccagu

SEQ ID NO: 671567 - RNA, 19 nt, Artificial Sequence
  Description of Artificial Sequence: Synthetic oligonucleotide
  Antisense strand to SEQ ID NO: 671566
acugguccagaauagauac

SEQ ID NO: 671568 - RNA, 19 nt, Artificial Sequence
  Description of Artificial Sequence: Synthetic oligonucleotide
  Sense strand starting at position 828 of SEQ ID NO: 585837
cugggaugggcuggaaauu

SEQ ID NO: 671569 - RNA, 19 nt, Artificial Sequence
  Description of Artificial Sequence: Synthetic oligonucleotide
  Antisense strand to SEQ ID NO: 671568
aauuuccagcccaucccag

SEQ ID NO: 671570 - RNA, 19 nt, Artificial Sequence
  Description of Artificial Sequence: Synthetic oligonucleotide
  Sense strand starting at position 901 of SEQ ID NO: 585837
uuaagagaaucacuacugu

SEQ ID NO: 671571 - RNA, 19 nt, Artificial Sequence
  Description of Artificial Sequence: Synthetic oligonucleotide
  Antisense strand to SEQ ID NO: 671570
acaguagugauucucuuaa

SEQ ID NO: 671572 - RNA, 19 nt, Artificial Sequence
  Description of Artificial Sequence: Synthetic oligonucleotide
  Sense strand starting at position 935 of SEQ ID NO: 585837
aagugcugggagugaauaa

SEQ ID NO: 671573 - RNA, 19 nt, Artificial Sequence
  Description of Artificial Sequence: Synthetic oligonucleotide
  Antisense strand to SEQ ID NO: 671572
uuauucacucccagcacuu

SEQ ID NO: 671574 - RNA, 19 nt, Artificial Sequence
  Description of Artificial Sequence: Synthetic oligonucleotide
  Sense strand starting at position 979 of SEQ ID NO: 585837
aguggacauccaggugaaa

SEQ ID NO: 671575 - RNA, 19 nt, Artificial Sequence
  Description of Artificial Sequence: Synthetic oligonucleotide
  Antisense strand to SEQ ID NO: 671574
uuucaccuggauguccacu

SEQ ID NO: 671576 - RNA, 19 nt, Artificial Sequence
  Description of Artificial Sequence: Synthetic oligonucleotide
  Sense strand starting at position 1009 of SEQ ID NO: 585837
ugaguuccacgguagacua

SEQ ID NO: 671577 - RNA, 19 nt, Artificial Sequence
  Description of Artificial Sequence: Synthetic oligonucleotide
  Antisense strand to SEQ ID NO: 671576
uagucuaccguggaacuca

SEQ ID NO: 671578 - RNA, 19 nt, Artificial Sequence
  Description of Artificial Sequence: Synthetic oligonucleotide
  Sense strand starting at position 1281 of SEQ ID NO: 585837
aacugagaugcaggaugua

SEQ ID NO: 671579 - RNA, 19 nt, Artificial Sequence
  Description of Artificial Sequence: Synthetic oligonucleotide
  Antisense strand to SEQ ID NO: 671578
uacauccugcaucucaguu

SEQ ID NO: 671580 - RNA, 19 nt, Artificial Sequence
  Description of Artificial Sequence: Synthetic oligonucleotide
  Sense strand starting at position 2100 of SEQ ID NO: 585837
uuuauucugcuagagaaua

SEQ ID NO: 671581 - RNA, 19 nt, Artificial Sequence
  Description of Artificial Sequence: Synthetic oligonucleotide
  Antisense strand to SEQ ID NO: 671580
uauucucuagcagaauaaa

SEQ ID NO: 671582 - RNA, 19 nt, Artificial Sequence
  Description of Artificial Sequence: Synthetic oligonucleotide
  Sense strand starting at position 2171 of SEQ ID NO: 585837
agauaacaccuuugagcaa

SEQ ID NO: 671583 - RNA, 19 nt, Artificial Sequence
  Description of Artificial Sequence: Synthetic oligonucleotide
  Antisense strand to SEQ ID NO: 671582
uugcucaaagguguuaucu

SEQ ID NO: 671584 - RNA, 19 nt, Artificial Sequence
  Description of Artificial Sequence: Synthetic oligonucleotide
  Sense strand starting at position 2187 of SEQ ID NO: 585837
caauuagacguccaggcau

SEQ ID NO: 671585 - RNA, 19 nt, Artificial Sequence
  Description of Artificial Sequence: Synthetic oligonucleotide
  Antisense strand to SEQ ID NO: 671584
augccuggacgucuaauug

SEQ ID NO: 671586 - RNA, 19 nt, Artificial Sequence
  Description of Artificial Sequence: Synthetic oligonucleotide
  Sense strand starting at position 2275 of SEQ ID NO: 585837
accucuuuguucuugacga

SEQ ID NO: 671587 - RNA, 19 nt, Artificial Sequence
  Description of Artificial Sequence: Synthetic oligonucleotide
  Antisense strand to SEQ ID NO: 671586
ucgucaagaacaaagaggu

SEQ ID NO: 671588 - RNA, 19 nt, Artificial Sequence
  Description of Artificial Sequence: Synthetic oligonucleotide
  Sense strand starting at position 2298 of SEQ ID NO: 585837
gcaguaccucagcaguuua

SEQ ID NO: 671589 - RNA, 19 nt, Artificial Sequence
  Description of Artificial Sequence: Synthetic oligonucleotide
  Antisense strand to SEQ ID NO: 671588
uaaacugcugagguacugc

SEQ ID NO: 671590 - RNA, 19 nt, Artificial Sequence
  Description of Artificial Sequence: Synthetic oligonucleotide
  Sense strand starting at position 2515 of SEQ ID NO: 585837
ugcagagagcccugaagua

SEQ ID NO: 671591 - RNA, 19 nt, Artificial Sequence
  Description of Artificial Sequence: Synthetic oligonucleotide
  Antisense strand to SEQ ID NO: 671590
uacuucagggcucucugca

SEQ ID NO: 671592 - RNA, 19 nt, Artificial Sequence
  Description of Artificial Sequence: Synthetic oligonucleotide
  Sense strand starting at position 2531 of SEQ ID NO: 585837
guaucaugauuugaaggaa

SEQ ID NO: 671593 - RNA, 19 nt, Artificial Sequence
  Description of Artificial Sequence: Synthetic oligonucleotide
  Antisense strand to SEQ ID NO: 671592
uuccuucaaaucaugauac

SEQ ID NO: 671594 - RNA, 19 nt, Artificial Sequence
  Description of Artificial Sequence: Synthetic oligonucleotide
  Sense strand starting at position 2592 of SEQ ID NO: 585837
gucucugaacugggaacau

SEQ ID NO: 671595 - RNA, 19 nt, Artificial Sequence
  Description of Artificial Sequence: Synthetic oligonucleotide
  Antisense strand to SEQ ID NO: 671594
auguucccaguucagagac

SEQ ID NO: 671596 - RNA, 19 nt, Artificial Sequence
  Description of Artificial Sequence: Synthetic oligonucleotide
  Sense strand starting at position 2662 of SEQ ID NO: 585837
uagaccuguugagucagaa

SEQ ID NO: 671597 - RNA, 19 nt, Artificial Sequence
  Description of Artificial Sequence: Synthetic oligonucleotide
  Antisense strand to SEQ ID NO: 671596
uucugacucaacaggucua

SEQ ID NO: 671598 - RNA, 19 nt, Artificial Sequence
  Description of Artificial Sequence: Synthetic oligonucleotide
  Sense strand starting at position 2727 of SEQ ID NO: 585837
auguuaaagugauugugau

SEQ ID NO: 671599 - RNA, 19 nt, Artificial Sequence
  Description of Artificial Sequence: Synthetic oligonucleotide
  Antisense strand to SEQ ID NO: 671598
aucacaaucacuuuaacau

SEQ ID NO: 671600 - RNA, 19 nt, Artificial Sequence
  Description of Artificial Sequence: Synthetic oligonucleotide
  Sense strand starting at position 2728 of SEQ ID NO: 585837
uguuaaagugauugugaug

SEQ ID NO: 671601 - RNA, 19 nt, Artificial Sequence
  Description of Artificial Sequence: Synthetic oligonucleotide
  Antisense strand to SEQ ID NO: 671600
caucacaaucacuuuaaca

SEQ ID NO: 671602 - RNA, 19 nt, Artificial Sequence
  Description of Artificial Sequence: Synthetic oligonucleotide
  Sense strand starting at position 2858 of SEQ ID NO: 585837
uccagagaugcauggaaau

SEQ ID NO: 671603 - RNA, 19 nt, Artificial Sequence
  Description of Artificial Sequence: Synthetic oligonucleotide
  Antisense strand to SEQ ID NO: 671602
auuuccaugcaucucugga

SEQ ID NO: 671604 - RNA, 19 nt, Artificial Sequence
  Description of Artificial Sequence: Synthetic oligonucleotide
  Sense strand starting at position 2898 of SEQ ID NO: 585837
ugaugcuuccacggaacuu

SEQ ID NO: 671605 - RNA, 19 nt, Artificial Sequence
  Description of Artificial Sequence: Synthetic oligonucleotide
  Antisense strand to SEQ ID NO: 671604
aaguuccguggaagcauca

SEQ ID NO: 671606 - RNA, 19 nt, Artificial Sequence
  Description of Artificial Sequence: Synthetic oligonucleotide
  Sense strand starting at position 3084 of SEQ ID NO: 585837
cguuuaugaggaugcugau

SEQ ID NO: 671607 - RNA, 19 nt, Artificial Sequence
  Description of Artificial Sequence: Synthetic oligonucleotide
  Antisense strand to SEQ ID NO: 671606
aucagcauccucauaaacg

SEQ ID NO: 671608 - RNA, 19 nt, Artificial Sequence
  Description of Artificial Sequence: Synthetic oligonucleotide
  Sense strand starting at position 3096 of SEQ ID NO: 585837
ugcugaucucuuggagaug

SEQ ID NO: 671609 - RNA, 19 nt, Artificial Sequence
  Description of Artificial Sequence: Synthetic oligonucleotide
  Antisense strand to SEQ ID NO: 671608
caucuccaagagaucagca

SEQ ID NO: 671610 - RNA, 19 nt, Artificial Sequence
  Description of Artificial Sequence: Synthetic oligonucleotide
  Sense strand starting at position 3143 of SEQ ID NO: 585837
guggaauuccuuugcagaa

SEQ ID NO: 671611 - RNA, 19 nt, Artificial Sequence
  Description of Artificial Sequence: Synthetic oligonucleotide
  Antisense strand to SEQ ID NO: 671610
uucugcaaaggaauuccac

SEQ ID NO: 671612 - RNA, 19 nt, Artificial Sequence
  Description of Artificial Sequence: Synthetic oligonucleotide
  Sense strand starting at position 3144 of SEQ ID NO: 585837
uggaauuccuuugcagaag

SEQ ID NO: 671613 - RNA, 19 nt, Artificial Sequence
  Description of Artificial Sequence: Synthetic oligonucleotide
  Antisense strand to SEQ ID NO: 671612
cuucugcaaaggaauucca

SEQ ID NO: 671614 - RNA, 19 nt, Artificial Sequence
  Description of Artificial Sequence: Synthetic oligonucleotide
  Sense strand starting at position 3193 of SEQ ID NO: 585837
aaagauguuguagagugua

SEQ ID NO: 671615 - RNA, 19 nt, Artificial Sequence
  Description of Artificial Sequence: Synthetic oligonucleotide
  Antisense strand to SEQ ID NO: 671614
uacacucuacaacaucuuu

SEQ ID NO: 671616 - RNA, 19 nt, Artificial Sequence
  Description of Artificial Sequence: Synthetic oligonucleotide
  Sense strand starting at position 3196 of SEQ ID NO: 585837
gauguuguagaguguauuu

SEQ ID NO: 671617 - RNA, 19 nt, Artificial Sequence
  Description of Artificial Sequence: Synthetic oligonucleotide
  Antisense strand to SEQ ID NO: 671616
aaauacacucuacaacauc

SEQ ID NO: 671618 - RNA, 19 nt, Artificial Sequence
  Description of Artificial Sequence: Synthetic oligonucleotide
  Sense strand starting at position 3207 of SEQ ID NO: 585837
guguauuucuuucccagca

SEQ ID NO: 671619 - RNA, 19 nt, Artificial Sequence
  Description of Artificial Sequence: Synthetic oligonucleotide
  Antisense strand to SEQ ID NO: 671618
ugcugggaaagaaauacac

SEQ ID NO: 671620 - RNA, 19 nt, Artificial Sequence
  Description of Artificial Sequence: Synthetic oligonucleotide
  Sense strand starting at position 3295 of SEQ ID NO: 585837
gaagcaaggugcuuccauu

SEQ ID NO: 671621 - RNA, 19 nt, Artificial Sequence
  Description of Artificial Sequence: Synthetic oligonucleotide
  Antisense strand to SEQ ID NO: 671620
aauggaagcaccuugcuuc

SEQ ID NO: 671622 - RNA, 19 nt, Artificial Sequence
  Description of Artificial Sequence: Synthetic oligonucleotide
  Sense strand starting at position 3461 of SEQ ID NO: 585837
guuggacaugcguaauuaa

SEQ ID NO: 671623 - RNA, 19 nt, Artificial Sequence
  Description of Artificial Sequence: Synthetic oligonucleotide
  Antisense strand to SEQ ID NO: 671622
uuaauuacgcauguccaac

SEQ ID NO: 671624 - RNA, 19 nt, Artificial Sequence
  Description of Artificial Sequence: Synthetic oligonucleotide
  Sense strand starting at position 3464 of SEQ ID NO: 585837
ggacaugcguaauuaacau

SEQ ID NO: 671625 - RNA, 19 nt, Artificial Sequence
  Description of Artificial Sequence: Synthetic oligonucleotide
  Antisense strand to SEQ ID NO: 671624
auguuaauuacgcaugucc

SEQ ID NO: 671626 - RNA, 19 nt, Artificial Sequence
  Description of Artificial Sequence: Synthetic oligonucleotide
  Sense strand starting at position 3642 of SEQ ID NO: 585837
ugccaaucaggacauguuu

SEQ ID NO: 671627 - RNA, 19 nt, Artificial Sequence
  Description of Artificial Sequence: Synthetic oligonucleotide
  Antisense strand to SEQ ID NO: 671626
aaacauguccugauuggca

SEQ ID NO: 671628 - RNA, 19 nt, Artificial Sequence
  Description of Artificial Sequence: Synthetic oligonucleotide
  Sense strand starting at position 3657 of SEQ ID NO: 585837
guuuaaaucuuccugugau

SEQ ID NO: 671629 - RNA, 19 nt, Artificial Sequence
  Description of Artificial Sequence: Synthetic oligonucleotide
  Antisense strand to SEQ ID NO: 671628
aucacaggaagauuuaaac

SEQ ID NO: 671630 - RNA, 19 nt, Artificial Sequence
  Description of Artificial Sequence: Synthetic oligonucleotide
  Sense strand starting at position 3747 of SEQ ID NO: 585837
acauguauugauugcugua

SEQ ID NO: 671631 - RNA, 19 nt, Artificial Sequence
  Description of Artificial Sequence: Synthetic oligonucleotide
  Antisense strand to SEQ ID NO: 671630
uacagcaaucaauacaugu

SEQ ID NO: 671632 - RNA, 19 nt, Artificial Sequence
  Description of Artificial Sequence: Synthetic oligonucleotide
  Sense strand starting at position 3752 of SEQ ID NO: 585837
uauugauugcuguaucaug

SEQ ID NO: 671633 - RNA, 19 nt, Artificial Sequence
  Description of Artificial Sequence: Synthetic oligonucleotide
  Antisense strand to SEQ ID NO: 671632
caugauacagcaaucaaua

SEQ ID NO: 671634 - RNA, 19 nt, Artificial Sequence
  Description of Artificial Sequence: Synthetic oligonucleotide
  Sense strand starting at position 53 of SEQ ID NO: 585838
augaaauugccauagcuau

SEQ ID NO: 671635 - RNA, 19 nt, Artificial Sequence
  Description of Artificial Sequence: Synthetic oligonucleotide
  Antisense strand to SEQ ID NO: 671634
auagcuauggcaauuucau

SEQ ID NO: 671636 - RNA, 19 nt, Artificial Sequence
  Description of Artificial Sequence: Synthetic oligonucleotide
  Sense strand starting at position 240 of SEQ ID NO: 585838
gggugacaaguuugaccuu

SEQ ID NO: 671637 - RNA, 19 nt, Artificial Sequence
  Description of Artificial Sequence: Synthetic oligonucleotide
  Antisense strand to SEQ ID NO: 671636
aaggucaaacuugucaccc

SEQ ID NO: 671638 - RNA, 19 nt, Artificial Sequence
  Description of Artificial Sequence: Synthetic oligonucleotide
  Sense strand starting at position 458 of SEQ ID NO: 585838
ggaggucaauaagaggaaa

SEQ ID NO: 671639 - RNA, 19 nt, Artificial Sequence
  Description of Artificial Sequence: Synthetic oligonucleotide
  Antisense strand to SEQ ID NO: 671638
uuuccucuuauugaccucc

SEQ ID NO: 671640 - RNA, 19 nt, Artificial Sequence
  Description of Artificial Sequence: Synthetic oligonucleotide
  Sense strand starting at position 562 of SEQ ID NO: 585838
gggaguaucagaggccaca

SEQ ID NO: 671641 - RNA, 19 nt, Artificial Sequence
  Description of Artificial Sequence: Synthetic oligonucleotide
  Antisense strand to SEQ ID NO: 671640
uguggccucugauacuccc

SEQ ID NO: 671642 - RNA, 19 nt, Artificial Sequence
  Description of Artificial Sequence: Synthetic oligonucleotide
  Sense strand starting at position 636 of SEQ ID NO: 585838
ugcgcaugucccucuuaua

SEQ ID NO: 671643 - RNA, 19 nt, Artificial Sequence
  Description of Artificial Sequence: Synthetic oligonucleotide
  Antisense strand to SEQ ID NO: 671642
uauaagagggacaugcgca

SEQ ID NO: 671644 - RNA, 19 nt, Artificial Sequence
  Description of Artificial Sequence: Synthetic oligonucleotide
  Sense strand starting at position 637 of SEQ ID NO: 585838
gcgcaugucccucuuauau

SEQ ID NO: 671645 - RNA, 19 nt, Artificial Sequence
  Description of Artificial Sequence: Synthetic oligonucleotide
  Antisense strand to SEQ ID NO: 671644
auauaagagggacaugcgc

SEQ ID NO: 671646 - RNA, 19 nt, Artificial Sequence
  Description of Artificial Sequence: Synthetic oligonucleotide
  Sense strand starting at position 655 of SEQ ID NO: 585838
uaaagagaugcuuacaguc

SEQ ID NO: 671647 - RNA, 19 nt, Artificial Sequence
  Description of Artificial Sequence: Synthetic oligonucleotide
  Antisense strand to SEQ ID NO: 671646
gacuguaagcaucucuuua

SEQ ID NO: 671648 - RNA, 19 nt, Artificial Sequence
  Description of Artificial Sequence: Synthetic oligonucleotide
  Sense strand starting at position 743 of SEQ ID NO: 585838
gccuguaacgcuguacuga

SEQ ID NO: 671649 - RNA, 19 nt, Artificial Sequence
  Description of Artificial Sequence: Synthetic oligonucleotide
  Antisense strand to SEQ ID NO: 671648
ucaguacagcguuacaggc

SEQ ID NO: 671650 - RNA, 19 nt, Artificial Sequence
  Description of Artificial Sequence: Synthetic oligonucleotide
  Sense strand starting at position 771 of SEQ ID NO: 585838
auccgauccgugagcguuu

SEQ ID NO: 671651 - RNA, 19 nt, Artificial Sequence
  Description of Artificial Sequence: Synthetic oligonucleotide
  Antisense strand to SEQ ID NO: 671650
aaacgcucacggaucggau

SEQ ID NO: 671652 - RNA, 19 nt, Artificial Sequence
  Description of Artificial Sequence: Synthetic oligonucleotide
  Sense strand starting at position 823 of SEQ ID NO: 585838
uccucuucugcaggaaaca

SEQ ID NO: 671653 - RNA, 19 nt, Artificial Sequence
  Description of Artificial Sequence: Synthetic oligonucleotide
  Antisense strand to SEQ ID NO: 671652
uguuuccugcagaagagga

SEQ ID NO: 671654 - RNA, 19 nt, Artificial Sequence
  Description of Artificial Sequence: Synthetic oligonucleotide
  Sense strand starting at position 824 of SEQ ID NO: 585838
ccucuucugcaggaaacaa

SEQ ID NO: 671655 - RNA, 19 nt, Artificial Sequence
  Description of Artificial Sequence: Synthetic oligonucleotide
  Antisense strand to SEQ ID NO: 671654
uuguuuccugcagaagagg

SEQ ID NO: 671656 - RNA, 19 nt, Artificial Sequence
  Description of Artificial Sequence: Synthetic oligonucleotide
  Sense strand starting at position 1274 of SEQ ID NO: 585838
gaaugcaucggauacccaa

SEQ ID NO: 671657 - RNA, 19 nt, Artificial Sequence
  Description of Artificial Sequence: Synthetic oligonucleotide
  Antisense strand to SEQ ID NO: 671656
uuggguauccgaugcauuc

SEQ ID NO: 671658 - RNA, 19 nt, Artificial Sequence
  Description of Artificial Sequence: Synthetic oligonucleotide
  Sense strand starting at position 1355 of SEQ ID NO: 585838
cgcgaaggagauuauccua

SEQ ID NO: 671659 - RNA, 19 nt, Artificial Sequence
  Description of Artificial Sequence: Synthetic oligonucleotide
  Antisense strand to SEQ ID NO: 671658
uaggauaaucuccuucgcg

SEQ ID NO: 671660 - RNA, 19 nt, Artificial Sequence
  Description of Artificial Sequence: Synthetic oligonucleotide
  Sense strand starting at position 1645 of SEQ ID NO: 585838
gggauuauccucugcggau

SEQ ID NO: 671661 - RNA, 19 nt, Artificial Sequence
  Description of Artificial Sequence: Synthetic oligonucleotide
  Antisense strand to SEQ ID NO: 671660
auccgcagaggauaauccc

SEQ ID NO: 671662 - RNA, 19 nt, Artificial Sequence
  Description of Artificial Sequence: Synthetic oligonucleotide
  Sense strand starting at position 1646 of SEQ ID NO: 585838
ggauuauccucugcggauc

SEQ ID NO: 671663 - RNA, 19 nt, Artificial Sequence
  Description of Artificial Sequence: Synthetic oligonucleotide
  Antisense strand to SEQ ID NO: 671662
gauccgcagaggauaaucc

SEQ ID NO: 671664 - RNA, 19 nt, Artificial Sequence
  Description of Artificial Sequence: Synthetic oligonucleotide
  Sense strand starting at position 2590 of SEQ ID NO: 585838
agguaauucuagccacuuu

SEQ ID NO: 671665 - RNA, 19 nt, Artificial Sequence
  Description of Artificial Sequence: Synthetic oligonucleotide
  Antisense strand to SEQ ID NO: 671664
aaaguggcuagaauuaccu

SEQ ID NO: 671666 - RNA, 19 nt, Artificial Sequence
  Description of Artificial Sequence: Synthetic oligonucleotide
  Sense strand starting at position 2620 of SEQ ID NO: 585838
gauacugaggucugcugaa

SEQ ID NO: 671667 - RNA, 19 nt, Artificial Sequence
  Description of Artificial Sequence: Synthetic oligonucleotide
  Antisense strand to SEQ ID NO: 671666
uucagcagaccucaguauc

SEQ ID NO: 671668 - RNA, 19 nt, Artificial Sequence
  Description of Artificial Sequence: Synthetic oligonucleotide
  Sense strand starting at position 2672 of SEQ ID NO: 585838
ccagauuaccuucgacagu

SEQ ID NO: 671669 - RNA, 19 nt, Artificial Sequence
  Description of Artificial Sequence: Synthetic oligonucleotide
  Antisense strand to SEQ ID NO: 671668
acugucgaagguaaucugg

SEQ ID NO: 671670 - RNA, 19 nt, Artificial Sequence
  Description of Artificial Sequence: Synthetic oligonucleotide
  Sense strand starting at position 2675 of SEQ ID NO: 585838
gauuaccuucgacaguaau

SEQ ID NO: 671671 - RNA, 19 nt, Artificial Sequence
  Description of Artificial Sequence: Synthetic oligonucleotide
  Antisense strand to SEQ ID NO: 671670
auuacugucgaagguaauc

SEQ ID NO: 671672 - RNA, 19 nt, Artificial Sequence
  Description of Artificial Sequence: Synthetic oligonucleotide
  Sense strand starting at position 2689 of SEQ ID NO: 585838
guaaucauuugcgugcaua

SEQ ID NO: 671673 - RNA, 19 nt, Artificial Sequence
  Description of Artificial Sequence: Synthetic oligonucleotide
  Antisense strand to SEQ ID NO: 671672
uaugcacgcaaaugauuac

SEQ ID NO: 671674 - RNA, 19 nt, Artificial Sequence
  Description of Artificial Sequence: Synthetic oligonucleotide
  Sense strand starting at position 2690 of SEQ ID NO: 585838
uaaucauuugcgugcauaa

SEQ ID NO: 671675 - RNA, 19 nt, Artificial Sequence
  Description of Artificial Sequence: Synthetic oligonucleotide
  Antisense strand to SEQ ID NO: 671674
uuaugcacgcaaaugauua

SEQ ID NO: 671676 - RNA, 19 nt, Artificial Sequence
  Description of Artificial Sequence: Synthetic oligonucleotide
  Sense strand starting at position 2778 of SEQ ID NO: 585838
guaugucaaguguauauuc

SEQ ID NO: 671677 - RNA, 19 nt, Artificial Sequence
  Description of Artificial Sequence: Synthetic oligonucleotide
  Antisense strand to SEQ ID NO: 671676
gaauauacacuugacauac

SEQ ID NO: 671678 - RNA, 19 nt, Artificial Sequence
  Description of Artificial Sequence: Synthetic oligonucleotide
  Sense strand starting at position 2780 of SEQ ID NO: 585838
augucaaguguauauucga

SEQ ID NO: 671679 - RNA, 19 nt, Artificial Sequence
  Description of Artificial Sequence: Synthetic oligonucleotide
  Antisense strand to SEQ ID NO: 671678
ucgaauauacacuugacau

SEQ ID NO: 671680 - RNA, 19 nt, Artificial Sequence
  Description of Artificial Sequence: Synthetic oligonucleotide
  Sense strand starting at position 2783 of SEQ ID NO: 585838
ucaaguguauauucgaaua

SEQ ID NO: 671681 - RNA, 19 nt, Artificial Sequence
  Description of Artificial Sequence: Synthetic oligonucleotide
  Antisense strand to SEQ ID NO: 671680
uauucgaauauacacuuga

SEQ ID NO: 671682 - RNA, 19 nt, Artificial Sequence
  Description of Artificial Sequence: Synthetic oligonucleotide
  Sense strand starting at position 2788 of SEQ ID NO: 585838
uguauauucgaauaguaag

SEQ ID NO: 671683 - RNA, 19 nt, Artificial Sequence
  Description of Artificial Sequence: Synthetic oligonucleotide
  Antisense strand to SEQ ID NO: 671682
cuuacuauucgaauauaca

SEQ ID NO: 671684 - RNA, 19 nt, Artificial Sequence
  Description of Artificial Sequence: Synthetic oligonucleotide
  Sense strand starting at position 2795 of SEQ ID NO: 585838
ucgaauaguaagcaggaau

SEQ ID NO: 671685 - RNA, 19 nt, Artificial Sequence
  Description of Artificial Sequence: Synthetic oligonucleotide
  Antisense strand to SEQ ID NO: 671684
auuccugcuuacuauucga

SEQ ID NO: 671686 - RNA, 19 nt, Artificial Sequence
  Description of Artificial Sequence: Synthetic oligonucleotide
  Sense strand starting at position 2824 of SEQ ID NO: 585838
ggauguggaguugguuaau

SEQ ID NO: 671687 - RNA, 19 nt, Artificial Sequence
  Description of Artificial Sequence: Synthetic oligonucleotide
  Antisense strand to SEQ ID NO: 671686
auuaaccaacuccacaucc

SEQ ID NO: 671688 - RNA, 19 nt, Artificial Sequence
  Description of Artificial Sequence: Synthetic oligonucleotide
  Sense strand starting at position 2901 of SEQ ID NO: 585838
cucacaguagcaugaagau

SEQ ID NO: 671689 - RNA, 19 nt, Artificial Sequence
  Description of Artificial Sequence: Synthetic oligonucleotide
  Antisense strand to SEQ ID NO: 671688
aucuucaugcuacugugag

SEQ ID NO: 671690 - RNA, 19 nt, Artificial Sequence
  Description of Artificial Sequence: Synthetic oligonucleotide
  Sense strand starting at position 2933 of SEQ ID NO: 585838
gugagcuuuccuggcauuu

SEQ ID NO: 671691 - RNA, 19 nt, Artificial Sequence
  Description of Artificial Sequence: Synthetic oligonucleotide
  Antisense strand to SEQ ID NO: 671690
aaaugccaggaaagcucac

SEQ ID NO: 671692 - RNA, 19 nt, Artificial Sequence
  Description of Artificial Sequence: Synthetic oligonucleotide
  Sense strand starting at position 2980 of SEQ ID NO: 585838
cggccuugaagccauauau

SEQ ID NO: 671693 - RNA, 19 nt, Artificial Sequence
  Description of Artificial Sequence: Synthetic oligonucleotide
  Antisense strand to SEQ ID NO: 671692
auauauggcuucaaggccg

SEQ ID NO: 671694 - RNA, 19 nt, Artificial Sequence
  Description of Artificial Sequence: Synthetic oligonucleotide
  Sense strand starting at position 2990 of SEQ ID NO: 585838
gccauauaucgauaccuau

SEQ ID NO: 671695 - RNA, 19 nt, Artificial Sequence
  Description of Artificial Sequence: Synthetic oligonucleotide
  Antisense strand to SEQ ID NO: 671694
auagguaucgauauauggc

SEQ ID NO: 671696 - RNA, 19 nt, Artificial Sequence
  Description of Artificial Sequence: Synthetic oligonucleotide
  Sense strand starting at position 3133 of SEQ ID NO: 585838
acagcuuaagagcacuauu

SEQ ID NO: 671697 - RNA, 19 nt, Artificial Sequence
  Description of Artificial Sequence: Synthetic oligonucleotide
  Antisense strand to SEQ ID NO: 671696
aauagugcucuuaagcugu

SEQ ID NO: 671698 - RNA, 19 nt, Artificial Sequence
  Description of Artificial Sequence: Synthetic oligonucleotide
  Sense strand starting at position 3136 of SEQ ID NO: 585838
gcuuaagagcacuauuguc

SEQ ID NO: 671699 - RNA, 19 nt, Artificial Sequence
  Description of Artificial Sequence: Synthetic oligonucleotide
  Antisense strand to SEQ ID NO: 671698
gacaauagugcucuuaagc

SEQ ID NO: 671700 - RNA, 19 nt, Artificial Sequence
  Description of Artificial Sequence: Synthetic oligonucleotide
  Sense strand starting at position 3159 of SEQ ID NO: 585838
guacuagucuuaccauauu

SEQ ID NO: 671701 - RNA, 19 nt, Artificial Sequence
  Description of Artificial Sequence: Synthetic oligonucleotide
  Antisense strand to SEQ ID NO: 671700
aauaugguaagacuaguac

SEQ ID NO: 671702 - RNA, 19 nt, Artificial Sequence
  Description of Artificial Sequence: Synthetic oligonucleotide
  Sense strand starting at position 3168 of SEQ ID NO: 585838
uuaccauauuuacaaggga

SEQ ID NO: 671703 - RNA, 19 nt, Artificial Sequence
  Description of Artificial Sequence: Synthetic oligonucleotide
  Antisense strand to SEQ ID NO: 671702
ucccuuguaaauaugguaa

SEQ ID NO: 671704 - RNA, 19 nt, Artificial Sequence
  Description of Artificial Sequence: Synthetic oligonucleotide
  Sense strand starting at position 3580 of SEQ ID NO: 585838
cggugaugaugauuauaca

SEQ ID NO: 671705 - RNA, 19 nt, Artificial Sequence
  Description of Artificial Sequence: Synthetic oligonucleotide
  Antisense strand to SEQ ID NO: 671704
uguauaaucaucaucaccg

SEQ ID NO: 671706 - RNA, 19 nt, Artificial Sequence
  Description of Artificial Sequence: Synthetic oligonucleotide
  Sense strand starting at position 3681 of SEQ ID NO: 585838
aucugauagaguugggagu

SEQ ID NO: 671707 - RNA, 19 nt, Artificial Sequence
  Description of Artificial Sequence: Synthetic oligonucleotide
  Antisense strand to SEQ ID NO: 671706
acucccaacucuaucagau

SEQ ID NO: 671708 - RNA, 19 nt, Artificial Sequence
  Description of Artificial Sequence: Synthetic oligonucleotide
  Sense strand starting at position 3687 of SEQ ID NO: 585838
uagaguugggaguggcaau

SEQ ID NO: 671709 - RNA, 19 nt, Artificial Sequence
  Description of Artificial Sequence: Synthetic oligonucleotide
  Antisense strand to SEQ ID NO: 671708
auugccacucccaacucua

SEQ ID NO: 671710 - RNA, 19 nt, Artificial Sequence
  Description of Artificial Sequence: Synthetic oligonucleotide
  Sense strand starting at position 3688 of SEQ ID NO: 585838
agaguugggaguggcaaua

SEQ ID NO: 671711 - RNA, 19 nt, Artificial Sequence
  Description of Artificial Sequence: Synthetic oligonucleotide
  Antisense strand to SEQ ID NO: 671710
uauugccacucccaacucu

SEQ ID NO: 671712 - RNA, 19 nt, Artificial Sequence
  Description of Artificial Sequence: Synthetic oligonucleotide
  Sense strand starting at position 3778 of SEQ ID NO: 585838
ucauuaagagcauggaaca

SEQ ID NO: 671713 - RNA, 19 nt, Artificial Sequence
  Description of Artificial Sequence: Synthetic oligonucleotide
  Antisense strand to SEQ ID NO: 671712
uguuccaugcucuuaauga

SEQ ID NO: 671714 - RNA, 19 nt, Artificial Sequence
  Description of Artificial Sequence: Synthetic oligonucleotide
  Sense strand starting at position 178 of SEQ ID NO: 585839
ggaggucaauaagaggaaa

SEQ ID NO: 671715 - RNA, 19 nt, Artificial Sequence
  Description of Artificial Sequence: Synthetic oligonucleotide
  Antisense strand to SEQ ID NO: 671714
uuuccucuuauugaccucc

SEQ ID NO: 671716 - RNA, 19 nt, Artificial Sequence
  Description of Artificial Sequence: Synthetic oligonucleotide
  Sense strand starting at position 282 of SEQ ID NO: 585839
gggaguaucagaggccaca

SEQ ID NO: 671717 - RNA, 19 nt, Artificial Sequence
  Description of Artificial Sequence: Synthetic oligonucleotide
  Antisense strand to SEQ ID NO: 671716
uguggccucugauacuccc

SEQ ID NO: 671718 - RNA, 19 nt, Artificial Sequence
  Description of Artificial Sequence: Synthetic oligonucleotide
  Sense strand starting at position 356 of SEQ ID NO: 585839
ugcgcaugucccucuuaua

SEQ ID NO: 671719 - RNA, 19 nt, Artificial Sequence
  Description of Artificial Sequence: Synthetic oligonucleotide
  Antisense strand to SEQ ID NO: 671718
uauaagagggacaugcgca

SEQ ID NO: 671720 - RNA, 19 nt, Artificial Sequence
  Description of Artificial Sequence: Synthetic oligonucleotide
  Sense strand starting at position 357 of SEQ ID NO: 585839
gcgcaugucccucuuauau

SEQ ID NO: 671721 - RNA, 19 nt, Artificial Sequence
  Description of Artificial Sequence: Synthetic oligonucleotide
  Antisense strand to SEQ ID NO: 671720
auauaagagggacaugcgc

SEQ ID NO: 671722 - RNA, 19 nt, Artificial Sequence
  Description of Artificial Sequence: Synthetic oligonucleotide
  Sense strand starting at position 375 of SEQ ID NO: 585839
uaaagagaugcuuacaguc

SEQ ID NO: 671723 - RNA, 19 nt, Artificial Sequence
  Description of Artificial Sequence: Synthetic oligonucleotide
  Antisense strand to SEQ ID NO: 671722
gacuguaagcaucucuuua

SEQ ID NO: 671724 - RNA, 19 nt, Artificial Sequence
  Description of Artificial Sequence: Synthetic oligonucleotide
  Sense strand starting at position 463 of SEQ ID NO: 585839
gccuguaacgcuguacuga

SEQ ID NO: 671725 - RNA, 19 nt, Artificial Sequence
  Description of Artificial Sequence: Synthetic oligonucleotide
  Antisense strand to SEQ ID NO: 671724
ucaguacagcguuacaggc

SEQ ID NO: 671726 - RNA, 19 nt, Artificial Sequence
  Description of Artificial Sequence: Synthetic oligonucleotide
  Sense strand starting at position 491 of SEQ ID NO: 585839
auccgauccgugagcguuu

SEQ ID NO: 671727 - RNA, 19 nt, Artificial Sequence
  Description of Artificial Sequence: Synthetic oligonucleotide
  Antisense strand to SEQ ID NO: 671726
aaacgcucacggaucggau

SEQ ID NO: 671728 - RNA, 19 nt, Artificial Sequence
  Description of Artificial Sequence: Synthetic oligonucleotide
  Sense strand starting at position 543 of SEQ ID NO: 585839
uccucuucugcaggaaaca

SEQ ID NO: 671729 - RNA, 19 nt, Artificial Sequence
  Description of Artificial Sequence: Synthetic oligonucleotide
  Antisense strand to SEQ ID NO: 671728
uguuuccugcagaagagga

SEQ ID NO: 671730 - RNA, 19 nt, Artificial Sequence
  Description of Artificial Sequence: Synthetic oligonucleotide
  Sense strand starting at position 544 of SEQ ID NO: 585839
ccucuucugcaggaaacaa

SEQ ID NO: 671731 - RNA, 19 nt, Artificial Sequence
  Description of Artificial Sequence: Synthetic oligonucleotide
  Antisense strand to SEQ ID NO: 671730
uuguuuccugcagaagagg

SEQ ID NO: 671732 - RNA, 19 nt, Artificial Sequence
  Description of Artificial Sequence: Synthetic oligonucleotide
  Sense strand starting at position 994 of SEQ ID NO: 585839
gaaugcaucggauacccaa

SEQ ID NO: 671733 - RNA, 19 nt, Artificial Sequence
  Description of Artificial Sequence: Synthetic oligonucleotide
  Antisense strand to SEQ ID NO: 671732
uuggguauccgaugcauuc

SEQ ID NO: 671734 - RNA, 19 nt, Artificial Sequence
  Description of Artificial Sequence: Synthetic oligonucleotide
  Sense strand starting at position 1075 of SEQ ID NO: 585839
cgcgaaggagauuauccua

SEQ ID NO: 671735 - RNA, 19 nt, Artificial Sequence
  Description of Artificial Sequence: Synthetic oligonucleotide
  Antisense strand to SEQ ID NO: 671734
uaggauaaucuccuucgcg

SEQ ID NO: 671736 - RNA, 19 nt, Artificial Sequence
  Description of Artificial Sequence: Synthetic oligonucleotide
  Sense strand starting at position 1365 of SEQ ID NO: 585839
gggauuauccucugcggau

SEQ ID NO: 671737 - RNA, 19 nt, Artificial Sequence
  Description of Artificial Sequence: Synthetic oligonucleotide
  Antisense strand to SEQ ID NO: 671736
auccgcagaggauaauccc

SEQ ID NO: 671738 - RNA, 19 nt, Artificial Sequence
  Description of Artificial Sequence: Synthetic oligonucleotide
  Sense strand starting at position 1366 of SEQ ID NO: 585839
ggauuauccucugcggauc

SEQ ID NO: 671739 - RNA, 19 nt, Artificial Sequence
  Description of Artificial Sequence: Synthetic oligonucleotide
  Antisense strand to SEQ ID NO: 671738
gauccgcagaggauaaucc

SEQ ID NO: 671740 - RNA, 19 nt, Artificial Sequence
  Description of Artificial Sequence: Synthetic oligonucleotide
  Sense strand starting at position 2310 of SEQ ID NO: 585839
agguaauucuagccacuuu

SEQ ID NO: 671741 - RNA, 19 nt, Artificial Sequence
  Description of Artificial Sequence: Synthetic oligonucleotide
  Antisense strand to SEQ ID NO: 671740
aaaguggcuagaauuaccu

SEQ ID NO: 671742 - RNA, 19 nt, Artificial Sequence
  Description of Artificial Sequence: Synthetic oligonucleotide
  Sense strand starting at position 2340 of SEQ ID NO: 585839
gauacugaggucugcugaa

SEQ ID NO: 671743 - RNA, 19 nt, Artificial Sequence
  Description of Artificial Sequence: Synthetic oligonucleotide
  Antisense strand to SEQ ID NO: 671742
uucagcagaccucaguauc

SEQ ID NO: 671744 - RNA, 19 nt, Artificial Sequence
  Description of Artificial Sequence: Synthetic oligonucleotide
  Sense strand starting at position 2392 of SEQ ID NO: 585839
ccagauuaccuucgacagu

SEQ ID NO: 671745 - RNA, 19 nt, Artificial Sequence
  Description of Artificial Sequence: Synthetic oligonucleotide
  Antisense strand to SEQ ID NO: 671744
acugucgaagguaaucugg

SEQ ID NO: 671746 - RNA, 19 nt, Artificial Sequence
  Description of Artificial Sequence: Synthetic oligonucleotide
  Sense strand starting at position 2395 of SEQ ID NO: 585839
gauuaccuucgacaguaau

SEQ ID NO: 671747 - RNA, 19 nt, Artificial Sequence
  Description of Artificial Sequence: Synthetic oligonucleotide
  Antisense strand to SEQ ID NO: 671746
auuacugucgaagguaauc

SEQ ID NO: 671748 - RNA, 19 nt, Artificial Sequence
  Description of Artificial Sequence: Synthetic oligonucleotide
  Sense strand starting at position 2409 of SEQ ID NO: 585839
guaaucauuugcgugcaua

SEQ ID NO: 671749 - RNA, 19 nt, Artificial Sequence
  Description of Artificial Sequence: Synthetic oligonucleotide
  Antisense strand to SEQ ID NO: 671748
uaugcacgcaaaugauuac

SEQ ID NO: 671750 - RNA, 19 nt, Artificial Sequence
  Description of Artificial Sequence: Synthetic oligonucleotide
  Sense strand starting at position 2410 of SEQ ID NO: 585839
uaaucauuugcgugcauaa

SEQ ID NO: 671751 - RNA, 19 nt, Artificial Sequence
  Description of Artificial Sequence: Synthetic oligonucleotide
  Antisense strand to SEQ ID NO: 671750
uuaugcacgcaaaugauua

SEQ ID NO: 671752 - RNA, 19 nt, Artificial Sequence
  Description of Artificial Sequence: Synthetic oligonucleotide
  Sense strand starting at position 2498 of SEQ ID NO: 585839
guaugucaaguguauauuc

SEQ ID NO: 671753 - RNA, 19 nt, Artificial Sequence
  Description of Artificial Sequence: Synthetic oligonucleotide
  Antisense strand to SEQ ID NO: 671752
gaauauacacuugacauac

SEQ ID NO: 671754 - RNA, 19 nt, Artificial Sequence
  Description of Artificial Sequence: Synthetic oligonucleotide
  Sense strand starting at position 2500 of SEQ ID NO: 585839
augucaaguguauauucga

SEQ ID NO: 671755 - RNA, 19 nt, Artificial Sequence
  Description of Artificial Sequence: Synthetic oligonucleotide
  Antisense strand to SEQ ID NO: 671754
ucgaauauacacuugacau

SEQ ID NO: 671756 - RNA, 19 nt, Artificial Sequence
  Description of Artificial Sequence: Synthetic oligonucleotide
  Sense strand starting at position 2503 of SEQ ID NO: 585839
ucaaguguauauucgaaua

SEQ ID NO: 671757 - RNA, 19 nt, Artificial Sequence
  Description of Artificial Sequence: Synthetic oligonucleotide
  Antisense strand to SEQ ID NO: 671756
uauucgaauauacacuuga

SEQ ID NO: 671758 - RNA, 19 nt, Artificial Sequence
  Description of Artificial Sequence: Synthetic oligonucleotide
  Sense strand starting at position 2508 of SEQ ID NO: 585839
uguauauucgaauaguaag

SEQ ID NO: 671759 - RNA, 19 nt, Artificial Sequence
  Description of Artificial Sequence: Synthetic oligonucleotide
  Antisense strand to SEQ ID NO: 671758
cuuacuauucgaauauaca

SEQ ID NO: 671760 - RNA, 19 nt, Artificial Sequence
  Description of Artificial Sequence: Synthetic oligonucleotide
  Sense strand starting at position 2515 of SEQ ID NO: 585839
ucgaauaguaagcaggaau

SEQ ID NO: 671761 - RNA, 19 nt, Artificial Sequence
  Description of Artificial Sequence: Synthetic oligonucleotide
  Antisense strand to SEQ ID NO: 671760
auuccugcuuacuauucga

SEQ ID NO: 671762 - RNA, 19 nt, Artificial Sequence
  Description of Artificial Sequence: Synthetic oligonucleotide
  Sense strand starting at position 2544 of SEQ ID NO: 585839
ggauguggaguugguuaau

SEQ ID NO: 671763 - RNA, 19 nt, Artificial Sequence
  Description of Artificial Sequence: Synthetic oligonucleotide
  Antisense strand to SEQ ID NO: 671762
auuaaccaacuccacaucc

SEQ ID NO: 671764 - RNA, 19 nt, Artificial Sequence
  Description of Artificial Sequence: Synthetic oligonucleotide
  Sense strand starting at position 2621 of SEQ ID NO: 585839
cucacaguagcaugaagau

SEQ ID NO: 671765 - RNA, 19 nt, Artificial Sequence
  Description of Artificial Sequence: Synthetic oligonucleotide
  Antisense strand to SEQ ID NO: 671764
aucuucaugcuacugugag

SEQ ID NO: 671766 - RNA, 19 nt, Artificial Sequence
  Description of Artificial Sequence: Synthetic oligonucleotide
  Sense strand starting at position 2653 of SEQ ID NO: 585839
gugagcuuuccuggcauuu

SEQ ID NO: 671767 - RNA, 19 nt, Artificial Sequence
  Description of Artificial Sequence: Synthetic oligonucleotide
  Antisense strand to SEQ ID NO: 671766
aaaugccaggaaagcucac

SEQ ID NO: 671768 - RNA, 19 nt, Artificial Sequence
  Description of Artificial Sequence: Synthetic oligonucleotide
  Sense strand starting at position 2700 of SEQ ID NO: 585839
cggccuugaagccauauau

SEQ ID NO: 671769 - RNA, 19 nt, Artificial Sequence
  Description of Artificial Sequence: Synthetic oligonucleotide
  Antisense strand to SEQ ID NO: 671768
auauauggcuucaaggccg

SEQ ID NO: 671770 - RNA, 19 nt, Artificial Sequence
  Description of Artificial Sequence: Synthetic oligonucleotide
  Sense strand starting at position 2710 of SEQ ID NO: 585839
gccauauaucgauaccuau

SEQ ID NO: 671771 - RNA, 19 nt, Artificial Sequence
  Description of Artificial Sequence: Synthetic oligonucleotide
  Antisense strand to SEQ ID NO: 671770
auagguaucgauauauggc

SEQ ID NO: 671772 - RNA, 19 nt, Artificial Sequence
  Description of Artificial Sequence: Synthetic oligonucleotide
  Sense strand starting at position 2853 of SEQ ID NO: 585839
acagcuuaagagcacuauu

SEQ ID NO: 671773 - RNA, 19 nt, Artificial Sequence
  Description of Artificial Sequence: Synthetic oligonucleotide
  Antisense strand to SEQ ID NO: 671772
aauagugcucuuaagcugu

SEQ ID NO: 671774 - RNA, 19 nt, Artificial Sequence
  Description of Artificial Sequence: Synthetic oligonucleotide
  Sense strand starting at position 2856 of SEQ ID NO: 585839
gcuuaagagcacuauuguc

SEQ ID NO: 671775 - RNA, 19 nt, Artificial Sequence
  Description of Artificial Sequence: Synthetic oligonucleotide
  Antisense strand to SEQ ID NO: 671774
gacaauagugcucuuaagc

SEQ ID NO: 671776 - RNA, 19 nt, Artificial Sequence
  Description of Artificial Sequence: Synthetic oligonucleotide
  Sense strand starting at position 2862 of SEQ ID NO: 585839
gagcacuauugucucaagu

SEQ ID NO: 671777 - RNA, 19 nt, Artificial Sequence
  Description of Artificial Sequence: Synthetic oligonucleotide
  Antisense strand to SEQ ID NO: 671776
acuugagacaauagugcuc

SEQ ID NO: 671778 - RNA, 19 nt, Artificial Sequence
  Description of Artificial Sequence: Synthetic oligonucleotide
  Sense strand starting at position 2879 of SEQ ID NO: 585839
guacuagucuuaccauauu

SEQ ID NO: 671779 - RNA, 19 nt, Artificial Sequence
  Description of Artificial Sequence: Synthetic oligonucleotide
  Antisense strand to SEQ ID NO: 671778
aauaugguaagacuaguac

SEQ ID NO: 671780 - RNA, 19 nt, Artificial Sequence
  Description of Artificial Sequence: Synthetic oligonucleotide
  Sense strand starting at position 2888 of SEQ ID NO: 585839
uuaccauauuuacaaggga

SEQ ID NO: 671781 - RNA, 19 nt, Artificial Sequence
  Description of Artificial Sequence: Synthetic oligonucleotide
  Antisense strand to SEQ ID NO: 671780
ucccuuguaaauaugguaa

SEQ ID NO: 671782 - RNA, 19 nt, Artificial Sequence
  Description of Artificial Sequence: Synthetic oligonucleotide
  Sense strand starting at position 3300 of SEQ ID NO: 585839
cggugaugaugauuauaca

SEQ ID NO: 671783 - RNA, 19 nt, Artificial Sequence
  Description of Artificial Sequence: Synthetic oligonucleotide
  Antisense strand to SEQ ID NO: 671782
uguauaaucaucaucaccg

SEQ ID NO: 671784 - RNA, 19 nt, Artificial Sequence
  Description of Artificial Sequence: Synthetic oligonucleotide
  Sense strand starting at position 3393 of SEQ ID NO: 585839
ucaauauaaucugauagag

SEQ ID NO: 671785 - RNA, 19 nt, Artificial Sequence
  Description of Artificial Sequence: Synthetic oligonucleotide
  Antisense strand to SEQ ID NO: 671784
cucuaucagauuauauuga

SEQ ID NO: 671786 - RNA, 19 nt, Artificial Sequence
  Description of Artificial Sequence: Synthetic oligonucleotide
  Sense strand starting at position 3401 of SEQ ID NO: 585839
aucugauagaguugggagu

SEQ ID NO: 671787 - RNA, 19 nt, Artificial Sequence
  Description of Artificial Sequence: Synthetic oligonucleotide
  Antisense strand to SEQ ID NO: 671786
acucccaacucuaucagau

SEQ ID NO: 671788 - RNA, 19 nt, Artificial Sequence
  Description of Artificial Sequence: Synthetic oligonucleotide
  Sense strand starting at position 3407 of SEQ ID NO: 585839
uagaguugggaguggcaau

SEQ ID NO: 671789 - RNA, 19 nt, Artificial Sequence
  Description of Artificial Sequence: Synthetic oligonucleotide
  Antisense strand to SEQ ID NO: 671788
auugccacucccaacucua

SEQ ID NO: 671790 - RNA, 19 nt, Artificial Sequence
  Description of Artificial Sequence: Synthetic oligonucleotide
  Sense strand starting at position 3408 of SEQ ID NO: 585839
agaguugggaguggcaaua

SEQ ID NO: 671791 - RNA, 19 nt, Artificial Sequence
  Description of Artificial Sequence: Synthetic oligonucleotide
  Antisense strand to SEQ ID NO: 671790
uauugccacucccaacucu

SEQ ID NO: 671792 - RNA, 19 nt, Artificial Sequence
  Description of Artificial Sequence: Synthetic oligonucleotide
  Sense strand starting at position 3498 of SEQ ID NO: 585839
ucauuaagagcauggaaca

SEQ ID NO: 671793 - RNA, 19 nt, Artificial Sequence
  Description of Artificial Sequence: Synthetic oligonucleotide
  Antisense strand to SEQ ID NO: 671792
uguuccaugcucuuaauga

SEQ ID NO: 671794 - RNA, 19 nt, Artificial Sequence
  Description of Artificial Sequence: Synthetic oligonucleotide
  Sense strand starting at position 134 of SEQ ID NO: 585840
guuuauccuucggugacaa

SEQ ID NO: 671795 - RNA, 19 nt, Artificial Sequence
  Description of Artificial Sequence: Synthetic oligonucleotide
  Antisense strand to SEQ ID NO: 671794
uugucaccgaaggauaaac

SEQ ID NO: 671796 - RNA, 19 nt, Artificial Sequence
  Description of Artificial Sequence: Synthetic oligonucleotide
  Sense strand starting at position 135 of SEQ ID NO: 585840
uuuauccuucggugacaaa

SEQ ID NO: 671797 - RNA, 19 nt, Artificial Sequence
  Description of Artificial Sequence: Synthetic oligonucleotide
  Antisense strand to SEQ ID NO: 671796
uuugucaccgaaggauaaa

SEQ ID NO: 671798 - RNA, 19 nt, Artificial Sequence
  Description of Artificial Sequence: Synthetic oligonucleotide
  Sense strand starting at position 380 of SEQ ID NO: 585840
augaaauugccauagcuau

SEQ ID NO: 671799 - RNA, 19 nt, Artificial Sequence
  Description of Artificial Sequence: Synthetic oligonucleotide
  Antisense strand to SEQ ID NO: 671798
auagcuauggcaauuucau

SEQ ID NO: 671800 - RNA, 19 nt, Artificial Sequence
  Description of Artificial Sequence: Synthetic oligonucleotide
  Sense strand starting at position 567 of SEQ ID NO: 585840
gggugacaaguuugaccuu

SEQ ID NO: 671801 - RNA, 19 nt, Artificial Sequence
  Description of Artificial Sequence: Synthetic oligonucleotide
  Antisense strand to SEQ ID NO: 671800
aaggucaaacuugucaccc

SEQ ID NO: 671802 - RNA, 19 nt, Artificial Sequence
  Description of Artificial Sequence: Synthetic oligonucleotide
  Sense strand starting at position 785 of SEQ ID NO: 585840
ggaggucaauaagaggaaa

SEQ ID NO: 671803 - RNA, 19 nt, Artificial Sequence
  Description of Artificial Sequence: Synthetic oligonucleotide
  Antisense strand to SEQ ID NO: 671802
uuuccucuuauugaccucc

SEQ ID NO: 671804 - RNA, 19 nt, Artificial Sequence
  Description of Artificial Sequence: Synthetic oligonucleotide
  Sense strand starting at position 889 of SEQ ID NO: 585840
gggaguaucagaggccaca

SEQ ID NO: 671805 - RNA, 19 nt, Artificial Sequence
  Description of Artificial Sequence: Synthetic oligonucleotide
  Antisense strand to SEQ ID NO: 671804
uguggccucugauacuccc

SEQ ID NO: 671806 - RNA, 19 nt, Artificial Sequence
  Description of Artificial Sequence: Synthetic oligonucleotide
  Sense strand starting at position 963 of SEQ ID NO: 585840
ugcgcaugucccucuuaua

SEQ ID NO: 671807 - RNA, 19 nt, Artificial Sequence
  Description of Artificial Sequence: Synthetic oligonucleotide
  Antisense strand to SEQ ID NO: 671806
uauaagagggacaugcgca

SEQ ID NO: 671808 - RNA, 19 nt, Artificial Sequence
  Description of Artificial Sequence: Synthetic oligonucleotide
  Sense strand starting at position 964 of SEQ ID NO: 585840
gcgcaugucccucuuauau

SEQ ID NO: 671809 - RNA, 19 nt, Artificial Sequence
  Description of Artificial Sequence: Synthetic oligonucleotide
  Antisense strand to SEQ ID NO: 671808
auauaagagggacaugcgc

SEQ ID NO: 671810 - RNA, 19 nt, Artificial Sequence
  Description of Artificial Sequence: Synthetic oligonucleotide
  Sense strand starting at position 982 of SEQ ID NO: 585840
uaaagagaugcuuacaguc

SEQ ID NO: 671811 - RNA, 19 nt, Artificial Sequence
  Description of Artificial Sequence: Synthetic oligonucleotide
  Antisense strand to SEQ ID NO: 671810
gacuguaagcaucucuuua

SEQ ID NO: 671812 - RNA, 19 nt, Artificial Sequence
  Description of Artificial Sequence: Synthetic oligonucleotide
  Sense strand starting at position 1070 of SEQ ID NO: 585840
gccuguaacgcuguacuga

SEQ ID NO: 671813 - RNA, 19 nt, Artificial Sequence
  Description of Artificial Sequence: Synthetic oligonucleotide
  Antisense strand to SEQ ID NO: 671812
ucaguacagcguuacaggc

SEQ ID NO: 671814 - RNA, 19 nt, Artificial Sequence
  Description of Artificial Sequence: Synthetic oligonucleotide
  Sense strand starting at position 1098 of SEQ ID NO: 585840
auccgauccgugagcguuu

SEQ ID NO: 671815 - RNA, 19 nt, Artificial Sequence
  Description of Artificial Sequence: Synthetic oligonucleotide
  Antisense strand to SEQ ID NO: 671814
aaacgcucacggaucggau

SEQ ID NO: 671816 - RNA, 19 nt, Artificial Sequence
  Description of Artificial Sequence: Synthetic oligonucleotide
  Sense strand starting at position 1150 of SEQ ID NO: 585840
uccucuucugcaggaaaca

SEQ ID NO: 671817 - RNA, 19 nt, Artificial Sequence
  Description of Artificial Sequence: Synthetic oligonucleotide
  Antisense strand to SEQ ID NO: 671816
uguuuccugcagaagagga

SEQ ID NO: 671818 - RNA, 19 nt, Artificial Sequence
  Description of Artificial Sequence: Synthetic oligonucleotide
  Sense strand starting at position 1151 of SEQ ID NO: 585840
ccucuucugcaggaaacaa

SEQ ID NO: 671819 - RNA, 19 nt, Artificial Sequence
  Description of Artificial Sequence: Synthetic oligonucleotide
  Antisense strand to SEQ ID NO: 671818
uuguuuccugcagaagagg

SEQ ID NO: 671820 - RNA, 19 nt, Artificial Sequence
  Description of Artificial Sequence: Synthetic oligonucleotide
  Sense strand starting at position 1601 of SEQ ID NO: 585840
gaaugcaucggauacccaa

SEQ ID NO: 671821 - RNA, 19 nt, Artificial Sequence
  Description of Artificial Sequence: Synthetic oligonucleotide
  Antisense strand to SEQ ID NO: 671820
uuggguauccgaugcauuc

SEQ ID NO: 671822 - RNA, 19 nt, Artificial Sequence
  Description of Artificial Sequence: Synthetic oligonucleotide
  Sense strand starting at position 1682 of SEQ ID NO: 585840
cgcgaaggagauuauccua

SEQ ID NO: 671823 - RNA, 19 nt, Artificial Sequence
  Description of Artificial Sequence: Synthetic oligonucleotide
  Antisense strand to SEQ ID NO: 671822
uaggauaaucuccuucgcg

SEQ ID NO: 671824 - RNA, 19 nt, Artificial Sequence
  Description of Artificial Sequence: Synthetic oligonucleotide
  Sense strand starting at position 1972 of SEQ ID NO: 585840
gggauuauccucugcggau

SEQ ID NO: 671825 - RNA, 19 nt, Artificial Sequence
  Description of Artificial Sequence: Synthetic oligonucleotide
  Antisense strand to SEQ ID NO: 671824
auccgcagaggauaauccc

SEQ ID NO: 671826 - RNA, 19 nt, Artificial Sequence
  Description of Artificial Sequence: Synthetic oligonucleotide
  Sense strand starting at position 1973 of SEQ ID NO: 585840
ggauuauccucugcggauc

SEQ ID NO: 671827 - RNA, 19 nt, Artificial Sequence
  Description of Artificial Sequence: Synthetic oligonucleotide
  Antisense strand to SEQ ID NO: 671826
gauccgcagaggauaaucc

SEQ ID NO: 671828 - RNA, 19 nt, Artificial Sequence
  Description of Artificial Sequence: Synthetic oligonucleotide
  Sense strand starting at position 2682 of SEQ ID NO: 585840
cggguucuacucugugaag

SEQ ID NO: 671829 - RNA, 19 nt, Artificial Sequence
  Description of Artificial Sequence: Synthetic oligonucleotide
  Antisense strand to SEQ ID NO: 671828
cuucacagaguagaacccg

SEQ ID NO: 671830 - RNA, 19 nt, Artificial Sequence
  Description of Artificial Sequence: Synthetic oligonucleotide
  Sense strand starting at position 2917 of SEQ ID NO: 585840
agguaauucuagccacuuu

SEQ ID NO: 671831 - RNA, 19 nt, Artificial Sequence
  Description of Artificial Sequence: Synthetic oligonucleotide
  Antisense strand to SEQ ID NO: 671830
aaaguggcuagaauuaccu

SEQ ID NO: 671832 - RNA, 19 nt, Artificial Sequence
  Description of Artificial Sequence: Synthetic oligonucleotide
  Sense strand starting at position 2947 of SEQ ID NO: 585840
gauacugaggucugcugaa

SEQ ID NO: 671833 - RNA, 19 nt, Artificial Sequence
  Description of Artificial Sequence: Synthetic oligonucleotide
  Antisense strand to SEQ ID NO: 671832
uucagcagaccucaguauc

SEQ ID NO: 671834 - RNA, 19 nt, Artificial Sequence
  Description of Artificial Sequence: Synthetic oligonucleotide
  Sense strand starting at position 2999 of SEQ ID NO: 585840
ccagauuaccuucgacagu

SEQ ID NO: 671835 - RNA, 19 nt, Artificial Sequence
  Description of Artificial Sequence: Synthetic oligonucleotide
  Antisense strand to SEQ ID NO: 671834
acugucgaagguaaucugg

SEQ ID NO: 671836 - RNA, 19 nt, Artificial Sequence
  Description of Artificial Sequence: Synthetic oligonucleotide
  Sense strand starting at position 3002 of SEQ ID NO: 585840
gauuaccuucgacaguaau

SEQ ID NO: 671837 - RNA, 19 nt, Artificial Sequence
  Description of Artificial Sequence: Synthetic oligonucleotide
  Antisense strand to SEQ ID NO: 671836
auuacugucgaagguaauc

SEQ ID NO: 671838 - RNA, 19 nt, Artificial Sequence
  Description of Artificial Sequence: Synthetic oligonucleotide
  Sense strand starting at position 3016 of SEQ ID NO: 585840
guaaucauuugcgugcaua

SEQ ID NO: 671839 - RNA, 19 nt, Artificial Sequence
  Description of Artificial Sequence: Synthetic oligonucleotide
  Antisense strand to SEQ ID NO: 671838
uaugcacgcaaaugauuac

SEQ ID NO: 671840 - RNA, 19 nt, Artificial Sequence
  Description of Artificial Sequence: Synthetic oligonucleotide
  Sense strand starting at position 3017 of SEQ ID NO: 585840
uaaucauuugcgugcauaa

SEQ ID NO: 671841 - RNA, 19 nt, Artificial Sequence
  Description of Artificial Sequence: Synthetic oligonucleotide
  Antisense strand to SEQ ID NO: 671840
uuaugcacgcaaaugauua

SEQ ID NO: 671842 - RNA, 19 nt, Artificial Sequence
  Description of Artificial Sequence: Synthetic oligonucleotide
  Sense strand starting at position 3105 of SEQ ID NO: 585840
guaugucaaguguauauuc

SEQ ID NO: 671843 - RNA, 19 nt, Artificial Sequence
  Description of Artificial Sequence: Synthetic oligonucleotide
  Antisense strand to SEQ ID NO: 671842
gaauauacacuugacauac

SEQ ID NO: 671844 - RNA, 19 nt, Artificial Sequence
  Description of Artificial Sequence: Synthetic oligonucleotide
  Sense strand starting at position 3107 of SEQ ID NO: 585840
augucaaguguauauucga

SEQ ID NO: 671845 - RNA, 19 nt, Artificial Sequence
  Description of Artificial Sequence: Synthetic oligonucleotide
  Antisense strand to SEQ ID NO: 671844
ucgaauauacacuugacau

SEQ ID NO: 671846 - RNA, 19 nt, Artificial Sequence
  Description of Artificial Sequence: Synthetic oligonucleotide
  Sense strand starting at position 3110 of SEQ ID NO: 585840
ucaaguguauauucgaaua

SEQ ID NO: 671847 - RNA, 19 nt, Artificial Sequence
  Description of Artificial Sequence: Synthetic oligonucleotide
  Antisense strand to SEQ ID NO: 671846
uauucgaauauacacuuga

SEQ ID NO: 671848 - RNA, 19 nt, Artificial Sequence
  Description of Artificial Sequence: Synthetic oligonucleotide
  Sense strand starting at position 3115 of SEQ ID NO: 585840
uguauauucgaauaguaag

SEQ ID NO: 671849 - RNA, 19 nt, Artificial Sequence
  Description of Artificial Sequence: Synthetic oligonucleotide
  Antisense strand to SEQ ID NO: 671848
cuuacuauucgaauauaca

SEQ ID NO: 671850 - RNA, 19 nt, Artificial Sequence
  Description of Artificial Sequence: Synthetic oligonucleotide
  Sense strand starting at position 3122 of SEQ ID NO: 585840
ucgaauaguaagcaggaau

SEQ ID NO: 671851 - RNA, 19 nt, Artificial Sequence
  Description of Artificial Sequence: Synthetic oligonucleotide
  Antisense strand to SEQ ID NO: 671850
auuccugcuuacuauucga

SEQ ID NO: 671852 - RNA, 19 nt, Artificial Sequence
  Description of Artificial Sequence: Synthetic oligonucleotide
  Sense strand starting at position 3151 of SEQ ID NO: 585840
ggauguggaguugguuaau

SEQ ID NO: 671853 - RNA, 19 nt, Artificial Sequence
  Description of Artificial Sequence: Synthetic oligonucleotide
  Antisense strand to SEQ ID NO: 671852
auuaaccaacuccacaucc

SEQ ID NO: 671854 - RNA, 19 nt, Artificial Sequence
  Description of Artificial Sequence: Synthetic oligonucleotide
  Sense strand starting at position 3228 of SEQ ID NO: 585840
cucacaguagcaugaagau

SEQ ID NO: 671855 - RNA, 19 nt, Artificial Sequence
  Description of Artificial Sequence: Synthetic oligonucleotide
  Antisense strand to SEQ ID NO: 671854
aucuucaugcuacugugag

SEQ ID NO: 671856 - RNA, 19 nt, Artificial Sequence
  Description of Artificial Sequence: Synthetic oligonucleotide
  Sense strand starting at position 3260 of SEQ ID NO: 585840
gugagcuuuccuggcauuu

SEQ ID NO: 671857 - RNA, 19 nt, Artificial Sequence
  Description of Artificial Sequence: Synthetic oligonucleotide
  Antisense strand to SEQ ID NO: 671856
aaaugccaggaaagcucac

SEQ ID NO: 671858 - RNA, 19 nt, Artificial Sequence
  Description of Artificial Sequence: Synthetic oligonucleotide
  Sense strand starting at position 3307 of SEQ ID NO: 585840
cggccuugaagccauauau

SEQ ID NO: 671859 - RNA, 19 nt, Artificial Sequence
  Description of Artificial Sequence: Synthetic oligonucleotide
  Antisense strand to SEQ ID NO: 671858
auauauggcuucaaggccg

SEQ ID NO: 671860 - RNA, 19 nt, Artificial Sequence
  Description of Artificial Sequence: Synthetic oligonucleotide
  Sense strand starting at position 3317 of SEQ ID NO: 585840
gccauauaucgauaccuau

SEQ ID NO: 671861 - RNA, 19 nt, Artificial Sequence
  Description of Artificial Sequence: Synthetic oligonucleotide
  Antisense strand to SEQ ID NO: 671860
auagguaucgauauauggc

SEQ ID NO: 671862 - RNA, 19 nt, Artificial Sequence
  Description of Artificial Sequence: Synthetic oligonucleotide
  Sense strand starting at position 3460 of SEQ ID NO: 585840
acagcuuaagagcacuauu

SEQ ID NO: 671863 - RNA, 19 nt, Artificial Sequence
  Description of Artificial Sequence: Synthetic oligonucleotide
  Antisense strand to SEQ ID NO: 671862
aauagugcucuuaagcugu

SEQ ID NO: 671864 - RNA, 19 nt, Artificial Sequence
  Description of Artificial Sequence: Synthetic oligonucleotide
  Sense strand starting at position 3463 of SEQ ID NO: 585840
gcuuaagagcacuauuguc

SEQ ID NO: 671865 - RNA, 19 nt, Artificial Sequence
  Description of Artificial Sequence: Synthetic oligonucleotide
  Antisense strand to SEQ ID NO: 671864
gacaauagugcucuuaagc

SEQ ID NO: 671866 - RNA, 19 nt, Artificial Sequence
  Description of Artificial Sequence: Synthetic oligonucleotide
  Sense strand starting at position 3469 of SEQ ID NO: 585840
gagcacuauugucucaagu

SEQ ID NO: 671867 - RNA, 19 nt, Artificial Sequence
  Description of Artificial Sequence: Synthetic oligonucleotide
  Antisense strand to SEQ ID NO: 671866
acuugagacaauagugcuc

SEQ ID NO: 671868 - RNA, 19 nt, Artificial Sequence
  Description of Artificial Sequence: Synthetic oligonucleotide
  Sense strand starting at position 3486 of SEQ ID NO: 585840
guacuagucuuaccauauu

SEQ ID NO: 671869 - RNA, 19 nt, Artificial Sequence
  Description of Artificial Sequence: Synthetic oligonucleotide
  Antisense strand to SEQ ID NO: 671868
aauaugguaagacuaguac

SEQ ID NO: 671870 - RNA, 19 nt, Artificial Sequence
  Description of Artificial Sequence: Synthetic oligonucleotide
  Sense strand starting at position 3495 of SEQ ID NO: 585840
uuaccauauuuacaaggga

SEQ ID NO: 671871 - RNA, 19 nt, Artificial Sequence
  Description of Artificial Sequence: Synthetic oligonucleotide
  Antisense strand to SEQ ID NO: 671870
ucccuuguaaauaugguaa

SEQ ID NO: 671872 - RNA, 19 nt, Artificial Sequence
  Description of Artificial Sequence: Synthetic oligonucleotide
  Sense strand starting at position 3907 of SEQ ID NO: 585840
cggugaugaugauuauaca

SEQ ID NO: 671873 - RNA, 19 nt, Artificial Sequence
  Description of Artificial Sequence: Synthetic oligonucleotide
  Antisense strand to SEQ ID NO: 671872
uguauaaucaucaucaccg

SEQ ID NO: 671874 - RNA, 19 nt, Artificial Sequence
  Description of Artificial Sequence: Synthetic oligonucleotide
  Sense strand starting at position 204 of SEQ ID NO: 585841
acaauaagcucugugagga

SEQ ID NO: 671875 - RNA, 19 nt, Artificial Sequence
  Description of Artificial Sequence: Synthetic oligonucleotide
  Antisense strand to SEQ ID NO: 671874
uccucacagagcuuauugu

SEQ ID NO: 671876 - RNA, 19 nt, Artificial Sequence
  Description of Artificial Sequence: Synthetic oligonucleotide
  Sense strand starting at position 205 of SEQ ID NO: 585841
caauaagcucugugaggac

SEQ ID NO: 671877 - RNA, 19 nt, Artificial Sequence
  Description of Artificial Sequence: Synthetic oligonucleotide
  Antisense strand to SEQ ID NO: 671876
guccucacagagcuuauug

SEQ ID NO: 671878 - RNA, 19 nt, Artificial Sequence
  Description of Artificial Sequence: Synthetic oligonucleotide
  Sense strand starting at position 267 of SEQ ID NO: 585841
aggacuagcucugugagga

SEQ ID NO: 671879 - RNA, 19 nt, Artificial Sequence
  Description of Artificial Sequence: Synthetic oligonucleotide
  Antisense strand to SEQ ID NO: 671878
uccucacagagcuaguccu

SEQ ID NO: 671880 - RNA, 19 nt, Artificial Sequence
  Description of Artificial Sequence: Synthetic oligonucleotide
  Sense strand starting at position 268 of SEQ ID NO: 585841
ggacuagcucugugaggac

SEQ ID NO: 671881 - RNA, 19 nt, Artificial Sequence
  Description of Artificial Sequence: Synthetic oligonucleotide
  Antisense strand to SEQ ID NO: 671880
guccucacagagcuagucc

SEQ ID NO: 671882 - RNA, 19 nt, Artificial Sequence
  Description of Artificial Sequence: Synthetic oligonucleotide
  Sense strand starting at position 362 of SEQ ID NO: 585841
cggaaauccuaacugccau

SEQ ID NO: 671883 - RNA, 19 nt, Artificial Sequence
  Description of Artificial Sequence: Synthetic oligonucleotide
  Antisense strand to SEQ ID NO: 671882
auggcaguuaggauuuccg

SEQ ID NO: 671884 - RNA, 19 nt, Artificial Sequence
  Description of Artificial Sequence: Synthetic oligonucleotide
  Sense strand starting at position 388 of SEQ ID NO: 585841
caguguauccuucgacaaa

SEQ ID NO: 671885 - RNA, 19 nt, Artificial Sequence
  Description of Artificial Sequence: Synthetic oligonucleotide
  Antisense strand to SEQ ID NO: 671884
uuugucgaaggauacacug

SEQ ID NO: 671886 - RNA, 19 nt, Artificial Sequence
  Description of Artificial Sequence: Synthetic oligonucleotide
  Sense strand starting at position 391 of SEQ ID NO: 585841
uguauccuucgacaaauua

SEQ ID NO: 671887 - RNA, 19 nt, Artificial Sequence
  Description of Artificial Sequence: Synthetic oligonucleotide
  Antisense strand to SEQ ID NO: 671886
uaauuugucgaaggauaca

SEQ ID NO: 671888 - RNA, 19 nt, Artificial Sequence
  Description of Artificial Sequence: Synthetic oligonucleotide
  Sense strand starting at position 488 of SEQ ID NO: 585841
gaaguaauguaaguggcaa

SEQ ID NO: 671889 - RNA, 19 nt, Artificial Sequence
  Description of Artificial Sequence: Synthetic oligonucleotide
  Antisense strand to SEQ ID NO: 671888
uugccacuuacauuacuuc

SEQ ID NO: 671890 - RNA, 19 nt, Artificial Sequence
  Description of Artificial Sequence: Synthetic oligonucleotide
  Sense strand starting at position 547 of SEQ ID NO: 585841
uaccgcaaugcugaguaaa

SEQ ID NO: 671891 - RNA, 19 nt, Artificial Sequence
  Description of Artificial Sequence: Synthetic oligonucleotide
  Antisense strand to SEQ ID NO: 671890
uuuacucagcauugcggua

SEQ ID NO: 671892 - RNA, 19 nt, Artificial Sequence
  Description of Artificial Sequence: Synthetic oligonucleotide
  Sense strand starting at position 550 of SEQ ID NO: 585841
cgcaaugcugaguaaacaa

SEQ ID NO: 671893 - RNA, 19 nt, Artificial Sequence
  Description of Artificial Sequence: Synthetic oligonucleotide
  Antisense strand to SEQ ID NO: 671892
uuguuuacucagcauugcg

SEQ ID NO: 671894 - RNA, 19 nt, Artificial Sequence
  Description of Artificial Sequence: Synthetic oligonucleotide
  Sense strand starting at position 711 of SEQ ID NO: 585841
uuuaaaugccucugaggaa

SEQ ID NO: 671895 - RNA, 19 nt, Artificial Sequence
  Description of Artificial Sequence: Synthetic oligonucleotide
  Antisense strand to SEQ ID NO: 671894
uuccucagaggcauuuaaa

SEQ ID NO: 671896 - RNA, 19 nt, Artificial Sequence
  Description of Artificial Sequence: Synthetic oligonucleotide
  Sense strand starting at position 730 of SEQ ID NO: 585841
ucagucauguaacuuaaac

SEQ ID NO: 671897 - RNA, 19 nt, Artificial Sequence
  Description of Artificial Sequence: Synthetic oligonucleotide
  Antisense strand to SEQ ID NO: 671896
guuuaaguuacaugacuga

SEQ ID NO: 671898 - RNA, 19 nt, Artificial Sequence
  Description of Artificial Sequence: Synthetic oligonucleotide
  Sense strand starting at position 758 of SEQ ID NO: 585841
auuaucacagcaugguaaa

SEQ ID NO: 671899 - RNA, 19 nt, Artificial Sequence
  Description of Artificial Sequence: Synthetic oligonucleotide
  Antisense strand to SEQ ID NO: 671898
uuuaccaugcugugauaau

SEQ ID NO: 671900 - RNA, 19 nt, Artificial Sequence
  Description of Artificial Sequence: Synthetic oligonucleotide
  Sense strand starting at position 919 of SEQ ID NO: 585841
uucuaauguccacaggagu

SEQ ID NO: 671901 - RNA, 19 nt, Artificial Sequence
  Description of Artificial Sequence: Synthetic oligonucleotide
  Antisense strand to SEQ ID NO: 671900
acuccuguggacauuagaa

SEQ ID NO: 671902 - RNA, 19 nt, Artificial Sequence
  Description of Artificial Sequence: Synthetic oligonucleotide
  Sense strand starting at position 1083 of SEQ ID NO: 585841
ccguaugacagaugacaau

SEQ ID NO: 671903 - RNA, 19 nt, Artificial Sequence
  Description of Artificial Sequence: Synthetic oligonucleotide
  Antisense strand to SEQ ID NO: 671902
auugucaucugucauacgg

SEQ ID NO: 671904 - RNA, 19 nt, Artificial Sequence
  Description of Artificial Sequence: Synthetic oligonucleotide
  Sense strand starting at position 1716 of SEQ ID NO: 585841
ggaucucccuucuuccaga

SEQ ID NO: 671905 - RNA, 19 nt, Artificial Sequence
  Description of Artificial Sequence: Synthetic oligonucleotide
  Antisense strand to SEQ ID NO: 671904
ucuggaagaagggagaucc

SEQ ID NO: 671906 - RNA, 19 nt, Artificial Sequence
  Description of Artificial Sequence: Synthetic oligonucleotide
  Sense strand starting at position 2132 of SEQ ID NO: 585841
cuggccuuuccagaaagau

SEQ ID NO: 671907 - RNA, 19 nt, Artificial Sequence
  Description of Artificial Sequence: Synthetic oligonucleotide
  Antisense strand to SEQ ID NO: 671906
aucuuucuggaaaggccag

SEQ ID NO: 671908 - RNA, 19 nt, Artificial Sequence
  Description of Artificial Sequence: Synthetic oligonucleotide
  Sense strand starting at position 2180 of SEQ ID NO: 585841
acggcuuauagcuacagaa

SEQ ID NO: 671909 - RNA, 19 nt, Artificial Sequence
  Description of Artificial Sequence: Synthetic oligonucleotide
  Antisense strand to SEQ ID NO: 671908
uucuguagcuauaagccgu

SEQ ID NO: 671910 - RNA, 19 nt, Artificial Sequence
  Description of Artificial Sequence: Synthetic oligonucleotide
  Sense strand starting at position 2270 of SEQ ID NO: 585841
ugauuucucuccgucucuu

SEQ ID NO: 671911 - RNA, 19 nt, Artificial Sequence
  Description of Artificial Sequence: Synthetic oligonucleotide
  Antisense strand to SEQ ID NO: 671910
aagagacggagagaaauca

SEQ ID NO: 671912 - RNA, 19 nt, Artificial Sequence
  Description of Artificial Sequence: Synthetic oligonucleotide
  Sense strand starting at position 2320 of SEQ ID NO: 585841
uuugcugaauucuuugaaa

SEQ ID NO: 671913 - RNA, 19 nt, Artificial Sequence
  Description of Artificial Sequence: Synthetic oligonucleotide
  Antisense strand to SEQ ID NO: 671912
uuucaaagaauucagcaaa

SEQ ID NO: 671914 - RNA, 19 nt, Artificial Sequence
  Description of Artificial Sequence: Synthetic oligonucleotide
  Sense strand starting at position 2322 of SEQ ID NO: 585841
ugcugaauucuuugaaagu

SEQ ID NO: 671915 - RNA, 19 nt, Artificial Sequence
  Description of Artificial Sequence: Synthetic oligonucleotide
  Antisense strand to SEQ ID NO: 671914
acuuucaaagaauucagca

SEQ ID NO: 671916 - RNA, 19 nt, Artificial Sequence
  Description of Artificial Sequence: Synthetic oligonucleotide
  Sense strand starting at position 2406 of SEQ ID NO: 585841
guguaaccgcaauacauga

SEQ ID NO: 671917 - RNA, 19 nt, Artificial Sequence
  Description of Artificial Sequence: Synthetic oligonucleotide
  Antisense strand to SEQ ID NO: 671916
ucauguauugcgguuacac

SEQ ID NO: 671918 - RNA, 19 nt, Artificial Sequence
  Description of Artificial Sequence: Synthetic oligonucleotide
  Sense strand starting at position 2613 of SEQ ID NO: 585841
acauguugugaugagccua

SEQ ID NO: 671919 - RNA, 19 nt, Artificial Sequence
  Description of Artificial Sequence: Synthetic oligonucleotide
  Antisense strand to SEQ ID NO: 671918
uaggcucaucacaacaugu

SEQ ID NO: 671920 - RNA, 19 nt, Artificial Sequence
  Description of Artificial Sequence: Synthetic oligonucleotide
  Sense strand starting at position 2750 of SEQ ID NO: 585841
ggacgcauaacucaguuau

SEQ ID NO: 671921 - RNA, 19 nt, Artificial Sequence
  Description of Artificial Sequence: Synthetic oligonucleotide
  Antisense strand to SEQ ID NO: 671920
auaacugaguuaugcgucc

SEQ ID NO: 671922 - RNA, 19 nt, Artificial Sequence
  Description of Artificial Sequence: Synthetic oligonucleotide
  Sense strand starting at position 2752 of SEQ ID NO: 585841
acgcauaacucaguuauau

SEQ ID NO: 671923 - RNA, 19 nt, Artificial Sequence
  Description of Artificial Sequence: Synthetic oligonucleotide
  Antisense strand to SEQ ID NO: 671922
auauaacugaguuaugcgu

SEQ ID NO: 671924 - RNA, 19 nt, Artificial Sequence
  Description of Artificial Sequence: Synthetic oligonucleotide
  Sense strand starting at position 2851 of SEQ ID NO: 585841
ugguaagcaaucuguggau

SEQ ID NO: 671925 - RNA, 19 nt, Artificial Sequence
  Description of Artificial Sequence: Synthetic oligonucleotide
  Antisense strand to SEQ ID NO: 671924
auccacagauugcuuacca

SEQ ID NO: 671926 - RNA, 19 nt, Artificial Sequence
  Description of Artificial Sequence: Synthetic oligonucleotide
  Sense strand starting at position 2853 of SEQ ID NO: 585841
guaagcaaucuguggauua

SEQ ID NO: 671927 - RNA, 19 nt, Artificial Sequence
  Description of Artificial Sequence: Synthetic oligonucleotide
  Antisense strand to SEQ ID NO: 671926
uaauccacagauugcuuac

SEQ ID NO: 671928 - RNA, 19 nt, Artificial Sequence
  Description of Artificial Sequence: Synthetic oligonucleotide
  Sense strand starting at position 2855 of SEQ ID NO: 585841
aagcaaucuguggauuaua

SEQ ID NO: 671929 - RNA, 19 nt, Artificial Sequence
  Description of Artificial Sequence: Synthetic oligonucleotide
  Antisense strand to SEQ ID NO: 671928
uauaauccacagauugcuu

SEQ ID NO: 671930 - RNA, 19 nt, Artificial Sequence
  Description of Artificial Sequence: Synthetic oligonucleotide
  Sense strand starting at position 2863 of SEQ ID NO: 585841
uguggauuauaccuugagu

SEQ ID NO: 671931 - RNA, 19 nt, Artificial Sequence
  Description of Artificial Sequence: Synthetic oligonucleotide
  Antisense strand to SEQ ID NO: 671930
acucaagguauaauccaca

SEQ ID NO: 671932 - RNA, 19 nt, Artificial Sequence
  Description of Artificial Sequence: Synthetic oligonucleotide
  Sense strand starting at position 2868 of SEQ ID NO: 585841
auuauaccuugaguccaua

SEQ ID NO: 671933 - RNA, 19 nt, Artificial Sequence
  Description of Artificial Sequence: Synthetic oligonucleotide
  Antisense strand to SEQ ID NO: 671932
uauggacucaagguauaau

SEQ ID NO: 671934 - RNA, 19 nt, Artificial Sequence
  Description of Artificial Sequence: Synthetic oligonucleotide
  Sense strand starting at position 2926 of SEQ ID NO: 585841
cugaaucuguuguuacauu

SEQ ID NO: 671935 - RNA, 19 nt, Artificial Sequence
  Description of Artificial Sequence: Synthetic oligonucleotide
  Antisense strand to SEQ ID NO: 671934
aauguaacaacagauucag

SEQ ID NO: 671936 - RNA, 19 nt, Artificial Sequence
  Description of Artificial Sequence: Synthetic oligonucleotide
  Sense strand starting at position 2952 of SEQ ID NO: 585841
auaagugauuccgcaauag

SEQ ID NO: 671937 - RNA, 19 nt, Artificial Sequence
  Description of Artificial Sequence: Synthetic oligonucleotide
  Antisense strand to SEQ ID NO: 671936
cuauugcggaaucacuuau

SEQ ID NO: 671938 - RNA, 19 nt, Artificial Sequence
  Description of Artificial Sequence: Synthetic oligonucleotide
  Sense strand starting at position 3191 of SEQ ID NO: 585841
cccuauuaguccuugaaug

SEQ ID NO: 671939 - RNA, 19 nt, Artificial Sequence
  Description of Artificial Sequence: Synthetic oligonucleotide
  Antisense strand to SEQ ID NO: 671938
cauucaaggacuaauaggg

SEQ ID NO: 671940 - RNA, 19 nt, Artificial Sequence
  Description of Artificial Sequence: Synthetic oligonucleotide
  Sense strand starting at position 3193 of SEQ ID NO: 585841
cuauuaguccuugaaugcu

SEQ ID NO: 671941 - RNA, 19 nt, Artificial Sequence
  Description of Artificial Sequence: Synthetic oligonucleotide
  Antisense strand to SEQ ID NO: 671940
agcauucaaggacuaauag

SEQ ID NO: 671942 - RNA, 19 nt, Artificial Sequence
  Description of Artificial Sequence: Synthetic oligonucleotide
  Sense strand starting at position 3380 of SEQ ID NO: 585841
uuuguuuacccaugugaag

SEQ ID NO: 671943 - RNA, 19 nt, Artificial Sequence
  Description of Artificial Sequence: Synthetic oligonucleotide
  Antisense strand to SEQ ID NO: 671942
cuucacauggguaaacaaa

SEQ ID NO: 671944 - RNA, 19 nt, Artificial Sequence
  Description of Artificial Sequence: Synthetic oligonucleotide
  Sense strand starting at position 3382 of SEQ ID NO: 585841
uguuuacccaugugaagga

SEQ ID NO: 671945 - RNA, 19 nt, Artificial Sequence
  Description of Artificial Sequence: Synthetic oligonucleotide
  Antisense strand to SEQ ID NO: 671944
uccuucacauggguaaaca

SEQ ID NO: 671946 - RNA, 19 nt, Artificial Sequence
  Description of Artificial Sequence: Synthetic oligonucleotide
  Sense strand starting at position 3521 of SEQ ID NO: 585841
gcugguaagagaggaguau

SEQ ID NO: 671947 - RNA, 19 nt, Artificial Sequence
  Description of Artificial Sequence: Synthetic oligonucleotide
  Antisense strand to SEQ ID NO: 671946
auacuccucucuuaccagc

SEQ ID NO: 671948 - RNA, 19 nt, Artificial Sequence
  Description of Artificial Sequence: Synthetic oligonucleotide
  Sense strand starting at position 3533 of SEQ ID NO: 585841
ggaguaugaaguuaaugua

SEQ ID NO: 671949 - RNA, 19 nt, Artificial Sequence
  Description of Artificial Sequence: Synthetic oligonucleotide
  Antisense strand to SEQ ID NO: 671948
uacauuaacuucauacucc

SEQ ID NO: 671950 - RNA, 19 nt, Artificial Sequence
  Description of Artificial Sequence: Synthetic oligonucleotide
  Sense strand starting at position 3553 of SEQ ID NO: 585841
ucauacucugccuacagua

SEQ ID NO: 671951 - RNA, 19 nt, Artificial Sequence
  Description of Artificial Sequence: Synthetic oligonucleotide
  Antisense strand to SEQ ID NO: 671950
uacuguaggcagaguauga

SEQ ID NO: 671952 - RNA, 19 nt, Artificial Sequence
  Description of Artificial Sequence: Synthetic oligonucleotide
  Sense strand starting at position 3929 of SEQ ID NO: 585841
gagacuauuucugauguga

SEQ ID NO: 671953 - RNA, 19 nt, Artificial Sequence
  Description of Artificial Sequence: Synthetic oligonucleotide
  Antisense strand to SEQ ID NO: 671952
ucacaucagaaauagucuc

SEQ ID NO: 671954 - RNA, 19 nt, Artificial Sequence
  Description of Artificial Sequence: Synthetic oligonucleotide
  Sense strand starting at position 2 of SEQ ID NO: 585842
ggugguucugauuagauug

SEQ ID NO: 671955 - RNA, 19 nt, Artificial Sequence
  Description of Artificial Sequence: Synthetic oligonucleotide
  Antisense strand to SEQ ID NO: 671954
caaucuaaucagaaccacc

SEQ ID NO: 671956 - RNA, 19 nt, Artificial Sequence
  Description of Artificial Sequence: Synthetic oligonucleotide
  Sense strand starting at position 7 of SEQ ID NO: 585842
uucugauuagauugugaca

SEQ ID NO: 671957 - RNA, 19 nt, Artificial Sequence
  Description of Artificial Sequence: Synthetic oligonucleotide
  Antisense strand to SEQ ID NO: 671956
ugucacaaucuaaucagaa

SEQ ID NO: 671958 - RNA, 19 nt, Artificial Sequence
  Description of Artificial Sequence: Synthetic oligonucleotide
  Sense strand starting at position 10 of SEQ ID NO: 585842
ugauuagauugugacauua

SEQ ID NO: 671959 - RNA, 19 nt, Artificial Sequence
  Description of Artificial Sequence: Synthetic oligonucleotide
  Antisense strand to SEQ ID NO: 671958
uaaugucacaaucuaauca

SEQ ID NO: 671960 - RNA, 19 nt, Artificial Sequence
  Description of Artificial Sequence: Synthetic oligonucleotide
  Sense strand starting at position 18 of SEQ ID NO: 585842
uugugacauuaauuaacgu

SEQ ID NO: 671961 - RNA, 19 nt, Artificial Sequence
  Description of Artificial Sequence: Synthetic oligonucleotide
  Antisense strand to SEQ ID NO: 671960
acguuaauuaaugucacaa

SEQ ID NO: 671962 - RNA, 19 nt, Artificial Sequence
  Description of Artificial Sequence: Synthetic oligonucleotide
  Sense strand starting at position 805 of SEQ ID NO: 585842
guuauuauuugacaagcag

SEQ ID NO: 671963 - RNA, 19 nt, Artificial Sequence
  Description of Artificial Sequence: Synthetic oligonucleotide
  Antisense strand to SEQ ID NO: 671962
cugcuugucaaauaauaac

SEQ ID NO: 671964 - RNA, 19 nt, Artificial Sequence
  Description of Artificial Sequence: Synthetic oligonucleotide
  Sense strand starting at position 945 of SEQ ID NO: 585842
augccugacuuguuaagca

SEQ ID NO: 671965 - RNA, 19 nt, Artificial Sequence
  Description of Artificial Sequence: Synthetic oligonucleotide
  Antisense strand to SEQ ID NO: 671964
ugcuuaacaagucaggcau

SEQ ID NO: 671966 - RNA, 19 nt, Artificial Sequence
  Description of Artificial Sequence: Synthetic oligonucleotide
  Sense strand starting at position 1243 of SEQ ID NO: 585842
agcgcuguucauggaagau

SEQ ID NO: 671967 - RNA, 19 nt, Artificial Sequence
  Description of Artificial Sequence: Synthetic oligonucleotide
  Antisense strand to SEQ ID NO: 671966
aucuuccaugaacagcgcu

SEQ ID NO: 671968 - RNA, 19 nt, Artificial Sequence
  Description of Artificial Sequence: Synthetic oligonucleotide
  Sense strand starting at position 1315 of SEQ ID NO: 585842
gcaucaaagcgucgacaca

SEQ ID NO: 671969 - RNA, 19 nt, Artificial Sequence
  Description of Artificial Sequence: Synthetic oligonucleotide
  Antisense strand to SEQ ID NO: 671968
ugugucgacgcuuugaugc

SEQ ID NO: 671970 - RNA, 19 nt, Artificial Sequence
  Description of Artificial Sequence: Synthetic oligonucleotide
  Sense strand starting at position 1354 of SEQ ID NO: 585842
ugccuuaagcgggauccau

SEQ ID NO: 671971 - RNA, 19 nt, Artificial Sequence
  Description of Artificial Sequence: Synthetic oligonucleotide
  Antisense strand to SEQ ID NO: 671970
auggaucccgcuuaaggca

SEQ ID NO: 671972 - RNA, 19 nt, Artificial Sequence
  Description of Artificial Sequence: Synthetic oligonucleotide
  Sense strand starting at position 1440 of SEQ ID NO: 585842
cucccaucccucgagguuu

SEQ ID NO: 671973 - RNA, 19 nt, Artificial Sequence
  Description of Artificial Sequence: Synthetic oligonucleotide
  Antisense strand to SEQ ID NO: 671972
aaaccucgagggaugggag

SEQ ID NO: 671974 - RNA, 19 nt, Artificial Sequence
  Description of Artificial Sequence: Synthetic oligonucleotide
  Sense strand starting at position 2066 of SEQ ID NO: 585842
cgaaacucuugucucuaca

SEQ ID NO: 671975 - RNA, 19 nt, Artificial Sequence
  Description of Artificial Sequence: Synthetic oligonucleotide
  Antisense strand to SEQ ID NO: 671974
uguagagacaagaguuucg

SEQ ID NO: 671976 - RNA, 19 nt, Artificial Sequence
  Description of Artificial Sequence: Synthetic oligonucleotide
  Sense strand starting at position 2482 of SEQ ID NO: 585842
ccaggaggucguggcuaua

SEQ ID NO: 671977 - RNA, 19 nt, Artificial Sequence
  Description of Artificial Sequence: Synthetic oligonucleotide
  Antisense strand to SEQ ID NO: 671976
uauagccacgaccuccugg

SEQ ID NO: 671978 - RNA, 19 nt, Artificial Sequence
  Description of Artificial Sequence: Synthetic oligonucleotide
  Sense strand starting at position 2484 of SEQ ID NO: 585842
aggaggucguggcuauagu

SEQ ID NO: 671979 - RNA, 19 nt, Artificial Sequence
  Description of Artificial Sequence: Synthetic oligonucleotide
  Antisense strand to SEQ ID NO: 671978
acuauagccacgaccuccu

SEQ ID NO: 671980 - RNA, 19 nt, Artificial Sequence
  Description of Artificial Sequence: Synthetic oligonucleotide
  Sense strand starting at position 2493 of SEQ ID NO: 585842
uggcuauagugagucguga

SEQ ID NO: 671981 - RNA, 19 nt, Artificial Sequence
  Description of Artificial Sequence: Synthetic oligonucleotide
  Antisense strand to SEQ ID NO: 671980
ucacgacucacuauagcca

SEQ ID NO: 671982 - RNA, 19 nt, Artificial Sequence
  Description of Artificial Sequence: Synthetic oligonucleotide
  Sense strand starting at position 2573 of SEQ ID NO: 585842
uauuuauaguaguggguua

SEQ ID NO: 671983 - RNA, 19 nt, Artificial Sequence
  Description of Artificial Sequence: Synthetic oligonucleotide
  Antisense strand to SEQ ID NO: 671982
uaacccacuacuauaaaua

SEQ ID NO: 671984 - RNA, 19 nt, Artificial Sequence
  Description of Artificial Sequence: Synthetic oligonucleotide
  Sense strand starting at position 2584 of SEQ ID NO: 585842
guggguuagguggagcaaa

SEQ ID NO: 671985 - RNA, 19 nt, Artificial Sequence
  Description of Artificial Sequence: Synthetic oligonucleotide
  Antisense strand to SEQ ID NO: 671984
uuugcuccaccuaacccac

SEQ ID NO: 671986 - RNA, 19 nt, Artificial Sequence
  Description of Artificial Sequence: Synthetic oligonucleotide
  Sense strand starting at position 2643 of SEQ ID NO: 585842
gagaaagguuaucucgucu

SEQ ID NO: 671987 - RNA, 19 nt, Artificial Sequence
  Description of Artificial Sequence: Synthetic oligonucleotide
  Antisense strand to SEQ ID NO: 671986
agacgagauaaccuuucuc

SEQ ID NO: 671988 - RNA, 19 nt, Artificial Sequence
  Description of Artificial Sequence: Synthetic oligonucleotide
  Sense strand starting at position 2986 of SEQ ID NO: 585842
gguaauaauuauuguagga

SEQ ID NO: 671989 - RNA, 19 nt, Artificial Sequence
  Description of Artificial Sequence: Synthetic oligonucleotide
  Antisense strand to SEQ ID NO: 671988
uccuacaauaauuauuacc

SEQ ID NO: 671990 - RNA, 19 nt, Artificial Sequence
  Description of Artificial Sequence: Synthetic oligonucleotide
  Sense strand starting at position 3013 of SEQ ID NO: 585842
agaauuacaugugaagauc

SEQ ID NO: 671991 - RNA, 19 nt, Artificial Sequence
  Description of Artificial Sequence: Synthetic oligonucleotide
  Antisense strand to SEQ ID NO: 671990
gaucuucacauguaauucu

SEQ ID NO: 671992 - RNA, 19 nt, Artificial Sequence
  Description of Artificial Sequence: Synthetic oligonucleotide
  Sense strand starting at position 3021 of SEQ ID NO: 585842
augugaagauccuuguaag

SEQ ID NO: 671993 - RNA, 19 nt, Artificial Sequence
  Description of Artificial Sequence: Synthetic oligonucleotide
  Antisense strand to SEQ ID NO: 671992
cuuacaaggaucuucacau

SEQ ID NO: 671994 - RNA, 19 nt, Artificial Sequence
  Description of Artificial Sequence: Synthetic oligonucleotide
  Sense strand starting at position 3022 of SEQ ID NO: 585842
ugugaagauccuuguaagu

SEQ ID NO: 671995 - RNA, 19 nt, Artificial Sequence
  Description of Artificial Sequence: Synthetic oligonucleotide
  Antisense strand to SEQ ID NO: 671994
acuuacaaggaucuucaca

SEQ ID NO: 671996 - RNA, 19 nt, Artificial Sequence
  Description of Artificial Sequence: Synthetic oligonucleotide
  Sense strand starting at position 3027 of SEQ ID NO: 585842
agauccuuguaaguguuua

SEQ ID NO: 671997 - RNA, 19 nt, Artificial Sequence
  Description of Artificial Sequence: Synthetic oligonucleotide
  Antisense strand to SEQ ID NO: 671996
uaaacacuuacaaggaucu

SEQ ID NO: 671998 - RNA, 19 nt, Artificial Sequence
  Description of Artificial Sequence: Synthetic oligonucleotide
  Sense strand starting at position 3031 of SEQ ID NO: 585842
ccuuguaaguguuuaauac

SEQ ID NO: 671999 - RNA, 19 nt, Artificial Sequence
  Description of Artificial Sequence: Synthetic oligonucleotide
  Antisense strand to SEQ ID NO: 671998
guauuaaacacuuacaagg

SEQ ID NO: 672000 - RNA, 19 nt, Artificial Sequence
  Description of Artificial Sequence: Synthetic oligonucleotide
  Sense strand starting at position 3076 of SEQ ID NO: 585842
agguaauuauuacauagga

SEQ ID NO: 672001 - RNA, 19 nt, Artificial Sequence
  Description of Artificial Sequence: Synthetic oligonucleotide
  Antisense strand to SEQ ID NO: 672000
uccuauguaauaauuaccu

SEQ ID NO: 672002 - RNA, 19 nt, Artificial Sequence
  Description of Artificial Sequence: Synthetic oligonucleotide
  Sense strand starting at position 3105 of SEQ ID NO: 585842
agaaguaacuuguccacag

SEQ ID NO: 672003 - RNA, 19 nt, Artificial Sequence
  Description of Artificial Sequence: Synthetic oligonucleotide
  Antisense strand to SEQ ID NO: 672002
cuguggacaaguuacuucu

SEQ ID NO: 672004 - RNA, 19 nt, Artificial Sequence
  Description of Artificial Sequence: Synthetic oligonucleotide
  Sense strand starting at position 3106 of SEQ ID NO: 585842
gaaguaacuuguccacaga

SEQ ID NO: 672005 - RNA, 19 nt, Artificial Sequence
  Description of Artificial Sequence: Synthetic oligonucleotide
  Antisense strand to SEQ ID NO: 672004
ucuguggacaaguuacuuc

SEQ ID NO: 672006 - RNA, 19 nt, Artificial Sequence
  Description of Artificial Sequence: Synthetic oligonucleotide
  Sense strand starting at position 3109 of SEQ ID NO: 585842
guaacuuguccacagauau

SEQ ID NO: 672007 - RNA, 19 nt, Artificial Sequence
  Description of Artificial Sequence: Synthetic oligonucleotide
  Antisense strand to SEQ ID NO: 672006
auaucuguggacaaguuac

SEQ ID NO: 672008 - RNA, 19 nt, Artificial Sequence
  Description of Artificial Sequence: Synthetic oligonucleotide
  Sense strand starting at position 3263 of SEQ ID NO: 585842
cccuauguucucugauggu

SEQ ID NO: 672009 - RNA, 19 nt, Artificial Sequence
  Description of Artificial Sequence: Synthetic oligonucleotide
  Antisense strand to SEQ ID NO: 672008
accaucagagaacauaggg

SEQ ID NO: 672010 - RNA, 19 nt, Artificial Sequence
  Description of Artificial Sequence: Synthetic oligonucleotide
  Sense strand starting at position 3267 of SEQ ID NO: 585842
auguucucugaugguagaa

SEQ ID NO: 672011 - RNA, 19 nt, Artificial Sequence
  Description of Artificial Sequence: Synthetic oligonucleotide
  Antisense strand to SEQ ID NO: 672010
uucuaccaucagagaacau

SEQ ID NO: 672012 - RNA, 19 nt, Artificial Sequence
  Description of Artificial Sequence: Synthetic oligonucleotide
  Sense strand starting at position 3311 of SEQ ID NO: 585842
gcuaguuuauuugaauguu

SEQ ID NO: 672013 - RNA, 19 nt, Artificial Sequence
  Description of Artificial Sequence: Synthetic oligonucleotide
  Antisense strand to SEQ ID NO: 672012
aacauucaaauaaacuagc

SEQ ID NO: 672014 - RNA, 19 nt, Artificial Sequence
  Description of Artificial Sequence: Synthetic oligonucleotide
  Sense strand starting at position 3336 of SEQ ID NO: 585842
gucauagguucuuuaaaug

SEQ ID NO: 672015 - RNA, 19 nt, Artificial Sequence
  Description of Artificial Sequence: Synthetic oligonucleotide
  Antisense strand to SEQ ID NO: 672014
cauuuaaagaaccuaugac

SEQ ID NO: 672016 - RNA, 19 nt, Artificial Sequence
  Description of Artificial Sequence: Synthetic oligonucleotide
  Sense strand starting at position 3441 of SEQ ID NO: 585842
agauuacuuccugguccua

SEQ ID NO: 672017 - RNA, 19 nt, Artificial Sequence
  Description of Artificial Sequence: Synthetic oligonucleotide
  Antisense strand to SEQ ID NO: 672016
uaggaccaggaaguaaucu

SEQ ID NO: 672018 - RNA, 19 nt, Artificial Sequence
  Description of Artificial Sequence: Synthetic oligonucleotide
  Sense strand starting at position 3492 of SEQ ID NO: 585842
accauaacaccgugguaaa

SEQ ID NO: 672019 - RNA, 19 nt, Artificial Sequence
  Description of Artificial Sequence: Synthetic oligonucleotide
  Antisense strand to SEQ ID NO: 672018
uuuaccacgguguuauggu

SEQ ID NO: 672020 - RNA, 19 nt, Artificial Sequence
  Description of Artificial Sequence: Synthetic oligonucleotide
  Sense strand starting at position 3493 of SEQ ID NO: 585842
ccauaacaccgugguaaau

SEQ ID NO: 672021 - RNA, 19 nt, Artificial Sequence
  Description of Artificial Sequence: Synthetic oligonucleotide
  Antisense strand to SEQ ID NO: 672020
auuuaccacgguguuaugg

SEQ ID NO: 672022 - RNA, 19 nt, Artificial Sequence
  Description of Artificial Sequence: Synthetic oligonucleotide
  Sense strand starting at position 3505 of SEQ ID NO: 585842
gguaaaucuuaacauaaug

SEQ ID NO: 672023 - RNA, 19 nt, Artificial Sequence
  Description of Artificial Sequence: Synthetic oligonucleotide
  Antisense strand to SEQ ID NO: 672022
cauuauguuaagauuuacc

SEQ ID NO: 672024 - RNA, 19 nt, Artificial Sequence
  Description of Artificial Sequence: Synthetic oligonucleotide
  Sense strand starting at position 3560 of SEQ ID NO: 585842
ugacaauauuaaguagcua

SEQ ID NO: 672025 - RNA, 19 nt, Artificial Sequence
  Description of Artificial Sequence: Synthetic oligonucleotide
  Antisense strand to SEQ ID NO: 672024
uagcuacuuaauauuguca

SEQ ID NO: 672026 - RNA, 19 nt, Artificial Sequence
  Description of Artificial Sequence: Synthetic oligonucleotide
  Sense strand starting at position 3838 of SEQ ID NO: 585842
gggauuacauguguuaguu

SEQ ID NO: 672027 - RNA, 19 nt, Artificial Sequence
  Description of Artificial Sequence: Synthetic oligonucleotide
  Antisense strand to SEQ ID NO: 672026
aacuaacacauguaauccc

SEQ ID NO: 672028 - RNA, 19 nt, Artificial Sequence
  Description of Artificial Sequence: Synthetic oligonucleotide
  Sense strand starting at position 3846 of SEQ ID NO: 585842
auguguuaguuagccucua

SEQ ID NO: 672029 - RNA, 19 nt, Artificial Sequence
  Description of Artificial Sequence: Synthetic oligonucleotide
  Antisense strand to SEQ ID NO: 672028
uagaggcuaacuaacacau

SEQ ID NO: 672030 - RNA, 19 nt, Artificial Sequence
  Description of Artificial Sequence: Synthetic oligonucleotide
  Sense strand starting at position 3847 of SEQ ID NO: 585842
uguguuaguuagccucuau

SEQ ID NO: 672031 - RNA, 19 nt, Artificial Sequence
  Description of Artificial Sequence: Synthetic oligonucleotide
  Antisense strand to SEQ ID NO: 672030
auagaggcuaacuaacaca

SEQ ID NO: 672032 - RNA, 19 nt, Artificial Sequence
  Description of Artificial Sequence: Synthetic oligonucleotide
  Sense strand starting at position 3968 of SEQ ID NO: 585842
agucuauaggaucagcuaa

SEQ ID NO: 672033 - RNA, 19 nt, Artificial Sequence
  Description of Artificial Sequence: Synthetic oligonucleotide
  Antisense strand to SEQ ID NO: 672032
uuagcugauccuauagacu

SEQ ID NO: 672034 - RNA, 19 nt, Artificial Sequence
  Description of Artificial Sequence: Synthetic oligonucleotide
  Sense strand starting at position 54 of SEQ ID NO: 585843
agagcacacuucucaguaa

SEQ ID NO: 672035 - RNA, 19 nt, Artificial Sequence
  Description of Artificial Sequence: Synthetic oligonucleotide
  Antisense strand to SEQ ID NO: 672034
uuacugagaagugugcucu

SEQ ID NO: 672036 - RNA, 19 nt, Artificial Sequence
  Description of Artificial Sequence: Synthetic oligonucleotide
  Sense strand starting at position 228 of SEQ ID NO: 585843
uguugcuauccuugggaau

SEQ ID NO: 672037 - RNA, 19 nt, Artificial Sequence
  Description of Artificial Sequence: Synthetic oligonucleotide
  Antisense strand to SEQ ID NO: 672036
auucccaaggauagcaaca

SEQ ID NO: 672038 - RNA, 19 nt, Artificial Sequence
  Description of Artificial Sequence: Synthetic oligonucleotide
  Sense strand starting at position 229 of SEQ ID NO: 585843
guugcuauccuugggaauc

SEQ ID NO: 672039 - RNA, 19 nt, Artificial Sequence
  Description of Artificial Sequence: Synthetic oligonucleotide
  Antisense strand to SEQ ID NO: 672038
gauucccaaggauagcaac

SEQ ID NO: 672040 - RNA, 19 nt, Artificial Sequence
  Description of Artificial Sequence: Synthetic oligonucleotide
  Sense strand starting at position 311 of SEQ ID NO: 585843
ggaugcugucaaugagaac

SEQ ID NO: 672041 - RNA, 19 nt, Artificial Sequence
  Description of Artificial Sequence: Synthetic oligonucleotide
  Antisense strand to SEQ ID NO: 672040
guucucauugacagcaucc

SEQ ID NO: 672042 - RNA, 19 nt, Artificial Sequence
  Description of Artificial Sequence: Synthetic oligonucleotide
  Sense strand starting at position 323 of SEQ ID NO: 585843
ugagaacuaucucagauuu

SEQ ID NO: 672043 - RNA, 19 nt, Artificial Sequence
  Description of Artificial Sequence: Synthetic oligonucleotide
  Antisense strand to SEQ ID NO: 672042
aaaucugagauaguucuca

SEQ ID NO: 672044 - RNA, 19 nt, Artificial Sequence
  Description of Artificial Sequence: Synthetic oligonucleotide
  Sense strand starting at position 541 of SEQ ID NO: 585843
ggcaucaaguccucuuaag

SEQ ID NO: 672045 - RNA, 19 nt, Artificial Sequence
  Description of Artificial Sequence: Synthetic oligonucleotide
  Antisense strand to SEQ ID NO: 672044
cuuaagaggacuugaugcc

SEQ ID NO: 672046 - RNA, 19 nt, Artificial Sequence
  Description of Artificial Sequence: Synthetic oligonucleotide
  Sense strand starting at position 970 of SEQ ID NO: 585843
ucaacaauacugcgggaaa

SEQ ID NO: 672047 - RNA, 19 nt, Artificial Sequence
  Description of Artificial Sequence: Synthetic oligonucleotide
  Antisense strand to SEQ ID NO: 672046
uuucccgcaguauuguuga

SEQ ID NO: 672048 - RNA, 19 nt, Artificial Sequence
  Description of Artificial Sequence: Synthetic oligonucleotide
  Sense strand starting at position 1107 of SEQ ID NO: 585843
ugacuugacugccugugua

SEQ ID NO: 672049 - RNA, 19 nt, Artificial Sequence
  Description of Artificial Sequence: Synthetic oligonucleotide
  Antisense strand to SEQ ID NO: 672048
uacacaggcagucaaguca

SEQ ID NO: 672050 - RNA, 19 nt, Artificial Sequence
  Description of Artificial Sequence: Synthetic oligonucleotide
  Sense strand starting at position 1886 of SEQ ID NO: 585843
cagucuuccguggaaacuc

SEQ ID NO: 672051 - RNA, 19 nt, Artificial Sequence
  Description of Artificial Sequence: Synthetic oligonucleotide
  Antisense strand to SEQ ID NO: 672050
gaguuuccacggaagacug

SEQ ID NO: 672052 - RNA, 19 nt, Artificial Sequence
  Description of Artificial Sequence: Synthetic oligonucleotide
  Sense strand starting at position 1896 of SEQ ID NO: 585843
uggaaacucugacaacacu

SEQ ID NO: 672053 - RNA, 19 nt, Artificial Sequence
  Description of Artificial Sequence: Synthetic oligonucleotide
  Antisense strand to SEQ ID NO: 672052
aguguugucagaguuucca

SEQ ID NO: 672054 - RNA, 19 nt, Artificial Sequence
  Description of Artificial Sequence: Synthetic oligonucleotide
  Sense strand starting at position 1966 of SEQ ID NO: 585843
gccuguauugcggaggaga

SEQ ID NO: 672055 - RNA, 19 nt, Artificial Sequence
  Description of Artificial Sequence: Synthetic oligonucleotide
  Antisense strand to SEQ ID NO: 672054
ucuccuccgcaauacaggc

SEQ ID NO: 672056 - RNA, 19 nt, Artificial Sequence
  Description of Artificial Sequence: Synthetic oligonucleotide
  Sense strand starting at position 2085 of SEQ ID NO: 585843
uguagucuucgugacacga

SEQ ID NO: 672057 - RNA, 19 nt, Artificial Sequence
  Description of Artificial Sequence: Synthetic oligonucleotide
  Antisense strand to SEQ ID NO: 672056
ucgugucacgaagacuaca

SEQ ID NO: 672058 - RNA, 19 nt, Artificial Sequence
  Description of Artificial Sequence: Synthetic oligonucleotide
  Sense strand starting at position 2237 of SEQ ID NO: 585843
cgccuuugagucgguauuu

SEQ ID NO: 672059 - RNA, 19 nt, Artificial Sequence
  Description of Artificial Sequence: Synthetic oligonucleotide
  Antisense strand to SEQ ID NO: 672058
aaauaccgacucaaaggcg

SEQ ID NO: 672060 - RNA, 19 nt, Artificial Sequence
  Description of Artificial Sequence: Synthetic oligonucleotide
  Sense strand starting at position 2522 of SEQ ID NO: 585843
cuguauuguccgcuacagu

SEQ ID NO: 672061 - RNA, 19 nt, Artificial Sequence
  Description of Artificial Sequence: Synthetic oligonucleotide
  Antisense strand to SEQ ID NO: 672060
acuguagcggacaauacag

SEQ ID NO: 672062 - RNA, 19 nt, Artificial Sequence
  Description of Artificial Sequence: Synthetic oligonucleotide
  Sense strand starting at position 2529 of SEQ ID NO: 585843
guccgcuacagugagagau

SEQ ID NO: 672063 - RNA, 19 nt, Artificial Sequence
  Description of Artificial Sequence: Synthetic oligonucleotide
  Antisense strand to SEQ ID NO: 672062
aucucucacuguagcggac

SEQ ID NO: 672064 - RNA, 19 nt, Artificial Sequence
  Description of Artificial Sequence: Synthetic oligonucleotide
  Sense strand starting at position 2551 of SEQ ID NO: 585843
ggaagacuauuaucgcgaa

SEQ ID NO: 672065 - RNA, 19 nt, Artificial Sequence
  Description of Artificial Sequence: Synthetic oligonucleotide
  Antisense strand to SEQ ID NO: 672064
uucgcgauaauagucuucc

SEQ ID NO: 672066 - RNA, 19 nt, Artificial Sequence
  Description of Artificial Sequence: Synthetic oligonucleotide
  Sense strand starting at position 2669 of SEQ ID NO: 585843
gcaaauuacugagacagaa

SEQ ID NO: 672067 - RNA, 19 nt, Artificial Sequence
  Description of Artificial Sequence: Synthetic oligonucleotide
  Antisense strand to SEQ ID NO: 672066
uucugucucaguaauuugc

SEQ ID NO: 672068 - RNA, 19 nt, Artificial Sequence
  Description of Artificial Sequence: Synthetic oligonucleotide
  Sense strand starting at position 2895 of SEQ ID NO: 585843
guaccauccuguuccauua

SEQ ID NO: 672069 - RNA, 19 nt, Artificial Sequence
  Description of Artificial Sequence: Synthetic oligonucleotide
  Antisense strand to SEQ ID NO: 672068
uaauggaacaggaugguac

SEQ ID NO: 672070 - RNA, 19 nt, Artificial Sequence
  Description of Artificial Sequence: Synthetic oligonucleotide
  Sense strand starting at position 2997 of SEQ ID NO: 585843
uacaauuacugggucaaag

SEQ ID NO: 672071 - RNA, 19 nt, Artificial Sequence
  Description of Artificial Sequence: Synthetic oligonucleotide
  Antisense strand to SEQ ID NO: 672070
cuuugacccaguaauugua

SEQ ID NO: 672072 - RNA, 19 nt, Artificial Sequence
  Description of Artificial Sequence: Synthetic oligonucleotide
  Sense strand starting at position 3041 of SEQ ID NO: 585843
gucaaacugcuuuguagaa

SEQ ID NO: 672073 - RNA, 19 nt, Artificial Sequence
  Description of Artificial Sequence: Synthetic oligonucleotide
  Antisense strand to SEQ ID NO: 672072
uucuacaaagcaguuugac

SEQ ID NO: 672074 - RNA, 19 nt, Artificial Sequence
  Description of Artificial Sequence: Synthetic oligonucleotide
  Sense strand starting at position 3042 of SEQ ID NO: 585843
ucaaacugcuuuguagaau

SEQ ID NO: 672075 - RNA, 19 nt, Artificial Sequence
  Description of Artificial Sequence: Synthetic oligonucleotide
  Antisense strand to SEQ ID NO: 672074
auucuacaaagcaguuuga

SEQ ID NO: 672076 - RNA, 19 nt, Artificial Sequence
  Description of Artificial Sequence: Synthetic oligonucleotide
  Sense strand starting at position 3107 of SEQ ID NO: 585843
gauccucacgauuagcuau

SEQ ID NO: 672077 - RNA, 19 nt, Artificial Sequence
  Description of Artificial Sequence: Synthetic oligonucleotide
  Antisense strand to SEQ ID NO: 672076
auagcuaaucgugaggauc

SEQ ID NO: 672078 - RNA, 19 nt, Artificial Sequence
  Description of Artificial Sequence: Synthetic oligonucleotide
  Sense strand starting at position 3154 of SEQ ID NO: 585843
ucuguuugugacuaaacca

SEQ ID NO: 672079 - RNA, 19 nt, Artificial Sequence
  Description of Artificial Sequence: Synthetic oligonucleotide
  Antisense strand to SEQ ID NO: 672078
ugguuuagucacaaacaga

SEQ ID NO: 672080 - RNA, 19 nt, Artificial Sequence
  Description of Artificial Sequence: Synthetic oligonucleotide
  Sense strand starting at position 3186 of SEQ ID NO: 585843
aguguaacaucauuggaaa

SEQ ID NO: 672081 - RNA, 19 nt, Artificial Sequence
  Description of Artificial Sequence: Synthetic oligonucleotide
  Antisense strand to SEQ ID NO: 672080
uuuccaaugauguuacacu

SEQ ID NO: 672082 - RNA, 19 nt, Artificial Sequence
  Description of Artificial Sequence: Synthetic oligonucleotide
  Sense strand starting at position 3187 of SEQ ID NO: 585843
guguaacaucauuggaaag

SEQ ID NO: 672083 - RNA, 19 nt, Artificial Sequence
  Description of Artificial Sequence: Synthetic oligonucleotide
  Antisense strand to SEQ ID NO: 672082
cuuuccaaugauguuacac

SEQ ID NO: 672084 - RNA, 19 nt, Artificial Sequence
  Description of Artificial Sequence: Synthetic oligonucleotide
  Sense strand starting at position 3301 of SEQ ID NO: 585843
gguguauguugaguggauc

SEQ ID NO: 672085 - RNA, 19 nt, Artificial Sequence
  Description of Artificial Sequence: Synthetic oligonucleotide
  Antisense strand to SEQ ID NO: 672084
gauccacucaacauacacc

SEQ ID NO: 672086 - RNA, 19 nt, Artificial Sequence
  Description of Artificial Sequence: Synthetic oligonucleotide
  Sense strand starting at position 3302 of SEQ ID NO: 585843
guguauguugaguggaucu

SEQ ID NO: 672087 - RNA, 19 nt, Artificial Sequence
  Description of Artificial Sequence: Synthetic oligonucleotide
  Antisense strand to SEQ ID NO: 672086
agauccacucaacauacac

SEQ ID NO: 672088 - RNA, 19 nt, Artificial Sequence
  Description of Artificial Sequence: Synthetic oligonucleotide
  Sense strand starting at position 3340 of SEQ ID NO: 585843
uauggacuugagugcuuua

SEQ ID NO: 672089 - RNA, 19 nt, Artificial Sequence
  Description of Artificial Sequence: Synthetic oligonucleotide
  Antisense strand to SEQ ID NO: 672088
uaaagcacucaaguccaua

SEQ ID NO: 672090 - RNA, 19 nt, Artificial Sequence
  Description of Artificial Sequence: Synthetic oligonucleotide
  Sense strand starting at position 3343 of SEQ ID NO: 585843
ggacuugagugcuuuacac

SEQ ID NO: 672091 - RNA, 19 nt, Artificial Sequence
  Description of Artificial Sequence: Synthetic oligonucleotide
  Antisense strand to SEQ ID NO: 672090
guguaaagcacucaagucc

SEQ ID NO: 672092 - RNA, 19 nt, Artificial Sequence
  Description of Artificial Sequence: Synthetic oligonucleotide
  Sense strand starting at position 3345 of SEQ ID NO: 585843
acuugagugcuuuacacuu

SEQ ID NO: 672093 - RNA, 19 nt, Artificial Sequence
  Description of Artificial Sequence: Synthetic oligonucleotide
  Antisense strand to SEQ ID NO: 672092
aaguguaaagcacucaagu

SEQ ID NO: 672094 - RNA, 19 nt, Artificial Sequence
  Description of Artificial Sequence: Synthetic oligonucleotide
  Sense strand starting at position 3411 of SEQ ID NO: 585843
uuauuaaccugccugguaa

SEQ ID NO: 672095 - RNA, 19 nt, Artificial Sequence
  Description of Artificial Sequence: Synthetic oligonucleotide
  Antisense strand to SEQ ID NO: 672094
uuaccaggcagguuaauaa

SEQ ID NO: 672096 - RNA, 19 nt, Artificial Sequence
  Description of Artificial Sequence: Synthetic oligonucleotide
  Sense strand starting at position 3413 of SEQ ID NO: 585843
auuaaccugccugguaaau

SEQ ID NO: 672097 - RNA, 19 nt, Artificial Sequence
  Description of Artificial Sequence: Synthetic oligonucleotide
  Antisense strand to SEQ ID NO: 672096
auuuaccaggcagguuaau

SEQ ID NO: 672098 - RNA, 19 nt, Artificial Sequence
  Description of Artificial Sequence: Synthetic oligonucleotide
  Sense strand starting at position 3588 of SEQ ID NO: 585843
ucugauuucuuagaggcaa

SEQ ID NO: 672099 - RNA, 19 nt, Artificial Sequence
  Description of Artificial Sequence: Synthetic oligonucleotide
  Antisense strand to SEQ ID NO: 672098
uugccucuaagaaaucaga

SEQ ID NO: 672100 - RNA, 19 nt, Artificial Sequence
  Description of Artificial Sequence: Synthetic oligonucleotide
  Sense strand starting at position 3650 of SEQ ID NO: 585843
uugcucuuaugauuagaaa

SEQ ID NO: 672101 - RNA, 19 nt, Artificial Sequence
  Description of Artificial Sequence: Synthetic oligonucleotide
  Antisense strand to SEQ ID NO: 672100
uuucuaaucauaagagcaa

SEQ ID NO: 672102 - RNA, 19 nt, Artificial Sequence
  Description of Artificial Sequence: Synthetic oligonucleotide
  Sense strand starting at position 3706 of SEQ ID NO: 585843
uucuuuauggcagagaauu

SEQ ID NO: 672103 - RNA, 19 nt, Artificial Sequence
  Description of Artificial Sequence: Synthetic oligonucleotide
  Antisense strand to SEQ ID NO: 672102
aauucucugccauaaagaa

SEQ ID NO: 672104 - RNA, 19 nt, Artificial Sequence
  Description of Artificial Sequence: Synthetic oligonucleotide
  Sense strand starting at position 3799 of SEQ ID NO: 585843
auuacaugucuuuagccua

SEQ ID NO: 672105 - RNA, 19 nt, Artificial Sequence
  Description of Artificial Sequence: Synthetic oligonucleotide
  Antisense strand to SEQ ID NO: 672104
uaggcuaaagacauguaau

SEQ ID NO: 672106 - RNA, 19 nt, Artificial Sequence
  Description of Artificial Sequence: Synthetic oligonucleotide
  Sense strand starting at position 3809 of SEQ ID NO: 585843
uuuagccuauggucuagaa

SEQ ID NO: 672107 - RNA, 19 nt, Artificial Sequence
  Description of Artificial Sequence: Synthetic oligonucleotide
  Antisense strand to SEQ ID NO: 672106
uucuagaccauaggcuaaa

SEQ ID NO: 672108 - RNA, 19 nt, Artificial Sequence
  Description of Artificial Sequence: Synthetic oligonucleotide
  Sense strand starting at position 3839 of SEQ ID NO: 585843
acgcacagagcucgaaauu

SEQ ID NO: 672109 - RNA, 19 nt, Artificial Sequence
  Description of Artificial Sequence: Synthetic oligonucleotide
  Antisense strand to SEQ ID NO: 672108
aauuucgagcucugugcgu

SEQ ID NO: 672110 - RNA, 19 nt, Artificial Sequence
  Description of Artificial Sequence: Synthetic oligonucleotide
  Sense strand starting at position 3955 of SEQ ID NO: 585843
agcaacauguuagcaagau

SEQ ID NO: 672111 - RNA, 19 nt, Artificial Sequence
  Description of Artificial Sequence: Synthetic oligonucleotide
  Antisense strand to SEQ ID NO: 672110
aucuugcuaacauguugcu

SEQ ID NO: 672112 - RNA, 19 nt, Artificial Sequence
  Description of Artificial Sequence: Synthetic oligonucleotide
  Sense strand starting at position 3959 of SEQ ID NO: 585843
acauguuagcaagauuaac

SEQ ID NO: 672113 - RNA, 19 nt, Artificial Sequence
  Description of Artificial Sequence: Synthetic oligonucleotide
  Antisense strand to SEQ ID NO: 672112
guuaaucuugcuaacaugu

SEQ ID NO: 672114 - RNA, 19 nt, Artificial Sequence
  Description of Artificial Sequence: Synthetic oligonucleotide
  Sense strand starting at position 301 of SEQ ID NO: 585844
agacaacaguggcuugaaa

SEQ ID NO: 672115 - RNA, 19 nt, Artificial Sequence
  Description of Artificial Sequence: Synthetic oligonucleotide
  Antisense strand to SEQ ID NO: 672114
uuucaagccacuguugucu

SEQ ID NO: 672116 - RNA, 19 nt, Artificial Sequence
  Description of Artificial Sequence: Synthetic oligonucleotide
  Sense strand starting at position 303 of SEQ ID NO: 585844
acaacaguggcuugaaaca

SEQ ID NO: 672117 - RNA, 19 nt, Artificial Sequence
  Description of Artificial Sequence: Synthetic oligonucleotide
  Antisense strand to SEQ ID NO: 672116
uguuucaagccacuguugu

SEQ ID NO: 672118 - RNA, 19 nt, Artificial Sequence
  Description of Artificial Sequence: Synthetic oligonucleotide
  Sense strand starting at position 427 of SEQ ID NO: 585844
auauacuacugagcuguau

SEQ ID NO: 672119 - RNA, 19 nt, Artificial Sequence
  Description of Artificial Sequence: Synthetic oligonucleotide
  Antisense strand to SEQ ID NO: 672118
auacagcucaguaguauau

SEQ ID NO: 672120 - RNA, 19 nt, Artificial Sequence
  Description of Artificial Sequence: Synthetic oligonucleotide
  Sense strand starting at position 496 of SEQ ID NO: 585844
gacacaaaguguguaaguu

SEQ ID NO: 672121 - RNA, 19 nt, Artificial Sequence
  Description of Artificial Sequence: Synthetic oligonucleotide
  Antisense strand to SEQ ID NO: 672120
aacuuacacacuuuguguc

SEQ ID NO: 672122 - RNA, 19 nt, Artificial Sequence
  Description of Artificial Sequence: Synthetic oligonucleotide
  Sense strand starting at position 497 of SEQ ID NO: 585844
acacaaaguguguaaguua

SEQ ID NO: 672123 - RNA, 19 nt, Artificial Sequence
  Description of Artificial Sequence: Synthetic oligonucleotide
  Antisense strand to SEQ ID NO: 672122
uaacuuacacacuuugugu

SEQ ID NO: 672124 - RNA, 19 nt, Artificial Sequence
  Description of Artificial Sequence: Synthetic oligonucleotide
  Sense strand starting at position 506 of SEQ ID NO: 585844
guguaaguuaaugagaauu

SEQ ID NO: 672125 - RNA, 19 nt, Artificial Sequence
  Description of Artificial Sequence: Synthetic oligonucleotide
  Antisense strand to SEQ ID NO: 672124
aauucucauuaacuuacac

SEQ ID NO: 672126 - RNA, 19 nt, Artificial Sequence
  Description of Artificial Sequence: Synthetic oligonucleotide
  Sense strand starting at position 649 of SEQ ID NO: 585844
uuccauacaugggcaaauu

SEQ ID NO: 672127 - RNA, 19 nt, Artificial Sequence
  Description of Artificial Sequence: Synthetic oligonucleotide
  Antisense strand to SEQ ID NO: 672126
aauuugcccauguauggaa

SEQ ID NO: 672128 - RNA, 19 nt, Artificial Sequence
  Description of Artificial Sequence: Synthetic oligonucleotide
  Sense strand starting at position 659 of SEQ ID NO: 585844
gggcaaauucuuuaauccu

SEQ ID NO: 672129 - RNA, 19 nt, Artificial Sequence
  Description of Artificial Sequence: Synthetic oligonucleotide
  Antisense strand to SEQ ID NO: 672128
aggauuaaagaauuugccc

SEQ ID NO: 672130 - RNA, 19 nt, Artificial Sequence
  Description of Artificial Sequence: Synthetic oligonucleotide
  Sense strand starting at position 677 of SEQ ID NO: 585844
ugaauuauagagugaaagu

SEQ ID NO: 672131 - RNA, 19 nt, Artificial Sequence
  Description of Artificial Sequence: Synthetic oligonucleotide
  Antisense strand to SEQ ID NO: 672130
acuuucacucuauaauuca

SEQ ID NO: 672132 - RNA, 19 nt, Artificial Sequence
  Description of Artificial Sequence: Synthetic oligonucleotide
  Sense strand starting at position 688 of SEQ ID NO: 585844
gugaaagugaagcacuauu

SEQ ID NO: 672133 - RNA, 19 nt, Artificial Sequence
  Description of Artificial Sequence: Synthetic oligonucleotide
  Antisense strand to SEQ ID NO: 672132
aauagugcuucacuuucac

SEQ ID NO: 672134 - RNA, 19 nt, Artificial Sequence
  Description of Artificial Sequence: Synthetic oligonucleotide
  Sense strand starting at position 804 of SEQ ID NO: 585844
agugcaaaucucgaauuaa

SEQ ID NO: 672135 - RNA, 19 nt, Artificial Sequence
  Description of Artificial Sequence: Synthetic oligonucleotide
  Antisense strand to SEQ ID NO: 672134
uuaauucgagauuugcacu

SEQ ID NO: 672136 - RNA, 19 nt, Artificial Sequence
  Description of Artificial Sequence: Synthetic oligonucleotide
  Sense strand starting at position 824 of SEQ ID NO: 585844
agagcaagaucccuagucu

SEQ ID NO: 672137 - RNA, 19 nt, Artificial Sequence
  Description of Artificial Sequence: Synthetic oligonucleotide
  Antisense strand to SEQ ID NO: 672136
agacuagggaucuugcucu

SEQ ID NO: 672138 - RNA, 19 nt, Artificial Sequence
  Description of Artificial Sequence: Synthetic oligonucleotide
  Sense strand starting at position 825 of SEQ ID NO: 585844
gagcaagaucccuagucuu

SEQ ID NO: 672139 - RNA, 19 nt, Artificial Sequence
  Description of Artificial Sequence: Synthetic oligonucleotide
  Antisense strand to SEQ ID NO: 672138
aagacuagggaucuugcuc

SEQ ID NO: 672140 - RNA, 19 nt, Artificial Sequence
  Description of Artificial Sequence: Synthetic oligonucleotide
  Sense strand starting at position 855 of SEQ ID NO: 585844
acuguaguucuggauuaug

SEQ ID NO: 672141 - RNA, 19 nt, Artificial Sequence
  Description of Artificial Sequence: Synthetic oligonucleotide
  Antisense strand to SEQ ID NO: 672140
cauaauccagaacuacagu

SEQ ID NO: 672142 - RNA, 19 nt, Artificial Sequence
  Description of Artificial Sequence: Synthetic oligonucleotide
  Sense strand starting at position 867 of SEQ ID NO: 585844
gauuaugagguaggugaca

SEQ ID NO: 672143 - RNA, 19 nt, Artificial Sequence
  Description of Artificial Sequence: Synthetic oligonucleotide
  Antisense strand to SEQ ID NO: 672142
ugucaccuaccucauaauc

SEQ ID NO: 672144 - RNA, 19 nt, Artificial Sequence
  Description of Artificial Sequence: Synthetic oligonucleotide
  Sense strand starting at position 925 of SEQ ID NO: 585844
ugaagucaaccauguccaa

SEQ ID NO: 672145 - RNA, 19 nt, Artificial Sequence
  Description of Artificial Sequence: Synthetic oligonucleotide
  Antisense strand to SEQ ID NO: 672144
uuggacaugguugacuuca

SEQ ID NO: 672146 - RNA, 19 nt, Artificial Sequence
  Description of Artificial Sequence: Synthetic oligonucleotide
  Sense strand starting at position 957 of SEQ ID NO: 585844
cuggcucagcccuaucaaa

SEQ ID NO: 672147 - RNA, 19 nt, Artificial Sequence
  Description of Artificial Sequence: Synthetic oligonucleotide
  Antisense strand to SEQ ID NO: 672146
uuugauagggcugagccag

SEQ ID NO: 672148 - RNA, 19 nt, Artificial Sequence
  Description of Artificial Sequence: Synthetic oligonucleotide
  Sense strand starting at position 1179 of SEQ ID NO: 585844
agggauguguucucgaaag

SEQ ID NO: 672149 - RNA, 19 nt, Artificial Sequence
  Description of Artificial Sequence: Synthetic oligonucleotide
  Antisense strand to SEQ ID NO: 672148
cuuucgagaacacaucccu

SEQ ID NO: 672150 - RNA, 19 nt, Artificial Sequence
  Description of Artificial Sequence: Synthetic oligonucleotide
  Sense strand starting at position 1181 of SEQ ID NO: 585844
ggauguguucucgaaagau

SEQ ID NO: 672151 - RNA, 19 nt, Artificial Sequence
  Description of Artificial Sequence: Synthetic oligonucleotide
  Antisense strand to SEQ ID NO: 672150
aucuuucgagaacacaucc

SEQ ID NO: 672152 - RNA, 19 nt, Artificial Sequence
  Description of Artificial Sequence: Synthetic oligonucleotide
  Sense strand starting at position 1185 of SEQ ID NO: 585844
guguucucgaaagaucuac

SEQ ID NO: 672153 - RNA, 19 nt, Artificial Sequence
  Description of Artificial Sequence: Synthetic oligonucleotide
  Antisense strand to SEQ ID NO: 672152
guagaucuuucgagaacac

SEQ ID NO: 672154 - RNA, 19 nt, Artificial Sequence
  Description of Artificial Sequence: Synthetic oligonucleotide
  Sense strand starting at position 1499 of SEQ ID NO: 585844
ccuugacccugauuucgua

SEQ ID NO: 672155 - RNA, 19 nt, Artificial Sequence
  Description of Artificial Sequence: Synthetic oligonucleotide
  Antisense strand to SEQ ID NO: 672154
uacgaaaucagggucaagg

SEQ ID NO: 672156 - RNA, 19 nt, Artificial Sequence
  Description of Artificial Sequence: Synthetic oligonucleotide
  Sense strand starting at position 1507 of SEQ ID NO: 585844
cugauuucguaagugguga

SEQ ID NO: 672157 - RNA, 19 nt, Artificial Sequence
  Description of Artificial Sequence: Synthetic oligonucleotide
  Antisense strand to SEQ ID NO: 672156
ucaccacuuacgaaaucag

SEQ ID NO: 672158 - RNA, 19 nt, Artificial Sequence
  Description of Artificial Sequence: Synthetic oligonucleotide
  Sense strand starting at position 1508 of SEQ ID NO: 585844
ugauuucguaaguggugaa

SEQ ID NO: 672159 - RNA, 19 nt, Artificial Sequence
  Description of Artificial Sequence: Synthetic oligonucleotide
  Antisense strand to SEQ ID NO: 672158
uucaccacuuacgaaauca

SEQ ID NO: 672160 - RNA, 19 nt, Artificial Sequence
  Description of Artificial Sequence: Synthetic oligonucleotide
  Sense strand starting at position 2183 of SEQ ID NO: 585844
cuuagagauuugcccgcaa

SEQ ID NO: 672161 - RNA, 19 nt, Artificial Sequence
  Description of Artificial Sequence: Synthetic oligonucleotide
  Antisense strand to SEQ ID NO: 672160
uugcgggcaaaucucuaag

SEQ ID NO: 672162 - RNA, 19 nt, Artificial Sequence
  Description of Artificial Sequence: Synthetic oligonucleotide
  Sense strand starting at position 2185 of SEQ ID NO: 585844
uagagauuugcccgcaaau

SEQ ID NO: 672163 - RNA, 19 nt, Artificial Sequence
  Description of Artificial Sequence: Synthetic oligonucleotide
  Antisense strand to SEQ ID NO: 672162
auuugcgggcaaaucucua

SEQ ID NO: 672164 - RNA, 19 nt, Artificial Sequence
  Description of Artificial Sequence: Synthetic oligonucleotide
  Sense strand starting at position 2271 of SEQ ID NO: 585844
ugccuuucuggagaagguu

SEQ ID NO: 672165 - RNA, 19 nt, Artificial Sequence
  Description of Artificial Sequence: Synthetic oligonucleotide
  Antisense strand to SEQ ID NO: 672164
aaccuucuccagaaaggca

SEQ ID NO: 672166 - RNA, 19 nt, Artificial Sequence
  Description of Artificial Sequence: Synthetic oligonucleotide
  Sense strand starting at position 2289 of SEQ ID NO: 585844
uaagcaaaugccugagaug

SEQ ID NO: 672167 - RNA, 19 nt, Artificial Sequence
  Description of Artificial Sequence: Synthetic oligonucleotide
  Antisense strand to SEQ ID NO: 672166
caucucaggcauuugcuua

SEQ ID NO: 672168 - RNA, 19 nt, Artificial Sequence
  Description of Artificial Sequence: Synthetic oligonucleotide
  Sense strand starting at position 2342 of SEQ ID NO: 585844
gcgucuggauugauagguu

SEQ ID NO: 672169 - RNA, 19 nt, Artificial Sequence
  Description of Artificial Sequence: Synthetic oligonucleotide
  Antisense strand to SEQ ID NO: 672168
aaccuaucaauccagacgc

SEQ ID NO: 672170 - RNA, 19 nt, Artificial Sequence
  Description of Artificial Sequence: Synthetic oligonucleotide
  Sense strand starting at position 2345 of SEQ ID NO: 585844
ucuggauugauagguugaa

SEQ ID NO: 672171 - RNA, 19 nt, Artificial Sequence
  Description of Artificial Sequence: Synthetic oligonucleotide
  Antisense strand to SEQ ID NO: 672170
uucaaccuaucaauccaga

SEQ ID NO: 672172 - RNA, 19 nt, Artificial Sequence
  Description of Artificial Sequence: Synthetic oligonucleotide
  Sense strand starting at position 2357 of SEQ ID NO: 585844
gguugaaaccaguaaagug

SEQ ID NO: 672173 - RNA, 19 nt, Artificial Sequence
  Description of Artificial Sequence: Synthetic oligonucleotide
  Antisense strand to SEQ ID NO: 672172
cacuuuacugguuucaacc

SEQ ID NO: 672174 - RNA, 19 nt, Artificial Sequence
  Description of Artificial Sequence: Synthetic oligonucleotide
  Sense strand starting at position 2412 of SEQ ID NO: 585844
cuagcauuauggucaaauc

SEQ ID NO: 672175 - RNA, 19 nt, Artificial Sequence
  Description of Artificial Sequence: Synthetic oligonucleotide
  Antisense strand to SEQ ID NO: 672174
gauuugaccauaaugcuag

SEQ ID NO: 672176 - RNA, 19 nt, Artificial Sequence
  Description of Artificial Sequence: Synthetic oligonucleotide
  Sense strand starting at position 2512 of SEQ ID NO: 585844
ucacgaaguccugauaagu

SEQ ID NO: 672177 - RNA, 19 nt, Artificial Sequence
  Description of Artificial Sequence: Synthetic oligonucleotide
  Antisense strand to SEQ ID NO: 672176
acuuaucaggacuucguga

SEQ ID NO: 672178 - RNA, 19 nt, Artificial Sequence
  Description of Artificial Sequence: Synthetic oligonucleotide
  Sense strand starting at position 3004 of SEQ ID NO: 585844
uucuaucucugcccagaga

SEQ ID NO: 672179 - RNA, 19 nt, Artificial Sequence
  Description of Artificial Sequence: Synthetic oligonucleotide
  Antisense strand to SEQ ID NO: 672178
ucucugggcagagauagaa

SEQ ID NO: 672180 - RNA, 19 nt, Artificial Sequence
  Description of Artificial Sequence: Synthetic oligonucleotide
  Sense strand starting at position 3007 of SEQ ID NO: 585844
uaucucugcccagagaguu

SEQ ID NO: 672181 - RNA, 19 nt, Artificial Sequence
  Description of Artificial Sequence: Synthetic oligonucleotide
  Antisense strand to SEQ ID NO: 672180
aacucucugggcagagaua

SEQ ID NO: 672182 - RNA, 19 nt, Artificial Sequence
  Description of Artificial Sequence: Synthetic oligonucleotide
  Sense strand starting at position 3015 of SEQ ID NO: 585844
cccagagaguuaucccuca

SEQ ID NO: 672183 - RNA, 19 nt, Artificial Sequence
  Description of Artificial Sequence: Synthetic oligonucleotide
  Antisense strand to SEQ ID NO: 672182
ugagggauaacucucuggg

SEQ ID NO: 672184 - RNA, 19 nt, Artificial Sequence
  Description of Artificial Sequence: Synthetic oligonucleotide
  Sense strand starting at position 3055 of SEQ ID NO: 585844
auaugucaaguuuaacacu

SEQ ID NO: 672185 - RNA, 19 nt, Artificial Sequence
  Description of Artificial Sequence: Synthetic oligonucleotide
  Antisense strand to SEQ ID NO: 672184
aguguuaaacuugacauau

SEQ ID NO: 672186 - RNA, 19 nt, Artificial Sequence
  Description of Artificial Sequence: Synthetic oligonucleotide
  Sense strand starting at position 3151 of SEQ ID NO: 585844
acgggaucucacugugauu

SEQ ID NO: 672187 - RNA, 19 nt, Artificial Sequence
  Description of Artificial Sequence: Synthetic oligonucleotide
  Antisense strand to SEQ ID NO: 672186
aaucacagugagaucccgu

SEQ ID NO: 672188 - RNA, 19 nt, Artificial Sequence
  Description of Artificial Sequence: Synthetic oligonucleotide
  Sense strand starting at position 3222 of SEQ ID NO: 585844
cccauaugugcugagauga

SEQ ID NO: 672189 - RNA, 19 nt, Artificial Sequence
  Description of Artificial Sequence: Synthetic oligonucleotide
  Antisense strand to SEQ ID NO: 672188
ucaucucagcacauauggg

SEQ ID NO: 672190 - RNA, 19 nt, Artificial Sequence
  Description of Artificial Sequence: Synthetic oligonucleotide
  Sense strand starting at position 3264 of SEQ ID NO: 585844
acugaucugucccuugaac

SEQ ID NO: 672191 - RNA, 19 nt, Artificial Sequence
  Description of Artificial Sequence: Synthetic oligonucleotide
  Antisense strand to SEQ ID NO: 672190
guucaagggacagaucagu

SEQ ID NO: 672192 - RNA, 19 nt, Artificial Sequence
  Description of Artificial Sequence: Synthetic oligonucleotide
  Sense strand starting at position 3266 of SEQ ID NO: 585844
ugaucugucccuugaacug

SEQ ID NO: 672193 - RNA, 19 nt, Artificial Sequence
  Description of Artificial Sequence: Synthetic oligonucleotide
  Antisense strand to SEQ ID NO: 672192
caguucaagggacagauca

SEQ ID NO: 672194 - RNA, 19 nt, Artificial Sequence
  Description of Artificial Sequence: Synthetic oligonucleotide
  Sense strand starting at position 231 of SEQ ID NO: 585845
gcaagaugagcauguacua

SEQ ID NO: 672195 - RNA, 19 nt, Artificial Sequence
  Description of Artificial Sequence: Synthetic oligonucleotide
  Antisense strand to SEQ ID NO: 672194
uaguacaugcucaucuugc

SEQ ID NO: 672196 - RNA, 19 nt, Artificial Sequence
  Description of Artificial Sequence: Synthetic oligonucleotide
  Sense strand starting at position 241 of SEQ ID NO: 585845
cauguacuaggauguguaa

SEQ ID NO: 672197 - RNA, 19 nt, Artificial Sequence
  Description of Artificial Sequence: Synthetic oligonucleotide
  Antisense strand to SEQ ID NO: 672196
uuacacauccuaguacaug

SEQ ID NO: 672198 - RNA, 19 nt, Artificial Sequence
  Description of Artificial Sequence: Synthetic oligonucleotide
  Sense strand starting at position 243 of SEQ ID NO: 585845
uguacuaggauguguaacu

SEQ ID NO: 672199 - RNA, 19 nt, Artificial Sequence
  Description of Artificial Sequence: Synthetic oligonucleotide
  Antisense strand to SEQ ID NO: 672198
aguuacacauccuaguaca

SEQ ID NO: 672200 - RNA, 19 nt, Artificial Sequence
  Description of Artificial Sequence: Synthetic oligonucleotide
  Sense strand starting at position 248 of SEQ ID NO: 585845
uaggauguguaacugguaa

SEQ ID NO: 672201 - RNA, 19 nt, Artificial Sequence
  Description of Artificial Sequence: Synthetic oligonucleotide
  Antisense strand to SEQ ID NO: 672200
uuaccaguuacacauccua

SEQ ID NO: 672202 - RNA, 19 nt, Artificial Sequence
  Description of Artificial Sequence: Synthetic oligonucleotide
  Sense strand starting at position 250 of SEQ ID NO: 585845
ggauguguaacugguaauu

SEQ ID NO: 672203 - RNA, 19 nt, Artificial Sequence
  Description of Artificial Sequence: Synthetic oligonucleotide
  Antisense strand to SEQ ID NO: 672202
aauuaccaguuacacaucc

SEQ ID NO: 672204 - RNA, 19 nt, Artificial Sequence
  Description of Artificial Sequence: Synthetic oligonucleotide
  Sense strand starting at position 307 of SEQ ID NO: 585845
cuuagaaauccuuggccua

SEQ ID NO: 672205 - RNA, 19 nt, Artificial Sequence
  Description of Artificial Sequence: Synthetic oligonucleotide
  Antisense strand to SEQ ID NO: 672204
uaggccaaggauuucuaag

SEQ ID NO: 672206 - RNA, 19 nt, Artificial Sequence
  Description of Artificial Sequence: Synthetic oligonucleotide
  Sense strand starting at position 308 of SEQ ID NO: 585845
uuagaaauccuuggccuaa

SEQ ID NO: 672207 - RNA, 19 nt, Artificial Sequence
  Description of Artificial Sequence: Synthetic oligonucleotide
  Antisense strand to SEQ ID NO: 672206
uuaggccaaggauuucuaa

SEQ ID NO: 672208 - RNA, 19 nt, Artificial Sequence
  Description of Artificial Sequence: Synthetic oligonucleotide
  Sense strand starting at position 310 of SEQ ID NO: 585845
agaaauccuuggccuaagu

SEQ ID NO: 672209 - RNA, 19 nt, Artificial Sequence
  Description of Artificial Sequence: Synthetic oligonucleotide
  Antisense strand to SEQ ID NO: 672208
acuuaggccaaggauuucu

SEQ ID NO: 672210 - RNA, 19 nt, Artificial Sequence
  Description of Artificial Sequence: Synthetic oligonucleotide
  Sense strand starting at position 379 of SEQ ID NO: 585845
guucuaucgcauuaauaaa

SEQ ID NO: 672211 - RNA, 19 nt, Artificial Sequence
  Description of Artificial Sequence: Synthetic oligonucleotide
  Antisense strand to SEQ ID NO: 672210
uuuauuaaugcgauagaac

SEQ ID NO: 672212 - RNA, 19 nt, Artificial Sequence
  Description of Artificial Sequence: Synthetic oligonucleotide
  Sense strand starting at position 562 of SEQ ID NO: 585845
ucaagcaaugcugaucuuu

SEQ ID NO: 672213 - RNA, 19 nt, Artificial Sequence
  Description of Artificial Sequence: Synthetic oligonucleotide
  Antisense strand to SEQ ID NO: 672212
aaagaucagcauugcuuga

SEQ ID NO: 672214 - RNA, 19 nt, Artificial Sequence
  Description of Artificial Sequence: Synthetic oligonucleotide
  Sense strand starting at position 781 of SEQ ID NO: 585845
uguaucacagaucaguuaa

SEQ ID NO: 672215 - RNA, 19 nt, Artificial Sequence
  Description of Artificial Sequence: Synthetic oligonucleotide
  Antisense strand to SEQ ID NO: 672214
uuaacugaucugugauaca

SEQ ID NO: 672216 - RNA, 19 nt, Artificial Sequence
  Description of Artificial Sequence: Synthetic oligonucleotide
  Sense strand starting at position 793 of SEQ ID NO: 585845
caguuaauggcucagguau

SEQ ID NO: 672217 - RNA, 19 nt, Artificial Sequence
  Description of Artificial Sequence: Synthetic oligonucleotide
  Antisense strand to SEQ ID NO: 672216
auaccugagccauuaacug

SEQ ID NO: 672218 - RNA, 19 nt, Artificial Sequence
  Description of Artificial Sequence: Synthetic oligonucleotide
  Sense strand starting at position 859 of SEQ ID NO: 585845
guggcuauucuacaucaag

SEQ ID NO: 672219 - RNA, 19 nt, Artificial Sequence
  Description of Artificial Sequence: Synthetic oligonucleotide
  Antisense strand to SEQ ID NO: 672218
cuugauguagaauagccac

SEQ ID NO: 672220 - RNA, 19 nt, Artificial Sequence
  Description of Artificial Sequence: Synthetic oligonucleotide
  Sense strand starting at position 938 of SEQ ID NO: 585845
agccaagagugacugcuaa

SEQ ID NO: 672221 - RNA, 19 nt, Artificial Sequence
  Description of Artificial Sequence: Synthetic oligonucleotide
  Antisense strand to SEQ ID NO: 672220
uuagcagucacucuuggcu

SEQ ID NO: 672222 - RNA, 19 nt, Artificial Sequence
  Description of Artificial Sequence: Synthetic oligonucleotide
  Sense strand starting at position 2726 of SEQ ID NO: 585845
ucuuuccagaguuggagau

SEQ ID NO: 672223 - RNA, 19 nt, Artificial Sequence
  Description of Artificial Sequence: Synthetic oligonucleotide
  Antisense strand to SEQ ID NO: 672222
aucuccaacucuggaaaga

SEQ ID NO: 672224 - RNA, 19 nt, Artificial Sequence
  Description of Artificial Sequence: Synthetic oligonucleotide
  Sense strand starting at position 2727 of SEQ ID NO: 585845
cuuuccagaguuggagaua

SEQ ID NO: 672225 - RNA, 19 nt, Artificial Sequence
  Description of Artificial Sequence: Synthetic oligonucleotide
  Antisense strand to SEQ ID NO: 672224
uaucuccaacucuggaaag

SEQ ID NO: 672226 - RNA, 19 nt, Artificial Sequence
  Description of Artificial Sequence: Synthetic oligonucleotide
  Sense strand starting at position 2753 of SEQ ID NO: 585845
ggguguuaugaauaaacga

SEQ ID NO: 672227 - RNA, 19 nt, Artificial Sequence
  Description of Artificial Sequence: Synthetic oligonucleotide
  Antisense strand to SEQ ID NO: 672226
ucguuuauucauaacaccc

SEQ ID NO: 672228 - RNA, 19 nt, Artificial Sequence
  Description of Artificial Sequence: Synthetic oligonucleotide
  Sense strand starting at position 2778 of SEQ ID NO: 585845
ugaauugagcagcaagauu

SEQ ID NO: 672229 - RNA, 19 nt, Artificial Sequence
  Description of Artificial Sequence: Synthetic oligonucleotide
  Antisense strand to SEQ ID NO: 672228
aaucuugcugcucaauuca

SEQ ID NO: 672230 - RNA, 19 nt, Artificial Sequence
  Description of Artificial Sequence: Synthetic oligonucleotide
  Sense strand starting at position 2819 of SEQ ID NO: 585845
acuggaagaugugucuuaa

SEQ ID NO: 672231 - RNA, 19 nt, Artificial Sequence
  Description of Artificial Sequence: Synthetic oligonucleotide
  Antisense strand to SEQ ID NO: 672230
uuaagacacaucuuccagu

SEQ ID NO: 672232 - RNA, 19 nt, Artificial Sequence
  Description of Artificial Sequence: Synthetic oligonucleotide
  Sense strand starting at position 2832 of SEQ ID NO: 585845
ucuuaauuggcauacuagu

SEQ ID NO: 672233 - RNA, 19 nt, Artificial Sequence
  Description of Artificial Sequence: Synthetic oligonucleotide
  Antisense strand to SEQ ID NO: 672232
acuaguaugccaauuaaga

SEQ ID NO: 672234 - RNA, 19 nt, Artificial Sequence
  Description of Artificial Sequence: Synthetic oligonucleotide
  Sense strand starting at position 2874 of SEQ ID NO: 585845
gggauauauuuguaagaag

SEQ ID NO: 672235 - RNA, 19 nt, Artificial Sequence
  Description of Artificial Sequence: Synthetic oligonucleotide
  Antisense strand to SEQ ID NO: 672234
cuucuuacaaauauauccc

SEQ ID NO: 672236 - RNA, 19 nt, Artificial Sequence
  Description of Artificial Sequence: Synthetic oligonucleotide
  Sense strand starting at position 2904 of SEQ ID NO: 585845
aaauguaaaucucuggugu

SEQ ID NO: 672237 - RNA, 19 nt, Artificial Sequence
  Description of Artificial Sequence: Synthetic oligonucleotide
  Antisense strand to SEQ ID NO: 672236
acaccagagauuuacauuu

SEQ ID NO: 672238 - RNA, 19 nt, Artificial Sequence
  Description of Artificial Sequence: Synthetic oligonucleotide
  Sense strand starting at position 3048 of SEQ ID NO: 585845
ugagcucaugguuaagcua

SEQ ID NO: 672239 - RNA, 19 nt, Artificial Sequence
  Description of Artificial Sequence: Synthetic oligonucleotide
  Antisense strand to SEQ ID NO: 672238
uagcuuaaccaugagcuca

SEQ ID NO: 672240 - RNA, 19 nt, Artificial Sequence
  Description of Artificial Sequence: Synthetic oligonucleotide
  Sense strand starting at position 3055 of SEQ ID NO: 585845
augguuaagcuauagucau

SEQ ID NO: 672241 - RNA, 19 nt, Artificial Sequence
  Description of Artificial Sequence: Synthetic oligonucleotide
  Antisense strand to SEQ ID NO: 672240
augacuauagcuuaaccau

SEQ ID NO: 672242 - RNA, 19 nt, Artificial Sequence
  Description of Artificial Sequence: Synthetic oligonucleotide
  Sense strand starting at position 3202 of SEQ ID NO: 585845
uugagaaacucauuauugu

SEQ ID NO: 672243 - RNA, 19 nt, Artificial Sequence
  Description of Artificial Sequence: Synthetic oligonucleotide
  Antisense strand to SEQ ID NO: 672242
acaauaaugaguuucucaa

SEQ ID NO: 672244 - RNA, 19 nt, Artificial Sequence
  Description of Artificial Sequence: Synthetic oligonucleotide
  Sense strand starting at position 3216 of SEQ ID NO: 585845
auuguccacuguuuacaaa

SEQ ID NO: 672245 - RNA, 19 nt, Artificial Sequence
  Description of Artificial Sequence: Synthetic oligonucleotide
  Antisense strand to SEQ ID NO: 672244
uuuguaaacaguggacaau

SEQ ID NO: 672246 - RNA, 19 nt, Artificial Sequence
  Description of Artificial Sequence: Synthetic oligonucleotide
  Sense strand starting at position 3319 of SEQ ID NO: 585845
gcagcccuccugggaauuu

SEQ ID NO: 672247 - RNA, 19 nt, Artificial Sequence
  Description of Artificial Sequence: Synthetic oligonucleotide
  Antisense strand to SEQ ID NO: 672246
aaauucccaggagggcugc

SEQ ID NO: 672248 - RNA, 19 nt, Artificial Sequence
  Description of Artificial Sequence: Synthetic oligonucleotide
  Sense strand starting at position 3376 of SEQ ID NO: 585845
aucaaagauuguucuguaa

SEQ ID NO: 672249 - RNA, 19 nt, Artificial Sequence
  Description of Artificial Sequence: Synthetic oligonucleotide
  Antisense strand to SEQ ID NO: 672248
uuacagaacaaucuuugau

SEQ ID NO: 672250 - RNA, 19 nt, Artificial Sequence
  Description of Artificial Sequence: Synthetic oligonucleotide
  Sense strand starting at position 3422 of SEQ ID NO: 585845
guuuguuaacaggacuguu

SEQ ID NO: 672251 - RNA, 19 nt, Artificial Sequence
  Description of Artificial Sequence: Synthetic oligonucleotide
  Antisense strand to SEQ ID NO: 672250
aacaguccuguuaacaaac

SEQ ID NO: 672252 - RNA, 19 nt, Artificial Sequence
  Description of Artificial Sequence: Synthetic oligonucleotide
  Sense strand starting at position 3476 of SEQ ID NO: 585845
cuaggaagcccguaagaaa

SEQ ID NO: 672253 - RNA, 19 nt, Artificial Sequence
  Description of Artificial Sequence: Synthetic oligonucleotide
  Antisense strand to SEQ ID NO: 672252
uuucuuacgggcuuccuag

SEQ ID NO: 672254 - RNA, 19 nt, Artificial Sequence
  Description of Artificial Sequence: Synthetic oligonucleotide
  Sense strand starting at position 3532 of SEQ ID NO: 585845
gaacauuauguaugguaca

SEQ ID NO: 672255 - RNA, 19 nt, Artificial Sequence
  Description of Artificial Sequence: Synthetic oligonucleotide
  Antisense strand to SEQ ID NO: 672254
uguaccauacauaauguuc

SEQ ID NO: 672256 - RNA, 19 nt, Artificial Sequence
  Description of Artificial Sequence: Synthetic oligonucleotide
  Sense strand starting at position 3582 of SEQ ID NO: 585845
ugugacacauuccuagaaa

SEQ ID NO: 672257 - RNA, 19 nt, Artificial Sequence
  Description of Artificial Sequence: Synthetic oligonucleotide
  Antisense strand to SEQ ID NO: 672256
uuucuaggaaugugucaca

SEQ ID NO: 672258 - RNA, 19 nt, Artificial Sequence
  Description of Artificial Sequence: Synthetic oligonucleotide
  Sense strand starting at position 3605 of SEQ ID NO: 585845
cugagaaagauucgccaga

SEQ ID NO: 672259 - RNA, 19 nt, Artificial Sequence
  Description of Artificial Sequence: Synthetic oligonucleotide
  Antisense strand to SEQ ID NO: 672258
ucuggcgaaucuuucucag

SEQ ID NO: 672260 - RNA, 19 nt, Artificial Sequence
  Description of Artificial Sequence: Synthetic oligonucleotide
  Sense strand starting at position 3606 of SEQ ID NO: 585845
ugagaaagauucgccagau

SEQ ID NO: 672261 - RNA, 19 nt, Artificial Sequence
  Description of Artificial Sequence: Synthetic oligonucleotide
  Antisense strand to SEQ ID NO: 672260
aucuggcgaaucuuucuca

SEQ ID NO: 672262 - RNA, 19 nt, Artificial Sequence
  Description of Artificial Sequence: Synthetic oligonucleotide
  Sense strand starting at position 3607 of SEQ ID NO: 585845
gagaaagauucgccagauc

SEQ ID NO: 672263 - RNA, 19 nt, Artificial Sequence
  Description of Artificial Sequence: Synthetic oligonucleotide
  Antisense strand to SEQ ID NO: 672262
gaucuggcgaaucuuucuc

SEQ ID NO: 672264 - RNA, 19 nt, Artificial Sequence
  Description of Artificial Sequence: Synthetic oligonucleotide
  Sense strand starting at position 3642 of SEQ ID NO: 585845
ugaccauguguauauauga

SEQ ID NO: 672265 - RNA, 19 nt, Artificial Sequence
  Description of Artificial Sequence: Synthetic oligonucleotide
  Antisense strand to SEQ ID NO: 672264
ucauauauacacaugguca

SEQ ID NO: 672266 - RNA, 19 nt, Artificial Sequence
  Description of Artificial Sequence: Synthetic oligonucleotide
  Sense strand starting at position 3723 of SEQ ID NO: 585845
acacacuaguauguggaaa

SEQ ID NO: 672267 - RNA, 19 nt, Artificial Sequence
  Description of Artificial Sequence: Synthetic oligonucleotide
  Antisense strand to SEQ ID NO: 672266
uuuccacauacuagugugu

SEQ ID NO: 672268 - RNA, 19 nt, Artificial Sequence
  Description of Artificial Sequence: Synthetic oligonucleotide
  Sense strand starting at position 3753 of SEQ ID NO: 585845
gaacucaggcaaugucaua

SEQ ID NO: 672269 - RNA, 19 nt, Artificial Sequence
  Description of Artificial Sequence: Synthetic oligonucleotide
  Antisense strand to SEQ ID NO: 672268
uaugacauugccugaguuc

SEQ ID NO: 672270 - RNA, 19 nt, Artificial Sequence
  Description of Artificial Sequence: Synthetic oligonucleotide
  Sense strand starting at position 3911 of SEQ ID NO: 585845
uggcaaauccuaugcaaau

SEQ ID NO: 672271 - RNA, 19 nt, Artificial Sequence
  Description of Artificial Sequence: Synthetic oligonucleotide
  Antisense strand to SEQ ID NO: 672270
auuugcauaggauuugcca

SEQ ID NO: 672272 - RNA, 19 nt, Artificial Sequence
  Description of Artificial Sequence: Synthetic oligonucleotide
  Sense strand starting at position 3912 of SEQ ID NO: 585845
ggcaaauccuaugcaaaua

SEQ ID NO: 672273 - RNA, 19 nt, Artificial Sequence
  Description of Artificial Sequence: Synthetic oligonucleotide
  Antisense strand to SEQ ID NO: 672272
uauuugcauaggauuugcc

SEQ ID NO: 672274 - RNA, 19 nt, Artificial Sequence
  Description of Artificial Sequence: Synthetic oligonucleotide
  Sense strand starting at position 14 of SEQ ID NO: 585846
cccuuaacucuccguugga

SEQ ID NO: 672275 - RNA, 19 nt, Artificial Sequence
  Description of Artificial Sequence: Synthetic oligonucleotide
  Antisense strand to SEQ ID NO: 672274
uccaacggagaguuaaggg

SEQ ID NO: 672276 - RNA, 19 nt, Artificial Sequence
  Description of Artificial Sequence: Synthetic oligonucleotide
  Sense strand starting at position 58 of SEQ ID NO: 585846
guacuaaguuccuuaucca

SEQ ID NO: 672277 - RNA, 19 nt, Artificial Sequence
  Description of Artificial Sequence: Synthetic oligonucleotide
  Antisense strand to SEQ ID NO: 672276
uggauaaggaacuuaguac

SEQ ID NO: 672278 - RNA, 19 nt, Artificial Sequence
  Description of Artificial Sequence: Synthetic oligonucleotide
  Sense strand starting at position 61 of SEQ ID NO: 585846
cuaaguuccuuauccagua

SEQ ID NO: 672279 - RNA, 19 nt, Artificial Sequence
  Description of Artificial Sequence: Synthetic oligonucleotide
  Antisense strand to SEQ ID NO: 672278
uacuggauaaggaacuuag

SEQ ID NO: 672280 - RNA, 19 nt, Artificial Sequence
  Description of Artificial Sequence: Synthetic oligonucleotide
  Sense strand starting at position 103 of SEQ ID NO: 585846
uagguugcuucugacauuu

SEQ ID NO: 672281 - RNA, 19 nt, Artificial Sequence
  Description of Artificial Sequence: Synthetic oligonucleotide
  Antisense strand to SEQ ID NO: 672280
aaaugucagaagcaaccua

SEQ ID NO: 672282 - RNA, 19 nt, Artificial Sequence
  Description of Artificial Sequence: Synthetic oligonucleotide
  Sense strand starting at position 105 of SEQ ID NO: 585846
gguugcuucugacauuucu

SEQ ID NO: 672283 - RNA, 19 nt, Artificial Sequence
  Description of Artificial Sequence: Synthetic oligonucleotide
  Antisense strand to SEQ ID NO: 672282
agaaaugucagaagcaacc

SEQ ID NO: 672284 - RNA, 19 nt, Artificial Sequence
  Description of Artificial Sequence: Synthetic oligonucleotide
  Sense strand starting at position 111 of SEQ ID NO: 585846
uucugacauuucugagaag

SEQ ID NO: 672285 - RNA, 19 nt, Artificial Sequence
  Description of Artificial Sequence: Synthetic oligonucleotide
  Antisense strand to SEQ ID NO: 672284
cuucucagaaaugucagaa

SEQ ID NO: 672286 - RNA, 19 nt, Artificial Sequence
  Description of Artificial Sequence: Synthetic oligonucleotide
  Sense strand starting at position 112 of SEQ ID NO: 585846
ucugacauuucugagaagu

SEQ ID NO: 672287 - RNA, 19 nt, Artificial Sequence
  Description of Artificial Sequence: Synthetic oligonucleotide
  Antisense strand to SEQ ID NO: 672286
acuucucagaaaugucaga

SEQ ID NO: 672288 - RNA, 19 nt, Artificial Sequence
  Description of Artificial Sequence: Synthetic oligonucleotide
  Sense strand starting at position 114 of SEQ ID NO: 585846
ugacauuucugagaaguaa

SEQ ID NO: 672289 - RNA, 19 nt, Artificial Sequence
  Description of Artificial Sequence: Synthetic oligonucleotide
  Antisense strand to SEQ ID NO: 672288
uuacuucucagaaauguca

SEQ ID NO: 672290 - RNA, 19 nt, Artificial Sequence
  Description of Artificial Sequence: Synthetic oligonucleotide
  Sense strand starting at position 187 of SEQ ID NO: 585846
cccugcuaagcgugagcua

SEQ ID NO: 672291 - RNA, 19 nt, Artificial Sequence
  Description of Artificial Sequence: Synthetic oligonucleotide
  Antisense strand to SEQ ID NO: 672290
uagcucacgcuuagcaggg

SEQ ID NO: 672292 - RNA, 19 nt, Artificial Sequence
  Description of Artificial Sequence: Synthetic oligonucleotide
  Sense strand starting at position 188 of SEQ ID NO: 585846
ccugcuaagcgugagcuau

SEQ ID NO: 672293 - RNA, 19 nt, Artificial Sequence
  Description of Artificial Sequence: Synthetic oligonucleotide
  Antisense strand to SEQ ID NO: 672292
auagcucacgcuuagcagg

SEQ ID NO: 672294 - RNA, 19 nt, Artificial Sequence
  Description of Artificial Sequence: Synthetic oligonucleotide
  Sense strand starting at position 192 of SEQ ID NO: 585846
cuaagcgugagcuaugaua

SEQ ID NO: 672295 - RNA, 19 nt, Artificial Sequence
  Description of Artificial Sequence: Synthetic oligonucleotide
  Antisense strand to SEQ ID NO: 672294
uaucauagcucacgcuuag

SEQ ID NO: 672296 - RNA, 19 nt, Artificial Sequence
  Description of Artificial Sequence: Synthetic oligonucleotide
  Sense strand starting at position 194 of SEQ ID NO: 585846
aagcgugagcuaugauaga

SEQ ID NO: 672297 - RNA, 19 nt, Artificial Sequence
  Description of Artificial Sequence: Synthetic oligonucleotide
  Antisense strand to SEQ ID NO: 672296
ucuaucauagcucacgcuu

SEQ ID NO: 672298 - RNA, 19 nt, Artificial Sequence
  Description of Artificial Sequence: Synthetic oligonucleotide
  Sense strand starting at position 235 of SEQ ID NO: 585846
agcgucaaagcgcaauaaa

SEQ ID NO: 672299 - RNA, 19 nt, Artificial Sequence
  Description of Artificial Sequence: Synthetic oligonucleotide
  Antisense strand to SEQ ID NO: 672298
uuuauugcgcuuugacgcu

SEQ ID NO: 672300 - RNA, 19 nt, Artificial Sequence
  Description of Artificial Sequence: Synthetic oligonucleotide
  Sense strand starting at position 451 of SEQ ID NO: 585846
ucaauagagacucgugaaa

SEQ ID NO: 672301 - RNA, 19 nt, Artificial Sequence
  Description of Artificial Sequence: Synthetic oligonucleotide
  Antisense strand to SEQ ID NO: 672300
uuucacgagucucuauuga

SEQ ID NO: 672302 - RNA, 19 nt, Artificial Sequence
  Description of Artificial Sequence: Synthetic oligonucleotide
  Sense strand starting at position 453 of SEQ ID NO: 585846
aauagagacucgugaaauc

SEQ ID NO: 672303 - RNA, 19 nt, Artificial Sequence
  Description of Artificial Sequence: Synthetic oligonucleotide
  Antisense strand to SEQ ID NO: 672302
gauuucacgagucucuauu

SEQ ID NO: 672304 - RNA, 19 nt, Artificial Sequence
  Description of Artificial Sequence: Synthetic oligonucleotide
  Sense strand starting at position 558 of SEQ ID NO: 585846
agcggugcucuugugcaau

SEQ ID NO: 672305 - RNA, 19 nt, Artificial Sequence
  Description of Artificial Sequence: Synthetic oligonucleotide
  Antisense strand to SEQ ID NO: 672304
auugcacaagagcaccgcu

SEQ ID NO: 672306 - RNA, 19 nt, Artificial Sequence
  Description of Artificial Sequence: Synthetic oligonucleotide
  Sense strand starting at position 1038 of SEQ ID NO: 585846
cccugaggaugauucucaa

SEQ ID NO: 672307 - RNA, 19 nt, Artificial Sequence
  Description of Artificial Sequence: Synthetic oligonucleotide
  Antisense strand to SEQ ID NO: 672306
uugagaaucauccucaggg

SEQ ID NO: 672308 - RNA, 19 nt, Artificial Sequence
  Description of Artificial Sequence: Synthetic oligonucleotide
  Sense strand starting at position 1159 of SEQ ID NO: 585846
ugggauucguaagguuaaa

SEQ ID NO: 672309 - RNA, 19 nt, Artificial Sequence
  Description of Artificial Sequence: Synthetic oligonucleotide
  Antisense strand to SEQ ID NO: 672308
uuuaaccuuacgaauccca

SEQ ID NO: 672310 - RNA, 19 nt, Artificial Sequence
  Description of Artificial Sequence: Synthetic oligonucleotide
  Sense strand starting at position 1202 of SEQ ID NO: 585846
aucugagguuggcaacaau

SEQ ID NO: 672311 - RNA, 19 nt, Artificial Sequence
  Description of Artificial Sequence: Synthetic oligonucleotide
  Antisense strand to SEQ ID NO: 672310
auuguugccaaccucagau

SEQ ID NO: 672312 - RNA, 19 nt, Artificial Sequence
  Description of Artificial Sequence: Synthetic oligonucleotide
  Sense strand starting at position 1238 of SEQ ID NO: 585846
cgaguuggccucugcuuua

SEQ ID NO: 672313 - RNA, 19 nt, Artificial Sequence
  Description of Artificial Sequence: Synthetic oligonucleotide
  Antisense strand to SEQ ID NO: 672312
uaaagcagaggccaacucg

SEQ ID NO: 672314 - RNA, 19 nt, Artificial Sequence
  Description of Artificial Sequence: Synthetic oligonucleotide
  Sense strand starting at position 1249 of SEQ ID NO: 585846
cugcuuuacaccuggagga

SEQ ID NO: 672315 - RNA, 19 nt, Artificial Sequence
  Description of Artificial Sequence: Synthetic oligonucleotide
  Antisense strand to SEQ ID NO: 672314
uccuccagguguaaagcag

SEQ ID NO: 672316 - RNA, 19 nt, Artificial Sequence
  Description of Artificial Sequence: Synthetic oligonucleotide
  Sense strand starting at position 3160 of SEQ ID NO: 585846
ggaugauguuucugugaua

SEQ ID NO: 672317 - RNA, 19 nt, Artificial Sequence
  Description of Artificial Sequence: Synthetic oligonucleotide
  Antisense strand to SEQ ID NO: 672316
uaucacagaaacaucaucc

SEQ ID NO: 672318 - RNA, 19 nt, Artificial Sequence
  Description of Artificial Sequence: Synthetic oligonucleotide
  Sense strand starting at position 3161 of SEQ ID NO: 585846
gaugauguuucugugauac

SEQ ID NO: 672319 - RNA, 19 nt, Artificial Sequence
  Description of Artificial Sequence: Synthetic oligonucleotide
  Antisense strand to SEQ ID NO: 672318
guaucacagaaacaucauc

SEQ ID NO: 672320 - RNA, 19 nt, Artificial Sequence
  Description of Artificial Sequence: Synthetic oligonucleotide
  Sense strand starting at position 3314 of SEQ ID NO: 585846
uguggaguguucguuauga

SEQ ID NO: 672321 - RNA, 19 nt, Artificial Sequence
  Description of Artificial Sequence: Synthetic oligonucleotide
  Antisense strand to SEQ ID NO: 672320
ucauaacgaacacuccaca

SEQ ID NO: 672322 - RNA, 19 nt, Artificial Sequence
  Description of Artificial Sequence: Synthetic oligonucleotide
  Sense strand starting at position 3316 of SEQ ID NO: 585846
uggaguguucguuaugaca

SEQ ID NO: 672323 - RNA, 19 nt, Artificial Sequence
  Description of Artificial Sequence: Synthetic oligonucleotide
  Antisense strand to SEQ ID NO: 672322
ugucauaacgaacacucca

SEQ ID NO: 672324 - RNA, 19 nt, Artificial Sequence
  Description of Artificial Sequence: Synthetic oligonucleotide
  Sense strand starting at position 3324 of SEQ ID NO: 585846
ucguuaugacaguggugga

SEQ ID NO: 672325 - RNA, 19 nt, Artificial Sequence
  Description of Artificial Sequence: Synthetic oligonucleotide
  Antisense strand to SEQ ID NO: 672324
uccaccacugucauaacga

SEQ ID NO: 672326 - RNA, 19 nt, Artificial Sequence
  Description of Artificial Sequence: Synthetic oligonucleotide
  Sense strand starting at position 3325 of SEQ ID NO: 585846
cguuaugacagugguggaa

SEQ ID NO: 672327 - RNA, 19 nt, Artificial Sequence
  Description of Artificial Sequence: Synthetic oligonucleotide
  Antisense strand to SEQ ID NO: 672326
uuccaccacugucauaacg

SEQ ID NO: 672328 - RNA, 19 nt, Artificial Sequence
  Description of Artificial Sequence: Synthetic oligonucleotide
  Sense strand starting at position 3400 of SEQ ID NO: 585846
ugaguaagcuuuccauuaa

SEQ ID NO: 672329 - RNA, 19 nt, Artificial Sequence
  Description of Artificial Sequence: Synthetic oligonucleotide
  Antisense strand to SEQ ID NO: 672328
uuaauggaaagcuuacuca

SEQ ID NO: 672330 - RNA, 19 nt, Artificial Sequence
  Description of Artificial Sequence: Synthetic oligonucleotide
  Sense strand starting at position 3421 of SEQ ID NO: 585846
cucaguuuggccugucaaa

SEQ ID NO: 672331 - RNA, 19 nt, Artificial Sequence
  Description of Artificial Sequence: Synthetic oligonucleotide
  Antisense strand to SEQ ID NO: 672330
uuugacaggccaaacugag

SEQ ID NO: 672332 - RNA, 19 nt, Artificial Sequence
  Description of Artificial Sequence: Synthetic oligonucleotide
  Sense strand starting at position 3442 of SEQ ID NO: 585846
aggcucauucuggguauua

SEQ ID NO: 672333 - RNA, 19 nt, Artificial Sequence
  Description of Artificial Sequence: Synthetic oligonucleotide
  Antisense strand to SEQ ID NO: 672332
uaauacccagaaugagccu

SEQ ID NO: 672334 - RNA, 19 nt, Artificial Sequence
  Description of Artificial Sequence: Synthetic oligonucleotide
  Sense strand starting at position 3443 of SEQ ID NO: 585846
ggcucauucuggguauuac

SEQ ID NO: 672335 - RNA, 19 nt, Artificial Sequence
  Description of Artificial Sequence: Synthetic oligonucleotide
  Antisense strand to SEQ ID NO: 672334
guaauacccagaaugagcc

SEQ ID NO: 672336 - RNA, 19 nt, Artificial Sequence
  Description of Artificial Sequence: Synthetic oligonucleotide
  Sense strand starting at position 3444 of SEQ ID NO: 585846
gcucauucuggguauuaca

SEQ ID NO: 672337 - RNA, 19 nt, Artificial Sequence
  Description of Artificial Sequence: Synthetic oligonucleotide
  Antisense strand to SEQ ID NO: 672336
uguaauacccagaaugagc

SEQ ID NO: 672338 - RNA, 19 nt, Artificial Sequence
  Description of Artificial Sequence: Synthetic oligonucleotide
  Sense strand starting at position 3452 of SEQ ID NO: 585846
uggguauuacaucgccuaa

SEQ ID NO: 672339 - RNA, 19 nt, Artificial Sequence
  Description of Artificial Sequence: Synthetic oligonucleotide
  Antisense strand to SEQ ID NO: 672338
uuaggcgauguaauaccca

SEQ ID NO: 672340 - RNA, 19 nt, Artificial Sequence
  Description of Artificial Sequence: Synthetic oligonucleotide
  Sense strand starting at position 3454 of SEQ ID NO: 585846
gguauuacaucgccuaauu

SEQ ID NO: 672341 - RNA, 19 nt, Artificial Sequence
  Description of Artificial Sequence: Synthetic oligonucleotide
  Antisense strand to SEQ ID NO: 672340
aauuaggcgauguaauacc

SEQ ID NO: 672342 - RNA, 19 nt, Artificial Sequence
  Description of Artificial Sequence: Synthetic oligonucleotide
  Sense strand starting at position 3785 of SEQ ID NO: 585846
aacacuuacgccgaggaaa

SEQ ID NO: 672343 - RNA, 19 nt, Artificial Sequence
  Description of Artificial Sequence: Synthetic oligonucleotide
  Antisense strand to SEQ ID NO: 672342
uuuccucggcguaaguguu

SEQ ID NO: 672344 - RNA, 19 nt, Artificial Sequence
  Description of Artificial Sequence: Synthetic oligonucleotide
  Sense strand starting at position 3837 of SEQ ID NO: 585846
gaggaagacugaugagguu

SEQ ID NO: 672345 - RNA, 19 nt, Artificial Sequence
  Description of Artificial Sequence: Synthetic oligonucleotide
  Antisense strand to SEQ ID NO: 672344
aaccucaucagucuuccuc

SEQ ID NO: 672346 - RNA, 19 nt, Artificial Sequence
  Description of Artificial Sequence: Synthetic oligonucleotide
  Sense strand starting at position 3878 of SEQ ID NO: 585846
gcguccuguauuugcgauu

SEQ ID NO: 672347 - RNA, 19 nt, Artificial Sequence
  Description of Artificial Sequence: Synthetic oligonucleotide
  Antisense strand to SEQ ID NO: 672346
aaucgcaaauacaggacgc

SEQ ID NO: 672348 - RNA, 19 nt, Artificial Sequence
  Description of Artificial Sequence: Synthetic oligonucleotide
  Sense strand starting at position 3879 of SEQ ID NO: 585846
cguccuguauuugcgauuu

SEQ ID NO: 672349 - RNA, 19 nt, Artificial Sequence
  Description of Artificial Sequence: Synthetic oligonucleotide
  Antisense strand to SEQ ID NO: 672348
aaaucgcaaauacaggacg

SEQ ID NO: 672350 - RNA, 19 nt, Artificial Sequence
  Description of Artificial Sequence: Synthetic oligonucleotide
  Sense strand starting at position 3899 of SEQ ID NO: 585846
cccaguagccucugagaac

SEQ ID NO: 672351 - RNA, 19 nt, Artificial Sequence
  Description of Artificial Sequence: Synthetic oligonucleotide
  Antisense strand to SEQ ID NO: 672350
guucucagaggcuacuggg

SEQ ID NO: 672352 - RNA, 19 nt, Artificial Sequence
  Description of Artificial Sequence: Synthetic oligonucleotide
  Sense strand starting at position 3910 of SEQ ID NO: 585846
cugagaaccuaucuaggua

SEQ ID NO: 672353 - RNA, 19 nt, Artificial Sequence
  Description of Artificial Sequence: Synthetic oligonucleotide
  Antisense strand to SEQ ID NO: 672352
uaccuagauagguucucag

SEQ ID NO: 672354 - RNA, 19 nt, Artificial Sequence
  Description of Artificial Sequence: Synthetic oligonucleotide
  Sense strand starting at position 19 of SEQ ID NO: 585847
guaaaucuuccagaaugug

SEQ ID NO: 672355 - RNA, 19 nt, Artificial Sequence
  Description of Artificial Sequence: Synthetic oligonucleotide
  Antisense strand to SEQ ID NO: 672354
cacauucuggaagauuuac

SEQ ID NO: 672356 - RNA, 19 nt, Artificial Sequence
  Description of Artificial Sequence: Synthetic oligonucleotide
  Sense strand starting at position 22 of SEQ ID NO: 585847
aaucuuccagaauguggua

SEQ ID NO: 672357 - RNA, 19 nt, Artificial Sequence
  Description of Artificial Sequence: Synthetic oligonucleotide
  Antisense strand to SEQ ID NO: 672356
uaccacauucuggaagauu

SEQ ID NO: 672358 - RNA, 19 nt, Artificial Sequence
  Description of Artificial Sequence: Synthetic oligonucleotide
  Sense strand starting at position 102 of SEQ ID NO: 585847
acuagaugccuccagucaa

SEQ ID NO: 672359 - RNA, 19 nt, Artificial Sequence
  Description of Artificial Sequence: Synthetic oligonucleotide
  Antisense strand to SEQ ID NO: 672358
uugacuggaggcaucuagu

SEQ ID NO: 672360 - RNA, 19 nt, Artificial Sequence
  Description of Artificial Sequence: Synthetic oligonucleotide
  Sense strand starting at position 120 of SEQ ID NO: 585847
acaagaugugacugucuaa

SEQ ID NO: 672361 - RNA, 19 nt, Artificial Sequence
  Description of Artificial Sequence: Synthetic oligonucleotide
  Antisense strand to SEQ ID NO: 672360
uuagacagucacaucuugu

SEQ ID NO: 672362 - RNA, 19 nt, Artificial Sequence
  Description of Artificial Sequence: Synthetic oligonucleotide
  Sense strand starting at position 566 of SEQ ID NO: 585847
ugaacuguuccacaguuag

SEQ ID NO: 672363 - RNA, 19 nt, Artificial Sequence
  Description of Artificial Sequence: Synthetic oligonucleotide
  Antisense strand to SEQ ID NO: 672362
cuaacuguggaacaguuca

SEQ ID NO: 672364 - RNA, 19 nt, Artificial Sequence
  Description of Artificial Sequence: Synthetic oligonucleotide
  Sense strand starting at position 728 of SEQ ID NO: 585847
guuugcucucaggaagaug

SEQ ID NO: 672365 - RNA, 19 nt, Artificial Sequence
  Description of Artificial Sequence: Synthetic oligonucleotide
  Antisense strand to SEQ ID NO: 672364
caucuuccugagagcaaac

SEQ ID NO: 672366 - RNA, 19 nt, Artificial Sequence
  Description of Artificial Sequence: Synthetic oligonucleotide
  Sense strand starting at position 802 of SEQ ID NO: 585847
gugaccuggcaguaagaca

SEQ ID NO: 672367 - RNA, 19 nt, Artificial Sequence
  Description of Artificial Sequence: Synthetic oligonucleotide
  Antisense strand to SEQ ID NO: 672366
ugucuuacugccaggucac

SEQ ID NO: 672368 - RNA, 19 nt, Artificial Sequence
  Description of Artificial Sequence: Synthetic oligonucleotide
  Sense strand starting at position 1055 of SEQ ID NO: 585847
uggcaauauguguaacgga

SEQ ID NO: 672369 - RNA, 19 nt, Artificial Sequence
  Description of Artificial Sequence: Synthetic oligonucleotide
  Antisense strand to SEQ ID NO: 672368
uccguuacacauauugcca

SEQ ID NO: 672370 - RNA, 19 nt, Artificial Sequence
  Description of Artificial Sequence: Synthetic oligonucleotide
  Sense strand starting at position 1070 of SEQ ID NO: 585847
cggaauguggcucacaaca

SEQ ID NO: 672371 - RNA, 19 nt, Artificial Sequence
  Description of Artificial Sequence: Synthetic oligonucleotide
  Antisense strand to SEQ ID NO: 672370
uguugugagccacauuccg

SEQ ID NO: 672372 - RNA, 19 nt, Artificial Sequence
  Description of Artificial Sequence: Synthetic oligonucleotide
  Sense strand starting at position 1160 of SEQ ID NO: 585847
cuccuucuacaaugaggua

SEQ ID NO: 672373 - RNA, 19 nt, Artificial Sequence
  Description of Artificial Sequence: Synthetic oligonucleotide
  Antisense strand to SEQ ID NO: 672372
uaccucauuguagaaggag

SEQ ID NO: 672374 - RNA, 19 nt, Artificial Sequence
  Description of Artificial Sequence: Synthetic oligonucleotide
  Sense strand starting at position 1172 of SEQ ID NO: 585847
ugagguagaccauguguuu

SEQ ID NO: 672375 - RNA, 19 nt, Artificial Sequence
  Description of Artificial Sequence: Synthetic oligonucleotide
  Antisense strand to SEQ ID NO: 672374
aaacacauggucuaccuca

SEQ ID NO: 672376 - RNA, 19 nt, Artificial Sequence
  Description of Artificial Sequence: Synthetic oligonucleotide
  Sense strand starting at position 1175 of SEQ ID NO: 585847
gguagaccauguguuuaaa

SEQ ID NO: 672377 - RNA, 19 nt, Artificial Sequence
  Description of Artificial Sequence: Synthetic oligonucleotide
  Antisense strand to SEQ ID NO: 672376
uuuaaacacauggucuacc

SEQ ID NO: 672378 - RNA, 19 nt, Artificial Sequence
  Description of Artificial Sequence: Synthetic oligonucleotide
  Sense strand starting at position 1198 of SEQ ID NO: 585847
agacuaucgugccuggaaa

SEQ ID NO: 672379 - RNA, 19 nt, Artificial Sequence
  Description of Artificial Sequence: Synthetic oligonucleotide
  Antisense strand to SEQ ID NO: 672378
uuuccaggcacgauagucu

SEQ ID NO: 672380 - RNA, 19 nt, Artificial Sequence
  Description of Artificial Sequence: Synthetic oligonucleotide
  Sense strand starting at position 2591 of SEQ ID NO: 585847
uaagaacaguucuuggaca

SEQ ID NO: 672381 - RNA, 19 nt, Artificial Sequence
  Description of Artificial Sequence: Synthetic oligonucleotide
  Antisense strand to SEQ ID NO: 672380
uguccaagaacuguucuua

SEQ ID NO: 672382 - RNA, 19 nt, Artificial Sequence
  Description of Artificial Sequence: Synthetic oligonucleotide
  Sense strand starting at position 2676 of SEQ ID NO: 585847
ugguauuauugauucuagu

SEQ ID NO: 672383 - RNA, 19 nt, Artificial Sequence
  Description of Artificial Sequence: Synthetic oligonucleotide
  Antisense strand to SEQ ID NO: 672382
acuagaaucaauaauacca

SEQ ID NO: 672384 - RNA, 19 nt, Artificial Sequence
  Description of Artificial Sequence: Synthetic oligonucleotide
  Sense strand starting at position 2698 of SEQ ID NO: 585847
agugaaauccuuugagguu

SEQ ID NO: 672385 - RNA, 19 nt, Artificial Sequence
  Description of Artificial Sequence: Synthetic oligonucleotide
  Antisense strand to SEQ ID NO: 672384
aaccucaaaggauuucacu

SEQ ID NO: 672386 - RNA, 19 nt, Artificial Sequence
  Description of Artificial Sequence: Synthetic oligonucleotide
  Sense strand starting at position 2732 of SEQ ID NO: 585847
ggcacaguuaacugaguca

SEQ ID NO: 672387 - RNA, 19 nt, Artificial Sequence
  Description of Artificial Sequence: Synthetic oligonucleotide
  Antisense strand to SEQ ID NO: 672386
ugacucaguuaacugugcc

SEQ ID NO: 672388 - RNA, 19 nt, Artificial Sequence
  Description of Artificial Sequence: Synthetic oligonucleotide
  Sense strand starting at position 2735 of SEQ ID NO: 585847
acaguuaacugagucagga

SEQ ID NO: 672389 - RNA, 19 nt, Artificial Sequence
  Description of Artificial Sequence: Synthetic oligonucleotide
  Antisense strand to SEQ ID NO: 672388
uccugacucaguuaacugu

SEQ ID NO: 672390 - RNA, 19 nt, Artificial Sequence
  Description of Artificial Sequence: Synthetic oligonucleotide
  Sense strand starting at position 2799 of SEQ ID NO: 585847
guguguuuacaguaacucu

SEQ ID NO: 672391 - RNA, 19 nt, Artificial Sequence
  Description of Artificial Sequence: Synthetic oligonucleotide
  Antisense strand to SEQ ID NO: 672390
agaguuacuguaaacacac

SEQ ID NO: 672392 - RNA, 19 nt, Artificial Sequence
  Description of Artificial Sequence: Synthetic oligonucleotide
  Sense strand starting at position 2873 of SEQ ID NO: 585847
ugucuuguagccuaguaag

SEQ ID NO: 672393 - RNA, 19 nt, Artificial Sequence
  Description of Artificial Sequence: Synthetic oligonucleotide
  Antisense strand to SEQ ID NO: 672392
cuuacuaggcuacaagaca

SEQ ID NO: 672394 - RNA, 19 nt, Artificial Sequence
  Description of Artificial Sequence: Synthetic oligonucleotide
  Sense strand starting at position 2887 of SEQ ID NO: 585847
guaagcuguuaaguaucaa

SEQ ID NO: 672395 - RNA, 19 nt, Artificial Sequence
  Description of Artificial Sequence: Synthetic oligonucleotide
  Antisense strand to SEQ ID NO: 672394
uugauacuuaacagcuuac

SEQ ID NO: 672396 - RNA, 19 nt, Artificial Sequence
  Description of Artificial Sequence: Synthetic oligonucleotide
  Sense strand starting at position 2906 of SEQ ID NO: 585847
gugcucucucaacaguuaa

SEQ ID NO: 672397 - RNA, 19 nt, Artificial Sequence
  Description of Artificial Sequence: Synthetic oligonucleotide
  Antisense strand to SEQ ID NO: 672396
uuaacuguugagagagcac

SEQ ID NO: 672398 - RNA, 19 nt, Artificial Sequence
  Description of Artificial Sequence: Synthetic oligonucleotide
  Sense strand starting at position 2932 of SEQ ID NO: 585847
uccugaauggugugaaucu

SEQ ID NO: 672399 - RNA, 19 nt, Artificial Sequence
  Description of Artificial Sequence: Synthetic oligonucleotide
  Antisense strand to SEQ ID NO: 672398
agauucacaccauucagga

SEQ ID NO: 672400 - RNA, 19 nt, Artificial Sequence
  Description of Artificial Sequence: Synthetic oligonucleotide
  Sense strand starting at position 2943 of SEQ ID NO: 585847
gugaaucuuccauguguag

SEQ ID NO: 672401 - RNA, 19 nt, Artificial Sequence
  Description of Artificial Sequence: Synthetic oligonucleotide
  Antisense strand to SEQ ID NO: 672400
cuacacauggaagauucac

SEQ ID NO: 672402 - RNA, 19 nt, Artificial Sequence
  Description of Artificial Sequence: Synthetic oligonucleotide
  Sense strand starting at position 2949 of SEQ ID NO: 585847
cuuccauguguagagguua

SEQ ID NO: 672403 - RNA, 19 nt, Artificial Sequence
  Description of Artificial Sequence: Synthetic oligonucleotide
  Antisense strand to SEQ ID NO: 672402
uaaccucuacacauggaag

SEQ ID NO: 672404 - RNA, 19 nt, Artificial Sequence
  Description of Artificial Sequence: Synthetic oligonucleotide
  Sense strand starting at position 2968 of SEQ ID NO: 585847
ggaaaucuacacugccauu

SEQ ID NO: 672405 - RNA, 19 nt, Artificial Sequence
  Description of Artificial Sequence: Synthetic oligonucleotide
  Antisense strand to SEQ ID NO: 672404
aauggcaguguagauuucc

SEQ ID NO: 672406 - RNA, 19 nt, Artificial Sequence
  Description of Artificial Sequence: Synthetic oligonucleotide
  Sense strand starting at position 3099 of SEQ ID NO: 585847
cgguaaguggaaugggaaa

SEQ ID NO: 672407 - RNA, 19 nt, Artificial Sequence
  Description of Artificial Sequence: Synthetic oligonucleotide
  Antisense strand to SEQ ID NO: 672406
uuucccauuccacuuaccg

SEQ ID NO: 672408 - RNA, 19 nt, Artificial Sequence
  Description of Artificial Sequence: Synthetic oligonucleotide
  Sense strand starting at position 3173 of SEQ ID NO: 585847
cuuguuuacagacgucaga

SEQ ID NO: 672409 - RNA, 19 nt, Artificial Sequence
  Description of Artificial Sequence: Synthetic oligonucleotide
  Antisense strand to SEQ ID NO: 672408
ucugacgucuguaaacaag

SEQ ID NO: 672410 - RNA, 19 nt, Artificial Sequence
  Description of Artificial Sequence: Synthetic oligonucleotide
  Sense strand starting at position 3176 of SEQ ID NO: 585847
guuuacagacgucagaaga

SEQ ID NO: 672411 - RNA, 19 nt, Artificial Sequence
  Description of Artificial Sequence: Synthetic oligonucleotide
  Antisense strand to SEQ ID NO: 672410
ucuucugacgucuguaaac

SEQ ID NO: 672412 - RNA, 19 nt, Artificial Sequence
  Description of Artificial Sequence: Synthetic oligonucleotide
  Sense strand starting at position 3184 of SEQ ID NO: 585847
acgucagaagaauguaacu

SEQ ID NO: 672413 - RNA, 19 nt, Artificial Sequence
  Description of Artificial Sequence: Synthetic oligonucleotide
  Antisense strand to SEQ ID NO: 672412
aguuacauucuucugacgu

SEQ ID NO: 672414 - RNA, 19 nt, Artificial Sequence
  Description of Artificial Sequence: Synthetic oligonucleotide
  Sense strand starting at position 3247 of SEQ ID NO: 585847
gguuauagauacucuuauu

SEQ ID NO: 672415 - RNA, 19 nt, Artificial Sequence
  Description of Artificial Sequence: Synthetic oligonucleotide
  Antisense strand to SEQ ID NO: 672414
aauaagaguaucuauaacc

SEQ ID NO: 672416 - RNA, 19 nt, Artificial Sequence
  Description of Artificial Sequence: Synthetic oligonucleotide
  Sense strand starting at position 3322 of SEQ ID NO: 585847
uggaguacugugucgcgau

SEQ ID NO: 672417 - RNA, 19 nt, Artificial Sequence
  Description of Artificial Sequence: Synthetic oligonucleotide
  Antisense strand to SEQ ID NO: 672416
aucgcgacacaguacucca

SEQ ID NO: 672418 - RNA, 19 nt, Artificial Sequence
  Description of Artificial Sequence: Synthetic oligonucleotide
  Sense strand starting at position 3617 of SEQ ID NO: 585847
guuugaugugauuguuaau

SEQ ID NO: 672419 - RNA, 19 nt, Artificial Sequence
  Description of Artificial Sequence: Synthetic oligonucleotide
  Antisense strand to SEQ ID NO: 672418
auuaacaaucacaucaaac

SEQ ID NO: 672420 - RNA, 19 nt, Artificial Sequence
  Description of Artificial Sequence: Synthetic oligonucleotide
  Sense strand starting at position 3623 of SEQ ID NO: 585847
ugugauuguuaauuggaag

SEQ ID NO: 672421 - RNA, 19 nt, Artificial Sequence
  Description of Artificial Sequence: Synthetic oligonucleotide
  Antisense strand to SEQ ID NO: 672420
cuuccaauuaacaaucaca

SEQ ID NO: 672422 - RNA, 19 nt, Artificial Sequence
  Description of Artificial Sequence: Synthetic oligonucleotide
  Sense strand starting at position 3644 of SEQ ID NO: 585847
gagaaacauuucugcugag

SEQ ID NO: 672423 - RNA, 19 nt, Artificial Sequence
  Description of Artificial Sequence: Synthetic oligonucleotide
  Antisense strand to SEQ ID NO: 672422
cucagcagaaauguuucuc

SEQ ID NO: 672424 - RNA, 19 nt, Artificial Sequence
  Description of Artificial Sequence: Synthetic oligonucleotide
  Sense strand starting at position 3791 of SEQ ID NO: 585847
gggcacuagcuaugagaac

SEQ ID NO: 672425 - RNA, 19 nt, Artificial Sequence
  Description of Artificial Sequence: Synthetic oligonucleotide
  Antisense strand to SEQ ID NO: 672424
guucucauagcuagugccc

SEQ ID NO: 672426 - RNA, 19 nt, Artificial Sequence
  Description of Artificial Sequence: Synthetic oligonucleotide
  Sense strand starting at position 3855 of SEQ ID NO: 585847
acagaucagucauuguaau

SEQ ID NO: 672427 - RNA, 19 nt, Artificial Sequence
  Description of Artificial Sequence: Synthetic oligonucleotide
  Antisense strand to SEQ ID NO: 672426
auuacaaugacugaucugu

SEQ ID NO: 672428 - RNA, 19 nt, Artificial Sequence
  Description of Artificial Sequence: Synthetic oligonucleotide
  Sense strand starting at position 3856 of SEQ ID NO: 585847
cagaucagucauuguaaug

SEQ ID NO: 672429 - RNA, 19 nt, Artificial Sequence
  Description of Artificial Sequence: Synthetic oligonucleotide
  Antisense strand to SEQ ID NO: 672428
cauuacaaugacugaucug

SEQ ID NO: 672430 - RNA, 19 nt, Artificial Sequence
  Description of Artificial Sequence: Synthetic oligonucleotide
  Sense strand starting at position 3862 of SEQ ID NO: 585847
agucauuguaauggaaaga

SEQ ID NO: 672431 - RNA, 19 nt, Artificial Sequence
  Description of Artificial Sequence: Synthetic oligonucleotide
  Antisense strand to SEQ ID NO: 672430
ucuuuccauuacaaugacu

SEQ ID NO: 672432 - RNA, 19 nt, Artificial Sequence
  Description of Artificial Sequence: Synthetic oligonucleotide
  Sense strand starting at position 3950 of SEQ ID NO: 585847
uuguauagagagugauacu

SEQ ID NO: 672433 - RNA, 19 nt, Artificial Sequence
  Description of Artificial Sequence: Synthetic oligonucleotide
  Antisense strand to SEQ ID NO: 672432
aguaucacucucuauacaa

SEQ ID NO: 672434 - RNA, 19 nt, Artificial Sequence
  Description of Artificial Sequence: Synthetic oligonucleotide
  Sense strand starting at position 26 of SEQ ID NO: 585848
gucuauauggguuaguuau

SEQ ID NO: 672435 - RNA, 19 nt, Artificial Sequence
  Description of Artificial Sequence: Synthetic oligonucleotide
  Antisense strand to SEQ ID NO: 672434
auaacuaacccauauagac

SEQ ID NO: 672436 - RNA, 19 nt, Artificial Sequence
  Description of Artificial Sequence: Synthetic oligonucleotide
  Sense strand starting at position 28 of SEQ ID NO: 585848
cuauauggguuaguuauua

SEQ ID NO: 672437 - RNA, 19 nt, Artificial Sequence
  Description of Artificial Sequence: Synthetic oligonucleotide
  Antisense strand to SEQ ID NO: 672436
uaauaacuaacccauauag

SEQ ID NO: 672438 - RNA, 19 nt, Artificial Sequence
  Description of Artificial Sequence: Synthetic oligonucleotide
  Sense strand starting at position 32 of SEQ ID NO: 585848
auggguuaguuauuagcaa

SEQ ID NO: 672439 - RNA, 19 nt, Artificial Sequence
  Description of Artificial Sequence: Synthetic oligonucleotide
  Antisense strand to SEQ ID NO: 672438
uugcuaauaacuaacccau

SEQ ID NO: 672440 - RNA, 19 nt, Artificial Sequence
  Description of Artificial Sequence: Synthetic oligonucleotide
  Sense strand starting at position 131 of SEQ ID NO: 585848
uaaguuucuggugaugaau

SEQ ID NO: 672441 - RNA, 19 nt, Artificial Sequence
  Description of Artificial Sequence: Synthetic oligonucleotide
  Antisense strand to SEQ ID NO: 672440
auucaucaccagaaacuua

SEQ ID NO: 672442 - RNA, 19 nt, Artificial Sequence
  Description of Artificial Sequence: Synthetic oligonucleotide
  Sense strand starting at position 200 of SEQ ID NO: 585848
guguaauugcuagauagaa

SEQ ID NO: 672443 - RNA, 19 nt, Artificial Sequence
  Description of Artificial Sequence: Synthetic oligonucleotide
  Antisense strand to SEQ ID NO: 672442
uucuaucuagcaauuacac

SEQ ID NO: 672444 - RNA, 19 nt, Artificial Sequence
  Description of Artificial Sequence: Synthetic oligonucleotide
  Sense strand starting at position 283 of SEQ ID NO: 585848
gugcccauuuccuccuaua

SEQ ID NO: 672445 - RNA, 19 nt, Artificial Sequence
  Description of Artificial Sequence: Synthetic oligonucleotide
  Antisense strand to SEQ ID NO: 672444
uauaggaggaaaugggcac

SEQ ID NO: 672446 - RNA, 19 nt, Artificial Sequence
  Description of Artificial Sequence: Synthetic oligonucleotide
  Sense strand starting at position 384 of SEQ ID NO: 585848
agauaaauccgucacuagc

SEQ ID NO: 672447 - RNA, 19 nt, Artificial Sequence
  Description of Artificial Sequence: Synthetic oligonucleotide
  Antisense strand to SEQ ID NO: 672446
gcuagugacggauuuaucu

SEQ ID NO: 672448 - RNA, 19 nt, Artificial Sequence
  Description of Artificial Sequence: Synthetic oligonucleotide
  Sense strand starting at position 440 of SEQ ID NO: 585848
gguuccucucccuagggau

SEQ ID NO: 672449 - RNA, 19 nt, Artificial Sequence
  Description of Artificial Sequence: Synthetic oligonucleotide
  Antisense strand to SEQ ID NO: 672448
aucccuagggagaggaacc

SEQ ID NO: 672450 - RNA, 19 nt, Artificial Sequence
  Description of Artificial Sequence: Synthetic oligonucleotide
  Sense strand starting at position 521 of SEQ ID NO: 585848
gggcaugacuaggcauaaa

SEQ ID NO: 672451 - RNA, 19 nt, Artificial Sequence
  Description of Artificial Sequence: Synthetic oligonucleotide
  Antisense strand to SEQ ID NO: 672450
uuuaugccuagucaugccc

SEQ ID NO: 672452 - RNA, 19 nt, Artificial Sequence
  Description of Artificial Sequence: Synthetic oligonucleotide
  Sense strand starting at position 830 of SEQ ID NO: 585848
gaaugucuggccuaguuua

SEQ ID NO: 672453 - RNA, 19 nt, Artificial Sequence
  Description of Artificial Sequence: Synthetic oligonucleotide
  Antisense strand to SEQ ID NO: 672452
uaaacuaggccagacauuc

SEQ ID NO: 672454 - RNA, 19 nt, Artificial Sequence
  Description of Artificial Sequence: Synthetic oligonucleotide
  Sense strand starting at position 870 of SEQ ID NO: 585848
ugggcuaucuaacuaacuu

SEQ ID NO: 672455 - RNA, 19 nt, Artificial Sequence
  Description of Artificial Sequence: Synthetic oligonucleotide
  Antisense strand to SEQ ID NO: 672454
aaguuaguuagauagccca

SEQ ID NO: 672456 - RNA, 19 nt, Artificial Sequence
  Description of Artificial Sequence: Synthetic oligonucleotide
  Sense strand starting at position 943 of SEQ ID NO: 585848
cugagaagccaauguuuaa

SEQ ID NO: 672457 - RNA, 19 nt, Artificial Sequence
  Description of Artificial Sequence: Synthetic oligonucleotide
  Antisense strand to SEQ ID NO: 672456
uuaaacauuggcuucucag

SEQ ID NO: 672458 - RNA, 19 nt, Artificial Sequence
  Description of Artificial Sequence: Synthetic oligonucleotide
  Sense strand starting at position 977 of SEQ ID NO: 585848
agcauuaacccaggcgaaa

SEQ ID NO: 672459 - RNA, 19 nt, Artificial Sequence
  Description of Artificial Sequence: Synthetic oligonucleotide
  Antisense strand to SEQ ID NO: 672458
uuucgccuggguuaaugcu

SEQ ID NO: 672460 - RNA, 19 nt, Artificial Sequence
  Description of Artificial Sequence: Synthetic oligonucleotide
  Sense strand starting at position 1238 of SEQ ID NO: 585848
gagguuuccaaguagcuga

SEQ ID NO: 672461 - RNA, 19 nt, Artificial Sequence
  Description of Artificial Sequence: Synthetic oligonucleotide
  Antisense strand to SEQ ID NO: 672460
ucagcuacuuggaaaccuc

SEQ ID NO: 672462 - RNA, 19 nt, Artificial Sequence
  Description of Artificial Sequence: Synthetic oligonucleotide
  Sense strand starting at position 1292 of SEQ ID NO: 585848
gaucucaggguuuauuauu

SEQ ID NO: 672463 - RNA, 19 nt, Artificial Sequence
  Description of Artificial Sequence: Synthetic oligonucleotide
  Antisense strand to SEQ ID NO: 672462
aauaauaaacccugagauc

SEQ ID NO: 672464 - RNA, 19 nt, Artificial Sequence
  Description of Artificial Sequence: Synthetic oligonucleotide
  Sense strand starting at position 1355 of SEQ ID NO: 585848
gcgacuuuccggcugagca

SEQ ID NO: 672465 - RNA, 19 nt, Artificial Sequence
  Description of Artificial Sequence: Synthetic oligonucleotide
  Antisense strand to SEQ ID NO: 672464
ugcucagccggaaagucgc

SEQ ID NO: 672466 - RNA, 19 nt, Artificial Sequence
  Description of Artificial Sequence: Synthetic oligonucleotide
  Sense strand starting at position 1871 of SEQ ID NO: 585848
ucggucauucuccaucaau

SEQ ID NO: 672467 - RNA, 19 nt, Artificial Sequence
  Description of Artificial Sequence: Synthetic oligonucleotide
  Antisense strand to SEQ ID NO: 672466
auugauggagaaugaccga

SEQ ID NO: 672468 - RNA, 19 nt, Artificial Sequence
  Description of Artificial Sequence: Synthetic oligonucleotide
  Sense strand starting at position 1943 of SEQ ID NO: 585848
ugacuaacaucuccugaug

SEQ ID NO: 672469 - RNA, 19 nt, Artificial Sequence
  Description of Artificial Sequence: Synthetic oligonucleotide
  Antisense strand to SEQ ID NO: 672468
caucaggagauguuaguca

SEQ ID NO: 672470 - RNA, 19 nt, Artificial Sequence
  Description of Artificial Sequence: Synthetic oligonucleotide
  Sense strand starting at position 2056 of SEQ ID NO: 585848
gggcggagucaucagaugu

SEQ ID NO: 672471 - RNA, 19 nt, Artificial Sequence
  Description of Artificial Sequence: Synthetic oligonucleotide
  Antisense strand to SEQ ID NO: 672470
acaucugaugacuccgccc

SEQ ID NO: 672472 - RNA, 19 nt, Artificial Sequence
  Description of Artificial Sequence: Synthetic oligonucleotide
  Sense strand starting at position 2075 of SEQ ID NO: 585848
cguuuccacgaauagauaa

SEQ ID NO: 672473 - RNA, 19 nt, Artificial Sequence
  Description of Artificial Sequence: Synthetic oligonucleotide
  Antisense strand to SEQ ID NO: 672472
uuaucuauucguggaaacg

SEQ ID NO: 672474 - RNA, 19 nt, Artificial Sequence
  Description of Artificial Sequence: Synthetic oligonucleotide
  Sense strand starting at position 2085 of SEQ ID NO: 585848
aauagauaaugguugccau

SEQ ID NO: 672475 - RNA, 19 nt, Artificial Sequence
  Description of Artificial Sequence: Synthetic oligonucleotide
  Antisense strand to SEQ ID NO: 672474
auggcaaccauuaucuauu

SEQ ID NO: 672476 - RNA, 19 nt, Artificial Sequence
  Description of Artificial Sequence: Synthetic oligonucleotide
  Sense strand starting at position 2088 of SEQ ID NO: 585848
agauaaugguugccaugau

SEQ ID NO: 672477 - RNA, 19 nt, Artificial Sequence
  Description of Artificial Sequence: Synthetic oligonucleotide
  Antisense strand to SEQ ID NO: 672476
aucauggcaaccauuaucu

SEQ ID NO: 672478 - RNA, 19 nt, Artificial Sequence
  Description of Artificial Sequence: Synthetic oligonucleotide
  Sense strand starting at position 2092 of SEQ ID NO: 585848
aaugguugccaugauggga

SEQ ID NO: 672479 - RNA, 19 nt, Artificial Sequence
  Description of Artificial Sequence: Synthetic oligonucleotide
  Antisense strand to SEQ ID NO: 672478
ucccaucauggcaaccauu

SEQ ID NO: 672480 - RNA, 19 nt, Artificial Sequence
  Description of Artificial Sequence: Synthetic oligonucleotide
  Sense strand starting at position 2125 of SEQ ID NO: 585848
gacaaaggguucuugcgaa

SEQ ID NO: 672481 - RNA, 19 nt, Artificial Sequence
  Description of Artificial Sequence: Synthetic oligonucleotide
  Antisense strand to SEQ ID NO: 672480
uucgcaagaacccuuuguc

SEQ ID NO: 672482 - RNA, 19 nt, Artificial Sequence
  Description of Artificial Sequence: Synthetic oligonucleotide
  Sense strand starting at position 2274 of SEQ ID NO: 585848
ugggauccauaaucuuuau

SEQ ID NO: 672483 - RNA, 19 nt, Artificial Sequence
  Description of Artificial Sequence: Synthetic oligonucleotide
  Antisense strand to SEQ ID NO: 672482
auaaagauuauggauccca

SEQ ID NO: 672484 - RNA, 19 nt, Artificial Sequence
  Description of Artificial Sequence: Synthetic oligonucleotide
  Sense strand starting at position 2299 of SEQ ID NO: 585848
gcaugcgaacaauaacaga

SEQ ID NO: 672485 - RNA, 19 nt, Artificial Sequence
  Description of Artificial Sequence: Synthetic oligonucleotide
  Antisense strand to SEQ ID NO: 672484
ucuguuauuguucgcaugc

SEQ ID NO: 672486 - RNA, 19 nt, Artificial Sequence
  Description of Artificial Sequence: Synthetic oligonucleotide
  Sense strand starting at position 2522 of SEQ ID NO: 585848
uaagaauuccuuugugagc

SEQ ID NO: 672487 - RNA, 19 nt, Artificial Sequence
  Description of Artificial Sequence: Synthetic oligonucleotide
  Antisense strand to SEQ ID NO: 672486
gcucacaaaggaauucuua

SEQ ID NO: 672488 - RNA, 19 nt, Artificial Sequence
  Description of Artificial Sequence: Synthetic oligonucleotide
  Sense strand starting at position 2531 of SEQ ID NO: 585848
cuuugugagcuugaguaug

SEQ ID NO: 672489 - RNA, 19 nt, Artificial Sequence
  Description of Artificial Sequence: Synthetic oligonucleotide
  Antisense strand to SEQ ID NO: 672488
cauacucaagcucacaaag

SEQ ID NO: 672490 - RNA, 19 nt, Artificial Sequence
  Description of Artificial Sequence: Synthetic oligonucleotide
  Sense strand starting at position 2536 of SEQ ID NO: 585848
ugagcuugaguaugagaau

SEQ ID NO: 672491 - RNA, 19 nt, Artificial Sequence
  Description of Artificial Sequence: Synthetic oligonucleotide
  Antisense strand to SEQ ID NO: 672490
auucucauacucaagcuca

SEQ ID NO: 672492 - RNA, 19 nt, Artificial Sequence
  Description of Artificial Sequence: Synthetic oligonucleotide
  Sense strand starting at position 2802 of SEQ ID NO: 585848
ugguuauucuuaucuuuag

SEQ ID NO: 672493 - RNA, 19 nt, Artificial Sequence
  Description of Artificial Sequence: Synthetic oligonucleotide
  Antisense strand to SEQ ID NO: 672492
cuaaagauaagaauaacca

SEQ ID NO: 672494 - RNA, 19 nt, Artificial Sequence
  Description of Artificial Sequence: Synthetic oligonucleotide
  Sense strand starting at position 2803 of SEQ ID NO: 585848
gguuauucuuaucuuuaga

SEQ ID NO: 672495 - RNA, 19 nt, Artificial Sequence
  Description of Artificial Sequence: Synthetic oligonucleotide
  Antisense strand to SEQ ID NO: 672494
ucuaaagauaagaauaacc

SEQ ID NO: 672496 - RNA, 19 nt, Artificial Sequence
  Description of Artificial Sequence: Synthetic oligonucleotide
  Sense strand starting at position 3028 of SEQ ID NO: 585848
aagugacaucugugacauu

SEQ ID NO: 672497 - RNA, 19 nt, Artificial Sequence
  Description of Artificial Sequence: Synthetic oligonucleotide
  Antisense strand to SEQ ID NO: 672496
aaugucacagaugucacuu

SEQ ID NO: 672498 - RNA, 19 nt, Artificial Sequence
  Description of Artificial Sequence: Synthetic oligonucleotide
  Sense strand starting at position 3031 of SEQ ID NO: 585848
ugacaucugugacauuuau

SEQ ID NO: 672499 - RNA, 19 nt, Artificial Sequence
  Description of Artificial Sequence: Synthetic oligonucleotide
  Antisense strand to SEQ ID NO: 672498
auaaaugucacagauguca

SEQ ID NO: 672500 - RNA, 19 nt, Artificial Sequence
  Description of Artificial Sequence: Synthetic oligonucleotide
  Sense strand starting at position 3119 of SEQ ID NO: 585848
aucacaaguugguuugaau

SEQ ID NO: 672501 - RNA, 19 nt, Artificial Sequence
  Description of Artificial Sequence: Synthetic oligonucleotide
  Antisense strand to SEQ ID NO: 672500
auucaaaccaacuugugau

SEQ ID NO: 672502 - RNA, 19 nt, Artificial Sequence
  Description of Artificial Sequence: Synthetic oligonucleotide
  Sense strand starting at position 3164 of SEQ ID NO: 585848
acccaaacuugagcuguaa

SEQ ID NO: 672503 - RNA, 19 nt, Artificial Sequence
  Description of Artificial Sequence: Synthetic oligonucleotide
  Antisense strand to SEQ ID NO: 672502
uuacagcucaaguuugggu

SEQ ID NO: 672504 - RNA, 19 nt, Artificial Sequence
  Description of Artificial Sequence: Synthetic oligonucleotide
  Sense strand starting at position 3176 of SEQ ID NO: 585848
gcuguaauauccucaagaa

SEQ ID NO: 672505 - RNA, 19 nt, Artificial Sequence
  Description of Artificial Sequence: Synthetic oligonucleotide
  Antisense strand to SEQ ID NO: 672504
uucuugaggauauuacagc

SEQ ID NO: 672506 - RNA, 19 nt, Artificial Sequence
  Description of Artificial Sequence: Synthetic oligonucleotide
  Sense strand starting at position 3566 of SEQ ID NO: 585848
cuuguuuacccauaaguau

SEQ ID NO: 672507 - RNA, 19 nt, Artificial Sequence
  Description of Artificial Sequence: Synthetic oligonucleotide
  Antisense strand to SEQ ID NO: 672506
auacuuauggguaaacaag

SEQ ID NO: 672508 - RNA, 19 nt, Artificial Sequence
  Description of Artificial Sequence: Synthetic oligonucleotide
  Sense strand starting at position 3600 of SEQ ID NO: 585848
acuucugaauuggauauuu

SEQ ID NO: 672509 - RNA, 19 nt, Artificial Sequence
  Description of Artificial Sequence: Synthetic oligonucleotide
  Antisense strand to SEQ ID NO: 672508
aaauauccaauucagaagu

SEQ ID NO: 672510 - RNA, 19 nt, Artificial Sequence
  Description of Artificial Sequence: Synthetic oligonucleotide
  Sense strand starting at position 3631 of SEQ ID NO: 585848
ccuuuauuugcugguuaaa

SEQ ID NO: 672511 - RNA, 19 nt, Artificial Sequence
  Description of Artificial Sequence: Synthetic oligonucleotide
  Antisense strand to SEQ ID NO: 672510
uuuaaccagcaaauaaagg

SEQ ID NO: 672512 - RNA, 19 nt, Artificial Sequence
  Description of Artificial Sequence: Synthetic oligonucleotide
  Sense strand starting at position 3703 of SEQ ID NO: 585848
uuccaagauuuagaaagau

SEQ ID NO: 672513 - RNA, 19 nt, Artificial Sequence
  Description of Artificial Sequence: Synthetic oligonucleotide
  Antisense strand to SEQ ID NO: 672512
aucuuucuaaaucuuggaa

SEQ ID NO: 672514 - RNA, 19 nt, Artificial Sequence
  Description of Artificial Sequence: Synthetic oligonucleotide
  Sense strand starting at position 2106 of SEQ ID NO: 585849
cuuggaacccgaugcaaua

SEQ ID NO: 672515 - RNA, 19 nt, Artificial Sequence
  Description of Artificial Sequence: Synthetic oligonucleotide
  Antisense strand to SEQ ID NO: 672514
uauugcaucggguuccaag

SEQ ID NO: 672516 - RNA, 19 nt, Artificial Sequence
  Description of Artificial Sequence: Synthetic oligonucleotide
  Sense strand starting at position 2122 of SEQ ID NO: 585849
auaauaaucuccgcgugca

SEQ ID NO: 672517 - RNA, 19 nt, Artificial Sequence
  Description of Artificial Sequence: Synthetic oligonucleotide
  Antisense strand to SEQ ID NO: 672516
ugcacgcggagauuauuau

SEQ ID NO: 672518 - RNA, 19 nt, Artificial Sequence
  Description of Artificial Sequence: Synthetic oligonucleotide
  Sense strand starting at position 2280 of SEQ ID NO: 585849
guguguauagugugugaag

SEQ ID NO: 672519 - RNA, 19 nt, Artificial Sequence
  Description of Artificial Sequence: Synthetic oligonucleotide
  Antisense strand to SEQ ID NO: 672518
cuucacacacuauacacac

SEQ ID NO: 672520 - RNA, 19 nt, Artificial Sequence
  Description of Artificial Sequence: Synthetic oligonucleotide
  Sense strand starting at position 2281 of SEQ ID NO: 585849
uguguauagugugugaaga

SEQ ID NO: 672521 - RNA, 19 nt, Artificial Sequence
  Description of Artificial Sequence: Synthetic oligonucleotide
  Antisense strand to SEQ ID NO: 672520
ucuucacacacuauacaca

SEQ ID NO: 672522 - RNA, 19 nt, Artificial Sequence
  Description of Artificial Sequence: Synthetic oligonucleotide
  Sense strand starting at position 2282 of SEQ ID NO: 585849
guguauagugugugaagag

SEQ ID NO: 672523 - RNA, 19 nt, Artificial Sequence
  Description of Artificial Sequence: Synthetic oligonucleotide
  Antisense strand to SEQ ID NO: 672522
cucuucacacacuauacac

SEQ ID NO: 672524 - RNA, 19 nt, Artificial Sequence
  Description of Artificial Sequence: Synthetic oligonucleotide
  Sense strand starting at position 2289 of SEQ ID NO: 585849
gugugugaagaggauguua

SEQ ID NO: 672525 - RNA, 19 nt, Artificial Sequence
  Description of Artificial Sequence: Synthetic oligonucleotide
  Antisense strand to SEQ ID NO: 672524
uaacauccucuucacacac

SEQ ID NO: 672526 - RNA, 19 nt, Artificial Sequence
  Description of Artificial Sequence: Synthetic oligonucleotide
  Sense strand starting at position 2291 of SEQ ID NO: 585849
gugugaagaggauguuaau

SEQ ID NO: 672527 - RNA, 19 nt, Artificial Sequence
  Description of Artificial Sequence: Synthetic oligonucleotide
  Antisense strand to SEQ ID NO: 672526
auuaacauccucuucacac

SEQ ID NO: 672528 - RNA, 19 nt, Artificial Sequence
  Description of Artificial Sequence: Synthetic oligonucleotide
  Sense strand starting at position 2301 of SEQ ID NO: 585849
gauguuaaugcaugaaauu

SEQ ID NO: 672529 - RNA, 19 nt, Artificial Sequence
  Description of Artificial Sequence: Synthetic oligonucleotide
  Antisense strand to SEQ ID NO: 672528
aauuucaugcauuaacauc

SEQ ID NO: 672530 - RNA, 19 nt, Artificial Sequence
  Description of Artificial Sequence: Synthetic oligonucleotide
  Sense strand starting at position 2335 of SEQ ID NO: 585849
ggaaauguauucuaaccau

SEQ ID NO: 672531 - RNA, 19 nt, Artificial Sequence
  Description of Artificial Sequence: Synthetic oligonucleotide
  Antisense strand to SEQ ID NO: 672530
augguuagaauacauuucc

SEQ ID NO: 672532 - RNA, 19 nt, Artificial Sequence
  Description of Artificial Sequence: Synthetic oligonucleotide
  Sense strand starting at position 2638 of SEQ ID NO: 585849
agcacagauguugauguau

SEQ ID NO: 672533 - RNA, 19 nt, Artificial Sequence
  Description of Artificial Sequence: Synthetic oligonucleotide
  Antisense strand to SEQ ID NO: 672532
auacaucaacaucugugcu

SEQ ID NO: 672534 - RNA, 19 nt, Artificial Sequence
  Description of Artificial Sequence: Synthetic oligonucleotide
  Sense strand starting at position 2649 of SEQ ID NO: 585849
ugauguauuguguaaaucc

SEQ ID NO: 672535 - RNA, 19 nt, Artificial Sequence
  Description of Artificial Sequence: Synthetic oligonucleotide
  Antisense strand to SEQ ID NO: 672534
ggauuuacacaauacauca

SEQ ID NO: 672536 - RNA, 19 nt, Artificial Sequence
  Description of Artificial Sequence: Synthetic oligonucleotide
  Sense strand starting at position 2746 of SEQ ID NO: 585849
aagggucaacuaugguuau

SEQ ID NO: 672537 - RNA, 19 nt, Artificial Sequence
  Description of Artificial Sequence: Synthetic oligonucleotide
  Antisense strand to SEQ ID NO: 672536
auaaccauaguugacccuu

SEQ ID NO: 672538 - RNA, 19 nt, Artificial Sequence
  Description of Artificial Sequence: Synthetic oligonucleotide
  Sense strand starting at position 2809 of SEQ ID NO: 585849
ggagcuuucccuugaaaca

SEQ ID NO: 672539 - RNA, 19 nt, Artificial Sequence
  Description of Artificial Sequence: Synthetic oligonucleotide
  Antisense strand to SEQ ID NO: 672538
uguuucaagggaaagcucc

SEQ ID NO: 672540 - RNA, 19 nt, Artificial Sequence
  Description of Artificial Sequence: Synthetic oligonucleotide
  Sense strand starting at position 2831 of SEQ ID NO: 585849
uagguagugcuccguaauu

SEQ ID NO: 672541 - RNA, 19 nt, Artificial Sequence
  Description of Artificial Sequence: Synthetic oligonucleotide
  Antisense strand to SEQ ID NO: 672540
aauuacggagcacuaccua

SEQ ID NO: 672542 - RNA, 19 nt, Artificial Sequence
  Description of Artificial Sequence: Synthetic oligonucleotide
  Sense strand starting at position 2833 of SEQ ID NO: 585849
gguagugcuccguaauuac

SEQ ID NO: 672543 - RNA, 19 nt, Artificial Sequence
  Description of Artificial Sequence: Synthetic oligonucleotide
  Antisense strand to SEQ ID NO: 672542
guaauuacggagcacuacc

SEQ ID NO: 672544 - RNA, 19 nt, Artificial Sequence
  Description of Artificial Sequence: Synthetic oligonucleotide
  Sense strand starting at position 2842 of SEQ ID NO: 585849
ccguaauuaccucaauagg

SEQ ID NO: 672545 - RNA, 19 nt, Artificial Sequence
  Description of Artificial Sequence: Synthetic oligonucleotide
  Antisense strand to SEQ ID NO: 672544
ccuauugagguaauuacgg

SEQ ID NO: 672546 - RNA, 19 nt, Artificial Sequence
  Description of Artificial Sequence: Synthetic oligonucleotide
  Sense strand starting at position 2857 of SEQ ID NO: 585849
uaggcagauuuccagaguu

SEQ ID NO: 672547 - RNA, 19 nt, Artificial Sequence
  Description of Artificial Sequence: Synthetic oligonucleotide
  Antisense strand to SEQ ID NO: 672546
aacucuggaaaucugccua

SEQ ID NO: 672548 - RNA, 19 nt, Artificial Sequence
  Description of Artificial Sequence: Synthetic oligonucleotide
  Sense strand starting at position 2886 of SEQ ID NO: 585849
uguauaauggcauguaaag

SEQ ID NO: 672549 - RNA, 19 nt, Artificial Sequence
  Description of Artificial Sequence: Synthetic oligonucleotide
  Antisense strand to SEQ ID NO: 672548
cuuuacaugccauuauaca

SEQ ID NO: 672550 - RNA, 19 nt, Artificial Sequence
  Description of Artificial Sequence: Synthetic oligonucleotide
  Sense strand starting at position 2895 of SEQ ID NO: 585849
gcauguaaaggauggaaau

SEQ ID NO: 672551 - RNA, 19 nt, Artificial Sequence
  Description of Artificial Sequence: Synthetic oligonucleotide
  Antisense strand to SEQ ID NO: 672550
auuuccauccuuuacaugc

SEQ ID NO: 672552 - RNA, 19 nt, Artificial Sequence
  Description of Artificial Sequence: Synthetic oligonucleotide
  Sense strand starting at position 3090 of SEQ ID NO: 585849
gauaacugguagcagaaga

SEQ ID NO: 672553 - RNA, 19 nt, Artificial Sequence
  Description of Artificial Sequence: Synthetic oligonucleotide
  Antisense strand to SEQ ID NO: 672552
ucuucugcuaccaguuauc

SEQ ID NO: 672554 - RNA, 19 nt, Artificial Sequence
  Description of Artificial Sequence: Synthetic oligonucleotide
  Sense strand starting at position 3130 of SEQ ID NO: 585849
aguagaccuggcugcuaau

SEQ ID NO: 672555 - RNA, 19 nt, Artificial Sequence
  Description of Artificial Sequence: Synthetic oligonucleotide
  Antisense strand to SEQ ID NO: 672554
auuagcagccaggucuacu

SEQ ID NO: 672556 - RNA, 19 nt, Artificial Sequence
  Description of Artificial Sequence: Synthetic oligonucleotide
  Sense strand starting at position 3139 of SEQ ID NO: 585849
ggcugcuaauccuucuuaa

SEQ ID NO: 672557 - RNA, 19 nt, Artificial Sequence
  Description of Artificial Sequence: Synthetic oligonucleotide
  Antisense strand to SEQ ID NO: 672556
uuaagaaggauuagcagcc

SEQ ID NO: 672558 - RNA, 19 nt, Artificial Sequence
  Description of Artificial Sequence: Synthetic oligonucleotide
  Sense strand starting at position 3149 of SEQ ID NO: 585849
ccuucuuaaugguuuguaa

SEQ ID NO: 672559 - RNA, 19 nt, Artificial Sequence
  Description of Artificial Sequence: Synthetic oligonucleotide
  Antisense strand to SEQ ID NO: 672558
uuacaaaccauuaagaagg

SEQ ID NO: 672560 - RNA, 19 nt, Artificial Sequence
  Description of Artificial Sequence: Synthetic oligonucleotide
  Sense strand starting at position 3151 of SEQ ID NO: 585849
uucuuaaugguuuguaacu

SEQ ID NO: 672561 - RNA, 19 nt, Artificial Sequence
  Description of Artificial Sequence: Synthetic oligonucleotide
  Antisense strand to SEQ ID NO: 672560
aguuacaaaccauuaagaa

SEQ ID NO: 672562 - RNA, 19 nt, Artificial Sequence
  Description of Artificial Sequence: Synthetic oligonucleotide
  Sense strand starting at position 3152 of SEQ ID NO: 585849
ucuuaaugguuuguaacua

SEQ ID NO: 672563 - RNA, 19 nt, Artificial Sequence
  Description of Artificial Sequence: Synthetic oligonucleotide
  Antisense strand to SEQ ID NO: 672562
uaguuacaaaccauuaaga

SEQ ID NO: 672564 - RNA, 19 nt, Artificial Sequence
  Description of Artificial Sequence: Synthetic oligonucleotide
  Sense strand starting at position 3202 of SEQ ID NO: 585849
ucuauuauaugggaacacu

SEQ ID NO: 672565 - RNA, 19 nt, Artificial Sequence
  Description of Artificial Sequence: Synthetic oligonucleotide
  Antisense strand to SEQ ID NO: 672564
aguguucccauauaauaga

SEQ ID NO: 672566 - RNA, 19 nt, Artificial Sequence
  Description of Artificial Sequence: Synthetic oligonucleotide
  Sense strand starting at position 3227 of SEQ ID NO: 585849
uacuuuauagaggguuguu

SEQ ID NO: 672567 - RNA, 19 nt, Artificial Sequence
  Description of Artificial Sequence: Synthetic oligonucleotide
  Antisense strand to SEQ ID NO: 672566
aacaacccucuauaaagua

SEQ ID NO: 672568 - RNA, 19 nt, Artificial Sequence
  Description of Artificial Sequence: Synthetic oligonucleotide
  Sense strand starting at position 3239 of SEQ ID NO: 585849
gguuguugugaggguucaa

SEQ ID NO: 672569 - RNA, 19 nt, Artificial Sequence
  Description of Artificial Sequence: Synthetic oligonucleotide
  Antisense strand to SEQ ID NO: 672568
uugaacccucacaacaacc

SEQ ID NO: 672570 - RNA, 19 nt, Artificial Sequence
  Description of Artificial Sequence: Synthetic oligonucleotide
  Sense strand starting at position 3255 of SEQ ID NO: 585849
caaugaauuugugacuaug

SEQ ID NO: 672571 - RNA, 19 nt, Artificial Sequence
  Description of Artificial Sequence: Synthetic oligonucleotide
  Antisense strand to SEQ ID NO: 672570
cauagucacaaauucauug

SEQ ID NO: 672572 - RNA, 19 nt, Artificial Sequence
  Description of Artificial Sequence: Synthetic oligonucleotide
  Sense strand starting at position 3270 of SEQ ID NO: 585849
uaugaagcaccugauguau

SEQ ID NO: 672573 - RNA, 19 nt, Artificial Sequence
  Description of Artificial Sequence: Synthetic oligonucleotide
  Antisense strand to SEQ ID NO: 672572
auacaucaggugcuucaua

SEQ ID NO: 672574 - RNA, 19 nt, Artificial Sequence
  Description of Artificial Sequence: Synthetic oligonucleotide
  Sense strand starting at position 3282 of SEQ ID NO: 585849
gauguauuguaagcccuca

SEQ ID NO: 672575 - RNA, 19 nt, Artificial Sequence
  Description of Artificial Sequence: Synthetic oligonucleotide
  Antisense strand to SEQ ID NO: 672574
ugagggcuuacaauacauc

SEQ ID NO: 672576 - RNA, 19 nt, Artificial Sequence
  Description of Artificial Sequence: Synthetic oligonucleotide
  Sense strand starting at position 3568 of SEQ ID NO: 585849
ggaugcaugcgccuguaau

SEQ ID NO: 672577 - RNA, 19 nt, Artificial Sequence
  Description of Artificial Sequence: Synthetic oligonucleotide
  Antisense strand to SEQ ID NO: 672576
auuacaggcgcaugcaucc

SEQ ID NO: 672578 - RNA, 19 nt, Artificial Sequence
  Description of Artificial Sequence: Synthetic oligonucleotide
  Sense strand starting at position 3673 of SEQ ID NO: 585849
ugggugauagcgugugacu

SEQ ID NO: 672579 - RNA, 19 nt, Artificial Sequence
  Description of Artificial Sequence: Synthetic oligonucleotide
  Antisense strand to SEQ ID NO: 672578
agucacacgcuaucaccca

SEQ ID NO: 672580 - RNA, 19 nt, Artificial Sequence
  Description of Artificial Sequence: Synthetic oligonucleotide
  Sense strand starting at position 3675 of SEQ ID NO: 585849
ggugauagcgugugacuau

SEQ ID NO: 672581 - RNA, 19 nt, Artificial Sequence
  Description of Artificial Sequence: Synthetic oligonucleotide
  Antisense strand to SEQ ID NO: 672580
auagucacacgcuaucacc

SEQ ID NO: 672582 - RNA, 19 nt, Artificial Sequence
  Description of Artificial Sequence: Synthetic oligonucleotide
  Sense strand starting at position 3721 of SEQ ID NO: 585849
gaucauugaugugaaccau

SEQ ID NO: 672583 - RNA, 19 nt, Artificial Sequence
  Description of Artificial Sequence: Synthetic oligonucleotide
  Antisense strand to SEQ ID NO: 672582
augguucacaucaaugauc

SEQ ID NO: 672584 - RNA, 19 nt, Artificial Sequence
  Description of Artificial Sequence: Synthetic oligonucleotide
  Sense strand starting at position 3809 of SEQ ID NO: 585849
agaagaauguggcaaagaa

SEQ ID NO: 672585 - RNA, 19 nt, Artificial Sequence
  Description of Artificial Sequence: Synthetic oligonucleotide
  Antisense strand to SEQ ID NO: 672584
uucuuugccacauucuucu

SEQ ID NO: 672586 - RNA, 19 nt, Artificial Sequence
  Description of Artificial Sequence: Synthetic oligonucleotide
  Sense strand starting at position 3850 of SEQ ID NO: 585849
aaacguuggcuacagaaau

SEQ ID NO: 672587 - RNA, 19 nt, Artificial Sequence
  Description of Artificial Sequence: Synthetic oligonucleotide
  Antisense strand to SEQ ID NO: 672586
auuucuguagccaacguuu

SEQ ID NO: 672588 - RNA, 19 nt, Artificial Sequence
  Description of Artificial Sequence: Synthetic oligonucleotide
  Sense strand starting at position 3957 of SEQ ID NO: 585849
aaccauaagugguuaggua

SEQ ID NO: 672589 - RNA, 19 nt, Artificial Sequence
  Description of Artificial Sequence: Synthetic oligonucleotide
  Antisense strand to SEQ ID NO: 672588
uaccuaaccacuuaugguu

SEQ ID NO: 672590 - RNA, 19 nt, Artificial Sequence
  Description of Artificial Sequence: Synthetic oligonucleotide
  Sense strand starting at position 3958 of SEQ ID NO: 585849
accauaagugguuagguaa

SEQ ID NO: 672591 - RNA, 19 nt, Artificial Sequence
  Description of Artificial Sequence: Synthetic oligonucleotide
  Antisense strand to SEQ ID NO: 672590
uuaccuaaccacuuauggu

SEQ ID NO: 672592 - RNA, 19 nt, Artificial Sequence
  Description of Artificial Sequence: Synthetic oligonucleotide
  Sense strand starting at position 3961 of SEQ ID NO: 585849
auaagugguuagguaaagu

SEQ ID NO: 672593 - RNA, 19 nt, Artificial Sequence
  Description of Artificial Sequence: Synthetic oligonucleotide
  Antisense strand to SEQ ID NO: 672592
acuuuaccuaaccacuuau

SEQ ID NO: 672594 - RNA, 19 nt, Artificial Sequence
  Description of Artificial Sequence: Synthetic oligonucleotide
  Sense strand starting at position 282 of SEQ ID NO: 585850
accucagauuguuuaaagu

SEQ ID NO: 672595 - RNA, 19 nt, Artificial Sequence
  Description of Artificial Sequence: Synthetic oligonucleotide
  Antisense strand to SEQ ID NO: 672594
acuuuaaacaaucugaggu

SEQ ID NO: 672596 - RNA, 19 nt, Artificial Sequence
  Description of Artificial Sequence: Synthetic oligonucleotide
  Sense strand starting at position 329 of SEQ ID NO: 585850
gcacuuaugcaugaaauag

SEQ ID NO: 672597 - RNA, 19 nt, Artificial Sequence
  Description of Artificial Sequence: Synthetic oligonucleotide
  Antisense strand to SEQ ID NO: 672596
cuauuucaugcauaagugc

SEQ ID NO: 672598 - RNA, 19 nt, Artificial Sequence
  Description of Artificial Sequence: Synthetic oligonucleotide
  Sense strand starting at position 380 of SEQ ID NO: 585850
ccuugaaguccguagauga

SEQ ID NO: 672599 - RNA, 19 nt, Artificial Sequence
  Description of Artificial Sequence: Synthetic oligonucleotide
  Antisense strand to SEQ ID NO: 672598
ucaucuacggacuucaagg

SEQ ID NO: 672600 - RNA, 19 nt, Artificial Sequence
  Description of Artificial Sequence: Synthetic oligonucleotide
  Sense strand starting at position 441 of SEQ ID NO: 585850
auuugaagguaagacauua

SEQ ID NO: 672601 - RNA, 19 nt, Artificial Sequence
  Description of Artificial Sequence: Synthetic oligonucleotide
  Antisense strand to SEQ ID NO: 672600
uaaugucuuaccuucaaau

SEQ ID NO: 672602 - RNA, 19 nt, Artificial Sequence
  Description of Artificial Sequence: Synthetic oligonucleotide
  Sense strand starting at position 472 of SEQ ID NO: 585850
cugaguuuagccuaaauaa

SEQ ID NO: 672603 - RNA, 19 nt, Artificial Sequence
  Description of Artificial Sequence: Synthetic oligonucleotide
  Antisense strand to SEQ ID NO: 672602
uuauuuaggcuaaacucag

SEQ ID NO: 672604 - RNA, 19 nt, Artificial Sequence
  Description of Artificial Sequence: Synthetic oligonucleotide
  Sense strand starting at position 511 of SEQ ID NO: 585850
gaaguauuucuuggccagu

SEQ ID NO: 672605 - RNA, 19 nt, Artificial Sequence
  Description of Artificial Sequence: Synthetic oligonucleotide
  Antisense strand to SEQ ID NO: 672604
acuggccaagaaauacuuc

SEQ ID NO: 672606 - RNA, 19 nt, Artificial Sequence
  Description of Artificial Sequence: Synthetic oligonucleotide
  Sense strand starting at position 512 of SEQ ID NO: 585850
aaguauuucuuggccaguu

SEQ ID NO: 672607 - RNA, 19 nt, Artificial Sequence
  Description of Artificial Sequence: Synthetic oligonucleotide
  Antisense strand to SEQ ID NO: 672606
aacuggccaagaaauacuu

SEQ ID NO: 672608 - RNA, 19 nt, Artificial Sequence
  Description of Artificial Sequence: Synthetic oligonucleotide
  Sense strand starting at position 513 of SEQ ID NO: 585850
aguauuucuuggccaguuu

SEQ ID NO: 672609 - RNA, 19 nt, Artificial Sequence
  Description of Artificial Sequence: Synthetic oligonucleotide
  Antisense strand to SEQ ID NO: 672608
aaacuggccaagaaauacu

SEQ ID NO: 672610 - RNA, 19 nt, Artificial Sequence
  Description of Artificial Sequence: Synthetic oligonucleotide
  Sense strand starting at position 639 of SEQ ID NO: 585850
uccgaagucaaggaucuuu

SEQ ID NO: 672611 - RNA, 19 nt, Artificial Sequence
  Description of Artificial Sequence: Synthetic oligonucleotide
  Antisense strand to SEQ ID NO: 672610
aaagauccuugacuucgga

SEQ ID NO: 672612 - RNA, 19 nt, Artificial Sequence
  Description of Artificial Sequence: Synthetic oligonucleotide
  Sense strand starting at position 854 of SEQ ID NO: 585850
cugggucauuuagaaggga

SEQ ID NO: 672613 - RNA, 19 nt, Artificial Sequence
  Description of Artificial Sequence: Synthetic oligonucleotide
  Antisense strand to SEQ ID NO: 672612
ucccuucuaaaugacccag

SEQ ID NO: 672614 - RNA, 19 nt, Artificial Sequence
  Description of Artificial Sequence: Synthetic oligonucleotide
  Sense strand starting at position 929 of SEQ ID NO: 585850
gaaugugaguuacuaauca

SEQ ID NO: 672615 - RNA, 19 nt, Artificial Sequence
  Description of Artificial Sequence: Synthetic oligonucleotide
  Antisense strand to SEQ ID NO: 672614
ugauuaguaacucacauuc

SEQ ID NO: 672616 - RNA, 19 nt, Artificial Sequence
  Description of Artificial Sequence: Synthetic oligonucleotide
  Sense strand starting at position 933 of SEQ ID NO: 585850
gugaguuacuaaucaauau

SEQ ID NO: 672617 - RNA, 19 nt, Artificial Sequence
  Description of Artificial Sequence: Synthetic oligonucleotide
  Antisense strand to SEQ ID NO: 672616
auauugauuaguaacucac

SEQ ID NO: 672618 - RNA, 19 nt, Artificial Sequence
  Description of Artificial Sequence: Synthetic oligonucleotide
  Sense strand starting at position 1076 of SEQ ID NO: 585850
gcuggaucccuugacaggu

SEQ ID NO: 672619 - RNA, 19 nt, Artificial Sequence
  Description of Artificial Sequence: Synthetic oligonucleotide
  Antisense strand to SEQ ID NO: 672618
accugucaagggauccagc

SEQ ID NO: 672620 - RNA, 19 nt, Artificial Sequence
  Description of Artificial Sequence: Synthetic oligonucleotide
  Sense strand starting at position 1452 of SEQ ID NO: 585850
auuucuauauacgugcuua

SEQ ID NO: 672621 - RNA, 19 nt, Artificial Sequence
  Description of Artificial Sequence: Synthetic oligonucleotide
  Antisense strand to SEQ ID NO: 672620
uaagcacguauauagaaau

SEQ ID NO: 672622 - RNA, 19 nt, Artificial Sequence
  Description of Artificial Sequence: Synthetic oligonucleotide
  Sense strand starting at position 1619 of SEQ ID NO: 585850
gccuuugcuccgucaacag

SEQ ID NO: 672623 - RNA, 19 nt, Artificial Sequence
  Description of Artificial Sequence: Synthetic oligonucleotide
  Antisense strand to SEQ ID NO: 672622
cuguugacggagcaaaggc

SEQ ID NO: 672624 - RNA, 19 nt, Artificial Sequence
  Description of Artificial Sequence: Synthetic oligonucleotide
  Sense strand starting at position 2114 of SEQ ID NO: 585850
gcgacaagucccuaggaga

SEQ ID NO: 672625 - RNA, 19 nt, Artificial Sequence
  Description of Artificial Sequence: Synthetic oligonucleotide
  Antisense strand to SEQ ID NO: 672624
ucuccuagggacuugucgc

SEQ ID NO: 672626 - RNA, 19 nt, Artificial Sequence
  Description of Artificial Sequence: Synthetic oligonucleotide
  Sense strand starting at position 2398 of SEQ ID NO: 585850
ugggauguauugagaagga

SEQ ID NO: 672627 - RNA, 19 nt, Artificial Sequence
  Description of Artificial Sequence: Synthetic oligonucleotide
  Antisense strand to SEQ ID NO: 672626
uccuucucaauacauccca

SEQ ID NO: 672628 - RNA, 19 nt, Artificial Sequence
  Description of Artificial Sequence: Synthetic oligonucleotide
  Sense strand starting at position 2583 of SEQ ID NO: 585850
gucauaucucccgaacacu

SEQ ID NO: 672629 - RNA, 19 nt, Artificial Sequence
  Description of Artificial Sequence: Synthetic oligonucleotide
  Antisense strand to SEQ ID NO: 672628
aguguucgggagauaugac

SEQ ID NO: 672630 - RNA, 19 nt, Artificial Sequence
  Description of Artificial Sequence: Synthetic oligonucleotide
  Sense strand starting at position 2597 of SEQ ID NO: 585850
acacuuacuuacucgauga

SEQ ID NO: 672631 - RNA, 19 nt, Artificial Sequence
  Description of Artificial Sequence: Synthetic oligonucleotide
  Antisense strand to SEQ ID NO: 672630
ucaucgaguaaguaagugu

SEQ ID NO: 672632 - RNA, 19 nt, Artificial Sequence
  Description of Artificial Sequence: Synthetic oligonucleotide
  Sense strand starting at position 2601 of SEQ ID NO: 585850
uuacuuacucgaugaucag

SEQ ID NO: 672633 - RNA, 19 nt, Artificial Sequence
  Description of Artificial Sequence: Synthetic oligonucleotide
  Antisense strand to SEQ ID NO: 672632
cugaucaucgaguaaguaa

SEQ ID NO: 672634 - RNA, 19 nt, Artificial Sequence
  Description of Artificial Sequence: Synthetic oligonucleotide
  Sense strand starting at position 2602 of SEQ ID NO: 585850
uacuuacucgaugaucagu

SEQ ID NO: 672635 - RNA, 19 nt, Artificial Sequence
  Description of Artificial Sequence: Synthetic oligonucleotide
  Antisense strand to SEQ ID NO: 672634
acugaucaucgaguaagua

SEQ ID NO: 672636 - RNA, 19 nt, Artificial Sequence
  Description of Artificial Sequence: Synthetic oligonucleotide
  Sense strand starting at position 2611 of SEQ ID NO: 585850
gaugaucagugauucuuau

SEQ ID NO: 672637 - RNA, 19 nt, Artificial Sequence
  Description of Artificial Sequence: Synthetic oligonucleotide
  Antisense strand to SEQ ID NO: 672636
auaagaaucacugaucauc

SEQ ID NO: 672638 - RNA, 19 nt, Artificial Sequence
  Description of Artificial Sequence: Synthetic oligonucleotide
  Sense strand starting at position 2775 of SEQ ID NO: 585850
agacauauagggugccaua

SEQ ID NO: 672639 - RNA, 19 nt, Artificial Sequence
  Description of Artificial Sequence: Synthetic oligonucleotide
  Antisense strand to SEQ ID NO: 672638
uauggcacccuauaugucu

SEQ ID NO: 672640 - RNA, 19 nt, Artificial Sequence
  Description of Artificial Sequence: Synthetic oligonucleotide
  Sense strand starting at position 2792 of SEQ ID NO: 585850
uacuuugaggcuuaauguu

SEQ ID NO: 672641 - RNA, 19 nt, Artificial Sequence
  Description of Artificial Sequence: Synthetic oligonucleotide
  Antisense strand to SEQ ID NO: 672640
aacauuaagccucaaagua

SEQ ID NO: 672642 - RNA, 19 nt, Artificial Sequence
  Description of Artificial Sequence: Synthetic oligonucleotide
  Sense strand starting at position 2799 of SEQ ID NO: 585850
aggcuuaauguuuaaauuc

SEQ ID NO: 672643 - RNA, 19 nt, Artificial Sequence
  Description of Artificial Sequence: Synthetic oligonucleotide
  Antisense strand to SEQ ID NO: 672642
gaauuuaaacauuaagccu

SEQ ID NO: 672644 - RNA, 19 nt, Artificial Sequence
  Description of Artificial Sequence: Synthetic oligonucleotide
  Sense strand starting at position 2816 of SEQ ID NO: 585850
uccuaugacaagugagaug

SEQ ID NO: 672645 - RNA, 19 nt, Artificial Sequence
  Description of Artificial Sequence: Synthetic oligonucleotide
  Antisense strand to SEQ ID NO: 672644
caucucacuugucauagga

SEQ ID NO: 672646 - RNA, 19 nt, Artificial Sequence
  Description of Artificial Sequence: Synthetic oligonucleotide
  Sense strand starting at position 2827 of SEQ ID NO: 585850
gugagaugaaagugaacuu

SEQ ID NO: 672647 - RNA, 19 nt, Artificial Sequence
  Description of Artificial Sequence: Synthetic oligonucleotide
  Antisense strand to SEQ ID NO: 672646
aaguucacuuucaucucac

SEQ ID NO: 672648 - RNA, 19 nt, Artificial Sequence
  Description of Artificial Sequence: Synthetic oligonucleotide
  Sense strand starting at position 2969 of SEQ ID NO: 585850
ugaagcagaaguugaaauu

SEQ ID NO: 672649 - RNA, 19 nt, Artificial Sequence
  Description of Artificial Sequence: Synthetic oligonucleotide
  Antisense strand to SEQ ID NO: 672648
aauuucaacuucugcuuca

SEQ ID NO: 672650 - RNA, 19 nt, Artificial Sequence
  Description of Artificial Sequence: Synthetic oligonucleotide
  Sense strand starting at position 3068 of SEQ ID NO: 585850
caaauugguauuggugaga

SEQ ID NO: 672651 - RNA, 19 nt, Artificial Sequence
  Description of Artificial Sequence: Synthetic oligonucleotide
  Antisense strand to SEQ ID NO: 672650
ucucaccaauaccaauuug

SEQ ID NO: 672652 - RNA, 19 nt, Artificial Sequence
  Description of Artificial Sequence: Synthetic oligonucleotide
  Sense strand starting at position 3071 of SEQ ID NO: 585850
auugguauuggugagaagu

SEQ ID NO: 672653 - RNA, 19 nt, Artificial Sequence
  Description of Artificial Sequence: Synthetic oligonucleotide
  Antisense strand to SEQ ID NO: 672652
acuucucaccaauaccaau

SEQ ID NO: 672654 - RNA, 19 nt, Artificial Sequence
  Description of Artificial Sequence: Synthetic oligonucleotide
  Sense strand starting at position 3081 of SEQ ID NO: 585850
gugagaagucucgggaaca

SEQ ID NO: 672655 - RNA, 19 nt, Artificial Sequence
  Description of Artificial Sequence: Synthetic oligonucleotide
  Antisense strand to SEQ ID NO: 672654
uguucccgagacuucucac

SEQ ID NO: 672656 - RNA, 19 nt, Artificial Sequence
  Description of Artificial Sequence: Synthetic oligonucleotide
  Sense strand starting at position 3124 of SEQ ID NO: 585850
aauauagcgcuugacaaga

SEQ ID NO: 672657 - RNA, 19 nt, Artificial Sequence
  Description of Artificial Sequence: Synthetic oligonucleotide
  Antisense strand to SEQ ID NO: 672656
ucuugucaagcgcuauauu

SEQ ID NO: 672658 - RNA, 19 nt, Artificial Sequence
  Description of Artificial Sequence: Synthetic oligonucleotide
  Sense strand starting at position 3138 of SEQ ID NO: 585850
caagauuaugagggacguu

SEQ ID NO: 672659 - RNA, 19 nt, Artificial Sequence
  Description of Artificial Sequence: Synthetic oligonucleotide
  Antisense strand to SEQ ID NO: 672658
aacgucccucauaaucuug

SEQ ID NO: 672660 - RNA, 19 nt, Artificial Sequence
  Description of Artificial Sequence: Synthetic oligonucleotide
  Sense strand starting at position 3170 of SEQ ID NO: 585850
uagauuugaucuugagaag

SEQ ID NO: 672661 - RNA, 19 nt, Artificial Sequence
  Description of Artificial Sequence: Synthetic oligonucleotide
  Antisense strand to SEQ ID NO: 672660
cuucucaagaucaaaucua

SEQ ID NO: 672662 - RNA, 19 nt, Artificial Sequence
  Description of Artificial Sequence: Synthetic oligonucleotide
  Sense strand starting at position 3173 of SEQ ID NO: 585850
auuugaucuugagaaguaa

SEQ ID NO: 672663 - RNA, 19 nt, Artificial Sequence
  Description of Artificial Sequence: Synthetic oligonucleotide
  Antisense strand to SEQ ID NO: 672662
uuacuucucaagaucaaau

SEQ ID NO: 672664 - RNA, 19 nt, Artificial Sequence
  Description of Artificial Sequence: Synthetic oligonucleotide
  Sense strand starting at position 3347 of SEQ ID NO: 585850
auccauugcuuccugaaga

SEQ ID NO: 672665 - RNA, 19 nt, Artificial Sequence
  Description of Artificial Sequence: Synthetic oligonucleotide
  Antisense strand to SEQ ID NO: 672664
ucuucaggaagcaauggau

SEQ ID NO: 672666 - RNA, 19 nt, Artificial Sequence
  Description of Artificial Sequence: Synthetic oligonucleotide
  Sense strand starting at position 3352 of SEQ ID NO: 585850
uugcuuccugaagauagua

SEQ ID NO: 672667 - RNA, 19 nt, Artificial Sequence
  Description of Artificial Sequence: Synthetic oligonucleotide
  Antisense strand to SEQ ID NO: 672666
uacuaucuucaggaagcaa

SEQ ID NO: 672668 - RNA, 19 nt, Artificial Sequence
  Description of Artificial Sequence: Synthetic oligonucleotide
  Sense strand starting at position 3568 of SEQ ID NO: 585850
acgcauguaaguuauaaga

SEQ ID NO: 672669 - RNA, 19 nt, Artificial Sequence
  Description of Artificial Sequence: Synthetic oligonucleotide
  Antisense strand to SEQ ID NO: 672668
ucuuauaacuuacaugcgu

SEQ ID NO: 672670 - RNA, 19 nt, Artificial Sequence
  Description of Artificial Sequence: Synthetic oligonucleotide
  Sense strand starting at position 3654 of SEQ ID NO: 585850
augaaagauaaguguuuag

SEQ ID NO: 672671 - RNA, 19 nt, Artificial Sequence
  Description of Artificial Sequence: Synthetic oligonucleotide
  Antisense strand to SEQ ID NO: 672670
cuaaacacuuaucuuucau

SEQ ID NO: 672672 - RNA, 19 nt, Artificial Sequence
  Description of Artificial Sequence: Synthetic oligonucleotide
  Sense strand starting at position 3657 of SEQ ID NO: 585850
aaagauaaguguuuagcca

SEQ ID NO: 672673 - RNA, 19 nt, Artificial Sequence
  Description of Artificial Sequence: Synthetic oligonucleotide
  Antisense strand to SEQ ID NO: 672672
uggcuaaacacuuaucuuu

SEQ ID NO: 672674 - RNA, 19 nt, Artificial Sequence
  Description of Artificial Sequence: Synthetic oligonucleotide
  Sense strand starting at position 9 of SEQ ID NO: 585851
aucucagcugauugucaua

SEQ ID NO: 672675 - RNA, 19 nt, Artificial Sequence
  Description of Artificial Sequence: Synthetic oligonucleotide
  Antisense strand to SEQ ID NO: 672674
uaugacaaucagcugagau

SEQ ID NO: 672676 - RNA, 19 nt, Artificial Sequence
  Description of Artificial Sequence: Synthetic oligonucleotide
  Sense strand starting at position 11 of SEQ ID NO: 585851
cucagcugauugucauaau

SEQ ID NO: 672677 - RNA, 19 nt, Artificial Sequence
  Description of Artificial Sequence: Synthetic oligonucleotide
  Antisense strand to SEQ ID NO: 672676
auuaugacaaucagcugag

SEQ ID NO: 672678 - RNA, 19 nt, Artificial Sequence
  Description of Artificial Sequence: Synthetic oligonucleotide
  Sense strand starting at position 71 of SEQ ID NO: 585851
uuuguuuaacauggauacu

SEQ ID NO: 672679 - RNA, 19 nt, Artificial Sequence
  Description of Artificial Sequence: Synthetic oligonucleotide
  Antisense strand to SEQ ID NO: 672678
aguauccauguuaaacaaa

SEQ ID NO: 672680 - RNA, 19 nt, Artificial Sequence
  Description of Artificial Sequence: Synthetic oligonucleotide
  Sense strand starting at position 303 of SEQ ID NO: 585851
ugcugaaauccauagacuc

SEQ ID NO: 672681 - RNA, 19 nt, Artificial Sequence
  Description of Artificial Sequence: Synthetic oligonucleotide
  Antisense strand to SEQ ID NO: 672680
gagucuauggauuucagca

SEQ ID NO: 672682 - RNA, 19 nt, Artificial Sequence
  Description of Artificial Sequence: Synthetic oligonucleotide
  Sense strand starting at position 337 of SEQ ID NO: 585851
ucagauguauucuccugaa

SEQ ID NO: 672683 - RNA, 19 nt, Artificial Sequence
  Description of Artificial Sequence: Synthetic oligonucleotide
  Antisense strand to SEQ ID NO: 672682
uucaggagaauacaucuga

SEQ ID NO: 672684 - RNA, 19 nt, Artificial Sequence
  Description of Artificial Sequence: Synthetic oligonucleotide
  Sense strand starting at position 517 of SEQ ID NO: 585851
aggucuggagcuuaaaguu

SEQ ID NO: 672685 - RNA, 19 nt, Artificial Sequence
  Description of Artificial Sequence: Synthetic oligonucleotide
  Antisense strand to SEQ ID NO: 672684
aacuuuaagcuccagaccu

SEQ ID NO: 672686 - RNA, 19 nt, Artificial Sequence
  Description of Artificial Sequence: Synthetic oligonucleotide
  Sense strand starting at position 620 of SEQ ID NO: 585851
acgguccuagcuuauauua

SEQ ID NO: 672687 - RNA, 19 nt, Artificial Sequence
  Description of Artificial Sequence: Synthetic oligonucleotide
  Antisense strand to SEQ ID NO: 672686
uaauauaagcuaggaccgu

SEQ ID NO: 672688 - RNA, 19 nt, Artificial Sequence
  Description of Artificial Sequence: Synthetic oligonucleotide
  Sense strand starting at position 634 of SEQ ID NO: 585851
uauuaauagcuggguggaa

SEQ ID NO: 672689 - RNA, 19 nt, Artificial Sequence
  Description of Artificial Sequence: Synthetic oligonucleotide
  Antisense strand to SEQ ID NO: 672688
uuccacccagcuauuaaua

SEQ ID NO: 672690 - RNA, 19 nt, Artificial Sequence
  Description of Artificial Sequence: Synthetic oligonucleotide
  Sense strand starting at position 635 of SEQ ID NO: 585851
auuaauagcuggguggaau

SEQ ID NO: 672691 - RNA, 19 nt, Artificial Sequence
  Description of Artificial Sequence: Synthetic oligonucleotide
  Antisense strand to SEQ ID NO: 672690
auuccacccagcuauuaau

SEQ ID NO: 672692 - RNA, 19 nt, Artificial Sequence
  Description of Artificial Sequence: Synthetic oligonucleotide
  Sense strand starting at position 646 of SEQ ID NO: 585851
gguggaaugaguuguaccu

SEQ ID NO: 672693 - RNA, 19 nt, Artificial Sequence
  Description of Artificial Sequence: Synthetic oligonucleotide
  Antisense strand to SEQ ID NO: 672692
agguacaacucauuccacc

SEQ ID NO: 672694 - RNA, 19 nt, Artificial Sequence
  Description of Artificial Sequence: Synthetic oligonucleotide
  Sense strand starting at position 1082 of SEQ ID NO: 585851
ugucaaaucccaggcucau

SEQ ID NO: 672695 - RNA, 19 nt, Artificial Sequence
  Description of Artificial Sequence: Synthetic oligonucleotide
  Antisense strand to SEQ ID NO: 672694
augagccugggauuugaca

SEQ ID NO: 672696 - RNA, 19 nt, Artificial Sequence
  Description of Artificial Sequence: Synthetic oligonucleotide
  Sense strand starting at position 1195 of SEQ ID NO: 585851
gugagauccagugagguaa

SEQ ID NO: 672697 - RNA, 19 nt, Artificial Sequence
  Description of Artificial Sequence: Synthetic oligonucleotide
  Antisense strand to SEQ ID NO: 672696
uuaccucacuggaucucac

SEQ ID NO: 672698 - RNA, 19 nt, Artificial Sequence
  Description of Artificial Sequence: Synthetic oligonucleotide
  Sense strand starting at position 1206 of SEQ ID NO: 585851
ugagguaauuuaugagacu

SEQ ID NO: 672699 - RNA, 19 nt, Artificial Sequence
  Description of Artificial Sequence: Synthetic oligonucleotide
  Antisense strand to SEQ ID NO: 672698
agucucauaaauuaccuca

SEQ ID NO: 672700 - RNA, 19 nt, Artificial Sequence
  Description of Artificial Sequence: Synthetic oligonucleotide
  Sense strand starting at position 1207 of SEQ ID NO: 585851
gagguaauuuaugagacuc

SEQ ID NO: 672701 - RNA, 19 nt, Artificial Sequence
  Description of Artificial Sequence: Synthetic oligonucleotide
  Antisense strand to SEQ ID NO: 672700
gagucucauaaauuaccuc

SEQ ID NO: 672702 - RNA, 19 nt, Artificial Sequence
  Description of Artificial Sequence: Synthetic oligonucleotide
  Sense strand starting at position 1209 of SEQ ID NO: 585851
gguaauuuaugagacucuc

SEQ ID NO: 672703 - RNA, 19 nt, Artificial Sequence
  Description of Artificial Sequence: Synthetic oligonucleotide
  Antisense strand to SEQ ID NO: 672702
gagagucucauaaauuacc

SEQ ID NO: 672704 - RNA, 19 nt, Artificial Sequence
  Description of Artificial Sequence: Synthetic oligonucleotide
  Sense strand starting at position 1215 of SEQ ID NO: 585851
uuaugagacucucugcuuu

SEQ ID NO: 672705 - RNA, 19 nt, Artificial Sequence
  Description of Artificial Sequence: Synthetic oligonucleotide
  Antisense strand to SEQ ID NO: 672704
aaagcagagagucucauaa

SEQ ID NO: 672706 - RNA, 19 nt, Artificial Sequence
  Description of Artificial Sequence: Synthetic oligonucleotide
  Sense strand starting at position 1252 of SEQ ID NO: 585851
aucaaaucuuggguuagca

SEQ ID NO: 672707 - RNA, 19 nt, Artificial Sequence
  Description of Artificial Sequence: Synthetic oligonucleotide
  Antisense strand to SEQ ID NO: 672706
ugcuaacccaagauuugau

SEQ ID NO: 672708 - RNA, 19 nt, Artificial Sequence
  Description of Artificial Sequence: Synthetic oligonucleotide
  Sense strand starting at position 1254 of SEQ ID NO: 585851
caaaucuuggguuagcaca

SEQ ID NO: 672709 - RNA, 19 nt, Artificial Sequence
  Description of Artificial Sequence: Synthetic oligonucleotide
  Antisense strand to SEQ ID NO: 672708
ugugcuaacccaagauuug

SEQ ID NO: 672710 - RNA, 19 nt, Artificial Sequence
  Description of Artificial Sequence: Synthetic oligonucleotide
  Sense strand starting at position 1368 of SEQ ID NO: 585851
gguguaguauacuuggaug

SEQ ID NO: 672711 - RNA, 19 nt, Artificial Sequence
  Description of Artificial Sequence: Synthetic oligonucleotide
  Antisense strand to SEQ ID NO: 672710
cauccaaguauacuacacc

SEQ ID NO: 672712 - RNA, 19 nt, Artificial Sequence
  Description of Artificial Sequence: Synthetic oligonucleotide
  Sense strand starting at position 1406 of SEQ ID NO: 585851
cuggauuucuuagaacuca

SEQ ID NO: 672713 - RNA, 19 nt, Artificial Sequence
  Description of Artificial Sequence: Synthetic oligonucleotide
  Antisense strand to SEQ ID NO: 672712
ugaguucuaagaaauccag

SEQ ID NO: 672714 - RNA, 19 nt, Artificial Sequence
  Description of Artificial Sequence: Synthetic oligonucleotide
  Sense strand starting at position 1564 of SEQ ID NO: 585851
aucugugcccaugaugauu

SEQ ID NO: 672715 - RNA, 19 nt, Artificial Sequence
  Description of Artificial Sequence: Synthetic oligonucleotide
  Antisense strand to SEQ ID NO: 672714
aaucaucaugggcacagau

SEQ ID NO: 672716 - RNA, 19 nt, Artificial Sequence
  Description of Artificial Sequence: Synthetic oligonucleotide
  Sense strand starting at position 1608 of SEQ ID NO: 585851
caaagaaagucccucguaa

SEQ ID NO: 672717 - RNA, 19 nt, Artificial Sequence
  Description of Artificial Sequence: Synthetic oligonucleotide
  Antisense strand to SEQ ID NO: 672716
uuacgagggacuuucuuug

SEQ ID NO: 672718 - RNA, 19 nt, Artificial Sequence
  Description of Artificial Sequence: Synthetic oligonucleotide
  Sense strand starting at position 1610 of SEQ ID NO: 585851
aagaaagucccucguaaga

SEQ ID NO: 672719 - RNA, 19 nt, Artificial Sequence
  Description of Artificial Sequence: Synthetic oligonucleotide
  Antisense strand to SEQ ID NO: 672718
ucuuacgagggacuuucuu

SEQ ID NO: 672720 - RNA, 19 nt, Artificial Sequence
  Description of Artificial Sequence: Synthetic oligonucleotide
  Sense strand starting at position 1619 of SEQ ID NO: 585851
ccucguaagaaagguauca

SEQ ID NO: 672721 - RNA, 19 nt, Artificial Sequence
  Description of Artificial Sequence: Synthetic oligonucleotide
  Antisense strand to SEQ ID NO: 672720
ugauaccuuucuuacgagg

SEQ ID NO: 672722 - RNA, 19 nt, Artificial Sequence
  Description of Artificial Sequence: Synthetic oligonucleotide
  Sense strand starting at position 1621 of SEQ ID NO: 585851
ucguaagaaagguaucagu

SEQ ID NO: 672723 - RNA, 19 nt, Artificial Sequence
  Description of Artificial Sequence: Synthetic oligonucleotide
  Antisense strand to SEQ ID NO: 672722
acugauaccuuucuuacga

SEQ ID NO: 672724 - RNA, 19 nt, Artificial Sequence
  Description of Artificial Sequence: Synthetic oligonucleotide
  Sense strand starting at position 1721 of SEQ ID NO: 585851
gggcguuucgugguuugga

SEQ ID NO: 672725 - RNA, 19 nt, Artificial Sequence
  Description of Artificial Sequence: Synthetic oligonucleotide
  Antisense strand to SEQ ID NO: 672724
uccaaaccacgaaacgccc

SEQ ID NO: 672726 - RNA, 19 nt, Artificial Sequence
  Description of Artificial Sequence: Synthetic oligonucleotide
  Sense strand starting at position 2279 of SEQ ID NO: 585851
ucugguagcagugaaagau

SEQ ID NO: 672727 - RNA, 19 nt, Artificial Sequence
  Description of Artificial Sequence: Synthetic oligonucleotide
  Antisense strand to SEQ ID NO: 672726
aucuuucacugcuaccaga

SEQ ID NO: 672728 - RNA, 19 nt, Artificial Sequence
  Description of Artificial Sequence: Synthetic oligonucleotide
  Sense strand starting at position 2329 of SEQ ID NO: 585851
uauaauuggcguugauuag

SEQ ID NO: 672729 - RNA, 19 nt, Artificial Sequence
  Description of Artificial Sequence: Synthetic oligonucleotide
  Antisense strand to SEQ ID NO: 672728
cuaaucaacgccaauuaua

SEQ ID NO: 672730 - RNA, 19 nt, Artificial Sequence
  Description of Artificial Sequence: Synthetic oligonucleotide
  Sense strand starting at position 2330 of SEQ ID NO: 585851
auaauuggcguugauuaga

SEQ ID NO: 672731 - RNA, 19 nt, Artificial Sequence
  Description of Artificial Sequence: Synthetic oligonucleotide
  Antisense strand to SEQ ID NO: 672730
ucuaaucaacgccaauuau

SEQ ID NO: 672732 - RNA, 19 nt, Artificial Sequence
  Description of Artificial Sequence: Synthetic oligonucleotide
  Sense strand starting at position 2339 of SEQ ID NO: 585851
guugauuagacaggaucca

SEQ ID NO: 672733 - RNA, 19 nt, Artificial Sequence
  Description of Artificial Sequence: Synthetic oligonucleotide
  Antisense strand to SEQ ID NO: 672732
uggauccugucuaaucaac

SEQ ID NO: 672734 - RNA, 19 nt, Artificial Sequence
  Description of Artificial Sequence: Synthetic oligonucleotide
  Sense strand starting at position 2398 of SEQ ID NO: 585851
gguggauauuaucuuccuu

SEQ ID NO: 672735 - RNA, 19 nt, Artificial Sequence
  Description of Artificial Sequence: Synthetic oligonucleotide
  Antisense strand to SEQ ID NO: 672734
aaggaagauaauauccacc

SEQ ID NO: 672736 - RNA, 19 nt, Artificial Sequence
  Description of Artificial Sequence: Synthetic oligonucleotide
  Sense strand starting at position 2614 of SEQ ID NO: 585851
aguuuaagucccuaaauuc

SEQ ID NO: 672737 - RNA, 19 nt, Artificial Sequence
  Description of Artificial Sequence: Synthetic oligonucleotide
  Antisense strand to SEQ ID NO: 672736
gaauuuagggacuuaaacu

SEQ ID NO: 672738 - RNA, 19 nt, Artificial Sequence
  Description of Artificial Sequence: Synthetic oligonucleotide
  Sense strand starting at position 2626 of SEQ ID NO: 585851
uaaauucguguuuagacca

SEQ ID NO: 672739 - RNA, 19 nt, Artificial Sequence
  Description of Artificial Sequence: Synthetic oligonucleotide
  Antisense strand to SEQ ID NO: 672738
uggucuaaacacgaauuua

SEQ ID NO: 672740 - RNA, 19 nt, Artificial Sequence
  Description of Artificial Sequence: Synthetic oligonucleotide
  Sense strand starting at position 2902 of SEQ ID NO: 585851
gucucagucagaggucaca

SEQ ID NO: 672741 - RNA, 19 nt, Artificial Sequence
  Description of Artificial Sequence: Synthetic oligonucleotide
  Antisense strand to SEQ ID NO: 672740
ugugaccucugacugagac

SEQ ID NO: 672742 - RNA, 19 nt, Artificial Sequence
  Description of Artificial Sequence: Synthetic oligonucleotide
  Sense strand starting at position 2920 of SEQ ID NO: 585851
agaggagcuuccucacuca

SEQ ID NO: 672743 - RNA, 19 nt, Artificial Sequence
  Description of Artificial Sequence: Synthetic oligonucleotide
  Antisense strand to SEQ ID NO: 672742
ugagugaggaagcuccucu

SEQ ID NO: 672744 - RNA, 19 nt, Artificial Sequence
  Description of Artificial Sequence: Synthetic oligonucleotide
  Sense strand starting at position 2998 of SEQ ID NO: 585851
ccauguguggcguuuccau

SEQ ID NO: 672745 - RNA, 19 nt, Artificial Sequence
  Description of Artificial Sequence: Synthetic oligonucleotide
  Antisense strand to SEQ ID NO: 672744
auggaaacgccacacaugg

SEQ ID NO: 672746 - RNA, 19 nt, Artificial Sequence
  Description of Artificial Sequence: Synthetic oligonucleotide
  Sense strand starting at position 3129 of SEQ ID NO: 585851
ccucuccaucauggucaua

SEQ ID NO: 672747 - RNA, 19 nt, Artificial Sequence
  Description of Artificial Sequence: Synthetic oligonucleotide
  Antisense strand to SEQ ID NO: 672746
uaugaccaugauggagagg

SEQ ID NO: 672748 - RNA, 19 nt, Artificial Sequence
  Description of Artificial Sequence: Synthetic oligonucleotide
  Sense strand starting at position 3131 of SEQ ID NO: 585851
ucuccaucauggucauacu

SEQ ID NO: 672749 - RNA, 19 nt, Artificial Sequence
  Description of Artificial Sequence: Synthetic oligonucleotide
  Antisense strand to SEQ ID NO: 672748
aguaugaccaugauggaga

SEQ ID NO: 672750 - RNA, 19 nt, Artificial Sequence
  Description of Artificial Sequence: Synthetic oligonucleotide
  Sense strand starting at position 3543 of SEQ ID NO: 585851
ccuggccgucaugaugaaa

SEQ ID NO: 672751 - RNA, 19 nt, Artificial Sequence
  Description of Artificial Sequence: Synthetic oligonucleotide
  Antisense strand to SEQ ID NO: 672750
uuucaucaugacggccagg

SEQ ID NO: 672752 - RNA, 19 nt, Artificial Sequence
  Description of Artificial Sequence: Synthetic oligonucleotide
  Sense strand starting at position 3891 of SEQ ID NO: 585851
uuuacauugcuuuagguau

SEQ ID NO: 672753 - RNA, 19 nt, Artificial Sequence
  Description of Artificial Sequence: Synthetic oligonucleotide
  Antisense strand to SEQ ID NO: 672752
auaccuaaagcaauguaaa

SEQ ID NO: 672754 - RNA, 19 nt, Artificial Sequence
  Description of Artificial Sequence: Synthetic oligonucleotide
  Sense strand starting at position 39 of SEQ ID NO: 585852
cccucagacuugguugaca

SEQ ID NO: 672755 - RNA, 19 nt, Artificial Sequence
  Description of Artificial Sequence: Synthetic oligonucleotide
  Antisense strand to SEQ ID NO: 672754
ugucaaccaagucugaggg

SEQ ID NO: 672756 - RNA, 19 nt, Artificial Sequence
  Description of Artificial Sequence: Synthetic oligonucleotide
  Sense strand starting at position 41 of SEQ ID NO: 585852
cucagacuugguugacaga

SEQ ID NO: 672757 - RNA, 19 nt, Artificial Sequence
  Description of Artificial Sequence: Synthetic oligonucleotide
  Antisense strand to SEQ ID NO: 672756
ucugucaaccaagucugag

SEQ ID NO: 672758 - RNA, 19 nt, Artificial Sequence
  Description of Artificial Sequence: Synthetic oligonucleotide
  Sense strand starting at position 44 of SEQ ID NO: 585852
agacuugguugacagagaa

SEQ ID NO: 672759 - RNA, 19 nt, Artificial Sequence
  Description of Artificial Sequence: Synthetic oligonucleotide
  Antisense strand to SEQ ID NO: 672758
uucucugucaaccaagucu

SEQ ID NO: 672760 - RNA, 19 nt, Artificial Sequence
  Description of Artificial Sequence: Synthetic oligonucleotide
  Sense strand starting at position 74 of SEQ ID NO: 585852
uucagaggguccuugugaa

SEQ ID NO: 672761 - RNA, 19 nt, Artificial Sequence
  Description of Artificial Sequence: Synthetic oligonucleotide
  Antisense strand to SEQ ID NO: 672760
uucacaaggacccucugaa

SEQ ID NO: 672762 - RNA, 19 nt, Artificial Sequence
  Description of Artificial Sequence: Synthetic oligonucleotide
  Sense strand starting at position 113 of SEQ ID NO: 585852
gacagugugcaauaagcaa

SEQ ID NO: 672763 - RNA, 19 nt, Artificial Sequence
  Description of Artificial Sequence: Synthetic oligonucleotide
  Antisense strand to SEQ ID NO: 672762
uugcuuauugcacacuguc

SEQ ID NO: 672764 - RNA, 19 nt, Artificial Sequence
  Description of Artificial Sequence: Synthetic oligonucleotide
  Sense strand starting at position 167 of SEQ ID NO: 585852
gccucacucagaggaaaug

SEQ ID NO: 672765 - RNA, 19 nt, Artificial Sequence
  Description of Artificial Sequence: Synthetic oligonucleotide
  Antisense strand to SEQ ID NO: 672764
cauuuccucugagugaggc

SEQ ID NO: 672766 - RNA, 19 nt, Artificial Sequence
  Description of Artificial Sequence: Synthetic oligonucleotide
  Sense strand starting at position 176 of SEQ ID NO: 585852
agaggaaaugcuuguacau

SEQ ID NO: 672767 - RNA, 19 nt, Artificial Sequence
  Description of Artificial Sequence: Synthetic oligonucleotide
  Antisense strand to SEQ ID NO: 672766
auguacaagcauuuccucu

SEQ ID NO: 672768 - RNA, 19 nt, Artificial Sequence
  Description of Artificial Sequence: Synthetic oligonucleotide
  Sense strand starting at position 292 of SEQ ID NO: 585852
ccaccauuugucugugagu

SEQ ID NO: 672769 - RNA, 19 nt, Artificial Sequence
  Description of Artificial Sequence: Synthetic oligonucleotide
  Antisense strand to SEQ ID NO: 672768
acucacagacaaauggugg

SEQ ID NO: 672770 - RNA, 19 nt, Artificial Sequence
  Description of Artificial Sequence: Synthetic oligonucleotide
  Sense strand starting at position 293 of SEQ ID NO: 585852
caccauuugucugugaguu

SEQ ID NO: 672771 - RNA, 19 nt, Artificial Sequence
  Description of Artificial Sequence: Synthetic oligonucleotide
  Antisense strand to SEQ ID NO: 672770
aacucacagacaaauggug

SEQ ID NO: 672772 - RNA, 19 nt, Artificial Sequence
  Description of Artificial Sequence: Synthetic oligonucleotide
  Sense strand starting at position 294 of SEQ ID NO: 585852
accauuugucugugaguuu

SEQ ID NO: 672773 - RNA, 19 nt, Artificial Sequence
  Description of Artificial Sequence: Synthetic oligonucleotide
  Antisense strand to SEQ ID NO: 672772
aaacucacagacaaauggu

SEQ ID NO: 672774 - RNA, 19 nt, Artificial Sequence
  Description of Artificial Sequence: Synthetic oligonucleotide
  Sense strand starting at position 591 of SEQ ID NO: 585852
ggagaaagcccauggccau

SEQ ID NO: 672775 - RNA, 19 nt, Artificial Sequence
  Description of Artificial Sequence: Synthetic oligonucleotide
  Antisense strand to SEQ ID NO: 672774
auggccaugggcuuucucc

SEQ ID NO: 672776 - RNA, 19 nt, Artificial Sequence
  Description of Artificial Sequence: Synthetic oligonucleotide
  Sense strand starting at position 886 of SEQ ID NO: 585852
cucucuccaccgcagaaau

SEQ ID NO: 672777 - RNA, 19 nt, Artificial Sequence
  Description of Artificial Sequence: Synthetic oligonucleotide
  Antisense strand to SEQ ID NO: 672776
auuucugcgguggagagag

SEQ ID NO: 672778 - RNA, 19 nt, Artificial Sequence
  Description of Artificial Sequence: Synthetic oligonucleotide
  Sense strand starting at position 1125 of SEQ ID NO: 585852
agacuuagcccugacccau

SEQ ID NO: 672779 - RNA, 19 nt, Artificial Sequence
  Description of Artificial Sequence: Synthetic oligonucleotide
  Antisense strand to SEQ ID NO: 672778
augggucagggcuaagucu

SEQ ID NO: 672780 - RNA, 19 nt, Artificial Sequence
  Description of Artificial Sequence: Synthetic oligonucleotide
  Sense strand starting at position 1188 of SEQ ID NO: 585852
agacccuuuccucagcaga

SEQ ID NO: 672781 - RNA, 19 nt, Artificial Sequence
  Description of Artificial Sequence: Synthetic oligonucleotide
  Antisense strand to SEQ ID NO: 672780
ucugcugaggaaagggucu

SEQ ID NO: 672782 - RNA, 19 nt, Artificial Sequence
  Description of Artificial Sequence: Synthetic oligonucleotide
  Sense strand starting at position 1463 of SEQ ID NO: 585852
gucacugaugacugggaga

SEQ ID NO: 672783 - RNA, 19 nt, Artificial Sequence
  Description of Artificial Sequence: Synthetic oligonucleotide
  Antisense strand to SEQ ID NO: 672782
ucucccagucaucagugac

SEQ ID NO: 672784 - RNA, 19 nt, Artificial Sequence
  Description of Artificial Sequence: Synthetic oligonucleotide
  Sense strand starting at position 1466 of SEQ ID NO: 585852
acugaugacugggagauga

SEQ ID NO: 672785 - RNA, 19 nt, Artificial Sequence
  Description of Artificial Sequence: Synthetic oligonucleotide
  Antisense strand to SEQ ID NO: 672784
ucaucucccagucaucagu

SEQ ID NO: 672786 - RNA, 19 nt, Artificial Sequence
  Description of Artificial Sequence: Synthetic oligonucleotide
  Sense strand starting at position 1482 of SEQ ID NO: 585852
ugagcucugagcuggcaaa

SEQ ID NO: 672787 - RNA, 19 nt, Artificial Sequence
  Description of Artificial Sequence: Synthetic oligonucleotide
  Antisense strand to SEQ ID NO: 672786
uuugccagcucagagcuca

SEQ ID NO: 672788 - RNA, 19 nt, Artificial Sequence
  Description of Artificial Sequence: Synthetic oligonucleotide
  Sense strand starting at position 1956 of SEQ ID NO: 585852
aggaaugugcugggaggaa

SEQ ID NO: 672789 - RNA, 19 nt, Artificial Sequence
  Description of Artificial Sequence: Synthetic oligonucleotide
  Antisense strand to SEQ ID NO: 672788
uuccucccagcacauuccu

SEQ ID NO: 672790 - RNA, 19 nt, Artificial Sequence
  Description of Artificial Sequence: Synthetic oligonucleotide
  Sense strand starting at position 2091 of SEQ ID NO: 585852
cugauuaacccuugcaggu

SEQ ID NO: 672791 - RNA, 19 nt, Artificial Sequence
  Description of Artificial Sequence: Synthetic oligonucleotide
  Antisense strand to SEQ ID NO: 672790
accugcaaggguuaaucag

SEQ ID NO: 672792 - RNA, 19 nt, Artificial Sequence
  Description of Artificial Sequence: Synthetic oligonucleotide
  Sense strand starting at position 2219 of SEQ ID NO: 585852
gugcaaggcgccagagaua

SEQ ID NO: 672793 - RNA, 19 nt, Artificial Sequence
  Description of Artificial Sequence: Synthetic oligonucleotide
  Antisense strand to SEQ ID NO: 672792
uaucucuggcgccuugcac

SEQ ID NO: 672794 - RNA, 19 nt, Artificial Sequence
  Description of Artificial Sequence: Synthetic oligonucleotide
  Sense strand starting at position 2458 of SEQ ID NO: 585852
gagggaucccgaggcuugu

SEQ ID NO: 672795 - RNA, 19 nt, Artificial Sequence
  Description of Artificial Sequence: Synthetic oligonucleotide
  Antisense strand to SEQ ID NO: 672794
acaagccucgggaucccuc

SEQ ID NO: 672796 - RNA, 19 nt, Artificial Sequence
  Description of Artificial Sequence: Synthetic oligonucleotide
  Sense strand starting at position 2774 of SEQ ID NO: 585852
gagaguugucccuggaggc

SEQ ID NO: 672797 - RNA, 19 nt, Artificial Sequence
  Description of Artificial Sequence: Synthetic oligonucleotide
  Antisense strand to SEQ ID NO: 672796
gccuccagggacaacucuc

SEQ ID NO: 672798 - RNA, 19 nt, Artificial Sequence
  Description of Artificial Sequence: Synthetic oligonucleotide
  Sense strand starting at position 2775 of SEQ ID NO: 585852
agaguugucccuggaggcu

SEQ ID NO: 672799 - RNA, 19 nt, Artificial Sequence
  Description of Artificial Sequence: Synthetic oligonucleotide
  Antisense strand to SEQ ID NO: 672798
agccuccagggacaacucu

SEQ ID NO: 672800 - RNA, 19 nt, Artificial Sequence
  Description of Artificial Sequence: Synthetic oligonucleotide
  Sense strand starting at position 2794 of SEQ ID NO: 585852
gggccuuccuuucuccaaa

SEQ ID NO: 672801 - RNA, 19 nt, Artificial Sequence
  Description of Artificial Sequence: Synthetic oligonucleotide
  Antisense strand to SEQ ID NO: 672800
uuuggagaaaggaaggccc

SEQ ID NO: 672802 - RNA, 19 nt, Artificial Sequence
  Description of Artificial Sequence: Synthetic oligonucleotide
  Sense strand starting at position 2844 of SEQ ID NO: 585852
cuccauucugacgggagaa

SEQ ID NO: 672803 - RNA, 19 nt, Artificial Sequence
  Description of Artificial Sequence: Synthetic oligonucleotide
  Antisense strand to SEQ ID NO: 672802
uucucccgucagaauggag

SEQ ID NO: 672804 - RNA, 19 nt, Artificial Sequence
  Description of Artificial Sequence: Synthetic oligonucleotide
  Sense strand starting at position 2845 of SEQ ID NO: 585852
uccauucugacgggagaaa

SEQ ID NO: 672805 - RNA, 19 nt, Artificial Sequence
  Description of Artificial Sequence: Synthetic oligonucleotide
  Antisense strand to SEQ ID NO: 672804
uuucucccgucagaaugga

SEQ ID NO: 672806 - RNA, 19 nt, Artificial Sequence
  Description of Artificial Sequence: Synthetic oligonucleotide
  Sense strand starting at position 2856 of SEQ ID NO: 585852
gggagaaaguucuagauaa

SEQ ID NO: 672807 - RNA, 19 nt, Artificial Sequence
  Description of Artificial Sequence: Synthetic oligonucleotide
  Antisense strand to SEQ ID NO: 672806
uuaucuagaacuuucuccc

SEQ ID NO: 672808 - RNA, 19 nt, Artificial Sequence
  Description of Artificial Sequence: Synthetic oligonucleotide
  Sense strand starting at position 2913 of SEQ ID NO: 585852
ugccgagagcaugaggauu

SEQ ID NO: 672809 - RNA, 19 nt, Artificial Sequence
  Description of Artificial Sequence: Synthetic oligonucleotide
  Antisense strand to SEQ ID NO: 672808
aauccucaugcucucggca

SEQ ID NO: 672810 - RNA, 19 nt, Artificial Sequence
  Description of Artificial Sequence: Synthetic oligonucleotide
  Sense strand starting at position 3064 of SEQ ID NO: 585852
uugguugaggaucaguuau

SEQ ID NO: 672811 - RNA, 19 nt, Artificial Sequence
  Description of Artificial Sequence: Synthetic oligonucleotide
  Antisense strand to SEQ ID NO: 672810
auaacugauccucaaccaa

SEQ ID NO: 672812 - RNA, 19 nt, Artificial Sequence
  Description of Artificial Sequence: Synthetic oligonucleotide
  Sense strand starting at position 3066 of SEQ ID NO: 585852
gguugaggaucaguuauca

SEQ ID NO: 672813 - RNA, 19 nt, Artificial Sequence
  Description of Artificial Sequence: Synthetic oligonucleotide
  Antisense strand to SEQ ID NO: 672812
ugauaacugauccucaacc

SEQ ID NO: 672814 - RNA, 19 nt, Artificial Sequence
  Description of Artificial Sequence: Synthetic oligonucleotide
  Sense strand starting at position 3070 of SEQ ID NO: 585852
gaggaucaguuaucaguca

SEQ ID NO: 672815 - RNA, 19 nt, Artificial Sequence
  Description of Artificial Sequence: Synthetic oligonucleotide
  Antisense strand to SEQ ID NO: 672814
ugacugauaacugauccuc

SEQ ID NO: 672816 - RNA, 19 nt, Artificial Sequence
  Description of Artificial Sequence: Synthetic oligonucleotide
  Sense strand starting at position 3303 of SEQ ID NO: 585852
acagaagccuggcuuauau

SEQ ID NO: 672817 - RNA, 19 nt, Artificial Sequence
  Description of Artificial Sequence: Synthetic oligonucleotide
  Antisense strand to SEQ ID NO: 672816
auauaagccaggcuucugu

SEQ ID NO: 672818 - RNA, 19 nt, Artificial Sequence
  Description of Artificial Sequence: Synthetic oligonucleotide
  Sense strand starting at position 3385 of SEQ ID NO: 585852
auguucgaugcucaugaga

SEQ ID NO: 672819 - RNA, 19 nt, Artificial Sequence
  Description of Artificial Sequence: Synthetic oligonucleotide
  Antisense strand to SEQ ID NO: 672818
ucucaugagcaucgaacau

SEQ ID NO: 672820 - RNA, 19 nt, Artificial Sequence
  Description of Artificial Sequence: Synthetic oligonucleotide
  Sense strand starting at position 3398 of SEQ ID NO: 585852
augagaugcuaagcuauua

SEQ ID NO: 672821 - RNA, 19 nt, Artificial Sequence
  Description of Artificial Sequence: Synthetic oligonucleotide
  Antisense strand to SEQ ID NO: 672820
uaauagcuuagcaucucau

SEQ ID NO: 672822 - RNA, 19 nt, Artificial Sequence
  Description of Artificial Sequence: Synthetic oligonucleotide
  Sense strand starting at position 3428 of SEQ ID NO: 585852
aguacuauaauguggguaa

SEQ ID NO: 672823 - RNA, 19 nt, Artificial Sequence
  Description of Artificial Sequence: Synthetic oligonucleotide
  Antisense strand to SEQ ID NO: 672822
uuacccacauuauaguacu

SEQ ID NO: 672824 - RNA, 19 nt, Artificial Sequence
  Description of Artificial Sequence: Synthetic oligonucleotide
  Sense strand starting at position 3431 of SEQ ID NO: 585852
acuauaauguggguaagua

SEQ ID NO: 672825 - RNA, 19 nt, Artificial Sequence
  Description of Artificial Sequence: Synthetic oligonucleotide
  Antisense strand to SEQ ID NO: 672824
uacuuacccacauuauagu

SEQ ID NO: 672826 - RNA, 19 nt, Artificial Sequence
  Description of Artificial Sequence: Synthetic oligonucleotide
  Sense strand starting at position 3432 of SEQ ID NO: 585852
cuauaauguggguaaguac

SEQ ID NO: 672827 - RNA, 19 nt, Artificial Sequence
  Description of Artificial Sequence: Synthetic oligonucleotide
  Antisense strand to SEQ ID NO: 672826
guacuuacccacauuauag

SEQ ID NO: 672828 - RNA, 19 nt, Artificial Sequence
  Description of Artificial Sequence: Synthetic oligonucleotide
  Sense strand starting at position 3763 of SEQ ID NO: 585852
aauguuuauugaguggaua

SEQ ID NO: 672829 - RNA, 19 nt, Artificial Sequence
  Description of Artificial Sequence: Synthetic oligonucleotide
  Antisense strand to SEQ ID NO: 672828
uauccacucaauaaacauu

SEQ ID NO: 672830 - RNA, 19 nt, Artificial Sequence
  Description of Artificial Sequence: Synthetic oligonucleotide
  Sense strand starting at position 3764 of SEQ ID NO: 585852
auguuuauugaguggauaa

SEQ ID NO: 672831 - RNA, 19 nt, Artificial Sequence
  Description of Artificial Sequence: Synthetic oligonucleotide
  Antisense strand to SEQ ID NO: 672830
uuauccacucaauaaacau

SEQ ID NO: 672832 - RNA, 19 nt, Artificial Sequence
  Description of Artificial Sequence: Synthetic oligonucleotide
  Sense strand starting at position 3765 of SEQ ID NO: 585852
uguuuauugaguggauaag

SEQ ID NO: 672833 - RNA, 19 nt, Artificial Sequence
  Description of Artificial Sequence: Synthetic oligonucleotide
  Antisense strand to SEQ ID NO: 672832
cuuauccacucaauaaaca

SEQ ID NO: 672834 - RNA, 19 nt, Artificial Sequence
  Description of Artificial Sequence: Synthetic oligonucleotide
  Sense strand starting at position 113 of SEQ ID NO: 585853
gcggucuucuaucaggaaa

SEQ ID NO: 672835 - RNA, 19 nt, Artificial Sequence
  Description of Artificial Sequence: Synthetic oligonucleotide
  Antisense strand to SEQ ID NO: 672834
uuuccugauagaagaccgc

SEQ ID NO: 672836 - RNA, 19 nt, Artificial Sequence
  Description of Artificial Sequence: Synthetic oligonucleotide
  Sense strand starting at position 115 of SEQ ID NO: 585853
ggucuucuaucaggaaagu

SEQ ID NO: 672837 - RNA, 19 nt, Artificial Sequence
  Description of Artificial Sequence: Synthetic oligonucleotide
  Antisense strand to SEQ ID NO: 672836
acuuuccugauagaagacc

SEQ ID NO: 672838 - RNA, 19 nt, Artificial Sequence
  Description of Artificial Sequence: Synthetic oligonucleotide
  Sense strand starting at position 116 of SEQ ID NO: 585853
gucuucuaucaggaaagug

SEQ ID NO: 672839 - RNA, 19 nt, Artificial Sequence
  Description of Artificial Sequence: Synthetic oligonucleotide
  Antisense strand to SEQ ID NO: 672838
cacuuuccugauagaagac

SEQ ID NO: 672840 - RNA, 19 nt, Artificial Sequence
  Description of Artificial Sequence: Synthetic oligonucleotide
  Sense strand starting at position 589 of SEQ ID NO: 585853
cucuaccuuccuugagaag

SEQ ID NO: 672841 - RNA, 19 nt, Artificial Sequence
  Description of Artificial Sequence: Synthetic oligonucleotide
  Antisense strand to SEQ ID NO: 672840
cuucucaaggaagguagag

SEQ ID NO: 672842 - RNA, 19 nt, Artificial Sequence
  Description of Artificial Sequence: Synthetic oligonucleotide
  Sense strand starting at position 590 of SEQ ID NO: 585853
ucuaccuuccuugagaagu

SEQ ID NO: 672843 - RNA, 19 nt, Artificial Sequence
  Description of Artificial Sequence: Synthetic oligonucleotide
  Antisense strand to SEQ ID NO: 672842
acuucucaaggaagguaga

SEQ ID NO: 672844 - RNA, 19 nt, Artificial Sequence
  Description of Artificial Sequence: Synthetic oligonucleotide
  Sense strand starting at position 616 of SEQ ID NO: 585853
agaauuauacagugauguc

SEQ ID NO: 672845 - RNA, 19 nt, Artificial Sequence
  Description of Artificial Sequence: Synthetic oligonucleotide
  Antisense strand to SEQ ID NO: 672844
gacaucacuguauaauucu

SEQ ID NO: 672846 - RNA, 19 nt, Artificial Sequence
  Description of Artificial Sequence: Synthetic oligonucleotide
  Sense strand starting at position 619 of SEQ ID NO: 585853
auuauacagugaugucauu

SEQ ID NO: 672847 - RNA, 19 nt, Artificial Sequence
  Description of Artificial Sequence: Synthetic oligonucleotide
  Antisense strand to SEQ ID NO: 672846
aaugacaucacuguauaau

SEQ ID NO: 672848 - RNA, 19 nt, Artificial Sequence
  Description of Artificial Sequence: Synthetic oligonucleotide
  Sense strand starting at position 653 of SEQ ID NO: 585853
ugaccuucgucucuaauga

SEQ ID NO: 672849 - RNA, 19 nt, Artificial Sequence
  Description of Artificial Sequence: Synthetic oligonucleotide
  Antisense strand to SEQ ID NO: 672848
ucauuagagacgaagguca

SEQ ID NO: 672850 - RNA, 19 nt, Artificial Sequence
  Description of Artificial Sequence: Synthetic oligonucleotide
  Sense strand starting at position 846 of SEQ ID NO: 585853
acagcuuagugccuggaau

SEQ ID NO: 672851 - RNA, 19 nt, Artificial Sequence
  Description of Artificial Sequence: Synthetic oligonucleotide
  Antisense strand to SEQ ID NO: 672850
auuccaggcacuaagcugu

SEQ ID NO: 672852 - RNA, 19 nt, Artificial Sequence
  Description of Artificial Sequence: Synthetic oligonucleotide
  Sense strand starting at position 848 of SEQ ID NO: 585853
agcuuagugccuggaaugu

SEQ ID NO: 672853 - RNA, 19 nt, Artificial Sequence
  Description of Artificial Sequence: Synthetic oligonucleotide
  Antisense strand to SEQ ID NO: 672852
acauuccaggcacuaagcu

SEQ ID NO: 672854 - RNA, 19 nt, Artificial Sequence
  Description of Artificial Sequence: Synthetic oligonucleotide
  Sense strand starting at position 937 of SEQ ID NO: 585853
acaagacauuagugauaau

SEQ ID NO: 672855 - RNA, 19 nt, Artificial Sequence
  Description of Artificial Sequence: Synthetic oligonucleotide
  Antisense strand to SEQ ID NO: 672854
auuaucacuaaugucuugu

SEQ ID NO: 672856 - RNA, 19 nt, Artificial Sequence
  Description of Artificial Sequence: Synthetic oligonucleotide
  Sense strand starting at position 940 of SEQ ID NO: 585853
agacauuagugauaaugga

SEQ ID NO: 672857 - RNA, 19 nt, Artificial Sequence
  Description of Artificial Sequence: Synthetic oligonucleotide
  Antisense strand to SEQ ID NO: 672856
uccauuaucacuaaugucu

SEQ ID NO: 672858 - RNA, 19 nt, Artificial Sequence
  Description of Artificial Sequence: Synthetic oligonucleotide
  Sense strand starting at position 1066 of SEQ ID NO: 585853
acuccuuugucuugggaag

SEQ ID NO: 672859 - RNA, 19 nt, Artificial Sequence
  Description of Artificial Sequence: Synthetic oligonucleotide
  Antisense strand to SEQ ID NO: 672858
cuucccaagacaaaggagu

SEQ ID NO: 672860 - RNA, 19 nt, Artificial Sequence
  Description of Artificial Sequence: Synthetic oligonucleotide
  Sense strand starting at position 1318 of SEQ ID NO: 585853
cugguuucuacaugggaca

SEQ ID NO: 672861 - RNA, 19 nt, Artificial Sequence
  Description of Artificial Sequence: Synthetic oligonucleotide
  Antisense strand to SEQ ID NO: 672860
ugucccauguagaaaccag

SEQ ID NO: 672862 - RNA, 19 nt, Artificial Sequence
  Description of Artificial Sequence: Synthetic oligonucleotide
  Sense strand starting at position 1320 of SEQ ID NO: 585853
gguuucuacaugggacaga

SEQ ID NO: 672863 - RNA, 19 nt, Artificial Sequence
  Description of Artificial Sequence: Synthetic oligonucleotide
  Antisense strand to SEQ ID NO: 672862
ucugucccauguagaaacc

SEQ ID NO: 672864 - RNA, 19 nt, Artificial Sequence
  Description of Artificial Sequence: Synthetic oligonucleotide
  Sense strand starting at position 1352 of SEQ ID NO: 585853
caguguucccaaggaucca

SEQ ID NO: 672865 - RNA, 19 nt, Artificial Sequence
  Description of Artificial Sequence: Synthetic oligonucleotide
  Antisense strand to SEQ ID NO: 672864
uggauccuugggaacacug

SEQ ID NO: 672866 - RNA, 19 nt, Artificial Sequence
  Description of Artificial Sequence: Synthetic oligonucleotide
  Sense strand starting at position 1468 of SEQ ID NO: 585853
gaggaauuccuagguaccu

SEQ ID NO: 672867 - RNA, 19 nt, Artificial Sequence
  Description of Artificial Sequence: Synthetic oligonucleotide
  Antisense strand to SEQ ID NO: 672866
agguaccuaggaauuccuc

SEQ ID NO: 672868 - RNA, 19 nt, Artificial Sequence
  Description of Artificial Sequence: Synthetic oligonucleotide
  Sense strand starting at position 1526 of SEQ ID NO: 585853
auagauucucccuagggcu

SEQ ID NO: 672869 - RNA, 19 nt, Artificial Sequence
  Description of Artificial Sequence: Synthetic oligonucleotide
  Antisense strand to SEQ ID NO: 672868
agcccuagggagaaucuau

SEQ ID NO: 672870 - RNA, 19 nt, Artificial Sequence
  Description of Artificial Sequence: Synthetic oligonucleotide
  Sense strand starting at position 1558 of SEQ ID NO: 585853
guccuaacggcaggagauu

SEQ ID NO: 672871 - RNA, 19 nt, Artificial Sequence
  Description of Artificial Sequence: Synthetic oligonucleotide
  Antisense strand to SEQ ID NO: 672870
aaucuccugccguuaggac

SEQ ID NO: 672872 - RNA, 19 nt, Artificial Sequence
  Description of Artificial Sequence: Synthetic oligonucleotide
  Sense strand starting at position 1598 of SEQ ID NO: 585853
gcaugugguucccagugga

SEQ ID NO: 672873 - RNA, 19 nt, Artificial Sequence
  Description of Artificial Sequence: Synthetic oligonucleotide
  Antisense strand to SEQ ID NO: 672872
uccacugggaaccacaugc

SEQ ID NO: 672874 - RNA, 19 nt, Artificial Sequence
  Description of Artificial Sequence: Synthetic oligonucleotide
  Sense strand starting at position 1759 of SEQ ID NO: 585853
ccacacauguucgcucauu

SEQ ID NO: 672875 - RNA, 19 nt, Artificial Sequence
  Description of Artificial Sequence: Synthetic oligonucleotide
  Antisense strand to SEQ ID NO: 672874
aaugagcgaacaugugugg

SEQ ID NO: 672876 - RNA, 19 nt, Artificial Sequence
  Description of Artificial Sequence: Synthetic oligonucleotide
  Sense strand starting at position 1770 of SEQ ID NO: 585853
cgcucauuguugucaugca

SEQ ID NO: 672877 - RNA, 19 nt, Artificial Sequence
  Description of Artificial Sequence: Synthetic oligonucleotide
  Antisense strand to SEQ ID NO: 672876
ugcaugacaacaaugagcg

SEQ ID NO: 672878 - RNA, 19 nt, Artificial Sequence
  Description of Artificial Sequence: Synthetic oligonucleotide
  Sense strand starting at position 3219 of SEQ ID NO: 585853
gagggcgcuuauuugcaua

SEQ ID NO: 672879 - RNA, 19 nt, Artificial Sequence
  Description of Artificial Sequence: Synthetic oligonucleotide
  Antisense strand to SEQ ID NO: 672878
uaugcaaauaagcgcccuc

SEQ ID NO: 672880 - RNA, 19 nt, Artificial Sequence
  Description of Artificial Sequence: Synthetic oligonucleotide
  Sense strand starting at position 3221 of SEQ ID NO: 585853
gggcgcuuauuugcauaga

SEQ ID NO: 672881 - RNA, 19 nt, Artificial Sequence
  Description of Artificial Sequence: Synthetic oligonucleotide
  Antisense strand to SEQ ID NO: 672880
ucuaugcaaauaagcgccc

SEQ ID NO: 672882 - RNA, 19 nt, Artificial Sequence
  Description of Artificial Sequence: Synthetic oligonucleotide
  Sense strand starting at position 3255 of SEQ ID NO: 585853
gcugucaucucgcgucaga

SEQ ID NO: 672883 - RNA, 19 nt, Artificial Sequence
  Description of Artificial Sequence: Synthetic oligonucleotide
  Antisense strand to SEQ ID NO: 672882
ucugacgcgagaugacagc

SEQ ID NO: 672884 - RNA, 19 nt, Artificial Sequence
  Description of Artificial Sequence: Synthetic oligonucleotide
  Sense strand starting at position 3404 of SEQ ID NO: 585853
agcgcagucuugcggaaga

SEQ ID NO: 672885 - RNA, 19 nt, Artificial Sequence
  Description of Artificial Sequence: Synthetic oligonucleotide
  Antisense strand to SEQ ID NO: 672884
ucuuccgcaagacugcgcu

SEQ ID NO: 672886 - RNA, 19 nt, Artificial Sequence
  Description of Artificial Sequence: Synthetic oligonucleotide
  Sense strand starting at position 3406 of SEQ ID NO: 585853
cgcagucuugcggaagaga

SEQ ID NO: 672887 - RNA, 19 nt, Artificial Sequence
  Description of Artificial Sequence: Synthetic oligonucleotide
  Antisense strand to SEQ ID NO: 672886
ucucuuccgcaagacugcg

SEQ ID NO: 672888 - RNA, 19 nt, Artificial Sequence
  Description of Artificial Sequence: Synthetic oligonucleotide
  Sense strand starting at position 3546 of SEQ ID NO: 585853
cagggauugauuggagcau

SEQ ID NO: 672889 - RNA, 19 nt, Artificial Sequence
  Description of Artificial Sequence: Synthetic oligonucleotide
  Antisense strand to SEQ ID NO: 672888
augcuccaaucaaucccug

SEQ ID NO: 672890 - RNA, 19 nt, Artificial Sequence
  Description of Artificial Sequence: Synthetic oligonucleotide
  Sense strand starting at position 3547 of SEQ ID NO: 585853
agggauugauuggagcauu

SEQ ID NO: 672891 - RNA, 19 nt, Artificial Sequence
  Description of Artificial Sequence: Synthetic oligonucleotide
  Antisense strand to SEQ ID NO: 672890
aaugcuccaaucaaucccu

SEQ ID NO: 672892 - RNA, 19 nt, Artificial Sequence
  Description of Artificial Sequence: Synthetic oligonucleotide
  Sense strand starting at position 3558 of SEQ ID NO: 585853
ggagcauuuccucacgccu

SEQ ID NO: 672893 - RNA, 19 nt, Artificial Sequence
  Description of Artificial Sequence: Synthetic oligonucleotide
  Antisense strand to SEQ ID NO: 672892
aggcgugaggaaaugcucc

SEQ ID NO: 672894 - RNA, 19 nt, Artificial Sequence
  Description of Artificial Sequence: Synthetic oligonucleotide
  Sense strand starting at position 3591 of SEQ ID NO: 585853
caguuauuggcugagcgga

SEQ ID NO: 672895 - RNA, 19 nt, Artificial Sequence
  Description of Artificial Sequence: Synthetic oligonucleotide
  Antisense strand to SEQ ID NO: 672894
uccgcucagccaauaacug

SEQ ID NO: 672896 - RNA, 19 nt, Artificial Sequence
  Description of Artificial Sequence: Synthetic oligonucleotide
  Sense strand starting at position 3777 of SEQ ID NO: 585853
gggucuuuggcagacauac

SEQ ID NO: 672897 - RNA, 19 nt, Artificial Sequence
  Description of Artificial Sequence: Synthetic oligonucleotide
  Antisense strand to SEQ ID NO: 672896
guaugucugccaaagaccc

SEQ ID NO: 672898 - RNA, 19 nt, Artificial Sequence
  Description of Artificial Sequence: Synthetic oligonucleotide
  Sense strand starting at position 3937 of SEQ ID NO: 585853
ggaggacgucccgaggaua

SEQ ID NO: 672899 - RNA, 19 nt, Artificial Sequence
  Description of Artificial Sequence: Synthetic oligonucleotide
  Antisense strand to SEQ ID NO: 672898
uauccucgggacguccucc

SEQ ID NO: 672900 - RNA, 19 nt, Artificial Sequence
  Description of Artificial Sequence: Synthetic oligonucleotide
  Sense strand starting at position 3973 of SEQ ID NO: 585853
agugcaaagacuugggaaa

SEQ ID NO: 672901 - RNA, 19 nt, Artificial Sequence
  Description of Artificial Sequence: Synthetic oligonucleotide
  Antisense strand to SEQ ID NO: 672900
uuucccaagucuuugcacu

SEQ ID NO: 672902 - RNA, 19 nt, Artificial Sequence
  Description of Artificial Sequence: Synthetic oligonucleotide
  Sense strand starting at position 223 of SEQ ID NO: 585854
cugguuucuacaugggaca

SEQ ID NO: 672903 - RNA, 19 nt, Artificial Sequence
  Description of Artificial Sequence: Synthetic oligonucleotide
  Antisense strand to SEQ ID NO: 672902
ugucccauguagaaaccag

SEQ ID NO: 672904 - RNA, 19 nt, Artificial Sequence
  Description of Artificial Sequence: Synthetic oligonucleotide
  Sense strand starting at position 225 of SEQ ID NO: 585854
gguuucuacaugggacaga

SEQ ID NO: 672905 - RNA, 19 nt, Artificial Sequence
  Description of Artificial Sequence: Synthetic oligonucleotide
  Antisense strand to SEQ ID NO: 672904
ucugucccauguagaaacc

SEQ ID NO: 672906 - RNA, 19 nt, Artificial Sequence
  Description of Artificial Sequence: Synthetic oligonucleotide
  Sense strand starting at position 257 of SEQ ID NO: 585854
caguguucccaaggaucca

SEQ ID NO: 672907 - RNA, 19 nt, Artificial Sequence
  Description of Artificial Sequence: Synthetic oligonucleotide
  Antisense strand to SEQ ID NO: 672906
uggauccuugggaacacug

SEQ ID NO: 672908 - RNA, 19 nt, Artificial Sequence
  Description of Artificial Sequence: Synthetic oligonucleotide
  Sense strand starting at position 373 of SEQ ID NO: 585854
gaggaauuccuagguaccu

SEQ ID NO: 672909 - RNA, 19 nt, Artificial Sequence
  Description of Artificial Sequence: Synthetic oligonucleotide
  Antisense strand to SEQ ID NO: 672908
agguaccuaggaauuccuc

SEQ ID NO: 672910 - RNA, 19 nt, Artificial Sequence
  Description of Artificial Sequence: Synthetic oligonucleotide
  Sense strand starting at position 431 of SEQ ID NO: 585854
auagauucucccuagggcu

SEQ ID NO: 672911 - RNA, 19 nt, Artificial Sequence
  Description of Artificial Sequence: Synthetic oligonucleotide
  Antisense strand to SEQ ID NO: 672910
agcccuagggagaaucuau

SEQ ID NO: 672912 - RNA, 19 nt, Artificial Sequence
  Description of Artificial Sequence: Synthetic oligonucleotide
  Sense strand starting at position 463 of SEQ ID NO: 585854
guccuaacggcaggagauu

SEQ ID NO: 672913 - RNA, 19 nt, Artificial Sequence
  Description of Artificial Sequence: Synthetic oligonucleotide
  Antisense strand to SEQ ID NO: 672912
aaucuccugccguuaggac

SEQ ID NO: 672914 - RNA, 19 nt, Artificial Sequence
  Description of Artificial Sequence: Synthetic oligonucleotide
  Sense strand starting at position 664 of SEQ ID NO: 585854
ccacacauguucgcucauu

SEQ ID NO: 672915 - RNA, 19 nt, Artificial Sequence
  Description of Artificial Sequence: Synthetic oligonucleotide
  Antisense strand to SEQ ID NO: 672914
aaugagcgaacaugugugg

SEQ ID NO: 672916 - RNA, 19 nt, Artificial Sequence
  Description of Artificial Sequence: Synthetic oligonucleotide
  Sense strand starting at position 675 of SEQ ID NO: 585854
cgcucauuguugucaugca

SEQ ID NO: 672917 - RNA, 19 nt, Artificial Sequence
  Description of Artificial Sequence: Synthetic oligonucleotide
  Antisense strand to SEQ ID NO: 672916
ugcaugacaacaaugagcg

SEQ ID NO: 672918 - RNA, 19 nt, Artificial Sequence
  Description of Artificial Sequence: Synthetic oligonucleotide
  Sense strand starting at position 2124 of SEQ ID NO: 585854
gagggcgcuuauuugcaua

SEQ ID NO: 672919 - RNA, 19 nt, Artificial Sequence
  Description of Artificial Sequence: Synthetic oligonucleotide
  Antisense strand to SEQ ID NO: 672918
uaugcaaauaagcgcccuc

SEQ ID NO: 672920 - RNA, 19 nt, Artificial Sequence
  Description of Artificial Sequence: Synthetic oligonucleotide
  Sense strand starting at position 2126 of SEQ ID NO: 585854
gggcgcuuauuugcauaga

SEQ ID NO: 672921 - RNA, 19 nt, Artificial Sequence
  Description of Artificial Sequence: Synthetic oligonucleotide
  Antisense strand to SEQ ID NO: 672920
ucuaugcaaauaagcgccc

SEQ ID NO: 672922 - RNA, 19 nt, Artificial Sequence
  Description of Artificial Sequence: Synthetic oligonucleotide
  Sense strand starting at position 2311 of SEQ ID NO: 585854
cgcagucuugcggaagaga

SEQ ID NO: 672923 - RNA, 19 nt, Artificial Sequence
  Description of Artificial Sequence: Synthetic oligonucleotide
  Antisense strand to SEQ ID NO: 672922
ucucuuccgcaagacugcg

SEQ ID NO: 672924 - RNA, 19 nt, Artificial Sequence
  Description of Artificial Sequence: Synthetic oligonucleotide
  Sense strand starting at position 2451 of SEQ ID NO: 585854
cagggauugauuggagcau

SEQ ID NO: 672925 - RNA, 19 nt, Artificial Sequence
  Description of Artificial Sequence: Synthetic oligonucleotide
  Antisense strand to SEQ ID NO: 672924
augcuccaaucaaucccug

SEQ ID NO: 672926 - RNA, 19 nt, Artificial Sequence
  Description of Artificial Sequence: Synthetic oligonucleotide
  Sense strand starting at position 2452 of SEQ ID NO: 585854
agggauugauuggagcauu

SEQ ID NO: 672927 - RNA, 19 nt, Artificial Sequence
  Description of Artificial Sequence: Synthetic oligonucleotide
  Antisense strand to SEQ ID NO: 672926
aaugcuccaaucaaucccu

SEQ ID NO: 672928 - RNA, 19 nt, Artificial Sequence
  Description of Artificial Sequence: Synthetic oligonucleotide
  Sense strand starting at position 2463 of SEQ ID NO: 585854
ggagcauuuccucacgccu

SEQ ID NO: 672929 - RNA, 19 nt, Artificial Sequence
  Description of Artificial Sequence: Synthetic oligonucleotide
  Antisense strand to SEQ ID NO: 672928
aggcgugaggaaaugcucc

SEQ ID NO: 672930 - RNA, 19 nt, Artificial Sequence
  Description of Artificial Sequence: Synthetic oligonucleotide
  Sense strand starting at position 2496 of SEQ ID NO: 585854
caguuauuggcugagcgga

SEQ ID NO: 672931 - RNA, 19 nt, Artificial Sequence
  Description of Artificial Sequence: Synthetic oligonucleotide
  Antisense strand to SEQ ID NO: 672930
uccgcucagccaauaacug

SEQ ID NO: 672932 - RNA, 19 nt, Artificial Sequence
  Description of Artificial Sequence: Synthetic oligonucleotide
  Sense strand starting at position 2682 of SEQ ID NO: 585854
gggucuuuggcagacauac

SEQ ID NO: 672933 - RNA, 19 nt, Artificial Sequence
  Description of Artificial Sequence: Synthetic oligonucleotide
  Antisense strand to SEQ ID NO: 672932
guaugucugccaaagaccc

SEQ ID NO: 672934 - RNA, 19 nt, Artificial Sequence
  Description of Artificial Sequence: Synthetic oligonucleotide
  Sense strand starting at position 2842 of SEQ ID NO: 585854
ggaggacgucccgaggaua

SEQ ID NO: 672935 - RNA, 19 nt, Artificial Sequence
  Description of Artificial Sequence: Synthetic oligonucleotide
  Antisense strand to SEQ ID NO: 672934
uauccucgggacguccucc

SEQ ID NO: 672936 - RNA, 19 nt, Artificial Sequence
  Description of Artificial Sequence: Synthetic oligonucleotide
  Sense strand starting at position 2878 of SEQ ID NO: 585854
agugcaaagacuugggaaa

SEQ ID NO: 672937 - RNA, 19 nt, Artificial Sequence
  Description of Artificial Sequence: Synthetic oligonucleotide
  Antisense strand to SEQ ID NO: 672936
uuucccaagucuuugcacu

SEQ ID NO: 672938 - RNA, 19 nt, Artificial Sequence
  Description of Artificial Sequence: Synthetic oligonucleotide
  Sense strand starting at position 2893 of SEQ ID NO: 585854
gaaaguguggcccgacaga

SEQ ID NO: 672939 - RNA, 19 nt, Artificial Sequence
  Description of Artificial Sequence: Synthetic oligonucleotide
  Antisense strand to SEQ ID NO: 672938
ucugucgggccacacuuuc

SEQ ID NO: 672940 - RNA, 19 nt, Artificial Sequence
  Description of Artificial Sequence: Synthetic oligonucleotide
  Sense strand starting at position 2969 of SEQ ID NO: 585854
uggaaagcccguuggagaa

SEQ ID NO: 672941 - RNA, 19 nt, Artificial Sequence
  Description of Artificial Sequence: Synthetic oligonucleotide
  Antisense strand to SEQ ID NO: 672940
uucuccaacgggcuuucca

SEQ ID NO: 672942 - RNA, 19 nt, Artificial Sequence
  Description of Artificial Sequence: Synthetic oligonucleotide
  Sense strand starting at position 3394 of SEQ ID NO: 585854
ggacuuugcuguuacagaa

SEQ ID NO: 672943 - RNA, 19 nt, Artificial Sequence
  Description of Artificial Sequence: Synthetic oligonucleotide
  Antisense strand to SEQ ID NO: 672942
uucuguaacagcaaagucc

SEQ ID NO: 672944 - RNA, 19 nt, Artificial Sequence
  Description of Artificial Sequence: Synthetic oligonucleotide
  Sense strand starting at position 3470 of SEQ ID NO: 585854
gugaucugaucucuccaga

SEQ ID NO: 672945 - RNA, 19 nt, Artificial Sequence
  Description of Artificial Sequence: Synthetic oligonucleotide
  Antisense strand to SEQ ID NO: 672944
ucuggagagaucagaucac

SEQ ID NO: 672946 - RNA, 19 nt, Artificial Sequence
  Description of Artificial Sequence: Synthetic oligonucleotide
  Sense strand starting at position 3475 of SEQ ID NO: 585854
cugaucucuccagacgcaa

SEQ ID NO: 672947 - RNA, 19 nt, Artificial Sequence
  Description of Artificial Sequence: Synthetic oligonucleotide
  Antisense strand to SEQ ID NO: 672946
uugcgucuggagagaucag

SEQ ID NO: 672948 - RNA, 19 nt, Artificial Sequence
  Description of Artificial Sequence: Synthetic oligonucleotide
  Sense strand starting at position 3508 of SEQ ID NO: 585854
gcuauccauucccugaguu

SEQ ID NO: 672949 - RNA, 19 nt, Artificial Sequence
  Description of Artificial Sequence: Synthetic oligonucleotide
  Antisense strand to SEQ ID NO: 672948
aacucagggaauggauagc

SEQ ID NO: 672950 - RNA, 19 nt, Artificial Sequence
  Description of Artificial Sequence: Synthetic oligonucleotide
  Sense strand starting at position 3509 of SEQ ID NO: 585854
cuauccauucccugaguuu

SEQ ID NO: 672951 - RNA, 19 nt, Artificial Sequence
  Description of Artificial Sequence: Synthetic oligonucleotide
  Antisense strand to SEQ ID NO: 672950
aaacucagggaauggauag

SEQ ID NO: 672952 - RNA, 19 nt, Artificial Sequence
  Description of Artificial Sequence: Synthetic oligonucleotide
  Sense strand starting at position 3825 of SEQ ID NO: 585854
ccgggccuauuccaugaaa

SEQ ID NO: 672953 - RNA, 19 nt, Artificial Sequence
  Description of Artificial Sequence: Synthetic oligonucleotide
  Antisense strand to SEQ ID NO: 672952
uuucauggaauaggcccgg

SEQ ID NO: 672954 - RNA, 19 nt, Artificial Sequence
  Description of Artificial Sequence: Synthetic oligonucleotide
  Sense strand starting at position 3827 of SEQ ID NO: 585854
gggccuauuccaugaaauu

SEQ ID NO: 672955 - RNA, 19 nt, Artificial Sequence
  Description of Artificial Sequence: Synthetic oligonucleotide
  Antisense strand to SEQ ID NO: 672954
aauuucauggaauaggccc

SEQ ID NO: 672956 - RNA, 19 nt, Artificial Sequence
  Description of Artificial Sequence: Synthetic oligonucleotide
  Sense strand starting at position 3828 of SEQ ID NO: 585854
ggccuauuccaugaaauuc

SEQ ID NO: 672957 - RNA, 19 nt, Artificial Sequence
  Description of Artificial Sequence: Synthetic oligonucleotide
  Antisense strand to SEQ ID NO: 672956
gaauuucauggaauaggcc

SEQ ID NO: 672958 - RNA, 19 nt, Artificial Sequence
  Description of Artificial Sequence: Synthetic oligonucleotide
  Sense strand starting at position 3839 of SEQ ID NO: 585854
ugaaauucuuaaugcagau

SEQ ID NO: 672959 - RNA, 19 nt, Artificial Sequence
  Description of Artificial Sequence: Synthetic oligonucleotide
  Antisense strand to SEQ ID NO: 672958
aucugcauuaagaauuuca

SEQ ID NO: 672960 - RNA, 19 nt, Artificial Sequence
  Description of Artificial Sequence: Synthetic oligonucleotide
  Sense strand starting at position 3879 of SEQ ID NO: 585854
ggcagaguaauuggucagu

SEQ ID NO: 672961 - RNA, 19 nt, Artificial Sequence
  Description of Artificial Sequence: Synthetic oligonucleotide
  Antisense strand to SEQ ID NO: 672960
acugaccaauuacucugcc

SEQ ID NO: 672962 - RNA, 19 nt, Artificial Sequence
  Description of Artificial Sequence: Synthetic oligonucleotide
  Sense strand starting at position 3882 of SEQ ID NO: 585854
agaguaauuggucaguggu

SEQ ID NO: 672963 - RNA, 19 nt, Artificial Sequence
  Description of Artificial Sequence: Synthetic oligonucleotide
  Antisense strand to SEQ ID NO: 672962
accacugaccaauuacucu

SEQ ID NO: 672964 - RNA, 19 nt, Artificial Sequence
  Description of Artificial Sequence: Synthetic oligonucleotide
  Sense strand starting at position 3884 of SEQ ID NO: 585854
aguaauuggucagugguua

SEQ ID NO: 672965 - RNA, 19 nt, Artificial Sequence
  Description of Artificial Sequence: Synthetic oligonucleotide
  Antisense strand to SEQ ID NO: 672964
uaaccacugaccaauuacu

SEQ ID NO: 672966 - RNA, 19 nt, Artificial Sequence
  Description of Artificial Sequence: Synthetic oligonucleotide
  Sense strand starting at position 3885 of SEQ ID NO: 585854
guaauuggucagugguuag

SEQ ID NO: 672967 - RNA, 19 nt, Artificial Sequence
  Description of Artificial Sequence: Synthetic oligonucleotide
  Antisense strand to SEQ ID NO: 672966
cuaaccacugaccaauuac

SEQ ID NO: 672968 - RNA, 19 nt, Artificial Sequence
  Description of Artificial Sequence: Synthetic oligonucleotide
  Sense strand starting at position 3896 of SEQ ID NO: 585854
gugguuaggcaauaggagu

SEQ ID NO: 672969 - RNA, 19 nt, Artificial Sequence
  Description of Artificial Sequence: Synthetic oligonucleotide
  Antisense strand to SEQ ID NO: 672968
acuccuauugccuaaccac

SEQ ID NO: 672970 - RNA, 19 nt, Artificial Sequence
  Description of Artificial Sequence: Synthetic oligonucleotide
  Sense strand starting at position 3907 of SEQ ID NO: 585854
auaggaguuaccuggagua

SEQ ID NO: 672971 - RNA, 19 nt, Artificial Sequence
  Description of Artificial Sequence: Synthetic oligonucleotide
  Antisense strand to SEQ ID NO: 672970
uacuccagguaacuccuau

SEQ ID NO: 672972 - RNA, 19 nt, Artificial Sequence
  Description of Artificial Sequence: Synthetic oligonucleotide
  Sense strand starting at position 3919 of SEQ ID NO: 585854
uggaguaagucaccucauc

SEQ ID NO: 672973 - RNA, 19 nt, Artificial Sequence
  Description of Artificial Sequence: Synthetic oligonucleotide
  Antisense strand to SEQ ID NO: 672972
gaugaggugacuuacucca

SEQ ID NO: 672974 - RNA, 19 nt, Artificial Sequence
  Description of Artificial Sequence: Synthetic oligonucleotide
  Sense strand starting at position 3927 of SEQ ID NO: 585854
gucaccucauccuagggau

SEQ ID NO: 672975 - RNA, 19 nt, Artificial Sequence
  Description of Artificial Sequence: Synthetic oligonucleotide
  Antisense strand to SEQ ID NO: 672974
aucccuaggaugaggugac

SEQ ID NO: 672976 - RNA, 19 nt, Artificial Sequence
  Description of Artificial Sequence: Synthetic oligonucleotide
  Sense strand starting at position 3930 of SEQ ID NO: 585854
accucauccuagggauaaa

SEQ ID NO: 672977 - RNA, 19 nt, Artificial Sequence
  Description of Artificial Sequence: Synthetic oligonucleotide
  Antisense strand to SEQ ID NO: 672976
uuuaucccuaggaugaggu

SEQ ID NO: 672978 - RNA, 19 nt, Artificial Sequence
  Description of Artificial Sequence: Synthetic oligonucleotide
  Sense strand starting at position 3948 of SEQ ID NO: 585854
agcaucuuggcauguuuaa

SEQ ID NO: 672979 - RNA, 19 nt, Artificial Sequence
  Description of Artificial Sequence: Synthetic oligonucleotide
  Antisense strand to SEQ ID NO: 672978
uuaaacaugccaagaugcu

SEQ ID NO: 672980 - RNA, 19 nt, Artificial Sequence
  Description of Artificial Sequence: Synthetic oligonucleotide
  Sense strand starting at position 3971 of SEQ ID NO: 585854
augggaggcagugauuauu

SEQ ID NO: 672981 - RNA, 19 nt, Artificial Sequence
  Description of Artificial Sequence: Synthetic oligonucleotide
  Antisense strand to SEQ ID NO: 672980
aauaaucacugccucccau

SEQ ID NO: 672982 - RNA, 19 nt, Artificial Sequence
  Description of Artificial Sequence: Synthetic oligonucleotide
  Sense strand starting at position 29 of SEQ ID NO: 585855
acaagacuucgucaccaag

SEQ ID NO: 672983 - RNA, 19 nt, Artificial Sequence
  Description of Artificial Sequence: Synthetic oligonucleotide
  Antisense strand to SEQ ID NO: 672982
cuuggugacgaagucuugu

SEQ ID NO: 672984 - RNA, 19 nt, Artificial Sequence
  Description of Artificial Sequence: Synthetic oligonucleotide
  Sense strand starting at position 31 of SEQ ID NO: 585855
aagacuucgucaccaagca

SEQ ID NO: 672985 - RNA, 19 nt, Artificial Sequence
  Description of Artificial Sequence: Synthetic oligonucleotide
  Antisense strand to SEQ ID NO: 672984
ugcuuggugacgaagucuu

SEQ ID NO: 672986 - RNA, 19 nt, Artificial Sequence
  Description of Artificial Sequence: Synthetic oligonucleotide
  Sense strand starting at position 129 of SEQ ID NO: 585855
gagagaagucauuaugugc

SEQ ID NO: 672987 - RNA, 19 nt, Artificial Sequence
  Description of Artificial Sequence: Synthetic oligonucleotide
  Antisense strand to SEQ ID NO: 672986
gcacauaaugacuucucuc

SEQ ID NO: 672988 - RNA, 19 nt, Artificial Sequence
  Description of Artificial Sequence: Synthetic oligonucleotide
  Sense strand starting at position 232 of SEQ ID NO: 585855
uaggaaggccuuugaaaug

SEQ ID NO: 672989 - RNA, 19 nt, Artificial Sequence
  Description of Artificial Sequence: Synthetic oligonucleotide
  Antisense strand to SEQ ID NO: 672988
cauuucaaaggccuuccua

SEQ ID NO: 672990 - RNA, 19 nt, Artificial Sequence
  Description of Artificial Sequence: Synthetic oligonucleotide
  Sense strand starting at position 269 of SEQ ID NO: 585855
ggaauuagaccgcauacga

SEQ ID NO: 672991 - RNA, 19 nt, Artificial Sequence
  Description of Artificial Sequence: Synthetic oligonucleotide
  Antisense strand to SEQ ID NO: 672990
ucguaugcggucuaauucc

SEQ ID NO: 672992 - RNA, 19 nt, Artificial Sequence
  Description of Artificial Sequence: Synthetic oligonucleotide
  Sense strand starting at position 377 of SEQ ID NO: 585855
gaauacaaaguguguaaga

SEQ ID NO: 672993 - RNA, 19 nt, Artificial Sequence
  Description of Artificial Sequence: Synthetic oligonucleotide
  Antisense strand to SEQ ID NO: 672992
ucuuacacacuuuguauuc

SEQ ID NO: 672994 - RNA, 19 nt, Artificial Sequence
  Description of Artificial Sequence: Synthetic oligonucleotide
  Sense strand starting at position 393 of SEQ ID NO: 585855
agagcugauuuccaagauc

SEQ ID NO: 672995 - RNA, 19 nt, Artificial Sequence
  Description of Artificial Sequence: Synthetic oligonucleotide
  Antisense strand to SEQ ID NO: 672994
gaucuuggaaaucagcucu

SEQ ID NO: 672996 - RNA, 19 nt, Artificial Sequence
  Description of Artificial Sequence: Synthetic oligonucleotide
  Sense strand starting at position 416 of SEQ ID NO: 585855
gcaauuaaacguuaguaca

SEQ ID NO: 672997 - RNA, 19 nt, Artificial Sequence
  Description of Artificial Sequence: Synthetic oligonucleotide
  Antisense strand to SEQ ID NO: 672996
uguacuaacguuuaauugc

SEQ ID NO: 672998 - RNA, 19 nt, Artificial Sequence
  Description of Artificial Sequence: Synthetic oligonucleotide
  Sense strand starting at position 424 of SEQ ID NO: 585855
acguuaguacaugaugaaa

SEQ ID NO: 672999 - RNA, 19 nt, Artificial Sequence
  Description of Artificial Sequence: Synthetic oligonucleotide
  Antisense strand to SEQ ID NO: 672998
uuucaucauguacuaacgu

SEQ ID NO: 673000 - RNA, 19 nt, Artificial Sequence
  Description of Artificial Sequence: Synthetic oligonucleotide
  Sense strand starting at position 521 of SEQ ID NO: 585855
ccacgauagcacuaaacua

SEQ ID NO: 673001 - RNA, 19 nt, Artificial Sequence
  Description of Artificial Sequence: Synthetic oligonucleotide
  Antisense strand to SEQ ID NO: 673000
uaguuuagugcuaucgugg

SEQ ID NO: 673002 - RNA, 19 nt, Artificial Sequence
  Description of Artificial Sequence: Synthetic oligonucleotide
  Sense strand starting at position 598 of SEQ ID NO: 585855
ucaucaauguuuguuaaag

SEQ ID NO: 673003 - RNA, 19 nt, Artificial Sequence
  Description of Artificial Sequence: Synthetic oligonucleotide
  Antisense strand to SEQ ID NO: 673002
cuuuaacaaacauugauga

SEQ ID NO: 673004 - RNA, 19 nt, Artificial Sequence
  Description of Artificial Sequence: Synthetic oligonucleotide
  Sense strand starting at position 636 of SEQ ID NO: 585855
ugauguccacuccggaaga

SEQ ID NO: 673005 - RNA, 19 nt, Artificial Sequence
  Description of Artificial Sequence: Synthetic oligonucleotide
  Antisense strand to SEQ ID NO: 673004
ucuuccggaguggacauca

SEQ ID NO: 673006 - RNA, 19 nt, Artificial Sequence
  Description of Artificial Sequence: Synthetic oligonucleotide
  Sense strand starting at position 638 of SEQ ID NO: 585855
auguccacuccggaagauu

SEQ ID NO: 673007 - RNA, 19 nt, Artificial Sequence
  Description of Artificial Sequence: Synthetic oligonucleotide
  Antisense strand to SEQ ID NO: 673006
aaucuuccggaguggacau

SEQ ID NO: 673008 - RNA, 19 nt, Artificial Sequence
  Description of Artificial Sequence: Synthetic oligonucleotide
  Sense strand starting at position 646 of SEQ ID NO: 585855
uccggaagauuaucugcau

SEQ ID NO: 673009 - RNA, 19 nt, Artificial Sequence
  Description of Artificial Sequence: Synthetic oligonucleotide
  Antisense strand to SEQ ID NO: 673008
augcagauaaucuuccgga

SEQ ID NO: 673010 - RNA, 19 nt, Artificial Sequence
  Description of Artificial Sequence: Synthetic oligonucleotide
  Sense strand starting at position 649 of SEQ ID NO: 585855
ggaagauuaucugcaucug

SEQ ID NO: 673011 - RNA, 19 nt, Artificial Sequence
  Description of Artificial Sequence: Synthetic oligonucleotide
  Antisense strand to SEQ ID NO: 673010
cagaugcagauaaucuucc

SEQ ID NO: 673012 - RNA, 19 nt, Artificial Sequence
  Description of Artificial Sequence: Synthetic oligonucleotide
  Sense strand starting at position 826 of SEQ ID NO: 585855
guugguagaacccaaagua

SEQ ID NO: 673013 - RNA, 19 nt, Artificial Sequence
  Description of Artificial Sequence: Synthetic oligonucleotide
  Antisense strand to SEQ ID NO: 673012
uacuuuggguucuaccaac

SEQ ID NO: 673014 - RNA, 19 nt, Artificial Sequence
  Description of Artificial Sequence: Synthetic oligonucleotide
  Sense strand starting at position 1874 of SEQ ID NO: 585855
cauggugagaccgguaauc

SEQ ID NO: 673015 - RNA, 19 nt, Artificial Sequence
  Description of Artificial Sequence: Synthetic oligonucleotide
  Antisense strand to SEQ ID NO: 673014
gauuaccggucucaccaug

SEQ ID NO: 673016 - RNA, 19 nt, Artificial Sequence
  Description of Artificial Sequence: Synthetic oligonucleotide
  Sense strand starting at position 2095 of SEQ ID NO: 585855
gggugaacguugaaggagu

SEQ ID NO: 673017 - RNA, 19 nt, Artificial Sequence
  Description of Artificial Sequence: Synthetic oligonucleotide
  Antisense strand to SEQ ID NO: 673016
acuccuucaacguucaccc

SEQ ID NO: 673018 - RNA, 19 nt, Artificial Sequence
  Description of Artificial Sequence: Synthetic oligonucleotide
  Sense strand starting at position 2112 of SEQ ID NO: 585855
guguuagagauccaagcuu

SEQ ID NO: 673019 - RNA, 19 nt, Artificial Sequence
  Description of Artificial Sequence: Synthetic oligonucleotide
  Antisense strand to SEQ ID NO: 673018
aagcuuggaucucuaacac

SEQ ID NO: 673020 - RNA, 19 nt, Artificial Sequence
  Description of Artificial Sequence: Synthetic oligonucleotide
  Sense strand starting at position 2472 of SEQ ID NO: 585855
uuaagugaaagcuguaaag

SEQ ID NO: 673021 - RNA, 19 nt, Artificial Sequence
  Description of Artificial Sequence: Synthetic oligonucleotide
  Antisense strand to SEQ ID NO: 673020
cuuuacagcuuucacuuaa

SEQ ID NO: 673022 - RNA, 19 nt, Artificial Sequence
  Description of Artificial Sequence: Synthetic oligonucleotide
  Sense strand starting at position 2731 of SEQ ID NO: 585855
ucaugaagcccuuauugua

SEQ ID NO: 673023 - RNA, 19 nt, Artificial Sequence
  Description of Artificial Sequence: Synthetic oligonucleotide
  Antisense strand to SEQ ID NO: 673022
uacaauaagggcuucauga

SEQ ID NO: 673024 - RNA, 19 nt, Artificial Sequence
  Description of Artificial Sequence: Synthetic oligonucleotide
  Sense strand starting at position 2797 of SEQ ID NO: 585855
ggcuuuguggaccauaaga

SEQ ID NO: 673025 - RNA, 19 nt, Artificial Sequence
  Description of Artificial Sequence: Synthetic oligonucleotide
  Antisense strand to SEQ ID NO: 673024
ucuuaugguccacaaagcc

SEQ ID NO: 673026 - RNA, 19 nt, Artificial Sequence
  Description of Artificial Sequence: Synthetic oligonucleotide
  Sense strand starting at position 2962 of SEQ ID NO: 585855
uaaacauggucuuuguuag

SEQ ID NO: 673027 - RNA, 19 nt, Artificial Sequence
  Description of Artificial Sequence: Synthetic oligonucleotide
  Antisense strand to SEQ ID NO: 673026
cuaacaaagaccauguuua

SEQ ID NO: 673028 - RNA, 19 nt, Artificial Sequence
  Description of Artificial Sequence: Synthetic oligonucleotide
  Sense strand starting at position 3264 of SEQ ID NO: 585855
ugaagaccuuugcucugaa

SEQ ID NO: 673029 - RNA, 19 nt, Artificial Sequence
  Description of Artificial Sequence: Synthetic oligonucleotide
  Antisense strand to SEQ ID NO: 673028
uucagagcaaaggucuuca

SEQ ID NO: 673030 - RNA, 19 nt, Artificial Sequence
  Description of Artificial Sequence: Synthetic oligonucleotide
  Sense strand starting at position 3267 of SEQ ID NO: 585855
agaccuuugcucugaacaa

SEQ ID NO: 673031 - RNA, 19 nt, Artificial Sequence
  Description of Artificial Sequence: Synthetic oligonucleotide
  Antisense strand to SEQ ID NO: 673030
uuguucagagcaaaggucu

SEQ ID NO: 673032 - RNA, 19 nt, Artificial Sequence
  Description of Artificial Sequence: Synthetic oligonucleotide
  Sense strand starting at position 3271 of SEQ ID NO: 585855
cuuugcucugaacaaguaa

SEQ ID NO: 673033 - RNA, 19 nt, Artificial Sequence
  Description of Artificial Sequence: Synthetic oligonucleotide
  Antisense strand to SEQ ID NO: 673032
uuacuuguucagagcaaag

SEQ ID NO: 673034 - RNA, 19 nt, Artificial Sequence
  Description of Artificial Sequence: Synthetic oligonucleotide
  Sense strand starting at position 3349 of SEQ ID NO: 585855
agaacuuauugagcaaagu

SEQ ID NO: 673035 - RNA, 19 nt, Artificial Sequence
  Description of Artificial Sequence: Synthetic oligonucleotide
  Antisense strand to SEQ ID NO: 673034
acuuugcucaauaaguucu

SEQ ID NO: 673036 - RNA, 19 nt, Artificial Sequence
  Description of Artificial Sequence: Synthetic oligonucleotide
  Sense strand starting at position 3358 of SEQ ID NO: 585855
ugagcaaaguaaguaauua

SEQ ID NO: 673037 - RNA, 19 nt, Artificial Sequence
  Description of Artificial Sequence: Synthetic oligonucleotide
  Antisense strand to SEQ ID NO: 673036
uaauuacuuacuuugcuca

SEQ ID NO: 673038 - RNA, 19 nt, Artificial Sequence
  Description of Artificial Sequence: Synthetic oligonucleotide
  Sense strand starting at position 3415 of SEQ ID NO: 585855
ggaaauauguaagauuucu

SEQ ID NO: 673039 - RNA, 19 nt, Artificial Sequence
  Description of Artificial Sequence: Synthetic oligonucleotide
  Antisense strand to SEQ ID NO: 673038
agaaaucuuacauauuucc

SEQ ID NO: 673040 - RNA, 19 nt, Artificial Sequence
  Description of Artificial Sequence: Synthetic oligonucleotide
  Sense strand starting at position 3421 of SEQ ID NO: 585855
auguaagauuucuauaggu

SEQ ID NO: 673041 - RNA, 19 nt, Artificial Sequence
  Description of Artificial Sequence: Synthetic oligonucleotide
  Antisense strand to SEQ ID NO: 673040
accuauagaaaucuuacau

SEQ ID NO: 673042 - RNA, 19 nt, Artificial Sequence
  Description of Artificial Sequence: Synthetic oligonucleotide
  Sense strand starting at position 3446 of SEQ ID NO: 585855
ggagaugucaggcauuccu

SEQ ID NO: 673043 - RNA, 19 nt, Artificial Sequence
  Description of Artificial Sequence: Synthetic oligonucleotide
  Antisense strand to SEQ ID NO: 673042
aggaaugccugacaucucc

SEQ ID NO: 673044 - RNA, 19 nt, Artificial Sequence
  Description of Artificial Sequence: Synthetic oligonucleotide
  Sense strand starting at position 3456 of SEQ ID NO: 585855
ggcauuccugaaugagaaa

SEQ ID NO: 673045 - RNA, 19 nt, Artificial Sequence
  Description of Artificial Sequence: Synthetic oligonucleotide
  Antisense strand to SEQ ID NO: 673044
uuucucauucaggaaugcc

SEQ ID NO: 673046 - RNA, 19 nt, Artificial Sequence
  Description of Artificial Sequence: Synthetic oligonucleotide
  Sense strand starting at position 3632 of SEQ ID NO: 585855
augauagcaugucugagua

SEQ ID NO: 673047 - RNA, 19 nt, Artificial Sequence
  Description of Artificial Sequence: Synthetic oligonucleotide
  Antisense strand to SEQ ID NO: 673046
uacucagacaugcuaucau

SEQ ID NO: 673048 - RNA, 19 nt, Artificial Sequence
  Description of Artificial Sequence: Synthetic oligonucleotide
  Sense strand starting at position 3668 of SEQ ID NO: 585855
guaccuguuggccaaggaa

SEQ ID NO: 673049 - RNA, 19 nt, Artificial Sequence
  Description of Artificial Sequence: Synthetic oligonucleotide
  Antisense strand to SEQ ID NO: 673048
uuccuuggccaacagguac

SEQ ID NO: 673050 - RNA, 19 nt, Artificial Sequence
  Description of Artificial Sequence: Synthetic oligonucleotide
  Sense strand starting at position 3760 of SEQ ID NO: 585855
gacucugaggguuguguga

SEQ ID NO: 673051 - RNA, 19 nt, Artificial Sequence
  Description of Artificial Sequence: Synthetic oligonucleotide
  Antisense strand to SEQ ID NO: 673050
ucacacaacccucagaguc

SEQ ID NO: 673052 - RNA, 19 nt, Artificial Sequence
  Description of Artificial Sequence: Synthetic oligonucleotide
  Sense strand starting at position 3784 of SEQ ID NO: 585855
ggauaaccgcgugugguuu

SEQ ID NO: 673053 - RNA, 19 nt, Artificial Sequence
  Description of Artificial Sequence: Synthetic oligonucleotide
  Antisense strand to SEQ ID NO: 673052
aaaccacacgcgguuaucc

SEQ ID NO: 673054 - RNA, 19 nt, Artificial Sequence
  Description of Artificial Sequence: Synthetic oligonucleotide
  Sense strand starting at position 3869 of SEQ ID NO: 585855
aaaguaaacuguuugagug

SEQ ID NO: 673055 - RNA, 19 nt, Artificial Sequence
  Description of Artificial Sequence: Synthetic oligonucleotide
  Antisense strand to SEQ ID NO: 673054
cacucaaacaguuuacuuu

SEQ ID NO: 673056 - RNA, 19 nt, Artificial Sequence
  Description of Artificial Sequence: Synthetic oligonucleotide
  Sense strand starting at position 3873 of SEQ ID NO: 585855
uaaacuguuugaguguaga

SEQ ID NO: 673057 - RNA, 19 nt, Artificial Sequence
  Description of Artificial Sequence: Synthetic oligonucleotide
  Antisense strand to SEQ ID NO: 673056
ucuacacucaaacaguuua

SEQ ID NO: 673058 - RNA, 19 nt, Artificial Sequence
  Description of Artificial Sequence: Synthetic oligonucleotide
  Sense strand starting at position 3947 of SEQ ID NO: 585855
uuaguaggugcucauauau

SEQ ID NO: 673059 - RNA, 19 nt, Artificial Sequence
  Description of Artificial Sequence: Synthetic oligonucleotide
  Antisense strand to SEQ ID NO: 673058
auauaugagcaccuacuaa

SEQ ID NO: 673060 - RNA, 19 nt, Artificial Sequence
  Description of Artificial Sequence: Synthetic oligonucleotide
  Sense strand starting at position 3954 of SEQ ID NO: 585855
gugcucauauauuugucua

SEQ ID NO: 673061 - RNA, 19 nt, Artificial Sequence
  Description of Artificial Sequence: Synthetic oligonucleotide
  Antisense strand to SEQ ID NO: 673060
uagacaaauauaugagcac

SEQ ID NO: 673062 - RNA, 19 nt, Artificial Sequence
  Description of Artificial Sequence: Synthetic oligonucleotide
  Sense strand starting at position 146 of SEQ ID NO: 585856
ccauuagaauuggaaaccu

SEQ ID NO: 673063 - RNA, 19 nt, Artificial Sequence
  Description of Artificial Sequence: Synthetic oligonucleotide
  Antisense strand to SEQ ID NO: 673062
agguuuccaauucuaaugg

SEQ ID NO: 673064 - RNA, 19 nt, Artificial Sequence
  Description of Artificial Sequence: Synthetic oligonucleotide
  Sense strand starting at position 191 of SEQ ID NO: 585856
aggcuugaugcuuauucca

SEQ ID NO: 673065 - RNA, 19 nt, Artificial Sequence
  Description of Artificial Sequence: Synthetic oligonucleotide
  Antisense strand to SEQ ID NO: 673064
uggaauaagcaucaagccu

SEQ ID NO: 673066 - RNA, 19 nt, Artificial Sequence
  Description of Artificial Sequence: Synthetic oligonucleotide
  Sense strand starting at position 193 of SEQ ID NO: 585856
gcuugaugcuuauuccauu

SEQ ID NO: 673067 - RNA, 19 nt, Artificial Sequence
  Description of Artificial Sequence: Synthetic oligonucleotide
  Antisense strand to SEQ ID NO: 673066
aauggaauaagcaucaagc

SEQ ID NO: 673068 - RNA, 19 nt, Artificial Sequence
  Description of Artificial Sequence: Synthetic oligonucleotide
  Sense strand starting at position 258 of SEQ ID NO: 585856
cauaaauuauguucguguu

SEQ ID NO: 673069 - RNA, 19 nt, Artificial Sequence
  Description of Artificial Sequence: Synthetic oligonucleotide
  Antisense strand to SEQ ID NO: 673068
aacacgaacauaauuuaug

SEQ ID NO: 673070 - RNA, 19 nt, Artificial Sequence
  Description of Artificial Sequence: Synthetic oligonucleotide
  Sense strand starting at position 369 of SEQ ID NO: 585856
aguugugauacauguacuu

SEQ ID NO: 673071 - RNA, 19 nt, Artificial Sequence
  Description of Artificial Sequence: Synthetic oligonucleotide
  Antisense strand to SEQ ID NO: 673070
aaguacauguaucacaacu

SEQ ID NO: 673072 - RNA, 19 nt, Artificial Sequence
  Description of Artificial Sequence: Synthetic oligonucleotide
  Sense strand starting at position 380 of SEQ ID NO: 585856
auguacuugcggugaucaa

SEQ ID NO: 673073 - RNA, 19 nt, Artificial Sequence
  Description of Artificial Sequence: Synthetic oligonucleotide
  Antisense strand to SEQ ID NO: 673072
uugaucaccgcaaguacau

SEQ ID NO: 673074 - RNA, 19 nt, Artificial Sequence
  Description of Artificial Sequence: Synthetic oligonucleotide
  Sense strand starting at position 381 of SEQ ID NO: 585856
uguacuugcggugaucaaa

SEQ ID NO: 673075 - RNA, 19 nt, Artificial Sequence
  Description of Artificial Sequence: Synthetic oligonucleotide
  Antisense strand to SEQ ID NO: 673074
uuugaucaccgcaaguaca

SEQ ID NO: 673076 - RNA, 19 nt, Artificial Sequence
  Description of Artificial Sequence: Synthetic oligonucleotide
  Sense strand starting at position 384 of SEQ ID NO: 585856
acuugcggugaucaaauaa

SEQ ID NO: 673077 - RNA, 19 nt, Artificial Sequence
  Description of Artificial Sequence: Synthetic oligonucleotide
  Antisense strand to SEQ ID NO: 673076
uuauuugaucaccgcaagu

SEQ ID NO: 673078 - RNA, 19 nt, Artificial Sequence
  Description of Artificial Sequence: Synthetic oligonucleotide
  Sense strand starting at position 785 of SEQ ID NO: 585856
agucaagagcuccauguau

SEQ ID NO: 673079 - RNA, 19 nt, Artificial Sequence
  Description of Artificial Sequence: Synthetic oligonucleotide
  Antisense strand to SEQ ID NO: 673078
auacauggagcucuugacu

SEQ ID NO: 673080 - RNA, 19 nt, Artificial Sequence
  Description of Artificial Sequence: Synthetic oligonucleotide
  Sense strand starting at position 787 of SEQ ID NO: 585856
ucaagagcuccauguaucu

SEQ ID NO: 673081 - RNA, 19 nt, Artificial Sequence
  Description of Artificial Sequence: Synthetic oligonucleotide
  Antisense strand to SEQ ID NO: 673080
agauacauggagcucuuga

SEQ ID NO: 673082 - RNA, 19 nt, Artificial Sequence
  Description of Artificial Sequence: Synthetic oligonucleotide
  Sense strand starting at position 874 of SEQ ID NO: 585856
aguacugcauagguagaaa

SEQ ID NO: 673083 - RNA, 19 nt, Artificial Sequence
  Description of Artificial Sequence: Synthetic oligonucleotide
  Antisense strand to SEQ ID NO: 673082
uuucuaccuaugcaguacu

SEQ ID NO: 673084 - RNA, 19 nt, Artificial Sequence
  Description of Artificial Sequence: Synthetic oligonucleotide
  Sense strand starting at position 905 of SEQ ID NO: 585856
guaaaugaagcccagugaa

SEQ ID NO: 673085 - RNA, 19 nt, Artificial Sequence
  Description of Artificial Sequence: Synthetic oligonucleotide
  Antisense strand to SEQ ID NO: 673084
uucacugggcuucauuuac

SEQ ID NO: 673086 - RNA, 19 nt, Artificial Sequence
  Description of Artificial Sequence: Synthetic oligonucleotide
  Sense strand starting at position 913 of SEQ ID NO: 585856
agcccagugaaaugagaau

SEQ ID NO: 673087 - RNA, 19 nt, Artificial Sequence
  Description of Artificial Sequence: Synthetic oligonucleotide
  Antisense strand to SEQ ID NO: 673086
auucucauuucacugggcu

SEQ ID NO: 673088 - RNA, 19 nt, Artificial Sequence
  Description of Artificial Sequence: Synthetic oligonucleotide
  Sense strand starting at position 919 of SEQ ID NO: 585856
gugaaaugagaaugucuau

SEQ ID NO: 673089 - RNA, 19 nt, Artificial Sequence
  Description of Artificial Sequence: Synthetic oligonucleotide
  Antisense strand to SEQ ID NO: 673088
auagacauucucauuucac

SEQ ID NO: 673090 - RNA, 19 nt, Artificial Sequence
  Description of Artificial Sequence: Synthetic oligonucleotide
  Sense strand starting at position 1115 of SEQ ID NO: 585856
gguguuaauacuggacuca

SEQ ID NO: 673091 - RNA, 19 nt, Artificial Sequence
  Description of Artificial Sequence: Synthetic oligonucleotide
  Antisense strand to SEQ ID NO: 673090
ugaguccaguauuaacacc

SEQ ID NO: 673092 - RNA, 19 nt, Artificial Sequence
  Description of Artificial Sequence: Synthetic oligonucleotide
  Sense strand starting at position 1266 of SEQ ID NO: 585856
ccgaguacgcauuauggua

SEQ ID NO: 673093 - RNA, 19 nt, Artificial Sequence
  Description of Artificial Sequence: Synthetic oligonucleotide
  Antisense strand to SEQ ID NO: 673092
uaccauaaugcguacucgg

SEQ ID NO: 673094 - RNA, 19 nt, Artificial Sequence
  Description of Artificial Sequence: Synthetic oligonucleotide
  Sense strand starting at position 1578 of SEQ ID NO: 585856
ggaguaguccgagggcuca

SEQ ID NO: 673095 - RNA, 19 nt, Artificial Sequence
  Description of Artificial Sequence: Synthetic oligonucleotide
  Antisense strand to SEQ ID NO: 673094
ugagcccucggacuacucc

SEQ ID NO: 673096 - RNA, 19 nt, Artificial Sequence
  Description of Artificial Sequence: Synthetic oligonucleotide
  Sense strand starting at position 1789 of SEQ ID NO: 585856
ccucguguagcgagacaug

SEQ ID NO: 673097 - RNA, 19 nt, Artificial Sequence
  Description of Artificial Sequence: Synthetic oligonucleotide
  Antisense strand to SEQ ID NO: 673096
caugucucgcuacacgagg

SEQ ID NO: 673098 - RNA, 19 nt, Artificial Sequence
  Description of Artificial Sequence: Synthetic oligonucleotide
  Sense strand starting at position 2585 of SEQ ID NO: 585856
gcauaacacucagcuguga

SEQ ID NO: 673099 - RNA, 19 nt, Artificial Sequence
  Description of Artificial Sequence: Synthetic oligonucleotide
  Antisense strand to SEQ ID NO: 673098
ucacagcugaguguuaugc

SEQ ID NO: 673100 - RNA, 19 nt, Artificial Sequence
  Description of Artificial Sequence: Synthetic oligonucleotide
  Sense strand starting at position 2617 of SEQ ID NO: 585856
gauguuuauugagcgucua

SEQ ID NO: 673101 - RNA, 19 nt, Artificial Sequence
  Description of Artificial Sequence: Synthetic oligonucleotide
  Antisense strand to SEQ ID NO: 673100
uagacgcucaauaaacauc

SEQ ID NO: 673102 - RNA, 19 nt, Artificial Sequence
  Description of Artificial Sequence: Synthetic oligonucleotide
  Sense strand starting at position 2645 of SEQ ID NO: 585856
aggcacuuagcgugggaua

SEQ ID NO: 673103 - RNA, 19 nt, Artificial Sequence
  Description of Artificial Sequence: Synthetic oligonucleotide
  Antisense strand to SEQ ID NO: 673102
uaucccacgcuaagugccu

SEQ ID NO: 673104 - RNA, 19 nt, Artificial Sequence
  Description of Artificial Sequence: Synthetic oligonucleotide
  Sense strand starting at position 2646 of SEQ ID NO: 585856
ggcacuuagcgugggauau

SEQ ID NO: 673105 - RNA, 19 nt, Artificial Sequence
  Description of Artificial Sequence: Synthetic oligonucleotide
  Antisense strand to SEQ ID NO: 673104
auaucccacgcuaagugcc

SEQ ID NO: 673106 - RNA, 19 nt, Artificial Sequence
  Description of Artificial Sequence: Synthetic oligonucleotide
  Sense strand starting at position 2647 of SEQ ID NO: 585856
gcacuuagcgugggauaua

SEQ ID NO: 673107 - RNA, 19 nt, Artificial Sequence
  Description of Artificial Sequence: Synthetic oligonucleotide
  Antisense strand to SEQ ID NO: 673106
uauaucccacgcuaagugc

SEQ ID NO: 673108 - RNA, 19 nt, Artificial Sequence
  Description of Artificial Sequence: Synthetic oligonucleotide
  Sense strand starting at position 2652 of SEQ ID NO: 585856
uagcgugggauauagcaau

SEQ ID NO: 673109 - RNA, 19 nt, Artificial Sequence
  Description of Artificial Sequence: Synthetic oligonucleotide
  Antisense strand to SEQ ID NO: 673108
auugcuauaucccacgcua

SEQ ID NO: 673110 - RNA, 19 nt, Artificial Sequence
  Description of Artificial Sequence: Synthetic oligonucleotide
  Sense strand starting at position 2736 of SEQ ID NO: 585856
augaauacaugauguagaa

SEQ ID NO: 673111 - RNA, 19 nt, Artificial Sequence
  Description of Artificial Sequence: Synthetic oligonucleotide
  Antisense strand to SEQ ID NO: 673110
uucuacaucauguauucau

SEQ ID NO: 673112 - RNA, 19 nt, Artificial Sequence
  Description of Artificial Sequence: Synthetic oligonucleotide
  Sense strand starting at position 2762 of SEQ ID NO: 585856
guuuaaaugcagggacagu

SEQ ID NO: 673113 - RNA, 19 nt, Artificial Sequence
  Description of Artificial Sequence: Synthetic oligonucleotide
  Antisense strand to SEQ ID NO: 673112
acugucccugcauuuaaac

SEQ ID NO: 673114 - RNA, 19 nt, Artificial Sequence
  Description of Artificial Sequence: Synthetic oligonucleotide
  Sense strand starting at position 2915 of SEQ ID NO: 585856
ggcaacuccuaagugugaa

SEQ ID NO: 673115 - RNA, 19 nt, Artificial Sequence
  Description of Artificial Sequence: Synthetic oligonucleotide
  Antisense strand to SEQ ID NO: 673114
uucacacuuaggaguugcc

SEQ ID NO: 673116 - RNA, 19 nt, Artificial Sequence
  Description of Artificial Sequence: Synthetic oligonucleotide
  Sense strand starting at position 2916 of SEQ ID NO: 585856
gcaacuccuaagugugaag

SEQ ID NO: 673117 - RNA, 19 nt, Artificial Sequence
  Description of Artificial Sequence: Synthetic oligonucleotide
  Antisense strand to SEQ ID NO: 673116
cuucacacuuaggaguugc

SEQ ID NO: 673118 - RNA, 19 nt, Artificial Sequence
  Description of Artificial Sequence: Synthetic oligonucleotide
  Sense strand starting at position 2951 of SEQ ID NO: 585856
cgcagaagugguaggcuuu

SEQ ID NO: 673119 - RNA, 19 nt, Artificial Sequence
  Description of Artificial Sequence: Synthetic oligonucleotide
  Antisense strand to SEQ ID NO: 673118
aaagccuaccacuucugcg

SEQ ID NO: 673120 - RNA, 19 nt, Artificial Sequence
  Description of Artificial Sequence: Synthetic oligonucleotide
  Sense strand starting at position 2957 of SEQ ID NO: 585856
agugguaggcuuugaagaa

SEQ ID NO: 673121 - RNA, 19 nt, Artificial Sequence
  Description of Artificial Sequence: Synthetic oligonucleotide
  Antisense strand to SEQ ID NO: 673120
uucuucaaagccuaccacu

SEQ ID NO: 673122 - RNA, 19 nt, Artificial Sequence
  Description of Artificial Sequence: Synthetic oligonucleotide
  Sense strand starting at position 2964 of SEQ ID NO: 585856
ggcuuugaagaauacaugu

SEQ ID NO: 673123 - RNA, 19 nt, Artificial Sequence
  Description of Artificial Sequence: Synthetic oligonucleotide
  Antisense strand to SEQ ID NO: 673122
acauguauucuucaaagcc

SEQ ID NO: 673124 - RNA, 19 nt, Artificial Sequence
  Description of Artificial Sequence: Synthetic oligonucleotide
  Sense strand starting at position 3138 of SEQ ID NO: 585856
cuuagaauuugguagggag

SEQ ID NO: 673125 - RNA, 19 nt, Artificial Sequence
  Description of Artificial Sequence: Synthetic oligonucleotide
  Antisense strand to SEQ ID NO: 673124
cucccuaccaaauucuaag

SEQ ID NO: 673126 - RNA, 19 nt, Artificial Sequence
  Description of Artificial Sequence: Synthetic oligonucleotide
  Sense strand starting at position 3156 of SEQ ID NO: 585856
ggcagaaucuaacaaucac

SEQ ID NO: 673127 - RNA, 19 nt, Artificial Sequence
  Description of Artificial Sequence: Synthetic oligonucleotide
  Antisense strand to SEQ ID NO: 673126
gugauuguuagauucugcc

SEQ ID NO: 673128 - RNA, 19 nt, Artificial Sequence
  Description of Artificial Sequence: Synthetic oligonucleotide
  Sense strand starting at position 3257 of SEQ ID NO: 585856
aggcuagagggucacuuau

SEQ ID NO: 673129 - RNA, 19 nt, Artificial Sequence
  Description of Artificial Sequence: Synthetic oligonucleotide
  Antisense strand to SEQ ID NO: 673128
auaagugacccucuagccu

SEQ ID NO: 673130 - RNA, 19 nt, Artificial Sequence
  Description of Artificial Sequence: Synthetic oligonucleotide
  Sense strand starting at position 3259 of SEQ ID NO: 585856
gcuagagggucacuuaugu

SEQ ID NO: 673131 - RNA, 19 nt, Artificial Sequence
  Description of Artificial Sequence: Synthetic oligonucleotide
  Antisense strand to SEQ ID NO: 673130
acauaagugacccucuagc

SEQ ID NO: 673132 - RNA, 19 nt, Artificial Sequence
  Description of Artificial Sequence: Synthetic oligonucleotide
  Sense strand starting at position 3266 of SEQ ID NO: 585856
ggucacuuauguucccuga

SEQ ID NO: 673133 - RNA, 19 nt, Artificial Sequence
  Description of Artificial Sequence: Synthetic oligonucleotide
  Antisense strand to SEQ ID NO: 673132
ucagggaacauaagugacc

SEQ ID NO: 673134 - RNA, 19 nt, Artificial Sequence
  Description of Artificial Sequence: Synthetic oligonucleotide
  Sense strand starting at position 3319 of SEQ ID NO: 585856
gaguaauuagugcagugga

SEQ ID NO: 673135 - RNA, 19 nt, Artificial Sequence
  Description of Artificial Sequence: Synthetic oligonucleotide
  Antisense strand to SEQ ID NO: 673134
uccacugcacuaauuacuc

SEQ ID NO: 673136 - RNA, 19 nt, Artificial Sequence
  Description of Artificial Sequence: Synthetic oligonucleotide
  Sense strand starting at position 3322 of SEQ ID NO: 585856
uaauuagugcaguggaaca

SEQ ID NO: 673137 - RNA, 19 nt, Artificial Sequence
  Description of Artificial Sequence: Synthetic oligonucleotide
  Antisense strand to SEQ ID NO: 673136
uguuccacugcacuaauua

SEQ ID NO: 673138 - RNA, 19 nt, Artificial Sequence
  Description of Artificial Sequence: Synthetic oligonucleotide
  Sense strand starting at position 3358 of SEQ ID NO: 585856
gaggcaauauaguaaauga

SEQ ID NO: 673139 - RNA, 19 nt, Artificial Sequence
  Description of Artificial Sequence: Synthetic oligonucleotide
  Antisense strand to SEQ ID NO: 673138
ucauuuacuauauugccuc

SEQ ID NO: 673140 - RNA, 19 nt, Artificial Sequence
  Description of Artificial Sequence: Synthetic oligonucleotide
  Sense strand starting at position 3451 of SEQ ID NO: 585856
agcuuagaaugcuuaccau

SEQ ID NO: 673141 - RNA, 19 nt, Artificial Sequence
  Description of Artificial Sequence: Synthetic oligonucleotide
  Antisense strand to SEQ ID NO: 673140
augguaagcauucuaagcu

SEQ ID NO: 673142 - RNA, 19 nt, Artificial Sequence
  Description of Artificial Sequence: Synthetic oligonucleotide
  Sense strand starting at position 412 of SEQ ID NO: 585857
uuuggucauuuggaacuau

SEQ ID NO: 673143 - RNA, 19 nt, Artificial Sequence
  Description of Artificial Sequence: Synthetic oligonucleotide
  Antisense strand to SEQ ID NO: 673142
auaguuccaaaugaccaaa

SEQ ID NO: 673144 - RNA, 19 nt, Artificial Sequence
  Description of Artificial Sequence: Synthetic oligonucleotide
  Sense strand starting at position 652 of SEQ ID NO: 585857
ugacaaauccuccaacguu

SEQ ID NO: 673145 - RNA, 19 nt, Artificial Sequence
  Description of Artificial Sequence: Synthetic oligonucleotide
  Antisense strand to SEQ ID NO: 673144
aacguuggaggauuuguca

SEQ ID NO: 673146 - RNA, 19 nt, Artificial Sequence
  Description of Artificial Sequence: Synthetic oligonucleotide
  Sense strand starting at position 773 of SEQ ID NO: 585857
gaagauuagugguugcuag

SEQ ID NO: 673147 - RNA, 19 nt, Artificial Sequence
  Description of Artificial Sequence: Synthetic oligonucleotide
  Antisense strand to SEQ ID NO: 673146
cuagcaaccacuaaucuuc

SEQ ID NO: 673148 - RNA, 19 nt, Artificial Sequence
  Description of Artificial Sequence: Synthetic oligonucleotide
  Sense strand starting at position 826 of SEQ ID NO: 585857
aagugcucaauggguagua

SEQ ID NO: 673149 - RNA, 19 nt, Artificial Sequence
  Description of Artificial Sequence: Synthetic oligonucleotide
  Antisense strand to SEQ ID NO: 673148
uacuacccauugagcacuu

SEQ ID NO: 673150 - RNA, 19 nt, Artificial Sequence
  Description of Artificial Sequence: Synthetic oligonucleotide
  Sense strand starting at position 877 of SEQ ID NO: 585857
uggaacuacguguaaguga

SEQ ID NO: 673151 - RNA, 19 nt, Artificial Sequence
  Description of Artificial Sequence: Synthetic oligonucleotide
  Antisense strand to SEQ ID NO: 673150
ucacuuacacguaguucca

SEQ ID NO: 673152 - RNA, 19 nt, Artificial Sequence
  Description of Artificial Sequence: Synthetic oligonucleotide
  Sense strand starting at position 882 of SEQ ID NO: 585857
cuacguguaagugaugauu

SEQ ID NO: 673153 - RNA, 19 nt, Artificial Sequence
  Description of Artificial Sequence: Synthetic oligonucleotide
  Antisense strand to SEQ ID NO: 673152
aaucaucacuuacacguag

SEQ ID NO: 673154 - RNA, 19 nt, Artificial Sequence
  Description of Artificial Sequence: Synthetic oligonucleotide
  Sense strand starting at position 885 of SEQ ID NO: 585857
cguguaagugaugauuaca

SEQ ID NO: 673155 - RNA, 19 nt, Artificial Sequence
  Description of Artificial Sequence: Synthetic oligonucleotide
  Antisense strand to SEQ ID NO: 673154
uguaaucaucacuuacacg

SEQ ID NO: 673156 - RNA, 19 nt, Artificial Sequence
  Description of Artificial Sequence: Synthetic oligonucleotide
  Sense strand starting at position 963 of SEQ ID NO: 585857
agagauauuugcuacuaaa

SEQ ID NO: 673157 - RNA, 19 nt, Artificial Sequence
  Description of Artificial Sequence: Synthetic oligonucleotide
  Antisense strand to SEQ ID NO: 673156
uuuaguagcaaauaucucu

SEQ ID NO: 673158 - RNA, 19 nt, Artificial Sequence
  Description of Artificial Sequence: Synthetic oligonucleotide
  Sense strand starting at position 1027 of SEQ ID NO: 585857
ggacuuguauuugauaaag

SEQ ID NO: 673159 - RNA, 19 nt, Artificial Sequence
  Description of Artificial Sequence: Synthetic oligonucleotide
  Antisense strand to SEQ ID NO: 673158
cuuuaucaaauacaagucc

SEQ ID NO: 673160 - RNA, 19 nt, Artificial Sequence
  Description of Artificial Sequence: Synthetic oligonucleotide
  Sense strand starting at position 1029 of SEQ ID NO: 585857
acuuguauuugauaaagcu

SEQ ID NO: 673161 - RNA, 19 nt, Artificial Sequence
  Description of Artificial Sequence: Synthetic oligonucleotide
  Antisense strand to SEQ ID NO: 673160
agcuuuaucaaauacaagu

SEQ ID NO: 673162 - RNA, 19 nt, Artificial Sequence
  Description of Artificial Sequence: Synthetic oligonucleotide
  Sense strand starting at position 1046 of SEQ ID NO: 585857
cuuuauuacugagucacuu

SEQ ID NO: 673163 - RNA, 19 nt, Artificial Sequence
  Description of Artificial Sequence: Synthetic oligonucleotide
  Antisense strand to SEQ ID NO: 673162
aagugacucaguaauaaag

SEQ ID NO: 673164 - RNA, 19 nt, Artificial Sequence
  Description of Artificial Sequence: Synthetic oligonucleotide
  Sense strand starting at position 1056 of SEQ ID NO: 585857
gagucacuucgacgaugaa

SEQ ID NO: 673165 - RNA, 19 nt, Artificial Sequence
  Description of Artificial Sequence: Synthetic oligonucleotide
  Antisense strand to SEQ ID NO: 673164
uucaucgucgaagugacuc

SEQ ID NO: 673166 - RNA, 19 nt, Artificial Sequence
  Description of Artificial Sequence: Synthetic oligonucleotide
  Sense strand starting at position 1057 of SEQ ID NO: 585857
agucacuucgacgaugaau

SEQ ID NO: 673167 - RNA, 19 nt, Artificial Sequence
  Description of Artificial Sequence: Synthetic oligonucleotide
  Antisense strand to SEQ ID NO: 673166
auucaucgucgaagugacu

SEQ ID NO: 673168 - RNA, 19 nt, Artificial Sequence
  Description of Artificial Sequence: Synthetic oligonucleotide
  Sense strand starting at position 1059 of SEQ ID NO: 585857
ucacuucgacgaugaaucu

SEQ ID NO: 673169 - RNA, 19 nt, Artificial Sequence
  Description of Artificial Sequence: Synthetic oligonucleotide
  Antisense strand to SEQ ID NO: 673168
agauucaucgucgaaguga

SEQ ID NO: 673170 - RNA, 19 nt, Artificial Sequence
  Description of Artificial Sequence: Synthetic oligonucleotide
  Sense strand starting at position 1065 of SEQ ID NO: 585857
cgacgaugaaucugauaaa

SEQ ID NO: 673171 - RNA, 19 nt, Artificial Sequence
  Description of Artificial Sequence: Synthetic oligonucleotide
  Antisense strand to SEQ ID NO: 673170
uuuaucagauucaucgucg

SEQ ID NO: 673172 - RNA, 19 nt, Artificial Sequence
  Description of Artificial Sequence: Synthetic oligonucleotide
  Sense strand starting at position 1351 of SEQ ID NO: 585857
gaagaucuuucggucuuag

SEQ ID NO: 673173 - RNA, 19 nt, Artificial Sequence
  Description of Artificial Sequence: Synthetic oligonucleotide
  Antisense strand to SEQ ID NO: 673172
cuaagaccgaaagaucuuc

SEQ ID NO: 673174 - RNA, 19 nt, Artificial Sequence
  Description of Artificial Sequence: Synthetic oligonucleotide
  Sense strand starting at position 1433 of SEQ ID NO: 585857
gccauuuaauaugaacuga

SEQ ID NO: 673175 - RNA, 19 nt, Artificial Sequence
  Description of Artificial Sequence: Synthetic oligonucleotide
  Antisense strand to SEQ ID NO: 673174
ucaguucauauuaaauggc

SEQ ID NO: 673176 - RNA, 19 nt, Artificial Sequence
  Description of Artificial Sequence: Synthetic oligonucleotide
  Sense strand starting at position 1446 of SEQ ID NO: 585857
aacugaaagguccggucuu

SEQ ID NO: 673177 - RNA, 19 nt, Artificial Sequence
  Description of Artificial Sequence: Synthetic oligonucleotide
  Antisense strand to SEQ ID NO: 673176
aagaccggaccuuucaguu

SEQ ID NO: 673178 - RNA, 19 nt, Artificial Sequence
  Description of Artificial Sequence: Synthetic oligonucleotide
  Sense strand starting at position 1462 of SEQ ID NO: 585857
cuugguuagugacuuuaca

SEQ ID NO: 673179 - RNA, 19 nt, Artificial Sequence
  Description of Artificial Sequence: Synthetic oligonucleotide
  Antisense strand to SEQ ID NO: 673178
uguaaagucacuaaccaag

SEQ ID NO: 673180 - RNA, 19 nt, Artificial Sequence
  Description of Artificial Sequence: Synthetic oligonucleotide
  Sense strand starting at position 1548 of SEQ ID NO: 585857
aaggccgugaccuggaaua

SEQ ID NO: 673181 - RNA, 19 nt, Artificial Sequence
  Description of Artificial Sequence: Synthetic oligonucleotide
  Antisense strand to SEQ ID NO: 673180
uauuccaggucacggccuu

SEQ ID NO: 673182 - RNA, 19 nt, Artificial Sequence
  Description of Artificial Sequence: Synthetic oligonucleotide
  Sense strand starting at position 1550 of SEQ ID NO: 585857
ggccgugaccuggaauaca

SEQ ID NO: 673183 - RNA, 19 nt, Artificial Sequence
  Description of Artificial Sequence: Synthetic oligonucleotide
  Antisense strand to SEQ ID NO: 673182
uguauuccaggucacggcc

SEQ ID NO: 673184 - RNA, 19 nt, Artificial Sequence
  Description of Artificial Sequence: Synthetic oligonucleotide
  Sense strand starting at position 1822 of SEQ ID NO: 585857
uggucucuuaccgagaucu

SEQ ID NO: 673185 - RNA, 19 nt, Artificial Sequence
  Description of Artificial Sequence: Synthetic oligonucleotide
  Antisense strand to SEQ ID NO: 673184
agaucucgguaagagacca

SEQ ID NO: 673186 - RNA, 19 nt, Artificial Sequence
  Description of Artificial Sequence: Synthetic oligonucleotide
  Sense strand starting at position 1824 of SEQ ID NO: 585857
gucucuuaccgagaucuag

SEQ ID NO: 673187 - RNA, 19 nt, Artificial Sequence
  Description of Artificial Sequence: Synthetic oligonucleotide
  Antisense strand to SEQ ID NO: 673186
cuagaucucgguaagagac

SEQ ID NO: 673188 - RNA, 19 nt, Artificial Sequence
  Description of Artificial Sequence: Synthetic oligonucleotide
  Sense strand starting at position 1830 of SEQ ID NO: 585857
uaccgagaucuaggguuaa

SEQ ID NO: 673189 - RNA, 19 nt, Artificial Sequence
  Description of Artificial Sequence: Synthetic oligonucleotide
  Antisense strand to SEQ ID NO: 673188
uuaacccuagaucucggua

SEQ ID NO: 673190 - RNA, 19 nt, Artificial Sequence
  Description of Artificial Sequence: Synthetic oligonucleotide
  Sense strand starting at position 2030 of SEQ ID NO: 585857
agaagaggccgugacguau

SEQ ID NO: 673191 - RNA, 19 nt, Artificial Sequence
  Description of Artificial Sequence: Synthetic oligonucleotide
  Antisense strand to SEQ ID NO: 673190
auacgucacggccucuucu

SEQ ID NO: 673192 - RNA, 19 nt, Artificial Sequence
  Description of Artificial Sequence: Synthetic oligonucleotide
  Sense strand starting at position 2329 of SEQ ID NO: 585857
ccuugugagcgguuagucu

SEQ ID NO: 673193 - RNA, 19 nt, Artificial Sequence
  Description of Artificial Sequence: Synthetic oligonucleotide
  Antisense strand to SEQ ID NO: 673192
agacuaaccgcucacaagg

SEQ ID NO: 673194 - RNA, 19 nt, Artificial Sequence
  Description of Artificial Sequence: Synthetic oligonucleotide
  Sense strand starting at position 2337 of SEQ ID NO: 585857
gcgguuagucuggaacuaa

SEQ ID NO: 673195 - RNA, 19 nt, Artificial Sequence
  Description of Artificial Sequence: Synthetic oligonucleotide
  Antisense strand to SEQ ID NO: 673194
uuaguuccagacuaaccgc

SEQ ID NO: 673196 - RNA, 19 nt, Artificial Sequence
  Description of Artificial Sequence: Synthetic oligonucleotide
  Sense strand starting at position 2452 of SEQ ID NO: 585857
uuggaaaguuugcccaacu

SEQ ID NO: 673197 - RNA, 19 nt, Artificial Sequence
  Description of Artificial Sequence: Synthetic oligonucleotide
  Antisense strand to SEQ ID NO: 673196
aguugggcaaacuuuccaa

SEQ ID NO: 673198 - RNA, 19 nt, Artificial Sequence
  Description of Artificial Sequence: Synthetic oligonucleotide
  Sense strand starting at position 2577 of SEQ ID NO: 585857
agggaaguuucugaagaag

SEQ ID NO: 673199 - RNA, 19 nt, Artificial Sequence
  Description of Artificial Sequence: Synthetic oligonucleotide
  Antisense strand to SEQ ID NO: 673198
cuucuucagaaacuucccu

SEQ ID NO: 673200 - RNA, 19 nt, Artificial Sequence
  Description of Artificial Sequence: Synthetic oligonucleotide
  Sense strand starting at position 2739 of SEQ ID NO: 585857
gagagacugugauuggguu

SEQ ID NO: 673201 - RNA, 19 nt, Artificial Sequence
  Description of Artificial Sequence: Synthetic oligonucleotide
  Antisense strand to SEQ ID NO: 673200
aacccaaucacagucucuc

SEQ ID NO: 673202 - RNA, 19 nt, Artificial Sequence
  Description of Artificial Sequence: Synthetic oligonucleotide
  Sense strand starting at position 2740 of SEQ ID NO: 585857
agagacugugauuggguua

SEQ ID NO: 673203 - RNA, 19 nt, Artificial Sequence
  Description of Artificial Sequence: Synthetic oligonucleotide
  Antisense strand to SEQ ID NO: 673202
uaacccaaucacagucucu

SEQ ID NO: 673204 - RNA, 19 nt, Artificial Sequence
  Description of Artificial Sequence: Synthetic oligonucleotide
  Sense strand starting at position 2743 of SEQ ID NO: 585857
gacugugauuggguuagaa

SEQ ID NO: 673205 - RNA, 19 nt, Artificial Sequence
  Description of Artificial Sequence: Synthetic oligonucleotide
  Antisense strand to SEQ ID NO: 673204
uucuaacccaaucacaguc

SEQ ID NO: 673206 - RNA, 19 nt, Artificial Sequence
  Description of Artificial Sequence: Synthetic oligonucleotide
  Sense strand starting at position 3061 of SEQ ID NO: 585857
ucccucuuagcugaaagau

SEQ ID NO: 673207 - RNA, 19 nt, Artificial Sequence
  Description of Artificial Sequence: Synthetic oligonucleotide
  Antisense strand to SEQ ID NO: 673206
aucuuucagcuaagaggga

SEQ ID NO: 673208 - RNA, 19 nt, Artificial Sequence
  Description of Artificial Sequence: Synthetic oligonucleotide
  Sense strand starting at position 3070 of SEQ ID NO: 585857
gcugaaagauaugccaauu

SEQ ID NO: 673209 - RNA, 19 nt, Artificial Sequence
  Description of Artificial Sequence: Synthetic oligonucleotide
  Antisense strand to SEQ ID NO: 673208
aauuggcauaucuuucagc

SEQ ID NO: 673210 - RNA, 19 nt, Artificial Sequence
  Description of Artificial Sequence: Synthetic oligonucleotide
  Sense strand starting at position 3464 of SEQ ID NO: 585857
cucuuauugugguucuaaa

SEQ ID NO: 673211 - RNA, 19 nt, Artificial Sequence
  Description of Artificial Sequence: Synthetic oligonucleotide
  Antisense strand to SEQ ID NO: 673210
uuuagaaccacaauaagag

SEQ ID NO: 673212 - RNA, 19 nt, Artificial Sequence
  Description of Artificial Sequence: Synthetic oligonucleotide
  Sense strand starting at position 3482 of SEQ ID NO: 585857
aagguuuaucuguagugga

SEQ ID NO: 673213 - RNA, 19 nt, Artificial Sequence
  Description of Artificial Sequence: Synthetic oligonucleotide
  Antisense strand to SEQ ID NO: 673212
uccacuacagauaaaccuu

SEQ ID NO: 673214 - RNA, 19 nt, Artificial Sequence
  Description of Artificial Sequence: Synthetic oligonucleotide
  Sense strand starting at position 3486 of SEQ ID NO: 585857
uuuaucuguaguggaggaa

SEQ ID NO: 673215 - RNA, 19 nt, Artificial Sequence
  Description of Artificial Sequence: Synthetic oligonucleotide
  Antisense strand to SEQ ID NO: 673214
uuccuccacuacagauaaa

SEQ ID NO: 673216 - RNA, 19 nt, Artificial Sequence
  Description of Artificial Sequence: Synthetic oligonucleotide
  Sense strand starting at position 3748 of SEQ ID NO: 585857
uaguuacuggcugaagcau

SEQ ID NO: 673217 - RNA, 19 nt, Artificial Sequence
  Description of Artificial Sequence: Synthetic oligonucleotide
  Antisense strand to SEQ ID NO: 673216
augcuucagccaguaacua

SEQ ID NO: 673218 - RNA, 19 nt, Artificial Sequence
  Description of Artificial Sequence: Synthetic oligonucleotide
  Sense strand starting at position 3766 of SEQ ID NO: 585857
uccugagaagaacguuuaa

SEQ ID NO: 673219 - RNA, 19 nt, Artificial Sequence
  Description of Artificial Sequence: Synthetic oligonucleotide
  Antisense strand to SEQ ID NO: 673218
uuaaacguucuucucagga

SEQ ID NO: 673220 - RNA, 19 nt, Artificial Sequence
  Description of Artificial Sequence: Synthetic oligonucleotide
  Sense strand starting at position 3901 of SEQ ID NO: 585857
gcagucaagcaauacauau

SEQ ID NO: 673221 - RNA, 19 nt, Artificial Sequence
  Description of Artificial Sequence: Synthetic oligonucleotide
  Antisense strand to SEQ ID NO: 673220
auauguauugcuugacugc

SEQ ID NO: 673222 - RNA, 19 nt, Artificial Sequence
  Description of Artificial Sequence: Synthetic oligonucleotide
  Sense strand starting at position 36 of SEQ ID NO: 585858
guggcaauucuguggauaa

SEQ ID NO: 673223 - RNA, 19 nt, Artificial Sequence
  Description of Artificial Sequence: Synthetic oligonucleotide
  Antisense strand to SEQ ID NO: 673222
uuauccacagaauugccac

SEQ ID NO: 673224 - RNA, 19 nt, Artificial Sequence
  Description of Artificial Sequence: Synthetic oligonucleotide
  Sense strand starting at position 121 of SEQ ID NO: 585858
uuuccaugucuuuaaguuc

SEQ ID NO: 673225 - RNA, 19 nt, Artificial Sequence
  Description of Artificial Sequence: Synthetic oligonucleotide
  Antisense strand to SEQ ID NO: 673224
gaacuuaaagacauggaaa

SEQ ID NO: 673226 - RNA, 19 nt, Artificial Sequence
  Description of Artificial Sequence: Synthetic oligonucleotide
  Sense strand starting at position 301 of SEQ ID NO: 585858
guaauuuaaagucgugguu

SEQ ID NO: 673227 - RNA, 19 nt, Artificial Sequence
  Description of Artificial Sequence: Synthetic oligonucleotide
  Antisense strand to SEQ ID NO: 673226
aaccacgacuuuaaauuac

SEQ ID NO: 673228 - RNA, 19 nt, Artificial Sequence
  Description of Artificial Sequence: Synthetic oligonucleotide
  Sense strand starting at position 637 of SEQ ID NO: 585858
uuguuaaaccugcagauua

SEQ ID NO: 673229 - RNA, 19 nt, Artificial Sequence
  Description of Artificial Sequence: Synthetic oligonucleotide
  Antisense strand to SEQ ID NO: 673228
uaaucugcagguuuaacaa

SEQ ID NO: 673230 - RNA, 19 nt, Artificial Sequence
  Description of Artificial Sequence: Synthetic oligonucleotide
  Sense strand starting at position 639 of SEQ ID NO: 585858
guuaaaccugcagauuaac

SEQ ID NO: 673231 - RNA, 19 nt, Artificial Sequence
  Description of Artificial Sequence: Synthetic oligonucleotide
  Antisense strand to SEQ ID NO: 673230
guuaaucugcagguuuaac

SEQ ID NO: 673232 - RNA, 19 nt, Artificial Sequence
  Description of Artificial Sequence: Synthetic oligonucleotide
  Sense strand starting at position 753 of SEQ ID NO: 585858
ugucacuaccguuaagaca

SEQ ID NO: 673233 - RNA, 19 nt, Artificial Sequence
  Description of Artificial Sequence: Synthetic oligonucleotide
  Antisense strand to SEQ ID NO: 673232
ugucuuaacgguagugaca

SEQ ID NO: 673234 - RNA, 19 nt, Artificial Sequence
  Description of Artificial Sequence: Synthetic oligonucleotide
  Sense strand starting at position 800 of SEQ ID NO: 585858
agggaugcuuagucagacu

SEQ ID NO: 673235 - RNA, 19 nt, Artificial Sequence
  Description of Artificial Sequence: Synthetic oligonucleotide
  Antisense strand to SEQ ID NO: 673234
agucugacuaagcaucccu

SEQ ID NO: 673236 - RNA, 19 nt, Artificial Sequence
  Description of Artificial Sequence: Synthetic oligonucleotide
  Sense strand starting at position 873 of SEQ ID NO: 585858
gaagucaaguugccauauu

SEQ ID NO: 673237 - RNA, 19 nt, Artificial Sequence
  Description of Artificial Sequence: Synthetic oligonucleotide
  Antisense strand to SEQ ID NO: 673236
aauauggcaacuugacuuc

SEQ ID NO: 673238 - RNA, 19 nt, Artificial Sequence
  Description of Artificial Sequence: Synthetic oligonucleotide
  Sense strand starting at position 917 of SEQ ID NO: 585858
cacuuaauugcuggguuaa

SEQ ID NO: 673239 - RNA, 19 nt, Artificial Sequence
  Description of Artificial Sequence: Synthetic oligonucleotide
  Antisense strand to SEQ ID NO: 673238
uuaacccagcaauuaagug

SEQ ID NO: 673240 - RNA, 19 nt, Artificial Sequence
  Description of Artificial Sequence: Synthetic oligonucleotide
  Sense strand starting at position 918 of SEQ ID NO: 585858
acuuaauugcuggguuaau

SEQ ID NO: 673241 - RNA, 19 nt, Artificial Sequence
  Description of Artificial Sequence: Synthetic oligonucleotide
  Antisense strand to SEQ ID NO: 673240
auuaacccagcaauuaagu

SEQ ID NO: 673242 - RNA, 19 nt, Artificial Sequence
  Description of Artificial Sequence: Synthetic oligonucleotide
  Sense strand starting at position 919 of SEQ ID NO: 585858
cuuaauugcuggguuaauu

SEQ ID NO: 673243 - RNA, 19 nt, Artificial Sequence
  Description of Artificial Sequence: Synthetic oligonucleotide
  Antisense strand to SEQ ID NO: 673242
aauuaacccagcaauuaag

SEQ ID NO: 673244 - RNA, 19 nt, Artificial Sequence
  Description of Artificial Sequence: Synthetic oligonucleotide
  Sense strand starting at position 1190 of SEQ ID NO: 585858
gcagaugaccauugaacaa

SEQ ID NO: 673245 - RNA, 19 nt, Artificial Sequence
  Description of Artificial Sequence: Synthetic oligonucleotide
  Antisense strand to SEQ ID NO: 673244
uuguucaauggucaucugc

SEQ ID NO: 673246 - RNA, 19 nt, Artificial Sequence
  Description of Artificial Sequence: Synthetic oligonucleotide
  Sense strand starting at position 1210 of SEQ ID NO: 585858
acacucugauggcuuagau

SEQ ID NO: 673247 - RNA, 19 nt, Artificial Sequence
  Description of Artificial Sequence: Synthetic oligonucleotide
  Antisense strand to SEQ ID NO: 673246
aucuaagccaucagagugu

SEQ ID NO: 673248 - RNA, 19 nt, Artificial Sequence
  Description of Artificial Sequence: Synthetic oligonucleotide
  Sense strand starting at position 1218 of SEQ ID NO: 585858
auggcuuagauguguagaa

SEQ ID NO: 673249 - RNA, 19 nt, Artificial Sequence
  Description of Artificial Sequence: Synthetic oligonucleotide
  Antisense strand to SEQ ID NO: 673248
uucuacacaucuaagccau

SEQ ID NO: 673250 - RNA, 19 nt, Artificial Sequence
  Description of Artificial Sequence: Synthetic oligonucleotide
  Sense strand starting at position 1219 of SEQ ID NO: 585858
uggcuuagauguguagaaa

SEQ ID NO: 673251 - RNA, 19 nt, Artificial Sequence
  Description of Artificial Sequence: Synthetic oligonucleotide
  Antisense strand to SEQ ID NO: 673250
uuucuacacaucuaagcca

SEQ ID NO: 673252 - RNA, 19 nt, Artificial Sequence
  Description of Artificial Sequence: Synthetic oligonucleotide
  Sense strand starting at position 1861 of SEQ ID NO: 585858
gcgguaauggcguuacucu

SEQ ID NO: 673253 - RNA, 19 nt, Artificial Sequence
  Description of Artificial Sequence: Synthetic oligonucleotide
  Antisense strand to SEQ ID NO: 673252
agaguaacgccauuaccgc

SEQ ID NO: 673254 - RNA, 19 nt, Artificial Sequence
  Description of Artificial Sequence: Synthetic oligonucleotide
  Sense strand starting at position 2138 of SEQ ID NO: 585858
auugucagugguuacuuua

SEQ ID NO: 673255 - RNA, 19 nt, Artificial Sequence
  Description of Artificial Sequence: Synthetic oligonucleotide
  Antisense strand to SEQ ID NO: 673254
uaaaguaaccacugacaau

SEQ ID NO: 673256 - RNA, 19 nt, Artificial Sequence
  Description of Artificial Sequence: Synthetic oligonucleotide
  Sense strand starting at position 2141 of SEQ ID NO: 585858
gucagugguuacuuuauuu

SEQ ID NO: 673257 - RNA, 19 nt, Artificial Sequence
  Description of Artificial Sequence: Synthetic oligonucleotide
  Antisense strand to SEQ ID NO: 673256
aaauaaaguaaccacugac

SEQ ID NO: 673258 - RNA, 19 nt, Artificial Sequence
  Description of Artificial Sequence: Synthetic oligonucleotide
  Sense strand starting at position 2160 of SEQ ID NO: 585858
gaaugacgauccucuugau

SEQ ID NO: 673259 - RNA, 19 nt, Artificial Sequence
  Description of Artificial Sequence: Synthetic oligonucleotide
  Antisense strand to SEQ ID NO: 673258
aucaagaggaucgucauuc

SEQ ID NO: 673260 - RNA, 19 nt, Artificial Sequence
  Description of Artificial Sequence: Synthetic oligonucleotide
  Sense strand starting at position 2173 of SEQ ID NO: 585858
cuugauaacggcgauguaa

SEQ ID NO: 673261 - RNA, 19 nt, Artificial Sequence
  Description of Artificial Sequence: Synthetic oligonucleotide
  Antisense strand to SEQ ID NO: 673260
uuacaucgccguuaucaag

SEQ ID NO: 673262 - RNA, 19 nt, Artificial Sequence
  Description of Artificial Sequence: Synthetic oligonucleotide
  Sense strand starting at position 2320 of SEQ ID NO: 585858
ucccaugguuaaguaauga

SEQ ID NO: 673263 - RNA, 19 nt, Artificial Sequence
  Description of Artificial Sequence: Synthetic oligonucleotide
  Antisense strand to SEQ ID NO: 673262
ucauuacuuaaccauggga

SEQ ID NO: 673264 - RNA, 19 nt, Artificial Sequence
  Description of Artificial Sequence: Synthetic oligonucleotide
  Sense strand starting at position 2652 of SEQ ID NO: 585858
uuaaauucguaugugacau

SEQ ID NO: 673265 - RNA, 19 nt, Artificial Sequence
  Description of Artificial Sequence: Synthetic oligonucleotide
  Antisense strand to SEQ ID NO: 673264
augucacauacgaauuuaa

SEQ ID NO: 673266 - RNA, 19 nt, Artificial Sequence
  Description of Artificial Sequence: Synthetic oligonucleotide
  Sense strand starting at position 2704 of SEQ ID NO: 585858
guauguagucagcauuugu

SEQ ID NO: 673267 - RNA, 19 nt, Artificial Sequence
  Description of Artificial Sequence: Synthetic oligonucleotide
  Antisense strand to SEQ ID NO: 673266
acaaaugcugacuacauac

SEQ ID NO: 673268 - RNA, 19 nt, Artificial Sequence
  Description of Artificial Sequence: Synthetic oligonucleotide
  Sense strand starting at position 2708 of SEQ ID NO: 585858
guagucagcauuuguaacu

SEQ ID NO: 673269 - RNA, 19 nt, Artificial Sequence
  Description of Artificial Sequence: Synthetic oligonucleotide
  Antisense strand to SEQ ID NO: 673268
aguuacaaaugcugacuac

SEQ ID NO: 673270 - RNA, 19 nt, Artificial Sequence
  Description of Artificial Sequence: Synthetic oligonucleotide
  Sense strand starting at position 2796 of SEQ ID NO: 585858
gcuggaguaauauagcagu

SEQ ID NO: 673271 - RNA, 19 nt, Artificial Sequence
  Description of Artificial Sequence: Synthetic oligonucleotide
  Antisense strand to SEQ ID NO: 673270
acugcuauauuacuccagc

SEQ ID NO: 673272 - RNA, 19 nt, Artificial Sequence
  Description of Artificial Sequence: Synthetic oligonucleotide
  Sense strand starting at position 2836 of SEQ ID NO: 585858
uaaguaaucuuggucugga

SEQ ID NO: 673273 - RNA, 19 nt, Artificial Sequence
  Description of Artificial Sequence: Synthetic oligonucleotide
  Antisense strand to SEQ ID NO: 673272
uccagaccaagauuacuua

SEQ ID NO: 673274 - RNA, 19 nt, Artificial Sequence
  Description of Artificial Sequence: Synthetic oligonucleotide
  Sense strand starting at position 2837 of SEQ ID NO: 585858
aaguaaucuuggucuggac

SEQ ID NO: 673275 - RNA, 19 nt, Artificial Sequence
  Description of Artificial Sequence: Synthetic oligonucleotide
  Antisense strand to SEQ ID NO: 673274
guccagaccaagauuacuu

SEQ ID NO: 673276 - RNA, 19 nt, Artificial Sequence
  Description of Artificial Sequence: Synthetic oligonucleotide
  Sense strand starting at position 2839 of SEQ ID NO: 585858
guaaucuuggucuggacca

SEQ ID NO: 673277 - RNA, 19 nt, Artificial Sequence
  Description of Artificial Sequence: Synthetic oligonucleotide
  Antisense strand to SEQ ID NO: 673276
ugguccagaccaagauuac

SEQ ID NO: 673278 - RNA, 19 nt, Artificial Sequence
  Description of Artificial Sequence: Synthetic oligonucleotide
  Sense strand starting at position 2854 of SEQ ID NO: 585858
accagagugagaugucaua

SEQ ID NO: 673279 - RNA, 19 nt, Artificial Sequence
  Description of Artificial Sequence: Synthetic oligonucleotide
  Antisense strand to SEQ ID NO: 673278
uaugacaucucacucuggu

SEQ ID NO: 673280 - RNA, 19 nt, Artificial Sequence
  Description of Artificial Sequence: Synthetic oligonucleotide
  Sense strand starting at position 2953 of SEQ ID NO: 585858
ucucuaugagcuggauauu

SEQ ID NO: 673281 - RNA, 19 nt, Artificial Sequence
  Description of Artificial Sequence: Synthetic oligonucleotide
  Antisense strand to SEQ ID NO: 673280
aauauccagcucauagaga

SEQ ID NO: 673282 - RNA, 19 nt, Artificial Sequence
  Description of Artificial Sequence: Synthetic oligonucleotide
  Sense strand starting at position 2954 of SEQ ID NO: 585858
cucuaugagcuggauauua

SEQ ID NO: 673283 - RNA, 19 nt, Artificial Sequence
  Description of Artificial Sequence: Synthetic oligonucleotide
  Antisense strand to SEQ ID NO: 673282
uaauauccagcucauagag

SEQ ID NO: 673284 - RNA, 19 nt, Artificial Sequence
  Description of Artificial Sequence: Synthetic oligonucleotide
  Sense strand starting at position 2966 of SEQ ID NO: 585858
gauauuauuuacugaggag

SEQ ID NO: 673285 - RNA, 19 nt, Artificial Sequence
  Description of Artificial Sequence: Synthetic oligonucleotide
  Antisense strand to SEQ ID NO: 673284
cuccucaguaaauaauauc

SEQ ID NO: 673286 - RNA, 19 nt, Artificial Sequence
  Description of Artificial Sequence: Synthetic oligonucleotide
  Sense strand starting at position 2969 of SEQ ID NO: 585858
auuauuuacugaggagaaa

SEQ ID NO: 673287 - RNA, 19 nt, Artificial Sequence
  Description of Artificial Sequence: Synthetic oligonucleotide
  Antisense strand to SEQ ID NO: 673286
uuucuccucaguaaauaau

SEQ ID NO: 673288 - RNA, 19 nt, Artificial Sequence
  Description of Artificial Sequence: Synthetic oligonucleotide
  Sense strand starting at position 2995 of SEQ ID NO: 585858
cagagagguuaguaauuua

SEQ ID NO: 673289 - RNA, 19 nt, Artificial Sequence
  Description of Artificial Sequence: Synthetic oligonucleotide
  Antisense strand to SEQ ID NO: 673288
uaaauuacuaaccucucug

SEQ ID NO: 673290 - RNA, 19 nt, Artificial Sequence
  Description of Artificial Sequence: Synthetic oligonucleotide
  Sense strand starting at position 3044 of SEQ ID NO: 585858
gaugcaagauuugaacaag

SEQ ID NO: 673291 - RNA, 19 nt, Artificial Sequence
  Description of Artificial Sequence: Synthetic oligonucleotide
  Antisense strand to SEQ ID NO: 673290
cuuguucaaaucuugcauc

SEQ ID NO: 673292 - RNA, 19 nt, Artificial Sequence
  Description of Artificial Sequence: Synthetic oligonucleotide
  Sense strand starting at position 3060 of SEQ ID NO: 585858
aaggcuaucugguuccaga

SEQ ID NO: 673293 - RNA, 19 nt, Artificial Sequence
  Description of Artificial Sequence: Synthetic oligonucleotide
  Antisense strand to SEQ ID NO: 673292
ucuggaaccagauagccuu

SEQ ID NO: 673294 - RNA, 19 nt, Artificial Sequence
  Description of Artificial Sequence: Synthetic oligonucleotide
  Sense strand starting at position 3087 of SEQ ID NO: 585858
acuacugaccuaggacauu

SEQ ID NO: 673295 - RNA, 19 nt, Artificial Sequence
  Description of Artificial Sequence: Synthetic oligonucleotide
  Antisense strand to SEQ ID NO: 673294
aauguccuaggucaguagu

SEQ ID NO: 673296 - RNA, 19 nt, Artificial Sequence
  Description of Artificial Sequence: Synthetic oligonucleotide
  Sense strand starting at position 3381 of SEQ ID NO: 585858
cagagcugugucuggaaua

SEQ ID NO: 673297 - RNA, 19 nt, Artificial Sequence
  Description of Artificial Sequence: Synthetic oligonucleotide
  Antisense strand to SEQ ID NO: 673296
uauuccagacacagcucug

SEQ ID NO: 673298 - RNA, 19 nt, Artificial Sequence
  Description of Artificial Sequence: Synthetic oligonucleotide
  Sense strand starting at position 3394 of SEQ ID NO: 585858
ggaauaggguucuuggucu

SEQ ID NO: 673299 - RNA, 19 nt, Artificial Sequence
  Description of Artificial Sequence: Synthetic oligonucleotide
  Antisense strand to SEQ ID NO: 673298
agaccaagaacccuauucc

SEQ ID NO: 673300 - RNA, 19 nt, Artificial Sequence
  Description of Artificial Sequence: Synthetic oligonucleotide
  Sense strand starting at position 3460 of SEQ ID NO: 585858
guucuuaaaguccagaguu

SEQ ID NO: 673301 - RNA, 19 nt, Artificial Sequence
  Description of Artificial Sequence: Synthetic oligonucleotide
  Antisense strand to SEQ ID NO: 673300
aacucuggacuuuaagaac

SEQ ID NO: 673302 - RNA, 19 nt, Artificial Sequence
  Description of Artificial Sequence: Synthetic oligonucleotide
  Sense strand starting at position 36 of SEQ ID NO: 585859
ucauuaaccuuggaugagu

SEQ ID NO: 673303 - RNA, 19 nt, Artificial Sequence
  Description of Artificial Sequence: Synthetic oligonucleotide
  Antisense strand to SEQ ID NO: 673302
acucauccaagguuaauga

SEQ ID NO: 673304 - RNA, 19 nt, Artificial Sequence
  Description of Artificial Sequence: Synthetic oligonucleotide
  Sense strand starting at position 47 of SEQ ID NO: 585859
ggaugagucccaggaaccu

SEQ ID NO: 673305 - RNA, 19 nt, Artificial Sequence
  Description of Artificial Sequence: Synthetic oligonucleotide
  Antisense strand to SEQ ID NO: 673304
agguuccugggacucaucc

SEQ ID NO: 673306 - RNA, 19 nt, Artificial Sequence
  Description of Artificial Sequence: Synthetic oligonucleotide
  Sense strand starting at position 132 of SEQ ID NO: 585859
guaacacugccuuaaauga

SEQ ID NO: 673307 - RNA, 19 nt, Artificial Sequence
  Description of Artificial Sequence: Synthetic oligonucleotide
  Antisense strand to SEQ ID NO: 673306
ucauuuaaggcaguguuac

SEQ ID NO: 673308 - RNA, 19 nt, Artificial Sequence
  Description of Artificial Sequence: Synthetic oligonucleotide
  Sense strand starting at position 140 of SEQ ID NO: 585859
gccuuaaaugaugguguuu

SEQ ID NO: 673309 - RNA, 19 nt, Artificial Sequence
  Description of Artificial Sequence: Synthetic oligonucleotide
  Antisense strand to SEQ ID NO: 673308
aaacaccaucauuuaaggc

SEQ ID NO: 673310 - RNA, 19 nt, Artificial Sequence
  Description of Artificial Sequence: Synthetic oligonucleotide
  Sense strand starting at position 149 of SEQ ID NO: 585859
gaugguguuucccagcauu

SEQ ID NO: 673311 - RNA, 19 nt, Artificial Sequence
  Description of Artificial Sequence: Synthetic oligonucleotide
  Antisense strand to SEQ ID NO: 673310
aaugcugggaaacaccauc

SEQ ID NO: 673312 - RNA, 19 nt, Artificial Sequence
  Description of Artificial Sequence: Synthetic oligonucleotide
  Sense strand starting at position 301 of SEQ ID NO: 585859
gagagauagccauagcuuu

SEQ ID NO: 673313 - RNA, 19 nt, Artificial Sequence
  Description of Artificial Sequence: Synthetic oligonucleotide
  Antisense strand to SEQ ID NO: 673312
aaagcuauggcuaucucuc

SEQ ID NO: 673314 - RNA, 19 nt, Artificial Sequence
  Description of Artificial Sequence: Synthetic oligonucleotide
  Sense strand starting at position 442 of SEQ ID NO: 585859
uuaucacuggcccagaauu

SEQ ID NO: 673315 - RNA, 19 nt, Artificial Sequence
  Description of Artificial Sequence: Synthetic oligonucleotide
  Antisense strand to SEQ ID NO: 673314
aauucugggccagugauaa

SEQ ID NO: 673316 - RNA, 19 nt, Artificial Sequence
  Description of Artificial Sequence: Synthetic oligonucleotide
  Sense strand starting at position 450 of SEQ ID NO: 585859
ggcccagaauucucuccaa

SEQ ID NO: 673317 - RNA, 19 nt, Artificial Sequence
  Description of Artificial Sequence: Synthetic oligonucleotide
  Antisense strand to SEQ ID NO: 673316
uuggagagaauucugggcc

SEQ ID NO: 673318 - RNA, 19 nt, Artificial Sequence
  Description of Artificial Sequence: Synthetic oligonucleotide
  Sense strand starting at position 484 of SEQ ID NO: 585859
gucuaauaccuuugucuuu

SEQ ID NO: 673319 - RNA, 19 nt, Artificial Sequence
  Description of Artificial Sequence: Synthetic oligonucleotide
  Antisense strand to SEQ ID NO: 673318
aaagacaaagguauuagac

SEQ ID NO: 673320 - RNA, 19 nt, Artificial Sequence
  Description of Artificial Sequence: Synthetic oligonucleotide
  Sense strand starting at position 546 of SEQ ID NO: 585859
acacauuaucuguagucca

SEQ ID NO: 673321 - RNA, 19 nt, Artificial Sequence
  Description of Artificial Sequence: Synthetic oligonucleotide
  Antisense strand to SEQ ID NO: 673320
uggacuacagauaaugugu

SEQ ID NO: 673322 - RNA, 19 nt, Artificial Sequence
  Description of Artificial Sequence: Synthetic oligonucleotide
  Sense strand starting at position 597 of SEQ ID NO: 585859
cgcagucaucuggaaaguc

SEQ ID NO: 673323 - RNA, 19 nt, Artificial Sequence
  Description of Artificial Sequence: Synthetic oligonucleotide
  Antisense strand to SEQ ID NO: 673322
gacuuuccagaugacugcg

SEQ ID NO: 673324 - RNA, 19 nt, Artificial Sequence
  Description of Artificial Sequence: Synthetic oligonucleotide
  Sense strand starting at position 605 of SEQ ID NO: 585859
ucuggaaagucugaguugu

SEQ ID NO: 673325 - RNA, 19 nt, Artificial Sequence
  Description of Artificial Sequence: Synthetic oligonucleotide
  Antisense strand to SEQ ID NO: 673324
acaacucagacuuuccaga

SEQ ID NO: 673326 - RNA, 19 nt, Artificial Sequence
  Description of Artificial Sequence: Synthetic oligonucleotide
  Sense strand starting at position 609 of SEQ ID NO: 585859
gaaagucugaguuguccug

SEQ ID NO: 673327 - RNA, 19 nt, Artificial Sequence
  Description of Artificial Sequence: Synthetic oligonucleotide
  Antisense strand to SEQ ID NO: 673326
caggacaacucagacuuuc

SEQ ID NO: 673328 - RNA, 19 nt, Artificial Sequence
  Description of Artificial Sequence: Synthetic oligonucleotide
  Sense strand starting at position 611 of SEQ ID NO: 585859
aagucugaguuguccugga

SEQ ID NO: 673329 - RNA, 19 nt, Artificial Sequence
  Description of Artificial Sequence: Synthetic oligonucleotide
  Antisense strand to SEQ ID NO: 673328
uccaggacaacucagacuu

SEQ ID NO: 673330 - RNA, 19 nt, Artificial Sequence
  Description of Artificial Sequence: Synthetic oligonucleotide
  Sense strand starting at position 792 of SEQ ID NO: 585859
gccucaguguaagauggaa

SEQ ID NO: 673331 - RNA, 19 nt, Artificial Sequence
  Description of Artificial Sequence: Synthetic oligonucleotide
  Antisense strand to SEQ ID NO: 673330
uuccaucuuacacugaggc

SEQ ID NO: 673332 - RNA, 19 nt, Artificial Sequence
  Description of Artificial Sequence: Synthetic oligonucleotide
  Sense strand starting at position 931 of SEQ ID NO: 585859
uuugaaaugcccuguacua

SEQ ID NO: 673333 - RNA, 19 nt, Artificial Sequence
  Description of Artificial Sequence: Synthetic oligonucleotide
  Antisense strand to SEQ ID NO: 673332
uaguacagggcauuucaaa

SEQ ID NO: 673334 - RNA, 19 nt, Artificial Sequence
  Description of Artificial Sequence: Synthetic oligonucleotide
  Sense strand starting at position 1007 of SEQ ID NO: 585859
gccugaaaggccuaaugcu

SEQ ID NO: 673335 - RNA, 19 nt, Artificial Sequence
  Description of Artificial Sequence: Synthetic oligonucleotide
  Antisense strand to SEQ ID NO: 673334
agcauuaggccuuucaggc

SEQ ID NO: 673336 - RNA, 19 nt, Artificial Sequence
  Description of Artificial Sequence: Synthetic oligonucleotide
  Sense strand starting at position 1014 of SEQ ID NO: 585859
aggccuaaugcuugcugaa

SEQ ID NO: 673337 - RNA, 19 nt, Artificial Sequence
  Description of Artificial Sequence: Synthetic oligonucleotide
  Antisense strand to SEQ ID NO: 673336
uucagcaagcauuaggccu

SEQ ID NO: 673338 - RNA, 19 nt, Artificial Sequence
  Description of Artificial Sequence: Synthetic oligonucleotide
  Sense strand starting at position 1245 of SEQ ID NO: 585859
cgacccugggcagauaaau

SEQ ID NO: 673339 - RNA, 19 nt, Artificial Sequence
  Description of Artificial Sequence: Synthetic oligonucleotide
  Antisense strand to SEQ ID NO: 673338
auuuaucugcccagggucg

SEQ ID NO: 673340 - RNA, 19 nt, Artificial Sequence
  Description of Artificial Sequence: Synthetic oligonucleotide
  Sense strand starting at position 2108 of SEQ ID NO: 585859
uggcucgcuuaguccuaaa

SEQ ID NO: 673341 - RNA, 19 nt, Artificial Sequence
  Description of Artificial Sequence: Synthetic oligonucleotide
  Antisense strand to SEQ ID NO: 673340
uuuaggacuaagcgagcca

SEQ ID NO: 673342 - RNA, 19 nt, Artificial Sequence
  Description of Artificial Sequence: Synthetic oligonucleotide
  Sense strand starting at position 2111 of SEQ ID NO: 585859
cucgcuuaguccuaaacca

SEQ ID NO: 673343 - RNA, 19 nt, Artificial Sequence
  Description of Artificial Sequence: Synthetic oligonucleotide
  Antisense strand to SEQ ID NO: 673342
ugguuuaggacuaagcgag

SEQ ID NO: 673344 - RNA, 19 nt, Artificial Sequence
  Description of Artificial Sequence: Synthetic oligonucleotide
  Sense strand starting at position 2141 of SEQ ID NO: 585859
ccaggccuccucuguagaa

SEQ ID NO: 673345 - RNA, 19 nt, Artificial Sequence
  Description of Artificial Sequence: Synthetic oligonucleotide
  Antisense strand to SEQ ID NO: 673344
uucuacagaggaggccugg

SEQ ID NO: 673346 - RNA, 19 nt, Artificial Sequence
  Description of Artificial Sequence: Synthetic oligonucleotide
  Sense strand starting at position 2142 of SEQ ID NO: 585859
caggccuccucuguagaau

SEQ ID NO: 673347 - RNA, 19 nt, Artificial Sequence
  Description of Artificial Sequence: Synthetic oligonucleotide
  Antisense strand to SEQ ID NO: 673346
auucuacagaggaggccug

SEQ ID NO: 673348 - RNA, 19 nt, Artificial Sequence
  Description of Artificial Sequence: Synthetic oligonucleotide
  Sense strand starting at position 2239 of SEQ ID NO: 585859
agcugagccucggaacaaa

SEQ ID NO: 673349 - RNA, 19 nt, Artificial Sequence
  Description of Artificial Sequence: Synthetic oligonucleotide
  Antisense strand to SEQ ID NO: 673348
uuuguuccgaggcucagcu

SEQ ID NO: 673350 - RNA, 19 nt, Artificial Sequence
  Description of Artificial Sequence: Synthetic oligonucleotide
  Sense strand starting at position 2365 of SEQ ID NO: 585859
acgccaguaccauggagau

SEQ ID NO: 673351 - RNA, 19 nt, Artificial Sequence
  Description of Artificial Sequence: Synthetic oligonucleotide
  Antisense strand to SEQ ID NO: 673350
aucuccaugguacuggcgu

SEQ ID NO: 673352 - RNA, 19 nt, Artificial Sequence
  Description of Artificial Sequence: Synthetic oligonucleotide
  Sense strand starting at position 2450 of SEQ ID NO: 585859
gacggauacccggaucgau

SEQ ID NO: 673353 - RNA, 19 nt, Artificial Sequence
  Description of Artificial Sequence: Synthetic oligonucleotide
  Antisense strand to SEQ ID NO: 673352
aucgauccggguauccguc

SEQ ID NO: 673354 - RNA, 19 nt, Artificial Sequence
  Description of Artificial Sequence: Synthetic oligonucleotide
  Sense strand starting at position 2842 of SEQ ID NO: 585859
cacuauaccugagugaagu

SEQ ID NO: 673355 - RNA, 19 nt, Artificial Sequence
  Description of Artificial Sequence: Synthetic oligonucleotide
  Antisense strand to SEQ ID NO: 673354
acuucacucagguauagug

SEQ ID NO: 673356 - RNA, 19 nt, Artificial Sequence
  Description of Artificial Sequence: Synthetic oligonucleotide
  Sense strand starting at position 2914 of SEQ ID NO: 585859
agcuuauguacaugggaua

SEQ ID NO: 673357 - RNA, 19 nt, Artificial Sequence
  Description of Artificial Sequence: Synthetic oligonucleotide
  Antisense strand to SEQ ID NO: 673356
uaucccauguacauaagcu

SEQ ID NO: 673358 - RNA, 19 nt, Artificial Sequence
  Description of Artificial Sequence: Synthetic oligonucleotide
  Sense strand starting at position 2917 of SEQ ID NO: 585859
uuauguacaugggauacaa

SEQ ID NO: 673359 - RNA, 19 nt, Artificial Sequence
  Description of Artificial Sequence: Synthetic oligonucleotide
  Antisense strand to SEQ ID NO: 673358
uuguaucccauguacauaa

SEQ ID NO: 673360 - RNA, 19 nt, Artificial Sequence
  Description of Artificial Sequence: Synthetic oligonucleotide
  Sense strand starting at position 3094 of SEQ ID NO: 585859
ggccuucugcucugugcua

SEQ ID NO: 673361 - RNA, 19 nt, Artificial Sequence
  Description of Artificial Sequence: Synthetic oligonucleotide
  Antisense strand to SEQ ID NO: 673360
uagcacagagcagaaggcc

SEQ ID NO: 673362 - RNA, 19 nt, Artificial Sequence
  Description of Artificial Sequence: Synthetic oligonucleotide
  Sense strand starting at position 3287 of SEQ ID NO: 585859
gcgagagcuuaggcuugaa

SEQ ID NO: 673363 - RNA, 19 nt, Artificial Sequence
  Description of Artificial Sequence: Synthetic oligonucleotide
  Antisense strand to SEQ ID NO: 673362
uucaagccuaagcucucgc

SEQ ID NO: 673364 - RNA, 19 nt, Artificial Sequence
  Description of Artificial Sequence: Synthetic oligonucleotide
  Sense strand starting at position 3297 of SEQ ID NO: 585859
aggcuugaaggcugggaaa

SEQ ID NO: 673365 - RNA, 19 nt, Artificial Sequence
  Description of Artificial Sequence: Synthetic oligonucleotide
  Antisense strand to SEQ ID NO: 673364
uuucccagccuucaagccu

SEQ ID NO: 673366 - RNA, 19 nt, Artificial Sequence
  Description of Artificial Sequence: Synthetic oligonucleotide
  Sense strand starting at position 3402 of SEQ ID NO: 585859
cugaaauggugggcucagu

SEQ ID NO: 673367 - RNA, 19 nt, Artificial Sequence
  Description of Artificial Sequence: Synthetic oligonucleotide
  Antisense strand to SEQ ID NO: 673366
acugagcccaccauuucag

SEQ ID NO: 673368 - RNA, 19 nt, Artificial Sequence
  Description of Artificial Sequence: Synthetic oligonucleotide
  Sense strand starting at position 3502 of SEQ ID NO: 585859
ccaugaagauguuugaaua

SEQ ID NO: 673369 - RNA, 19 nt, Artificial Sequence
  Description of Artificial Sequence: Synthetic oligonucleotide
  Antisense strand to SEQ ID NO: 673368
uauucaaacaucuucaugg

SEQ ID NO: 673370 - RNA, 19 nt, Artificial Sequence
  Description of Artificial Sequence: Synthetic oligonucleotide
  Sense strand starting at position 3503 of SEQ ID NO: 585859
caugaagauguuugaauau

SEQ ID NO: 673371 - RNA, 19 nt, Artificial Sequence
  Description of Artificial Sequence: Synthetic oligonucleotide
  Antisense strand to SEQ ID NO: 673370
auauucaaacaucuucaug

SEQ ID NO: 673372 - RNA, 19 nt, Artificial Sequence
  Description of Artificial Sequence: Synthetic oligonucleotide
  Sense strand starting at position 3512 of SEQ ID NO: 585859
guuugaauaugucagggua

SEQ ID NO: 673373 - RNA, 19 nt, Artificial Sequence
  Description of Artificial Sequence: Synthetic oligonucleotide
  Antisense strand to SEQ ID NO: 673372
uacccugacauauucaaac

SEQ ID NO: 673374 - RNA, 19 nt, Artificial Sequence
  Description of Artificial Sequence: Synthetic oligonucleotide
  Sense strand starting at position 3514 of SEQ ID NO: 585859
uugaauaugucaggguaag

SEQ ID NO: 673375 - RNA, 19 nt, Artificial Sequence
  Description of Artificial Sequence: Synthetic oligonucleotide
  Antisense strand to SEQ ID NO: 673374
cuuacccugacauauucaa

SEQ ID NO: 673376 - RNA, 19 nt, Artificial Sequence
  Description of Artificial Sequence: Synthetic oligonucleotide
  Sense strand starting at position 3515 of SEQ ID NO: 585859
ugaauaugucaggguaagg

SEQ ID NO: 673377 - RNA, 19 nt, Artificial Sequence
  Description of Artificial Sequence: Synthetic oligonucleotide
  Antisense strand to SEQ ID NO: 673376
ccuuacccugacauauuca

SEQ ID NO: 673378 - RNA, 19 nt, Artificial Sequence
  Description of Artificial Sequence: Synthetic oligonucleotide
  Sense strand starting at position 3924 of SEQ ID NO: 585859
gcccauaugguauguggaa

SEQ ID NO: 673379 - RNA, 19 nt, Artificial Sequence
  Description of Artificial Sequence: Synthetic oligonucleotide
  Antisense strand to SEQ ID NO: 673378
uuccacauaccauaugggc

SEQ ID NO: 673380 - RNA, 19 nt, Artificial Sequence
  Description of Artificial Sequence: Synthetic oligonucleotide
  Sense strand starting at position 3933 of SEQ ID NO: 585859
guauguggaagcuaugacu

SEQ ID NO: 673381 - RNA, 19 nt, Artificial Sequence
  Description of Artificial Sequence: Synthetic oligonucleotide
  Antisense strand to SEQ ID NO: 673380
agucauagcuuccacauac

SEQ ID NO: 673382 - RNA, 19 nt, Artificial Sequence
  Description of Artificial Sequence: Synthetic oligonucleotide
  Sense strand starting at position 2001 of SEQ ID NO: 585860
gugcauuuggucugaagac

SEQ ID NO: 673383 - RNA, 19 nt, Artificial Sequence
  Description of Artificial Sequence: Synthetic oligonucleotide
  Antisense strand to SEQ ID NO: 673382
gucuucagaccaaaugcac

SEQ ID NO: 673384 - RNA, 19 nt, Artificial Sequence
  Description of Artificial Sequence: Synthetic oligonucleotide
  Sense strand starting at position 2002 of SEQ ID NO: 585860
ugcauuuggucugaagaca

SEQ ID NO: 673385 - RNA, 19 nt, Artificial Sequence
  Description of Artificial Sequence: Synthetic oligonucleotide
  Antisense strand to SEQ ID NO: 673384
ugucuucagaccaaaugca

SEQ ID NO: 673386 - RNA, 19 nt, Artificial Sequence
  Description of Artificial Sequence: Synthetic oligonucleotide
  Sense strand starting at position 208 of SEQ ID NO: 585861
aggacuauccaucaggcuu

SEQ ID NO: 673387 - RNA, 19 nt, Artificial Sequence
  Description of Artificial Sequence: Synthetic oligonucleotide
  Antisense strand to SEQ ID NO: 673386
aagccugauggauaguccu

SEQ ID NO: 673388 - RNA, 19 nt, Artificial Sequence
  Description of Artificial Sequence: Synthetic oligonucleotide
  Sense strand starting at position 313 of SEQ ID NO: 585861
ggaaauaauagguggcuga

SEQ ID NO: 673389 - RNA, 19 nt, Artificial Sequence
  Description of Artificial Sequence: Synthetic oligonucleotide
  Antisense strand to SEQ ID NO: 673388
ucagccaccuauuauuucc

SEQ ID NO: 673390 - RNA, 19 nt, Artificial Sequence
  Description of Artificial Sequence: Synthetic oligonucleotide
  Sense strand starting at position 317 of SEQ ID NO: 585861
auaauagguggcugaggaa

SEQ ID NO: 673391 - RNA, 19 nt, Artificial Sequence
  Description of Artificial Sequence: Synthetic oligonucleotide
  Antisense strand to SEQ ID NO: 673390
uuccucagccaccuauuau

SEQ ID NO: 673392 - RNA, 19 nt, Artificial Sequence
  Description of Artificial Sequence: Synthetic oligonucleotide
  Sense strand starting at position 471 of SEQ ID NO: 585861
cugacuuuacaaugguacu

SEQ ID NO: 673393 - RNA, 19 nt, Artificial Sequence
  Description of Artificial Sequence: Synthetic oligonucleotide
  Antisense strand to SEQ ID NO: 673392
aguaccauuguaaagucag

SEQ ID NO: 673394 - RNA, 19 nt, Artificial Sequence
  Description of Artificial Sequence: Synthetic oligonucleotide
  Sense strand starting at position 477 of SEQ ID NO: 585861
uuacaaugguacucuguga

SEQ ID NO: 673395 - RNA, 19 nt, Artificial Sequence
  Description of Artificial Sequence: Synthetic oligonucleotide
  Antisense strand to SEQ ID NO: 673394
ucacagaguaccauuguaa

SEQ ID NO: 673396 - RNA, 19 nt, Artificial Sequence
  Description of Artificial Sequence: Synthetic oligonucleotide
  Sense strand starting at position 481 of SEQ ID NO: 585861
aaugguacucugugaucac

SEQ ID NO: 673397 - RNA, 19 nt, Artificial Sequence
  Description of Artificial Sequence: Synthetic oligonucleotide
  Antisense strand to SEQ ID NO: 673396
gugaucacagaguaccauu

SEQ ID NO: 673398 - RNA, 19 nt, Artificial Sequence
  Description of Artificial Sequence: Synthetic oligonucleotide
  Sense strand starting at position 484 of SEQ ID NO: 585861
gguacucugugaucacuau

SEQ ID NO: 673399 - RNA, 19 nt, Artificial Sequence
  Description of Artificial Sequence: Synthetic oligonucleotide
  Antisense strand to SEQ ID NO: 673398
auagugaucacagaguacc

SEQ ID NO: 673400 - RNA, 19 nt, Artificial Sequence
  Description of Artificial Sequence: Synthetic oligonucleotide
  Sense strand starting at position 485 of SEQ ID NO: 585861
guacucugugaucacuaua

SEQ ID NO: 673401 - RNA, 19 nt, Artificial Sequence
  Description of Artificial Sequence: Synthetic oligonucleotide
  Antisense strand to SEQ ID NO: 673400
uauagugaucacagaguac

SEQ ID NO: 673402 - RNA, 19 nt, Artificial Sequence
  Description of Artificial Sequence: Synthetic oligonucleotide
  Sense strand starting at position 526 of SEQ ID NO: 585861
ggacuuuauuucuuugcga

SEQ ID NO: 673403 - RNA, 19 nt, Artificial Sequence
  Description of Artificial Sequence: Synthetic oligonucleotide
  Antisense strand to SEQ ID NO: 673402
ucgcaaagaaauaaagucc

SEQ ID NO: 673404 - RNA, 19 nt, Artificial Sequence
  Description of Artificial Sequence: Synthetic oligonucleotide
  Sense strand starting at position 527 of SEQ ID NO: 585861
gacuuuauuucuuugcgac

SEQ ID NO: 673405 - RNA, 19 nt, Artificial Sequence
  Description of Artificial Sequence: Synthetic oligonucleotide
  Antisense strand to SEQ ID NO: 673404
gucgcaaagaaauaaaguc

SEQ ID NO: 673406 - RNA, 19 nt, Artificial Sequence
  Description of Artificial Sequence: Synthetic oligonucleotide
  Sense strand starting at position 528 of SEQ ID NO: 585861
acuuuauuucuuugcgacu

SEQ ID NO: 673407 - RNA, 19 nt, Artificial Sequence
  Description of Artificial Sequence: Synthetic oligonucleotide
  Antisense strand to SEQ ID NO: 673406
agucgcaaagaaauaaagu

SEQ ID NO: 673408 - RNA, 19 nt, Artificial Sequence
  Description of Artificial Sequence: Synthetic oligonucleotide
  Sense strand starting at position 588 of SEQ ID NO: 585861
cuaagauuauugcuuaagu

SEQ ID NO: 673409 - RNA, 19 nt, Artificial Sequence
  Description of Artificial Sequence: Synthetic oligonucleotide
  Antisense strand to SEQ ID NO: 673408
acuuaagcaauaaucuuag

SEQ ID NO: 673410 - RNA, 19 nt, Artificial Sequence
  Description of Artificial Sequence: Synthetic oligonucleotide
  Sense strand starting at position 783 of SEQ ID NO: 585861
uguccauuccuaggaguuu

SEQ ID NO: 673411 - RNA, 19 nt, Artificial Sequence
  Description of Artificial Sequence: Synthetic oligonucleotide
  Antisense strand to SEQ ID NO: 673410
aaacuccuaggaauggaca

SEQ ID NO: 673412 - RNA, 19 nt, Artificial Sequence
  Description of Artificial Sequence: Synthetic oligonucleotide
  Sense strand starting at position 792 of SEQ ID NO: 585861
cuaggaguuuaugugugau

SEQ ID NO: 673413 - RNA, 19 nt, Artificial Sequence
  Description of Artificial Sequence: Synthetic oligonucleotide
  Antisense strand to SEQ ID NO: 673412
aucacacauaaacuccuag

SEQ ID NO: 673414 - RNA, 19 nt, Artificial Sequence
  Description of Artificial Sequence: Synthetic oligonucleotide
  Sense strand starting at position 828 of SEQ ID NO: 585861
caugaaaugguuugcuaua

SEQ ID NO: 673415 - RNA, 19 nt, Artificial Sequence
  Description of Artificial Sequence: Synthetic oligonucleotide
  Antisense strand to SEQ ID NO: 673414
uauagcaaaccauuucaug

SEQ ID NO: 673416 - RNA, 19 nt, Artificial Sequence
  Description of Artificial Sequence: Synthetic oligonucleotide
  Sense strand starting at position 829 of SEQ ID NO: 585861
augaaaugguuugcuauag

SEQ ID NO: 673417 - RNA, 19 nt, Artificial Sequence
  Description of Artificial Sequence: Synthetic oligonucleotide
  Antisense strand to SEQ ID NO: 673416
cuauagcaaaccauuucau

SEQ ID NO: 673418 - RNA, 19 nt, Artificial Sequence
  Description of Artificial Sequence: Synthetic oligonucleotide
  Sense strand starting at position 1041 of SEQ ID NO: 585861
agaacaaguuucucuccga

SEQ ID NO: 673419 - RNA, 19 nt, Artificial Sequence
  Description of Artificial Sequence: Synthetic oligonucleotide
  Antisense strand to SEQ ID NO: 673418
ucggagagaaacuuguucu

SEQ ID NO: 673420 - RNA, 19 nt, Artificial Sequence
  Description of Artificial Sequence: Synthetic oligonucleotide
  Sense strand starting at position 1068 of SEQ ID NO: 585861
gucguuucagaaugaacug

SEQ ID NO: 673421 - RNA, 19 nt, Artificial Sequence
  Description of Artificial Sequence: Synthetic oligonucleotide
  Antisense strand to SEQ ID NO: 673420
caguucauucugaaacgac

SEQ ID NO: 673422 - RNA, 19 nt, Artificial Sequence
  Description of Artificial Sequence: Synthetic oligonucleotide
  Sense strand starting at position 1373 of SEQ ID NO: 585861
gaccgagaucccugaggga

SEQ ID NO: 673423 - RNA, 19 nt, Artificial Sequence
  Description of Artificial Sequence: Synthetic oligonucleotide
  Antisense strand to SEQ ID NO: 673422
ucccucagggaucucgguc

SEQ ID NO: 673424 - RNA, 19 nt, Artificial Sequence
  Description of Artificial Sequence: Synthetic oligonucleotide
  Sense strand starting at position 1592 of SEQ ID NO: 585861
gagguuagggcuugaaaga

SEQ ID NO: 673425 - RNA, 19 nt, Artificial Sequence
  Description of Artificial Sequence: Synthetic oligonucleotide
  Antisense strand to SEQ ID NO: 673424
ucuuucaagcccuaaccuc

SEQ ID NO: 673426 - RNA, 19 nt, Artificial Sequence
  Description of Artificial Sequence: Synthetic oligonucleotide
  Sense strand starting at position 1774 of SEQ ID NO: 585861
cggccaguagucucgacuu

SEQ ID NO: 673427 - RNA, 19 nt, Artificial Sequence
  Description of Artificial Sequence: Synthetic oligonucleotide
  Antisense strand to SEQ ID NO: 673426
aagucgagacuacuggccg

SEQ ID NO: 673428 - RNA, 19 nt, Artificial Sequence
  Description of Artificial Sequence: Synthetic oligonucleotide
  Sense strand starting at position 1776 of SEQ ID NO: 585861
gccaguagucucgacuuga

SEQ ID NO: 673429 - RNA, 19 nt, Artificial Sequence
  Description of Artificial Sequence: Synthetic oligonucleotide
  Antisense strand to SEQ ID NO: 673428
ucaagucgagacuacuggc

SEQ ID NO: 673430 - RNA, 19 nt, Artificial Sequence
  Description of Artificial Sequence: Synthetic oligonucleotide
  Sense strand starting at position 2301 of SEQ ID NO: 585861
uucucaaagccaggaaauu

SEQ ID NO: 673431 - RNA, 19 nt, Artificial Sequence
  Description of Artificial Sequence: Synthetic oligonucleotide
  Antisense strand to SEQ ID NO: 673430
aauuuccuggcuuugagaa

SEQ ID NO: 673432 - RNA, 19 nt, Artificial Sequence
  Description of Artificial Sequence: Synthetic oligonucleotide
  Sense strand starting at position 2318 of SEQ ID NO: 585861
uugacauucgcacaauaca

SEQ ID NO: 673433 - RNA, 19 nt, Artificial Sequence
  Description of Artificial Sequence: Synthetic oligonucleotide
  Antisense strand to SEQ ID NO: 673432
uguauugugcgaaugucaa

SEQ ID NO: 673434 - RNA, 19 nt, Artificial Sequence
  Description of Artificial Sequence: Synthetic oligonucleotide
  Sense strand starting at position 2387 of SEQ ID NO: 585861
agaccacacucggauuuaa

SEQ ID NO: 673435 - RNA, 19 nt, Artificial Sequence
  Description of Artificial Sequence: Synthetic oligonucleotide
  Antisense strand to SEQ ID NO: 673434
uuaaauccgaguguggucu

SEQ ID NO: 673436 - RNA, 19 nt, Artificial Sequence
  Description of Artificial Sequence: Synthetic oligonucleotide
  Sense strand starting at position 2445 of SEQ ID NO: 585861
uguguaguucuaugaaaug

SEQ ID NO: 673437 - RNA, 19 nt, Artificial Sequence
  Description of Artificial Sequence: Synthetic oligonucleotide
  Antisense strand to SEQ ID NO: 673436
cauuucauagaacuacaca

SEQ ID NO: 673438 - RNA, 19 nt, Artificial Sequence
  Description of Artificial Sequence: Synthetic oligonucleotide
  Sense strand starting at position 2455 of SEQ ID NO: 585861
uaugaaauguugucaccug

SEQ ID NO: 673439 - RNA, 19 nt, Artificial Sequence
  Description of Artificial Sequence: Synthetic oligonucleotide
  Antisense strand to SEQ ID NO: 673438
caggugacaacauuucaua

SEQ ID NO: 673440 - RNA, 19 nt, Artificial Sequence
  Description of Artificial Sequence: Synthetic oligonucleotide
  Sense strand starting at position 2565 of SEQ ID NO: 585861
gggauaaggugagcucuca

SEQ ID NO: 673441 - RNA, 19 nt, Artificial Sequence
  Description of Artificial Sequence: Synthetic oligonucleotide
  Antisense strand to SEQ ID NO: 673440
ugagagcucaccuuauccc

SEQ ID NO: 673442 - RNA, 19 nt, Artificial Sequence
  Description of Artificial Sequence: Synthetic oligonucleotide
  Sense strand starting at position 2718 of SEQ ID NO: 585861
guuucuugagaauggagca

SEQ ID NO: 673443 - RNA, 19 nt, Artificial Sequence
  Description of Artificial Sequence: Synthetic oligonucleotide
  Antisense strand to SEQ ID NO: 673442
ugcuccauucucaagaaac

SEQ ID NO: 673444 - RNA, 19 nt, Artificial Sequence
  Description of Artificial Sequence: Synthetic oligonucleotide
  Sense strand starting at position 2757 of SEQ ID NO: 585861
ugucaagcuccuggaaacu

SEQ ID NO: 673445 - RNA, 19 nt, Artificial Sequence
  Description of Artificial Sequence: Synthetic oligonucleotide
  Antisense strand to SEQ ID NO: 673444
aguuuccaggagcuugaca

SEQ ID NO: 673446 - RNA, 19 nt, Artificial Sequence
  Description of Artificial Sequence: Synthetic oligonucleotide
  Sense strand starting at position 2785 of SEQ ID NO: 585861
gagacauggucccugacug

SEQ ID NO: 673447 - RNA, 19 nt, Artificial Sequence
  Description of Artificial Sequence: Synthetic oligonucleotide
  Antisense strand to SEQ ID NO: 673446
cagucagggaccaugucuc

SEQ ID NO: 673448 - RNA, 19 nt, Artificial Sequence
  Description of Artificial Sequence: Synthetic oligonucleotide
  Sense strand starting at position 2833 of SEQ ID NO: 585861
gaagcaugugcugcgaguu

SEQ ID NO: 673449 - RNA, 19 nt, Artificial Sequence
  Description of Artificial Sequence: Synthetic oligonucleotide
  Antisense strand to SEQ ID NO: 673448
aacucgcagcacaugcuuc

SEQ ID NO: 673450 - RNA, 19 nt, Artificial Sequence
  Description of Artificial Sequence: Synthetic oligonucleotide
  Sense strand starting at position 3191 of SEQ ID NO: 585861
cugucucaaucagucacua

SEQ ID NO: 673451 - RNA, 19 nt, Artificial Sequence
  Description of Artificial Sequence: Synthetic oligonucleotide
  Antisense strand to SEQ ID NO: 673450
uagugacugauugagacag

SEQ ID NO: 673452 - RNA, 19 nt, Artificial Sequence
  Description of Artificial Sequence: Synthetic oligonucleotide
  Sense strand starting at position 3310 of SEQ ID NO: 585861
auaauaguccaagaugucu

SEQ ID NO: 673453 - RNA, 19 nt, Artificial Sequence
  Description of Artificial Sequence: Synthetic oligonucleotide
  Antisense strand to SEQ ID NO: 673452
agacaucuuggacuauuau

SEQ ID NO: 673454 - RNA, 19 nt, Artificial Sequence
  Description of Artificial Sequence: Synthetic oligonucleotide
  Sense strand starting at position 3315 of SEQ ID NO: 585861
aguccaagaugucugcaua

SEQ ID NO: 673455 - RNA, 19 nt, Artificial Sequence
  Description of Artificial Sequence: Synthetic oligonucleotide
  Antisense strand to SEQ ID NO: 673454
uaugcagacaucuuggacu

SEQ ID NO: 673456 - RNA, 19 nt, Artificial Sequence
  Description of Artificial Sequence: Synthetic oligonucleotide
  Sense strand starting at position 3316 of SEQ ID NO: 585861
guccaagaugucugcauaa

SEQ ID NO: 673457 - RNA, 19 nt, Artificial Sequence
  Description of Artificial Sequence: Synthetic oligonucleotide
  Antisense strand to SEQ ID NO: 673456
uuaugcagacaucuuggac

SEQ ID NO: 673458 - RNA, 19 nt, Artificial Sequence
  Description of Artificial Sequence: Synthetic oligonucleotide
  Sense strand starting at position 3318 of SEQ ID NO: 585861
ccaagaugucugcauaaug

SEQ ID NO: 673459 - RNA, 19 nt, Artificial Sequence
  Description of Artificial Sequence: Synthetic oligonucleotide
  Antisense strand to SEQ ID NO: 673458
cauuaugcagacaucuugg

SEQ ID NO: 673460 - RNA, 19 nt, Artificial Sequence
  Description of Artificial Sequence: Synthetic oligonucleotide
  Sense strand starting at position 3328 of SEQ ID NO: 585861
ugcauaaugcuuuacaguu

SEQ ID NO: 673461 - RNA, 19 nt, Artificial Sequence
  Description of Artificial Sequence: Synthetic oligonucleotide
  Antisense strand to SEQ ID NO: 673460
aacuguaaagcauuaugca

SEQ ID NO: 673462 - RNA, 19 nt, Artificial Sequence
  Description of Artificial Sequence: Synthetic oligonucleotide
  Sense strand starting at position 3384 of SEQ ID NO: 585861
ucacuuuggcagugacaca

SEQ ID NO: 673463 - RNA, 19 nt, Artificial Sequence
  Description of Artificial Sequence: Synthetic oligonucleotide
  Antisense strand to SEQ ID NO: 673462
ugugucacugccaaaguga

SEQ ID NO: 673464 - RNA, 19 nt, Artificial Sequence
  Description of Artificial Sequence: Synthetic oligonucleotide
  Sense strand starting at position 3441 of SEQ ID NO: 585861
cuaagugacuugucugaau

SEQ ID NO: 673465 - RNA, 19 nt, Artificial Sequence
  Description of Artificial Sequence: Synthetic oligonucleotide
  Antisense strand to SEQ ID NO: 673464
auucagacaagucacuuag

SEQ ID NO: 673466 - RNA, 19 nt, Artificial Sequence
  Description of Artificial Sequence: Synthetic oligonucleotide
  Sense strand starting at position 35 of SEQ ID NO: 585862
uacguauuaguccaaagug

SEQ ID NO: 673467 - RNA, 19 nt, Artificial Sequence
  Description of Artificial Sequence: Synthetic oligonucleotide
  Antisense strand to SEQ ID NO: 673466
cacuuuggacuaauacgua

SEQ ID NO: 673468 - RNA, 19 nt, Artificial Sequence
  Description of Artificial Sequence: Synthetic oligonucleotide
  Sense strand starting at position 44 of SEQ ID NO: 585862
guccaaagugaucaugagu

SEQ ID NO: 673469 - RNA, 19 nt, Artificial Sequence
  Description of Artificial Sequence: Synthetic oligonucleotide
  Antisense strand to SEQ ID NO: 673468
acucaugaucacuuuggac

SEQ ID NO: 673470 - RNA, 19 nt, Artificial Sequence
  Description of Artificial Sequence: Synthetic oligonucleotide
  Sense strand starting at position 137 of SEQ ID NO: 585862
gugugagaugccuggaaga

SEQ ID NO: 673471 - RNA, 19 nt, Artificial Sequence
  Description of Artificial Sequence: Synthetic oligonucleotide
  Antisense strand to SEQ ID NO: 673470
ucuuccaggcaucucacac

SEQ ID NO: 673472 - RNA, 19 nt, Artificial Sequence
  Description of Artificial Sequence: Synthetic oligonucleotide
  Sense strand starting at position 153 of SEQ ID NO: 585862
agaacugagcccugagagu

SEQ ID NO: 673473 - RNA, 19 nt, Artificial Sequence
  Description of Artificial Sequence: Synthetic oligonucleotide
  Antisense strand to SEQ ID NO: 673472
acucucagggcucaguucu

SEQ ID NO: 673474 - RNA, 19 nt, Artificial Sequence
  Description of Artificial Sequence: Synthetic oligonucleotide
  Sense strand starting at position 174 of SEQ ID NO: 585862
uuugguuuagcagauccaa

SEQ ID NO: 673475 - RNA, 19 nt, Artificial Sequence
  Description of Artificial Sequence: Synthetic oligonucleotide
  Antisense strand to SEQ ID NO: 673474
uuggaucugcuaaaccaaa

SEQ ID NO: 673476 - RNA, 19 nt, Artificial Sequence
  Description of Artificial Sequence: Synthetic oligonucleotide
  Sense strand starting at position 693 of SEQ ID NO: 585862
gguaaugggucccuauaca

SEQ ID NO: 673477 - RNA, 19 nt, Artificial Sequence
  Description of Artificial Sequence: Synthetic oligonucleotide
  Antisense strand to SEQ ID NO: 673476
uguauagggacccauuacc

SEQ ID NO: 673478 - RNA, 19 nt, Artificial Sequence
  Description of Artificial Sequence: Synthetic oligonucleotide
  Sense strand starting at position 721 of SEQ ID NO: 585862
gcaguuucaggauggaaag

SEQ ID NO: 673479 - RNA, 19 nt, Artificial Sequence
  Description of Artificial Sequence: Synthetic oligonucleotide
  Antisense strand to SEQ ID NO: 673478
cuuuccauccugaaacugc

SEQ ID NO: 673480 - RNA, 19 nt, Artificial Sequence
  Description of Artificial Sequence: Synthetic oligonucleotide
  Sense strand starting at position 981 of SEQ ID NO: 585862
cggaaagguggccauaagu

SEQ ID NO: 673481 - RNA, 19 nt, Artificial Sequence
  Description of Artificial Sequence: Synthetic oligonucleotide
  Antisense strand to SEQ ID NO: 673480
acuuauggccaccuuuccg

SEQ ID NO: 673482 - RNA, 19 nt, Artificial Sequence
  Description of Artificial Sequence: Synthetic oligonucleotide
  Sense strand starting at position 1253 of SEQ ID NO: 585862
cccauaaugucucuagaag

SEQ ID NO: 673483 - RNA, 19 nt, Artificial Sequence
  Description of Artificial Sequence: Synthetic oligonucleotide
  Antisense strand to SEQ ID NO: 673482
cuucuagagacauuauggg

SEQ ID NO: 673484 - RNA, 19 nt, Artificial Sequence
  Description of Artificial Sequence: Synthetic oligonucleotide
  Sense strand starting at position 1308 of SEQ ID NO: 585862
agaguauuggaacgaaacu

SEQ ID NO: 673485 - RNA, 19 nt, Artificial Sequence
  Description of Artificial Sequence: Synthetic oligonucleotide
  Antisense strand to SEQ ID NO: 673484
aguuucguuccaauacucu

SEQ ID NO: 673486 - RNA, 19 nt, Artificial Sequence
  Description of Artificial Sequence: Synthetic oligonucleotide
  Sense strand starting at position 1395 of SEQ ID NO: 585862
cucucugggccucaugauu

SEQ ID NO: 673487 - RNA, 19 nt, Artificial Sequence
  Description of Artificial Sequence: Synthetic oligonucleotide
  Antisense strand to SEQ ID NO: 673486
aaucaugaggcccagagag

SEQ ID NO: 673488 - RNA, 19 nt, Artificial Sequence
  Description of Artificial Sequence: Synthetic oligonucleotide
  Sense strand starting at position 1532 of SEQ ID NO: 585862
cuaaccuucccucgagaau

SEQ ID NO: 673489 - RNA, 19 nt, Artificial Sequence
  Description of Artificial Sequence: Synthetic oligonucleotide
  Antisense strand to SEQ ID NO: 673488
auucucgagggaagguuag

SEQ ID NO: 673490 - RNA, 19 nt, Artificial Sequence
  Description of Artificial Sequence: Synthetic oligonucleotide
  Sense strand starting at position 1674 of SEQ ID NO: 585862
gccauauaucuguaucuau

SEQ ID NO: 673491 - RNA, 19 nt, Artificial Sequence
  Description of Artificial Sequence: Synthetic oligonucleotide
  Antisense strand to SEQ ID NO: 673490
auagauacagauauauggc

SEQ ID NO: 673492 - RNA, 19 nt, Artificial Sequence
  Description of Artificial Sequence: Synthetic oligonucleotide
  Sense strand starting at position 1739 of SEQ ID NO: 585862
ucuagucccgguuaagaca

SEQ ID NO: 673493 - RNA, 19 nt, Artificial Sequence
  Description of Artificial Sequence: Synthetic oligonucleotide
  Antisense strand to SEQ ID NO: 673492
ugucuuaaccgggacuaga

SEQ ID NO: 673494 - RNA, 19 nt, Artificial Sequence
  Description of Artificial Sequence: Synthetic oligonucleotide
  Sense strand starting at position 1747 of SEQ ID NO: 585862
cgguuaagacagcaguuaa

SEQ ID NO: 673495 - RNA, 19 nt, Artificial Sequence
  Description of Artificial Sequence: Synthetic oligonucleotide
  Antisense strand to SEQ ID NO: 673494
uuaacugcugucuuaaccg

SEQ ID NO: 673496 - RNA, 19 nt, Artificial Sequence
  Description of Artificial Sequence: Synthetic oligonucleotide
  Sense strand starting at position 1761 of SEQ ID NO: 585862
guuaaacaccggcagaaua

SEQ ID NO: 673497 - RNA, 19 nt, Artificial Sequence
  Description of Artificial Sequence: Synthetic oligonucleotide
  Antisense strand to SEQ ID NO: 673496
uauucugccgguguuuaac

SEQ ID NO: 673498 - RNA, 19 nt, Artificial Sequence
  Description of Artificial Sequence: Synthetic oligonucleotide
  Sense strand starting at position 2148 of SEQ ID NO: 585862
cccacuucccgcgcuuaaa

SEQ ID NO: 673499 - RNA, 19 nt, Artificial Sequence
  Description of Artificial Sequence: Synthetic oligonucleotide
  Antisense strand to SEQ ID NO: 673498
uuuaagcgcgggaaguggg

SEQ ID NO: 673500 - RNA, 19 nt, Artificial Sequence
  Description of Artificial Sequence: Synthetic oligonucleotide
  Sense strand starting at position 2203 of SEQ ID NO: 585862
caggaaugguugccacaau

SEQ ID NO: 673501 - RNA, 19 nt, Artificial Sequence
  Description of Artificial Sequence: Synthetic oligonucleotide
  Antisense strand to SEQ ID NO: 673500
auuguggcaaccauuccug

SEQ ID NO: 673502 - RNA, 19 nt, Artificial Sequence
  Description of Artificial Sequence: Synthetic oligonucleotide
  Sense strand starting at position 2282 of SEQ ID NO: 585862
gaagguuggaggugucuaa

SEQ ID NO: 673503 - RNA, 19 nt, Artificial Sequence
  Description of Artificial Sequence: Synthetic oligonucleotide
  Antisense strand to SEQ ID NO: 673502
uuagacaccuccaaccuuc

SEQ ID NO: 673504 - RNA, 19 nt, Artificial Sequence
  Description of Artificial Sequence: Synthetic oligonucleotide
  Sense strand starting at position 2286 of SEQ ID NO: 585862
guuggaggugucuaaauca

SEQ ID NO: 673505 - RNA, 19 nt, Artificial Sequence
  Description of Artificial Sequence: Synthetic oligonucleotide
  Antisense strand to SEQ ID NO: 673504
ugauuuagacaccuccaac

SEQ ID NO: 673506 - RNA, 19 nt, Artificial Sequence
  Description of Artificial Sequence: Synthetic oligonucleotide
  Sense strand starting at position 2494 of SEQ ID NO: 585862
agacacugucuguagugaa

SEQ ID NO: 673507 - RNA, 19 nt, Artificial Sequence
  Description of Artificial Sequence: Synthetic oligonucleotide
  Antisense strand to SEQ ID NO: 673506
uucacuacagacagugucu

SEQ ID NO: 673508 - RNA, 19 nt, Artificial Sequence
  Description of Artificial Sequence: Synthetic oligonucleotide
  Sense strand starting at position 2534 of SEQ ID NO: 585862
gcagguguccagucgcaga

SEQ ID NO: 673509 - RNA, 19 nt, Artificial Sequence
  Description of Artificial Sequence: Synthetic oligonucleotide
  Antisense strand to SEQ ID NO: 673508
ucugcgacuggacaccugc

SEQ ID NO: 673510 - RNA, 19 nt, Artificial Sequence
  Description of Artificial Sequence: Synthetic oligonucleotide
  Sense strand starting at position 2802 of SEQ ID NO: 585862
gaauuaaaucaagguguua

SEQ ID NO: 673511 - RNA, 19 nt, Artificial Sequence
  Description of Artificial Sequence: Synthetic oligonucleotide
  Antisense strand to SEQ ID NO: 673510
uaacaccuugauuuaauuc

SEQ ID NO: 673512 - RNA, 19 nt, Artificial Sequence
  Description of Artificial Sequence: Synthetic oligonucleotide
  Sense strand starting at position 2840 of SEQ ID NO: 585862
caggaagacugcuccaaug

SEQ ID NO: 673513 - RNA, 19 nt, Artificial Sequence
  Description of Artificial Sequence: Synthetic oligonucleotide
  Antisense strand to SEQ ID NO: 673512
cauuggagcagucuuccug

SEQ ID NO: 673514 - RNA, 19 nt, Artificial Sequence
  Description of Artificial Sequence: Synthetic oligonucleotide
  Sense strand starting at position 2858 of SEQ ID NO: 585862
gaggaucaaguuugucuuu

SEQ ID NO: 673515 - RNA, 19 nt, Artificial Sequence
  Description of Artificial Sequence: Synthetic oligonucleotide
  Antisense strand to SEQ ID NO: 673514
aaagacaaacuugauccuc

SEQ ID NO: 673516 - RNA, 19 nt, Artificial Sequence
  Description of Artificial Sequence: Synthetic oligonucleotide
  Sense strand starting at position 3010 of SEQ ID NO: 585862
acgggaagcuaguuaauga

SEQ ID NO: 673517 - RNA, 19 nt, Artificial Sequence
  Description of Artificial Sequence: Synthetic oligonucleotide
  Antisense strand to SEQ ID NO: 673516
ucauuaacuagcuucccgu

SEQ ID NO: 673518 - RNA, 19 nt, Artificial Sequence
  Description of Artificial Sequence: Synthetic oligonucleotide
  Sense strand starting at position 3011 of SEQ ID NO: 585862
cgggaagcuaguuaaugaa

SEQ ID NO: 673519 - RNA, 19 nt, Artificial Sequence
  Description of Artificial Sequence: Synthetic oligonucleotide
  Antisense strand to SEQ ID NO: 673518
uucauuaacuagcuucccg

SEQ ID NO: 673520 - RNA, 19 nt, Artificial Sequence
  Description of Artificial Sequence: Synthetic oligonucleotide
  Sense strand starting at position 3100 of SEQ ID NO: 585862
aggauucuuagagguguaa

SEQ ID NO: 673521 - RNA, 19 nt, Artificial Sequence
  Description of Artificial Sequence: Synthetic oligonucleotide
  Antisense strand to SEQ ID NO: 673520
uuacaccucuaagaauccu

SEQ ID NO: 673522 - RNA, 19 nt, Artificial Sequence
  Description of Artificial Sequence: Synthetic oligonucleotide
  Sense strand starting at position 3161 of SEQ ID NO: 585862
auaggaagcugauuacuua

SEQ ID NO: 673523 - RNA, 19 nt, Artificial Sequence
  Description of Artificial Sequence: Synthetic oligonucleotide
  Antisense strand to SEQ ID NO: 673522
uaaguaaucagcuuccuau

SEQ ID NO: 673524 - RNA, 19 nt, Artificial Sequence
  Description of Artificial Sequence: Synthetic oligonucleotide
  Sense strand starting at position 3375 of SEQ ID NO: 585862
uuaacucaugggugucaua

SEQ ID NO: 673525 - RNA, 19 nt, Artificial Sequence
  Description of Artificial Sequence: Synthetic oligonucleotide
  Antisense strand to SEQ ID NO: 673524
uaugacacccaugaguuaa

SEQ ID NO: 673526 - RNA, 19 nt, Artificial Sequence
  Description of Artificial Sequence: Synthetic oligonucleotide
  Sense strand starting at position 3435 of SEQ ID NO: 585862
cgauuagaauauuccaaca

SEQ ID NO: 673527 - RNA, 19 nt, Artificial Sequence
  Description of Artificial Sequence: Synthetic oligonucleotide
  Antisense strand to SEQ ID NO: 673526
uguuggaauauucuaaucg

SEQ ID NO: 673528 - RNA, 19 nt, Artificial Sequence
  Description of Artificial Sequence: Synthetic oligonucleotide
  Sense strand starting at position 3481 of SEQ ID NO: 585862
gcaaguugaauggauguuu

SEQ ID NO: 673529 - RNA, 19 nt, Artificial Sequence
  Description of Artificial Sequence: Synthetic oligonucleotide
  Antisense strand to SEQ ID NO: 673528
aaacauccauucaacuugc

SEQ ID NO: 673530 - RNA, 19 nt, Artificial Sequence
  Description of Artificial Sequence: Synthetic oligonucleotide
  Sense strand starting at position 3486 of SEQ ID NO: 585862
uugaauggauguuuguaua

SEQ ID NO: 673531 - RNA, 19 nt, Artificial Sequence
  Description of Artificial Sequence: Synthetic oligonucleotide
  Antisense strand to SEQ ID NO: 673530
uauacaaacauccauucaa

SEQ ID NO: 673532 - RNA, 19 nt, Artificial Sequence
  Description of Artificial Sequence: Synthetic oligonucleotide
  Sense strand starting at position 3497 of SEQ ID NO: 585862
uuuguauaacuguaagggu

SEQ ID NO: 673533 - RNA, 19 nt, Artificial Sequence
  Description of Artificial Sequence: Synthetic oligonucleotide
  Antisense strand to SEQ ID NO: 673532
acccuuacaguuauacaaa

SEQ ID NO: 673534 - RNA, 19 nt, Artificial Sequence
  Description of Artificial Sequence: Synthetic oligonucleotide
  Sense strand starting at position 3566 of SEQ ID NO: 585862
gagauuugcugagaacgag

SEQ ID NO: 673535 - RNA, 19 nt, Artificial Sequence
  Description of Artificial Sequence: Synthetic oligonucleotide
  Antisense strand to SEQ ID NO: 673534
cucguucucagcaaaucuc

SEQ ID NO: 673536 - RNA, 19 nt, Artificial Sequence
  Description of Artificial Sequence: Synthetic oligonucleotide
  Sense strand starting at position 3629 of SEQ ID NO: 585862
cuaggacuacaguguguaa

SEQ ID NO: 673537 - RNA, 19 nt, Artificial Sequence
  Description of Artificial Sequence: Synthetic oligonucleotide
  Antisense strand to SEQ ID NO: 673536
uuacacacuguaguccuag

SEQ ID NO: 673538 - RNA, 19 nt, Artificial Sequence
  Description of Artificial Sequence: Synthetic oligonucleotide
  Sense strand starting at position 3632 of SEQ ID NO: 585862
ggacuacaguguguaaacu

SEQ ID NO: 673539 - RNA, 19 nt, Artificial Sequence
  Description of Artificial Sequence: Synthetic oligonucleotide
  Antisense strand to SEQ ID NO: 673538
aguuuacacacuguagucc

SEQ ID NO: 673540 - RNA, 19 nt, Artificial Sequence
  Description of Artificial Sequence: Synthetic oligonucleotide
  Sense strand starting at position 3633 of SEQ ID NO: 585862
gacuacaguguguaaacua

SEQ ID NO: 673541 - RNA, 19 nt, Artificial Sequence
  Description of Artificial Sequence: Synthetic oligonucleotide
  Antisense strand to SEQ ID NO: 673540
uaguuuacacacuguaguc

SEQ ID NO: 673542 - RNA, 19 nt, Artificial Sequence
  Description of Artificial Sequence: Synthetic oligonucleotide
  Sense strand starting at position 3733 of SEQ ID NO: 585862
ccugguuaugacggaauga

SEQ ID NO: 673543 - RNA, 19 nt, Artificial Sequence
  Description of Artificial Sequence: Synthetic oligonucleotide
  Antisense strand to SEQ ID NO: 673542
ucauuccgucauaaccagg

SEQ ID NO: 673544 - RNA, 19 nt, Artificial Sequence
  Description of Artificial Sequence: Synthetic oligonucleotide
  Sense strand starting at position 3751 of SEQ ID NO: 585862
agaggugagacaugccuuu

SEQ ID NO: 673545 - RNA, 19 nt, Artificial Sequence
  Description of Artificial Sequence: Synthetic oligonucleotide
  Antisense strand to SEQ ID NO: 673544
aaaggcaugucucaccucu

SEQ ID NO: 673546 - RNA, 19 nt, Artificial Sequence
  Description of Artificial Sequence: Synthetic oligonucleotide
  Sense strand starting at position 81 of SEQ ID NO: 585863
agaauaggcugccuacaaa

SEQ ID NO: 673547 - RNA, 19 nt, Artificial Sequence
  Description of Artificial Sequence: Synthetic oligonucleotide
  Antisense strand to SEQ ID NO: 673546
uuuguaggcagccuauucu

SEQ ID NO: 673548 - RNA, 19 nt, Artificial Sequence
  Description of Artificial Sequence: Synthetic oligonucleotide
  Sense strand starting at position 185 of SEQ ID NO: 585863
cagucauauugggacagaa

SEQ ID NO: 673549 - RNA, 19 nt, Artificial Sequence
  Description of Artificial Sequence: Synthetic oligonucleotide
  Antisense strand to SEQ ID NO: 673548
uucugucccaauaugacug

SEQ ID NO: 673550 - RNA, 19 nt, Artificial Sequence
  Description of Artificial Sequence: Synthetic oligonucleotide
  Sense strand starting at position 316 of SEQ ID NO: 585863
aacuaaucgugaccgcaau

SEQ ID NO: 673551 - RNA, 19 nt, Artificial Sequence
  Description of Artificial Sequence: Synthetic oligonucleotide
  Antisense strand to SEQ ID NO: 673550
auugcggucacgauuaguu

SEQ ID NO: 673552 - RNA, 19 nt, Artificial Sequence
  Description of Artificial Sequence: Synthetic oligonucleotide
  Sense strand starting at position 342 of SEQ ID NO: 585863
gggugauaaucugcugagu

SEQ ID NO: 673553 - RNA, 19 nt, Artificial Sequence
  Description of Artificial Sequence: Synthetic oligonucleotide
  Antisense strand to SEQ ID NO: 673552
acucagcagauuaucaccc

SEQ ID NO: 673554 - RNA, 19 nt, Artificial Sequence
  Description of Artificial Sequence: Synthetic oligonucleotide
  Sense strand starting at position 345 of SEQ ID NO: 585863
ugauaaucugcugagucua

SEQ ID NO: 673555 - RNA, 19 nt, Artificial Sequence
  Description of Artificial Sequence: Synthetic oligonucleotide
  Antisense strand to SEQ ID NO: 673554
uagacucagcagauuauca

SEQ ID NO: 673556 - RNA, 19 nt, Artificial Sequence
  Description of Artificial Sequence: Synthetic oligonucleotide
  Sense strand starting at position 353 of SEQ ID NO: 585863
ugcugagucuacucuuuaa

SEQ ID NO: 673557 - RNA, 19 nt, Artificial Sequence
  Description of Artificial Sequence: Synthetic oligonucleotide
  Antisense strand to SEQ ID NO: 673556
uuaaagaguagacucagca

SEQ ID NO: 673558 - RNA, 19 nt, Artificial Sequence
  Description of Artificial Sequence: Synthetic oligonucleotide
  Sense strand starting at position 384 of SEQ ID NO: 585863
ccagcauauugaguuauau

SEQ ID NO: 673559 - RNA, 19 nt, Artificial Sequence
  Description of Artificial Sequence: Synthetic oligonucleotide
  Antisense strand to SEQ ID NO: 673558
auauaacucaauaugcugg

SEQ ID NO: 673560 - RNA, 19 nt, Artificial Sequence
  Description of Artificial Sequence: Synthetic oligonucleotide
  Sense strand starting at position 393 of SEQ ID NO: 585863
ugaguuauauuggcacaga

SEQ ID NO: 673561 - RNA, 19 nt, Artificial Sequence
  Description of Artificial Sequence: Synthetic oligonucleotide
  Antisense strand to SEQ ID NO: 673560
ucugugccaauauaacuca

SEQ ID NO: 673562 - RNA, 19 nt, Artificial Sequence
  Description of Artificial Sequence: Synthetic oligonucleotide
  Sense strand starting at position 396 of SEQ ID NO: 585863
guuauauuggcacagaaac

SEQ ID NO: 673563 - RNA, 19 nt, Artificial Sequence
  Description of Artificial Sequence: Synthetic oligonucleotide
  Antisense strand to SEQ ID NO: 673562
guuucugugccaauauaac

SEQ ID NO: 673564 - RNA, 19 nt, Artificial Sequence
  Description of Artificial Sequence: Synthetic oligonucleotide
  Sense strand starting at position 527 of SEQ ID NO: 585863
guuguuugaggcugaauuc

SEQ ID NO: 673565 - RNA, 19 nt, Artificial Sequence
  Description of Artificial Sequence: Synthetic oligonucleotide
  Antisense strand to SEQ ID NO: 673564
gaauucagccucaaacaac

SEQ ID NO: 673566 - RNA, 19 nt, Artificial Sequence
  Description of Artificial Sequence: Synthetic oligonucleotide
  Sense strand starting at position 759 of SEQ ID NO: 585863
uuuagagaguuacuuacaa

SEQ ID NO: 673567 - RNA, 19 nt, Artificial Sequence
  Description of Artificial Sequence: Synthetic oligonucleotide
  Antisense strand to SEQ ID NO: 673566
uuguaaguaacucucuaaa

SEQ ID NO: 673568 - RNA, 19 nt, Artificial Sequence
  Description of Artificial Sequence: Synthetic oligonucleotide
  Sense strand starting at position 1138 of SEQ ID NO: 585863
cugagaaacggcugaaaca

SEQ ID NO: 673569 - RNA, 19 nt, Artificial Sequence
  Description of Artificial Sequence: Synthetic oligonucleotide
  Antisense strand to SEQ ID NO: 673568
uguuucagccguuucucag

SEQ ID NO: 673570 - RNA, 19 nt, Artificial Sequence
  Description of Artificial Sequence: Synthetic oligonucleotide
  Sense strand starting at position 1151 of SEQ ID NO: 585863
gaaacaagugcgugagaac

SEQ ID NO: 673571 - RNA, 19 nt, Artificial Sequence
  Description of Artificial Sequence: Synthetic oligonucleotide
  Antisense strand to SEQ ID NO: 673570
guucucacgcacuuguuuc

SEQ ID NO: 673572 - RNA, 19 nt, Artificial Sequence
  Description of Artificial Sequence: Synthetic oligonucleotide
  Sense strand starting at position 1318 of SEQ ID NO: 585863
ccucgaaggcucuaucaau

SEQ ID NO: 673573 - RNA, 19 nt, Artificial Sequence
  Description of Artificial Sequence: Synthetic oligonucleotide
  Antisense strand to SEQ ID NO: 673572
auugauagagccuucgagg

SEQ ID NO: 673574 - RNA, 19 nt, Artificial Sequence
  Description of Artificial Sequence: Synthetic oligonucleotide
  Sense strand starting at position 2534 of SEQ ID NO: 585863
ggcucaucauucucuggau

SEQ ID NO: 673575 - RNA, 19 nt, Artificial Sequence
  Description of Artificial Sequence: Synthetic oligonucleotide
  Antisense strand to SEQ ID NO: 673574
auccagagaaugaugagcc

SEQ ID NO: 673576 - RNA, 19 nt, Artificial Sequence
  Description of Artificial Sequence: Synthetic oligonucleotide
  Sense strand starting at position 2535 of SEQ ID NO: 585863
gcucaucauucucuggaua

SEQ ID NO: 673577 - RNA, 19 nt, Artificial Sequence
  Description of Artificial Sequence: Synthetic oligonucleotide
  Antisense strand to SEQ ID NO: 673576
uauccagagaaugaugagc

SEQ ID NO: 673578 - RNA, 19 nt, Artificial Sequence
  Description of Artificial Sequence: Synthetic oligonucleotide
  Sense strand starting at position 3009 of SEQ ID NO: 585863
augagacgcugucucaauu

SEQ ID NO: 673579 - RNA, 19 nt, Artificial Sequence
  Description of Artificial Sequence: Synthetic oligonucleotide
  Antisense strand to SEQ ID NO: 673578
aauugagacagcgucucau

SEQ ID NO: 673580 - RNA, 19 nt, Artificial Sequence
  Description of Artificial Sequence: Synthetic oligonucleotide
  Sense strand starting at position 3015 of SEQ ID NO: 585863
cgcugucucaauugaauga

SEQ ID NO: 673581 - RNA, 19 nt, Artificial Sequence
  Description of Artificial Sequence: Synthetic oligonucleotide
  Antisense strand to SEQ ID NO: 673580
ucauucaauugagacagcg

SEQ ID NO: 673582 - RNA, 19 nt, Artificial Sequence
  Description of Artificial Sequence: Synthetic oligonucleotide
  Sense strand starting at position 3022 of SEQ ID NO: 585863
ucaauugaaugagaagaaa

SEQ ID NO: 673583 - RNA, 19 nt, Artificial Sequence
  Description of Artificial Sequence: Synthetic oligonucleotide
  Antisense strand to SEQ ID NO: 673582
uuucuucucauucaauuga

SEQ ID NO: 673584 - RNA, 19 nt, Artificial Sequence
  Description of Artificial Sequence: Synthetic oligonucleotide
  Sense strand starting at position 3057 of SEQ ID NO: 585863
aacgaauccugccuugaug

SEQ ID NO: 673585 - RNA, 19 nt, Artificial Sequence
  Description of Artificial Sequence: Synthetic oligonucleotide
  Antisense strand to SEQ ID NO: 673584
caucaaggcaggauucguu

SEQ ID NO: 673586 - RNA, 19 nt, Artificial Sequence
  Description of Artificial Sequence: Synthetic oligonucleotide
  Sense strand starting at position 3073 of SEQ ID NO: 585863
auggcagaauguuuagaca

SEQ ID NO: 673587 - RNA, 19 nt, Artificial Sequence
  Description of Artificial Sequence: Synthetic oligonucleotide
  Antisense strand to SEQ ID NO: 673586
ugucuaaacauucugccau

SEQ ID NO: 673588 - RNA, 19 nt, Artificial Sequence
  Description of Artificial Sequence: Synthetic oligonucleotide
  Sense strand starting at position 3361 of SEQ ID NO: 585863
guagguuuacaauggagaa

SEQ ID NO: 673589 - RNA, 19 nt, Artificial Sequence
  Description of Artificial Sequence: Synthetic oligonucleotide
  Antisense strand to SEQ ID NO: 673588
uucuccauuguaaaccuac

SEQ ID NO: 673590 - RNA, 19 nt, Artificial Sequence
  Description of Artificial Sequence: Synthetic oligonucleotide
  Sense strand starting at position 3420 of SEQ ID NO: 585863
gucaacaaucgugacucau

SEQ ID NO: 673591 - RNA, 19 nt, Artificial Sequence
  Description of Artificial Sequence: Synthetic oligonucleotide
  Antisense strand to SEQ ID NO: 673590
augagucacgauuguugac

SEQ ID NO: 673592 - RNA, 19 nt, Artificial Sequence
  Description of Artificial Sequence: Synthetic oligonucleotide
  Sense strand starting at position 3422 of SEQ ID NO: 585863
caacaaucgugacucauug

SEQ ID NO: 673593 - RNA, 19 nt, Artificial Sequence
  Description of Artificial Sequence: Synthetic oligonucleotide
  Antisense strand to SEQ ID NO: 673592
caaugagucacgauuguug

SEQ ID NO: 673594 - RNA, 19 nt, Artificial Sequence
  Description of Artificial Sequence: Synthetic oligonucleotide
  Sense strand starting at position 3437 of SEQ ID NO: 585863
auugauggcauguagucaa

SEQ ID NO: 673595 - RNA, 19 nt, Artificial Sequence
  Description of Artificial Sequence: Synthetic oligonucleotide
  Antisense strand to SEQ ID NO: 673594
uugacuacaugccaucaau

SEQ ID NO: 673596 - RNA, 19 nt, Artificial Sequence
  Description of Artificial Sequence: Synthetic oligonucleotide
  Sense strand starting at position 3440 of SEQ ID NO: 585863
gauggcauguagucaauau

SEQ ID NO: 673597 - RNA, 19 nt, Artificial Sequence
  Description of Artificial Sequence: Synthetic oligonucleotide
  Antisense strand to SEQ ID NO: 673596
auauugacuacaugccauc

SEQ ID NO: 673598 - RNA, 19 nt, Artificial Sequence
  Description of Artificial Sequence: Synthetic oligonucleotide
  Sense strand starting at position 3441 of SEQ ID NO: 585863
auggcauguagucaauaug

SEQ ID NO: 673599 - RNA, 19 nt, Artificial Sequence
  Description of Artificial Sequence: Synthetic oligonucleotide
  Antisense strand to SEQ ID NO: 673598
cauauugacuacaugccau

SEQ ID NO: 673600 - RNA, 19 nt, Artificial Sequence
  Description of Artificial Sequence: Synthetic oligonucleotide
  Sense strand starting at position 3444 of SEQ ID NO: 585863
gcauguagucaauaugaug

SEQ ID NO: 673601 - RNA, 19 nt, Artificial Sequence
  Description of Artificial Sequence: Synthetic oligonucleotide
  Antisense strand to SEQ ID NO: 673600
caucauauugacuacaugc

SEQ ID NO: 673602 - RNA, 19 nt, Artificial Sequence
  Description of Artificial Sequence: Synthetic oligonucleotide
  Sense strand starting at position 3451 of SEQ ID NO: 585863
gucaauaugaugugaugaa

SEQ ID NO: 673603 - RNA, 19 nt, Artificial Sequence
  Description of Artificial Sequence: Synthetic oligonucleotide
  Antisense strand to SEQ ID NO: 673602
uucaucacaucauauugac

SEQ ID NO: 673604 - RNA, 19 nt, Artificial Sequence
  Description of Artificial Sequence: Synthetic oligonucleotide
  Sense strand starting at position 3458 of SEQ ID NO: 585863
ugaugugaugaauguggca

SEQ ID NO: 673605 - RNA, 19 nt, Artificial Sequence
  Description of Artificial Sequence: Synthetic oligonucleotide
  Antisense strand to SEQ ID NO: 673604
ugccacauucaucacauca

SEQ ID NO: 673606 - RNA, 19 nt, Artificial Sequence
  Description of Artificial Sequence: Synthetic oligonucleotide
  Sense strand starting at position 3460 of SEQ ID NO: 585863
augugaugaauguggcaua

SEQ ID NO: 673607 - RNA, 19 nt, Artificial Sequence
  Description of Artificial Sequence: Synthetic oligonucleotide
  Antisense strand to SEQ ID NO: 673606
uaugccacauucaucacau

SEQ ID NO: 673608 - RNA, 19 nt, Artificial Sequence
  Description of Artificial Sequence: Synthetic oligonucleotide
  Sense strand starting at position 3587 of SEQ ID NO: 585863
uccucaaaguugucagguu

SEQ ID NO: 673609 - RNA, 19 nt, Artificial Sequence
  Description of Artificial Sequence: Synthetic oligonucleotide
  Antisense strand to SEQ ID NO: 673608
aaccugacaacuuugagga

SEQ ID NO: 673610 - RNA, 19 nt, Artificial Sequence
  Description of Artificial Sequence: Synthetic oligonucleotide
  Sense strand starting at position 3707 of SEQ ID NO: 585863
gccugaucuggccgacaua

SEQ ID NO: 673611 - RNA, 19 nt, Artificial Sequence
  Description of Artificial Sequence: Synthetic oligonucleotide
  Antisense strand to SEQ ID NO: 673610
uaugucggccagaucaggc

SEQ ID NO: 673612 - RNA, 19 nt, Artificial Sequence
  Description of Artificial Sequence: Synthetic oligonucleotide
  Sense strand starting at position 3925 of SEQ ID NO: 585863
guugauuaauuaguuguga

SEQ ID NO: 673613 - RNA, 19 nt, Artificial Sequence
  Description of Artificial Sequence: Synthetic oligonucleotide
  Antisense strand to SEQ ID NO: 673612
ucacaacuaauuaaucaac

SEQ ID NO: 673614 - RNA, 19 nt, Artificial Sequence
  Description of Artificial Sequence: Synthetic oligonucleotide
  Sense strand starting at position 3927 of SEQ ID NO: 585863
ugauuaauuaguugugagg

SEQ ID NO: 673615 - RNA, 19 nt, Artificial Sequence
  Description of Artificial Sequence: Synthetic oligonucleotide
  Antisense strand to SEQ ID NO: 673614
ccucacaacuaauuaauca

SEQ ID NO: 673616 - RNA, 19 nt, Artificial Sequence
  Description of Artificial Sequence: Synthetic oligonucleotide
  Sense strand starting at position 3933 of SEQ ID NO: 585863
auuaguugugaggaaugua

SEQ ID NO: 673617 - RNA, 19 nt, Artificial Sequence
  Description of Artificial Sequence: Synthetic oligonucleotide
  Antisense strand to SEQ ID NO: 673616
uacauuccucacaacuaau

SEQ ID NO: 673618 - RNA, 19 nt, Artificial Sequence
  Description of Artificial Sequence: Synthetic oligonucleotide
  Sense strand starting at position 3936 of SEQ ID NO: 585863
aguugugaggaauguaaug

SEQ ID NO: 673619 - RNA, 19 nt, Artificial Sequence
  Description of Artificial Sequence: Synthetic oligonucleotide
  Antisense strand to SEQ ID NO: 673618
cauuacauuccucacaacu

SEQ ID NO: 673620 - RNA, 19 nt, Artificial Sequence
  Description of Artificial Sequence: Synthetic oligonucleotide
  Sense strand starting at position 3938 of SEQ ID NO: 585863
uugugaggaauguaaugua

SEQ ID NO: 673621 - RNA, 19 nt, Artificial Sequence
  Description of Artificial Sequence: Synthetic oligonucleotide
  Antisense strand to SEQ ID NO: 673620
uacauuacauuccucacaa

SEQ ID NO: 673622 - RNA, 19 nt, Artificial Sequence
  Description of Artificial Sequence: Synthetic oligonucleotide
  Sense strand starting at position 3948 of SEQ ID NO: 585863
uguaauguaagaugguaau

SEQ ID NO: 673623 - RNA, 19 nt, Artificial Sequence
  Description of Artificial Sequence: Synthetic oligonucleotide
  Antisense strand to SEQ ID NO: 673622
auuaccaucuuacauuaca

SEQ ID NO: 673624 - RNA, 19 nt, Artificial Sequence
  Description of Artificial Sequence: Synthetic oligonucleotide
  Sense strand starting at position 3954 of SEQ ID NO: 585863
guaagaugguaaucauagg

SEQ ID NO: 673625 - RNA, 19 nt, Artificial Sequence
  Description of Artificial Sequence: Synthetic oligonucleotide
  Antisense strand to SEQ ID NO: 673624
ccuaugauuaccaucuuac

SEQ ID NO: 673626 - RNA, 19 nt, Artificial Sequence
  Description of Artificial Sequence: Synthetic oligonucleotide
  Sense strand starting at position 182 of SEQ ID NO: 585864
agagaaaccuuugugacca

SEQ ID NO: 673627 - RNA, 19 nt, Artificial Sequence
  Description of Artificial Sequence: Synthetic oligonucleotide
  Antisense strand to SEQ ID NO: 673626
uggucacaaagguuucucu

SEQ ID NO: 673628 - RNA, 19 nt, Artificial Sequence
  Description of Artificial Sequence: Synthetic oligonucleotide
  Sense strand starting at position 192 of SEQ ID NO: 585864
uugugaccacucugauaug

SEQ ID NO: 673629 - RNA, 19 nt, Artificial Sequence
  Description of Artificial Sequence: Synthetic oligonucleotide
  Antisense strand to SEQ ID NO: 673628
cauaucagaguggucacaa

SEQ ID NO: 673630 - RNA, 19 nt, Artificial Sequence
  Description of Artificial Sequence: Synthetic oligonucleotide
  Sense strand starting at position 214 of SEQ ID NO: 585864
gugagaacucaccacuggu

SEQ ID NO: 673631 - RNA, 19 nt, Artificial Sequence
  Description of Artificial Sequence: Synthetic oligonucleotide
  Antisense strand to SEQ ID NO: 673630
accaguggugaguucucac

SEQ ID NO: 673632 - RNA, 19 nt, Artificial Sequence
  Description of Artificial Sequence: Synthetic oligonucleotide
  Sense strand starting at position 276 of SEQ ID NO: 585864
ucgaauuaaucacuguuua

SEQ ID NO: 673633 - RNA, 19 nt, Artificial Sequence
  Description of Artificial Sequence: Synthetic oligonucleotide
  Antisense strand to SEQ ID NO: 673632
uaaacagugauuaauucga

SEQ ID NO: 673634 - RNA, 19 nt, Artificial Sequence
  Description of Artificial Sequence: Synthetic oligonucleotide
  Sense strand starting at position 354 of SEQ ID NO: 585864
gagagaugaccuugucauc

SEQ ID NO: 673635 - RNA, 19 nt, Artificial Sequence
  Description of Artificial Sequence: Synthetic oligonucleotide
  Antisense strand to SEQ ID NO: 673634
gaugacaaggucaucucuc

SEQ ID NO: 673636 - RNA, 19 nt, Artificial Sequence
  Description of Artificial Sequence: Synthetic oligonucleotide
  Sense strand starting at position 397 of SEQ ID NO: 585864
cauaguaaaugcucaagga

SEQ ID NO: 673637 - RNA, 19 nt, Artificial Sequence
  Description of Artificial Sequence: Synthetic oligonucleotide
  Antisense strand to SEQ ID NO: 673636
uccuugagcauuuacuaug

SEQ ID NO: 673638 - RNA, 19 nt, Artificial Sequence
  Description of Artificial Sequence: Synthetic oligonucleotide
  Sense strand starting at position 401 of SEQ ID NO: 585864
guaaaugcucaaggaaugu

SEQ ID NO: 673639 - RNA, 19 nt, Artificial Sequence
  Description of Artificial Sequence: Synthetic oligonucleotide
  Antisense strand to SEQ ID NO: 673638
acauuccuugagcauuuac

SEQ ID NO: 673640 - RNA, 19 nt, Artificial Sequence
  Description of Artificial Sequence: Synthetic oligonucleotide
  Sense strand starting at position 524 of SEQ ID NO: 585864
ucacaauaccgaggauugu

SEQ ID NO: 673641 - RNA, 19 nt, Artificial Sequence
  Description of Artificial Sequence: Synthetic oligonucleotide
  Antisense strand to SEQ ID NO: 673640
acaauccucgguauuguga

SEQ ID NO: 673642 - RNA, 19 nt, Artificial Sequence
  Description of Artificial Sequence: Synthetic oligonucleotide
  Sense strand starting at position 525 of SEQ ID NO: 585864
cacaauaccgaggauuguu

SEQ ID NO: 673643 - RNA, 19 nt, Artificial Sequence
  Description of Artificial Sequence: Synthetic oligonucleotide
  Antisense strand to SEQ ID NO: 673642
aacaauccucgguauugug

SEQ ID NO: 673644 - RNA, 19 nt, Artificial Sequence
  Description of Artificial Sequence: Synthetic oligonucleotide
  Sense strand starting at position 602 of SEQ ID NO: 585864
ucagacuuacugugaauau

SEQ ID NO: 673645 - RNA, 19 nt, Artificial Sequence
  Description of Artificial Sequence: Synthetic oligonucleotide
  Antisense strand to SEQ ID NO: 673644
auauucacaguaagucuga

SEQ ID NO: 673646 - RNA, 19 nt, Artificial Sequence
  Description of Artificial Sequence: Synthetic oligonucleotide
  Sense strand starting at position 690 of SEQ ID NO: 585864
uguuaucaagagcaacaua

SEQ ID NO: 673647 - RNA, 19 nt, Artificial Sequence
  Description of Artificial Sequence: Synthetic oligonucleotide
  Antisense strand to SEQ ID NO: 673646
uauguugcucuugauaaca

SEQ ID NO: 673648 - RNA, 19 nt, Artificial Sequence
  Description of Artificial Sequence: Synthetic oligonucleotide
  Sense strand starting at position 819 of SEQ ID NO: 585864
gaggccaacuucucaaagu

SEQ ID NO: 673649 - RNA, 19 nt, Artificial Sequence
  Description of Artificial Sequence: Synthetic oligonucleotide
  Antisense strand to SEQ ID NO: 673648
acuuugagaaguuggccuc

SEQ ID NO: 673650 - RNA, 19 nt, Artificial Sequence
  Description of Artificial Sequence: Synthetic oligonucleotide
  Sense strand starting at position 983 of SEQ ID NO: 585864
ccagauucugggcaaguuu

SEQ ID NO: 673651 - RNA, 19 nt, Artificial Sequence
  Description of Artificial Sequence: Synthetic oligonucleotide
  Antisense strand to SEQ ID NO: 673650
aaacuugcccagaaucugg

SEQ ID NO: 673652 - RNA, 19 nt, Artificial Sequence
  Description of Artificial Sequence: Synthetic oligonucleotide
  Sense strand starting at position 1266 of SEQ ID NO: 585864
uguuaaagucaucaagcca

SEQ ID NO: 673653 - RNA, 19 nt, Artificial Sequence
  Description of Artificial Sequence: Synthetic oligonucleotide
  Antisense strand to SEQ ID NO: 673652
uggcuugaugacuuuaaca

SEQ ID NO: 673654 - RNA, 19 nt, Artificial Sequence
  Description of Artificial Sequence: Synthetic oligonucleotide
  Sense strand starting at position 1298 of SEQ ID NO: 585864
auacuacgauccucugaau

SEQ ID NO: 673655 - RNA, 19 nt, Artificial Sequence
  Description of Artificial Sequence: Synthetic oligonucleotide
  Antisense strand to SEQ ID NO: 673654
auucagaggaucguaguau

SEQ ID NO: 673656 - RNA, 19 nt, Artificial Sequence
  Description of Artificial Sequence: Synthetic oligonucleotide
  Sense strand starting at position 1365 of SEQ ID NO: 585864
cucuauauucgggaaguuu

SEQ ID NO: 673657 - RNA, 19 nt, Artificial Sequence
  Description of Artificial Sequence: Synthetic oligonucleotide
  Antisense strand to SEQ ID NO: 673656
aaacuucccgaauauagag

SEQ ID NO: 673658 - RNA, 19 nt, Artificial Sequence
  Description of Artificial Sequence: Synthetic oligonucleotide
  Sense strand starting at position 2065 of SEQ ID NO: 585864
ugaagccugacguagagau

SEQ ID NO: 673659 - RNA, 19 nt, Artificial Sequence
  Description of Artificial Sequence: Synthetic oligonucleotide
  Antisense strand to SEQ ID NO: 673658
aucucuacgucaggcuuca

SEQ ID NO: 673660 - RNA, 19 nt, Artificial Sequence
  Description of Artificial Sequence: Synthetic oligonucleotide
  Sense strand starting at position 2139 of SEQ ID NO: 585864
ucuuuaucuggugaagcca

SEQ ID NO: 673661 - RNA, 19 nt, Artificial Sequence
  Description of Artificial Sequence: Synthetic oligonucleotide
  Antisense strand to SEQ ID NO: 673660
uggcuucaccagauaaaga

SEQ ID NO: 673662 - RNA, 19 nt, Artificial Sequence
  Description of Artificial Sequence: Synthetic oligonucleotide
  Sense strand starting at position 2227 of SEQ ID NO: 585864
gcaguagaucgcguugaca

SEQ ID NO: 673663 - RNA, 19 nt, Artificial Sequence
  Description of Artificial Sequence: Synthetic oligonucleotide
  Antisense strand to SEQ ID NO: 673662
ugucaacgcgaucuacugc

SEQ ID NO: 673664 - RNA, 19 nt, Artificial Sequence
  Description of Artificial Sequence: Synthetic oligonucleotide
  Sense strand starting at position 2518 of SEQ ID NO: 585864
gauagauuggcuuagccuu

SEQ ID NO: 673665 - RNA, 19 nt, Artificial Sequence
  Description of Artificial Sequence: Synthetic oligonucleotide
  Antisense strand to SEQ ID NO: 673664
aaggcuaagccaaucuauc

SEQ ID NO: 673666 - RNA, 19 nt, Artificial Sequence
  Description of Artificial Sequence: Synthetic oligonucleotide
  Sense strand starting at position 2531 of SEQ ID NO: 585864
agccuuugccuauauuaag

SEQ ID NO: 673667 - RNA, 19 nt, Artificial Sequence
  Description of Artificial Sequence: Synthetic oligonucleotide
  Antisense strand to SEQ ID NO: 673666
cuuaauauaggcaaaggcu

SEQ ID NO: 673668 - RNA, 19 nt, Artificial Sequence
  Description of Artificial Sequence: Synthetic oligonucleotide
  Sense strand starting at position 2569 of SEQ ID NO: 585864
ugauuacccggauagguga

SEQ ID NO: 673669 - RNA, 19 nt, Artificial Sequence
  Description of Artificial Sequence: Synthetic oligonucleotide
  Antisense strand to SEQ ID NO: 673668
ucaccuauccggguaauca

SEQ ID NO: 673670 - RNA, 19 nt, Artificial Sequence
  Description of Artificial Sequence: Synthetic oligonucleotide
  Sense strand starting at position 2659 of SEQ ID NO: 585864
acacuaaguguggaauguu

SEQ ID NO: 673671 - RNA, 19 nt, Artificial Sequence
  Description of Artificial Sequence: Synthetic oligonucleotide
  Antisense strand to SEQ ID NO: 673670
aacauuccacacuuagugu

SEQ ID NO: 673672 - RNA, 19 nt, Artificial Sequence
  Description of Artificial Sequence: Synthetic oligonucleotide
  Sense strand starting at position 2786 of SEQ ID NO: 585864
gggaauuguccaugauguc

SEQ ID NO: 673673 - RNA, 19 nt, Artificial Sequence
  Description of Artificial Sequence: Synthetic oligonucleotide
  Antisense strand to SEQ ID NO: 673672
gacaucauggacaauuccc

SEQ ID NO: 673674 - RNA, 19 nt, Artificial Sequence
  Description of Artificial Sequence: Synthetic oligonucleotide
  Sense strand starting at position 2787 of SEQ ID NO: 585864
ggaauuguccaugauguca

SEQ ID NO: 673675 - RNA, 19 nt, Artificial Sequence
  Description of Artificial Sequence: Synthetic oligonucleotide
  Antisense strand to SEQ ID NO: 673674
ugacaucauggacaauucc

SEQ ID NO: 673676 - RNA, 19 nt, Artificial Sequence
  Description of Artificial Sequence: Synthetic oligonucleotide
  Sense strand starting at position 2847 of SEQ ID NO: 585864
ugcauuguacuugagaauu

SEQ ID NO: 673677 - RNA, 19 nt, Artificial Sequence
  Description of Artificial Sequence: Synthetic oligonucleotide
  Antisense strand to SEQ ID NO: 673676
aauucucaaguacaaugca

SEQ ID NO: 673678 - RNA, 19 nt, Artificial Sequence
  Description of Artificial Sequence: Synthetic oligonucleotide
  Sense strand starting at position 3026 of SEQ ID NO: 585864
agaagaaccugagauuaag

SEQ ID NO: 673679 - RNA, 19 nt, Artificial Sequence
  Description of Artificial Sequence: Synthetic oligonucleotide
  Antisense strand to SEQ ID NO: 673678
cuuaaucucagguucuucu

SEQ ID NO: 673680 - RNA, 19 nt, Artificial Sequence
  Description of Artificial Sequence: Synthetic oligonucleotide
  Sense strand starting at position 3053 of SEQ ID NO: 585864
ucaaguuacccugauaguu

SEQ ID NO: 673681 - RNA, 19 nt, Artificial Sequence
  Description of Artificial Sequence: Synthetic oligonucleotide
  Antisense strand to SEQ ID NO: 673680
aacuaucaggguaacuuga

SEQ ID NO: 673682 - RNA, 19 nt, Artificial Sequence
  Description of Artificial Sequence: Synthetic oligonucleotide
  Sense strand starting at position 3061 of SEQ ID NO: 585864
cccugauaguuacugacua

SEQ ID NO: 673683 - RNA, 19 nt, Artificial Sequence
  Description of Artificial Sequence: Synthetic oligonucleotide
  Antisense strand to SEQ ID NO: 673682
uagucaguaacuaucaggg

SEQ ID NO: 673684 - RNA, 19 nt, Artificial Sequence
  Description of Artificial Sequence: Synthetic oligonucleotide
  Sense strand starting at position 3145 of SEQ ID NO: 585864
auauguuaugaguggauuc

SEQ ID NO: 673685 - RNA, 19 nt, Artificial Sequence
  Description of Artificial Sequence: Synthetic oligonucleotide
  Antisense strand to SEQ ID NO: 673684
gaauccacucauaacauau

SEQ ID NO: 673686 - RNA, 19 nt, Artificial Sequence
  Description of Artificial Sequence: Synthetic oligonucleotide
  Sense strand starting at position 3423 of SEQ ID NO: 585864
uuuccaugugcagaaguua

SEQ ID NO: 673687 - RNA, 19 nt, Artificial Sequence
  Description of Artificial Sequence: Synthetic oligonucleotide
  Antisense strand to SEQ ID NO: 673686
uaacuucugcacauggaaa

SEQ ID NO: 673688 - RNA, 19 nt, Artificial Sequence
  Description of Artificial Sequence: Synthetic oligonucleotide
  Sense strand starting at position 3434 of SEQ ID NO: 585864
agaaguuaccuaugacuga

SEQ ID NO: 673689 - RNA, 19 nt, Artificial Sequence
  Description of Artificial Sequence: Synthetic oligonucleotide
  Antisense strand to SEQ ID NO: 673688
ucagucauagguaacuucu

SEQ ID NO: 673690 - RNA, 19 nt, Artificial Sequence
  Description of Artificial Sequence: Synthetic oligonucleotide
  Sense strand starting at position 3478 of SEQ ID NO: 585864
auaguaauuugcgagauuu

SEQ ID NO: 673691 - RNA, 19 nt, Artificial Sequence
  Description of Artificial Sequence: Synthetic oligonucleotide
  Antisense strand to SEQ ID NO: 673690
aaaucucgcaaauuacuau

SEQ ID NO: 673692 - RNA, 19 nt, Artificial Sequence
  Description of Artificial Sequence: Synthetic oligonucleotide
  Sense strand starting at position 3651 of SEQ ID NO: 585864
cagugucugggauagcaau

SEQ ID NO: 673693 - RNA, 19 nt, Artificial Sequence
  Description of Artificial Sequence: Synthetic oligonucleotide
  Antisense strand to SEQ ID NO: 673692
auugcuaucccagacacug

SEQ ID NO: 673694 - RNA, 19 nt, Artificial Sequence
  Description of Artificial Sequence: Synthetic oligonucleotide
  Sense strand starting at position 3662 of SEQ ID NO: 585864
auagcaauuccagggaaua

SEQ ID NO: 673695 - RNA, 19 nt, Artificial Sequence
  Description of Artificial Sequence: Synthetic oligonucleotide
  Antisense strand to SEQ ID NO: 673694
uauucccuggaauugcuau

SEQ ID NO: 673696 - RNA, 19 nt, Artificial Sequence
  Description of Artificial Sequence: Synthetic oligonucleotide
  Sense strand starting at position 3663 of SEQ ID NO: 585864
uagcaauuccagggaauag

SEQ ID NO: 673697 - RNA, 19 nt, Artificial Sequence
  Description of Artificial Sequence: Synthetic oligonucleotide
  Antisense strand to SEQ ID NO: 673696
cuauucccuggaauugcua

SEQ ID NO: 673698 - RNA, 19 nt, Artificial Sequence
  Description of Artificial Sequence: Synthetic oligonucleotide
  Sense strand starting at position 3734 of SEQ ID NO: 585864
acaugaccacuaugugauc

SEQ ID NO: 673699 - RNA, 19 nt, Artificial Sequence
  Description of Artificial Sequence: Synthetic oligonucleotide
  Antisense strand to SEQ ID NO: 673698
gaucacauaguggucaugu

SEQ ID NO: 673700 - RNA, 19 nt, Artificial Sequence
  Description of Artificial Sequence: Synthetic oligonucleotide
  Sense strand starting at position 3803 of SEQ ID NO: 585864
cagggacuuauugguaagu

SEQ ID NO: 673701 - RNA, 19 nt, Artificial Sequence
  Description of Artificial Sequence: Synthetic oligonucleotide
  Antisense strand to SEQ ID NO: 673700
acuuaccaauaagucccug

SEQ ID NO: 673702 - RNA, 19 nt, Artificial Sequence
  Description of Artificial Sequence: Synthetic oligonucleotide
  Sense strand starting at position 3808 of SEQ ID NO: 585864
acuuauugguaagugagaa

SEQ ID NO: 673703 - RNA, 19 nt, Artificial Sequence
  Description of Artificial Sequence: Synthetic oligonucleotide
  Antisense strand to SEQ ID NO: 673702
uucucacuuaccaauaagu

SEQ ID NO: 673704 - RNA, 19 nt, Artificial Sequence
  Description of Artificial Sequence: Synthetic oligonucleotide
  Sense strand starting at position 3809 of SEQ ID NO: 585864
cuuauugguaagugagaag

SEQ ID NO: 673705 - RNA, 19 nt, Artificial Sequence
  Description of Artificial Sequence: Synthetic oligonucleotide
  Antisense strand to SEQ ID NO: 673704
cuucucacuuaccaauaag

SEQ ID NO: 673706 - RNA, 19 nt, Artificial Sequence
  Description of Artificial Sequence: Synthetic oligonucleotide
  Sense strand starting at position 61 of SEQ ID NO: 585865
agaccucuauuuggauaua

SEQ ID NO: 673707 - RNA, 19 nt, Artificial Sequence
  Description of Artificial Sequence: Synthetic oligonucleotide
  Antisense strand to SEQ ID NO: 673706
uauauccaaauagaggucu

SEQ ID NO: 673708 - RNA, 19 nt, Artificial Sequence
  Description of Artificial Sequence: Synthetic oligonucleotide
  Sense strand starting at position 71 of SEQ ID NO: 585865
uuggauauauguuuagcua

SEQ ID NO: 673709 - RNA, 19 nt, Artificial Sequence
  Description of Artificial Sequence: Synthetic oligonucleotide
  Antisense strand to SEQ ID NO: 673708
uagcuaaacauauauccaa

SEQ ID NO: 673710 - RNA, 19 nt, Artificial Sequence
  Description of Artificial Sequence: Synthetic oligonucleotide
  Sense strand starting at position 72 of SEQ ID NO: 585865
uggauauauguuuagcuac

SEQ ID NO: 673711 - RNA, 19 nt, Artificial Sequence
  Description of Artificial Sequence: Synthetic oligonucleotide
  Antisense strand to SEQ ID NO: 673710
guagcuaaacauauaucca

SEQ ID NO: 673712 - RNA, 19 nt, Artificial Sequence
  Description of Artificial Sequence: Synthetic oligonucleotide
  Sense strand starting at position 118 of SEQ ID NO: 585865
agcaguauauaagcugaau

SEQ ID NO: 673713 - RNA, 19 nt, Artificial Sequence
  Description of Artificial Sequence: Synthetic oligonucleotide
  Antisense strand to SEQ ID NO: 673712
auucagcuuauauacugcu

SEQ ID NO: 673714 - RNA, 19 nt, Artificial Sequence
  Description of Artificial Sequence: Synthetic oligonucleotide
  Sense strand starting at position 378 of SEQ ID NO: 585865
uggcgaacagucuagggau

SEQ ID NO: 673715 - RNA, 19 nt, Artificial Sequence
  Description of Artificial Sequence: Synthetic oligonucleotide
  Antisense strand to SEQ ID NO: 673714
aucccuagacuguucgcca

SEQ ID NO: 673716 - RNA, 19 nt, Artificial Sequence
  Description of Artificial Sequence: Synthetic oligonucleotide
  Sense strand starting at position 449 of SEQ ID NO: 585865
agucaauagaggcguuaga

SEQ ID NO: 673717 - RNA, 19 nt, Artificial Sequence
  Description of Artificial Sequence: Synthetic oligonucleotide
  Antisense strand to SEQ ID NO: 673716
ucuaacgccucuauugacu

SEQ ID NO: 673718 - RNA, 19 nt, Artificial Sequence
  Description of Artificial Sequence: Synthetic oligonucleotide
  Sense strand starting at position 690 of SEQ ID NO: 585865
uaaaguuugcaauggucca

SEQ ID NO: 673719 - RNA, 19 nt, Artificial Sequence
  Description of Artificial Sequence: Synthetic oligonucleotide
  Antisense strand to SEQ ID NO: 673718
uggaccauugcaaacuuua

SEQ ID NO: 673720 - RNA, 19 nt, Artificial Sequence
  Description of Artificial Sequence: Synthetic oligonucleotide
  Sense strand starting at position 769 of SEQ ID NO: 585865
uuacuuuauuuggaugcua

SEQ ID NO: 673721 - RNA, 19 nt, Artificial Sequence
  Description of Artificial Sequence: Synthetic oligonucleotide
  Antisense strand to SEQ ID NO: 673720
uagcauccaaauaaaguaa

SEQ ID NO: 673722 - RNA, 19 nt, Artificial Sequence
  Description of Artificial Sequence: Synthetic oligonucleotide
  Sense strand starting at position 1021 of SEQ ID NO: 585865
auggcuauuuaugagaaag

SEQ ID NO: 673723 - RNA, 19 nt, Artificial Sequence
  Description of Artificial Sequence: Synthetic oligonucleotide
  Antisense strand to SEQ ID NO: 673722
cuuucucauaaauagccau

SEQ ID NO: 673724 - RNA, 19 nt, Artificial Sequence
  Description of Artificial Sequence: Synthetic oligonucleotide
  Sense strand starting at position 1031 of SEQ ID NO: 585865
augagaaaggcagguauua

SEQ ID NO: 673725 - RNA, 19 nt, Artificial Sequence
  Description of Artificial Sequence: Synthetic oligonucleotide
  Antisense strand to SEQ ID NO: 673724
uaauaccugccuuucucau

SEQ ID NO: 673726 - RNA, 19 nt, Artificial Sequence
  Description of Artificial Sequence: Synthetic oligonucleotide
  Sense strand starting at position 1065 of SEQ ID NO: 585865
uguguuucucauuaagcag

SEQ ID NO: 673727 - RNA, 19 nt, Artificial Sequence
  Description of Artificial Sequence: Synthetic oligonucleotide
  Antisense strand to SEQ ID NO: 673726
cugcuuaaugagaaacaca

SEQ ID NO: 673728 - RNA, 19 nt, Artificial Sequence
  Description of Artificial Sequence: Synthetic oligonucleotide
  Sense strand starting at position 1079 of SEQ ID NO: 585865
agcagcuggugacuuaauu

SEQ ID NO: 673729 - RNA, 19 nt, Artificial Sequence
  Description of Artificial Sequence: Synthetic oligonucleotide
  Antisense strand to SEQ ID NO: 673728
aauuaagucaccagcugcu

SEQ ID NO: 673730 - RNA, 19 nt, Artificial Sequence
  Description of Artificial Sequence: Synthetic oligonucleotide
  Sense strand starting at position 1091 of SEQ ID NO: 585865
cuuaauucgcugcaucauu

SEQ ID NO: 673731 - RNA, 19 nt, Artificial Sequence
  Description of Artificial Sequence: Synthetic oligonucleotide
  Antisense strand to SEQ ID NO: 673730
aaugaugcagcgaauuaag

SEQ ID NO: 673732 - RNA, 19 nt, Artificial Sequence
  Description of Artificial Sequence: Synthetic oligonucleotide
  Sense strand starting at position 1120 of SEQ ID NO: 585865
uacagaacgcuauggcaau

SEQ ID NO: 673733 - RNA, 19 nt, Artificial Sequence
  Description of Artificial Sequence: Synthetic oligonucleotide
  Antisense strand to SEQ ID NO: 673732
auugccauagcguucugua

SEQ ID NO: 673734 - RNA, 19 nt, Artificial Sequence
  Description of Artificial Sequence: Synthetic oligonucleotide
  Sense strand starting at position 1253 of SEQ ID NO: 585865
ugagcaaaggugugguaga

SEQ ID NO: 673735 - RNA, 19 nt, Artificial Sequence
  Description of Artificial Sequence: Synthetic oligonucleotide
  Antisense strand to SEQ ID NO: 673734
ucuaccacaccuuugcuca

SEQ ID NO: 673736 - RNA, 19 nt, Artificial Sequence
  Description of Artificial Sequence: Synthetic oligonucleotide
  Sense strand starting at position 1327 of SEQ ID NO: 585865
uucgaaguuggugaaucau

SEQ ID NO: 673737 - RNA, 19 nt, Artificial Sequence
  Description of Artificial Sequence: Synthetic oligonucleotide
  Antisense strand to SEQ ID NO: 673736
augauucaccaacuucgaa

SEQ ID NO: 673738 - RNA, 19 nt, Artificial Sequence
  Description of Artificial Sequence: Synthetic oligonucleotide
  Sense strand starting at position 1378 of SEQ ID NO: 585865
uauuacuggcagugucaga

SEQ ID NO: 673739 - RNA, 19 nt, Artificial Sequence
  Description of Artificial Sequence: Synthetic oligonucleotide
  Antisense strand to SEQ ID NO: 673738
ucugacacugccaguaaua

SEQ ID NO: 673740 - RNA, 19 nt, Artificial Sequence
  Description of Artificial Sequence: Synthetic oligonucleotide
  Sense strand starting at position 1388 of SEQ ID NO: 585865
agugucagaauacgauuaa

SEQ ID NO: 673741 - RNA, 19 nt, Artificial Sequence
  Description of Artificial Sequence: Synthetic oligonucleotide
  Antisense strand to SEQ ID NO: 673740
uuaaucguauucugacacu

SEQ ID NO: 673742 - RNA, 19 nt, Artificial Sequence
  Description of Artificial Sequence: Synthetic oligonucleotide
  Sense strand starting at position 1399 of SEQ ID NO: 585865
acgauuaaaggucggauaa

SEQ ID NO: 673743 - RNA, 19 nt, Artificial Sequence
  Description of Artificial Sequence: Synthetic oligonucleotide
  Antisense strand to SEQ ID NO: 673742
uuauccgaccuuuaaucgu

SEQ ID NO: 673744 - RNA, 19 nt, Artificial Sequence
  Description of Artificial Sequence: Synthetic oligonucleotide
  Sense strand starting at position 1400 of SEQ ID NO: 585865
cgauuaaaggucggauaau

SEQ ID NO: 673745 - RNA, 19 nt, Artificial Sequence
  Description of Artificial Sequence: Synthetic oligonucleotide
  Antisense strand to SEQ ID NO: 673744
auuauccgaccuuuaaucg

SEQ ID NO: 673746 - RNA, 19 nt, Artificial Sequence
  Description of Artificial Sequence: Synthetic oligonucleotide
  Sense strand starting at position 1409 of SEQ ID NO: 585865
gucggauaauaguuugaag

SEQ ID NO: 673747 - RNA, 19 nt, Artificial Sequence
  Description of Artificial Sequence: Synthetic oligonucleotide
  Antisense strand to SEQ ID NO: 673746
cuucaaacuauuauccgac

SEQ ID NO: 673748 - RNA, 19 nt, Artificial Sequence
  Description of Artificial Sequence: Synthetic oligonucleotide
  Sense strand starting at position 1411 of SEQ ID NO: 585865
cggauaauaguuugaagca

SEQ ID NO: 673749 - RNA, 19 nt, Artificial Sequence
  Description of Artificial Sequence: Synthetic oligonucleotide
  Antisense strand to SEQ ID NO: 673748
ugcuucaaacuauuauccg

SEQ ID NO: 673750 - RNA, 19 nt, Artificial Sequence
  Description of Artificial Sequence: Synthetic oligonucleotide
  Sense strand starting at position 1515 of SEQ ID NO: 585865
cgaagaaacguuugccaag

SEQ ID NO: 673751 - RNA, 19 nt, Artificial Sequence
  Description of Artificial Sequence: Synthetic oligonucleotide
  Antisense strand to SEQ ID NO: 673750
cuuggcaaacguuucuucg

SEQ ID NO: 673752 - RNA, 19 nt, Artificial Sequence
  Description of Artificial Sequence: Synthetic oligonucleotide
  Sense strand starting at position 1588 of SEQ ID NO: 585865
cuugcauucccauguaaag

SEQ ID NO: 673753 - RNA, 19 nt, Artificial Sequence
  Description of Artificial Sequence: Synthetic oligonucleotide
  Antisense strand to SEQ ID NO: 673752
cuuuacaugggaaugcaag

SEQ ID NO: 673754 - RNA, 19 nt, Artificial Sequence
  Description of Artificial Sequence: Synthetic oligonucleotide
  Sense strand starting at position 2738 of SEQ ID NO: 585865
cuuaaauuaucuucugcga

SEQ ID NO: 673755 - RNA, 19 nt, Artificial Sequence
  Description of Artificial Sequence: Synthetic oligonucleotide
  Antisense strand to SEQ ID NO: 673754
ucgcagaagauaauuuaag

SEQ ID NO: 673756 - RNA, 19 nt, Artificial Sequence
  Description of Artificial Sequence: Synthetic oligonucleotide
  Sense strand starting at position 2761 of SEQ ID NO: 585865
cccagacgcuggcuaaauu

SEQ ID NO: 673757 - RNA, 19 nt, Artificial Sequence
  Description of Artificial Sequence: Synthetic oligonucleotide
  Antisense strand to SEQ ID NO: 673756
aauuuagccagcgucuggg

SEQ ID NO: 673758 - RNA, 19 nt, Artificial Sequence
  Description of Artificial Sequence: Synthetic oligonucleotide
  Sense strand starting at position 2905 of SEQ ID NO: 585865
ugaugcuuucucgccguua

SEQ ID NO: 673759 - RNA, 19 nt, Artificial Sequence
  Description of Artificial Sequence: Synthetic oligonucleotide
  Antisense strand to SEQ ID NO: 673758
uaacggcgagaaagcauca

SEQ ID NO: 673760 - RNA, 19 nt, Artificial Sequence
  Description of Artificial Sequence: Synthetic oligonucleotide
  Sense strand starting at position 2908 of SEQ ID NO: 585865
ugcuuucucgccguuaaug

SEQ ID NO: 673761 - RNA, 19 nt, Artificial Sequence
  Description of Artificial Sequence: Synthetic oligonucleotide
  Antisense strand to SEQ ID NO: 673760
cauuaacggcgagaaagca

SEQ ID NO: 673762 - RNA, 19 nt, Artificial Sequence
  Description of Artificial Sequence: Synthetic oligonucleotide
  Sense strand starting at position 3023 of SEQ ID NO: 585865
cgucuagacaacgauaugu

SEQ ID NO: 673763 - RNA, 19 nt, Artificial Sequence
  Description of Artificial Sequence: Synthetic oligonucleotide
  Antisense strand to SEQ ID NO: 673762
acauaucguugucuagacg

SEQ ID NO: 673764 - RNA, 19 nt, Artificial Sequence
  Description of Artificial Sequence: Synthetic oligonucleotide
  Sense strand starting at position 3025 of SEQ ID NO: 585865
ucuagacaacgauauguca

SEQ ID NO: 673765 - RNA, 19 nt, Artificial Sequence
  Description of Artificial Sequence: Synthetic oligonucleotide
  Antisense strand to SEQ ID NO: 673764
ugacauaucguugucuaga

SEQ ID NO: 673766 - RNA, 19 nt, Artificial Sequence
  Description of Artificial Sequence: Synthetic oligonucleotide
  Sense strand starting at position 3034 of SEQ ID NO: 585865
cgauaugucaguggcagga

SEQ ID NO: 673767 - RNA, 19 nt, Artificial Sequence
  Description of Artificial Sequence: Synthetic oligonucleotide
  Antisense strand to SEQ ID NO: 673766
uccugccacugacauaucg

SEQ ID NO: 673768 - RNA, 19 nt, Artificial Sequence
  Description of Artificial Sequence: Synthetic oligonucleotide
  Sense strand starting at position 3060 of SEQ ID NO: 585865
ggacuuagguacuaggaaa

SEQ ID NO: 673769 - RNA, 19 nt, Artificial Sequence
  Description of Artificial Sequence: Synthetic oligonucleotide
  Antisense strand to SEQ ID NO: 673768
uuuccuaguaccuaagucc

SEQ ID NO: 673770 - RNA, 19 nt, Artificial Sequence
  Description of Artificial Sequence: Synthetic oligonucleotide
  Sense strand starting at position 3443 of SEQ ID NO: 585865
gagacaaaugccuggcuca

SEQ ID NO: 673771 - RNA, 19 nt, Artificial Sequence
  Description of Artificial Sequence: Synthetic oligonucleotide
  Antisense strand to SEQ ID NO: 673770
ugagccaggcauuugucuc

SEQ ID NO: 673772 - RNA, 19 nt, Artificial Sequence
  Description of Artificial Sequence: Synthetic oligonucleotide
  Sense strand starting at position 3444 of SEQ ID NO: 585865
agacaaaugccuggcucaa

SEQ ID NO: 673773 - RNA, 19 nt, Artificial Sequence
  Description of Artificial Sequence: Synthetic oligonucleotide
  Antisense strand to SEQ ID NO: 673772
uugagccaggcauuugucu

SEQ ID NO: 673774 - RNA, 19 nt, Artificial Sequence
  Description of Artificial Sequence: Synthetic oligonucleotide
  Sense strand starting at position 3756 of SEQ ID NO: 585865
cucccucuccuuuagggaa

SEQ ID NO: 673775 - RNA, 19 nt, Artificial Sequence
  Description of Artificial Sequence: Synthetic oligonucleotide
  Antisense strand to SEQ ID NO: 673774
uucccuaaaggagagggag

SEQ ID NO: 673776 - RNA, 19 nt, Artificial Sequence
  Description of Artificial Sequence: Synthetic oligonucleotide
  Sense strand starting at position 3770 of SEQ ID NO: 585865
gggaaauucucgucacccu

SEQ ID NO: 673777 - RNA, 19 nt, Artificial Sequence
  Description of Artificial Sequence: Synthetic oligonucleotide
  Antisense strand to SEQ ID NO: 673776
agggugacgagaauuuccc

SEQ ID NO: 673778 - RNA, 19 nt, Artificial Sequence
  Description of Artificial Sequence: Synthetic oligonucleotide
  Sense strand starting at position 3771 of SEQ ID NO: 585865
ggaaauucucgucacccua

SEQ ID NO: 673779 - RNA, 19 nt, Artificial Sequence
  Description of Artificial Sequence: Synthetic oligonucleotide
  Antisense strand to SEQ ID NO: 673778
uagggugacgagaauuucc

SEQ ID NO: 673780 - RNA, 19 nt, Artificial Sequence
  Description of Artificial Sequence: Synthetic oligonucleotide
  Sense strand starting at position 3783 of SEQ ID NO: 585865
cacccuauugguugaguua

SEQ ID NO: 673781 - RNA, 19 nt, Artificial Sequence
  Description of Artificial Sequence: Synthetic oligonucleotide
  Antisense strand to SEQ ID NO: 673780
uaacucaaccaauagggug

SEQ ID NO: 673782 - RNA, 19 nt, Artificial Sequence
  Description of Artificial Sequence: Synthetic oligonucleotide
  Sense strand starting at position 3784 of SEQ ID NO: 585865
acccuauugguugaguuaa

SEQ ID NO: 673783 - RNA, 19 nt, Artificial Sequence
  Description of Artificial Sequence: Synthetic oligonucleotide
  Antisense strand to SEQ ID NO: 673782
uuaacucaaccaauagggu

SEQ ID NO: 673784 - RNA, 19 nt, Artificial Sequence
  Description of Artificial Sequence: Synthetic oligonucleotide
  Sense strand starting at position 3792 of SEQ ID NO: 585865
gguugaguuaaccagcauu

SEQ ID NO: 673785 - RNA, 19 nt, Artificial Sequence
  Description of Artificial Sequence: Synthetic oligonucleotide
  Antisense strand to SEQ ID NO: 673784
aaugcugguuaacucaacc

SEQ ID NO: 673786 - RNA, 19 nt, Artificial Sequence
  Description of Artificial Sequence: Synthetic oligonucleotide
  Sense strand starting at position 16 of SEQ ID NO: 585866
uuuggauaggaauguauca

SEQ ID NO: 673787 - RNA, 19 nt, Artificial Sequence
  Description of Artificial Sequence: Synthetic oligonucleotide
  Antisense strand to SEQ ID NO: 673786
ugauacauuccuauccaaa

SEQ ID NO: 673788 - RNA, 19 nt, Artificial Sequence
  Description of Artificial Sequence: Synthetic oligonucleotide
  Sense strand starting at position 51 of SEQ ID NO: 585866
ucuagucuguuggcauaaa

SEQ ID NO: 673789 - RNA, 19 nt, Artificial Sequence
  Description of Artificial Sequence: Synthetic oligonucleotide
  Antisense strand to SEQ ID NO: 673788
uuuaugccaacagacuaga

SEQ ID NO: 673790 - RNA, 19 nt, Artificial Sequence
  Description of Artificial Sequence: Synthetic oligonucleotide
  Sense strand starting at position 320 of SEQ ID NO: 585866
gguucccugagguauaauu

SEQ ID NO: 673791 - RNA, 19 nt, Artificial Sequence
  Description of Artificial Sequence: Synthetic oligonucleotide
  Antisense strand to SEQ ID NO: 673790
aauuauaccucagggaacc

SEQ ID NO: 673792 - RNA, 19 nt, Artificial Sequence
  Description of Artificial Sequence: Synthetic oligonucleotide
  Sense strand starting at position 364 of SEQ ID NO: 585866
uguaguauuguuuaucucu

SEQ ID NO: 673793 - RNA, 19 nt, Artificial Sequence
  Description of Artificial Sequence: Synthetic oligonucleotide
  Antisense strand to SEQ ID NO: 673792
agagauaaacaauacuaca

SEQ ID NO: 673794 - RNA, 19 nt, Artificial Sequence
  Description of Artificial Sequence: Synthetic oligonucleotide
  Sense strand starting at position 367 of SEQ ID NO: 585866
aguauuguuuaucucuaga

SEQ ID NO: 673795 - RNA, 19 nt, Artificial Sequence
  Description of Artificial Sequence: Synthetic oligonucleotide
  Antisense strand to SEQ ID NO: 673794
ucuagagauaaacaauacu

SEQ ID NO: 673796 - RNA, 19 nt, Artificial Sequence
  Description of Artificial Sequence: Synthetic oligonucleotide
  Sense strand starting at position 506 of SEQ ID NO: 585866
ucaagacuguguuuaaauu

SEQ ID NO: 673797 - RNA, 19 nt, Artificial Sequence
  Description of Artificial Sequence: Synthetic oligonucleotide
  Antisense strand to SEQ ID NO: 673796
aauuuaaacacagucuuga

SEQ ID NO: 673798 - RNA, 19 nt, Artificial Sequence
  Description of Artificial Sequence: Synthetic oligonucleotide
  Sense strand starting at position 596 of SEQ ID NO: 585866
uggaaugauuucuaucuuc

SEQ ID NO: 673799 - RNA, 19 nt, Artificial Sequence
  Description of Artificial Sequence: Synthetic oligonucleotide
  Antisense strand to SEQ ID NO: 673798
gaagauagaaaucauucca

SEQ ID NO: 673800 - RNA, 19 nt, Artificial Sequence
  Description of Artificial Sequence: Synthetic oligonucleotide
  Sense strand starting at position 611 of SEQ ID NO: 585866
cuucuuagguuuguuuaaa

SEQ ID NO: 673801 - RNA, 19 nt, Artificial Sequence
  Description of Artificial Sequence: Synthetic oligonucleotide
  Antisense strand to SEQ ID NO: 673800
uuuaaacaaaccuaagaag

SEQ ID NO: 673802 - RNA, 19 nt, Artificial Sequence
  Description of Artificial Sequence: Synthetic oligonucleotide
  Sense strand starting at position 612 of SEQ ID NO: 585866
uucuuagguuuguuuaaac

SEQ ID NO: 673803 - RNA, 19 nt, Artificial Sequence
  Description of Artificial Sequence: Synthetic oligonucleotide
  Antisense strand to SEQ ID NO: 673802
guuuaaacaaaccuaagaa

SEQ ID NO: 673804 - RNA, 19 nt, Artificial Sequence
  Description of Artificial Sequence: Synthetic oligonucleotide
  Sense strand starting at position 672 of SEQ ID NO: 585866
ccgugugugcuuguucaaa

SEQ ID NO: 673805 - RNA, 19 nt, Artificial Sequence
  Description of Artificial Sequence: Synthetic oligonucleotide
  Antisense strand to SEQ ID NO: 673804
uuugaacaagcacacacgg

SEQ ID NO: 673806 - RNA, 19 nt, Artificial Sequence
  Description of Artificial Sequence: Synthetic oligonucleotide
  Sense strand starting at position 714 of SEQ ID NO: 585866
cugccuggauauucuauua

SEQ ID NO: 673807 - RNA, 19 nt, Artificial Sequence
  Description of Artificial Sequence: Synthetic oligonucleotide
  Antisense strand to SEQ ID NO: 673806
uaauagaauauccaggcag

SEQ ID NO: 673808 - RNA, 19 nt, Artificial Sequence
  Description of Artificial Sequence: Synthetic oligonucleotide
  Sense strand starting at position 766 of SEQ ID NO: 585866
cugucaauuucugucguca

SEQ ID NO: 673809 - RNA, 19 nt, Artificial Sequence
  Description of Artificial Sequence: Synthetic oligonucleotide
  Antisense strand to SEQ ID NO: 673808
ugacgacagaaauugacag

SEQ ID NO: 673810 - RNA, 19 nt, Artificial Sequence
  Description of Artificial Sequence: Synthetic oligonucleotide
  Sense strand starting at position 770 of SEQ ID NO: 585866
caauuucugucgucagaac

SEQ ID NO: 673811 - RNA, 19 nt, Artificial Sequence
  Description of Artificial Sequence: Synthetic oligonucleotide
  Antisense strand to SEQ ID NO: 673810
guucugacgacagaaauug

SEQ ID NO: 673812 - RNA, 19 nt, Artificial Sequence
  Description of Artificial Sequence: Synthetic oligonucleotide
  Sense strand starting at position 789 of SEQ ID NO: 585866
ugucauuauuugcuuuaca

SEQ ID NO: 673813 - RNA, 19 nt, Artificial Sequence
  Description of Artificial Sequence: Synthetic oligonucleotide
  Antisense strand to SEQ ID NO: 673812
uguaaagcaaauaaugaca

SEQ ID NO: 673814 - RNA, 19 nt, Artificial Sequence
  Description of Artificial Sequence: Synthetic oligonucleotide
  Sense strand starting at position 790 of SEQ ID NO: 585866
gucauuauuugcuuuacau

SEQ ID NO: 673815 - RNA, 19 nt, Artificial Sequence
  Description of Artificial Sequence: Synthetic oligonucleotide
  Antisense strand to SEQ ID NO: 673814
auguaaagcaaauaaugac

SEQ ID NO: 673816 - RNA, 19 nt, Artificial Sequence
  Description of Artificial Sequence: Synthetic oligonucleotide
  Sense strand starting at position 807 of SEQ ID NO: 585866
auauuaauguagucugaug

SEQ ID NO: 673817 - RNA, 19 nt, Artificial Sequence
  Description of Artificial Sequence: Synthetic oligonucleotide
  Antisense strand to SEQ ID NO: 673816
caucagacuacauuaauau

SEQ ID NO: 673818 - RNA, 19 nt, Artificial Sequence
  Description of Artificial Sequence: Synthetic oligonucleotide
  Sense strand starting at position 1011 of SEQ ID NO: 585866
cuaugugugucuuuaaaua

SEQ ID NO: 673819 - RNA, 19 nt, Artificial Sequence
  Description of Artificial Sequence: Synthetic oligonucleotide
  Antisense strand to SEQ ID NO: 673818
uauuuaaagacacacauag

SEQ ID NO: 673820 - RNA, 19 nt, Artificial Sequence
  Description of Artificial Sequence: Synthetic oligonucleotide
  Sense strand starting at position 1048 of SEQ ID NO: 585866
gauaguauauuauuggauc

SEQ ID NO: 673821 - RNA, 19 nt, Artificial Sequence
  Description of Artificial Sequence: Synthetic oligonucleotide
  Antisense strand to SEQ ID NO: 673820
gauccaauaauauacuauc

SEQ ID NO: 673822 - RNA, 19 nt, Artificial Sequence
  Description of Artificial Sequence: Synthetic oligonucleotide
  Sense strand starting at position 1111 of SEQ ID NO: 585866
uaagaagccugacuugaag

SEQ ID NO: 673823 - RNA, 19 nt, Artificial Sequence
  Description of Artificial Sequence: Synthetic oligonucleotide
  Antisense strand to SEQ ID NO: 673822
cuucaagucaggcuucuua

SEQ ID NO: 673824 - RNA, 19 nt, Artificial Sequence
  Description of Artificial Sequence: Synthetic oligonucleotide
  Sense strand starting at position 2255 of SEQ ID NO: 585866
ggacuuacuauuggcaguu

SEQ ID NO: 673825 - RNA, 19 nt, Artificial Sequence
  Description of Artificial Sequence: Synthetic oligonucleotide
  Antisense strand to SEQ ID NO: 673824
aacugccaauaguaagucc

SEQ ID NO: 673826 - RNA, 19 nt, Artificial Sequence
  Description of Artificial Sequence: Synthetic oligonucleotide
  Sense strand starting at position 2256 of SEQ ID NO: 585866
gacuuacuauuggcaguuu

SEQ ID NO: 673827 - RNA, 19 nt, Artificial Sequence
  Description of Artificial Sequence: Synthetic oligonucleotide
  Antisense strand to SEQ ID NO: 673826
aaacugccaauaguaaguc

SEQ ID NO: 673828 - RNA, 19 nt, Artificial Sequence
  Description of Artificial Sequence: Synthetic oligonucleotide
  Sense strand starting at position 2343 of SEQ ID NO: 585866
guuuaaucgugauuuacuu

SEQ ID NO: 673829 - RNA, 19 nt, Artificial Sequence
  Description of Artificial Sequence: Synthetic oligonucleotide
  Antisense strand to SEQ ID NO: 673828
aaguaaaucacgauuaaac

SEQ ID NO: 673830 - RNA, 19 nt, Artificial Sequence
  Description of Artificial Sequence: Synthetic oligonucleotide
  Sense strand starting at position 2554 of SEQ ID NO: 585866
auuauauaccacgguuaag

SEQ ID NO: 673831 - RNA, 19 nt, Artificial Sequence
  Description of Artificial Sequence: Synthetic oligonucleotide
  Antisense strand to SEQ ID NO: 673830
cuuaaccgugguauauaau

SEQ ID NO: 673832 - RNA, 19 nt, Artificial Sequence
  Description of Artificial Sequence: Synthetic oligonucleotide
  Sense strand starting at position 2683 of SEQ ID NO: 585866
ugaaaugucuuaguuuggu

SEQ ID NO: 673833 - RNA, 19 nt, Artificial Sequence
  Description of Artificial Sequence: Synthetic oligonucleotide
  Antisense strand to SEQ ID NO: 673832
accaaacuaagacauuuca

SEQ ID NO: 673834 - RNA, 19 nt, Artificial Sequence
  Description of Artificial Sequence: Synthetic oligonucleotide
  Sense strand starting at position 2693 of SEQ ID NO: 585866
uaguuuggugugcauauau

SEQ ID NO: 673835 - RNA, 19 nt, Artificial Sequence
  Description of Artificial Sequence: Synthetic oligonucleotide
  Antisense strand to SEQ ID NO: 673834
auauaugcacaccaaacua

SEQ ID NO: 673836 - RNA, 19 nt, Artificial Sequence
  Description of Artificial Sequence: Synthetic oligonucleotide
  Sense strand starting at position 2700 of SEQ ID NO: 585866
gugugcauauauucugaga

SEQ ID NO: 673837 - RNA, 19 nt, Artificial Sequence
  Description of Artificial Sequence: Synthetic oligonucleotide
  Antisense strand to SEQ ID NO: 673836
ucucagaauauaugcacac

SEQ ID NO: 673838 - RNA, 19 nt, Artificial Sequence
  Description of Artificial Sequence: Synthetic oligonucleotide
  Sense strand starting at position 2760 of SEQ ID NO: 585866
ccuggaauuuaggguauuu

SEQ ID NO: 673839 - RNA, 19 nt, Artificial Sequence
  Description of Artificial Sequence: Synthetic oligonucleotide
  Antisense strand to SEQ ID NO: 673838
aaauacccuaaauuccagg

SEQ ID NO: 673840 - RNA, 19 nt, Artificial Sequence
  Description of Artificial Sequence: Synthetic oligonucleotide
  Sense strand starting at position 2840 of SEQ ID NO: 585866
agguaucuuccuuaucauu

SEQ ID NO: 673841 - RNA, 19 nt, Artificial Sequence
  Description of Artificial Sequence: Synthetic oligonucleotide
  Antisense strand to SEQ ID NO: 673840
aaugauaaggaagauaccu

SEQ ID NO: 673842 - RNA, 19 nt, Artificial Sequence
  Description of Artificial Sequence: Synthetic oligonucleotide
  Sense strand starting at position 2918 of SEQ ID NO: 585866
uugcuauuauugguuggga

SEQ ID NO: 673843 - RNA, 19 nt, Artificial Sequence
  Description of Artificial Sequence: Synthetic oligonucleotide
  Antisense strand to SEQ ID NO: 673842
ucccaaccaauaauagcaa

SEQ ID NO: 673844 - RNA, 19 nt, Artificial Sequence
  Description of Artificial Sequence: Synthetic oligonucleotide
  Sense strand starting at position 2921 of SEQ ID NO: 585866
cuauuauugguugggagua

SEQ ID NO: 673845 - RNA, 19 nt, Artificial Sequence
  Description of Artificial Sequence: Synthetic oligonucleotide
  Antisense strand to SEQ ID NO: 673844
uacucccaaccaauaauag

SEQ ID NO: 673846 - RNA, 19 nt, Artificial Sequence
  Description of Artificial Sequence: Synthetic oligonucleotide
  Sense strand starting at position 2936 of SEQ ID NO: 585866
aguacauaguguuuccuaa

SEQ ID NO: 673847 - RNA, 19 nt, Artificial Sequence
  Description of Artificial Sequence: Synthetic oligonucleotide
  Antisense strand to SEQ ID NO: 673846
uuaggaaacacuauguacu

SEQ ID NO: 673848 - RNA, 19 nt, Artificial Sequence
  Description of Artificial Sequence: Synthetic oligonucleotide
  Sense strand starting at position 3059 of SEQ ID NO: 585866
auuuaagaaugccaaaguu

SEQ ID NO: 673849 - RNA, 19 nt, Artificial Sequence
  Description of Artificial Sequence: Synthetic oligonucleotide
  Antisense strand to SEQ ID NO: 673848
aacuuuggcauucuuaaau

SEQ ID NO: 673850 - RNA, 19 nt, Artificial Sequence
  Description of Artificial Sequence: Synthetic oligonucleotide
  Sense strand starting at position 3387 of SEQ ID NO: 585866
cucgaauuauauguaagau

SEQ ID NO: 673851 - RNA, 19 nt, Artificial Sequence
  Description of Artificial Sequence: Synthetic oligonucleotide
  Antisense strand to SEQ ID NO: 673850
aucuuacauauaauucgag

SEQ ID NO: 673852 - RNA, 19 nt, Artificial Sequence
  Description of Artificial Sequence: Synthetic oligonucleotide
  Sense strand starting at position 3466 of SEQ ID NO: 585866
agugguaaacugugaaaga

SEQ ID NO: 673853 - RNA, 19 nt, Artificial Sequence
  Description of Artificial Sequence: Synthetic oligonucleotide
  Antisense strand to SEQ ID NO: 673852
ucuuucacaguuuaccacu

SEQ ID NO: 673854 - RNA, 19 nt, Artificial Sequence
  Description of Artificial Sequence: Synthetic oligonucleotide
  Sense strand starting at position 3520 of SEQ ID NO: 585866
agaaguagaucccuguucu

SEQ ID NO: 673855 - RNA, 19 nt, Artificial Sequence
  Description of Artificial Sequence: Synthetic oligonucleotide
  Antisense strand to SEQ ID NO: 673854
agaacagggaucuacuucu

SEQ ID NO: 673856 - RNA, 19 nt, Artificial Sequence
  Description of Artificial Sequence: Synthetic oligonucleotide
  Sense strand starting at position 3521 of SEQ ID NO: 585866
gaaguagaucccuguucua

SEQ ID NO: 673857 - RNA, 19 nt, Artificial Sequence
  Description of Artificial Sequence: Synthetic oligonucleotide
  Antisense strand to SEQ ID NO: 673856
uagaacagggaucuacuuc

SEQ ID NO: 673858 - RNA, 19 nt, Artificial Sequence
  Description of Artificial Sequence: Synthetic oligonucleotide
  Sense strand starting at position 3698 of SEQ ID NO: 585866
caaggauuguaguuucuag

SEQ ID NO: 673859 - RNA, 19 nt, Artificial Sequence
  Description of Artificial Sequence: Synthetic oligonucleotide
  Antisense strand to SEQ ID NO: 673858
cuagaaacuacaauccuug

SEQ ID NO: 673860 - RNA, 19 nt, Artificial Sequence
  Description of Artificial Sequence: Synthetic oligonucleotide
  Sense strand starting at position 3847 of SEQ ID NO: 585866
cagucccaagugugauuaa

SEQ ID NO: 673861 - RNA, 19 nt, Artificial Sequence
  Description of Artificial Sequence: Synthetic oligonucleotide
  Antisense strand to SEQ ID NO: 673860
uuaaucacacuugggacug

SEQ ID NO: 673862 - RNA, 19 nt, Artificial Sequence
  Description of Artificial Sequence: Synthetic oligonucleotide
  Sense strand starting at position 3850 of SEQ ID NO: 585866
ucccaagugugauuaaaga

SEQ ID NO: 673863 - RNA, 19 nt, Artificial Sequence
  Description of Artificial Sequence: Synthetic oligonucleotide
  Antisense strand to SEQ ID NO: 673862
ucuuuaaucacacuuggga

SEQ ID NO: 673864 - RNA, 19 nt, Artificial Sequence
  Description of Artificial Sequence: Synthetic oligonucleotide
  Sense strand starting at position 3971 of SEQ ID NO: 585866
uuuaguucucuauggaacu

SEQ ID NO: 673865 - RNA, 19 nt, Artificial Sequence
  Description of Artificial Sequence: Synthetic oligonucleotide
  Antisense strand to SEQ ID NO: 673864
aguuccauagagaacuaaa

SEQ ID NO: 673866 - RNA, 19 nt, Artificial Sequence
  Description of Artificial Sequence: Synthetic oligonucleotide
  Sense strand starting at position 95 of SEQ ID NO: 585867
gcauuagcuguacaaccua

SEQ ID NO: 673867 - RNA, 19 nt, Artificial Sequence
  Description of Artificial Sequence: Synthetic oligonucleotide
  Antisense strand to SEQ ID NO: 673866
uagguuguacagcuaaugc

SEQ ID NO: 673868 - RNA, 19 nt, Artificial Sequence
  Description of Artificial Sequence: Synthetic oligonucleotide
  Sense strand starting at position 169 of SEQ ID NO: 585867
uggucugaacugcaguauu

SEQ ID NO: 673869 - RNA, 19 nt, Artificial Sequence
  Description of Artificial Sequence: Synthetic oligonucleotide
  Antisense strand to SEQ ID NO: 673868
aauacugcaguucagacca

SEQ ID NO: 673870 - RNA, 19 nt, Artificial Sequence
  Description of Artificial Sequence: Synthetic oligonucleotide
  Sense strand starting at position 177 of SEQ ID NO: 585867
acugcaguauuugaaugaa

SEQ ID NO: 673871 - RNA, 19 nt, Artificial Sequence
  Description of Artificial Sequence: Synthetic oligonucleotide
  Antisense strand to SEQ ID NO: 673870
uucauucaaauacugcagu

SEQ ID NO: 673872 - RNA, 19 nt, Artificial Sequence
  Description of Artificial Sequence: Synthetic oligonucleotide
  Sense strand starting at position 222 of SEQ ID NO: 585867
ucccuauggcaauaaaugu

SEQ ID NO: 673873 - RNA, 19 nt, Artificial Sequence
  Description of Artificial Sequence: Synthetic oligonucleotide
  Antisense strand to SEQ ID NO: 673872
acauuuauugccauaggga

SEQ ID NO: 673874 - RNA, 19 nt, Artificial Sequence
  Description of Artificial Sequence: Synthetic oligonucleotide
  Sense strand starting at position 229 of SEQ ID NO: 585867
ggcaauaaauguuccaaag

SEQ ID NO: 673875 - RNA, 19 nt, Artificial Sequence
  Description of Artificial Sequence: Synthetic oligonucleotide
  Antisense strand to SEQ ID NO: 673874
cuuuggaacauuuauugcc

SEQ ID NO: 673876 - RNA, 19 nt, Artificial Sequence
  Description of Artificial Sequence: Synthetic oligonucleotide
  Sense strand starting at position 407 of SEQ ID NO: 585867
uuaaguuccucagugacac

SEQ ID NO: 673877 - RNA, 19 nt, Artificial Sequence
  Description of Artificial Sequence: Synthetic oligonucleotide
  Antisense strand to SEQ ID NO: 673876
gugucacugaggaacuuaa

SEQ ID NO: 673878 - RNA, 19 nt, Artificial Sequence
  Description of Artificial Sequence: Synthetic oligonucleotide
  Sense strand starting at position 418 of SEQ ID NO: 585867
agugacacuuaucacauuu

SEQ ID NO: 673879 - RNA, 19 nt, Artificial Sequence
  Description of Artificial Sequence: Synthetic oligonucleotide
  Antisense strand to SEQ ID NO: 673878
aaaugugauaagugucacu

SEQ ID NO: 673880 - RNA, 19 nt, Artificial Sequence
  Description of Artificial Sequence: Synthetic oligonucleotide
  Sense strand starting at position 920 of SEQ ID NO: 585867
cuaauuuauccacguguac

SEQ ID NO: 673881 - RNA, 19 nt, Artificial Sequence
  Description of Artificial Sequence: Synthetic oligonucleotide
  Antisense strand to SEQ ID NO: 673880
guacacguggauaaauuag

SEQ ID NO: 673882 - RNA, 19 nt, Artificial Sequence
  Description of Artificial Sequence: Synthetic oligonucleotide
  Sense strand starting at position 929 of SEQ ID NO: 585867
ccacguguacaguaauacu

SEQ ID NO: 673883 - RNA, 19 nt, Artificial Sequence
  Description of Artificial Sequence: Synthetic oligonucleotide
  Antisense strand to SEQ ID NO: 673882
aguauuacuguacacgugg

SEQ ID NO: 673884 - RNA, 19 nt, Artificial Sequence
  Description of Artificial Sequence: Synthetic oligonucleotide
  Sense strand starting at position 1014 of SEQ ID NO: 585867
gagaccaaguguccugauu

SEQ ID NO: 673885 - RNA, 19 nt, Artificial Sequence
  Description of Artificial Sequence: Synthetic oligonucleotide
  Antisense strand to SEQ ID NO: 673884
aaucaggacacuuggucuc

SEQ ID NO: 673886 - RNA, 19 nt, Artificial Sequence
  Description of Artificial Sequence: Synthetic oligonucleotide
  Sense strand starting at position 1022 of SEQ ID NO: 585867
guguccugauucucugaga

SEQ ID NO: 673887 - RNA, 19 nt, Artificial Sequence
  Description of Artificial Sequence: Synthetic oligonucleotide
  Antisense strand to SEQ ID NO: 673886
ucucagagaaucaggacac

SEQ ID NO: 673888 - RNA, 19 nt, Artificial Sequence
  Description of Artificial Sequence: Synthetic oligonucleotide
  Sense strand starting at position 1023 of SEQ ID NO: 585867
uguccugauucucugagaa

SEQ ID NO: 673889 - RNA, 19 nt, Artificial Sequence
  Description of Artificial Sequence: Synthetic oligonucleotide
  Antisense strand to SEQ ID NO: 673888
uucucagagaaucaggaca

SEQ ID NO: 673890 - RNA, 19 nt, Artificial Sequence
  Description of Artificial Sequence: Synthetic oligonucleotide
  Sense strand starting at position 1046 of SEQ ID NO: 585867
aggucacagucauucugaa

SEQ ID NO: 673891 - RNA, 19 nt, Artificial Sequence
  Description of Artificial Sequence: Synthetic oligonucleotide
  Antisense strand to SEQ ID NO: 673890
uucagaaugacugugaccu

SEQ ID NO: 673892 - RNA, 19 nt, Artificial Sequence
  Description of Artificial Sequence: Synthetic oligonucleotide
  Sense strand starting at position 1120 of SEQ ID NO: 585867
gcuguucuaagcguuuaac

SEQ ID NO: 673893 - RNA, 19 nt, Artificial Sequence
  Description of Artificial Sequence: Synthetic oligonucleotide
  Antisense strand to SEQ ID NO: 673892
guuaaacgcuuagaacagc

SEQ ID NO: 673894 - RNA, 19 nt, Artificial Sequence
  Description of Artificial Sequence: Synthetic oligonucleotide
  Sense strand starting at position 1122 of SEQ ID NO: 585867
uguucuaagcguuuaacgu

SEQ ID NO: 673895 - RNA, 19 nt, Artificial Sequence
  Description of Artificial Sequence: Synthetic oligonucleotide
  Antisense strand to SEQ ID NO: 673894
acguuaaacgcuuagaaca

SEQ ID NO: 673896 - RNA, 19 nt, Artificial Sequence
  Description of Artificial Sequence: Synthetic oligonucleotide
  Sense strand starting at position 1748 of SEQ ID NO: 585867
gcgcuucccgcgaggagaa

SEQ ID NO: 673897 - RNA, 19 nt, Artificial Sequence
  Description of Artificial Sequence: Synthetic oligonucleotide
  Antisense strand to SEQ ID NO: 673896
uucuccucgcgggaagcgc

SEQ ID NO: 673898 - RNA, 19 nt, Artificial Sequence
  Description of Artificial Sequence: Synthetic oligonucleotide
  Sense strand starting at position 1841 of SEQ ID NO: 585867
gagaguguggaguguagaa

SEQ ID NO: 673899 - RNA, 19 nt, Artificial Sequence
  Description of Artificial Sequence: Synthetic oligonucleotide
  Antisense strand to SEQ ID NO: 673898
uucuacacuccacacucuc

SEQ ID NO: 673900 - RNA, 19 nt, Artificial Sequence
  Description of Artificial Sequence: Synthetic oligonucleotide
  Sense strand starting at position 2195 of SEQ ID NO: 585867
aggcuugaauucuuuagga

SEQ ID NO: 673901 - RNA, 19 nt, Artificial Sequence
  Description of Artificial Sequence: Synthetic oligonucleotide
  Antisense strand to SEQ ID NO: 673900
uccuaaagaauucaagccu

SEQ ID NO: 673902 - RNA, 19 nt, Artificial Sequence
  Description of Artificial Sequence: Synthetic oligonucleotide
  Sense strand starting at position 2197 of SEQ ID NO: 585867
gcuugaauucuuuaggaau

SEQ ID NO: 673903 - RNA, 19 nt, Artificial Sequence
  Description of Artificial Sequence: Synthetic oligonucleotide
  Antisense strand to SEQ ID NO: 673902
auuccuaaagaauucaagc

SEQ ID NO: 673904 - RNA, 19 nt, Artificial Sequence
  Description of Artificial Sequence: Synthetic oligonucleotide
  Sense strand starting at position 2219 of SEQ ID NO: 585867
gcccgagagggcuaggauu

SEQ ID NO: 673905 - RNA, 19 nt, Artificial Sequence
  Description of Artificial Sequence: Synthetic oligonucleotide
  Antisense strand to SEQ ID NO: 673904
aauccuagcccucucgggc

SEQ ID NO: 673906 - RNA, 19 nt, Artificial Sequence
  Description of Artificial Sequence: Synthetic oligonucleotide
  Sense strand starting at position 2285 of SEQ ID NO: 585867
ggaagagauucaccguucu

SEQ ID NO: 673907 - RNA, 19 nt, Artificial Sequence
  Description of Artificial Sequence: Synthetic oligonucleotide
  Antisense strand to SEQ ID NO: 673906
agaacggugaaucucuucc

SEQ ID NO: 673908 - RNA, 19 nt, Artificial Sequence
  Description of Artificial Sequence: Synthetic oligonucleotide
  Sense strand starting at position 2302 of SEQ ID NO: 585867
cuaagcuucuuuccaggaa

SEQ ID NO: 673909 - RNA, 19 nt, Artificial Sequence
  Description of Artificial Sequence: Synthetic oligonucleotide
  Antisense strand to SEQ ID NO: 673908
uuccuggaaagaagcuuag

SEQ ID NO: 673910 - RNA, 19 nt, Artificial Sequence
  Description of Artificial Sequence: Synthetic oligonucleotide
  Sense strand starting at position 2305 of SEQ ID NO: 585867
agcuucuuuccaggaauug

SEQ ID NO: 673911 - RNA, 19 nt, Artificial Sequence
  Description of Artificial Sequence: Synthetic oligonucleotide
  Antisense strand to SEQ ID NO: 673910
caauuccuggaaagaagcu

SEQ ID NO: 673912 - RNA, 19 nt, Artificial Sequence
  Description of Artificial Sequence: Synthetic oligonucleotide
  Sense strand starting at position 2972 of SEQ ID NO: 585867
uagauacugugaguucuga

SEQ ID NO: 673913 - RNA, 19 nt, Artificial Sequence
  Description of Artificial Sequence: Synthetic oligonucleotide
  Antisense strand to SEQ ID NO: 673912
ucagaacucacaguaucua

SEQ ID NO: 673914 - RNA, 19 nt, Artificial Sequence
  Description of Artificial Sequence: Synthetic oligonucleotide
  Sense strand starting at position 3039 of SEQ ID NO: 585867
gguuauuuccucuguggau

SEQ ID NO: 673915 - RNA, 19 nt, Artificial Sequence
  Description of Artificial Sequence: Synthetic oligonucleotide
  Antisense strand to SEQ ID NO: 673914
auccacagaggaaauaacc

SEQ ID NO: 673916 - RNA, 19 nt, Artificial Sequence
  Description of Artificial Sequence: Synthetic oligonucleotide
  Sense strand starting at position 3040 of SEQ ID NO: 585867
guuauuuccucuguggauu

SEQ ID NO: 673917 - RNA, 19 nt, Artificial Sequence
  Description of Artificial Sequence: Synthetic oligonucleotide
  Antisense strand to SEQ ID NO: 673916
aauccacagaggaaauaac

SEQ ID NO: 673918 - RNA, 19 nt, Artificial Sequence
  Description of Artificial Sequence: Synthetic oligonucleotide
  Sense strand starting at position 3071 of SEQ ID NO: 585867
gcuaguguuguguuugauu

SEQ ID NO: 673919 - RNA, 19 nt, Artificial Sequence
  Description of Artificial Sequence: Synthetic oligonucleotide
  Antisense strand to SEQ ID NO: 673918
aaucaaacacaacacuagc

SEQ ID NO: 673920 - RNA, 19 nt, Artificial Sequence
  Description of Artificial Sequence: Synthetic oligonucleotide
  Sense strand starting at position 3147 of SEQ ID NO: 585867
agauauauuuaggauguga

SEQ ID NO: 673921 - RNA, 19 nt, Artificial Sequence
  Description of Artificial Sequence: Synthetic oligonucleotide
  Antisense strand to SEQ ID NO: 673920
ucacauccuaaauauaucu

SEQ ID NO: 673922 - RNA, 19 nt, Artificial Sequence
  Description of Artificial Sequence: Synthetic oligonucleotide
  Sense strand starting at position 3171 of SEQ ID NO: 585867
cagcuugauguguaaauca

SEQ ID NO: 673923 - RNA, 19 nt, Artificial Sequence
  Description of Artificial Sequence: Synthetic oligonucleotide
  Antisense strand to SEQ ID NO: 673922
ugauuuacacaucaagcug

SEQ ID NO: 673924 - RNA, 19 nt, Artificial Sequence
  Description of Artificial Sequence: Synthetic oligonucleotide
  Sense strand starting at position 3179 of SEQ ID NO: 585867
uguguaaaucagggaucaa

SEQ ID NO: 673925 - RNA, 19 nt, Artificial Sequence
  Description of Artificial Sequence: Synthetic oligonucleotide
  Antisense strand to SEQ ID NO: 673924
uugaucccugauuuacaca

SEQ ID NO: 673926 - RNA, 19 nt, Artificial Sequence
  Description of Artificial Sequence: Synthetic oligonucleotide
  Sense strand starting at position 3230 of SEQ ID NO: 585867
aaaguaacagagugaguau

SEQ ID NO: 673927 - RNA, 19 nt, Artificial Sequence
  Description of Artificial Sequence: Synthetic oligonucleotide
  Antisense strand to SEQ ID NO: 673926
auacucacucuguuacuuu

SEQ ID NO: 673928 - RNA, 19 nt, Artificial Sequence
  Description of Artificial Sequence: Synthetic oligonucleotide
  Sense strand starting at position 3249 of SEQ ID NO: 585867
ggugauaacuucuuacaug

SEQ ID NO: 673929 - RNA, 19 nt, Artificial Sequence
  Description of Artificial Sequence: Synthetic oligonucleotide
  Antisense strand to SEQ ID NO: 673928
cauguaagaaguuaucacc

SEQ ID NO: 673930 - RNA, 19 nt, Artificial Sequence
  Description of Artificial Sequence: Synthetic oligonucleotide
  Sense strand starting at position 3444 of SEQ ID NO: 585867
ugaguaccuguuugaucca

SEQ ID NO: 673931 - RNA, 19 nt, Artificial Sequence
  Description of Artificial Sequence: Synthetic oligonucleotide
  Antisense strand to SEQ ID NO: 673930
uggaucaaacagguacuca

SEQ ID NO: 673932 - RNA, 19 nt, Artificial Sequence
  Description of Artificial Sequence: Synthetic oligonucleotide
  Sense strand starting at position 3456 of SEQ ID NO: 585867
ugauccaguuuaucaggau

SEQ ID NO: 673933 - RNA, 19 nt, Artificial Sequence
  Description of Artificial Sequence: Synthetic oligonucleotide
  Antisense strand to SEQ ID NO: 673932
auccugauaaacuggauca

SEQ ID NO: 673934 - RNA, 19 nt, Artificial Sequence
  Description of Artificial Sequence: Synthetic oligonucleotide
  Sense strand starting at position 3796 of SEQ ID NO: 585867
agaacuagacuccgucaaa

SEQ ID NO: 673935 - RNA, 19 nt, Artificial Sequence
  Description of Artificial Sequence: Synthetic oligonucleotide
  Antisense strand to SEQ ID NO: 673934
uuugacggagucuaguucu

SEQ ID NO: 673936 - RNA, 19 nt, Artificial Sequence
  Description of Artificial Sequence: Synthetic oligonucleotide
  Sense strand starting at position 3845 of SEQ ID NO: 585867
aguuaaugagagugacaca

SEQ ID NO: 673937 - RNA, 19 nt, Artificial Sequence
  Description of Artificial Sequence: Synthetic oligonucleotide
  Antisense strand to SEQ ID NO: 673936
ugugucacucucauuaacu

SEQ ID NO: 673938 - RNA, 19 nt, Artificial Sequence
  Description of Artificial Sequence: Synthetic oligonucleotide
  Sense strand starting at position 3879 of SEQ ID NO: 585867
gaguuaaggcauugauaca

SEQ ID NO: 673939 - RNA, 19 nt, Artificial Sequence
  Description of Artificial Sequence: Synthetic oligonucleotide
  Antisense strand to SEQ ID NO: 673938
uguaucaaugccuuaacuc

SEQ ID NO: 673940 - RNA, 19 nt, Artificial Sequence
  Description of Artificial Sequence: Synthetic oligonucleotide
  Sense strand starting at position 3886 of SEQ ID NO: 585867
ggcauugauacaggaaguu

SEQ ID NO: 673941 - RNA, 19 nt, Artificial Sequence
  Description of Artificial Sequence: Synthetic oligonucleotide
  Antisense strand to SEQ ID NO: 673940
aacuuccuguaucaaugcc

SEQ ID NO: 673942 - RNA, 19 nt, Artificial Sequence
  Description of Artificial Sequence: Synthetic oligonucleotide
  Sense strand starting at position 3935 of SEQ ID NO: 585867
gcuguuggcagagaucuga

SEQ ID NO: 673943 - RNA, 19 nt, Artificial Sequence
  Description of Artificial Sequence: Synthetic oligonucleotide
  Antisense strand to SEQ ID NO: 673942
ucagaucucugccaacagc

SEQ ID NO: 673944 - RNA, 19 nt, Artificial Sequence
  Description of Artificial Sequence: Synthetic oligonucleotide
  Sense strand starting at position 3967 of SEQ ID NO: 585867
augaguuaaccagguuccu

SEQ ID NO: 673945 - RNA, 19 nt, Artificial Sequence
  Description of Artificial Sequence: Synthetic oligonucleotide
  Antisense strand to SEQ ID NO: 673944
aggaaccugguuaacucau

SEQ ID NO: 673946 - RNA, 19 nt, Artificial Sequence
  Description of Artificial Sequence: Synthetic oligonucleotide
  Sense strand starting at position 42 of SEQ ID NO: 585868
uucugaauuagugggaaau

SEQ ID NO: 673947 - RNA, 19 nt, Artificial Sequence
  Description of Artificial Sequence: Synthetic oligonucleotide
  Antisense strand to SEQ ID NO: 673946
auuucccacuaauucagaa

SEQ ID NO: 673948 - RNA, 19 nt, Artificial Sequence
  Description of Artificial Sequence: Synthetic oligonucleotide
  Sense strand starting at position 78 of SEQ ID NO: 585868
aaauauucccgggagccuu

SEQ ID NO: 673949 - RNA, 19 nt, Artificial Sequence
  Description of Artificial Sequence: Synthetic oligonucleotide
  Antisense strand to SEQ ID NO: 673948
aaggcucccgggaauauuu

SEQ ID NO: 673950 - RNA, 19 nt, Artificial Sequence
  Description of Artificial Sequence: Synthetic oligonucleotide
  Sense strand starting at position 154 of SEQ ID NO: 585868
ucaauucguaugcagagau

SEQ ID NO: 673951 - RNA, 19 nt, Artificial Sequence
  Description of Artificial Sequence: Synthetic oligonucleotide
  Antisense strand to SEQ ID NO: 673950
aucucugcauacgaauuga

SEQ ID NO: 673952 - RNA, 19 nt, Artificial Sequence
  Description of Artificial Sequence: Synthetic oligonucleotide
  Sense strand starting at position 359 of SEQ ID NO: 585868
cagaaagugggaugguuua

SEQ ID NO: 673953 - RNA, 19 nt, Artificial Sequence
  Description of Artificial Sequence: Synthetic oligonucleotide
  Antisense strand to SEQ ID NO: 673952
uaaaccaucccacuuucug

SEQ ID NO: 673954 - RNA, 19 nt, Artificial Sequence
  Description of Artificial Sequence: Synthetic oligonucleotide
  Sense strand starting at position 388 of SEQ ID NO: 585868
aucguuagauucucugaga

SEQ ID NO: 673955 - RNA, 19 nt, Artificial Sequence
  Description of Artificial Sequence: Synthetic oligonucleotide
  Antisense strand to SEQ ID NO: 673954
ucucagagaaucuaacgau

SEQ ID NO: 673956 - RNA, 19 nt, Artificial Sequence
  Description of Artificial Sequence: Synthetic oligonucleotide
  Sense strand starting at position 389 of SEQ ID NO: 585868
ucguuagauucucugagau

SEQ ID NO: 673957 - RNA, 19 nt, Artificial Sequence
  Description of Artificial Sequence: Synthetic oligonucleotide
  Antisense strand to SEQ ID NO: 673956
aucucagagaaucuaacga

SEQ ID NO: 673958 - RNA, 19 nt, Artificial Sequence
  Description of Artificial Sequence: Synthetic oligonucleotide
  Sense strand starting at position 806 of SEQ ID NO: 585868
cugacagaaugucuguaau

SEQ ID NO: 673959 - RNA, 19 nt, Artificial Sequence
  Description of Artificial Sequence: Synthetic oligonucleotide
  Antisense strand to SEQ ID NO: 673958
auuacagacauucugucag

SEQ ID NO: 673960 - RNA, 19 nt, Artificial Sequence
  Description of Artificial Sequence: Synthetic oligonucleotide
  Sense strand starting at position 808 of SEQ ID NO: 585868
gacagaaugucuguaaugu

SEQ ID NO: 673961 - RNA, 19 nt, Artificial Sequence
  Description of Artificial Sequence: Synthetic oligonucleotide
  Antisense strand to SEQ ID NO: 673960
acauuacagacauucuguc

SEQ ID NO: 673962 - RNA, 19 nt, Artificial Sequence
  Description of Artificial Sequence: Synthetic oligonucleotide
  Sense strand starting at position 809 of SEQ ID NO: 585868
acagaaugucuguaauguu

SEQ ID NO: 673963 - RNA, 19 nt, Artificial Sequence
  Description of Artificial Sequence: Synthetic oligonucleotide
  Antisense strand to SEQ ID NO: 673962
aacauuacagacauucugu

SEQ ID NO: 673964 - RNA, 19 nt, Artificial Sequence
  Description of Artificial Sequence: Synthetic oligonucleotide
  Sense strand starting at position 898 of SEQ ID NO: 585868
gggugaggagguuaugcuu

SEQ ID NO: 673965 - RNA, 19 nt, Artificial Sequence
  Description of Artificial Sequence: Synthetic oligonucleotide
  Antisense strand to SEQ ID NO: 673964
aagcauaaccuccucaccc

SEQ ID NO: 673966 - RNA, 19 nt, Artificial Sequence
  Description of Artificial Sequence: Synthetic oligonucleotide
  Sense strand starting at position 913 of SEQ ID NO: 585868
gcuuaagugcucugaauuu

SEQ ID NO: 673967 - RNA, 19 nt, Artificial Sequence
  Description of Artificial Sequence: Synthetic oligonucleotide
  Antisense strand to SEQ ID NO: 673966
aaauucagagcacuuaagc

SEQ ID NO: 673968 - RNA, 19 nt, Artificial Sequence
  Description of Artificial Sequence: Synthetic oligonucleotide
  Sense strand starting at position 942 of SEQ ID NO: 585868
ugauguuagaaagguuucu

SEQ ID NO: 673969 - RNA, 19 nt, Artificial Sequence
  Description of Artificial Sequence: Synthetic oligonucleotide
  Antisense strand to SEQ ID NO: 673968
agaaaccuuucuaacauca

SEQ ID NO: 673970 - RNA, 19 nt, Artificial Sequence
  Description of Artificial Sequence: Synthetic oligonucleotide
  Sense strand starting at position 987 of SEQ ID NO: 585868
ggaagauggcgccagauga

SEQ ID NO: 673971 - RNA, 19 nt, Artificial Sequence
  Description of Artificial Sequence: Synthetic oligonucleotide
  Antisense strand to SEQ ID NO: 673970
ucaucuggcgccaucuucc

SEQ ID NO: 673972 - RNA, 19 nt, Artificial Sequence
  Description of Artificial Sequence: Synthetic oligonucleotide
  Sense strand starting at position 1027 of SEQ ID NO: 585868
aagagugaguuccuggauc

SEQ ID NO: 673973 - RNA, 19 nt, Artificial Sequence
  Description of Artificial Sequence: Synthetic oligonucleotide
  Antisense strand to SEQ ID NO: 673972
gauccaggaacucacucuu

SEQ ID NO: 673974 - RNA, 19 nt, Artificial Sequence
  Description of Artificial Sequence: Synthetic oligonucleotide
  Sense strand starting at position 1029 of SEQ ID NO: 585868
gagugaguuccuggaucua

SEQ ID NO: 673975 - RNA, 19 nt, Artificial Sequence
  Description of Artificial Sequence: Synthetic oligonucleotide
  Antisense strand to SEQ ID NO: 673974
uagauccaggaacucacuc

SEQ ID NO: 673976 - RNA, 19 nt, Artificial Sequence
  Description of Artificial Sequence: Synthetic oligonucleotide
  Sense strand starting at position 1081 of SEQ ID NO: 585868
uggcguccucacuaacaaa

SEQ ID NO: 673977 - RNA, 19 nt, Artificial Sequence
  Description of Artificial Sequence: Synthetic oligonucleotide
  Antisense strand to SEQ ID NO: 673976
uuuguuagugaggacgcca

SEQ ID NO: 673978 - RNA, 19 nt, Artificial Sequence
  Description of Artificial Sequence: Synthetic oligonucleotide
  Sense strand starting at position 1296 of SEQ ID NO: 585868
guccuuugucguucgguua

SEQ ID NO: 673979 - RNA, 19 nt, Artificial Sequence
  Description of Artificial Sequence: Synthetic oligonucleotide
  Antisense strand to SEQ ID NO: 673978
uaaccgaacgacaaaggac

SEQ ID NO: 673980 - RNA, 19 nt, Artificial Sequence
  Description of Artificial Sequence: Synthetic oligonucleotide
  Sense strand starting at position 1435 of SEQ ID NO: 585868
uugcuuuccgaacacgaau

SEQ ID NO: 673981 - RNA, 19 nt, Artificial Sequence
  Description of Artificial Sequence: Synthetic oligonucleotide
  Antisense strand to SEQ ID NO: 673980
auucguguucggaaagcaa

SEQ ID NO: 673982 - RNA, 19 nt, Artificial Sequence
  Description of Artificial Sequence: Synthetic oligonucleotide
  Sense strand starting at position 1475 of SEQ ID NO: 585868
agcgcuauuuagcuaggga

SEQ ID NO: 673983 - RNA, 19 nt, Artificial Sequence
  Description of Artificial Sequence: Synthetic oligonucleotide
  Antisense strand to SEQ ID NO: 673982
ucccuagcuaaauagcgcu

SEQ ID NO: 673984 - RNA, 19 nt, Artificial Sequence
  Description of Artificial Sequence: Synthetic oligonucleotide
  Sense strand starting at position 1476 of SEQ ID NO: 585868
gcgcuauuuagcuagggau

SEQ ID NO: 673985 - RNA, 19 nt, Artificial Sequence
  Description of Artificial Sequence: Synthetic oligonucleotide
  Antisense strand to SEQ ID NO: 673984
aucccuagcuaaauagcgc

SEQ ID NO: 673986 - RNA, 19 nt, Artificial Sequence
  Description of Artificial Sequence: Synthetic oligonucleotide
  Sense strand starting at position 2025 of SEQ ID NO: 585868
aaacguuccuuauuugcga

SEQ ID NO: 673987 - RNA, 19 nt, Artificial Sequence
  Description of Artificial Sequence: Synthetic oligonucleotide
  Antisense strand to SEQ ID NO: 673986
ucgcaaauaaggaacguuu

SEQ ID NO: 673988 - RNA, 19 nt, Artificial Sequence
  Description of Artificial Sequence: Synthetic oligonucleotide
  Sense strand starting at position 2027 of SEQ ID NO: 585868
acguuccuuauuugcgaaa

SEQ ID NO: 673989 - RNA, 19 nt, Artificial Sequence
  Description of Artificial Sequence: Synthetic oligonucleotide
  Antisense strand to SEQ ID NO: 673988
uuucgcaaauaaggaacgu

SEQ ID NO: 673990 - RNA, 19 nt, Artificial Sequence
  Description of Artificial Sequence: Synthetic oligonucleotide
  Sense strand starting at position 2028 of SEQ ID NO: 585868
cguuccuuauuugcgaaau

SEQ ID NO: 673991 - RNA, 19 nt, Artificial Sequence
  Description of Artificial Sequence: Synthetic oligonucleotide
  Antisense strand to SEQ ID NO: 673990
auuucgcaaauaaggaacg

SEQ ID NO: 673992 - RNA, 19 nt, Artificial Sequence
  Description of Artificial Sequence: Synthetic oligonucleotide
  Sense strand starting at position 2052 of SEQ ID NO: 585868
acagauaggcguucgcuuu

SEQ ID NO: 673993 - RNA, 19 nt, Artificial Sequence
  Description of Artificial Sequence: Synthetic oligonucleotide
  Antisense strand to SEQ ID NO: 673992
aaagcgaacgccuaucugu

SEQ ID NO: 673994 - RNA, 19 nt, Artificial Sequence
  Description of Artificial Sequence: Synthetic oligonucleotide
  Sense strand starting at position 2478 of SEQ ID NO: 585868
ccagacuuguacccgauau

SEQ ID NO: 673995 - RNA, 19 nt, Artificial Sequence
  Description of Artificial Sequence: Synthetic oligonucleotide
  Antisense strand to SEQ ID NO: 673994
auaucggguacaagucugg

SEQ ID NO: 673996 - RNA, 19 nt, Artificial Sequence
  Description of Artificial Sequence: Synthetic oligonucleotide
  Sense strand starting at position 2480 of SEQ ID NO: 585868
agacuuguacccgauauua

SEQ ID NO: 673997 - RNA, 19 nt, Artificial Sequence
  Description of Artificial Sequence: Synthetic oligonucleotide
  Antisense strand to SEQ ID NO: 673996
uaauaucggguacaagucu

SEQ ID NO: 673998 - RNA, 19 nt, Artificial Sequence
  Description of Artificial Sequence: Synthetic oligonucleotide
  Sense strand starting at position 2482 of SEQ ID NO: 585868
acuuguacccgauauuauu

SEQ ID NO: 673999 - RNA, 19 nt, Artificial Sequence
  Description of Artificial Sequence: Synthetic oligonucleotide
  Antisense strand to SEQ ID NO: 673998
aauaauaucggguacaagu

SEQ ID NO: 674000 - RNA, 19 nt, Artificial Sequence
  Description of Artificial Sequence: Synthetic oligonucleotide
  Sense strand starting at position 2780 of SEQ ID NO: 585868
ccaaacauccuuuguguaa

SEQ ID NO: 674001 - RNA, 19 nt, Artificial Sequence
  Description of Artificial Sequence: Synthetic oligonucleotide
  Antisense strand to SEQ ID NO: 674000
uuacacaaaggauguuugg

SEQ ID NO: 674002 - RNA, 19 nt, Artificial Sequence
  Description of Artificial Sequence: Synthetic oligonucleotide
  Sense strand starting at position 2809 of SEQ ID NO: 585868
guauuauaacuagaccugu

SEQ ID NO: 674003 - RNA, 19 nt, Artificial Sequence
  Description of Artificial Sequence: Synthetic oligonucleotide
  Antisense strand to SEQ ID NO: 674002
acaggucuaguuauaauac

SEQ ID NO: 674004 - RNA, 19 nt, Artificial Sequence
  Description of Artificial Sequence: Synthetic oligonucleotide
  Sense strand starting at position 2815 of SEQ ID NO: 585868
uaacuagaccugugaguau

SEQ ID NO: 674005 - RNA, 19 nt, Artificial Sequence
  Description of Artificial Sequence: Synthetic oligonucleotide
  Antisense strand to SEQ ID NO: 674004
auacucacaggucuaguua

SEQ ID NO: 674006 - RNA, 19 nt, Artificial Sequence
  Description of Artificial Sequence: Synthetic oligonucleotide
  Sense strand starting at position 2838 of SEQ ID NO: 585868
agucauaauauguacggaa

SEQ ID NO: 674007 - RNA, 19 nt, Artificial Sequence
  Description of Artificial Sequence: Synthetic oligonucleotide
  Antisense strand to SEQ ID NO: 674006
uuccguacauauuaugacu

SEQ ID NO: 674008 - RNA, 19 nt, Artificial Sequence
  Description of Artificial Sequence: Synthetic oligonucleotide
  Sense strand starting at position 2840 of SEQ ID NO: 585868
ucauaauauguacggaaga

SEQ ID NO: 674009 - RNA, 19 nt, Artificial Sequence
  Description of Artificial Sequence: Synthetic oligonucleotide
  Antisense strand to SEQ ID NO: 674008
ucuuccguacauauuauga

SEQ ID NO: 674010 - RNA, 19 nt, Artificial Sequence
  Description of Artificial Sequence: Synthetic oligonucleotide
  Sense strand starting at position 2966 of SEQ ID NO: 585868
auaucaauuuccuggaaag

SEQ ID NO: 674011 - RNA, 19 nt, Artificial Sequence
  Description of Artificial Sequence: Synthetic oligonucleotide
  Antisense strand to SEQ ID NO: 674010
cuuuccaggaaauugauau

SEQ ID NO: 674012 - RNA, 19 nt, Artificial Sequence
  Description of Artificial Sequence: Synthetic oligonucleotide
  Sense strand starting at position 3104 of SEQ ID NO: 585868
caggaacagcugugaguau

SEQ ID NO: 674013 - RNA, 19 nt, Artificial Sequence
  Description of Artificial Sequence: Synthetic oligonucleotide
  Antisense strand to SEQ ID NO: 674012
auacucacagcuguuccug

SEQ ID NO: 674014 - RNA, 19 nt, Artificial Sequence
  Description of Artificial Sequence: Synthetic oligonucleotide
  Sense strand starting at position 3123 of SEQ ID NO: 585868
aagcuauugugagucaaua

SEQ ID NO: 674015 - RNA, 19 nt, Artificial Sequence
  Description of Artificial Sequence: Synthetic oligonucleotide
  Antisense strand to SEQ ID NO: 674014
uauugacucacaauagcuu

SEQ ID NO: 674016 - RNA, 19 nt, Artificial Sequence
  Description of Artificial Sequence: Synthetic oligonucleotide
  Sense strand starting at position 3597 of SEQ ID NO: 585868
caggucucucuaggaacau

SEQ ID NO: 674017 - RNA, 19 nt, Artificial Sequence
  Description of Artificial Sequence: Synthetic oligonucleotide
  Antisense strand to SEQ ID NO: 674016
auguuccuagagagaccug

SEQ ID NO: 674018 - RNA, 19 nt, Artificial Sequence
  Description of Artificial Sequence: Synthetic oligonucleotide
  Sense strand starting at position 3735 of SEQ ID NO: 585868
aggauaaguuaucuuagac

SEQ ID NO: 674019 - RNA, 19 nt, Artificial Sequence
  Description of Artificial Sequence: Synthetic oligonucleotide
  Antisense strand to SEQ ID NO: 674018
gucuaagauaacuuauccu

SEQ ID NO: 674020 - RNA, 19 nt, Artificial Sequence
  Description of Artificial Sequence: Synthetic oligonucleotide
  Sense strand starting at position 3862 of SEQ ID NO: 585868
ggaccuuuggcagacaguu

SEQ ID NO: 674021 - RNA, 19 nt, Artificial Sequence
  Description of Artificial Sequence: Synthetic oligonucleotide
  Antisense strand to SEQ ID NO: 674020
aacugucugccaaaggucc

SEQ ID NO: 674022 - RNA, 19 nt, Artificial Sequence
  Description of Artificial Sequence: Synthetic oligonucleotide
  Sense strand starting at position 3901 of SEQ ID NO: 585868
aaugaaacucgugggugaa

SEQ ID NO: 674023 - RNA, 19 nt, Artificial Sequence
  Description of Artificial Sequence: Synthetic oligonucleotide
  Antisense strand to SEQ ID NO: 674022
uucacccacgaguuucauu

SEQ ID NO: 674024 - RNA, 19 nt, Artificial Sequence
  Description of Artificial Sequence: Synthetic oligonucleotide
  Sense strand starting at position 3903 of SEQ ID NO: 585868
ugaaacucgugggugaaga

SEQ ID NO: 674025 - RNA, 19 nt, Artificial Sequence
  Description of Artificial Sequence: Synthetic oligonucleotide
  Antisense strand to SEQ ID NO: 674024
ucuucacccacgaguuuca

SEQ ID NO: 674026 - RNA, 19 nt, Artificial Sequence
  Description of Artificial Sequence: Synthetic oligonucleotide
  Sense strand starting at position 350 of SEQ ID NO: 585869
uugcaaguguuaguucuua

SEQ ID NO: 674027 - RNA, 19 nt, Artificial Sequence
  Description of Artificial Sequence: Synthetic oligonucleotide
  Antisense strand to SEQ ID NO: 674026
uaagaacuaacacuugcaa

SEQ ID NO: 674028 - RNA, 19 nt, Artificial Sequence
  Description of Artificial Sequence: Synthetic oligonucleotide
  Sense strand starting at position 354 of SEQ ID NO: 585869
aaguguuaguucuuaccug

SEQ ID NO: 674029 - RNA, 19 nt, Artificial Sequence
  Description of Artificial Sequence: Synthetic oligonucleotide
  Antisense strand to SEQ ID NO: 674028
cagguaagaacuaacacuu

SEQ ID NO: 674030 - RNA, 19 nt, Artificial Sequence
  Description of Artificial Sequence: Synthetic oligonucleotide
  Sense strand starting at position 358 of SEQ ID NO: 585869
guuaguucuuaccugcaac

SEQ ID NO: 674031 - RNA, 19 nt, Artificial Sequence
  Description of Artificial Sequence: Synthetic oligonucleotide
  Antisense strand to SEQ ID NO: 674030
guugcagguaagaacuaac

SEQ ID NO: 674032 - RNA, 19 nt, Artificial Sequence
  Description of Artificial Sequence: Synthetic oligonucleotide
  Sense strand starting at position 361 of SEQ ID NO: 585869
aguucuuaccugcaacgua

SEQ ID NO: 674033 - RNA, 19 nt, Artificial Sequence
  Description of Artificial Sequence: Synthetic oligonucleotide
  Antisense strand to SEQ ID NO: 674032
uacguugcagguaagaacu

SEQ ID NO: 674034 - RNA, 19 nt, Artificial Sequence
  Description of Artificial Sequence: Synthetic oligonucleotide
  Sense strand starting at position 397 of SEQ ID NO: 585869
cagcaacuuucugugguaa

SEQ ID NO: 674035 - RNA, 19 nt, Artificial Sequence
  Description of Artificial Sequence: Synthetic oligonucleotide
  Antisense strand to SEQ ID NO: 674034
uuaccacagaaaguugcug

SEQ ID NO: 674036 - RNA, 19 nt, Artificial Sequence
  Description of Artificial Sequence: Synthetic oligonucleotide
  Sense strand starting at position 398 of SEQ ID NO: 585869
agcaacuuucugugguaaa

SEQ ID NO: 674037 - RNA, 19 nt, Artificial Sequence
  Description of Artificial Sequence: Synthetic oligonucleotide
  Antisense strand to SEQ ID NO: 674036
uuuaccacagaaaguugcu

SEQ ID NO: 674038 - RNA, 19 nt, Artificial Sequence
  Description of Artificial Sequence: Synthetic oligonucleotide
  Sense strand starting at position 465 of SEQ ID NO: 585869
guaguauccaugggcucuu

SEQ ID NO: 674039 - RNA, 19 nt, Artificial Sequence
  Description of Artificial Sequence: Synthetic oligonucleotide
  Antisense strand to SEQ ID NO: 674038
aagagcccauggauacuac

SEQ ID NO: 674040 - RNA, 19 nt, Artificial Sequence
  Description of Artificial Sequence: Synthetic oligonucleotide
  Sense strand starting at position 495 of SEQ ID NO: 585869
ccauuaacauguucuguag

SEQ ID NO: 674041 - RNA, 19 nt, Artificial Sequence
  Description of Artificial Sequence: Synthetic oligonucleotide
  Antisense strand to SEQ ID NO: 674040
cuacagaacauguuaaugg

SEQ ID NO: 674042 - RNA, 19 nt, Artificial Sequence
  Description of Artificial Sequence: Synthetic oligonucleotide
  Sense strand starting at position 498 of SEQ ID NO: 585869
uuaacauguucuguagcca

SEQ ID NO: 674043 - RNA, 19 nt, Artificial Sequence
  Description of Artificial Sequence: Synthetic oligonucleotide
  Antisense strand to SEQ ID NO: 674042
uggcuacagaacauguuaa

SEQ ID NO: 674044 - RNA, 19 nt, Artificial Sequence
  Description of Artificial Sequence: Synthetic oligonucleotide
  Sense strand starting at position 510 of SEQ ID NO: 585869
guagccauguuuccagaga

SEQ ID NO: 674045 - RNA, 19 nt, Artificial Sequence
  Description of Artificial Sequence: Synthetic oligonucleotide
  Antisense strand to SEQ ID NO: 674044
ucucuggaaacauggcuac

SEQ ID NO: 674046 - RNA, 19 nt, Artificial Sequence
  Description of Artificial Sequence: Synthetic oligonucleotide
  Sense strand starting at position 664 of SEQ ID NO: 585869
gucacuaucgccugacaag

SEQ ID NO: 674047 - RNA, 19 nt, Artificial Sequence
  Description of Artificial Sequence: Synthetic oligonucleotide
  Antisense strand to SEQ ID NO: 674046
cuugucaggcgauagugac

SEQ ID NO: 674048 - RNA, 19 nt, Artificial Sequence
  Description of Artificial Sequence: Synthetic oligonucleotide
  Sense strand starting at position 830 of SEQ ID NO: 585869
agcugugcccguucggaaa

SEQ ID NO: 674049 - RNA, 19 nt, Artificial Sequence
  Description of Artificial Sequence: Synthetic oligonucleotide
  Antisense strand to SEQ ID NO: 674048
uuuccgaacgggcacagcu

SEQ ID NO: 674050 - RNA, 19 nt, Artificial Sequence
  Description of Artificial Sequence: Synthetic oligonucleotide
  Sense strand starting at position 929 of SEQ ID NO: 585869
ccgcuuauagaucgguaac

SEQ ID NO: 674051 - RNA, 19 nt, Artificial Sequence
  Description of Artificial Sequence: Synthetic oligonucleotide
  Antisense strand to SEQ ID NO: 674050
guuaccgaucuauaagcgg

SEQ ID NO: 674052 - RNA, 19 nt, Artificial Sequence
  Description of Artificial Sequence: Synthetic oligonucleotide
  Sense strand starting at position 930 of SEQ ID NO: 585869
cgcuuauagaucgguaaca

SEQ ID NO: 674053 - RNA, 19 nt, Artificial Sequence
  Description of Artificial Sequence: Synthetic oligonucleotide
  Antisense strand to SEQ ID NO: 674052
uguuaccgaucuauaagcg

SEQ ID NO: 674054 - RNA, 19 nt, Artificial Sequence
  Description of Artificial Sequence: Synthetic oligonucleotide
  Sense strand starting at position 931 of SEQ ID NO: 585869
gcuuauagaucgguaacaa

SEQ ID NO: 674055 - RNA, 19 nt, Artificial Sequence
  Description of Artificial Sequence: Synthetic oligonucleotide
  Antisense strand to SEQ ID NO: 674054
uuguuaccgaucuauaagc

SEQ ID NO: 674056 - RNA, 19 nt, Artificial Sequence
  Description of Artificial Sequence: Synthetic oligonucleotide
  Sense strand starting at position 932 of SEQ ID NO: 585869
cuuauagaucgguaacaac

SEQ ID NO: 674057 - RNA, 19 nt, Artificial Sequence
  Description of Artificial Sequence: Synthetic oligonucleotide
  Antisense strand to SEQ ID NO: 674056
guuguuaccgaucuauaag

SEQ ID NO: 674058 - RNA, 19 nt, Artificial Sequence
  Description of Artificial Sequence: Synthetic oligonucleotide
  Sense strand starting at position 1100 of SEQ ID NO: 585869
gugcucugcgccuuccaau

SEQ ID NO: 674059 - RNA, 19 nt, Artificial Sequence
  Description of Artificial Sequence: Synthetic oligonucleotide
  Antisense strand to SEQ ID NO: 674058
auuggaaggcgcagagcac

SEQ ID NO: 674060 - RNA, 19 nt, Artificial Sequence
  Description of Artificial Sequence: Synthetic oligonucleotide
  Sense strand starting at position 1959 of SEQ ID NO: 585869
gcgaguggagcuguuguaa

SEQ ID NO: 674061 - RNA, 19 nt, Artificial Sequence
  Description of Artificial Sequence: Synthetic oligonucleotide
  Antisense strand to SEQ ID NO: 674060
uuacaacagcuccacucgc

SEQ ID NO: 674062 - RNA, 19 nt, Artificial Sequence
  Description of Artificial Sequence: Synthetic oligonucleotide
  Sense strand starting at position 3275 of SEQ ID NO: 585869
guggugaaggguugugcaa

SEQ ID NO: 674063 - RNA, 19 nt, Artificial Sequence
  Description of Artificial Sequence: Synthetic oligonucleotide
  Antisense strand to SEQ ID NO: 674062
uugcacaacccuucaccac

SEQ ID NO: 674064 - RNA, 19 nt, Artificial Sequence
  Description of Artificial Sequence: Synthetic oligonucleotide
  Sense strand starting at position 3342 of SEQ ID NO: 585869
ggcacaguuugagcaacuu

SEQ ID NO: 674065 - RNA, 19 nt, Artificial Sequence
  Description of Artificial Sequence: Synthetic oligonucleotide
  Antisense strand to SEQ ID NO: 674064
aaguugcucaaacugugcc

SEQ ID NO: 674066 - RNA, 19 nt, Artificial Sequence
  Description of Artificial Sequence: Synthetic oligonucleotide
  Sense strand starting at position 3433 of SEQ ID NO: 585869
gcaacuaaaucuucuguga

SEQ ID NO: 674067 - RNA, 19 nt, Artificial Sequence
  Description of Artificial Sequence: Synthetic oligonucleotide
  Antisense strand to SEQ ID NO: 674066
ucacagaagauuuaguugc

SEQ ID NO: 674068 - RNA, 19 nt, Artificial Sequence
  Description of Artificial Sequence: Synthetic oligonucleotide
  Sense strand starting at position 3437 of SEQ ID NO: 585869
cuaaaucuucugugaaaug

SEQ ID NO: 674069 - RNA, 19 nt, Artificial Sequence
  Description of Artificial Sequence: Synthetic oligonucleotide
  Antisense strand to SEQ ID NO: 674068
cauuucacagaagauuuag

SEQ ID NO: 674070 - RNA, 19 nt, Artificial Sequence
  Description of Artificial Sequence: Synthetic oligonucleotide
  Sense strand starting at position 3442 of SEQ ID NO: 585869
ucuucugugaaaugacguu

SEQ ID NO: 674071 - RNA, 19 nt, Artificial Sequence
  Description of Artificial Sequence: Synthetic oligonucleotide
  Antisense strand to SEQ ID NO: 674070
aacgucauuucacagaaga

SEQ ID NO: 674072 - RNA, 19 nt, Artificial Sequence
  Description of Artificial Sequence: Synthetic oligonucleotide
  Sense strand starting at position 3454 of SEQ ID NO: 585869
ugacguuuccuuuauaauc

SEQ ID NO: 674073 - RNA, 19 nt, Artificial Sequence
  Description of Artificial Sequence: Synthetic oligonucleotide
  Antisense strand to SEQ ID NO: 674072
gauuauaaaggaaacguca

SEQ ID NO: 674074 - RNA, 19 nt, Artificial Sequence
  Description of Artificial Sequence: Synthetic oligonucleotide
  Sense strand starting at position 3469 of SEQ ID NO: 585869
aaucguuuacuagguacaa

SEQ ID NO: 674075 - RNA, 19 nt, Artificial Sequence
  Description of Artificial Sequence: Synthetic oligonucleotide
  Antisense strand to SEQ ID NO: 674074
uuguaccuaguaaacgauu

SEQ ID NO: 674076 - RNA, 19 nt, Artificial Sequence
  Description of Artificial Sequence: Synthetic oligonucleotide
  Sense strand starting at position 3471 of SEQ ID NO: 585869
ucguuuacuagguacaaga

SEQ ID NO: 674077 - RNA, 19 nt, Artificial Sequence
  Description of Artificial Sequence: Synthetic oligonucleotide
  Antisense strand to SEQ ID NO: 674076
ucuuguaccuaguaaacga

SEQ ID NO: 674078 - RNA, 19 nt, Artificial Sequence
  Description of Artificial Sequence: Synthetic oligonucleotide
  Sense strand starting at position 3508 of SEQ ID NO: 585869
uugaauuacagacgcgaua

SEQ ID NO: 674079 - RNA, 19 nt, Artificial Sequence
  Description of Artificial Sequence: Synthetic oligonucleotide
  Antisense strand to SEQ ID NO: 674078
uaucgcgucuguaauucaa

SEQ ID NO: 674080 - RNA, 19 nt, Artificial Sequence
  Description of Artificial Sequence: Synthetic oligonucleotide
  Sense strand starting at position 3510 of SEQ ID NO: 585869
gaauuacagacgcgauaug

SEQ ID NO: 674081 - RNA, 19 nt, Artificial Sequence
  Description of Artificial Sequence: Synthetic oligonucleotide
  Antisense strand to SEQ ID NO: 674080
cauaucgcgucuguaauuc

SEQ ID NO: 674082 - RNA, 19 nt, Artificial Sequence
  Description of Artificial Sequence: Synthetic oligonucleotide
  Sense strand starting at position 3519 of SEQ ID NO: 585869
acgcgauauggauacuaau

SEQ ID NO: 674083 - RNA, 19 nt, Artificial Sequence
  Description of Artificial Sequence: Synthetic oligonucleotide
  Antisense strand to SEQ ID NO: 674082
auuaguauccauaucgcgu

SEQ ID NO: 674084 - RNA, 19 nt, Artificial Sequence
  Description of Artificial Sequence: Synthetic oligonucleotide
  Sense strand starting at position 3619 of SEQ ID NO: 585869
ccagaugagcucugugcua

SEQ ID NO: 674085 - RNA, 19 nt, Artificial Sequence
  Description of Artificial Sequence: Synthetic oligonucleotide
  Antisense strand to SEQ ID NO: 674084
uagcacagagcucaucugg

SEQ ID NO: 674086 - RNA, 19 nt, Artificial Sequence
  Description of Artificial Sequence: Synthetic oligonucleotide
  Sense strand starting at position 3621 of SEQ ID NO: 585869
agaugagcucugugcuaug

SEQ ID NO: 674087 - RNA, 19 nt, Artificial Sequence
  Description of Artificial Sequence: Synthetic oligonucleotide
  Antisense strand to SEQ ID NO: 674086
cauagcacagagcucaucu

SEQ ID NO: 674088 - RNA, 19 nt, Artificial Sequence
  Description of Artificial Sequence: Synthetic oligonucleotide
  Sense strand starting at position 3626 of SEQ ID NO: 585869
agcucugugcuaugauaac

SEQ ID NO: 674089 - RNA, 19 nt, Artificial Sequence
  Description of Artificial Sequence: Synthetic oligonucleotide
  Antisense strand to SEQ ID NO: 674088
guuaucauagcacagagcu

SEQ ID NO: 674090 - RNA, 19 nt, Artificial Sequence
  Description of Artificial Sequence: Synthetic oligonucleotide
  Sense strand starting at position 3639 of SEQ ID NO: 585869
gauaacaaaucagugguuu

SEQ ID NO: 674091 - RNA, 19 nt, Artificial Sequence
  Description of Artificial Sequence: Synthetic oligonucleotide
  Antisense strand to SEQ ID NO: 674090
aaaccacugauuuguuauc

SEQ ID NO: 674092 - RNA, 19 nt, Artificial Sequence
  Description of Artificial Sequence: Synthetic oligonucleotide
  Sense strand starting at position 3645 of SEQ ID NO: 585869
aaaucagugguuugaggaa

SEQ ID NO: 674093 - RNA, 19 nt, Artificial Sequence
  Description of Artificial Sequence: Synthetic oligonucleotide
  Antisense strand to SEQ ID NO: 674092
uuccucaaaccacugauuu

SEQ ID NO: 674094 - RNA, 19 nt, Artificial Sequence
  Description of Artificial Sequence: Synthetic oligonucleotide
  Sense strand starting at position 3719 of SEQ ID NO: 585869
cauagcuacuuggaucaga

SEQ ID NO: 674095 - RNA, 19 nt, Artificial Sequence
  Description of Artificial Sequence: Synthetic oligonucleotide
  Antisense strand to SEQ ID NO: 674094
ucugauccaaguagcuaug

SEQ ID NO: 674096 - RNA, 19 nt, Artificial Sequence
  Description of Artificial Sequence: Synthetic oligonucleotide
  Sense strand starting at position 3724 of SEQ ID NO: 585869
cuacuuggaucagauauga

SEQ ID NO: 674097 - RNA, 19 nt, Artificial Sequence
  Description of Artificial Sequence: Synthetic oligonucleotide
  Antisense strand to SEQ ID NO: 674096
ucauaucugauccaaguag

SEQ ID NO: 674098 - RNA, 19 nt, Artificial Sequence
  Description of Artificial Sequence: Synthetic oligonucleotide
  Sense strand starting at position 3875 of SEQ ID NO: 585869
ugcagaggucgugguuaau

SEQ ID NO: 674099 - RNA, 19 nt, Artificial Sequence
  Description of Artificial Sequence: Synthetic oligonucleotide
  Antisense strand to SEQ ID NO: 674098
auuaaccacgaccucugca

SEQ ID NO: 674100 - RNA, 19 nt, Artificial Sequence
  Description of Artificial Sequence: Synthetic oligonucleotide
  Sense strand starting at position 3878 of SEQ ID NO: 585869
agaggucgugguuaaugau

SEQ ID NO: 674101 - RNA, 19 nt, Artificial Sequence
  Description of Artificial Sequence: Synthetic oligonucleotide
  Antisense strand to SEQ ID NO: 674100
aucauuaaccacgaccucu

SEQ ID NO: 674102 - RNA, 19 nt, Artificial Sequence
  Description of Artificial Sequence: Synthetic oligonucleotide
  Sense strand starting at position 3939 of SEQ ID NO: 585869
agagucauaccauggauua

SEQ ID NO: 674103 - RNA, 19 nt, Artificial Sequence
  Description of Artificial Sequence: Synthetic oligonucleotide
  Antisense strand to SEQ ID NO: 674102
uaauccaugguaugacucu

SEQ ID NO: 674104 - RNA, 19 nt, Artificial Sequence
  Description of Artificial Sequence: Synthetic oligonucleotide
  Sense strand starting at position 3940 of SEQ ID NO: 585869
gagucauaccauggauuaa

SEQ ID NO: 674105 - RNA, 19 nt, Artificial Sequence
  Description of Artificial Sequence: Synthetic oligonucleotide
  Antisense strand to SEQ ID NO: 674104
uuaauccaugguaugacuc

SEQ ID NO: 674106 - RNA, 19 nt, Artificial Sequence
  Description of Artificial Sequence: Synthetic oligonucleotide
  Sense strand starting at position 382 of SEQ ID NO: 585870
uugcaaguguuaguucuua

SEQ ID NO: 674107 - RNA, 19 nt, Artificial Sequence
  Description of Artificial Sequence: Synthetic oligonucleotide
  Antisense strand to SEQ ID NO: 674106
uaagaacuaacacuugcaa

SEQ ID NO: 674108 - RNA, 19 nt, Artificial Sequence
  Description of Artificial Sequence: Synthetic oligonucleotide
  Sense strand starting at position 386 of SEQ ID NO: 585870
aaguguuaguucuuaccug

SEQ ID NO: 674109 - RNA, 19 nt, Artificial Sequence
  Description of Artificial Sequence: Synthetic oligonucleotide
  Antisense strand to SEQ ID NO: 674108
cagguaagaacuaacacuu

SEQ ID NO: 674110 - RNA, 19 nt, Artificial Sequence
  Description of Artificial Sequence: Synthetic oligonucleotide
  Sense strand starting at position 390 of SEQ ID NO: 585870
guuaguucuuaccugcaac

SEQ ID NO: 674111 - RNA, 19 nt, Artificial Sequence
  Description of Artificial Sequence: Synthetic oligonucleotide
  Antisense strand to SEQ ID NO: 674110
guugcagguaagaacuaac

SEQ ID NO: 674112 - RNA, 19 nt, Artificial Sequence
  Description of Artificial Sequence: Synthetic oligonucleotide
  Sense strand starting at position 393 of SEQ ID NO: 585870
aguucuuaccugcaacgua

SEQ ID NO: 674113 - RNA, 19 nt, Artificial Sequence
  Description of Artificial Sequence: Synthetic oligonucleotide
  Antisense strand to SEQ ID NO: 674112
uacguugcagguaagaacu

SEQ ID NO: 674114 - RNA, 19 nt, Artificial Sequence
  Description of Artificial Sequence: Synthetic oligonucleotide
  Sense strand starting at position 429 of SEQ ID NO: 585870
cagcaacuuucugugguaa

SEQ ID NO: 674115 - RNA, 19 nt, Artificial Sequence
  Description of Artificial Sequence: Synthetic oligonucleotide
  Antisense strand to SEQ ID NO: 674114
uuaccacagaaaguugcug

SEQ ID NO: 674116 - RNA, 19 nt, Artificial Sequence
  Description of Artificial Sequence: Synthetic oligonucleotide
  Sense strand starting at position 430 of SEQ ID NO: 585870
agcaacuuucugugguaaa

SEQ ID NO: 674117 - RNA, 19 nt, Artificial Sequence
  Description of Artificial Sequence: Synthetic oligonucleotide
  Antisense strand to SEQ ID NO: 674116
uuuaccacagaaaguugcu

SEQ ID NO: 674118 - RNA, 19 nt, Artificial Sequence
  Description of Artificial Sequence: Synthetic oligonucleotide
  Sense strand starting at position 497 of SEQ ID NO: 585870
guaguauccaugggcucuu

SEQ ID NO: 674119 - RNA, 19 nt, Artificial Sequence
  Description of Artificial Sequence: Synthetic oligonucleotide
  Antisense strand to SEQ ID NO: 674118
aagagcccauggauacuac

SEQ ID NO: 674120 - RNA, 19 nt, Artificial Sequence
  Description of Artificial Sequence: Synthetic oligonucleotide
  Sense strand starting at position 527 of SEQ ID NO: 585870
ccauuaacauguucuguag

SEQ ID NO: 674121 - RNA, 19 nt, Artificial Sequence
  Description of Artificial Sequence: Synthetic oligonucleotide
  Antisense strand to SEQ ID NO: 674120
cuacagaacauguuaaugg

SEQ ID NO: 674122 - RNA, 19 nt, Artificial Sequence
  Description of Artificial Sequence: Synthetic oligonucleotide
  Sense strand starting at position 530 of SEQ ID NO: 585870
uuaacauguucuguagcca

SEQ ID NO: 674123 - RNA, 19 nt, Artificial Sequence
  Description of Artificial Sequence: Synthetic oligonucleotide
  Antisense strand to SEQ ID NO: 674122
uggcuacagaacauguuaa

SEQ ID NO: 674124 - RNA, 19 nt, Artificial Sequence
  Description of Artificial Sequence: Synthetic oligonucleotide
  Sense strand starting at position 542 of SEQ ID NO: 585870
guagccauguuuccagaga

SEQ ID NO: 674125 - RNA, 19 nt, Artificial Sequence
  Description of Artificial Sequence: Synthetic oligonucleotide
  Antisense strand to SEQ ID NO: 674124
ucucuggaaacauggcuac

SEQ ID NO: 674126 - RNA, 19 nt, Artificial Sequence
  Description of Artificial Sequence: Synthetic oligonucleotide
  Sense strand starting at position 696 of SEQ ID NO: 585870
gucacuaucgccugacaag

SEQ ID NO: 674127 - RNA, 19 nt, Artificial Sequence
  Description of Artificial Sequence: Synthetic oligonucleotide
  Antisense strand to SEQ ID NO: 674126
cuugucaggcgauagugac

SEQ ID NO: 674128 - RNA, 19 nt, Artificial Sequence
  Description of Artificial Sequence: Synthetic oligonucleotide
  Sense strand starting at position 862 of SEQ ID NO: 585870
agcugugcccguucggaaa

SEQ ID NO: 674129 - RNA, 19 nt, Artificial Sequence
  Description of Artificial Sequence: Synthetic oligonucleotide
  Antisense strand to SEQ ID NO: 674128
uuuccgaacgggcacagcu

SEQ ID NO: 674130 - RNA, 19 nt, Artificial Sequence
  Description of Artificial Sequence: Synthetic oligonucleotide
  Sense strand starting at position 961 of SEQ ID NO: 585870
ccgcuuauagaucgguaac

SEQ ID NO: 674131 - RNA, 19 nt, Artificial Sequence
  Description of Artificial Sequence: Synthetic oligonucleotide
  Antisense strand to SEQ ID NO: 674130
guuaccgaucuauaagcgg

SEQ ID NO: 674132 - RNA, 19 nt, Artificial Sequence
  Description of Artificial Sequence: Synthetic oligonucleotide
  Sense strand starting at position 962 of SEQ ID NO: 585870
cgcuuauagaucgguaaca

SEQ ID NO: 674133 - RNA, 19 nt, Artificial Sequence
  Description of Artificial Sequence: Synthetic oligonucleotide
  Antisense strand to SEQ ID NO: 674132
uguuaccgaucuauaagcg

SEQ ID NO: 674134 - RNA, 19 nt, Artificial Sequence
  Description of Artificial Sequence: Synthetic oligonucleotide
  Sense strand starting at position 963 of SEQ ID NO: 585870
gcuuauagaucgguaacaa

SEQ ID NO: 674135 - RNA, 19 nt, Artificial Sequence
  Description of Artificial Sequence: Synthetic oligonucleotide
  Antisense strand to SEQ ID NO: 674134
uuguuaccgaucuauaagc

SEQ ID NO: 674136 - RNA, 19 nt, Artificial Sequence
  Description of Artificial Sequence: Synthetic oligonucleotide
  Sense strand starting at position 964 of SEQ ID NO: 585870
cuuauagaucgguaacaac

SEQ ID NO: 674137 - RNA, 19 nt, Artificial Sequence
  Description of Artificial Sequence: Synthetic oligonucleotide
  Antisense strand to SEQ ID NO: 674136
guuguuaccgaucuauaag

SEQ ID NO: 674138 - RNA, 19 nt, Artificial Sequence
  Description of Artificial Sequence: Synthetic oligonucleotide
  Sense strand starting at position 1132 of SEQ ID NO: 585870
gugcucugcgccuuccaau

SEQ ID NO: 674139 - RNA, 19 nt, Artificial Sequence
  Description of Artificial Sequence: Synthetic oligonucleotide
  Antisense strand to SEQ ID NO: 674138
auuggaaggcgcagagcac

SEQ ID NO: 674140 - RNA, 19 nt, Artificial Sequence
  Description of Artificial Sequence: Synthetic oligonucleotide
  Sense strand starting at position 1991 of SEQ ID NO: 585870
gcgaguggagcuguuguaa

SEQ ID NO: 674141 - RNA, 19 nt, Artificial Sequence
  Description of Artificial Sequence: Synthetic oligonucleotide
  Antisense strand to SEQ ID NO: 674140
uuacaacagcuccacucgc

SEQ ID NO: 674142 - RNA, 19 nt, Artificial Sequence
  Description of Artificial Sequence: Synthetic oligonucleotide
  Sense strand starting at position 3307 of SEQ ID NO: 585870
guggugaaggguugugcaa

SEQ ID NO: 674143 - RNA, 19 nt, Artificial Sequence
  Description of Artificial Sequence: Synthetic oligonucleotide
  Antisense strand to SEQ ID NO: 674142
uugcacaacccuucaccac

SEQ ID NO: 674144 - RNA, 19 nt, Artificial Sequence
  Description of Artificial Sequence: Synthetic oligonucleotide
  Sense strand starting at position 3374 of SEQ ID NO: 585870
ggcacaguuugagcaacuu

SEQ ID NO: 674145 - RNA, 19 nt, Artificial Sequence
  Description of Artificial Sequence: Synthetic oligonucleotide
  Antisense strand to SEQ ID NO: 674144
aaguugcucaaacugugcc

SEQ ID NO: 674146 - RNA, 19 nt, Artificial Sequence
  Description of Artificial Sequence: Synthetic oligonucleotide
  Sense strand starting at position 3465 of SEQ ID NO: 585870
gcaacuaaaucuucuguga

SEQ ID NO: 674147 - RNA, 19 nt, Artificial Sequence
  Description of Artificial Sequence: Synthetic oligonucleotide
  Antisense strand to SEQ ID NO: 674146
ucacagaagauuuaguugc

SEQ ID NO: 674148 - RNA, 19 nt, Artificial Sequence
  Description of Artificial Sequence: Synthetic oligonucleotide
  Sense strand starting at position 3469 of SEQ ID NO: 585870
cuaaaucuucugugaaaug

SEQ ID NO: 674149 - RNA, 19 nt, Artificial Sequence
  Description of Artificial Sequence: Synthetic oligonucleotide
  Antisense strand to SEQ ID NO: 674148
cauuucacagaagauuuag

SEQ ID NO: 674150 - RNA, 19 nt, Artificial Sequence
  Description of Artificial Sequence: Synthetic oligonucleotide
  Sense strand starting at position 3474 of SEQ ID NO: 585870
ucuucugugaaaugacguu

SEQ ID NO: 674151 - RNA, 19 nt, Artificial Sequence
  Description of Artificial Sequence: Synthetic oligonucleotide
  Antisense strand to SEQ ID NO: 674150
aacgucauuucacagaaga

SEQ ID NO: 674152 - RNA, 19 nt, Artificial Sequence
  Description of Artificial Sequence: Synthetic oligonucleotide
  Sense strand starting at position 3486 of SEQ ID NO: 585870
ugacguuuccuuuauaauc

SEQ ID NO: 674153 - RNA, 19 nt, Artificial Sequence
  Description of Artificial Sequence: Synthetic oligonucleotide
  Antisense strand to SEQ ID NO: 674152
gauuauaaaggaaacguca

SEQ ID NO: 674154 - RNA, 19 nt, Artificial Sequence
  Description of Artificial Sequence: Synthetic oligonucleotide
  Sense strand starting at position 3501 of SEQ ID NO: 585870
aaucguuuacuagguacaa

SEQ ID NO: 674155 - RNA, 19 nt, Artificial Sequence
  Description of Artificial Sequence: Synthetic oligonucleotide
  Antisense strand to SEQ ID NO: 674154
uuguaccuaguaaacgauu

SEQ ID NO: 674156 - RNA, 19 nt, Artificial Sequence
  Description of Artificial Sequence: Synthetic oligonucleotide
  Sense strand starting at position 3503 of SEQ ID NO: 585870
ucguuuacuagguacaaga

SEQ ID NO: 674157 - RNA, 19 nt, Artificial Sequence
  Description of Artificial Sequence: Synthetic oligonucleotide
  Antisense strand to SEQ ID NO: 674156
ucuuguaccuaguaaacga

SEQ ID NO: 674158 - RNA, 19 nt, Artificial Sequence
  Description of Artificial Sequence: Synthetic oligonucleotide
  Sense strand starting at position 3540 of SEQ ID NO: 585870
uugaauuacagacgcgaua

SEQ ID NO: 674159 - RNA, 19 nt, Artificial Sequence
  Description of Artificial Sequence: Synthetic oligonucleotide
  Antisense strand to SEQ ID NO: 674158
uaucgcgucuguaauucaa

SEQ ID NO: 674160 - RNA, 19 nt, Artificial Sequence
  Description of Artificial Sequence: Synthetic oligonucleotide
  Sense strand starting at position 3542 of SEQ ID NO: 585870
gaauuacagacgcgauaug

SEQ ID NO: 674161 - RNA, 19 nt, Artificial Sequence
  Description of Artificial Sequence: Synthetic oligonucleotide
  Antisense strand to SEQ ID NO: 674160
cauaucgcgucuguaauuc

SEQ ID NO: 674162 - RNA, 19 nt, Artificial Sequence
  Description of Artificial Sequence: Synthetic oligonucleotide
  Sense strand starting at position 3551 of SEQ ID NO: 585870
acgcgauauggauacuaau

SEQ ID NO: 674163 - RNA, 19 nt, Artificial Sequence
  Description of Artificial Sequence: Synthetic oligonucleotide
  Antisense strand to SEQ ID NO: 674162
auuaguauccauaucgcgu

SEQ ID NO: 674164 - RNA, 19 nt, Artificial Sequence
  Description of Artificial Sequence: Synthetic oligonucleotide
  Sense strand starting at position 3651 of SEQ ID NO: 585870
ccagaugagcucugugcua

SEQ ID NO: 674165 - RNA, 19 nt, Artificial Sequence
  Description of Artificial Sequence: Synthetic oligonucleotide
  Antisense strand to SEQ ID NO: 674164
uagcacagagcucaucugg

SEQ ID NO: 674166 - RNA, 19 nt, Artificial Sequence
  Description of Artificial Sequence: Synthetic oligonucleotide
  Sense strand starting at position 3653 of SEQ ID NO: 585870
agaugagcucugugcuaug

SEQ ID NO: 674167 - RNA, 19 nt, Artificial Sequence
  Description of Artificial Sequence: Synthetic oligonucleotide
  Antisense strand to SEQ ID NO: 674166
cauagcacagagcucaucu

SEQ ID NO: 674168 - RNA, 19 nt, Artificial Sequence
  Description of Artificial Sequence: Synthetic oligonucleotide
  Sense strand starting at position 3658 of SEQ ID NO: 585870
agcucugugcuaugauaac

SEQ ID NO: 674169 - RNA, 19 nt, Artificial Sequence
  Description of Artificial Sequence: Synthetic oligonucleotide
  Antisense strand to SEQ ID NO: 674168
guuaucauagcacagagcu

SEQ ID NO: 674170 - RNA, 19 nt, Artificial Sequence
  Description of Artificial Sequence: Synthetic oligonucleotide
  Sense strand starting at position 3671 of SEQ ID NO: 585870
gauaacaaaucagugguuu

SEQ ID NO: 674171 - RNA, 19 nt, Artificial Sequence
  Description of Artificial Sequence: Synthetic oligonucleotide
  Antisense strand to SEQ ID NO: 674170
aaaccacugauuuguuauc

SEQ ID NO: 674172 - RNA, 19 nt, Artificial Sequence
  Description of Artificial Sequence: Synthetic oligonucleotide
  Sense strand starting at position 3677 of SEQ ID NO: 585870
aaaucagugguuugaggaa

SEQ ID NO: 674173 - RNA, 19 nt, Artificial Sequence
  Description of Artificial Sequence: Synthetic oligonucleotide
  Antisense strand to SEQ ID NO: 674172
uuccucaaaccacugauuu

SEQ ID NO: 674174 - RNA, 19 nt, Artificial Sequence
  Description of Artificial Sequence: Synthetic oligonucleotide
  Sense strand starting at position 3751 of SEQ ID NO: 585870
cauagcuacuuggaucaga

SEQ ID NO: 674175 - RNA, 19 nt, Artificial Sequence
  Description of Artificial Sequence: Synthetic oligonucleotide
  Antisense strand to SEQ ID NO: 674174
ucugauccaaguagcuaug

SEQ ID NO: 674176 - RNA, 19 nt, Artificial Sequence
  Description of Artificial Sequence: Synthetic oligonucleotide
  Sense strand starting at position 3756 of SEQ ID NO: 585870
cuacuuggaucagauauga

SEQ ID NO: 674177 - RNA, 19 nt, Artificial Sequence
  Description of Artificial Sequence: Synthetic oligonucleotide
  Antisense strand to SEQ ID NO: 674176
ucauaucugauccaaguag

SEQ ID NO: 674178 - RNA, 19 nt, Artificial Sequence
  Description of Artificial Sequence: Synthetic oligonucleotide
  Sense strand starting at position 3907 of SEQ ID NO: 585870
ugcagaggucgugguuaau

SEQ ID NO: 674179 - RNA, 19 nt, Artificial Sequence
  Description of Artificial Sequence: Synthetic oligonucleotide
  Antisense strand to SEQ ID NO: 674178
auuaaccacgaccucugca

SEQ ID NO: 674180 - RNA, 19 nt, Artificial Sequence
  Description of Artificial Sequence: Synthetic oligonucleotide
  Sense strand starting at position 3910 of SEQ ID NO: 585870
agaggucgugguuaaugau

SEQ ID NO: 674181 - RNA, 19 nt, Artificial Sequence
  Description of Artificial Sequence: Synthetic oligonucleotide
  Antisense strand to SEQ ID NO: 674180
aucauuaaccacgaccucu

SEQ ID NO: 674182 - RNA, 19 nt, Artificial Sequence
  Description of Artificial Sequence: Synthetic oligonucleotide
  Sense strand starting at position 3971 of SEQ ID NO: 585870
agagucauaccauggauua

SEQ ID NO: 674183 - RNA, 19 nt, Artificial Sequence
  Description of Artificial Sequence: Synthetic oligonucleotide
  Antisense strand to SEQ ID NO: 674182
uaauccaugguaugacucu

SEQ ID NO: 674184 - RNA, 19 nt, Artificial Sequence
  Description of Artificial Sequence: Synthetic oligonucleotide
  Sense strand starting at position 3972 of SEQ ID NO: 585870
gagucauaccauggauuaa

SEQ ID NO: 674185 - RNA, 19 nt, Artificial Sequence
  Description of Artificial Sequence: Synthetic oligonucleotide
  Antisense strand to SEQ ID NO: 674184
uuaauccaugguaugacuc

SEQ ID NO: 674186 - RNA, 19 nt, Artificial Sequence
  Description of Artificial Sequence: Synthetic oligonucleotide
  Sense strand starting at position 76 of SEQ ID NO: 585871
ggccuauacccuuaacuga

SEQ ID NO: 674187 - RNA, 19 nt, Artificial Sequence
  Description of Artificial Sequence: Synthetic oligonucleotide
  Antisense strand to SEQ ID NO: 674186
ucaguuaaggguauaggcc

SEQ ID NO: 674188 - RNA, 19 nt, Artificial Sequence
  Description of Artificial Sequence: Synthetic oligonucleotide
  Sense strand starting at position 321 of SEQ ID NO: 585871
ugucaaagcugcuuugaga

SEQ ID NO: 674189 - RNA, 19 nt, Artificial Sequence
  Description of Artificial Sequence: Synthetic oligonucleotide
  Antisense strand to SEQ ID NO: 674188
ucucaaagcagcuuugaca

SEQ ID NO: 674190 - RNA, 19 nt, Artificial Sequence
  Description of Artificial Sequence: Synthetic oligonucleotide
  Sense strand starting at position 441 of SEQ ID NO: 585871
auguacauucuccaucagu

SEQ ID NO: 674191 - RNA, 19 nt, Artificial Sequence
  Description of Artificial Sequence: Synthetic oligonucleotide
  Antisense strand to SEQ ID NO: 674190
acugauggagaauguacau

SEQ ID NO: 674192 - RNA, 19 nt, Artificial Sequence
  Description of Artificial Sequence: Synthetic oligonucleotide
  Sense strand starting at position 508 of SEQ ID NO: 585871
agagguaucaugggugugu

SEQ ID NO: 674193 - RNA, 19 nt, Artificial Sequence
  Description of Artificial Sequence: Synthetic oligonucleotide
  Antisense strand to SEQ ID NO: 674192
acacacccaugauaccucu

SEQ ID NO: 674194 - RNA, 19 nt, Artificial Sequence
  Description of Artificial Sequence: Synthetic oligonucleotide
  Sense strand starting at position 509 of SEQ ID NO: 585871
gagguaucauggguguguu

SEQ ID NO: 674195 - RNA, 19 nt, Artificial Sequence
  Description of Artificial Sequence: Synthetic oligonucleotide
  Antisense strand to SEQ ID NO: 674194
aacacacccaugauaccuc

SEQ ID NO: 674196 - RNA, 19 nt, Artificial Sequence
  Description of Artificial Sequence: Synthetic oligonucleotide
  Sense strand starting at position 510 of SEQ ID NO: 585871
agguaucauggguguguuu

SEQ ID NO: 674197 - RNA, 19 nt, Artificial Sequence
  Description of Artificial Sequence: Synthetic oligonucleotide
  Antisense strand to SEQ ID NO: 674196
aaacacacccaugauaccu

SEQ ID NO: 674198 - RNA, 19 nt, Artificial Sequence
  Description of Artificial Sequence: Synthetic oligonucleotide
  Sense strand starting at position 512 of SEQ ID NO: 585871
guaucauggguguguuucu

SEQ ID NO: 674199 - RNA, 19 nt, Artificial Sequence
  Description of Artificial Sequence: Synthetic oligonucleotide
  Antisense strand to SEQ ID NO: 674198
agaaacacacccaugauac

SEQ ID NO: 674200 - RNA, 19 nt, Artificial Sequence
  Description of Artificial Sequence: Synthetic oligonucleotide
  Sense strand starting at position 517 of SEQ ID NO: 585871
auggguguguuucuuuaua

SEQ ID NO: 674201 - RNA, 19 nt, Artificial Sequence
  Description of Artificial Sequence: Synthetic oligonucleotide
  Antisense strand to SEQ ID NO: 674200
uauaaagaaacacacccau

SEQ ID NO: 674202 - RNA, 19 nt, Artificial Sequence
  Description of Artificial Sequence: Synthetic oligonucleotide
  Sense strand starting at position 519 of SEQ ID NO: 585871
ggguguguuucuuuauacu

SEQ ID NO: 674203 - RNA, 19 nt, Artificial Sequence
  Description of Artificial Sequence: Synthetic oligonucleotide
  Antisense strand to SEQ ID NO: 674202
aguauaaagaaacacaccc

SEQ ID NO: 674204 - RNA, 19 nt, Artificial Sequence
  Description of Artificial Sequence: Synthetic oligonucleotide
  Sense strand starting at position 561 of SEQ ID NO: 585871
aaacaucaguagcuggaua

SEQ ID NO: 674205 - RNA, 19 nt, Artificial Sequence
  Description of Artificial Sequence: Synthetic oligonucleotide
  Antisense strand to SEQ ID NO: 674204
uauccagcuacugauguuu

SEQ ID NO: 674206 - RNA, 19 nt, Artificial Sequence
  Description of Artificial Sequence: Synthetic oligonucleotide
  Sense strand starting at position 574 of SEQ ID NO: 585871
uggauaacaugauaaacuu

SEQ ID NO: 674207 - RNA, 19 nt, Artificial Sequence
  Description of Artificial Sequence: Synthetic oligonucleotide
  Antisense strand to SEQ ID NO: 674206
aaguuuaucauguuaucca

SEQ ID NO: 674208 - RNA, 19 nt, Artificial Sequence
  Description of Artificial Sequence: Synthetic oligonucleotide
  Sense strand starting at position 594 of SEQ ID NO: 585871
acagcaaauugcuuuagaa

SEQ ID NO: 674209 - RNA, 19 nt, Artificial Sequence
  Description of Artificial Sequence: Synthetic oligonucleotide
  Antisense strand to SEQ ID NO: 674208
uucuaaagcaauuugcugu

SEQ ID NO: 674210 - RNA, 19 nt, Artificial Sequence
  Description of Artificial Sequence: Synthetic oligonucleotide
  Sense strand starting at position 596 of SEQ ID NO: 585871
agcaaauugcuuuagaaac

SEQ ID NO: 674211 - RNA, 19 nt, Artificial Sequence
  Description of Artificial Sequence: Synthetic oligonucleotide
  Antisense strand to SEQ ID NO: 674210
guuucuaaagcaauuugcu

SEQ ID NO: 674212 - RNA, 19 nt, Artificial Sequence
  Description of Artificial Sequence: Synthetic oligonucleotide
  Sense strand starting at position 647 of SEQ ID NO: 585871
aggaaagauugaugaauua

SEQ ID NO: 674213 - RNA, 19 nt, Artificial Sequence
  Description of Artificial Sequence: Synthetic oligonucleotide
  Antisense strand to SEQ ID NO: 674212
uaauucaucaaucuuuccu

SEQ ID NO: 674214 - RNA, 19 nt, Artificial Sequence
  Description of Artificial Sequence: Synthetic oligonucleotide
  Sense strand starting at position 779 of SEQ ID NO: 585871
ugccucaucugguccuuua

SEQ ID NO: 674215 - RNA, 19 nt, Artificial Sequence
  Description of Artificial Sequence: Synthetic oligonucleotide
  Antisense strand to SEQ ID NO: 674214
uaaaggaccagaugaggca

SEQ ID NO: 674216 - RNA, 19 nt, Artificial Sequence
  Description of Artificial Sequence: Synthetic oligonucleotide
  Sense strand starting at position 782 of SEQ ID NO: 585871
cucaucugguccuuuacua

SEQ ID NO: 674217 - RNA, 19 nt, Artificial Sequence
  Description of Artificial Sequence: Synthetic oligonucleotide
  Antisense strand to SEQ ID NO: 674216
uaguaaaggaccagaugag

SEQ ID NO: 674218 - RNA, 19 nt, Artificial Sequence
  Description of Artificial Sequence: Synthetic oligonucleotide
  Sense strand starting at position 786 of SEQ ID NO: 585871
ucugguccuuuacuagaau

SEQ ID NO: 674219 - RNA, 19 nt, Artificial Sequence
  Description of Artificial Sequence: Synthetic oligonucleotide
  Antisense strand to SEQ ID NO: 674218
auucuaguaaaggaccaga

SEQ ID NO: 674220 - RNA, 19 nt, Artificial Sequence
  Description of Artificial Sequence: Synthetic oligonucleotide
  Sense strand starting at position 1006 of SEQ ID NO: 585871
agagaucacugucuuuaaa

SEQ ID NO: 674221 - RNA, 19 nt, Artificial Sequence
  Description of Artificial Sequence: Synthetic oligonucleotide
  Antisense strand to SEQ ID NO: 674220
uuuaaagacagugaucucu

SEQ ID NO: 674222 - RNA, 19 nt, Artificial Sequence
  Description of Artificial Sequence: Synthetic oligonucleotide
  Sense strand starting at position 1168 of SEQ ID NO: 585871
gaagacuauguuggcaaua

SEQ ID NO: 674223 - RNA, 19 nt, Artificial Sequence
  Description of Artificial Sequence: Synthetic oligonucleotide
  Antisense strand to SEQ ID NO: 674222
uauugccaacauagucuuc

SEQ ID NO: 674224 - RNA, 19 nt, Artificial Sequence
  Description of Artificial Sequence: Synthetic oligonucleotide
  Sense strand starting at position 1190 of SEQ ID NO: 585871
guacaugugugccuuuaca

SEQ ID NO: 674225 - RNA, 19 nt, Artificial Sequence
  Description of Artificial Sequence: Synthetic oligonucleotide
  Antisense strand to SEQ ID NO: 674224
uguaaaggcacacauguac

SEQ ID NO: 674226 - RNA, 19 nt, Artificial Sequence
  Description of Artificial Sequence: Synthetic oligonucleotide
  Sense strand starting at position 1350 of SEQ ID NO: 585871
gucugauaacucugaacac

SEQ ID NO: 674227 - RNA, 19 nt, Artificial Sequence
  Description of Artificial Sequence: Synthetic oligonucleotide
  Antisense strand to SEQ ID NO: 674226
guguucagaguuaucagac

SEQ ID NO: 674228 - RNA, 19 nt, Artificial Sequence
  Description of Artificial Sequence: Synthetic oligonucleotide
  Sense strand starting at position 1359 of SEQ ID NO: 585871
cucugaacacuacgguauu

SEQ ID NO: 674229 - RNA, 19 nt, Artificial Sequence
  Description of Artificial Sequence: Synthetic oligonucleotide
  Antisense strand to SEQ ID NO: 674228
aauaccguaguguucagag

SEQ ID NO: 674230 - RNA, 19 nt, Artificial Sequence
  Description of Artificial Sequence: Synthetic oligonucleotide
  Sense strand starting at position 1821 of SEQ ID NO: 585871
uugcaaguguuaguucuua

SEQ ID NO: 674231 - RNA, 19 nt, Artificial Sequence
  Description of Artificial Sequence: Synthetic oligonucleotide
  Antisense strand to SEQ ID NO: 674230
uaagaacuaacacuugcaa

SEQ ID NO: 674232 - RNA, 19 nt, Artificial Sequence
  Description of Artificial Sequence: Synthetic oligonucleotide
  Sense strand starting at position 1825 of SEQ ID NO: 585871
aaguguuaguucuuaccug

SEQ ID NO: 674233 - RNA, 19 nt, Artificial Sequence
  Description of Artificial Sequence: Synthetic oligonucleotide
  Antisense strand to SEQ ID NO: 674232
cagguaagaacuaacacuu

SEQ ID NO: 674234 - RNA, 19 nt, Artificial Sequence
  Description of Artificial Sequence: Synthetic oligonucleotide
  Sense strand starting at position 1829 of SEQ ID NO: 585871
guuaguucuuaccugcaac

SEQ ID NO: 674235 - RNA, 19 nt, Artificial Sequence
  Description of Artificial Sequence: Synthetic oligonucleotide
  Antisense strand to SEQ ID NO: 674234
guugcagguaagaacuaac

SEQ ID NO: 674236 - RNA, 19 nt, Artificial Sequence
  Description of Artificial Sequence: Synthetic oligonucleotide
  Sense strand starting at position 1832 of SEQ ID NO: 585871
aguucuuaccugcaacgua

SEQ ID NO: 674237 - RNA, 19 nt, Artificial Sequence
  Description of Artificial Sequence: Synthetic oligonucleotide
  Antisense strand to SEQ ID NO: 674236
uacguugcagguaagaacu

SEQ ID NO: 674238 - RNA, 19 nt, Artificial Sequence
  Description of Artificial Sequence: Synthetic oligonucleotide
  Sense strand starting at position 1868 of SEQ ID NO: 585871
cagcaacuuucugugguaa

SEQ ID NO: 674239 - RNA, 19 nt, Artificial Sequence
  Description of Artificial Sequence: Synthetic oligonucleotide
  Antisense strand to SEQ ID NO: 674238
uuaccacagaaaguugcug

SEQ ID NO: 674240 - RNA, 19 nt, Artificial Sequence
  Description of Artificial Sequence: Synthetic oligonucleotide
  Sense strand starting at position 1869 of SEQ ID NO: 585871
agcaacuuucugugguaaa

SEQ ID NO: 674241 - RNA, 19 nt, Artificial Sequence
  Description of Artificial Sequence: Synthetic oligonucleotide
  Antisense strand to SEQ ID NO: 674240
uuuaccacagaaaguugcu

SEQ ID NO: 674242 - RNA, 19 nt, Artificial Sequence
  Description of Artificial Sequence: Synthetic oligonucleotide
  Sense strand starting at position 1936 of SEQ ID NO: 585871
guaguauccaugggcucuu

SEQ ID NO: 674243 - RNA, 19 nt, Artificial Sequence
  Description of Artificial Sequence: Synthetic oligonucleotide
  Antisense strand to SEQ ID NO: 674242
aagagcccauggauacuac

SEQ ID NO: 674244 - RNA, 19 nt, Artificial Sequence
  Description of Artificial Sequence: Synthetic oligonucleotide
  Sense strand starting at position 1966 of SEQ ID NO: 585871
ccauuaacauguucuguag

SEQ ID NO: 674245 - RNA, 19 nt, Artificial Sequence
  Description of Artificial Sequence: Synthetic oligonucleotide
  Antisense strand to SEQ ID NO: 674244
cuacagaacauguuaaugg

SEQ ID NO: 674246 - RNA, 19 nt, Artificial Sequence
  Description of Artificial Sequence: Synthetic oligonucleotide
  Sense strand starting at position 1969 of SEQ ID NO: 585871
uuaacauguucuguagcca

SEQ ID NO: 674247 - RNA, 19 nt, Artificial Sequence
  Description of Artificial Sequence: Synthetic oligonucleotide
  Antisense strand to SEQ ID NO: 674246
uggcuacagaacauguuaa

SEQ ID NO: 674248 - RNA, 19 nt, Artificial Sequence
  Description of Artificial Sequence: Synthetic oligonucleotide
  Sense strand starting at position 1981 of SEQ ID NO: 585871
guagccauguuuccagaga

SEQ ID NO: 674249 - RNA, 19 nt, Artificial Sequence
  Description of Artificial Sequence: Synthetic oligonucleotide
  Antisense strand to SEQ ID NO: 674248
ucucuggaaacauggcuac

SEQ ID NO: 674250 - RNA, 19 nt, Artificial Sequence
  Description of Artificial Sequence: Synthetic oligonucleotide
  Sense strand starting at position 2135 of SEQ ID NO: 585871
gucacuaucgccugacaag

SEQ ID NO: 674251 - RNA, 19 nt, Artificial Sequence
  Description of Artificial Sequence: Synthetic oligonucleotide
  Antisense strand to SEQ ID NO: 674250
cuugucaggcgauagugac

SEQ ID NO: 674252 - RNA, 19 nt, Artificial Sequence
  Description of Artificial Sequence: Synthetic oligonucleotide
  Sense strand starting at position 2301 of SEQ ID NO: 585871
agcugugcccguucggaaa

SEQ ID NO: 674253 - RNA, 19 nt, Artificial Sequence
  Description of Artificial Sequence: Synthetic oligonucleotide
  Antisense strand to SEQ ID NO: 674252
uuuccgaacgggcacagcu

SEQ ID NO: 674254 - RNA, 19 nt, Artificial Sequence
  Description of Artificial Sequence: Synthetic oligonucleotide
  Sense strand starting at position 2400 of SEQ ID NO: 585871
ccgcuuauagaucgguaac

SEQ ID NO: 674255 - RNA, 19 nt, Artificial Sequence
  Description of Artificial Sequence: Synthetic oligonucleotide
  Antisense strand to SEQ ID NO: 674254
guuaccgaucuauaagcgg

SEQ ID NO: 674256 - RNA, 19 nt, Artificial Sequence
  Description of Artificial Sequence: Synthetic oligonucleotide
  Sense strand starting at position 2401 of SEQ ID NO: 585871
cgcuuauagaucgguaaca

SEQ ID NO: 674257 - RNA, 19 nt, Artificial Sequence
  Description of Artificial Sequence: Synthetic oligonucleotide
  Antisense strand to SEQ ID NO: 674256
uguuaccgaucuauaagcg

SEQ ID NO: 674258 - RNA, 19 nt, Artificial Sequence
  Description of Artificial Sequence: Synthetic oligonucleotide
  Sense strand starting at position 2402 of SEQ ID NO: 585871
gcuuauagaucgguaacaa

SEQ ID NO: 674259 - RNA, 19 nt, Artificial Sequence
  Description of Artificial Sequence: Synthetic oligonucleotide
  Antisense strand to SEQ ID NO: 674258
uuguuaccgaucuauaagc

SEQ ID NO: 674260 - RNA, 19 nt, Artificial Sequence
  Description of Artificial Sequence: Synthetic oligonucleotide
  Sense strand starting at position 2403 of SEQ ID NO: 585871
cuuauagaucgguaacaac

SEQ ID NO: 674261 - RNA, 19 nt, Artificial Sequence
  Description of Artificial Sequence: Synthetic oligonucleotide
  Antisense strand to SEQ ID NO: 674260
guuguuaccgaucuauaag

SEQ ID NO: 674262 - RNA, 19 nt, Artificial Sequence
  Description of Artificial Sequence: Synthetic oligonucleotide
  Sense strand starting at position 2571 of SEQ ID NO: 585871
gugcucugcgccuuccaau

SEQ ID NO: 674263 - RNA, 19 nt, Artificial Sequence
  Description of Artificial Sequence: Synthetic oligonucleotide
  Antisense strand to SEQ ID NO: 674262
auuggaaggcgcagagcac

SEQ ID NO: 674264 - RNA, 19 nt, Artificial Sequence
  Description of Artificial Sequence: Synthetic oligonucleotide
  Sense strand starting at position 3430 of SEQ ID NO: 585871
gcgaguggagcuguuguaa

SEQ ID NO: 674265 - RNA, 19 nt, Artificial Sequence
  Description of Artificial Sequence: Synthetic oligonucleotide
  Antisense strand to SEQ ID NO: 674264
uuacaacagcuccacucgc

SEQ ID NO: 674266 - RNA, 19 nt, Artificial Sequence
  Description of Artificial Sequence: Synthetic oligonucleotide
  Sense strand starting at position 62 of SEQ ID NO: 585872
guaguauccaugggcucuu

SEQ ID NO: 674267 - RNA, 19 nt, Artificial Sequence
  Description of Artificial Sequence: Synthetic oligonucleotide
  Antisense strand to SEQ ID NO: 674266
aagagcccauggauacuac

SEQ ID NO: 674268 - RNA, 19 nt, Artificial Sequence
  Description of Artificial Sequence: Synthetic oligonucleotide
  Sense strand starting at position 92 of SEQ ID NO: 585872
ccauuaacauguucuguag

SEQ ID NO: 674269 - RNA, 19 nt, Artificial Sequence
  Description of Artificial Sequence: Synthetic oligonucleotide
  Antisense strand to SEQ ID NO: 674268
cuacagaacauguuaaugg

SEQ ID NO: 674270 - RNA, 19 nt, Artificial Sequence
  Description of Artificial Sequence: Synthetic oligonucleotide
  Sense strand starting at position 95 of SEQ ID NO: 585872
uuaacauguucuguagcca

SEQ ID NO: 674271 - RNA, 19 nt, Artificial Sequence
  Description of Artificial Sequence: Synthetic oligonucleotide
  Antisense strand to SEQ ID NO: 674270
uggcuacagaacauguuaa

SEQ ID NO: 674272 - RNA, 19 nt, Artificial Sequence
  Description of Artificial Sequence: Synthetic oligonucleotide
  Sense strand starting at position 107 of SEQ ID NO: 585872
guagccauguuuccagaga

SEQ ID NO: 674273 - RNA, 19 nt, Artificial Sequence
  Description of Artificial Sequence: Synthetic oligonucleotide
  Antisense strand to SEQ ID NO: 674272
ucucuggaaacauggcuac

SEQ ID NO: 674274 - RNA, 19 nt, Artificial Sequence
  Description of Artificial Sequence: Synthetic oligonucleotide
  Sense strand starting at position 261 of SEQ ID NO: 585872
gucacuaucgccugacaag

SEQ ID NO: 674275 - RNA, 19 nt, Artificial Sequence
  Description of Artificial Sequence: Synthetic oligonucleotide
  Antisense strand to SEQ ID NO: 674274
cuugucaggcgauagugac

SEQ ID NO: 674276 - RNA, 19 nt, Artificial Sequence
  Description of Artificial Sequence: Synthetic oligonucleotide
  Sense strand starting at position 427 of SEQ ID NO: 585872
agcugugcccguucggaaa

SEQ ID NO: 674277 - RNA, 19 nt, Artificial Sequence
  Description of Artificial Sequence: Synthetic oligonucleotide
  Antisense strand to SEQ ID NO: 674276
uuuccgaacgggcacagcu

SEQ ID NO: 674278 - RNA, 19 nt, Artificial Sequence
  Description of Artificial Sequence: Synthetic oligonucleotide
  Sense strand starting at position 526 of SEQ ID NO: 585872
ccgcuuauagaucgguaac

SEQ ID NO: 674279 - RNA, 19 nt, Artificial Sequence
  Description of Artificial Sequence: Synthetic oligonucleotide
  Antisense strand to SEQ ID NO: 674278
guuaccgaucuauaagcgg

SEQ ID NO: 674280 - RNA, 19 nt, Artificial Sequence
  Description of Artificial Sequence: Synthetic oligonucleotide
  Sense strand starting at position 527 of SEQ ID NO: 585872
cgcuuauagaucgguaaca

SEQ ID NO: 674281 - RNA, 19 nt, Artificial Sequence
  Description of Artificial Sequence: Synthetic oligonucleotide
  Antisense strand to SEQ ID NO: 674280
uguuaccgaucuauaagcg

SEQ ID NO: 674282 - RNA, 19 nt, Artificial Sequence
  Description of Artificial Sequence: Synthetic oligonucleotide
  Sense strand starting at position 528 of SEQ ID NO: 585872
gcuuauagaucgguaacaa

SEQ ID NO: 674283 - RNA, 19 nt, Artificial Sequence
  Description of Artificial Sequence: Synthetic oligonucleotide
  Antisense strand to SEQ ID NO: 674282
uuguuaccgaucuauaagc

SEQ ID NO: 674284 - RNA, 19 nt, Artificial Sequence
  Description of Artificial Sequence: Synthetic oligonucleotide
  Sense strand starting at position 529 of SEQ ID NO: 585872
cuuauagaucgguaacaac

SEQ ID NO: 674285 - RNA, 19 nt, Artificial Sequence
  Description of Artificial Sequence: Synthetic oligonucleotide
  Antisense strand to SEQ ID NO: 674284
guuguuaccgaucuauaag

SEQ ID NO: 674286 - RNA, 19 nt, Artificial Sequence
  Description of Artificial Sequence: Synthetic oligonucleotide
  Sense strand starting at position 697 of SEQ ID NO: 585872
gugcucugcgccuuccaau

SEQ ID NO: 674287 - RNA, 19 nt, Artificial Sequence
  Description of Artificial Sequence: Synthetic oligonucleotide
  Antisense strand to SEQ ID NO: 674286
auuggaaggcgcagagcac

SEQ ID NO: 674288 - RNA, 19 nt, Artificial Sequence
  Description of Artificial Sequence: Synthetic oligonucleotide
  Sense strand starting at position 1556 of SEQ ID NO: 585872
gcgaguggagcuguuguaa

SEQ ID NO: 674289 - RNA, 19 nt, Artificial Sequence
  Description of Artificial Sequence: Synthetic oligonucleotide
  Antisense strand to SEQ ID NO: 674288
uuacaacagcuccacucgc

SEQ ID NO: 674290 - RNA, 19 nt, Artificial Sequence
  Description of Artificial Sequence: Synthetic oligonucleotide
  Sense strand starting at position 2872 of SEQ ID NO: 585872
guggugaaggguugugcaa

SEQ ID NO: 674291 - RNA, 19 nt, Artificial Sequence
  Description of Artificial Sequence: Synthetic oligonucleotide
  Antisense strand to SEQ ID NO: 674290
uugcacaacccuucaccac

SEQ ID NO: 674292 - RNA, 19 nt, Artificial Sequence
  Description of Artificial Sequence: Synthetic oligonucleotide
  Sense strand starting at position 2939 of SEQ ID NO: 585872
ggcacaguuugagcaacuu

SEQ ID NO: 674293 - RNA, 19 nt, Artificial Sequence
  Description of Artificial Sequence: Synthetic oligonucleotide
  Antisense strand to SEQ ID NO: 674292
aaguugcucaaacugugcc

SEQ ID NO: 674294 - RNA, 19 nt, Artificial Sequence
  Description of Artificial Sequence: Synthetic oligonucleotide
  Sense strand starting at position 3030 of SEQ ID NO: 585872
gcaacuaaaucuucuguga

SEQ ID NO: 674295 - RNA, 19 nt, Artificial Sequence
  Description of Artificial Sequence: Synthetic oligonucleotide
  Antisense strand to SEQ ID NO: 674294
ucacagaagauuuaguugc

SEQ ID NO: 674296 - RNA, 19 nt, Artificial Sequence
  Description of Artificial Sequence: Synthetic oligonucleotide
  Sense strand starting at position 3034 of SEQ ID NO: 585872
cuaaaucuucugugaaaug

SEQ ID NO: 674297 - RNA, 19 nt, Artificial Sequence
  Description of Artificial Sequence: Synthetic oligonucleotide
  Antisense strand to SEQ ID NO: 674296
cauuucacagaagauuuag

SEQ ID NO: 674298 - RNA, 19 nt, Artificial Sequence
  Description of Artificial Sequence: Synthetic oligonucleotide
  Sense strand starting at position 3039 of SEQ ID NO: 585872
ucuucugugaaaugacguu

SEQ ID NO: 674299 - RNA, 19 nt, Artificial Sequence
  Description of Artificial Sequence: Synthetic oligonucleotide
  Antisense strand to SEQ ID NO: 674298
aacgucauuucacagaaga

SEQ ID NO: 674300 - RNA, 19 nt, Artificial Sequence
  Description of Artificial Sequence: Synthetic oligonucleotide
  Sense strand starting at position 3051 of SEQ ID NO: 585872
ugacguuuccuuuauaauc

SEQ ID NO: 674301 - RNA, 19 nt, Artificial Sequence
  Description of Artificial Sequence: Synthetic oligonucleotide
  Antisense strand to SEQ ID NO: 674300
gauuauaaaggaaacguca

SEQ ID NO: 674302 - RNA, 19 nt, Artificial Sequence
  Description of Artificial Sequence: Synthetic oligonucleotide
  Sense strand starting at position 3066 of SEQ ID NO: 585872
aaucguuuacuagguacaa

SEQ ID NO: 674303 - RNA, 19 nt, Artificial Sequence
  Description of Artificial Sequence: Synthetic oligonucleotide
  Antisense strand to SEQ ID NO: 674302
uuguaccuaguaaacgauu

SEQ ID NO: 674304 - RNA, 19 nt, Artificial Sequence
  Description of Artificial Sequence: Synthetic oligonucleotide
  Sense strand starting at position 3068 of SEQ ID NO: 585872
ucguuuacuagguacaaga

SEQ ID NO: 674305 - RNA, 19 nt, Artificial Sequence
  Description of Artificial Sequence: Synthetic oligonucleotide
  Antisense strand to SEQ ID NO: 674304
ucuuguaccuaguaaacga

SEQ ID NO: 674306 - RNA, 19 nt, Artificial Sequence
  Description of Artificial Sequence: Synthetic oligonucleotide
  Sense strand starting at position 3105 of SEQ ID NO: 585872
uugaauuacagacgcgaua

SEQ ID NO: 674307 - RNA, 19 nt, Artificial Sequence
  Description of Artificial Sequence: Synthetic oligonucleotide
  Antisense strand to SEQ ID NO: 674306
uaucgcgucuguaauucaa

SEQ ID NO: 674308 - RNA, 19 nt, Artificial Sequence
  Description of Artificial Sequence: Synthetic oligonucleotide
  Sense strand starting at position 3107 of SEQ ID NO: 585872
gaauuacagacgcgauaug

SEQ ID NO: 674309 - RNA, 19 nt, Artificial Sequence
  Description of Artificial Sequence: Synthetic oligonucleotide
  Antisense strand to SEQ ID NO: 674308
cauaucgcgucuguaauuc

SEQ ID NO: 674310 - RNA, 19 nt, Artificial Sequence
  Description of Artificial Sequence: Synthetic oligonucleotide
  Sense strand starting at position 3116 of SEQ ID NO: 585872
acgcgauauggauacuaau

SEQ ID NO: 674311 - RNA, 19 nt, Artificial Sequence
  Description of Artificial Sequence: Synthetic oligonucleotide
  Antisense strand to SEQ ID NO: 674310
auuaguauccauaucgcgu

SEQ ID NO: 674312 - RNA, 19 nt, Artificial Sequence
  Description of Artificial Sequence: Synthetic oligonucleotide
  Sense strand starting at position 3216 of SEQ ID NO: 585872
ccagaugagcucugugcua

SEQ ID NO: 674313 - RNA, 19 nt, Artificial Sequence
  Description of Artificial Sequence: Synthetic oligonucleotide
  Antisense strand to SEQ ID NO: 674312
uagcacagagcucaucugg

SEQ ID NO: 674314 - RNA, 19 nt, Artificial Sequence
  Description of Artificial Sequence: Synthetic oligonucleotide
  Sense strand starting at position 3218 of SEQ ID NO: 585872
agaugagcucugugcuaug

SEQ ID NO: 674315 - RNA, 19 nt, Artificial Sequence
  Description of Artificial Sequence: Synthetic oligonucleotide
  Antisense strand to SEQ ID NO: 674314
cauagcacagagcucaucu

SEQ ID NO: 674316 - RNA, 19 nt, Artificial Sequence
  Description of Artificial Sequence: Synthetic oligonucleotide
  Sense strand starting at position 3223 of SEQ ID NO: 585872
agcucugugcuaugauaac

SEQ ID NO: 674317 - RNA, 19 nt, Artificial Sequence
  Description of Artificial Sequence: Synthetic oligonucleotide
  Antisense strand to SEQ ID NO: 674316
guuaucauagcacagagcu

SEQ ID NO: 674318 - RNA, 19 nt, Artificial Sequence
  Description of Artificial Sequence: Synthetic oligonucleotide
  Sense strand starting at position 3236 of SEQ ID NO: 585872
gauaacaaaucagugguuu

SEQ ID NO: 674319 - RNA, 19 nt, Artificial Sequence
  Description of Artificial Sequence: Synthetic oligonucleotide
  Antisense strand to SEQ ID NO: 674318
aaaccacugauuuguuauc

SEQ ID NO: 674320 - RNA, 19 nt, Artificial Sequence
  Description of Artificial Sequence: Synthetic oligonucleotide
  Sense strand starting at position 3242 of SEQ ID NO: 585872
aaaucagugguuugaggaa

SEQ ID NO: 674321 - RNA, 19 nt, Artificial Sequence
  Description of Artificial Sequence: Synthetic oligonucleotide
  Antisense strand to SEQ ID NO: 674320
uuccucaaaccacugauuu

SEQ ID NO: 674322 - RNA, 19 nt, Artificial Sequence
  Description of Artificial Sequence: Synthetic oligonucleotide
  Sense strand starting at position 3321 of SEQ ID NO: 585872
cuacuuggaucagauauga

SEQ ID NO: 674323 - RNA, 19 nt, Artificial Sequence
  Description of Artificial Sequence: Synthetic oligonucleotide
  Antisense strand to SEQ ID NO: 674322
ucauaucugauccaaguag

SEQ ID NO: 674324 - RNA, 19 nt, Artificial Sequence
  Description of Artificial Sequence: Synthetic oligonucleotide
  Sense strand starting at position 3472 of SEQ ID NO: 585872
ugcagaggucgugguuaau

SEQ ID NO: 674325 - RNA, 19 nt, Artificial Sequence
  Description of Artificial Sequence: Synthetic oligonucleotide
  Antisense strand to SEQ ID NO: 674324
auuaaccacgaccucugca

SEQ ID NO: 674326 - RNA, 19 nt, Artificial Sequence
  Description of Artificial Sequence: Synthetic oligonucleotide
  Sense strand starting at position 3475 of SEQ ID NO: 585872
agaggucgugguuaaugau

SEQ ID NO: 674327 - RNA, 19 nt, Artificial Sequence
  Description of Artificial Sequence: Synthetic oligonucleotide
  Antisense strand to SEQ ID NO: 674326
aucauuaaccacgaccucu

SEQ ID NO: 674328 - RNA, 19 nt, Artificial Sequence
  Description of Artificial Sequence: Synthetic oligonucleotide
  Sense strand starting at position 3536 of SEQ ID NO: 585872
agagucauaccauggauua

SEQ ID NO: 674329 - RNA, 19 nt, Artificial Sequence
  Description of Artificial Sequence: Synthetic oligonucleotide
  Antisense strand to SEQ ID NO: 674328
uaauccaugguaugacucu

SEQ ID NO: 674330 - RNA, 19 nt, Artificial Sequence
  Description of Artificial Sequence: Synthetic oligonucleotide
  Sense strand starting at position 3537 of SEQ ID NO: 585872
gagucauaccauggauuaa

SEQ ID NO: 674331 - RNA, 19 nt, Artificial Sequence
  Description of Artificial Sequence: Synthetic oligonucleotide
  Antisense strand to SEQ ID NO: 674330
uuaauccaugguaugacuc

SEQ ID NO: 674332 - RNA, 19 nt, Artificial Sequence
  Description of Artificial Sequence: Synthetic oligonucleotide
  Sense strand starting at position 3885 of SEQ ID NO: 585872
auguaacacuuuguuuaga

SEQ ID NO: 674333 - RNA, 19 nt, Artificial Sequence
  Description of Artificial Sequence: Synthetic oligonucleotide
  Antisense strand to SEQ ID NO: 674332
ucuaaacaaaguguuacau

SEQ ID NO: 674334 - RNA, 19 nt, Artificial Sequence
  Description of Artificial Sequence: Synthetic oligonucleotide
  Sense strand starting at position 3899 of SEQ ID NO: 585872
uuagaccuuccuggguauu

SEQ ID NO: 674335 - RNA, 19 nt, Artificial Sequence
  Description of Artificial Sequence: Synthetic oligonucleotide
  Antisense strand to SEQ ID NO: 674334
aauacccaggaaggucuaa

SEQ ID NO: 674336 - RNA, 19 nt, Artificial Sequence
  Description of Artificial Sequence: Synthetic oligonucleotide
  Sense strand starting at position 3900 of SEQ ID NO: 585872
uagaccuuccuggguauua

SEQ ID NO: 674337 - RNA, 19 nt, Artificial Sequence
  Description of Artificial Sequence: Synthetic oligonucleotide
  Antisense strand to SEQ ID NO: 674336
uaauacccaggaaggucua

SEQ ID NO: 674338 - RNA, 19 nt, Artificial Sequence
  Description of Artificial Sequence: Synthetic oligonucleotide
  Sense strand starting at position 3901 of SEQ ID NO: 585872
agaccuuccuggguauuaa

SEQ ID NO: 674339 - RNA, 19 nt, Artificial Sequence
  Description of Artificial Sequence: Synthetic oligonucleotide
  Antisense strand to SEQ ID NO: 674338
uuaauacccaggaaggucu

SEQ ID NO: 674340 - RNA, 19 nt, Artificial Sequence
  Description of Artificial Sequence: Synthetic oligonucleotide
  Sense strand starting at position 3935 of SEQ ID NO: 585872
gugccuuaaccugggcaaa

SEQ ID NO: 674341 - RNA, 19 nt, Artificial Sequence
  Description of Artificial Sequence: Synthetic oligonucleotide
  Antisense strand to SEQ ID NO: 674340
uuugcccagguuaaggcac

SEQ ID NO: 674342 - RNA, 19 nt, Artificial Sequence
  Description of Artificial Sequence: Synthetic oligonucleotide
  Sense strand starting at position 3971 of SEQ ID NO: 585872
ucuagcuguucucugacau

SEQ ID NO: 674343 - RNA, 19 nt, Artificial Sequence
  Description of Artificial Sequence: Synthetic oligonucleotide
  Antisense strand to SEQ ID NO: 674342
augucagagaacagcuaga

SEQ ID NO: 674344 - RNA, 19 nt, Artificial Sequence
  Description of Artificial Sequence: Synthetic oligonucleotide
  Sense strand starting at position 3972 of SEQ ID NO: 585872
cuagcuguucucugacauc

SEQ ID NO: 674345 - RNA, 19 nt, Artificial Sequence
  Description of Artificial Sequence: Synthetic oligonucleotide
  Antisense strand to SEQ ID NO: 674344
gaugucagagaacagcuag

SEQ ID NO: 674346 - RNA, 19 nt, Artificial Sequence
  Description of Artificial Sequence: Synthetic oligonucleotide
  Sense strand starting at position 115 of SEQ ID NO: 585873
uagagcuggaguugugaaa

SEQ ID NO: 674347 - RNA, 19 nt, Artificial Sequence
  Description of Artificial Sequence: Synthetic oligonucleotide
  Antisense strand to SEQ ID NO: 674346
uuucacaacuccagcucua

SEQ ID NO: 674348 - RNA, 19 nt, Artificial Sequence
  Description of Artificial Sequence: Synthetic oligonucleotide
  Sense strand starting at position 163 of SEQ ID NO: 585873
uccuacauccugugacagu

SEQ ID NO: 674349 - RNA, 19 nt, Artificial Sequence
  Description of Artificial Sequence: Synthetic oligonucleotide
  Antisense strand to SEQ ID NO: 674348
acugucacaggauguagga

SEQ ID NO: 674350 - RNA, 19 nt, Artificial Sequence
  Description of Artificial Sequence: Synthetic oligonucleotide
  Sense strand starting at position 215 of SEQ ID NO: 585873
gcagcauaguuaucagaaa

SEQ ID NO: 674351 - RNA, 19 nt, Artificial Sequence
  Description of Artificial Sequence: Synthetic oligonucleotide
  Antisense strand to SEQ ID NO: 674350
uuucugauaacuaugcugc

SEQ ID NO: 674352 - RNA, 19 nt, Artificial Sequence
  Description of Artificial Sequence: Synthetic oligonucleotide
  Sense strand starting at position 451 of SEQ ID NO: 585873
caaauauuguuaucugggu

SEQ ID NO: 674353 - RNA, 19 nt, Artificial Sequence
  Description of Artificial Sequence: Synthetic oligonucleotide
  Antisense strand to SEQ ID NO: 674352
acccagauaacaauauuug

SEQ ID NO: 674354 - RNA, 19 nt, Artificial Sequence
  Description of Artificial Sequence: Synthetic oligonucleotide
  Sense strand starting at position 596 of SEQ ID NO: 585873
cacuguuccggugauauca

SEQ ID NO: 674355 - RNA, 19 nt, Artificial Sequence
  Description of Artificial Sequence: Synthetic oligonucleotide
  Antisense strand to SEQ ID NO: 674354
ugauaucaccggaacagug

SEQ ID NO: 674356 - RNA, 19 nt, Artificial Sequence
  Description of Artificial Sequence: Synthetic oligonucleotide
  Sense strand starting at position 604 of SEQ ID NO: 585873
cggugauaucaggaacuuu

SEQ ID NO: 674357 - RNA, 19 nt, Artificial Sequence
  Description of Artificial Sequence: Synthetic oligonucleotide
  Antisense strand to SEQ ID NO: 674356
aaaguuccugauaucaccg

SEQ ID NO: 674358 - RNA, 19 nt, Artificial Sequence
  Description of Artificial Sequence: Synthetic oligonucleotide
  Sense strand starting at position 685 of SEQ ID NO: 585873
caugacucgugauuaaauu

SEQ ID NO: 674359 - RNA, 19 nt, Artificial Sequence
  Description of Artificial Sequence: Synthetic oligonucleotide
  Antisense strand to SEQ ID NO: 674358
aauuuaaucacgagucaug

SEQ ID NO: 674360 - RNA, 19 nt, Artificial Sequence
  Description of Artificial Sequence: Synthetic oligonucleotide
  Sense strand starting at position 686 of SEQ ID NO: 585873
augacucgugauuaaauuc

SEQ ID NO: 674361 - RNA, 19 nt, Artificial Sequence
  Description of Artificial Sequence: Synthetic oligonucleotide
  Antisense strand to SEQ ID NO: 674360
gaauuuaaucacgagucau

SEQ ID NO: 674362 - RNA, 19 nt, Artificial Sequence
  Description of Artificial Sequence: Synthetic oligonucleotide
  Sense strand starting at position 692 of SEQ ID NO: 585873
cgugauuaaauucgcauuu

SEQ ID NO: 674363 - RNA, 19 nt, Artificial Sequence
  Description of Artificial Sequence: Synthetic oligonucleotide
  Antisense strand to SEQ ID NO: 674362
aaaugcgaauuuaaucacg

SEQ ID NO: 674364 - RNA, 19 nt, Artificial Sequence
  Description of Artificial Sequence: Synthetic oligonucleotide
  Sense strand starting at position 711 of SEQ ID NO: 585873
uaugaagauguaggucaua

SEQ ID NO: 674365 - RNA, 19 nt, Artificial Sequence
  Description of Artificial Sequence: Synthetic oligonucleotide
  Antisense strand to SEQ ID NO: 674364
uaugaccuacaucuucaua

SEQ ID NO: 674366 - RNA, 19 nt, Artificial Sequence
  Description of Artificial Sequence: Synthetic oligonucleotide
  Sense strand starting at position 734 of SEQ ID NO: 585873
ugaccuuugccucauugaa

SEQ ID NO: 674367 - RNA, 19 nt, Artificial Sequence
  Description of Artificial Sequence: Synthetic oligonucleotide
  Antisense strand to SEQ ID NO: 674366
uucaaugaggcaaagguca

SEQ ID NO: 674368 - RNA, 19 nt, Artificial Sequence
  Description of Artificial Sequence: Synthetic oligonucleotide
  Sense strand starting at position 780 of SEQ ID NO: 585873
cuggcuucuguauacgaau

SEQ ID NO: 674369 - RNA, 19 nt, Artificial Sequence
  Description of Artificial Sequence: Synthetic oligonucleotide
  Antisense strand to SEQ ID NO: 674368
auucguauacagaagccag

SEQ ID NO: 674370 - RNA, 19 nt, Artificial Sequence
  Description of Artificial Sequence: Synthetic oligonucleotide
  Sense strand starting at position 791 of SEQ ID NO: 585873
auacgaauguugucuuuag

SEQ ID NO: 674371 - RNA, 19 nt, Artificial Sequence
  Description of Artificial Sequence: Synthetic oligonucleotide
  Antisense strand to SEQ ID NO: 674370
cuaaagacaacauucguau

SEQ ID NO: 674372 - RNA, 19 nt, Artificial Sequence
  Description of Artificial Sequence: Synthetic oligonucleotide
  Sense strand starting at position 806 of SEQ ID NO: 585873
uuaggaaagucauucucag

SEQ ID NO: 674373 - RNA, 19 nt, Artificial Sequence
  Description of Artificial Sequence: Synthetic oligonucleotide
  Antisense strand to SEQ ID NO: 674372
cugagaaugacuuuccuaa

SEQ ID NO: 674374 - RNA, 19 nt, Artificial Sequence
  Description of Artificial Sequence: Synthetic oligonucleotide
  Sense strand starting at position 1195 of SEQ ID NO: 585873
gcaagaucucucuauguga

SEQ ID NO: 674375 - RNA, 19 nt, Artificial Sequence
  Description of Artificial Sequence: Synthetic oligonucleotide
  Antisense strand to SEQ ID NO: 674374
ucacauagagagaucuugc

SEQ ID NO: 674376 - RNA, 19 nt, Artificial Sequence
  Description of Artificial Sequence: Synthetic oligonucleotide
  Sense strand starting at position 1198 of SEQ ID NO: 585873
agaucucucuaugugaaac

SEQ ID NO: 674377 - RNA, 19 nt, Artificial Sequence
  Description of Artificial Sequence: Synthetic oligonucleotide
  Antisense strand to SEQ ID NO: 674376
guuucacauagagagaucu

SEQ ID NO: 674378 - RNA, 19 nt, Artificial Sequence
  Description of Artificial Sequence: Synthetic oligonucleotide
  Sense strand starting at position 1209 of SEQ ID NO: 585873
ugugaaacguaucuuuaua

SEQ ID NO: 674379 - RNA, 19 nt, Artificial Sequence
  Description of Artificial Sequence: Synthetic oligonucleotide
  Antisense strand to SEQ ID NO: 674378
uauaaagauacguuucaca

SEQ ID NO: 674380 - RNA, 19 nt, Artificial Sequence
  Description of Artificial Sequence: Synthetic oligonucleotide
  Sense strand starting at position 1552 of SEQ ID NO: 585873
gggacaucuacguacgaga

SEQ ID NO: 674381 - RNA, 19 nt, Artificial Sequence
  Description of Artificial Sequence: Synthetic oligonucleotide
  Antisense strand to SEQ ID NO: 674380
ucucguacguagauguccc

SEQ ID NO: 674382 - RNA, 19 nt, Artificial Sequence
  Description of Artificial Sequence: Synthetic oligonucleotide
  Sense strand starting at position 1593 of SEQ ID NO: 585873
cuagucuccuuaucuauga

SEQ ID NO: 674383 - RNA, 19 nt, Artificial Sequence
  Description of Artificial Sequence: Synthetic oligonucleotide
  Antisense strand to SEQ ID NO: 674382
ucauagauaaggagacuag

SEQ ID NO: 674384 - RNA, 19 nt, Artificial Sequence
  Description of Artificial Sequence: Synthetic oligonucleotide
  Sense strand starting at position 1597 of SEQ ID NO: 585873
ucuccuuaucuaugaguau

SEQ ID NO: 674385 - RNA, 19 nt, Artificial Sequence
  Description of Artificial Sequence: Synthetic oligonucleotide
  Antisense strand to SEQ ID NO: 674384
auacucauagauaaggaga

SEQ ID NO: 674386 - RNA, 19 nt, Artificial Sequence
  Description of Artificial Sequence: Synthetic oligonucleotide
  Sense strand starting at position 1601 of SEQ ID NO: 585873
cuuaucuaugaguaucgca

SEQ ID NO: 674387 - RNA, 19 nt, Artificial Sequence
  Description of Artificial Sequence: Synthetic oligonucleotide
  Antisense strand to SEQ ID NO: 674386
ugcgauacucauagauaag

SEQ ID NO: 674388 - RNA, 19 nt, Artificial Sequence
  Description of Artificial Sequence: Synthetic oligonucleotide
  Sense strand starting at position 1680 of SEQ ID NO: 585873
ggcacaaacuugcugacaa

SEQ ID NO: 674389 - RNA, 19 nt, Artificial Sequence
  Description of Artificial Sequence: Synthetic oligonucleotide
  Antisense strand to SEQ ID NO: 674388
uugucagcaaguuugugcc

SEQ ID NO: 674390 - RNA, 19 nt, Artificial Sequence
  Description of Artificial Sequence: Synthetic oligonucleotide
  Sense strand starting at position 1691 of SEQ ID NO: 585873
gcugacaauuugucugcaa

SEQ ID NO: 674391 - RNA, 19 nt, Artificial Sequence
  Description of Artificial Sequence: Synthetic oligonucleotide
  Antisense strand to SEQ ID NO: 674390
uugcagacaaauugucagc

SEQ ID NO: 674392 - RNA, 19 nt, Artificial Sequence
  Description of Artificial Sequence: Synthetic oligonucleotide
  Sense strand starting at position 1694 of SEQ ID NO: 585873
gacaauuugucugcaaugu

SEQ ID NO: 674393 - RNA, 19 nt, Artificial Sequence
  Description of Artificial Sequence: Synthetic oligonucleotide
  Antisense strand to SEQ ID NO: 674392
acauugcagacaaauuguc

SEQ ID NO: 674394 - RNA, 19 nt, Artificial Sequence
  Description of Artificial Sequence: Synthetic oligonucleotide
  Sense strand starting at position 2400 of SEQ ID NO: 585873
cgcucagcgagccuuuaua

SEQ ID NO: 674395 - RNA, 19 nt, Artificial Sequence
  Description of Artificial Sequence: Synthetic oligonucleotide
  Antisense strand to SEQ ID NO: 674394
uauaaaggcucgcugagcg

SEQ ID NO: 674396 - RNA, 19 nt, Artificial Sequence
  Description of Artificial Sequence: Synthetic oligonucleotide
  Sense strand starting at position 2450 of SEQ ID NO: 585873
aggaaaugucccugagagc

SEQ ID NO: 674397 - RNA, 19 nt, Artificial Sequence
  Description of Artificial Sequence: Synthetic oligonucleotide
  Antisense strand to SEQ ID NO: 674396
gcucucagggacauuuccu

SEQ ID NO: 674398 - RNA, 19 nt, Artificial Sequence
  Description of Artificial Sequence: Synthetic oligonucleotide
  Sense strand starting at position 2560 of SEQ ID NO: 585873
agcggaaccuauccugaaa

SEQ ID NO: 674399 - RNA, 19 nt, Artificial Sequence
  Description of Artificial Sequence: Synthetic oligonucleotide
  Antisense strand to SEQ ID NO: 674398
uuucaggauagguuccgcu

SEQ ID NO: 674400 - RNA, 19 nt, Artificial Sequence
  Description of Artificial Sequence: Synthetic oligonucleotide
  Sense strand starting at position 2609 of SEQ ID NO: 585873
gggcgugaugcagagcaaa

SEQ ID NO: 674401 - RNA, 19 nt, Artificial Sequence
  Description of Artificial Sequence: Synthetic oligonucleotide
  Antisense strand to SEQ ID NO: 674400
uuugcucugcaucacgccc

SEQ ID NO: 674402 - RNA, 19 nt, Artificial Sequence
  Description of Artificial Sequence: Synthetic oligonucleotide
  Sense strand starting at position 2686 of SEQ ID NO: 585873
cugccaagucaguagcaaa

SEQ ID NO: 674403 - RNA, 19 nt, Artificial Sequence
  Description of Artificial Sequence: Synthetic oligonucleotide
  Antisense strand to SEQ ID NO: 674402
uuugcuacugacuuggcag

SEQ ID NO: 674404 - RNA, 19 nt, Artificial Sequence
  Description of Artificial Sequence: Synthetic oligonucleotide
  Sense strand starting at position 2724 of SEQ ID NO: 585873
cuggucaggcuuuauagau

SEQ ID NO: 674405 - RNA, 19 nt, Artificial Sequence
  Description of Artificial Sequence: Synthetic oligonucleotide
  Antisense strand to SEQ ID NO: 674404
aucuauaaagccugaccag

SEQ ID NO: 674406 - RNA, 19 nt, Artificial Sequence
  Description of Artificial Sequence: Synthetic oligonucleotide
  Sense strand starting at position 2764 of SEQ ID NO: 585873
aguuuagacuucuugagaa

SEQ ID NO: 674407 - RNA, 19 nt, Artificial Sequence
  Description of Artificial Sequence: Synthetic oligonucleotide
  Antisense strand to SEQ ID NO: 674406
uucucaagaagucuaaacu

SEQ ID NO: 674408 - RNA, 19 nt, Artificial Sequence
  Description of Artificial Sequence: Synthetic oligonucleotide
  Sense strand starting at position 2777 of SEQ ID NO: 585873
ugagaaagcgcuugacauc

SEQ ID NO: 674409 - RNA, 19 nt, Artificial Sequence
  Description of Artificial Sequence: Synthetic oligonucleotide
  Antisense strand to SEQ ID NO: 674408
gaugucaagcgcuuucuca

SEQ ID NO: 674410 - RNA, 19 nt, Artificial Sequence
  Description of Artificial Sequence: Synthetic oligonucleotide
  Sense strand starting at position 2778 of SEQ ID NO: 585873
gagaaagcgcuugacaucu

SEQ ID NO: 674411 - RNA, 19 nt, Artificial Sequence
  Description of Artificial Sequence: Synthetic oligonucleotide
  Antisense strand to SEQ ID NO: 674410
agaugucaagcgcuuucuc

SEQ ID NO: 674412 - RNA, 19 nt, Artificial Sequence
  Description of Artificial Sequence: Synthetic oligonucleotide
  Sense strand starting at position 2888 of SEQ ID NO: 585873
uguaucuuuggccacaagu

SEQ ID NO: 674413 - RNA, 19 nt, Artificial Sequence
  Description of Artificial Sequence: Synthetic oligonucleotide
  Antisense strand to SEQ ID NO: 674412
acuuguggccaaagauaca

SEQ ID NO: 674414 - RNA, 19 nt, Artificial Sequence
  Description of Artificial Sequence: Synthetic oligonucleotide
  Sense strand starting at position 2908 of SEQ ID NO: 585873
cuucucgugguguaagaga

SEQ ID NO: 674415 - RNA, 19 nt, Artificial Sequence
  Description of Artificial Sequence: Synthetic oligonucleotide
  Antisense strand to SEQ ID NO: 674414
ucucuuacaccacgagaag

SEQ ID NO: 674416 - RNA, 19 nt, Artificial Sequence
  Description of Artificial Sequence: Synthetic oligonucleotide
  Sense strand starting at position 2919 of SEQ ID NO: 585873
guaagagaucuugguguug

SEQ ID NO: 674417 - RNA, 19 nt, Artificial Sequence
  Description of Artificial Sequence: Synthetic oligonucleotide
  Antisense strand to SEQ ID NO: 674416
caacaccaagaucucuuac

SEQ ID NO: 674418 - RNA, 19 nt, Artificial Sequence
  Description of Artificial Sequence: Synthetic oligonucleotide
  Sense strand starting at position 2930 of SEQ ID NO: 585873
ugguguugccugguagcau

SEQ ID NO: 674419 - RNA, 19 nt, Artificial Sequence
  Description of Artificial Sequence: Synthetic oligonucleotide
  Antisense strand to SEQ ID NO: 674418
augcuaccaggcaacacca

SEQ ID NO: 674420 - RNA, 19 nt, Artificial Sequence
  Description of Artificial Sequence: Synthetic oligonucleotide
  Sense strand starting at position 3523 of SEQ ID NO: 585873
gagcauaauuauuccaggu

SEQ ID NO: 674421 - RNA, 19 nt, Artificial Sequence
  Description of Artificial Sequence: Synthetic oligonucleotide
  Antisense strand to SEQ ID NO: 674420
accuggaauaauuaugcuc

SEQ ID NO: 674422 - RNA, 19 nt, Artificial Sequence
  Description of Artificial Sequence: Synthetic oligonucleotide
  Sense strand starting at position 3586 of SEQ ID NO: 585873
aggcuugccacucagaaga

SEQ ID NO: 674423 - RNA, 19 nt, Artificial Sequence
  Description of Artificial Sequence: Synthetic oligonucleotide
  Antisense strand to SEQ ID NO: 674422
ucuucugaguggcaagccu

SEQ ID NO: 674424 - RNA, 19 nt, Artificial Sequence
  Description of Artificial Sequence: Synthetic oligonucleotide
  Sense strand starting at position 3688 of SEQ ID NO: 585873
gaaaguuauugugccaacu

SEQ ID NO: 674425 - RNA, 19 nt, Artificial Sequence
  Description of Artificial Sequence: Synthetic oligonucleotide
  Antisense strand to SEQ ID NO: 674424
aguuggcacaauaacuuuc

SEQ ID NO: 674426 - RNA, 19 nt, Artificial Sequence
  Description of Artificial Sequence: Synthetic oligonucleotide
  Sense strand starting at position 48 of SEQ ID NO: 585874
cacuguuccggugauauca

SEQ ID NO: 674427 - RNA, 19 nt, Artificial Sequence
  Description of Artificial Sequence: Synthetic oligonucleotide
  Antisense strand to SEQ ID NO: 674426
ugauaucaccggaacagug

SEQ ID NO: 674428 - RNA, 19 nt, Artificial Sequence
  Description of Artificial Sequence: Synthetic oligonucleotide
  Sense strand starting at position 56 of SEQ ID NO: 585874
cggugauaucaggaacuuu

SEQ ID NO: 674429 - RNA, 19 nt, Artificial Sequence
  Description of Artificial Sequence: Synthetic oligonucleotide
  Antisense strand to SEQ ID NO: 674428
aaaguuccugauaucaccg

SEQ ID NO: 674430 - RNA, 19 nt, Artificial Sequence
  Description of Artificial Sequence: Synthetic oligonucleotide
  Sense strand starting at position 137 of SEQ ID NO: 585874
caugacucgugauuaaauu

SEQ ID NO: 674431 - RNA, 19 nt, Artificial Sequence
  Description of Artificial Sequence: Synthetic oligonucleotide
  Antisense strand to SEQ ID NO: 674430
aauuuaaucacgagucaug

SEQ ID NO: 674432 - RNA, 19 nt, Artificial Sequence
  Description of Artificial Sequence: Synthetic oligonucleotide
  Sense strand starting at position 138 of SEQ ID NO: 585874
augacucgugauuaaauuc

SEQ ID NO: 674433 - RNA, 19 nt, Artificial Sequence
  Description of Artificial Sequence: Synthetic oligonucleotide
  Antisense strand to SEQ ID NO: 674432
gaauuuaaucacgagucau

SEQ ID NO: 674434 - RNA, 19 nt, Artificial Sequence
  Description of Artificial Sequence: Synthetic oligonucleotide
  Sense strand starting at position 144 of SEQ ID NO: 585874
cgugauuaaauucgcauuu

SEQ ID NO: 674435 - RNA, 19 nt, Artificial Sequence
  Description of Artificial Sequence: Synthetic oligonucleotide
  Antisense strand to SEQ ID NO: 674434
aaaugcgaauuuaaucacg

SEQ ID NO: 674436 - RNA, 19 nt, Artificial Sequence
  Description of Artificial Sequence: Synthetic oligonucleotide
  Sense strand starting at position 163 of SEQ ID NO: 585874
uaugaagauguaggucaua

SEQ ID NO: 674437 - RNA, 19 nt, Artificial Sequence
  Description of Artificial Sequence: Synthetic oligonucleotide
  Antisense strand to SEQ ID NO: 674436
uaugaccuacaucuucaua

SEQ ID NO: 674438 - RNA, 19 nt, Artificial Sequence
  Description of Artificial Sequence: Synthetic oligonucleotide
  Sense strand starting at position 186 of SEQ ID NO: 585874
ugaccuuugccucauugaa

SEQ ID NO: 674439 - RNA, 19 nt, Artificial Sequence
  Description of Artificial Sequence: Synthetic oligonucleotide
  Antisense strand to SEQ ID NO: 674438
uucaaugaggcaaagguca

SEQ ID NO: 674440 - RNA, 19 nt, Artificial Sequence
  Description of Artificial Sequence: Synthetic oligonucleotide
  Sense strand starting at position 232 of SEQ ID NO: 585874
cuggcuucuguauacgaau

SEQ ID NO: 674441 - RNA, 19 nt, Artificial Sequence
  Description of Artificial Sequence: Synthetic oligonucleotide
  Antisense strand to SEQ ID NO: 674440
auucguauacagaagccag

SEQ ID NO: 674442 - RNA, 19 nt, Artificial Sequence
  Description of Artificial Sequence: Synthetic oligonucleotide
  Sense strand starting at position 258 of SEQ ID NO: 585874
uuaggaaagucauucucag

SEQ ID NO: 674443 - RNA, 19 nt, Artificial Sequence
  Description of Artificial Sequence: Synthetic oligonucleotide
  Antisense strand to SEQ ID NO: 674442
cugagaaugacuuuccuaa

SEQ ID NO: 674444 - RNA, 19 nt, Artificial Sequence
  Description of Artificial Sequence: Synthetic oligonucleotide
  Sense strand starting at position 647 of SEQ ID NO: 585874
gcaagaucucucuauguga

SEQ ID NO: 674445 - RNA, 19 nt, Artificial Sequence
  Description of Artificial Sequence: Synthetic oligonucleotide
  Antisense strand to SEQ ID NO: 674444
ucacauagagagaucuugc

SEQ ID NO: 674446 - RNA, 19 nt, Artificial Sequence
  Description of Artificial Sequence: Synthetic oligonucleotide
  Sense strand starting at position 650 of SEQ ID NO: 585874
agaucucucuaugugaaac

SEQ ID NO: 674447 - RNA, 19 nt, Artificial Sequence
  Description of Artificial Sequence: Synthetic oligonucleotide
  Antisense strand to SEQ ID NO: 674446
guuucacauagagagaucu

SEQ ID NO: 674448 - RNA, 19 nt, Artificial Sequence
  Description of Artificial Sequence: Synthetic oligonucleotide
  Sense strand starting at position 661 of SEQ ID NO: 585874
ugugaaacguaucuuuaua

SEQ ID NO: 674449 - RNA, 19 nt, Artificial Sequence
  Description of Artificial Sequence: Synthetic oligonucleotide
  Antisense strand to SEQ ID NO: 674448
uauaaagauacguuucaca

SEQ ID NO: 674450 - RNA, 19 nt, Artificial Sequence
  Description of Artificial Sequence: Synthetic oligonucleotide
  Sense strand starting at position 1004 of SEQ ID NO: 585874
gggacaucuacguacgaga

SEQ ID NO: 674451 - RNA, 19 nt, Artificial Sequence
  Description of Artificial Sequence: Synthetic oligonucleotide
  Antisense strand to SEQ ID NO: 674450
ucucguacguagauguccc

SEQ ID NO: 674452 - RNA, 19 nt, Artificial Sequence
  Description of Artificial Sequence: Synthetic oligonucleotide
  Sense strand starting at position 1045 of SEQ ID NO: 585874
cuagucuccuuaucuauga

SEQ ID NO: 674453 - RNA, 19 nt, Artificial Sequence
  Description of Artificial Sequence: Synthetic oligonucleotide
  Antisense strand to SEQ ID NO: 674452
ucauagauaaggagacuag

SEQ ID NO: 674454 - RNA, 19 nt, Artificial Sequence
  Description of Artificial Sequence: Synthetic oligonucleotide
  Sense strand starting at position 1049 of SEQ ID NO: 585874
ucuccuuaucuaugaguau

SEQ ID NO: 674455 - RNA, 19 nt, Artificial Sequence
  Description of Artificial Sequence: Synthetic oligonucleotide
  Antisense strand to SEQ ID NO: 674454
auacucauagauaaggaga

SEQ ID NO: 674456 - RNA, 19 nt, Artificial Sequence
  Description of Artificial Sequence: Synthetic oligonucleotide
  Sense strand starting at position 1053 of SEQ ID NO: 585874
cuuaucuaugaguaucgca

SEQ ID NO: 674457 - RNA, 19 nt, Artificial Sequence
  Description of Artificial Sequence: Synthetic oligonucleotide
  Antisense strand to SEQ ID NO: 674456
ugcgauacucauagauaag

SEQ ID NO: 674458 - RNA, 19 nt, Artificial Sequence
  Description of Artificial Sequence: Synthetic oligonucleotide
  Sense strand starting at position 1132 of SEQ ID NO: 585874
ggcacaaacuugcugacaa

SEQ ID NO: 674459 - RNA, 19 nt, Artificial Sequence
  Description of Artificial Sequence: Synthetic oligonucleotide
  Antisense strand to SEQ ID NO: 674458
uugucagcaaguuugugcc

SEQ ID NO: 674460 - RNA, 19 nt, Artificial Sequence
  Description of Artificial Sequence: Synthetic oligonucleotide
  Sense strand starting at position 1143 of SEQ ID NO: 585874
gcugacaauuugucugcaa

SEQ ID NO: 674461 - RNA, 19 nt, Artificial Sequence
  Description of Artificial Sequence: Synthetic oligonucleotide
  Antisense strand to SEQ ID NO: 674460
uugcagacaaauugucagc

SEQ ID NO: 674462 - RNA, 19 nt, Artificial Sequence
  Description of Artificial Sequence: Synthetic oligonucleotide
  Sense strand starting at position 1146 of SEQ ID NO: 585874
gacaauuugucugcaaugu

SEQ ID NO: 674463 - RNA, 19 nt, Artificial Sequence
  Description of Artificial Sequence: Synthetic oligonucleotide
  Antisense strand to SEQ ID NO: 674462
acauugcagacaaauuguc

SEQ ID NO: 674464 - RNA, 19 nt, Artificial Sequence
  Description of Artificial Sequence: Synthetic oligonucleotide
  Sense strand starting at position 1852 of SEQ ID NO: 585874
cgcucagcgagccuuuaua

SEQ ID NO: 674465 - RNA, 19 nt, Artificial Sequence
  Description of Artificial Sequence: Synthetic oligonucleotide
  Antisense strand to SEQ ID NO: 674464
uauaaaggcucgcugagcg

SEQ ID NO: 674466 - RNA, 19 nt, Artificial Sequence
  Description of Artificial Sequence: Synthetic oligonucleotide
  Sense strand starting at position 1902 of SEQ ID NO: 585874
aggaaaugucccugagagc

SEQ ID NO: 674467 - RNA, 19 nt, Artificial Sequence
  Description of Artificial Sequence: Synthetic oligonucleotide
  Antisense strand to SEQ ID NO: 674466
gcucucagggacauuuccu

SEQ ID NO: 674468 - RNA, 19 nt, Artificial Sequence
  Description of Artificial Sequence: Synthetic oligonucleotide
  Sense strand starting at position 2012 of SEQ ID NO: 585874
agcggaaccuauccugaaa

SEQ ID NO: 674469 - RNA, 19 nt, Artificial Sequence
  Description of Artificial Sequence: Synthetic oligonucleotide
  Antisense strand to SEQ ID NO: 674468
uuucaggauagguuccgcu

SEQ ID NO: 674470 - RNA, 19 nt, Artificial Sequence
  Description of Artificial Sequence: Synthetic oligonucleotide
  Sense strand starting at position 2138 of SEQ ID NO: 585874
cugccaagucaguagcaaa
